United States Patent Application Publication US 2020/0163878 A1 - sequence listing, part 18

SEQ ID NO: 64138 - RNA, 1701 nt, Artificial Sequence
  derived and/or modified CDS sequence (opt1) from hemagglutinin__InfluenzaA__AAY18096
augaagaccaucaucgcccugagcugcauccucugccugguguucgcccagaagcugcccggcaacgacaacuccaccgcgacgcucugccuggggcaccacgccgucccgaacggcaccaucgugaagaccaucaccaacgaccagaucgaggugacgaacgccaccgagcugguccagagcuccagcaccgggggcaucugcgacagcccccaccagauccucgacggggagaacugcacccugaucgacgcccugcucggcgacccccagugcgacggcuuccagaacaagaagugggaccuguucguggagcgcagcaaggccuacuccaacugcuaccccuacgacgugccggacuacgcgagccugcggucccucgucgccagcuccgggacgcuggaguucaacaacgagagcuucaacuggaccggcgugacccagaacgggaccuccagcgccugcgagcgccgguccaacaagagcuucuucucccgccugaacuggcucacgcaccugaaguacaaguaccccgcccugaacgugaccaugcccaacaacgagaaguucgacaagcucuacaucuggggcguccaccaccccgggaccgacagcgaccagaucucccuguacgcgcaggccagcggccggaucaccgugagcacgaagcgcucccagcagaccgugaucccgaacaucggcagccggccccgcguccgggacguguccagccgcaucuccaucuacuggaccaucgugaagcccggggacauccugcucaucaacagcaccggcaaccugaucgcgccccggggguacuucaagauccgcuccggcaagagcuccaucaugcggagcgacgccccgaucggcaagugcaacuccgagugcaucacgcccaacgggagcauccccaacgacaagcccuuccagaacgucaaccgcaucaccuacggcgccugcccgcgguacgugaagcagaacacccugaagcucgccaccgggaugcgcaacgugcccgagaagcagacgcggggcaucuucggggccaucgccggcuucaucgagaacggcugggaggggauggucgacggcugguacggguuccgccaccagaacuccgagggcaccgggcaggccgccgaccugaaguccacccaggcggccaucaaccagaucaacggcaagcugaaccggcucaucggcaagaccaacgagaaguuccaccagaucgagaaggaguucuccgagguggaggggcgcauccaggaccuggagaaguacguggaggacacgaagaucgaccuguggagcuacaacgccgagcuccuggucgcccuggagaaccagcacaccaucgaccucaccgacuccgagaugaacaagcuguucgagcggaccaagaagcagcugcgcgagaacgccgaggacaugggcaacgggugcuucaagaucuaccacaagugcgacaacgcgugcaucggcagcauccgcaacgggacguacgaccacgacguguaccgggacgaggcccucaacaaccgcuuccagaucaagggcguggagcugaaguccggcuacaaggacuggauccuguggaucagcuucgccaucagcugcuuccuccugugcgucgcccugcucggguucaucaugugggccugccagaagggcaacauccggugcgacaucugcaucuga

SEQ ID NO: 64139 - RNA, 1701 nt, Artificial Sequence; identical to SEQ ID NO: 64071
  derived and/or modified CDS sequence (opt1) from hemagglutinin__InfluenzaA__AAY18106

SEQ ID NO: 64140 - RNA, 1701 nt, Artificial Sequence; identical to SEQ ID NO: 64071
  derived and/or modified CDS sequence (opt1) from hemagglutinin__InfluenzaA__AAY18116

SEQ ID NO: 64141 - RNA, 1701 nt, Artificial Sequence
  derived and/or modified CDS sequence (opt1) from hemagglutinin__InfluenzaA__AAY18126
augaagaccaucaucgcccugagcuacauccucugccugguguucgcccagaagcugcccggcaacgacaacuccaccgcgacgcucugccuggggcaccacgccgucccgaacggcaccaucgugaagaccaucaccaacgaccagaucgaggugacgaacgccaccgagcugguccagagcuccagcaccgggggcaucugcgacagcccccaccagauccucgacggggagaacugcacccugaucgacgcccugcucggcgacccccagugcgacggcuuccagaacaagaagugggaccuguucguggagcgcagcaaggccuacuccaacugcuaccccuacgacgugccggacuacgcgagccugcggucccucgucgccagcuccgggacgcuggaguucaacaacgagggcuucaacuggaccggggugacccagaacggcaccagcuccgccugcaagcgcaagagcaacaaguccuucuucagccggcugaacuggcucacgcaccugaaguacaaguaccccgcccugaacgugaccaugcccaacaacgagaaguucgacaagcucuacaucuggggcguccaccaccccgggaccgacaacgaccagaucucccuguacgcgcaggccagcggccgcaucaccguguccacgaagcggagccagcagaccgugaucccgaacaucgggagccgcccccggguccgcgacguguccagccggaucuccaucuacuggaccaucgugaagcccggcgacauccugcucaucaacagcaccgggaaccugaucgcgccccgcggcuacuucaagauccgguccggcaagagcuccaucaugcgcagcgacgccccgaucgggaagugcaacuccgagugcaucacgcccaacggcagcauccccaacgacaagcccuuccagaacgucaaccggaucaccuacggggccugcccgcgcuacgugaagcagaacacccugaagcucgccaccggcaugcggaacgugcccgagaagcagacgcgcgggaucuucggcgccaucgccggcuucaucgagaacgggugggagggcauggucgacgggugguacggcuuccggcaccagaacuccgaggggaccggccaggccgccgaccugaaguccacccaggcggccaucaaccagaucaacggcaagcugaaccgccucaucgggaagaccaacgagaaguuccaccagaucgagaaggaguucuccgagguggagggccggauccaggaccuggagaaguacguggaggacacgaagaucgaccuguggagcuacaacgccgagcuccuggucgcccuggagaaccagcacaccaucgaccucaccgacuccgagaugaacaagcuguucgagcgcaccaagaagcagcugcgggagaacgccgaggacauggggaacggcugcuucaagaucuaccacaagugcgacaacgcgugcaucgggagcauccgcaacggcacguacgaccacgacguguaccgcgacgaggcccucaacaaccgguuccagaucaagggcguggagcugaaguccggguacaaggacuggauccuguggaucagcuucgccaucuccugcuuccuccugugcgucgcccugcucggcuucaucaugugggccugccagaaggggaacauccgcugcaacaucugcaucuga

SEQ ID NO: 64142 - RNA, 1701 nt, Artificial Sequence
  derived and/or modified CDS sequence (opt1) from hemagglutinin__InfluenzaA__AAY18136
augaagaccaucaucgcccugagcuacauccucugccugguguucgcccagaagcugcccggcaacgacaacuccaccgcgacgcucugccuggggcaccacgccgucccgaacggcaccaucgugaagaccaucaccaacgaccagaucgaggugacgaacgccaccgagcugguccagagcuccagcaccgggggcaucugcgacagcccccaccagauccucgacggggagaacugcacccugaucgacgcccugcucggcgacccccagugcgacggcuuccagaacaagaagugggaccuguucguggagcgcagcaaggccuacuccaacugcuaccccuacgacgugccggacuacgcgagccugcggucccucgucgccagcuccgggacgcuggaguucaacaacgagagcuucgacuggaccggcgugacccagaacgggaccuccagcgccugcaagcgccgguccaacaagagcuucuucucccgccugaacuggcucacgcaccugaaguacaaguaccccgcccugaacgugaccaugcccaacaacgagaaguucgacaagcucuacaucuggggcguccaccaccccgggaccgacagcgaccagaucucccuguacgcgcaggccagcggccggaucaccgugagcacgaagcgcucccagcagaccgugaucccgaacaucggcagccggccccgcguccgggacguguccagccgcaucuccaucuacuggaccaucgugaagcccggggacauccugcucaucaacagcaccggcaaccugaucgcgccccggggguacuucaagauccgcuccggcaagagcuccaucaugcggagcgacgccccgaucggcaagugcaacuccgagugcaucacgcccaacgggagcauccccaacgacaagcccuuccagaacgucaaccgcaucaccuacggcgccugcccgcgguacaucaagcagaacacccugaagcucgccaccgggaugcgcaacgugcccgagaagcagacgcggggcaucuucggggccaucgccggcuucaucgagaacggcugggaggggaugguggacggcugguacggguuccgccaccagaacuccgagggcaccgggcaggccgccgaccugaaguccacccaggcggccaucaaccagaucaacggcaagcugaaccggcucaucggcaagaccaacgagaaguuccaccagaucgagaaggaguucuccgaggucgaggggcgcauccaggaccuggagaaguacguggaggacacgaagaucgaccuguggagcuacaacgccgagcuccugguggcccuggagaaccagcacaccaucgaccucaccgacuccgagaugaacaagcuguucgagcggaccaagaagcagcugcgcgagaacgccgaggacaugggcaacgggugcuucaagaucuaccacaagugcgacaacgcgugcaucggcagcauccgcaacgggacguacgaccacgacgucuaccgggacgaggcccucaacaaccgcuuccagaucaagggcguggagcugaaguccggcuacaaggacuggauccuguggaucagcuucgccaucagcugcuuccuccugugcguggcccugcucggguucaucaugugggccugccagaagggcaacauccggugcaacaucugcaucuga

SEQ ID NO: 64143 - RNA, 1701 nt, Artificial Sequence; identical to SEQ ID NO: 64096
  derived and/or modified CDS sequence (opt1) from hemagglutinin__InfluenzaA__AAY18156

SEQ ID NO: 64144 - RNA, 1701 nt, Artificial Sequence; identical to SEQ ID NO: 64096
  derived and/or modified CDS sequence (opt1) from hemagglutinin__InfluenzaA__AAY18176

SEQ ID NO: 64145 - RNA, 1701 nt, Artificial Sequence; identical to SEQ ID NO: 64096
  derived and/or modified CDS sequence (opt1) from hemagglutinin__InfluenzaA__AAY18186

SEQ ID NO: 64146 - RNA, 1701 nt, Artificial Sequence; identical to SEQ ID NO: 64097
  derived and/or modified CDS sequence (opt1) from hemagglutinin__InfluenzaA__AAY18564

SEQ ID NO: 64147 - RNA, 1701 nt, Artificial Sequence
  derived and/or modified CDS sequence (opt1) from hemagglutinin__InfluenzaA__AAY18585
augaagaccaucaucgcccugagcuacauccucugccugguguucgcccagaagcugcccgagaacgacaacuccaccgcgacgcucugccugggccaccacgccgucccgaacgggacccuggugaagaccaucaccaacgaccagaucgaggugacgaacgccaccgagcucguccagagcuccagcaccggccgcaucugcgacagcccccaccagauccuggacggggagaacugcacccugaucgacgcccuccugggcgacccccacugcgacggguuccagaacaaggagugggaccuguucguggagcggagcaaggccuacuccaacugcuaccccuacgacgugccggacuacgucagccuccgcucccugguggcgagcuccggcacgcuggaguucaacaacgagagcuucaacuggaccggcguggcccagaacgggaccuccagcgccugcaagcggcgcuccgacaagagcuucuucucccggcucaacuggcugcaccagcugaaguacaaguaccccgcccucaacgucaccaugcccaacaacgagaaguucgacaagcuguacaucuggggcgugcaccaccccgggacggacagcgaccagaucucccuguacgcgcaggccagcggccgcgugaccgucagcaccaagcggucccagcagaccgugaucccgaacaucgggagccgccccugggugcggggcgucuccagccgcaucuccaucuacuggacgaucgugaagcccggcgacauccuccugaucaacagcaccgggaaccugaucgcgccccggggcuacuucaagauccgcuccgggaaguccuccaucaugcggagcgacgccccgaucggcaagugcaacuccgagugcaucacccccaacggcagcauccccaacgacaagcccuuccagaacgugaaccgcaucaccuacgggccgugcccccgguacgucaagcagaacacgcucaagcuggccaccggcaugcgcaacgugcccgagaagcagacccgggggaucuucggcgccaucgccggguucaucgagaacggcugggagggcaugauggacgggugguacggcuuccgccaccagaacuccgaggggaccggccaggccgccgaccucaagagcacgcaggccgcgaucaaccagaucaacgggaagcugaaccggcugaucgagaagaccaacgagaaguuccaccagaucgagaaggaguucuccgagguggagggccgcauccaggaccuggagaaguacgucgaggacaccaagaucgaccucuggagcuacaacgccgagcugcugguggcccucgagaaccagcacaccaucgaccugacggacuccgagaugaacaagcuguucgagcggaccaagaagcagcuccgcgagaacgccgaggacaugggcaacgggugcuucaagaucuaccacaagugcgacaacgccugcaucggcagcauccgcaacgggaccuacgaccacgacguguaccgggacgaggcgcugaacaaccgcuuccagaucaagggcgucgagcugaaguccggguacaaggacuggauccucuggaucagcuucgccaucagcugcuuccugcugugcaucgugcuccugggcuucaucaugugggccugccagaagggcaacauccggugcaacaucugcaucuga

SEQ ID NO: 64148 - RNA, 1701 nt, Artificial Sequence; identical to SEQ ID NO: 64056
  derived and/or modified CDS sequence (opt1) from hemagglutinin__InfluenzaA__AAY18611

SEQ ID NO: 64149 - RNA, 1701 nt, Artificial Sequence; identical to SEQ ID NO: 64097
  derived and/or modified CDS sequence (opt1) from hemagglutinin__InfluenzaA__AAY27843

SEQ ID NO: 64150 - RNA, 1701 nt, Artificial Sequence; identical to SEQ ID NO: 64056
  derived and/or modified CDS sequence (opt1) from hemagglutinin__InfluenzaA__AAY27853

SEQ ID NO: 64151 - RNA, 1701 nt, Artificial Sequence
  derived and/or modified CDS sequence (opt1) from hemagglutinin__InfluenzaA__AAY27863
augaagaccaucaucgcccugagcuacauccucugccugguguucgcccagaagcugcccggcaacgacaacuccaccgcgacgcucugccuggggcaccacgccgucccgaacggcaccaucgugaagaccaucaccaacgaccagaucgaggugacgaacgccaccgagcugguccagagcuccagcaccgggggcaucugcgacagcccccaccagaucaucgacggggagaacugcacccucaucgacgcccugcugggcgacccccagugcgacggcuuccagaacaagaagugggaccucuucguggagcgcuccaaggccuacuccaacugcuaccccuacgacgugccggacuacgcgagccugcggucccuggucgccagcuccgggacgcucgaguucaacaacgagagcuucgacuggaccggcgugacccagaacgggaccuccagcgccugcaagcgccgguccaacaagagcuucuucucccgccugaacuggcugacgcaccucaaguacaaguaccccgcccugaacgugaccaugcccaacaacgagaaguucgacaagcuguacaucuggggcguccaccaccccgggaccgacagcgaccagaucucccucuacgcgcaggccagcggccggaucaccgugagcacgaagcgcucccagcagaccgugaucccgaacaucggcagccggccccgcguccgggacguguccagccgcaucuccaucuacuggaccaucgugaagcccggggacauccugcugaucaacagcaccggcaaccucaucgcgccccggggguacuucaagauccgcuccggcaagagcuccaucaugaucagcgacgccccgaucggcaagugcaacuccgagugcaucacgcccaacgggagcauccccaacgacaagcccuuccagaacgucaaccggaucaccuacggcgccugcccgcgcuacgugaagcagaacacccugaagcuggccaccgggaugcggaacgugcccgagaagcagacgcgcggcaucuucggggccaucgccggcuucaucgagaacggcugggaggggauggucgacggcugguacggguuccggcaccagaacuccgagggcaccgggcaggccgccgaccucaagagcacccaggcggccaucaaccagaucaacggcaagcugaaccgccugaucggcaagaccaacgagaaguuccaccagaucgagaaggaguucuccgagguggaggggcggauccaggaccucgagaaguacguggaggacacgaagaucgaccuguggagcuacaacgccgagcugcucgucgcccuggagaaccagcacaccaucgaccugaccgacuccgagaugaacaagcuguucgagcgcaccaagaagcagcuccgggagaacgccgaggacaugggcaacgggugcuucaagaucuaccacaagugcgacaacgcgugcaucggcagcauccgcaacgggacguacgaccacgacguguaccgcgacgaggcccugaacaaccgguuccagaucaagggcguggagcucaaguccggcuacaaggacuggauccuguggaucagcuucgccaucagcugcuuccugcucugcgucgcccugcugggguucaucaugugggccugccagaagggcaacauccgcugcaacaucugcaucuga

SEQ ID NO: 64152 - RNA, 1701 nt, Artificial Sequence; identical to SEQ ID NO: 64075
  derived and/or modified CDS sequence (opt1) from hemagglutinin__InfluenzaA__AAY27959

SEQ ID NO: 64153 - RNA, 1701 nt, Artificial Sequence; identical to SEQ ID NO: 64055
  derived and/or modified CDS sequence (opt1) from hemagglutinin__InfluenzaA__AAY27994

SEQ ID NO: 64154 - RNA, 1701 nt, Artificial Sequence; identical to SEQ ID NO: 64055
  derived and/or modified CDS sequence (opt1) from hemagglutinin__InfluenzaA__AAY28004

SEQ ID NO: 64155 - RNA, 1701 nt, Artificial Sequence; identical to SEQ ID NO: 64055
  derived and/or modified CDS sequence (opt1) from hemagglutinin__InfluenzaA__AAY28265

SEQ ID NO: 64156 - RNA, 1701 nt, Artificial Sequence
  derived and/or modified CDS sequence (opt1) from hemagglutinin__InfluenzaA__AAY28275
augaagaccaucaucgcccugagcuacauccucugccugguguucgcccagaagcugcccggcaacgacaacuccaccgcgacgcucugccuggggcaccacgccgucccgaacggcacccuggugaagaccaucaccaacgaccagaucgaggugacgaacgccaccgagcucguccagagcuccagcaccgggcgcaucugcgacagcccccaccagauccuggacggcgagaacugcacccugaucgacgcccuccugggggacccccacugcgacggcuuccagaacaaggagugggaccuguucguggagcggagcaaggccuacuccaacugcuaccccuacgacgugccggacuacgcgagccuccgcucccuggucgccagcuccggcacgcuggaguucaacaacgagagcuucaacuggaccgggguggcccagaacggcaccuccagcgccugcaagcggcgcuccaacaagagcuucuucucccggcucaacuggcugcaccagcugaaguacaaguaccccgcgcucaacgugaccaugcccaacaacgagaaguucgacaagcuguacaucuggggcguccaccaccccagcacggacuccgaccagaucagccuguacgcccaggccagcgggcgcgugaccguguccaccaagcggagccagcagaccgucaucccgaacaucgggucccgccccugggugcggggcgugagcucccgcaucagcaucuacuggacgaucgucaagcccggcgacauccuccugaucaacuccaccgggaaccugaucgcgccccggggcuacuucaagauccgcagcgggaaguccagcgugaugcgguccgacgccagcaucggcaagugcaacuccgagugcaucaccccgaacggcagcauccccaacgacaagcccuuccagaacgugaaccgcaucaccuacggggccugcccccgguacgucaagcagaacacgcucaagcuggccaccggcaugcgcaacgugccggagaagcagacccgggggaucuucggcgccaucgccggguucaucgagaacggcugggagggcaugguggacgggugguacggcuuccgccaccagaacuccgaggggaccggccaggccgcggaccugaaguccacgcaggccgccaucaaccagaucaacgggaagcucaaccggcugaucgagaagaccaacgagaaguuccaccagaucgagaaggaguucuccgaggucgagggccgcauccaggaccuggagaaguacguggaggacaccaagaucgaccucuggagcuacaacgccgagcugcugguggcccucgagaaccagcacaccaucgaccugacggacuccgagaugaacaagcuguucgagcggaccaagaagcagcuccgcgagaacgcggaggacaugggcaacgggugcuucaagaucuaccacaagugcgacaacgccugcaucggcagcauccgcaacgggaccuacgaccacgacgucuaccgggacgaggcccugaacaaccgcuuccagaucaagggcguggagcucaagagcggguacaaggacuggauccuguggaucuccuucgccaucagcugcuuccugcugugcgucgugcuccugggcuucaucaugugggccugccagaagggcaacauccggugcaacaucugcaucuga

SEQ ID NO: 64157 - RNA, 1701 nt, Artificial Sequence
  derived and/or modified CDS sequence (opt1) from hemagglutinin__InfluenzaA__AAY28285
augaagaccaucaucgcccugagcuacauccucugccugguguucgcccagaagcugcccggcaacgacaacuccaccgcgacgcucugccuggggcaccacgccgucccgaacggcacccuggugaagaccaucaccaacgaccagaucgaggugacgaacgccaccgagcucguccagaacagcuccaccgggcgcaucugcgacagcccccaccagauccuggacggcgagaacugcacccugaucgacgcccuccugggggacccccacugcgacggcuuccagaacaaggagugggaccuguucguggagcgguccaaggccuacagcaacugcuaccccuacgacgugccggacuacgucucccuccgcagccugguggcguccagcggcacgcuggaguucaacaacgaguccuucaacuggaccgggguggcccagaacggcaccagcuccgccugcaagcggcgcagcgacaaguccuucuucagccggcucaacuggcugcaccagcugaaguacaaguaccccgcccucaacgucaccaugcccaacaacgagaaguucgacaagcuguacaucuggggcgugcaccaccccgggacggacaacgaccagaucucccuguacgcgcaggccagcgggcgcgugaccgucuccaccaagcggagccagcagaccgugaucccgaacaucggcagccgccccugggugcggggcgucuccagccgcaucuccaucuacuggacgaucgugaagcccggggacauccuccugaucaacagcaccggcaaccugaucgcgccccggggguacuucaagauccgcuccggcaagagcuccaucaugcggagcgacgccccgaucggcaagugcaacuccgagugcaucacccccaacgggagcauccccaacgacaagcccuuccagaacgugaaccgcaucaccuacggcccgugcccccgguacgucaagcagaacacgcucaagcuggccaccgggaugcgcaacgugcccgagaagcagacccggggcaucuucggggccaucgccggcuucaucgagaacggcugggaggggaugauggacggcugguacggguuccgccaccagaacuccgagggcaccgggcaggccgccgaccucaagagcacgcaggccgcgaucaaccagaucaacggcaagcugaaccggcugaucgagaagaccaacgagaaguuccaccagaucgagaaggaguucuccgagguggagggccgcauccaggaccuggagaaguacgucgaggacaccaagaucgaccucuggagcuacaacgccgagcugcugguggcccucgagaaccagcacaccaucgaccugacggacuccgagaugaacaagcuguucgagcggaccaagaagcagcuccgcgagaacgccgaggacauggggaacggcugcuucaagaucuaccacaagugcgacaacgccugcaucgggagcauccgcaacggcaccuacgaccacgacguguaccgggacgaggcgcugaacaaccgcuuccagaucaagggggucgagcugaaguccggcuacaaggacuggauccucuggaucagcuucgccaucuccugcuuccugcugugcaucgugcuccugggcuucaucaugugggccugccagaaggggaacauccggugcaacaucugcaucuga

SEQ ID NO: 64158 - RNA, 1701 nt, Artificial Sequence
  derived and/or modified CDS sequence (opt1) from hemagglutinin__InfluenzaA__AAY28295
augaagaccaucaucgcccugagcuacauccucugccugguguucgcccagaagcugcccggcaacgacaacuccaccgcgacgcucugccuggggcaccacgccgucccgaacggcaccaucgugaagaccaucaccaacgaccagaucgaggugacgaacgccaccgagcugguccagagcuccagcaccgggggcaucugcgacagcccccaccagauccucgacggggagaacugcacccugaucgacgcccugcucggcgacccccagugcgacggcuuccagaacaagaagugggaccuguucguggagcgcagcaaggccuacuccaacugcuaccccuacgacgugccggacuacgcgagccugcggucccucgucgccagcuccgggacgcuggaguucaacaacgagagcuucgacuggaccggcgugacccagaacgggaccuccagcgccugcaagcgccgguccaacaagagcuucuucucccgccugaacuggcucacgcaccugaaguacaaguaccccgcccugaacgugaccaugcccaacaacgagaaguucgacaagcucuacaucuggggcguccaccaccccgggaccgacagcgaccagaucucccuguacgcgcaggccagcggcaagaucaccgugagcacgaagcggucccagcagaccgugaucccgaacaucggcagccgcccccggguccgcgacguguccagccggaucuccaucuacuggaccaucgugaagcccggggacauccugcucaucaacagcaccggcaaccugaucgcgccccgcggguacuucaagauccaguccggcaagagcuccaucaugcggagcgacgccccgaucggcaagugcaacuccgagugcaucacgcccaacgggagcauccccaacgacaagcccuuccagaacgucaaccgcaucaccuacggcgccugcccgcgguacgugaagcagaagacccugaagcucgccaccgggaugcgcaacgugcccgagaagcagacgcggggcaucuucggggccaucgccggcuucaucgagaacggcugggaggggauggucgacggcugguacggguuccgccaccagaacuccgagggcaccgggcaggccgccgaccugaaguccacccaggcggccaucaaccagaucaacggcaagcugaaccggcucaucggcaagaccaacgagaaguuccaccagaucgagaaggaguucuccgagguggaggggcgcauccaggaccuggagaaguacguggaggacacgaagaucgaccuguggagcuacaacgccgagcuccuggucgcccuggagaaccagcacaccaucgaccucaccgacuccgagaugaacaagcuguucgagcggaccaagaagcagcugcgcgagaacgccgaggacaugggcaacgggugcuucaagaucuaccacaagugcgacaacgcgugcaucggcagcauccggaacgggacguacgaccacgacguguaccgcgacgaggcccucaacaaccgcuuccagaucaagggcguggagcugaaguccggcuacaaggacuggauccuguggaucagcuucgccaucagcugcuuccuccugugcgucgcccugcucggguucaucaugugggccugccagaagggcaacauccggugcaacaucugcaucuga

SEQ ID NO: 64159 - RNA, 1701 nt, Artificial Sequence
  derived and/or modified CDS sequence (opt1) from hemagglutinin__InfluenzaA__AAY28305
augaaggccaucaucgcccugagcuacauccucugccugguguucgcgcagaagcugcccggcaacgacaacuccaccgccacccucugccuggggcaccacgccgucccgaacggcacgcuggugaagaccaucaccaacgaccagaucgaggugaccaacgccacggagcucguccagagcuccagcaccgggcgcaucugcgacagcccccaccagauccuggacggcgagaacugcacccugaucgacgcccuccugggggacccccacugcgacggcuuccagaacaaggagugggaccuguucguggagcggagcaaggcguacuccaacugcuaccccuacgacgugccggacuacgucagccuccgcucccugguggccagcuccggcacccuggaguucaacaacgagagcuucaacuggacggggguggcccagaacggcaccuccagcgccugcaagcggcgcuccgacaagagcuucuucucccggcucaacuggcugcaccagcugaaguacaaguaccccgcgcucaacgucaccaugcccaacaacgagaaguucgacaagcuguacaucuggggcgugcaccaccccgggaccgacagcgaccagaucucccuguacgcccaggccagcgggcgcgugacggucagcaccaagcggucccagcagaccgugaucccgaacaucggcagcggccccugggugcgcggggucuccagccggaucuccaucuacuggaccaucgugaagcccggcgacauccuccugaucaacagcacggggaaccugaucgcgccccgcggcuacuucaagauccgguccggcaagagcuccaucaugcgcagcgacgccccgaucgggaagugcaacuccgagugcaucacccccaacggcagcauccccaacgacaagcccuuccagaacgugaaccggaucaccuacggggccugcccgcgcuacgucaagcagaacacccucaagcuggccacgggcaugcggaacgugcccgagaagcagacccgcgggaucuucggcgccaucgccggcuucaucgagaacgggugggagggcaugauggacgggugguacggcuuccggcaccagaacuccgaggggaccggccaggccgcggaccugaaguccacccaggccgccaucaaccagaucaacggcaagcucaaccgccugaucgagaagacgaacgagaaguuccaccagaucgagaaggaguucuccgagguggaggggcggauccaggaccuggagaaguacgucgaggacaccaagaucgaccucuggagcuacaacgccgagcugcugguggcccucgagaaccagcacaccaucgaccugaccgacuccgagaugaacaagcuguucgagcgcacgaagaagcagcuccgggagaacgcggaggacaugggcaacgggugcuucaagaucuaccacaagugcgacaacgccugcaucggcagcauccgcaacgggaccuacgaccacgacguguaccgcgacgaggcccugaacaaccgguuccagaucaagggcgucgagcugaaguccggcuacaaggacuggauccucuggaucagcuucgccaucagcugcuuccugcugugcaucgugcuccugggguucaucaugugggccugccagaagggcaacauccgcugcaacaucugcaucuga

SEQ ID NO: 64160 - RNA, 1701 nt, Artificial Sequence
  derived and/or modified CDS sequence (opt1) from hemagglutinin__InfluenzaA__AAY28325
augaagaccaucaucgcccugagcuacauccucugccugguguucgcccagaagcugcccggcaacgacaacuccaccgcgacgcucugccuggggcaccacgccgucccgaacggcacccuggugaagaccaucaccaacgaccagaucgaggugacgaacgccaccgagcucguccagagcuccagcaccucccgcaucugcgacagcccccaccagauccuggacggggagaacugcacccugaucgacgcccuccugggcgacccccacugcgacggguuccagaacaaggagugggaccuguucguggagcgguccaaggccuacagcaacugcuaccccuacgacgugccggacuacgucucccuccgcagccugguggcguccagcggcacgcuggaguucaacaacgaguccuucaacuggaccggcguggcccagaacgggaccagcuccgccugcaagcggcgcagcgacaaguccuucuucagccggcucaacuggcugcaccagcugaaguacaaguaccccgcccucaacgucaccaugcccaacaacgagaaguucgacaagcuguacaucuggggcgugcaccaccccgggacggacuccgaccagaucagccuguacgcgcaggccagcggccgcgugaucgucuccaccaagcggagccagcagaccgugaucccgaacaucggguccggccccugggugcgcggcgucagcucccggaucagcaucuacuggaccaucgugaagcccggggacauccuccugaucaacuccacgggcaaccugaucgcgccccgcggguacuucaagauccggagcggcaaguccagcaucaugcgcuccgacgccccgaucggcaagugcaacagcgagugcaucacccccaacggguccauccccaacgacaagcccuuccagaacgugaaccggaucaccuacggcgccugcccgcgcuacgucaagcagaacacccucaagcuggccacggggaugcggaacgugcccgagaagcagacccgcggcaucuucggggccaucgccggcuucaucgagaacggcugggaggggaugauggacggcugguacggguuccggcaccagaacagcgagggcaccgggcaggccgccgaccugaaguccacccaggcggccaucaaccagaucaacggcaagcucaaccgccugaucgagaagacgaacgagaaguuccaccagaucgagaaggaguucgccgagguggagggccggauccaggaccuggagaaguacgucgaggacaccaagaucgaccucuggagcuacaacgccgagcugcugguggcccucgagaaccagcacaccaucgaccugaccgacuccgagaugaacaagcuguucgagcgcacgaagaagcagcuccgggagaacgcggaggacauggggaacggcugcuucaagaucuaccacaagugcgacaacgccugcaucgggagcauccgcaacggcaccuacgaccacgacguguaccgcgacgaggcccugaacaaccgguuccagaucaagggggucgagcugaaguccggcuacaaggacuggauccucuggaucagcuucgccaucagcugcuuccugcugugcaucgugcuccugggcuucaucaugugggccugccagaaggggaacauccgcugcaacaucugcaucuga

SEQ ID NO: 64161 - RNA, 1701 nt, Artificial Sequence
  derived and/or modified CDS sequence (opt1) from hemagglutinin__InfluenzaA__AAY28335
augaagaccaucaucgcccugagcuacauccucugccugguguccgcccagaagcugcccggcaacgacaacagcaccgcgacgcucugccuggggcaccacgccgucccgaacggcacccuggugaagaccaucaccaacgaccagaucgaggugacgaacgccaccgagcucguccaguccagcuccaccagccgcaucugcgacagcccccaccagauccuggacggggagaacugcacccugaucgacgcccuccugggcgacccccacugcgacggguuccagaacaaggagugggaccuguucguggagcggagcaaggccuacuccaacugcuaccccuacgacgugccggacuacgucagccuccgcucccugguggcgagcuccggcacgcuggaguucaacaacgagagcuucaacuggaccggcguggcccagaacgggaccuccagcgccugcaagcggcgcuccgacaagagcuucuucucccggcucaacuggcugcaccagcugaaguacaaguaccccgcccucaacgucaccaugcccaacaacgagaaguucgacaagcuguacaucuggggcgugcaccaccccgggacggacagcgaccagaucagccuguacgcgcaggccuccggccgcgugaccgucagcaccaagcggucccagcagaccgugaucccgaacaucgggagccgccccugggugcggggcgucuccagccgcaucuccaucuacuggacgaucgugaagcccggcgacauccuccugaucaacagcaccgggaaccugaucgcgccccggggcuacuucaagauccgcuccgggaaguccuccaucaugcggagcgacgccccgaucggcaagugcaacuccgagugcaucacccccaacggcagcauccccaacgacaagcccuuccagaacgugaaccgcaucaccuacggggccugcccgcgguacgucaagcagaacacgcucaagcuggccaccggcaugcgcaacgugcccgagaagcagacccgggggaucuucggcgccaucgccggguucaucgagaacggcugggagggcaugauggacgggugguacggcuuccgccaccagaacuccgaggggaccggccaggccgccgaccucaagagcacgcaggcggccaucaaccagaucaacgggaagcugaaccggcugaucgagaagaccaacgagaaguuccaccagaucgagaaggaguucuccgagguggagggccgcauccaggaccuggagaaguacgucgaggacaccaagguggaccucuggagcuacaacgccgagcugcugguggcccucgagaaccagcacaccaucgaccugacggacuccgagaugaacaagcuguucgagcggaccaagaagcagcuccgcgagaacgccgaggacaugggcaacgggugcuucaagaucuaccacaagugcgacaacgcgugcaucggcagcauccgcaacgggaccuacgaccacgacgucuaccgggacgaggcccugaacaaccgcuuccagaucaagggcguggagcucaagagcggguacaaggacuggauccuguggaucuccuucgccaucagcugcuuccugcugugcaucguccuccugggcuucaucaugugggccugccagaagggcaacauccggugcaacaucugcaucuga

SEQ ID NO: 64162 - RNA, 1701 nt, Artificial Sequence; identical to SEQ ID NO: 64056
  derived and/or modified CDS sequence (opt1) from hemagglutinin__InfluenzaA__AAY28345

SEQ ID NO: 64163 - RNA, 1701 nt, Artificial Sequence; identical to SEQ ID NO: 64096
  derived and/or modified CDS sequence (opt1) from hemagglutinin__InfluenzaA__AAY28355

SEQ ID NO: 64164 - RNA, 1701 nt, Artificial Sequence
  derived and/or modified CDS sequence (opt1) from hemagglutinin__InfluenzaA__AAY28363
augaagaccaucaucgcccugagcuacauccucugcaugguguucgcccagaagcugcccgucaacgacaacuccaccgcgacgcugugccucggccaccacgccgugccgaacgggacccuggugaagaccaucaccaacgaccacaucgaggucacgaacgccaccgagcuggugcagagcuccagcaccggccgcaucugcgacagcccccaccagauccucgacggggagaacugcacccugaucgacgcccugcucggcgacccccacugcgacggguuccagaacaaggagugggaccuguucguggagcggagcacggccuacuccaacugcuaccccuacgacgucccggacuacgcgagccugcgcucccucguggccagcuccggcacccuggaguucaacaacgagagcuucaacuggaccggcguggcccagaacgggaccuccagcgccugcaagcggcgcuccaucaagagcuucuucucccggcugaacuggcuccaccagcugaaguacaaguaccccagccugaacgucacgaugcccaacaacgagaaguucgacaagcucuacaucuggggcgugcaccaccccuccaccgacagcgaccagaucagccuguacgcgcaggccuccgggcgcgugaccgucagcaccaagcggucccagcagacggugaucccgaacaucggcagccgccccugggugcgcggggucuccagccggaucuccaucuacuggaccaucgugaagcccggcgacauccugcucaucaacagcaccggcaaccugaucgcgccccggggguacuucaagauccgcuccggcaagagcuccaucaugcggagcaacgccccgaucgggaagugcaacuccgagugcaucacccccaacggcagcauccccaacgacaagcccuuccagaacgugaaccgcaucacguacggcgccugcccgcgguacgucaagcagaacacccugaagcucgccaccgggaugcgcaacgugcccgagaagcagacccggggcaucuucggggccaucgccggcuucaucgagaacgggugggagggcaugguggacggcugguacggguuccgccaccagaacuccgagggcacggggcaggccgccgaccugaaguccacccaggcggccaucaaccagaucaacggcaagcugaaccggcucaucgagaagaccaacgagaaguuccaccagaucgagaaggaguucuccgaggucgaggggcgcauccaggaccuggagaaguacguggaggacaccaagaucgaccuguggagcuacaacgccgagcuccugguggcccuggagaaccagcacacgaucgaccucaccgacuccgagaugaacaagcuguucgagcggacccgcaagcagcugcgcgagaacgccgaggacaugggcaacggcugcuucaagaucuaccacaagugcgacaacgcgugcaucgggagcauccggaacggcaccuacgaccacgacgucuaccgcgacgaggcccucaacaaccgguuccagaucaaggggguggagcucaagagcggcuacaaggacuggauccuguggaucuccuucgccaucagcugcuuccugcugugcgucgugcugcucggguucaucaugugggccugccagaagggcaacauccgcugcaacaucugcaucuga

SEQ ID NO: 64165 - RNA, 1701 nt, Artificial Sequence; identical to SEQ ID NO: 64096
  derived and/or modified CDS sequence (opt1) from hemagglutinin__InfluenzaA__AAY28375

SEQ ID NO: 64166 - RNA, 1701 nt, Artificial Sequence; identical to SEQ ID NO: 64056
  derived and/or modified CDS sequence (opt1) from hemagglutinin__InfluenzaA__AAY28385

SEQ ID NO: 64167 - RNA, 1701 nt, Artificial Sequence
  derived and/or modified CDS sequence (opt1) from hemagglutinin__InfluenzaA__AAY28395
augaagaccaucaucgcccugagcuacauccucugccugguguucgcccagaagcugcccggcaacgacaacuccaccgcgacgcucugccuggggcaccacgccgucccgaacggcaccaucgugaagaccaucaccaacgaccagaucgaggugacgaacgccaccgagcugguccagagcuccagcaccgggggcaucugcgacagcccccaccagauccucgacggggagaacugcacccugaucgacgcccugcucggcgacccccagugcgacggcuuccagaacaagaagugggaccuguucguggagcgcagcaaggccuacuccaacugcuaccccuacgacgugccggacuacgcgagccugcggucccucgucgccagcuccgggacgcuggaguucaacaacgagagcuucgacuggaccggcgugacccagaacgggaccuccagcgccugcaagcgccgguccaacaagagcuucuucucccgccugaacuggcucacgcaccugaaguacaaguaccccgcccugaacgugaccaugcccaacaacgagaaguucgacaagcucuacaucuggggcguccaccaccccgggaccgacagcgaccagaucaaccuguacgcgcaggccuccggccggaucaccgugagcacgaagcgcagccagcagaccgugaucccgaacaucggcucccggccccgcguccgggacgugagcucccgcaucagcaucuacuggaccaucgugaagcccggggacauccugcucaucaacuccaccggcaaccugaucgcgccccggggguacuucaagauccgcagcggcaaguccagcaucaugcgguccgacgccccgaucggcaagugcaacagcgagugcaucacgcccaacggguccauccccaacgacaagcccuuccagaacgucaaccgcaucaccuacggcgccugcccgcgguacaucaagcagaacacccugaagcucgccaccgggaugcgcaacgugcccgagaagcagacgcggggcaucuucggggccaucgccggcuucaucgagaacggcugggaggggaugguggacggcugguacggguuccgccaccagaacagcgagggcaccgggcaggccgccgaccugaaguccacccaggcggccaucaaccagaucaacggcaagcugaaccggcucaucggcaagaccaacgagaaguuccaccagaucgagaaggaguucagcgaggucgaggggcgcauccaggaccuggagaaguacguggaggacacgaagaucgaccugugguccuacaacgccgagcuccugguggcccuggagaaccagcacaccaucgaccucaccgacagcgagaugaacaagcuguucgagcggaccaagaagcagcugcgcgagaacgccgaggacaugggcaacgggugcuucaagaucuaccacaagugcgacaacgcgugcaucggcuccauccgcaacgggacguacgaccacgacgucuaccgggacgaggcccucaacaaccgcuuccagaucaagggcguggagcugaaguccggcuacaaggacuggauccuguggaucuccuucgccaucagcugcuuccuccugugcguggcccugcucggguucaucaugugggccugccagaagggcaacauccggugcaacaucugcaucuga

SEQ ID NO: 64168 - RNA, 1701 nt, Artificial Sequence
  derived and/or modified CDS sequence (opt1) from hemagglutinin__InfluenzaA__AAY28405
augaagaccaucaucgcccugagcuacauccucugccugguguucgcccagaagcugcccggcaacgacaacuccaccgcgacgcucugccuggggcaccacgccgucccgaacggcacccuggugaagaccaucaccaacgaccagaucgaggugacgaacgccaccgagcucguccagaucagcuccaccgggcgcaucugcgacaacccccaccagauccuggacggcgagaacugcacccugaucgacgcccuccugggggacccccacugcgacggcuuccagaacaaggagugggaccuguucguggagcggagcaaggccuacuccaacugcuaccccuacgacgugccggacuacgucagccuccgcucccugguggcgagcuccggcacgcuggaguucaacaacgagagcuucaacuggaccgggguggcccagaacggcaccuccagcgccugcaagcggcgcuccgacaagagcuucuucucccggcucaacuggcugcaccagcugaaguacaaguaccccgcccucaacgucaccaugcccaacaacgagaaguucgacaagcuguacaucuggggcgugcaccaccccgggacggacagcgaccagaucucccuguacgcgcaggccagcgggcgcgugaccgucuccaccaagcggagccagcagaccgugaucccgaacaucggcagccgccccugggugcggggcgucuccagccgcaucuccaucuacuggacgaucgugaagcccggggacauccuccugaucaacagcaccggcaaccugaucgcgccccggggguacuucaagauccgcuccggcaagagcuccaucaugcggagcgacgccccgaucggcaagugcaacuccgagugcaucacccccaacgggagcauccccaacgacaagcccuuccagaacgugaaccgcaucaccuacggcccgugcccccgguacgucaagcagaacacgcucaagcuggccaccgggaugcgcaacgugcccgagaagcagacccggggcaucuucggggccaucgccggcuucaucgagaacggcugggaggggaugauggacggcugguacggguuccgccaccagaacuccgagggcaccgggcaggccgccgaccucaagagcacgcaggccgcgaucaaccagaucaacggcaagcugaaccggcugaucgagaagaccaacgagaaguuccaccagaucgagaaggaguucuccgagguggagggccgcauccaggaccuggagaaguacgucgaggacaccaagaucgaccucuggagcuacaacgccgagcugcugguggcccucgagaaccagcacaccaucgaccugacggacuccgagaugaacaagcuguucgagcggaccaagaagcagcuccgcgagaacgccgaggacauggggaacggcugcuucaagaucuaccacaagugcgacaacgccugcaucgggagcauccgcaacggcaccuacgaccacgacguguaccgggacgaggcgcugaacaaccgcuuccagaucaagggggucgagcugaaguccggcuacaaggacuggauccucuggaucagcuucgccaucuccugcuuccugcugugcaucgugcuccugggcuucaucaugugggccugccagaaggggaacauccggugcaacaucugcgucuga

SEQ ID NO: 64169 - RNA, 1701 nt, Artificial Sequence; identical to SEQ ID NO: 64056
  derived and/or modified CDS sequence (opt1) from hemagglutinin__InfluenzaA__AAY28486

SEQ ID NO: 64170 - RNA, 1701 nt, Artificial Sequence; identical to SEQ ID NO: 64056
  derived and/or modified CDS sequence (opt1) from hemagglutinin__InfluenzaA__AAY28521

SEQ ID NO: 64171 - RNA, 1701 nt, Artificial Sequence; identical to SEQ ID NO: 64055
  derived and/or modified CDS sequence (opt1) from hemagglutinin__InfluenzaA__AAY28531

SEQ ID NO: 64172 - RNA, 1701 nt, Artificial Sequence; identical to SEQ ID NO: 64056
  derived and/or modified CDS sequence (opt1) from hemagglutinin__InfluenzaA__AAY28541

SEQ ID NO: 64173 - RNA, 1701 nt, Artificial Sequence
  derived and/or modified CDS sequence (opt1) from hemagglutinin__InfluenzaA__AAY28551
augaagaccaucaucgcccugagcuacauccucugccugguguucgcccagaagcugcccgucaacgacaacuccaccgcgacgcucugccugggccaccacgccgugccgaacgggacccuggugaagaccaucaccaacgaccacaucgaggucacgaacgccaccgagcucgugcagagcuccagcaccggccgcaucugcgacagcccccaccagauccuggacggggagaacugcacccugaucgacgcccuccugggcgacccccacugcgacggguuccagaacaaggagugggaccuguucguggagcggagcacggccuacuccaacugcuaccccuacgacgucccggacuacgcgagccuccgcucccugguggccagcuccggcacccuggaguucaacaacgagagcuucaacuggaccggcguggcccagaacgggaccuccagcgccugcaagcggcgcuccaucaagagcuucuucucccggcucaacuggcugcaccagcugaaguacaaguaccccgcgcucaacgucacgaugcccaacaacgagaaguucgacaagcuguacaucuggggcgugcaccaccccagcaccgacuccgaccagaucagccuguacgcccaggccagcgggcgcgugaccgucuccaccaagcggagccagcagacggugaucccgaacaucggcuccgggcccugggugcgcggcgucagcucccggaucagcaucuacuggaccaucgugaagcccggcgacauccuccugaucaacuccaccgggaaccugaucgcgccccgcggcuacuucaagauccggagcgggaaguccagcaucaugcgcuccaacgccccgaucggcaagugcaacagcgagugcaucacccccaacggcuccauccccaacgacaagcccuuccagaacgugaaccggaucacguacggggccugcccgcgcuacgucaagcagaacacccucaagcuggccaccggcaugcggaacgugcccgagaagcagacccgcgggaucuucggcgccaucgccggguucaucgagaacggcugggagggcaugguggacgggugguacggcuuccggcaccagaacagcgaggggacgggccaggccgcggaccugaaguccacccaggccgccaucaaccagaucaacgggaagcucaaccgccugaucgagaagaccaacgagaaguuccaccagaucgagaaggaguucagcgaggucgagggccggauccaggaccuggagaaguacguggaggacaccaagaucgaccucugguccuacaacgccgagcugcugguggcccucgagaaccagcacacgaucgaccugaccgacagcgagaugaacaagcuguucgagcgcacccggaagcagcuccgcgagaacgcggaggacaugggcaacgggugcuucaagaucuaccacaagugcgacaacgccugcaucggcuccauccgcaacgggaccuacgaccacgacgucuaccgggacgaggcccugaacaaccgcuuccagaucaagggcguggagcugaaguccggguacaaggacuggauccucuggaucagcuucgccaucuccugcuuccugcugugcgucgugcuccugggcuucaucaugugggccugccagaagggcaacauccggugcaacaucugcaucuga

SEQ ID NO: 64174 - RNA, 1701 nt, Artificial Sequence; identical to SEQ ID NO: 64056
  derived and/or modified CDS sequence (opt1) from hemagglutinin__InfluenzaA__AAY28561

SEQ ID NO: 64175 - RNA, 1701 nt, Artificial Sequence; identical to SEQ ID NO: 64071
  derived and/or modified CDS sequence (opt1) from hemagglutinin__InfluenzaA__AAY28581

SEQ ID NO: 64176 - RNA, 1701 nt, Artificial Sequence
  derived and/or modified CDS sequence (opt1) from hemagglutinin__InfluenzaA__AAY28591
augaagaccaucaucgcccugagcuacauccucugccugguguucgcccagaagcugcccgucaacgacaacuccaccgcgacgcucugccugggccaccacgccgugccgaacgggacccuggugaagaccaucaccaacgaccacaucgaggucacgaacgccaccgagcucgugcagagcuccagcaccggccgcaucugcgacagcccccaccagauccuggacggggagaacugcacccugaucgacgcccuccugggcgacccccacugcgacggguuccagaacaaggagugggaccuguucguggagcggagcacggccuacuccaacugcuaccccuacgacgucccggacuacgcgagccuccgcucccugguggccagcuccggcacccuggaguucaacaacgagagcuucaacuggaccggcguggcccagaacgggaccuccagcgccugcaagcggcgcuccaucaagagcuucuucucccggcucaacuggcugcaccagcugaaguacaaguaccccgcgcucgacgucacgaugcccaacaacgagaaguucgacaagcuguacaucuggggcgugcaccaccccagcaccgacuccgaccagaucagccuguacgcccaggccagcgggcgcgugaccgucuccaccaagcggagccagcagacggugaucccgaacaucggcucccgccccugggugcgcggggucagcucccggaucagcaucuacuggaccaucgugaagcccggcgacauccuccugaucaacuccaccggcaaccugaucgcgccccggggguacuucaagauccgcagcggcaaguccagcaucaugcgguccaacgccccgaucgggaagugcaacagcgagugcaucacccccaacggcuccauccccaacgacaagcccuuccagaacgugaaccgcaucacguacggcgccugcccgcgguacgucaagcagaacacccucaagcuggccaccgggaugcgcaacgugcccgagaagcagacccggggcaucuucggggccaucgccggcuucaucgagaacgggugggagggcaugguggacggcugguacggguuccgccaccagaacagcgagggcacggggcaggccgcggaccugaaguccacccaggccgccaucaaccagaucaacggcaagcucaaccggcugaucgagaagaccaacgagaaguuccaccagaucgagaaggaguucagcgaggucgaggggcgcauccaggaccuggagaaguacguggaggacaccaagaucgaccucugguccuacaacgccgagcugcugguggcccucgagaaccagcacacgaucgaccugaccgacagcgagaugaacaagcuguucgagcggacccgcaagcagcuccgcgagaacgcggaggacaugggcaacggcugcuucaagaucuaccacaagugcgacaacgccugcaucggguccauccggaacggcaccuacgaccacgacgucuaccgcgacgaggcccugaacaaccgguuccagaucaaggggguggagcugaaguccggcuacaaggacuggauccucuggaucagcuucgccaucuccugcuuccugcugugcgucgugcuccugggguucaucaugugggccugccagaagggcaacauccgcugcaacaucugcaucuga

SEQ ID NO: 64177 - RNA, 1701 nt, Artificial Sequence; identical to SEQ ID NO: 64096
  derived and/or modified CDS sequence (opt1) from hemagglutinin__InfluenzaA__AAY28608

SEQ ID NO: 64178 - RNA, 1701 nt, Artificial Sequence
  derived and/or modified CDS sequence (opt1) from hemagglutinin__InfluenzaA__AAY28618
augaagaccaucaucgcccugagcuacauccucugccugguguucgcccagaagcugcccggcaacgacaacuccaccgcgacgcucugccuggggcaccacgccgucccgaacggcaccaucgugaagaccaucaccaacgaccagaucgaggugacgaacgccaccgagcugguccagagcuccagcaccgggggcaucugcgacagcccccaccagauccucgacggggagaacugcacccugaucgacgcccugcucggcgacccccagugcgacggcuuccagaacaagaagugggaccuguucguggagcgcagcaaggccuacuccaacugcuaccccuacgacgugccggacuacgcgagccugcggucccucgucgccagcuccgggacgcuggaguucaacaacgagagcuucaacuggaccggcgugacccagaacgggaccuccagcgccugcaagcgccgguccaacaagagcuucuucucccgccugaacuggcucacgcaccugaaguacaaguaccccgcccugaacgugaccaugcccaacaacgagaaguucgacaagcucuacaucuggggcguccaccaccccgggaccgacagcgaccagaucucccuguacgcgcaggccagcggccggaucaccgugagcacgaagcgcucccagcagaccgugaucccgaacaucggcagccggccccgcguccgggacguguccagccgcauguccaucuacuggaccaucgugaagcccggggacauccugcucaucaacagcaccggcaaccugaucgcgccccggggguacuucaagauccgcuccggcaagagcuccaucaugcggagcgacgccccgaucggcaagugcaacuccgagugcaucacgcccaacgggagcauccccaacgacaagcccuuccagaacgucaaccgcaucaccuacggcgccugcccgcgguacgugaagcagaacacccugaagcucgccaccgggaugcgcaacgugcccgagaagcagacgcggggcaucuucggggccaucgccggcuucaucgagaacggcugggaggggauggucgacggcugguacggguuccgccaccagaacuccgagggcaccgggcaggccgccgaccugaaguccacccaggcggccaucaaccagaucaacggcaagcugaaccggcucaucggcaagaccaacgagaaguuccaccagaucgagaaggaguucuccgagguggaggggcgcauccaggaccuggagaaguacguggaggacacgaagaucgaccuguggagcuacaacgccgagcuccuggucgcccuggagaaccagcacaccaucgaccucaccgacuccgagaugaacaagcuguucgagcggaccaagaagcagcugcgcgagaacgccgaggacaugggcaacgggugcuucaagaucuaccacaagugcgacaacgcgugcaucgagagcauccgcaacggcacguacgaccacgacguguaccgggacgaggcccucaacaaccgcuuccagaucaaggggguggagcugaaguccggcuacaaggacuggauccuguggaucagcuucgccaucagcugcuuccuccugugcgucgcccugcucggcuucaucaugugggccugccagaaggggaacauccggugcaacaucugcaucuga

SEQ ID NO: 64179 - RNA, 1701 nt, Artificial Sequence; identical to SEQ ID NO: 64071
  derived and/or modified CDS sequence (opt1) from hemagglutinin__InfluenzaA__AAY28638

SEQ ID NO: 64180 - RNA, 1701 nt, Artificial Sequence
  derived and/or modified CDS sequence (opt1) from hemagglutinin__InfluenzaA__AAY28648
augaagaccaucaucgcccugagcuacauccucugccugguguucgcccagaagcugcccggcaacgacaacuccaccgcgacgcucugccuggggcaccacgccgucccgaacggcacccuggugaagaccaucaccaacgaccagaucgaggugacgaacgccaccgagcucguccagagcuccagcaccgggcgcaucugcgacagcccccaccagauccuggacggcgagaacugcacccugaucgacgcccuccugggggacccccacugcgacggcuuccagaacaaggagugggaccuguucguggagcggagcaaggccuacuccaacugcuaccccuacgacgugccggacuacgucagccuccgcucccugguggcgagcuccggcacgcuggaguucaacaacgagagcuucaacuggaccgggguggcccagaacggcaccuccagcgccugcaagcggcgcuccgacaagagcuucuucucccggcucaacuggcugcaccagcugaaguacaaguaccccgcccucaacgucaccaugcccaacaacgagaaguucgacaagcuguacaucuggggcgugcaccaccccgggacggacagcgaccagaucucccuguacgcgcaggccagcgggcgcgugaccgucagcaccaagcggucccagcagaccgugaucccgaacaucggcagcggccccugggugcgcggggucuccagccggaucuccaucuacuggacgaucgugaagcccggcgacauccuccugaucaacagcaccgggaaccugaucgcgccccgcggcuacuucaagauccgguccggcaagagcuccaucaugcgcagcgacgccccgaucgggaagugcaacuccgagugcaucacccccaacggcagcauccccaacgacaagcccuuccagaacgugaaccggaucaccuacggggccugcccgcgcuacgucaagcagaacacgcucaagcuggccaccggcaugcggaacgugcccgagaagcagacccgcgggaucuucggcgccaucgccggcuucaucgagaacgggugggagggcaugauggacgggugguacggcuuccggcaccagaacuccgaggggaccggccaggccgccgaccugaaguccacgcaggcggccaucaaccagaucaacggcaagcucaaccgccugaucgagaagaccaacgagaaguuccaccagaucgagaaggaguucuccgagguggaggggcggauccaggaccuggagaaguacgucgaggacaccaagaucgaccucuggagcuacaacgccgagcugcugguggcccucgagaaccagcacaccaucgaccugacggacuccgagaugaacaagcuguucgagcgcaccaagaagcagcuccgggagaacgccgaggacaugggcaacgggugcuucaagaucuaccacaagugcgacaacgcgugcaucggcagcauccgcaacgggaccuacgaccacgacguguaccgcgacgaggcccugaacaaccgguuccagaucaagggcgucgagcugaaguccggcuacaaggacuggauccucuggaucagcuucgccaucagcugcuuccugcugugcaucgugcuccugggguucaucaugugggccugccagaagggcaacauccgcugcaacaucugcaucuga

SEQ ID NO: 64181 - RNA, 1701 nt, Artificial Sequence
  derived and/or modified CDS sequence (opt1) from hemagglutinin__InfluenzaA__AAY44610
augaagaccaucaucgcccugagcuacauccucugccugguguucgcccagaagcugcccggcaacgacaacuccaccgcgacgcucugccuggggcaccacgccgucccgaacggcaccaucgugaagaccaucaccaacgaccagaucgaggugacgaacgccaccgagcugguccagagcuccagcaccgggggcaucugcgacagcccccaccagauccucgacggggagaacugcacccugaucgacgcccugcucggcgacccccagugcgacggcuuccagaacaagaagugggaccuguucguggagcgcaacaaggccuacagcaacugcuaccccuacgacgugccggacuacgcgucccugcggagccucgucgccuccagcgggacgcuggaguucaacaacgaguccuucgacuggaccggcgugacccagaacgggaccagcuccgccugcaagcgccggagcaacaaguccuucuucagccgccugaacuggcucacgcaccugaaguacaaguaccccgcccugaacgugaccaugcccaacaacgagaaguucgacaagcucuacaucuggggcguccaccaccccgggaccgacuccgaccagaucagccuguacgcgcaggccuccggccggaucaccgugagcacgaagcgcagccagcagaccgugaucccgaacaucggcucccggccccgcguccgggacgugagcucccgcaucagcaucuacuggaccaucgugaagcccggggacauccugcucaucaacuccaccggcaaccugaucgcgccccggggguacuucaagauccgcagcggcaaguccagcaucaugcgguccgacgccccgaucggcaagugcaacagcgagugcaucacgcccaacggguccauccccaacgacaagcccuuccagaacgucaaccgcaucaccuacggcgccugcccgcgguacgugaagcagaacacccugaagcucgccaccgggaugcgcaacgugcccgagaagcagacgcggggcaucuucggggccaucgccggcuucaucgagaacggcugggaggggauggucgacggcugguacggguuccgccaccagaacagcgagggcaccgggcaggccgccgaccugaaguccacccaggcggccaucaaccagaucaacggcaagcugaaccggcucaucggcaagaccaacgagaaguuccaccagaucgagaaggaguucagcgagguggaggggcgcauccaggaccuggagaaguacguggaggacacgaagaucgaccugugguccuacaacgccgagcuccuggucgcccuggagaaccagcacaccaucgaccucaccgacagcgagaugaacaagcuguucgagcggaccaagaagcagcugcgcgagaacgccgaggacaugggcaacgggugcuucaagaucuaccacaagugcgacaacgcgugcaucggcuccauccgcaacgggacguacgaccacgacguguaccgggacgaggcccucaacaaccgcuuccagaucaagggcguggagcugaaguccggcuacaaggacuggauccuguggaucuccuucgccaucagcugcuuccuccugugcgucgcccugcucggguucaucaugugggccugccagaagggcaacauccggugcaacaucugcaucuga

SEQ ID NO: 64182 - RNA, 1701 nt, Artificial Sequence
  derived and/or modified CDS sequence (opt1) from hemagglutinin__InfluenzaA__AAY44620
augaagaccaucaucgcccugagcuacauccucugccugguguucgcccagaagcugcccggcaacgacaacuccaccgcgacgcucugccuggggcaccacgccgucccgaacggcacccuggugaagaccaucaccaacgaccagaucgaggugacgaacgccaccgagcucguccagagcuccagcaccgggcgcaucugcgacagcccccaccagauccuggacggcgagaacugcacccugaucgacgcccuccugggggacccccacugcgacggcuuccagaacaaggagugggaccuguucguggagcggagcaaggccuacuccaacugcuaccccuacgacgugccggacuacgucagccuccgcucccugguggcgagcuccggcacgcuggaguucaacaacgagagcuucaacuggaccgggguggcccagaacggcaccuccagcgccugcaagcggcgcuccgacaagagcuucuucucccggcucaacuggcugcaccagcugaaguacaaguaccccgcccucaacgucaccaugcccaacaacgagaaguucgacaagcuguacaucuggggcgugcaccaccccgggacggacagcgaccagaucucccuguacgcgcaggccagcgggcgcgugaccgucagcaccaagcggucccagcagaccgugaucccgaacaucggcagccgccccugggugcggggcgucuccagccgcaucuccaucuacuggacgaucgugaagcccggggacauccuccugaucaacagcaccggcaaccugaucgcgccccggggguacuucaagauccgcuccggcaagagcuccaucaugcggagcgacgccccgaucggcaagugcaacuccgagugcaucacccccaacgggagcauccccaacgacaagcccuuccagaacgugaaccgcaucaccuacggcccgugcccccgguacgucaagcagaacacgcucaagcuggccaccgggaugcgcaacgugcccgagaagcagacccggggcaucuucggggccaucgccggcuucaucgagaacggcugggaggggaugauggacggcugguacggguuccgccaccagaacuccgagggcaccgggcaggccgccgaccugaaguccacgcaggccgcgaucaaccagaucaacgagaagcucaaccggcugaucgagaagaccaacgagaaguuccaccagaucgagaaggaguucuccgagguggagggccgcauccaggaccuggagaaguacgucgaggacaccaagaucgaccucuggagcuacaacgccgagcugcugguggcccucgagaaccagcacaccaucgaccugacggacuccgagaugaacaagcuguucgagcggaccaagaagcagcuccgcgagaacgccgaggacaugggcaacgggugcuucaagaucuaccacaagugcgacaacgccugcaucggcagcauccgcaacgggaccuacgaccacgacguguaccgggacgaggcgcugaacaaccgcuuccagaucaagggcgucgagcugaaguccggguacaaggacuggauccucuggaucagcuucgccaucagcugcuuccugcugugcaucgugcuccugggcuucaucaugugggccugccagaagggcaacauccggugcaacaucugcaucuga

SEQ ID NO: 64183 - RNA, 1701 nt, Artificial Sequence; identical to SEQ ID NO: 64104
  derived and/or modified CDS sequence (opt1) from hemagglutinin__InfluenzaA__AAY44621

SEQ ID NO: 64184 - RNA, 1701 nt, Artificial Sequence; identical to SEQ ID NO: 64071
  derived and/or modified CDS sequence (opt1) from hemagglutinin__InfluenzaA__AAY44631

SEQ ID NO: 64185 - RNA, 1701 nt, Artificial Sequence
  derived and/or modified CDS sequence (opt1) from hemagglutinin__InfluenzaA__AAY44641
augaagaccaucaucgcccugagcuacauccucugccugguguucgcccagaagcugcccggcaacgacaacuccaccgcgacgcucugccuggggcaccacgccgucccgaacggcacccuggugaagaccaucaccaacgaccagaucgaggugacgaacgccaccgagcucguccagagcuccagcaccgggcgcaucugcgacagcccccaccagauccuggacggcgagaacugcacccugaucgacgcccuccugggggacccccacugcgacggcuuccagaacaaggagugggaccuguucguggagcggagcaaggccuacuccaacugcuaccccuacgacgugccggacuacgucagccuccgcucccugguggcgagcuccggcacgcuggaguucaacaacgagagcuucaacuggaccgggguggcccagaacggcaccuccagcgccugcaagcggcgcuccgacaagagcuucuucucccggcucaacuggcugcaccagcugaaguacaaguaccccgcccucaacgucaccaugcccaacaacgagaaguucgacaagcuguacaucuggggcgugcaccaccccgggacggacagcgaccagaucucccuguacgcgcaggccagcgggcgcgugaccgucagcaccaagcggucccagcagaccgugaucccgaacaucggcagccgccccugggugcggggcgucuccagccgcaucuccaucuacuggacgaucgugaagcccggggacauccuccugaucaacagcaccggcaaccugaucgcgccccggggguacuucaagauccgcuccggcaagagcuccaucaugcggagcgacgccccgaucggcaagugcaacuccgagugcaucacccccaacgggagcauccccaacgacaagcccuuccagaacgugaaccgcaucaccuacggcccgugcccccgguacgucaagcagaacacgcucaagcuggccaccgggaugcgcaacgugcccgagaagcagacccggggcaucuucggggccaucgccggcuucaucgagaacggcugggaggggaugauggacggcugguacggguuccgccaccagaacuccgagggcaccgggcaggccgccgaccugaaguccacgcaggccgcgaucaaccagaucaacggcaagcucaaccggcugaucgagaagaccaacgagaaguuccaccagaucgagaaggaguucuccgagguggagggccgcauccaggaccuggagaaguacgucgaggacaccaagaucgaccucuggagcuacaacgccgagcugcugguggcccucgagaaccagcacaccaucgaccugacggacuccgagaugaacaagcuguucgagcggaccaagaagcagcuccgcgagaacgccgaggacauggggaacggcugcuucaagaucuaccacaagugcgacaacgccugcaucgggagcauccgcaacggcaccuacgaccacgacguguaccgggacgaggcgcugaacaaccgcuuccagaucaagggggucgagcugaaguccggcuacaaggacuggauccucuggaucagcuucgccaucagcugcuuccugcugugcaucggccuccugggguucaucaugugggccugccagaagggcaacauccggugcaacaucugcaucuga

SEQ ID NO: 64186 - RNA, 1701 nt, Artificial Sequence
  derived and/or modified CDS sequence (opt1) from hemagglutinin__InfluenzaA__AAY44651
augaagaccaucaucgcccugagcuacauccucugccugguguucgcccagaagcugcccgucaacgacaacuccaccgcgacgcucugccugggccaccacgccgugccgaacgggacccuggugaagaccaucaccaacgaccacaucgaggucacgaacgccaccgagcucgugcagagcuccagcaccggccgcaucugcgacagcccccaccagauccuggacggggagaacugcacccugaucgacgcccuccugggcgacccccacugcgacggguuccagaacaaggagugggaccuguucguggagcggagcacggccuacuccaacugcuaccccuacgacgucccggacuacgcgagccuccgcucccugguggccagcuccggcacccuggaguucaacaacgagagcuucaacuggaccggcguggcccagaacgggaccuccagcgccugcaagcggcgcuccaucaagagcuucuucucccggcucaacuggcugcaccagcugaaguacaaguaccccgcgcucaacgucacgaugcccaacaacgagaaguucgacaagcuguacaucuggggcgugcaccaccccagcaccgacuccgaccagaucagccuguacgcccaggccagcgggcgcgugaccgucuccaccaagcggagccagcagacggugaucccgaacaucggcucccgccccugggagcgcggggugagcucccggaucagcaucuacuggaccaucgucaagcccggcgacauccuccugaucaacuccaccggcaaccugaucgcgccccggggguacuucaagauccgcagcggcaaguccagcaucaugcgguccaacgccccgaucgggaagugcaacagcgagugcaucacccccaacggcuccauccccaacgacaagcccuuccagaacgugaaccgcaucacguacggcgccugcccgcgguacgugaagcagaacacccucaagcuggccaccgggaugcgcaacguccccgagaagcagacccggggcaucuucggggccaucgccggcuucaucgagaacgggugggagggcaugguggacggcugguacggguuccgccaccagaacagcgagggcacggggcaggccgcggaccugaaguccacccaggccgccaucaaccagaucaacggcaagcucaaccggcugaucgagaagaccaacgagaaguuccaccagaucgagaaggaguucagcgagguggaggggcgcauccaggaccuggagaaguacgucgaggacaccaagaucgaccucugguccuacaacgccgagcugcugguggcccucgagaaccagcacacgaucgaccugaccgacagcgagaugaacaagcuguucgagcggacccgcaagcagcucaaggagaacgcggaggacaugggcaacggcugcuucaagaucuaccacaagugcgacaacgccugcaucggguccauccgcaacggcaccuacgaccacgacguguaccgggacgaggcccugaacaaccgcuuccagaucaagggggucgagcugaaguccggcuacaaggacuggauccucuggaucagcuucgccaucuccugcuuccugcugugcgugguccuccugggguucaucaugugggccugccagaagggcaacauccggugcaacaucugcaucuga

SEQ ID NO: 64187 - RNA, 1701 nt, Artificial Sequence
  derived and/or modified CDS sequence (opt1) from hemagglutinin__InfluenzaA__AAY44755
augaagaccaucaucgcccugagcuacauccucugccugguguucgcccagaagcugcccggcaacgacaacuccaccgcgacgcucugccuggggcaccacgccgucccgaacggcacccuggugaagaccaucaccaacgaccagaucgaggugacgaacgccaccgagcucguccagagcuccagcaccgggcgcaucugcgacagcccccaccagauccuggacggcgagaacugcacccugaucgacgcccuccugggggacccccacugcgacggcuuccagaacaaggagugggaccuguucguggagcggagcaaggccuacuccaacugcuaccccuacgacgugccggacuacgcgagccuccgcucccuggucgccagcuccggcacgcuggaguucaacaacgagagcuucaacuggaccgggguggcccagaacggcaccuccagcgccugcaagcggcgcuccaacaagagcuucuucucccggcucaacuggcugcaccagcugaaguacaaguaccccgcgcucaacgugaccaugcccaacaacgagaaguucgacaagcuguacaucuggggcguccaccaccccagcacggacuccgaccagaucagccuguacgcccaggccagcgggcgcgugaccguguccaccaagcgggggcagcagaccgucaucccgaacaucggcagccgccccugggugcggggcguguccagcaucaucuccaucuacuggacgaucgucaagcccggggacauccuccugaucaacagcaccggcaaccugaucgcgccccgcggguacuucaagauccgguccggcaagagcuccgugaugcgcagcgacgccuccaucggcaagugcaacagcgagugcaucaccccgaacggguccauccccaacgacaagcccuuccagaacgugaaccggaucaccuacggcgccugcccccgcuacgucaagcagaacacgcucaagcuggccaccgggaugcggaacgugccggagaagcagacccgcggcaucuucggggccaucgccggcuucaucgagaacggcugggaggggaugguggacggcugguacggguuccggcaccagaacagcgagggcaccgggcaggccgcggaccugaaguccacgcaggccgccaucaaccagaucaacggcaagcucaaccgccugaucgagaagaccaacgagaaguuccaccagaucgagaaggaguucagcgaggucgagggccggauccaggaccuggagaaguacguggaggacaccaagaucgaccucugguccuacaacgccgagcugcugguggcccucgagaaccagcacaccaucgaccugacggacagcgagaugaacaagcuguucgagcgcaccaagaagcagcuccgggagaacgcggaggacauggggaacggcugcuucaagaucuaccacaagugcgacaacgccugcaucggguccauccgcaacggcaccuacgaccacgacgucuaccgcgacgaggcccugaacaaccgguuccagaucaaggggguggagcugaaguccggcuacaaggacuggauccucuggaucagcuucgccaucuccugcuuccugcugugcgucgugcuccugggcuucaucaugugggccugccagaaggggaacauccgcugcaacaucugcaucuga

SEQ ID NO: 64188 - RNA, 1701 nt, Artificial Sequence
  derived and/or modified CDS sequence (opt1) from hemagglutinin__InfluenzaA__AAY44775
augaagaccaucaucgcccugagcuacauccucugccugguguucgcccagaagcugcccgucaacgacaacuccaccgcgacgcucugccugggccaccacgccgugccgaacgggacccuggugaagaccaucaccaacgaccacaucgaggucacgaacgccaccgagcucgugcagagcuccagcaccggccgcaucugcgacagcccccaccagauccuggacggggagaacugcacccugaucgacgcccuccugggcgacccccacugcgacggguuccaggacaaggagugggaccuguucguggagcggagcacggccuacuccaacugcuaccccuacgacgucccggacuacgcgagccuccgcucccugguggccagcuccggcacccuggaguucaacaacgagagcuucaacuggaccggcguggcccagaacgggaccuccagcgccugcaagcggcgcuccaucaagagcuucuucucccggcucaacuggcugcaccagcugaaguacaaguaccccgcgcucaacgucacgaugcccaacaacgagaaguucgacaagcuguacaucuggggcgugcaccaccccagcaccgacuccgaccagaucagccuguacgcccaggccagcgggcgcgugaccgucuccaccaagcggagccagcagacggugaucccgaacaucggcucccgccccugggugcgcggggucagcucccggaucagcaucuacuggaccaucgugaagcccggcgacauccuccugaucaacuccaccggcaaccugaucgcgccccggggguacuucaagauccgcagcggcaaguccagcaucaugcgguccaacgccccgaucgggaagugcaacagcgagugcaucacccccaacggcuccauccccaacgacaagcccuuccagaacgugaaccgcaucacguacggcgccugcccgcgguacgucaagcagaccacccucaagcuggccaccgggaugcgcaacgugcccgagaagcagacgcggggcaucuucggggccaucgccggcuucaucgagaacgggugggagggcaugguggacggcugguacggguuccgccaccagaacagcgagggcaccgggcaggccgcggaccugaaguccacccaggccgccaucaaccagaucaacggcaagcucaaccggcugaucgagaagaccaacgagaaguuccaccagaucgagaaggaguucagcgaggucgaggggcgcauccaggaccuggagaaguacguggaggacacgaagaucgaccucugguccuacaacgccgagcugcugguggcccucgagaaccagcacaccaucgaccugaccgacagcgagaugaacaagcuguucgagcggacccgcaagcagcuccgcgagaacgcggaggacaugggcaacggcugcuucaagaucuaccacaagugcgacaacgccugcaucggguccauccggaacggcacguacgaccacgacgucuaccgcgacgaggcccugaacaaccgguuccagaucaaggggguggagcugaaguccggcuacaaggacuggauccucuggaucagcuucgccaucuccugcuuccugcugugcgucgugcuccugggguucaucaugugggccugccagaagggcaacauccgcugcaacaucugcaucuga

SEQ ID NO: 64189 - RNA, 1701 nt, Artificial Sequence; identical to SEQ ID NO: 64096
  derived and/or modified CDS sequence (opt1) from hemagglutinin__InfluenzaA__AAY44785

SEQ ID NO: 64190 - RNA, 1701 nt, Artificial Sequence
  derived and/or modified CDS sequence (opt1) from hemagglutinin__InfluenzaA__AAY44795
augaagaccaucaucgcccugagcuacauccucugccugguguucgcccagaagcugcccgucaacgacaacuccaccgcgacgcucugccugggccaccacgccgugccgaacgggacccuggugaagaccaucaccaacgaccacaucgaggucacgaacgccaccgagcucgugcagagcuccagcaccggccgcaucugcgacuccacccaccagauccuggacggggagaacugcacgcugaucgacgcccuccugggcgacccccacugcgacggguuccagaacaaggagugggaccuguucguggagcggagcaccgccuacuccaacugcuaccccuacgacguccccgacuacgcgagccuccgcucccugguggccagcuccggcacccuggaguucaacaacgagagcuucaacuggaccggcguggcccagaacgggacguccagcgccugcaagcggcgcuccaucaagagcuucuucucccggcucaacuggcugcaccagcugaaguacaaguacccggcgcucaacgucaccaugcccaacaacgagaaguucgacaagcuguacaucuggggcgugcaccaccccagcaccgacuccgaccagaucagccuguacgcccaggccagcgggcgcgugaccgucuccacgaagcggagccagcagaccgugauccccaacaucggcucccgcccgugggugcgcggggucagcucccggaucagcaucuacuggaccaucgugaagcccggcgacauccuccugaucaacuccaccggcaaccugaucgcgccccggggguacuucaagauccgcagcggcaaguccagcaucaugcgguccaacgcccccaucgggaagugcaacagcgagugcaucacgccgaacggcuccauccccaacgacaagcccuuccagaacgugaaccgcaucaccuacggcgccugcccccgguacgucaagcagaacacccucaagcuggccaccgggaugcgcaacgugccggagaagcagacgcggggcaucuucggggccaucgccggcuucaucgagaacgggugggagggcaugguggacggcugguacggguuccgccaccagaacagcgagggcaccgggcaggccgcggaccugaaguccacccaggccgccaucaaccagaucaacggcaagcucaaccggcugaucgagaagaccaacgagaaguuccaccagaucgagaaggaguucagcgaggucgaggggcgcauccaggaccuggagaaguacguggaggacacgaagaucgaccucugguccuacaacgccgagcugcugguggcccucgagaaccagcacaccaucgaccugaccgacagcgagaugaacaagcuguucgagcggacccgcaagcagcuccgcgagaacgcggaggacaugggcaacggcugcuucaagaucuaccacaagugcgacaacgccugcaucggguccauccggaacggcacguacgaccacgacgucuaccgcgacgaggcccugaacaaccgguuccagaucaaggggguggagcucaagagcggcuacaaggacuggauccuguggaucagcuucgccaucuccugcuuccugcugugcgucgugcuccugggguucaucaugugggccugccagaagggcaacauccgcugcaacaucugcaucuga

SEQ ID NO: 64191 - RNA, 1701 nt, Artificial Sequence
  derived and/or modified CDS sequence (opt1) from hemagglutinin__InfluenzaA__AAY44796
augaagaccaucaucgcccugagcuacacccucugccugguguucgcccagaagcugcccggcaacgacaacuccacggcgacccucugccuggggcaccacgccgucccgaacggcaccaucgugaagaccaucacgaacgaccagaucgaggugaccaacgccaccgagcugguccagagcuccagcaccgggggcaucugcgacagcccccaccagauccucgacggggagaacugcacgcugaucgacgcccugcucggcgacccccagugcgacggcuuccagaacaagaagugggaccuguucguggagcgcagcaaggccuacuccaacugcuaccccuacgacgugccggacuacgcgagccugcggucccucgucgccagcuccgggacccuggaguucaacaacgagagcuucgacuggaccggcgugacccagaacgggacguccagcgccugcaagcgccgguccaacaagagcuucuucucccgccugaacuggcucacccaccugaaguacaaguaccccgcccugaacgugaccaugcccaacaacgagaaguucgacaagcucuacaucuggggcguccaccaccccgggaccgacagcgaccagaucucccuguacgcgcaggccagcggccggaucacggugagcaccaagcgcucccagcagaccgugaucccgaacaucggcagccggccccgcguccgggacguguccagccgcaucuccaucuacuggaccaucgugaagcccggggacauccugcucaucaacagcacgggcaaccugaucgcgccccggggguacuucaagauccgcuccggcaagagcuccaucaugcggagcgacgccccgaucggcaagugcaacuccgagugcaucacccccaacgggagcauccccaacgacaagcccuuccagaacgucaaccgcaucaccuacggcgccugcccgcgguacaucaagcagaacacccugaagcucgccacggggaugcgcaacgugcccgagaagcagacccggggcaucuucggggccaucgccggcuucaucgagaacggcugggaggggaugguggacggcugguacggguuccgccaccagaacuccgagggcaccgggcaggccgccgaccugaaguccacccaggcggccaucaaccagaucaacggcaagcugaaccggcucaucggcaagacgaacgagaaguuccaccagaucgagaaggaguucuccgaggucgaggggcgcauccaggaccuggagaaguacguggaggacaccaagaucgaccuguggagcuacaacgccgagcuccugguggcccuggagaaccagcacaccaucgaccucaccgacuccgagaugaacaagcuguucgagcggacgaagaagcagcugcgcgagaacgccgaggacaugggcaacgggugcuucaagaucuaccacaagugcgacaacgcgugcaucggcagcauccgcaacgggaccuacgaccacgacgucuaccgggacgaggcccucaacaaccgcuuccagaucaagggcguggagcugaaguccggcuacaaggacuggauccuguggaucagcuucgccaucagcugcuuccuccugugcguggcccugcucggguucaucaugugggccugccagaagggcaacauccggugcaacaucugcaucuga

SEQ ID NO: 64192 - RNA, 1701 nt, Artificial Sequence; identical to SEQ ID NO: 64071
  derived and/or modified CDS sequence (opt1) from hemagglutinin__InfluenzaA__AAY44896

SEQ ID NO: 64193 - RNA, 1701 nt, Artificial Sequence
  derived and/or modified CDS sequence (opt1) from hemagglutinin__InfluenzaA__AAY44906
augaagaccaucaucgcccugagcuacauccucugccugguguucgcccagaagcugcccggcaacgacaacuccaccgcgacgcucugccuggggcaccacgccgucccgaacggcaccaucgugaagaccaucaccaacgaccagaucgaggugacgaacgccaccgagcugguccagagcuccagcaccgggggcaucugcgacagcccccaccagauccucgacggggagaacugcacccugaucgacgcccugcucggcgacccccagugcgacggcuuccagaacaagaagugggaccuguucguggagcgcagcaaggccuacuccaacugcuaccccuacgacgugccggacuacgcgagccugcggucccucgucgccagcuccgggacgcuggaguucaacaacgagagcuucgacuggaccggcgugacccagaacgggaccuccagcgccugcaagcgccgguccaacaagagcuucuucucccgccugaacuggcucacgcaccugaaguacaaguaccccgcccugaacgugaccaugcccaacaacgagaaguucgacaagcucuacaucuggggcguccaccaccccgggaccgacagcgaccagaucucccuguacgcgcaggccagcggccggaucaccgugagcacgaagcgcucccagcagaccgugaucccgaacaucggcagccggccccgcguccgggacguguccagccgcaucuccaucuacuggaccaucgugaagcccggggacauccugcucaucaacagcaccggcaaccugaucgcgccccggggguacuucaagauccgcuccggcaagagcuccaucaugcggagcgacgccccgaucggcaagugcaacuccgagugcaucacgcccaacgggagcauccccaacgacaagcccuuccagaacgucaaccgcaucaccuacggcgccugcccgcgguacgugaagcagaacacccugaagcucgccaccgggaugcgcaacgugcccgagcggcagacgcgcggcaucuucggggccaucgccggcuucaucgagaacggcugggaggggauggucgacggcugguacggguuccggcaccagaacuccgagggcaccgggcaggccgccgaccugaaguccacccaggcggccaucaaccagaucaacggcaagcugaaccgccucaucggcaagaccaacgagaaguuccaccagaucgagaaggaguucuccgagguggaggggcggauccaggaccuggagaaguacguggaggacacgaagaucgaccuguggagcuacaacgccgagcuccuggucgcccuggagaaccagcacaccaucgaccucaccgacuccgagaugaacaagcuguucgagcgcaccaagaagcagcugcgcgagaacgccgaggacaugggcaacgggugcuucaagaucuaccacaagugcgacaacgcgugcaucggcagcauccggaacgggacguacgaccacgacguguaccgcgacgaggcccucaacaaccgguuccagaucaagggcguggagcugaaguccggcuacaaggacuggauccuguggaucagcuucgccaucagcugcuuccuccugugcgucgcccugcucggguucaucaugugggccugccagaagggcaacauccgcugcaacaucugcaucuga

SEQ ID NO: 64194 - RNA, 1701 nt, Artificial Sequence
  derived and/or modified CDS sequence (opt1) from hemagglutinin__InfluenzaA__AAY46371
augaagaccaucaucgcccugagcuacauccucugccugguguucgcccagaagcugcccggcaacgacaacuccaccgcgacgcucugccuggggcaccacgccgucccgaacggcacccuggugaagaccaucaccagcgaccagaucgaggugacgaacgccaccgagcucguccaguccagcuccaccgggcgcaucugcgacagcccccaccggauccuggacggcgagaacugcacccugaucgacgcccuccugggggacccccacugcgacggcuuccagaacaaggagugggaccuguucguggagcgcuccaaggccuacagcaacugcuaccccuacgacgugccggacuacgcgucccuccggagccuggucgccuccagcggcacgcuggaguucaacaacgaguccuucaacuggaccgggguggcccagaacggcaccagcuucgccugcaagcgccgguccaucaagagcuucuucucccgccucaacuggcugcaccagcugaaguacaaguaccccgcgcucaacgugaccaugcccaacaacgacaaguucgacaagcuguacaucuggggcguccaccaccccgggacggacagcgaccagaccucccuguacgcccaggccagcgggcgggugaccgugagcaccaagcgcucccagcagacggucaucccgaacaucggcagccggcccugggugcgcggcguguccagccggaucuccaucuacuggaccaucgucaagcccggggacauccuccugaucaacagcaccggcaaccugaucgcgccccgcggguacuucaagauccgguccggcaagagcuccaucaugcgcagcgacgccccgaucggcaagugcaacuccgagugcaucacccccaacgggagcauccccaacggcaagcccuuccagaacgugaaccggaucacguacggggccugcccgcgcuacgugaagcagaacacccucaagcuggccaccggcaugcggaacguccccgagaagcagacccgcgggaucuucggcgccaucgccggcuucaucgagaacgggugggagggcaugguggacgggugguacggcuuccggcaccagaacuccgaggggacgggccaggccgcggaccucaagagcacccaggccgccaucaaccagaucaacggcaagcugaaccgccugaucgagaagaccaacgagaaguuccaccagaucgagaaggaguucaccgagguggaggggcggauccaggaccuggagaaguacgucgaggacacgaagaucgaccucugguccuacaacgccgagcugcugguggcccucgagaaccagcacaccaucgaccugaccgacagcgagaugaacaagcuguucgagcgcacccgcaagcagcuccgggagaacgcggaggacaugggcaacgggugcuucaagaucuaccacaagugcgacaacgccugcaucggcuccauccgcaacgggacguacgaccacgacguguaccgggacgaggcccugaacaaccgcuuccagaucaagggcgucgagcucaagagcggcuacaaggacuggauccuguggaucuccuucgccaccagcugcuuccugcugugcgugguccuccugggguucaucaugugggccugccagaagggcaacauccggugcaacaucugcaucuga

SEQ ID NO: 64195 - RNA, 1701 nt, Artificial Sequence; identical to SEQ ID NO: 64056
  derived and/or modified CDS sequence (opt1) from hemagglutinin__InfluenzaA__AAY46381

SEQ ID NO: 64196 - RNA, 1701 nt, Artificial Sequence
  derived and/or modified CDS sequence (opt1) from hemagglutinin__InfluenzaA__AAY46391
augaagaccaucaucgcccugagcuacauccucugccugguguucgcccagaagcugcccgucaacgacaacuccaccgcgacgcucugccugggccaccacgccgugccgaacgggacccuggugaagaccaucaccaacgaccacaucgaggucacgaacgccaccgagcucgugcagagcuccagcaccggccgcaucugcgacagcccccaccagauccuggacggggagaacugcacccugaucgacgcccuccugggcgacccccacugcgacggguuccagaacaaggagugggaccuguucguggagcggagcacggccuacuccaacugcuaccccuacgacgucccggacuacgcgagccuccgcucccugguggccagcuccggcacccuggaguucaacaacgagagcuucaacuggaccggcguggcccagaacgggaccuccagcgccugcaagcggcgcuccaucaagagcuucuucucccggcucaacuggcugcaccagcugaaguacaaguaccccgcgcucaacgucacgaugcccaacaacgagaaguucgacaagcuguacaucuggggcgugcaccaccccagcaccgacuccgaccagaucagccuguacgcccaggccagcgggcgcgugaccgucuccaccaagcggagccagcagacggugaucccgaacaucggcucccgccccugggugcgcggggucagcuccaucaucagcaucuacuggaccaucgugaagcccggcgacauccuccugaucaacuccaccggcaaccugaucgcgccccggggguacuucaagauccggagcggcaaguccagcaucaugcgcuccaacgccccgaucgggaagugcaacagcgagugcaucacccccaacggcuccauccccaacgacaagcccuuccagaacgugaaccggaucacguacggcgccugcccgcgcuacgucaagcagaacacccucaagcuggccaccgggaugcggaacgugcccgagaagcagacccgcggcaucuucggggccaucgccggcuucaucgagaacgggugggagggcaugguggacggcugguacggguuccggcaccagaacagcgagggcacggggcaggccgcggaccugaaguccacccaggccgccaucaaccagaucaacggcaagcucaaccgccugaucgagaagaccaacgagaaguuccaccagaucgagaaggaguucagcgaggucgaggggcggauccaggaccuggagaaguacguggaggacaccaagaucgaccucugguccuacaacgccgagcugcugguggcccucgagaaccagcacacgaucgaccugaccgacagcgagaugaacaagcuguucgagcgcacccggaagcagcuccgcgagaacgcggaggacaugggcaacggcugcuucaagaucuaccacaagugcgacaacgccugcaucggguccauccgcaacggcaccuacgaccacgacgucuaccgggacgaggcccugaacaaccgcuuccagaucaaggggguggagcugaaguccggcuacaaggacuggauccucuggaucagcuucgccaucuccugcuuccugcugugcgucgugcuccugggguucaucaugugggccugccagaagggcaacauccggugcaacaucugcaucuga

SEQ ID NO: 64197 - RNA, 1701 nt, Artificial Sequence
  derived and/or modified CDS sequence (opt1) from hemagglutinin__InfluenzaA__AAY46426
augaagaccaucaucgcccugagcuacauccucugccugguguucgcccagaagcugcccggcaacgacaacuccaccgcgacgcucugccuggggcaccacgccgucccgaacggcacccuggugaagaccaucaccaacgaccagaucgaggugacgaacgccaccgagcucguccagagcuccagcaccgggcgcaucugcgacagcccccaccagauccuggacggcgagaacugcacccugaucgacgcccuccugggggacccccacugcgacggcuuccagaacaaggagugggaccuguucguggagcggagcaaggccuacuccaacugcuaccccuacgacgugccggacuacgcgagccuccgcucccuggucgccagcuccggcacgcuggaguucaacaacgagagcuucaacuggaccgggguggcccagaacggcaccuccagcgccugcaagcggcgcuccaacaagagcuucuucucccggcucaacuggcugcaccagcugaaguacaaguaccccgcgcucaacgugaccaugcccaacaacaagaaguucgacaagcuguacaucuggggcguccaccaccccagcacggacuccgaccagaucagccuguacgcccaggccagcgggcgcgugaccguguccaccaagcggagccagcagaccgucaucccgaacaucgggucccgccccugggugcggggcgugagcucccgcaucagcaucuacuggacgaucgucaagcccggcgacauccuccugaucaacuccaccgggaaccugaucgcgccccggggcuacuucaagauccgcagcgggaaguccagcaucaugcgguccgacgccccgaucggcaagugcaacagcgagugcaucacccccaacggcuccauccccaacgacaagcccuuccagaacgugaaccgcaucaccuacggggccugcccgcgguacgugaagcagaacacgcucaagcuggccaccggcaugcgcaacauccccgagaagcagacccgggggaucuucggcgccaucgccggguucaucgagaacggcugggagggcauggucgacgggugguacggcuuccgccaccagaacagcgaggggaccggccaggccgcggaccugaaguccacgcaggccgccaucaaccagaucaacgggaagcucaaccggcugaucgagaagaccaacgagaaguuccaccagaucgagaaggaguucagcgagguggagggccgcauccaggaccuggagaaguacguggaggacaccaagaucgaccucugguccuacaacgccgagcugcuggucgcccucgagaaccagcacaccaucgaccugacggacagcgagaugaacaagcuguucgagcggaccaagaagcagcuccgcgagaacgcggaggacaugggcaacgggugcuucaagaucuaccacaagugcgacaacgccugcaucggcuccauccgcaacgggaccuacgaccacgacguguaccgggacgaggcccugaacaaccgcuuccagaucaagggcguggagcugaaguccggguacaaggacuggauccucuggaucagcuucgccaucuccugcuuccugcugugcgucgugcuccugggcuucaucaugugggccugccagaagggcaacauccggugcaacaucugcaucuga

SEQ ID NO: 64198 - RNA, 1701 nt, Artificial Sequence
  derived and/or modified CDS sequence (opt1) from hemagglutinin__InfluenzaA__AAY47013
augaagaccaucaucgcccugagcuacauccucugccugguguucgcccagaagcugcccggcaacgacaacuccaccgcgacgcucugccuggggcaccacgccgucccgaacggcacccuggugaagaccaucaccaacgaccagaucgaggugacgaacgccaccgagcucguccagagcuccagcaccgggcgcaucugcgacagcccccaccagauccuggacggcgagaacugcacccugaucgacgcccuccugggggacccccacugcgacggcuuccagaacaaggagugggaccuguucguggagcggagcaaggccuacuccaacugcuaccccuacgacgugccggacuacgucagccuccgcucccugguggcgagcuccggcacgcuggaguucaacaacgagagcuucaacuggaccgggguggcccagaacggcaccuccagcgccugcaagcggcgcuccgacaagagcuucuucucccggcucaacuggcugcaccagcugaaguacaaguaccccgcccucaacgucaccaugcccaacaacgagaaguucgacaagcuguacaucuggggcgugcaccaccccgggacggacagcgaccagaucucccuguacgcgcaggccagcgggcgcgugaccgucagcaccaagcggucccagcagaccgugaucccgaacaucggcagcggccccugggugcgcggggucuccagccggaucuccaucuacuggacgaucgugaagcccggcgacauccuccugaucaacagcaccgggaaccugaucgcgccccgcggcuacuucaagauccgguccggcaagagcuccaucaugcgcagcgacgccccgaucgggaagugcaacuccgagugcaucacccccaacggcagcauccccaacgacaagcccuuccagaacgugaaccggaucaccuacgggccgugcccccgcuacgucaagcagaacacgcucaagcuggccaccggcaugcggaacgugcccgagaagcagacccgcgggaucuucggcgccaucgccggcuucaucgagaacgggugggagggcaugauggacgggugguacggcuuccggcaccagaacuccgaggggaccggccaggccgccgaccugaaguccacgcaggccgcgaucaaccagaucaacggcaagcucaaccgccugaucaagaagaccaacgagaaguuccaccagaucgagaaggaguucuccgagguggaggggcggauccaggaccuggagaaguacgucgaggacaccaagaucgaccucuggagcuacaacgccgagcugcugguggcccucgagaaccagcacaccaucgaccugacggacuccgagaugaacaagcuguucgagcgcaccaagaagcagcuccgggagaacgccgaggacaugggcaacgggugcuucaagaucuaccacaagugcgacaacgccugcaucggcagcauccgcaacgggaccuacgaccacgacguguaccgcgacgaggcgcugaacaaccgguuccagaucaagggcgucgagcugaaguccggcuacaaggacuggauccucuggaucagcuucgccaucagcugcuuccugcugugcaucgugcuccugggguucaucaugugggccugccagaagggcaacauccgcugcaacaucugcaucuga

SEQ ID NO: 64199 - RNA, 1701 nt, Artificial Sequence
  derived and/or modified CDS sequence (opt1) from hemagglutinin__InfluenzaA__AAY47023
augaagaccaucaucgcccugagcuacauccucugccugguguucgcccagaagcugcccggcaacgacaacuccaccgcgacgcucugccuggggcaccacgccgucccgaacggcacccuggugaagaccaucaccaacgaccagaucgaggugacgaacgccaccgagcucguccagagcuccagcaccucccgcaucugcgacagcccccaccagauccuggacggggagaacugcacccugaucgacgcccuccugggcgacccccacugcgacggguuccagaacaaggaguggggccuguucguggagcgguccaaggccuacagcaacugcuaccccuacgacgugccggacuacgucucccuccgcagccugguggcguccagcggcacgcuggaguucaacaacgaguccuucaacuggaccgggguggcccagaacggcaccagcuccgccugcaagcggcgcagcgacaaguccuucuucagccggcucaacuggcugcaccagcugaaguacaaguaccccgcccucaacgucaccaugcccaacaacgagaaguucgacaagcuguacaucuggggcgugcaccaccccgggacggacuccgaccagaucagccuguacgcgcaggccagcgggcgcgugaccgucuccaccaagcggagccagcagaccgugaucccgaacaucggcucccgccccugggugcggggcgucagcucccgcaucagcaucuacuggacgaucgugaagcccggggacauccuccugaucaacuccaccggcaaccugaucgcgccccggggguacuucaagauccgcagcggcaaguccagcaucaugcgguccgacgccccgaucggcaagugcaacagcgagugcaucacccccaacggguccauccccaacgacaagcccuuccagaacgugaaccgcaucaccuacggcgccugcccgcgguacgucaagcagaacacgcucaagcuggccaccgggaugcgcaacgugcccgagaagcaggcccggggcaucuucggggccaucgccggcuucaucgagaacggcugggaggggaugauggacggcugguacggguuccgccaccagaacagcgagggcaccgggcaggccgcggaccugaaguccacccaggccgccaucaaccagaucaacggcaagcucaaccggcugaucgagaagacgaacgagaaguuccaccagaucgagaaggaguucagcgagguggagggccgcauccaggaccuggagaaguacgucgaggacaccaagaucgaccucugguccuacaacgccgagcugcugguggcccucgagaaccagcacaccaucgaccugaccgacagcgagaugaacaagcuguucgagcggacgaagaagcagcuccgcgagaacgcggaggacauggggaacggcugcuucaagaucuaccacaagugcgacaacgccugcaucggguccauccgcaacggcaccuacgaccacgacguguaccgggacgaggcccugaacaaccgcuuccagaucaagggggucgagcucaagagcggcuacaaggacuggauccuguggaucagcuucgccaucuccugcuuccugcugugcaucgugcuccugggcuucaucaugugggccugccagaaggggaacauccggugcaacaucugcaucuga

SEQ ID NO: 64200 - RNA, 1701 nt, Artificial Sequence; identical to SEQ ID NO: 64196
  derived and/or modified CDS sequence (opt1) from hemagglutinin__InfluenzaA__AAY47052

SEQ ID NO: 64201 - RNA, 1701 nt, Artificial Sequence
  derived and/or modified CDS sequence (opt1) from hemagglutinin__InfluenzaA__AAY47075
augaagaccaucaucgcccugagcuacauccucugccugguguucgcccagaagcugcccggcaacgacaacuccauggcgacccucugccuggggcaccacgccgucccgaacggcacgcuggugaagaccaucaccaacgaccagaucgaggugaccaacgccacggagcucguccagagcuccagcaccgggcgcaucugcgacagcccccaccagauccuggacggcgagaacugcacccugaucgacgcccuccugggggacccccacugcgacggcuuccagaacaaggagugggaccuguucguggagcggagcaaggccuacuccaacugcuaccccuacgacgugccggacuacgucagccuccgcucccugguggcgagcuccggcacccuggaguucaacaacgagagcuucaacuggacggggguggcccagaacggcaccuccagcgccugcaagcggcgcuccaacaagagcuucuucucccggcucaacuggcugcaccagcugaagaacaaguaccccgcccucaacgucaccaugcccaacaacgagaaguucgacaagcuguacaucuggggcgugcaccaccccgggaccgacagcgaccagaucucccuguacgcgcaggccagcgggcgcgugacggucagcaccaagcggucccagcagaccgugaucccgaacaucggcagccgcccccgggugcgcgacaucuccagccggaucuccaucuacuggaccaucgucaagcccggcgacauccuccugaucaacagcacggggaaccugaucgcgccccgcggcuacuucaagauccgguccgggaaguccuccaucaugcgcagcgacgccccgaucggcaagugcaacuccgagugcaucacccccaacggcagcauccccaacgacaagcccuuccagaacgugaaccggaucaccuacggggccugcccgcgcuacgugaagcagaacacccucaagcuggccacgggcaugcggaacguccccgagaagcagacccgcgggaucuucggcgccaucgccggguucaucgagaacggcugggagggcaugauggacgggugguacggcuuccggcaccagaacuccgaggggaccggccaggccgccgaccucaagagcacccaggcggccaucaaccagaucaacgggaagcugaaccgccugaucgagaagacgaacgagaaguuccaccagaucgagaaggaguucuccgagguggagggccggauccaggaccuggagaaguacguggaggacaccaagaucgaccucuggagcuacaacgccgagcugcuggucgcccucgagaaccagcacaccaucgaccugaccgacuccgagaugaacaagcuguucgagcgcacgaagaagcagcuccgcgagaacgccgaggacaugggcaacgggugcuucaagaucuaccacaagugcgacaacgcgugcaucggcagcauccggaacgggaccuacgaccacgacguguaccgcgacgaggcccugaacaaccgguuccagaucaagggcguggagcugaaguccggguacaaggacuggauccucuggaucagcuucgccaucagcugcuuccugcugugcaucguccuccugggcuucaucaugugggccugccagaagggcaacauccgcugcaacaucugcaucuga

SEQ ID NO: 64202 - RNA, 1701 nt, Artificial Sequence
  derived and/or modified CDS sequence (opt1) from hemagglutinin__InfluenzaA__AAY47085
augaagaccaucaucgcccugagcuacauccucugccugguguucgcccagaagcugcccggcaacgacaacuccaccgcgacgcucugccuggggcaccacgccgucccgaacggcaccaucgugaagaccaucaccaacgaccagaucgaggugacgaacgccaccgagcugguccagagcuccagcaccgggggcaucugcgacagcccccaccagauccucgacggggagaacugcacccugaucgacgcccugcucggcgacccccagugcgacggcuuccagaacaagaagugggaccuguucguggagcgcagcaaggccuacuccaacugcuaccccuacgacgugccggacuacgcgagccugcggucccucgucgccagcuccgggacgcuggaguucaacaacgagagcuucaacuggaccggcgugacccagaacgggaccuccagcgccugcaagcgccgguccaacaagagcuucuucucccgccugaacuggcucacgcaccugaaguacaaguaccccgcccugaacgugaccaugcccaacaacgagaaguucgacaagcucuacaucuggggcguccaccaccccgggaccgacagcgaccagaucucccuguacgcgcaggccagcggccggaucaccgugagcacgaagcgcucccagcagaccgugaucccgaacgucggcagccggccccgcgugcgggacguguccagccgcaucuccaucuacuggaccaucgucaagcccggggacauccugcucaucaacagcaccggcaaccugaucgcgccccggggguacuucaagauccgcuccggcaagagcuccaucaugcggagcgacgccccgaucggcaagugcaacuccgagugcaucacgcccaacgggagcauccccaacgacaagcccuuccagaacgugaaccgcaucaccuacggcgccugcccgcgguacgugaagcagaacacccugaagcucgccaccgggaugcgcaacguccccgagaagcagacgcggggcaucuucggggccaucgccggcuucaucgagaacggcugggaggggaugguggacggcugguacggguuccgccaccagaacuccgagggcaccgggcaggccgccgaccugaaguccacccaggcggccaucaaccagaucaacggcaagcugaaccggcucaucggcaagaccaacgagaaguuccaccagaucgagaaggaguucuccgagguggaggggcgcauccaggaccuggagaaguacgucgaggacacgaagaucgaccuguggagcuacaacgccgagcuccugguggcccuggagaaccagcacaccaucgaccucaccgacuccgagaugaacaagcuguucgagcggaccaagaagcagcugcgcgagaacgccgaggacaugggcaacgggugcuucaagaucuaccacaagugcgacaacgcgugcaucgagagcauccgcaacggcacguacgaccacgacguguaccgggacgaggcccucaacaaccgcuuccagaucaagggggucgagcugaaguccggcuacaaggacuggauccuguggaucagcuucgccaucagcugcuuccuccugugcguggcccugcucggcuucaucaugugggccugccagaaggggaacauccggugcaacaucugcaucuga

SEQ ID NO: 64203 - RNA, 1701 nt, Artificial Sequence
  derived and/or modified CDS sequence (opt1) from hemagglutinin__InfluenzaA__AAY58320
augaagaccaucaucgcccugagcuacauccucugccugguguucgcccagaagcugcccggcaacgacaacuccaccgcgacgcucugccuggggcaccacgccgucccgaacggcaccaucgugaagaccaucaccaacgaccagaucgaggugacgaacgccaccgagcugguccagagcuccagcaccgggggcaucugcgacagcccccaccagauccucgacggggagaacugcacccugaucgacgcccugcucggcgacccccagugcgacggcuuccagaacaagaagugggaccuguucguggagcgcagcaaggccuacuccaacugcuaccccuacgacgugccggacuacgcgagccugcggucccucgucgccagcuccgggacgcuggaguucaacaacgagagcuucgacuggaccggcgugacccagaacgggaccuccagcgccugcaagcgccgguccaacaagagcuucuucucccgccugaacuggcucacgcaccugaaguacaaguaccccgcccugaacgugaccaugcccaacaacgagaaguucgacaagcucuacaucuggggcguccaccaccccgggaccgacagcgaccagaucucccuguacgcgcaggccagcggccggaucaccgugagcacgaagcgcucccagcagaccgugaucccgaacaucggcagccggccccgcguccgggacaucuccagccgcaucuccaucuacuggaccaucgugaagcccggggacauccugcucaucaacagcaccggcaaccugaucgcgccccggggguacuucaagauccgcuccggcaagagcuccaucaugcggagcgacgccccgaucggcaagugcaacuccgagugcaucacgcccaacgggagcauccccaacgacaagcccuuccagaacgugaaccgcaucaccuacggcgccugcccgcgguacgucaagcagaacacccugaagcucgccaccgggaugcgcaacgugcccgagaagcagacgcggggcaucuucggggccaucgccggcuucaucgagaacggcugggaggggaugguggacggcugguacggguuccgccaccagaacuccgagggcaccgggcaggccgccgaccugaaguccacccaggcggccaucaaccagaucaacggcaagcugaaccggcucaucggcaagaccaacgagaaguuccaccagaucgagaaggaguucuccgaggucgaggggcgcauccaggaccuggagaaguacguggaggacacgaagaucgaccuguggagcuacaacgccgagcuccugguggcccuggagaaccagcacaccaucgaccucaccgacuccgagaugaacaagcuguucgagcggaccaagaagcagcugcgcgagaacgccgaggacaugggcaacgggugcuucaagaucuaccacaagugcgacaacgcgugcaucggcagcauccgcaacgggacguacgaccacgacgucuaccgggacgaggcccucaacaaccgcuuccagaucaagggcguggagcugaaguccggcuacaaggacuggauccuguggaucagcuucgccaucagcugcuuccuccugugcguggcccugcucggguucaucaugugggccugccagaagggcaacauccggugcaacaucugcaucuga

SEQ ID NO: 64204 - RNA, 1701 nt, Artificial Sequence
  derived and/or modified CDS sequence (opt1) from hemagglutinin__InfluenzaA__AAY59035
augaagaccaucaucgcccugagcuacauccucugccugguguucgcccagaagcugaccgucaacgacaacuccacggcgacccucugccugggccaccacgccgugcccaacgggacccuggugaagaccaucacgaacgaccacaucgaggucaccaacgccaccgagcucgugcagagcuccagcaccggccgcaucugcgacuccccgcaccagauccuggacggggagaacugcacgcugaucgacgcccuccugggcgacccccacugcgacggguuccagaacaaggagugggaccuguucguggagcggagcaccgccuacuccaacugcuaccccuacgacguccccgacuacgcgagccuccgcucccugguggccagcuccggcacccuggaguucaacaacgagagcuucaacuggaccggcguggcccagaacgggacguccagcgccugcaagcggcgcuccaucaagagcuucuucucccggcucaacuggcugcaccagcugaaguacaaguacccggcgcucaacgucaccaugcccaacaacgagaaguucgacaagcuguacaucuggggcgugcaccaccccagcaccgacuccgaccagaucagccuguacgcccaggccagcgggcgcgugaccgucuccacgaagcggagccagcagaccgugauccccaacaucggcucccgcccgugggugcgcggggucagcucccggaucagcaucuacuggaccaucgugaagcccggcgacauccuccugaucaacuccaccggcaaccugaucgcgccccggggguacuucaagauccgcagcggcaaguccagcaucaugcgguccaacgcccccaucgggaagugcaacagcgagugcaucacgccgaacggcuccauccccaacgacaagcccuuccagaacgugaaccgcaucaccuacggcgccugcccccgguacgucaagcagaacacccucaagcuggccaccgggaugcgcaacgugccggagaagcagacgcggggcaucuucggggccaucgccggcuucaucgagaacgggugggagggcaugguggacggcugguacggguuccgccaccagaacagcgagggcaccgggcaggccgcggaccugaaguccacccaggccgccaucaaccagaucaacggcaagcucaaccggcugaucgagaagaccaacgagaaguuccaccagaucgagaaggaguucagcgaggucgaggggcgcauccaggaccuggagaaguacguggaggacacgaagaucgaccucugguccuacaacgccgagcugcugguggcccucgagaaccagcacaccaucgaccugaccgacagcgagaugaacaagcuguucgagcggacccgcaagcagcuccgcgagaacgcggaggacaugggcaacggcugcuucaagaucuaccacaagugcgacaacgccugcaucggguccauccggaacggcacguacgaccacgacgucuaccgcgacgaggcccugaacaaccgguuccagaucaaggggguggagcucaagagcggcuacaaggacuggauccuguggaucagcuucgccaucuccugcuuccugcugugcgucgugcuccugggguucaucaugugggccugccagaagggcaacauccgcugcaacaucugcaucuga

SEQ ID NO: 64205 - RNA, 1701 nt, Artificial Sequence
  derived and/or modified CDS sequence (opt1) from hemagglutinin__InfluenzaA__AAY64202
augaagaccaucaucgcccugagcuacauccucugccugguguucgcccagaagcugcccggcaacgacaacuccaccgcgacgcucugccuggggcaccacgccgucccgaacggcaccaucgugaagaccaucaccaacgaccagaucgaggugacgaacgccaccgagcugguccagagcuccagcaccgggggcaucugcgacagcccccaccagauccucgacggggagaacugcacccugaucgacgcccugcucggcgacccccagugcgacggcuuccagaacaagaagugggaccuguucguggagcgcagcaaggccuacuccaacugcuaccccuacgacgugccggacuacgcgagccugcggucccucgucgccagcuccgggacgcuggaguucaacaacgagagcuucaacuggaccggcgugacccagaacgggaccuccagcgccugcgagcgccgguccaacaagagcuucuucucccgccugaacuggcucacgcaccugaaguacaaguaccccgcccugaacgugaccaugcccaacaacgagaaguucgacaagcucuacaucuggggcguccaccaccccgggaccgacagcgaccagaucucccuguacgcgcaggccagcggccggaucaccgugagcacgaagcgcucccagcagaccgugaucccgaacaucggcagccggccccgcguccgggacguguccagccgcaucuccaucuacuggaccaucgugaagcccggggacauccugcucaucaacagcaccggcaaccugaucgcgccccggggguacuucaagauccgcuccggcaagagcuccaucaugcggagcgacgccccgaucggcaagugcaacuccgagugcaucacgcccaacgggagcauccccaacgacaagcccuuccagaacgucaaccgcaucaccuacggcgccugcccgcgguacgugaagcagaacacccugaagcucgccaccgggaugcgcaacgugcccgagaagcagaaccggggcaucuucggggccaucgccggcuucaucgagaacggcugggaggggauggucgacggcugguacggguuccgccaccagaacuccgagggcacggggcaggccgccgaccugaaguccacccaggcggccaucaaccagaucaacggcaagcugaaccggcucaucggcaagaccaacgagaaguuccaccagaucgagaaggaguucuccgagguggaggggcgcauccaggaccuggagaaguacguggaggacaccaagaucgaccuguggagcuacaacgccgagcuccuggucgcccuggagaaccagcacacgaucgaccucaccgacuccgagaugaacaagcuguucgagcggaccaagaagcagcugcgcgagaacgccgaggacaugggcaacgggugcuucaagaucuaccacaagugcgacaacgcgugcaucggcagcauccgcaacgggaccuacgaccacgacguguaccgggacgaggcccucaacaaccgcuuccagaucaagggcguggagcugaaguccggcuacaaggacuggauccuguggaucagcuucgccaucagcugcuuccuccugugcgucgcccugcucggguucaucaugugggccugccagaagggcaacauccggugcgacaucugcaucuga

SEQ ID NO: 64206 - RNA, 1701 nt, Artificial Sequence
  derived and/or modified CDS sequence (opt1) from hemagglutinin__InfluenzaA__AAY64212
augaagaccaucaucgcccugagcuacauccucugccugguguucgcccagaagauccccgucaacgacaacuccaccgcgacgcugugccucggccaccacgccgugccgaacgggacccuggugaagaccaucaccaacgagcacaucgaggucacgaacgccaccgagcuggugcagagcuccagcaccggccgcaucugcgacagcccccaccagauccucgacggggagaacugcacccugaucgacgcccugcucggcgacccccacugcgacggguuccagaacaaggagugggaccuguucguggagcggagcacggccuacuccaacugcuaccccuacgacgucccggacuacgcgagccugcgcucccucguggccagcuccggcacccuggaguucaacaacgagagcuucaacuggaccggcguggcccagaacgggaccuccagcgccugcaagcggcgcuccaucaagagcuucuucucccggcugaacuggcuccaccagcugaaguacaaguaccccgcgcugaacgucacgaugcccaacaacgagaaguucgacaagcucuacaucuggggcgugcaccaccccagcaccgacuccgaccagaucagccuguacgcccaggccagcgggcgcgugaccgucuccaccaagcggagccagcagacggugaucccgaacaucggcucccgccccugggugcgcggggucagcucccggaucagcaucuacuggaccaucgugaagcccggcgacauccugcucaucaacuccaccggcaaccugaucgcgccccggggguacuucaagauccgcagcggcaaguccagcaucaugcgguccaacgcccugaucgggaagugcaacagcgagugcaucaccccgaacggcuccauccccaacgacaagcccuuccagaacgugaaccgcaucacguacggcgccugcccccgguacgucaagcagaacacccucaagcuggccaccgggaugcgcaacgugccggagaagcagacccggggcaucuucggggccaucgccggcuucaucgagaacgggugggagggcaugguggacggcugguacggguuccgccaccagaacagcgagggcacggggcaggccgcggaccugaaguccacccaggccgccaucaaccagaucaacggcaagcucaaccggcugaucgagaagaccaacgagaaguuccaccagaucgagaaggaguucagcgaggucgaggggcgcauccaggaccuggagaaguacguggaggacaccaagaucgaccucugguccuacaacgccgagcugcugguggcccucgagaaccagcacacgaucgaccugaccgacagcgagaugaacaagcuguucgagcggacccgcaagcagcuccgcgagaacgcggaggacaugggcaacggcugcuucaagaucuaccacaagugcgacaacgccugcaucggguccauccggaacggcaccuacgaccacgacgucuaccgcgacgaggcccugaacaaccgguuccagaucaaggggguggagcugaaguccggcuacaaggacuggauccucuggaucagcuucgccaucuccugcuuccugcugugcgucgugcuccugggguucaucaugugggccugccagaagggcaacauccgcugcaacaucugcaucuga

SEQ ID NO: 64207 - RNA, 1701 nt, Artificial Sequence
  derived and/or modified CDS sequence (opt1) from hemagglutinin__InfluenzaA__AAY64222
augaagaccaucaucgcccugagcuacauccucugccugguguucgcccagaagcugcccggcaacgacaacuccaccgcgacgcucugccuggggcaccacgccgucccgaacggcacccuggugaagaccaucaccaacgaccagaucgaggugacgaacgccaccgagcucguccagagcuccagcaucgggcgcaucugcgacagcccccaccagauccuggacggcgagaacugcacccugaucgacgcccuccugggggacccccacugcgacggcuuccagaacaaggagugggaccuguucguggagcggagcaaggccuacuccaacugcuaccccuacgacgugccggacuacgucagccuccgcucccugguggcgagcuccggcacccuggaguucaacaacgagagcuucaacuggacggggguggcccagaacggcaccuccagcuccugcaagcggcgcagcgacaaguccuucuucagccggcucaacuggcugcaccagcugaaguacaaguaccccgcccucaacgucaccaugcccaacaacgagaaguucgacaagcuguacaucuggggcgugcaccaccccgggaccgacuccgaccagaucagccuguacgcccaggcgagcgggcgcgugacggucuccaccaagcggagccagcagaccgugaucccgaacaucggcucccgccccugggugcggggcgucagcucccgcaucagcaucuacuggaccaucgugaagcccggggacauccuccugaucaacuccacgggcaaccugaucgcgccccggggguacuucaagauccgcagcggcaaguccagcaucaugcgguccgacgccccgaucggcaagugcaacagcgagugcaucacccccaacggguccauccccaacgacaagcccuuccagaacgugaaccgcaucaccuacggcccgugcccccgguacgucaagcagaacacccucaagcuggccacggggaugcgcaacgugcccgagaagcagacccggggcaucuucggggccaucgccggcuucaucgagaacggcugggaggggaugauggacggcugguacggguuccgccaccagaacagcgagggcaccgggcaggccgccgaccugaaguccacccaggccgccaucaaccagaucaacggcaagcucaaccggcugaucgagaagacgaacgagaaguuccaccagaucgagaaggaguucagcgagguggagggccgcauccaggaccuggagaaguacgucgaggacaccaagaucgaccucugguccuacaacgcggagcugcugguggcccucgagaaccagcacaccaucgaccugaccgacagcgagaugaacaagcuguucgagaagacgaagaagcagcuccgggagaacgccgaggacauggggaacggcugcuucaagaucuaccacaagugcgacaacgccugcaucggguccauccgcaacggcaccuacgaccacgacguguaccgcgacgaggcccugaacaaccgguuccagaucaagggggucgagcugaaguccggcuacaaggacuggauccucuggaucagcuucgcgaucuccugcuuccugcugugcaucgugcuccugggcuucaucaugugggccugccagaaggggaacauccgcugcaacaucugcaucuga

SEQ ID NO: 64208 - RNA, 1701 nt, Artificial Sequence
  derived and/or modified CDS sequence (opt1) from hemagglutinin__InfluenzaA__AAY64262
augaagaccaucaucgcccugagcuacauccucugccugguguucgcccagaagcugcccggcaacgacaacuccaccgcgacgcucugccuggggcaccacgccgucccgaacggcacccuggugaagaccaucaccaacgaccagaucgaggugacgaacgccaccgagcucguccagagcuccagcaccgggcgcaucugcgacagcccccaccagauccuggacggcgagaacugcacccugaucgacgcccuccugggggacccccacugcgacggcuuccagaacaaggagugggaccuguucguggagcggagcaaggccuacuccaacugcuaccccuacgacgugccggacuacgcgagccuccgcucccuggucgccagcuccggcacgcuggaguucaacaacgagagcuucaacuggaccgggguggcccagaacggcaccuccagcgccugcaagcggcgcuccaacaagagcuucuucucccggcucaacuggcugcaccagcugaaguacaaguaccccgcgcucaacgugaccaugcccaacaacgagaaguucgacaagcuguacaucuggggcguccaccaccccagcacggacuccgaccagaucagccuguacgcccaggccagcgggcgcgugaccguguccaccaagcggagccagcagaccgucaucccgaacaucgggucccgccccugggugcggggcgugagcucccgcaucagcaucuacuggacgaucgucaagcccggcgacauccuccugaucaacuccaccgggaaccugaucgcgccccggggcuacuucaagauccgcagcgggaaguccagcaucaugcgguccgacgccccgaucggcaagugcaacagcgagugcaucacccccaacggcuccauccccaacgacaagcccuuccagaacgugaaccgcaucaccuacggggccugcccgcgguacgugaagcagaacacgcucaagcuggccaccggcaugcgcaacguccccgagaagcagacccgggggaucuucggcgccaucgccggguucaucgagaacggcugggagggcaugguggacgggugguacggcuuccgccaccagaacagcgaggggaccggccaggccgcggaccugaaguccacgcaggccgccaucaaccagaucaacgggaagcucaaccggcugaucgagaagaccaacgagaaguuccaccagaucgagaaggaguucagcgagguggagggccgcauccaggaccuggagaaguacgucgaggacaccaagaucgaccucugguccuacaacgccgagcugcugguggcccucgagaaccagcacaccaucgaccugacggacagcgagaugaacaagcuguucgagcggaccaagaagcagcuccgcgagaacgcggaggacaugggcaacgggugcuucaagaucuaccacaagugcgacaacgccugcaugggcuccauccgcaacgggaccuacgaccacgacguguaccgggacgaggcccugaacaaccgcuuccagaucaagggcgucgagcugaaguccggguacaaggacuggauccucuggaucagcuucgccaucuccugcuuccugcugugcgugguccuccugggcuucaucaugugggccugccagaagggcaacauccggugcaacaucugcaucuga

SEQ ID NO: 64209 - RNA, 1701 nt, Artificial Sequence
  derived and/or modified CDS sequence (opt1) from hemagglutinin__InfluenzaA__AAY64272
augaagaccaucaucgcccugagcuacauccucugccugguguucgcccagaagcugcccggcaacgacaacuccaccgcgacgcucugccuggggcaccacgccgucccgaacggcaccaucgugaagaccaucaccaacgaccagaucgaggugacgaacgccaccgagcugguccagagcuccagcaccgggggcaucugcgacagcccccaccagauccucgacggggagaacugcacccugaucgacgcccugcucggcgacccccagugcgacggcuuccagaacaagaagugggaccuguucguggagcgcagcaaggccuacuccaacugcuaccccuacgacgugccggacuacgcgagccugcggucccucgucgccagcuccgggacgcuggaguucaacaacgagagcuucaacuggaccggcgugacccagaacgggaccuccagcgccugcaagcgccgguccaacaagagcuucuucucccgccugaacuggcucacgcaccugaaguacaaguaccccgcccugaacgugaccaugcccaacaacgagaaguucgacaagcucuacaucuggggcguccaccaccccgggaccgacagcgaccagaucucccuguacgcgcaggccagcggccggaucaccgugagcacgaagcgcucccagcagaccgugaucccgaacaucggcagccggccccgcguccgggacguguccagccgcaucuccaucuacuggaccaucgugaagcccggggacauccugcucaucaacagcaccggcaaccugaucgcgccccggggguacuucaagauccgcuccggcaagagcuccaucaugcggagcgacgccccgaucggcaagugcaacuccgagugcaucacgcccaacgggagcauccccaacgacaagcccuuccagaacgucaaccgcaucaccuacggcgccugcccgcgguacgugaagcagaacacccugaagcucgccaccgggaugcgcaacgugcccgagaagcagacgcggggcaucuucggggccaucgccggcuucaucgagaacggcugggaggggauggucgacggcugguacggguuccgccaccagaacuccgagggcaccgggcaggccgccgaccugaaguccacccaggcggccaucaaccagaucaacggcaagcugaaccggcucaucggcaagaccaacgagaaguuccaccagaucgagaaggaguucuccgagguggaggggcgcauccaggaccuggagaaguacguggaggacacgaagaucgaccuguggagcuacaacgccgagcuccuggucgcccuggagaaccagcacaccaucgaccucaccgacuccgagaugaacaagcuguucgagcggaccaagaagcagcugcgcgagaacgccgaggacaugggcaacgggugcuucaagaucuaccacaagugcgacaacgcgugcaucgagagcauccgcaacggcacguacgaccacgacguguaccgggacgaggcccucaacaaccgcuuccagaucaaggggguggagcugaaguccggcuacaaggacuggauccuguggaucagcuucgccaucagcugcuuccuccugugcgucgcccugcucggcuucaucaugugggccugccagaaggggaacauccggugcaacaucugcaucuga

SEQ ID NO: 64210 - RNA, 1701 nt, Artificial Sequence
  derived and/or modified CDS sequence (opt1) from hemagglutinin__InfluenzaA__AAY64282
augaagaccaucaucgcccugagcuacauccucugccugguguucgcccagaagcugcccggcaacgacaacuccaccgcgacgcucugccuggggcaccacgccgucccgaacggcacccuggugaagaccaucaccaacgaccagaucgaggugacgaacgccaccgagcucguccagagcuccagcaccgggcgcaucugcgacagcccccaccagauccuggacggcgagaacugcacccugaucgacgcccuccugggggacccccacugcgacggcuuccagaacaaggagugggaccuguucguggagcggagcaaggccuacuccaacugcuaccccuacgacgugccggacuacgcgagccuccgcucccuggucgccagcuccggcacgcuggaguucaacaacgagagcuucaacuggaccgggguggcccagaacggcaccuccagcgccugcaagcggcgcuccaacaagagcuucuucucccggcucaacuggcugcaccagcugaaguacaaguaccccgcgcucaacgugaccaugcccaacaacgagaaguucgacaagcuguacaucuggggcguccaccaccccagcacggacuccgaccagaucagccuguacgcccaggccagcgggcgcgugaccguguccaccaagcggagccagcagaccgucaucccgaacaucgggucccgccccugggugcggggcgugagcucccgcaucagcaucuacuggacgaucgucaagcccggcgacauccuccugaucaacuccaccgggaaccugaucgcgccccggggcuacuucaagauccgcagcgggaaguccagcaucaugcgguccgacgccccgaucggcaagugcaacagcgagugcaucacccccaacggcuccauccccaacgacaagcccuuccagaacgugaaccgcaucaccuacggggccugcccgcgguacgugaagcagaacacgcucaagcuggccaccggcaugcgcaacguccccgagaagcagacccgggggaucuucggcgccaucgccggguucaucgagaacggcugggagggcaugguggacgggugguacggcuuccgccaccagaacagcgaggggaccggccaggccgcggaccugaaguccacgcaggccgccaucaaccagaucaacgggaagcucaaccggcugaucgagaagaccaacgagaaguuccaccagaucgagaaggaguucagcgagguggagggccgcauccaggaccuggagaaguacgucgaggacaccaagaucgaccucugguccuacaacgccgagcugcugguggcccucgagaaccagcacaccaucgaccugacggacagcgagaugaacaagcuguucgagcggaccaagaagcagcuccgcgagaacgcggaggacaugggcaacgggugcuucaagaucuaccacaagugcgacaacgccugcaucggcuccauccgcaacgggaccuacgaccacgacguguaccgggacgaggcccugaacaaccgcuuccagaucaagggcgucgagcugaaguccggguacaaggacuggauccucuggaucagcuucgccaucuccugcuuccugcugugcgugguccuccugggcuucaucaugugggccugccagaagggcaacauccggugcaacaucugcaucuga

SEQ ID NO: 64211 - RNA, 1701 nt, Artificial Sequence
  derived and/or modified CDS sequence (opt1) from hemagglutinin__InfluenzaA__AAY64292
augaagaccaucaucgcccugagcuacauccucugccugguguucgcccagaagcugcccggcaacgacaacuccaccgcgacgcucugccuggggcaccacgccgucccgaacggcacccuggugaagaccaucaccaacgaccagaucgaggugacgaacgccaccgagcucguccagagcuccagcaccgacaagaucugcgacagcccccaccagauccuggacgggggcaacugcacccugaucgacgcccuccugggggacccccacugcgacggcuuccagaacaaggagugggaccuguucguggagcgcagcaaggccuacuccaacugcuaccccuacgacgugccggacuacgucagccuccggucccugguggcgagcuccggcacgcuggaguucaacaacgagagcuucaacuggaccgggguggcccagaacggcaccuccagcgccugcaagcgccgguccgacaagagcuucuucucccgccucaacuggcugcaccagcugaagaacaaguaccccgcccucaacgucaccaugcccaacaacgagaaguucgacaagcuguacaucuggggcgugcaccaccccgggacggacagcgaccagaucucccuguacgcgcaggccagcgggcgggugaccgucagcaccaagcgcucccagcagaccgugaucccgaacaucggcagccggccccgcgugcgggacaucuccagccgcaucuccaucuacuggacgaucgucaagcccggcgacauccuccugaucaacagcaccgggaaccugaucgcgccccggggcuacuucaagauccgcuccgggaaguccuccaucaugcggagcgacgccccgaucggcaagugcaacuccgagugcaucacccccaacggcagcauccccaacgacaagcccuuccagaacgugaaccgcaucaccuacggggccugcccgcgguacgugaagcagaacacgcucaagcuggccaccggcaugcgcaacguccccgagaagcagacccgggggaucuucggcgccaucgccggguucaucgagaacggcugggagggcaugguggacgggugguacggcuuccgccaccagaacuccgaggggaccggccaggccgccgaccucaagagcacgcaggcggccaucaaccagaucaacgggaagcugaaccggcugaucgagaagaccaacgagaaguuccaccagaucgagaaggaguucuccgagguggagggccgcauccaggaccuggagaaguacgucgaggacaccaagaucgaccucuggagcuacaacgccgagcugcugguggcccucgagaaccagcacaccaucgaccugacggacuccgagaugaacaagcuguucgagcggaccaagaagcagcuccgcgagaacgccgaggacaugggcaacgggugcuucaagaucuaccacaagugcgacaacgcgugcaucggcagcauccgcaacgggaccuacgaccacgacguguaccgggacgaggcccugaacaaccgcuuccagaucaagggcgucgagcugaaguccggguacaaggacuggauccucuggaucagcuucgccaucagcugcuuccugcugugcaucgugcuccugggcuucaucaugugggccugccagaagggcaacauccggugcaacaucugcaucuga

SEQ ID NO: 64212 - RNA, 1701 nt, Artificial Sequence
  derived and/or modified CDS sequence (opt1) from hemagglutinin__InfluenzaA__AAY64302
augaagaccaucaucgcccugagcuacauccucugccugguguucgcccagaagcugcccggcaacgacaacuccaccgcgacgcucugccuggggcaccacgccgucccgaacggcacccuggugaagaccaucaccagcgaccagaucgaggugacgaacgccaccgagcucguccaguccagcuccaccgggcgcaucugcgacagcccccaccggauccuggacggcgagaacugcacccugaucgacgcccuccugggggacccccacugcgacggcuuccagaacaaggagugggaccuguucguggagcgcuccaaggccuacagcaacugcuaccccuacgacgugccggacuacgcgucccuccggagccuggucgccuccagcggcacgcuggaguucaacaacgaguccuucaacuggaccgggguggcccagaacggcaccagcuucgccugcaagcgccgguccaucaagagcuucuucucccgccucaacuggcugcaccagcugaaguacaaguaccccgcgcucaacgugaccaugcccaacaacgacaaguucgacaagcuguacaucuggggcguccaccaccccagcacggacuccgaccagaccagccuguacgcccaggccagcgggcgggugaccguguccaccaagcgcagccagcagacggucaucccgaacaucgggucccggcccugggugcgcggcgugagcucccggaucagcaucuacuggaccaucgucaagcccggcgacauccuccugaucaacuccaccgggaaccugaucgcgccccgcggcuacuucaagauccggagcgggaaguccagcaucaugaaguccgacgccccgaucggcaagugcaacagcgagugcaucacccccaacggcuccauccccaacgacaagcccuuccagaacgugaaccgcaucacguacggggccugcccgcgguacgugaagcagaacacccucaagcuggccaccggcaugcgcaacguccccgagaagcagacccgggggaucuucggcgccaucgccggguucaucgagaacggcugggagggcaugguggacgggugguacggcuuccgccaccagaacagcgaggggacgggccaggccgcggaccugaaguccacccaggccgccaucaaccagaucaacgggaagcucaaccggcugaucgagaagaccaacgagaaguuccaccagaucgagaaggaguucaccgagguggagggccgcauccaggaccuggagaaguacgucgaggacacgaagaucgaccucuggagcuacaacgccgagcugcugguggcccucgagaaccagcacaccaucgaccugaccgacuccgagaugaacaagcuguucgagcggacccgcaagcagcuccgcgagaacgcggaggacaugggcaacgggugcuucaagaucuaccacaagugcgacaacgugugcaucggcagcauccggaacgggacguacgaccacgacgucuaccgcgacgaggcccugaacaaccgguuccagaucaagggcguggagcugaaguccggguacaaggacuggauccucuggaucagcuucgccaccagcugcuuccugcugugcgucgugcuccugggcuucaucaugugggccugccagaagggcaacauccgcugcaacaucugcaucuga

SEQ ID NO: 64213 - RNA, 1701 nt, Artificial Sequence; identical to SEQ ID NO: 64207
  derived and/or modified CDS sequence (opt1) from hemagglutinin__InfluenzaA__AAY64312

SEQ ID NO: 64214 - RNA, 1701 nt, Artificial Sequence; identical to SEQ ID NO: 64210
  derived and/or modified CDS sequence (opt1) from hemagglutinin__InfluenzaA__AAY64322

SEQ ID NO: 64215 - RNA, 1701 nt, Artificial Sequence
  derived and/or modified CDS sequence (opt1) from hemagglutinin__InfluenzaA__AAY64332
augaagaccaucaucgcccugagcuacauccucugccugguguucacccagaagcugcccggcaacgacaacuccacggccacccucugccuggggcaccacgcggucccgaacggcaccaucgugaagaccaucacgaacgaccagaucgaggugaccaacgccaccgagcugguccagagcuccagcaccgggggcaucugcgacagcccccaccagauccucgacggggagaacugcacgcugaucgacgcccugcucggcgacccccagugcgacggcuuccagaacaagaagugggaccuguucguggagcgcagcaaggccuacuccaacugcuaccccuacgacgugccggacuacgccagccugcggucccucgucgcgagcuccgggacccuggaguucaacaacgagagcuucgacuggaccggcgugacccagaacgggacguccagcgccugcaagcgccgguccaacaagagcuucuucucccgccugaacuggcucacccaccugaaguucaaguaccccgcccugaacgugaccaugcccaacaacgagaaguucgacaagcucuacaucuggggcguccaccaccccgggaccgacagcgaccagaucucccuguacgcccaggcgagcggccggaucacggugagcaccaagcgcucccagcagaccgugaucccgaacaucggcagccggccccgcguccgggacguguccagccgcaucuccaucuacuggaccaucgugaagcccggggacauccugcucaucaacagcacgggcaaccugaucgcgccccggggguacuucaagauccgcuccggcaagagcuccaucaugcggagcgacgccccgaucggcaagugcaacuccgagugcaucacccccaacgggagcauccccaacgacaagcccuuccagaacgucaaccgcaucaccuacggcgccugcccgcgguacgugaagcagaacacccugaagcucgccacggggaugcgcaacgugcccgagaagcagacccggggcaucuucggggccaucgccggcuucaucgagaacggcugggaggggauggucgacggcugguacggguuccgccaccagaacuccgagggcaccgggcaggccgccgaccugaaguccacccaggccgcgaucaaccagaucaacggcaagcugaaccggcucaucggcaagacgaacgagaaguuccaccagaucgagaaggaguucuccgagguggaggggcgcauccaggaccuggagaaguacguggaggacaccaagaucgaccuguggagcuacaacgccgagcuccuggucgcccuggagaaccagcacaccaucgaccucaccgacuccgagaugaacaagcuguucgagcggacgaagaagcagcugcgcgagaacgccgaggacaugggcaacgggugcuucaagaucuaccacaagugcgacaacgccugcaucggcagcauccgcaacgggaccuacgaccacgacguguaccgggacgaggcgcucaacaaccgcuuccagaucaagggcguggagcugaaguccggcuacaaggacuggauccuguggaucagcuucgccaucagcugcuuccuccugugcgucgcccugcucggguucaucaugugggccugccagaagggcaacauccggugcgacaucugcaucuga

SEQ ID NO: 64216 - RNA, 1701 nt, Artificial Sequence
  derived and/or modified CDS sequence (opt1) from hemagglutinin__InfluenzaA__AAY64342
augaagaccaucaucgcccugagcuacauccucugccugguguucgcccagaagcugcccggcaacgacaacuccaccgcgacgcucugccuggggcaccacgccgucccgaacggcacccuggugaagaccaucaccaacgaccagaucgaggugacgaacgccaccgagcucguccagagcuccagcaccgggcgcaucugcgacagcccccaccagauccuggacggcgagaacugcacccugaucgacgcccuccugggggacccccacugcgacggcuuccagaacaaggagugggaccuguucguggagcggagcaaggccuacuccaacugcuaccccuacgacgugccggacuacgcgagccuccgcucccuggucgccagcuccggcacgcuggaguucaacaacgagagcuucaacuggaccgggguggcccagaacggcaccuccagcgccugcaagcggcgcuccaacaagagcuucuucucccggcucaacuggcugcaccagcugaaguacaaguaccccgcgcucaacgugaccaugcccaacaacgagaaguucgacaagcuguacaucuggggcguccaccaccccagcacggacuccgaccagaucagccuguacgcccaggccagcgggcgcgugaccguguccaccaagcggagccagcagaccgucaucccgaacaucgggucccgccccugggugcggggcgugagcucccgcaucagcaucuacuggacgaucgucaagcccggcgacauccuccugaucaacuccaccgggaaccugaucgcgccccggggcuacuucaagauccgcagcgggaaguccagcaucaugcgguccgacgccccgaucggcaagugcaacagcgagugcaucacccccaacggcuccauccccaacgacaagcccuuccagaacgugaaccgcaucaccuacggggccugcccgcgguacgugaagcagaacacgcucaagcuggccaccggcaugcgcaacguccccgagaagcagacccgggggaucuucggcgccaucgccggguucaucgagaacggcugggagggcaugguggacgggugguacggcuuccgccaccagaacagcgaggggaccggccaggccgcggaccugaaguccacgcaggccgccaucaaccagaucaacgggaagcucaaccggcugaucgagaagaccaacgagaaguuccaccagaucgagaaggaguucagcgagguggagggccgcauccaggaccuggagaaguacgucgaggacaccaagaucgaccucugguccuacaacgccgagcugcugguggcccucgagaaccagcacaccaucgaccugacggacagcgagaugaacaagcuguucgagcggaccaagaagcagcuccgcgagaacgcggaggacaugggcaacgggugcuucaagaucuaccacaagugcgacaacgccugcaucggcuccauccgcaacgggaccuacgaccacgacguguaccgggacgaggcccugaacaaccgcuuccagaucaagggcgucgagcugaaguccggguacaaggacuggauccucuggaucagcuucgccaccuccugcuuccugcugugcgugguccuccugggcuucaucaugugggccugccagaagggcaacauccggugcaacaucugcaucuga

SEQ ID NO: 64217 - RNA, 1701 nt, Artificial Sequence; identical to SEQ ID NO: 64056
  derived and/or modified CDS sequence (opt1) from hemagglutinin__InfluenzaA__AAY64352

SEQ ID NO: 64218 - RNA, 1701 nt, Artificial Sequence
  derived and/or modified CDS sequence (opt1) from hemagglutinin__InfluenzaA__AAY64362
augaagaccaucaucgcccugagcuacauccucugccugguguucgcccagaagcugcccggcaacgacaacuccaccgcgacgcucugccuggggcaccacgccgucccgaacggcaccaucgugaagaccaucaccaacgaccagaucgaggugacgaacgccaccgagcugguccagagcuccagcaccggggagaucugcgacagcccccaccagauccucgacggcgagaacugcacccugaucgacgcccugcucggggacccccagugcgacggcuuccagaacaagaagugggaccuguucguggagcgcagcaaggccuacuccaacugcuaccccuacgacgugccggacuacgcgagccugcggucccucgucgccagcuccggcacgcuggaguucaacaacgagagcuucgacuggaccggggugacccagaacggcaccuccagcgccugcaagcgccgguccaacaagagcuucuucucccgccugaacuggcucacgcaccugaaguacaaguaccccgcccugaacgugaccaugcccaacaacgagaaguucgacaagcucuacaucuggggcguccaccaccccgggaccgacagcgaccagaucucccuguacgcgcaggccagcgggcggaucaccgugagcacgaagcgcucccagcagaccgugaucccgaacaucggcagccggccccgcguccgggacaucuccagccgcaucuccaucuacuggaccaucgugaagcccggcgacauccugcucaucaacagcaccgggaaccugaucgcgccccggggcuacuucaagauccgcuccgggaaguccuccaucaugcggagcgacgccccgaucggcaagugcaacuccgagugcaucacgcccaacggcagcauccccaacgacaagcccuuccagaacgugaaccgcaucaccuacggggccugcccgcgguacaucaagcagaacacccugaagcucgccaccggcaugcgcaacguccccgagaagcagacgcgggggaucuucggcgccaucgccggguucaucgagaacggcugggagggcaugguggacgggugguacggcuuccgccaccagaacuccgaggggaccggccaggccgccgaccucaagagcacccaggcggccaucaaccagaucaacgggaagcugaaccggcugaucggcaagaccaacgagaaguuccaccagaucgagaaggaguucuccgagguggagggccgcauccaggaccuggagaaguacgucgaggacacgaagaucgaccuguggagcuacaacgccgagcuccugguggcccuggagaaccagcacaccaucgaccucaccgacuccgagaugaacaagcuguucgagcggaccaagaagcagcugcgcgagaacgccgaggacauggggaacggcugcuucaagaucuaccacaagugcgacaacgcgugcaucgggagcauccgcaacggcacguacgaccacgacguguaccgggacgaggcccucaacaaccgcuuccagaucaagggggucgagcugaaguccggcuacaaggacuggauccuguggaucagcuucgccaucagcugcuuccuccugugcguggcccugcucggcuucaucaugugggccugccagaaggggaacauccggugcaacaucugcaucuga

SEQ ID NO: 64219 - RNA, 1701 nt, Artificial Sequence; identical to SEQ ID NO: 64210
  derived and/or modified CDS sequence (opt1) from hemagglutinin__InfluenzaA__AAY64382

SEQ ID NO: 64220 - RNA, 1701 nt, Artificial Sequence
  derived and/or modified CDS sequence (opt1) from hemagglutinin__InfluenzaA__AAY64392
augaagaccaucaucgcccugagcuacauccucugccugguguucgcccagaagcugcccggcaacgacaacuccaccgcgacgcucugccuggggcaccacgccgucccgaacggcaccaucgugaagaccaucaccaacgaccagaucgaggugacgaacgccaccgagcugguccagagcuccagcaccgggggcaucugcgacagcccccaccagauccucgacggggagaacugcacccugaucgacgcccugcucggcgacccccagugcgacggcuuccagaacaagaagugggaccuguucguggagcgcagcaaggccuacuccaacugcuaccccuacgacgugccggacuacgcgagccugcggucccucgucgccagcuccgggacgcuggaguucaacaacgagagcuucaacuggaccggcgugacccagaacgggaccuccagcgccugcaagcgccgguccaacaagagcuucuucucccgccugaacuggcucacgcaccugaaguacaaguaccccgcccugaacgugaccaugcccaacaacgagaaguucgacaagcucuacaucuggggcguccaccaccccgggaccgacaacgaccagaucagccuguacgcgcaggccuccggccggaucaccgugagcacgaagcgcagccagcagaccgugaucccgaacaucggcucccggccccgcguccgggacgugagcucccgcaucagcaucuacuggaccaucgugaagcccggggacauccugcucaucaacuccaccggcaaccugaucgcgccccggggguacuucaagauccgcagcggcaaguccagcaucaugcgguccgacgccccgaucggcaagugcaacagcgagugcaucacgcccaacggguccauccccaacgacaagcccuuccagaacgucaaccgcaucaccuacggcgccugcccgcgguacgugaagcagaacacccugaagcucgccaccgggaugcgcaacgugcccgagaagcagacgcggggcaucuucggggccaucgccggcuucaucgagaacggcugggaggggauggucgacggcugguacggguuccgccaccagaacagcgagggcaccgggcaggccgccgaccugaaguccacccaggcggccaucaaccagaucaacggcaagcugaaccggcucaucggcaagaccaacgagaaguuccaccagaucgagaaggaguucagcgagguggaggggcgcauccaggaccuggagaaguacguggaggacacgaagaucgaccugugguccuacaacgccgagcuccuggucgcccuggagaaccagcacaccaucgaccucaccgacagcgagaugaacaagcuguucgagcggaccaagaagcagcugcgcgagaacgccgaggacaugggcaacgggugcuucaagaucuaccacaagugcgacaacgcgugcaucggcuccauccgcaacgggacguacgaccacgacguguaccgggacgaggcccucaacaaccgcuuccagaucaagggcguggagcugaaguccggcuacaaggacuggauccuguggaucuccuucgccaucagcugcuuccuccugugcgucgcccugcucggguucaucaugugggccugccagaagggcaacauccggugcaacaucugcaucuga

SEQ ID NO: 64221 - RNA, 1701 nt, Artificial Sequence; identical to SEQ ID NO: 64212
  derived and/or modified CDS sequence (opt1) from hemagglutinin__InfluenzaA__AAY64402

SEQ ID NO: 64222 - RNA, 1701 nt, Artificial Sequence; identical to SEQ ID NO: 64210
  derived and/or modified CDS sequence (opt1) from hemagglutinin__InfluenzaA__AAY98037

SEQ ID NO: 64223 - RNA, 1701 nt, Artificial Sequence; identical to SEQ ID NO: 64210
  derived and/or modified CDS sequence (opt1) from hemagglutinin__InfluenzaA__AAY98047

SEQ ID NO: 64224 - RNA, 1701 nt, Artificial Sequence; identical to SEQ ID NO: 64071
  derived and/or modified CDS sequence (opt1) from hemagglutinin__InfluenzaA__AAY98057

SEQ ID NO: 64225 - RNA, 1701 nt, Artificial Sequence
  derived and/or modified CDS sequence (opt1) from hemagglutinin__InfluenzaA__AAY98067
augaagaccaucaucgcccugagcuacauccucugccugguguucgcccaggagcugcccggcaacgacaacuccaccgcgacgcucugccuggggcaccacgccgucccgaacggcacccuggugaagaccaucaccaacgaccagaucgaggugacgaacgccaccgagcucguccagagcuccagcaccgggcgcaucugcgacagcccccaccagauccuggacggcgagaacugcacccugaucgacgcccuccugggggacccccacugcgacggcuuccagaacaaggagugggaccuguucguggagcggagcaaggccuacuccaacugcuaccccuacgacgugccggacuacgucagccuccgcucccugguggcgagcuccggcacgcuggaguucaacaacgagagcuucaacuggaccgggguggcccagaacggcaccuccagcgccugcaagcggcgcuccgacaagagcuucuucucccggcucaacuggcugcaccagcugaaguacaaguaccccgcccucaacgucaccaugcccaacaacgagaaguucgacaagcuguacaucuggggcgugcaccaccccgggacggacagcgaccagaucucccuguacgcgcaggccagcgggcgcgugaccgucagcaccaagcggucccagcagaccgugaucccgaacaucggcagcggccccugggugcgcggggucuccagccggaucuccaucuacuggacgaucgugaagcccggcgacauccuccugaucaacagcaccgggaaccugaucgcgccccgcggcuacuucaagauccgguccggcaagagcuccaucaugcgcagcgacgccccgaucgggaagugcaacuccgagugcaucacccccaacggcagcauccccaacgacaagcccuuccagaacgugaaccggaucaccuacgggccgugcccccgcuacgucaagcagaacacgcucaagcuggccaccggcaugcggaacgugcccgagaagcagacccgcgggaucuucggcgccaucgccggcuucaucgagaacgggugggagggcaugauggacgggugguacggcuuccggcaccagaacuccgaggggaccggccaggccgccgaccugaaguccacgcaggccgcgaucaaccagaucaacggcaagcucaaccgccugaucgagaagaccaacgagaaguuccaccagaucgagaaggaguucuccgagguggaggggcggauccaggaccuggagaaguacgucgaggacaccaagaucgaccucuggagcuacaacgccgagcugcugguggcccucgagaaccagcacaccaucgaccugacggacuccgagaugaacaagcuguucgagcgcaccaagaagcagcuccgggagaacgccgaggacaugggcaacgggugcuucaagaucuaccacaagugcgacaacgccugcaucggcagcauccgcaacgggaccuacgaccacgacguguaccgcgacgaggcgcugaacaaccgguuccagaucaagggcgucgagcugaaguccggcuacaaggacuggauccucuggaucagcuucgccaucagcugcuuccugcugugcaucgugcuccugggguucaucaugugggccugccagaagggcaacauccgcugcaacaucugcaucuga

SEQ ID NO: 64226 - RNA, 1701 nt, Artificial Sequence
  derived and/or modified CDS sequence (opt1) from hemagglutinin__InfluenzaA__AAY98077
augaagaccaucaucgcccugagcuacauccucugccugguguucgcccagaagcugcccggcaacgacaacuccaccgcgacgcucugccuggggcaccacgccgucccgaacggcacccuggugaagaccaucaccaacgaccagaucgaggugacgaacgccaccgagcucguccagagcuccagcgccucccgcaucugcgacagcccccaccagauccuggacggggagaacugcacccugaucgacgcccuccugggcgacccccacugcgacggguuccagaacaaggagugggaccuguucguggagcgguccaaggcguacagcaacugcuaccccuacgacgugccggacuacgucucccuccgcagccugguggccuccagcggcacccuggaguucaacaacgaguccuucaacuggacgggcguggcccagaacgggaccagcuccgccugcaagcggcgcagcgacaaguccuucuucagccggcucaacuggcugcaccagcugaaguacaaguaccccgcgcucaacgucaccaugcccaacaacgagaaguucgacaagcuguacaucuggggcgugcaccaccccgggaccgacuccgaccagaucagccuguacgcccaggccagcggccgcgugacggucuccaccaagcggagccagcagaccgugaucccgaacaucgggucccgccccugggugcggggcgucagcucccgcaucagcaucuacuggaccaucgugaagcccggcgacauccuccugaucaacuccacggggaaccugaucgcgccccggggcuacuucaagauccgcagcgggaaguccagcaucaugcgguccgacgccccgaucggcaagugcaacagcgagugcaucacccccaacggcuccauccccaacgacaagcccuuccagaacgugaaccgcaucaccuacggggccugcccgcgguacgucaagcagaacacccucaagcuggccacgggcaugcgcaacgugcccgagaagcagacccgggggaucuucggcgccaucgccggguucaucgagaacggcugggagggcaugauggacgggugguacggcuuccgccaccagaacagcgaggggaccggccaggccgcggaccugaaguccacccaggccgccaucaaccagaucaacgggaagcucaaccggcugaucgagaagacgaacgagaaguuccaccagaucgagaaggaguucagcgagguggagggccgcauccaggaccuggagaaguacgucgaggacaccaagaucgaccucugguccuacaacgccgagcugcugguggcccucgagaaccagcacaccaucgaccugaccgacagcgagaugaacaagcuguucgagcggacgaagaagcagcuccgcgagaacgcggaggacaugggcaacgggugcuucaagaucuaccacaagugcgacaacgccugcaucggcuccauccgcaacgggaccuacgaccacgacguguaccgggacgaggcccugaacaaccgcuuccagaucaagggcgucgagcucaagagcggguacaaggacuggauccuguggaucagcuucgccaucuccugcuuccugcugugcaucgugcuccugggcuucaucaugugggccugccagaagggcaacauccggugcaacaucugcaucuga

SEQ ID NO: 64227 - RNA, 1701 nt, Artificial Sequence
  derived and/or modified CDS sequence (opt1) from hemagglutinin__InfluenzaA__AAY98087
augaagaccaucaucgcccugagcuacauccucugccugguguucgcccagaagcugcccggcaacgacaacuccaccgcgacgcucugccuggggcaccacgccgucccgaacggcacccuggugaagaccaucaccaacgaccagaucgaggugacgaacgccaccgagcucguccagagcuccagcaccgggcgcaucugcgacagcccccaccggauccuggacggcgagaacugcacccugaucgacgcccuccugggggacccccacugcgacggcuuccagaacaaggagugggaccuguucguggagcgcagcaaggccuacuccaacugcuaccccuacgacgugccggacuacgcgagccuccggucccuggucgccagcuccggcacgcuggaguucaacaacgagagcuucaacuggaccgggguggcccagaacggcaccuccagcgccugcaagcgccgguccaucaagagcuucuucucccgccucaacuggcugcaccagcugaaguacaaguaccccgcgcucaacgugaccaugcccaacaacgacaaguucgacaagcuguacaucuggggcguccaccaccccagcacggacuccgaccagaccagccuguacgcccaggccagcgggcgggugaccguguccaccaagcgcagccagcagacggucaucccgaacaucgggucccggcccugggugcgcggcgugagcucccggaucagcaucuacuggaccaucgucaagcccggcgacauccuccugaucaacuccaccgggaaccugaucgcgccccgcggcuacuucaagauccggagcgggaaguccagcaucaugcgcuccgacgccccgaucggcaagugcaacagcgagugcaucacccccaacggcuccauccccaacgacaagcccuuccagaacgugaaccggaucacguacggggccugcccgcgcuacgugaagcagaacacccucaagcuggccaccggcaugcggaacguccccgagaagcagacccgcgggaucuucggcgccaucgccggguucaucgagaacggcugggagggcaugguggacgggugguacggcuuccggcaccagaacagcgaggggacgggccaggccgcggaccugaaguccacccaggccgccaucaaccagaucaacgggaagcucaaccgccugaucgagaagaccaacgagaaguuccaccagaucgagaaggaguucagcgagguggagggccggauccaggaccuggagaaguacgucgaggacaccaagaucgaccucugguccuacaacgccgagcugcugguggcccucgagaaccagcacacgaucgaccugaccgacagcgagaugaacaagcuguucgagcgcacccgcaagcagcuccgggagaacgcggaggacaugggcaacgggugcuucaagaucuaccacaagugcgacaacgccugcaucggcuccauccgcaacgggaccuacgaccacgacguguaccgggacgaggcccugaacaaccgcuuccagaucaagggcgucgagcugaaguccggguacaaggacuggauccucuggaucagcuucgccaucuccugcuuccugcugugcgugguccuccugggcuucaucaugugggccugccagaagggcaacauccggugcaacaucugcaucuga

SEQ ID NO: 64228 - RNA, 1701 nt, Artificial Sequence; identical to SEQ ID NO: 64210
  derived and/or modified CDS sequence (opt1) from hemagglutinin__InfluenzaA__AAY98097

SEQ ID NO: 64229 - RNA, 1701 nt, Artificial Sequence; identical to SEQ ID NO: 64210
  derived and/or modified CDS sequence (opt1) from hemagglutinin__InfluenzaA__AAY98107

SEQ ID NO: 64230 - RNA, 1701 nt, Artificial Sequence
  derived and/or modified CDS sequence (opt1) from hemagglutinin__InfluenzaA__AAY98117
augaagaccaucaucgcccugagcuacauccucugccugguguucgcccagaagcugcccggcaacgacaacuccaccgcgacgcucugccuggggcaccacgccgucccgaacggcacccuggugaagaccaucaccaacgaccagaucgaggugacgaacgccaccgagcucguccagagcuccagcaccgggcgcaucugcgacagcccccaccagauccuggacggcgagaacugcacccugaucgacgcccuccugggggacccccacugcgacggcuuccagaacaaggagugggaccuguucguggagcggagcaaggccuacuccaacugcuaccccuacgacgugccggacuacgcgagccuccgcucccuggucgccagcuccggcacgcuggaguucaacaacgagagcuucaacuggaccgggguggcccagaacggcaccuccagcgccugcaagcggggguccaacaagagcuucuucucccgccucaacuggcugcaccagcugaaguacaaguaccccgcgcucaacgugaccaugcccaacaacgagaaguucgagaagcuguacaucuggggcguccaccaccccagcacggacuccgaccagaucagccuguacgcccaggccagcgggcgggugaccguguccaccaagcgcagccagcagaccgucaucccgaacaucggcucccggcccugggugcgcggcgugagcucccggaucagcaucuacuggacgaucgucaagcccggggacauccuccugaucaacuccaccggcaaccugaucgcgccccgcggguacuucaagauccggagcggcaaguccagcaucaugcgcuccgacgccccgaucggcaagugcaacagcgagugcaucacccccaacggguccauccccaacgacaagcccuuccagaacgugaaccggaucaccuacggcgccugcccgcgcuacgugaagcagaacacgcucaagcuggccaccgggaugcggaacguccccgagaagcagacccgcggcaucuucggggccaucgccggcuucaucgagaacggcugggaggggaugguggacggcugguacggguuccggcaccagaacagcgagggcaccgggcaggccgcggaccugaaguccacgcaggccgccaucaaccagaucaacggcaagcucaaccgccugaucgagaagaccaacgagaaguuccaccagaucgagaaggaguucagcgagguggagggccggauccaggaccuggagaaguacgucgaggacaccaagaucgaccucugguccuacaacgccgagcugcugguggcccucgagaaccagcacaccaucgaccugacggacagcgagaugaacaagcuguucgagcgcaccaagaagcagcuccgggagaacgcggaggacauggggaacggcugcuucaagaucuaccacaagugcgacaacgccugcaucggguccauccgcaacggcaccuacgaccacgacguguaccgcgacgaggcccugaacaaccgguuccagaucaagggggucgagcugaaguccggcuacaaggacuggauccucuggaucagcuucgccaucuccugcuuccugcugugcgugguccuccugggcuucaucaugugggccugccagaaggggaacauccgcugcaacaucugcaucuga

SEQ ID NO: 64231 - RNA, 1701 nt, Artificial Sequence; identical to SEQ ID NO: 64210
  derived and/or modified CDS sequence (opt1) from hemagglutinin__InfluenzaA__AAY98147

SEQ ID NO: 64232 - RNA, 1701 nt, Artificial Sequence; identical to SEQ ID NO: 64210
  derived and/or modified CDS sequence (opt1) from hemagglutinin__InfluenzaA__AAY98157

SEQ ID NO: 64233 - RNA, 1701 nt, Artificial Sequence
  derived and/or modified CDS sequence (opt1) from hemagglutinin__InfluenzaA__AAY98167
augaagaccaucaucgcccugagcuacauccucugccugguguucgcccagaagcugcccggcaacgacaacuccaccgcgacgcucugccuggggcaccacgccgucccgaacggcacccuggugaagaccaucaccaacgaccagaucgaggugacgaacgccaccgagcucguccagagcuccagcaccgggcgcaucugcgacagcccccaccagauccuggacggcgagaacugcacccugaucgacgcccuccugggggacccccacugcgacggcuuccagaacaaggagugggaccuguucguggagcggagcaaggccuacuccaacugcuaccccuacgacgugccggacuacgcgagccuccgcucccuggucgccagcuccggcacgcuggaguucaacaacgagagcuucaacuggaccgggguggcccagaacggcaccuccagcgccugcaagcggcgcuccaacaagagcuucuucucccggcucaacuggcugcaccagcugaaguacaaguaccccgcgcucaacgugaccaugcccaacaacgagaaguucgacaagcuguacaucuggggcguccaccaccccagcacggacuccgaccagaucagccuguacgcccaggccagcgggcgcgugaccguguccacccagcggagccagcagaccgucaucccgaacaucgggucccgccccugggugcggggcgugagcucccgcaucagcaucuacuggacgaucgucaagcccggcgacauccuccugaucaacuccaccgggaaccugaucgcgccccggggcuacuucaagauccgcagcgggaaguccagcaucaugcgguccgacgccccgaucggcaagugcaacagcgagugcaucacccccaacggcuccauccccaacgacaagcccuuccagaacgugaaccgcaucaccuacggggccugcccgcgguacgugaagcagaacacgcucaagcuggccaccggcaugcgcaacguccccgagaagcagacccgggggaucuucggcgccaucgccggguucaucgagaacggcugggagggcaugguggacgggugguacggcuuccgccaccagaacagcgaggggaccggccaggccgcggaccugaaguccacgcaggccgccaucaaccagaucaacgggaagcucaaccggcugaucgagaagaccaacgagaaguuccaccagaucgagaaggaguucagcgagguggagggccgcauccaggaccuggagaaguacgucgaggacaccaagaucgaccucugguccuacaacgccgagcugcugguggcccucgagaaccagcacaccaucgaccugacggacagcgagaugaacaagcuguucgagcggaccaagaagcagcuccgcgagaacgcggaggacaugggcaacgggugcuucaagaucuaccacaagugcgacaacgccugcaucggcuccauccgcaacgggaccuacgaccacgacguguaccgggacgaggcccugaacaaccgcuuccagaucaagggcgucgagcugaaguccggguacaaggacuggauccucuggaucagcuucgccaucuccugcuuccugcugugcgugguccuccugggcuucaucaugugggccugccagaagggcaacauccggugcaacaucugcaucuga

SEQ ID NO: 64234 - RNA, 1701 nt, Artificial Sequence
  derived and/or modified CDS sequence (opt1) from hemagglutinin__InfluenzaA__AAY98177
augaagaccaucaucgcccugagcuacauccucugccugguguucgcccagaagcugcccggcaacgacaacuccaccgcgacgcucugccuggggcaccacgccgucccgaacggcacccuggugaagaccaucaccaacgaccagaucgaggugacgaacgccaccgagcucguccagagcuccagcaccgggcgcaucugcgacagcccccaccagauccuggacggcgagaacugcacccugaucgacgcccuccugggggacccccacugcgacggcuuccagaacaaggagugggaccuguucguggagcggagcaaggccuacuccaacugcuaccccuacgacgugccggacuacgcgagccuccgcucccuggucgccagcuccggcacgcuggaguucaacaacgagagcuucaacuggaccgggguggcccagaacggcaccuccagcgccugcaagcggcgcuccaacaagagcuucuucucccggcucaacuggcugcaccagcugaaguacaaguaccccgcgcucaacgugaccaugcccaacaacgagaaguucgacaagcuguacaucuggggcguccaccaccccagcacggacuccgaccagaucagccuguacgcccaggccagcgggcgcgugaccguguccaccaagcggagccagcagaccgucaucccgaacaucgggucccgccccugggugcggggcgugagcucccgcaucagcaucuacuggacgaucgucaagcccggcgacauccuccugaucaacuccaccgggaaccugaucgcgccccggggcuacuucaagauccgcagcgggaaguccagcaucaugcgguccgacgccccgaucggcaagugcaacagcgagugcaucacccccaacggcuccauccccaacgacaagcccuuccagaacgugaaccgcaucaccuacggggccugcccgcgguacgugaagcagaacacgcucaagcuggccaccggcaugcgcaacguccccgagaagcagacccgggggaucuucggcgccaucgccggguucaucgagaacggcugggagggcaugguggacgggugguacggcuuccgccaccagaacagcgaggggaccggccaggccgcggaccugaaguccacgcaggccgccaucaaccagaucaacgggaagcucaaccggcugaucgagaagaccaacgagaaguuccaccagaucgagaaggaguucagcgagguggagggccgcauccaggaccuggagaaguacgucgaggacaccaagaucgaccucugguccuacaacgccggccugcugguggcccucgagaaccagcacaccaucgaccugacggacagcgagaugaacaagcuguucgagcggaccaagaagcagcuccgcgagaacgcggaggacauggggaacggcugcuucaagaucuaccacaagugcgacaacgccugcaucggguccauccgcaacggcaccuacgaccacgacguguaccgggacgaggcccugaacaaccgcuuccagaucaagggggucgagcugaaguccggcuacaaggacuggauccucuggaucagcuucgccaucuccugcuuccugcugugcgugguccuccugggcuucaucaugugggccugccagaaggggaacauccggugcaacaucugcaucuga

SEQ ID NO: 64235 - RNA, 1701 nt, Artificial Sequence
  derived and/or modified CDS sequence (opt1) from hemagglutinin__InfluenzaA__AAY98195
augaagaccaucaucgcccugagcuacauccucugccugguguucgcccagaagcugcccggcaacgacaacuccaccgcgacgcucugccuggggcaccacgccgucccgaacggcacccuggugaagaccaucaccaacgaccagaucgaggugacgaacgccaccgagcucguccagagcuccagcaccgggcgcaucugcgacagcccccaccagauccuggacggcgagaacugcacccugaucgacgcccuccugggggacccccacugcgacggcuuccagaacaaggagugggaccuguucguggagcggagcaaggccuacuccaacugcuaccccuacgacgugccggacuacgcgagccuccgcucccuggucgccagcuccggcacgcuggaguucaacaacgagagcuucaacuggaccgggguggcccagaacggcaccuccagcgccugcaagcggcgcuccaacaagagcuucuucucccggcucaacuggcugcaccagcugaaguacaaguaccccgcgcucaacgugaccaugcccaacaacgagaaguucgacaagcuguacaucuggggcguccaccaccccagcacggacuccgaccagaucagccuguacgcccaggccagcgggcgcgugaccguguccaccaagcggagccagcagaccgucaucccgaacaucgggucccgccccugggugcggggcgugagcucccgcaucagcaucuacuggacgaucgucaagcccggcgacauccuccugaucaacuccaccgggaaccugaucgcgccccggggcuacuucaagauccgcagcgggaaguccagcaucaugcgguccgacgccccgaucggcaagugcaacagcgagugcaucacccccaacggcuccauccccaacgacaagcccuuccagaacgugaaccgcaucaccuacggggccugcccgcgguacgugaagcagaacacgcucaagcuggccaccggcaugcgcaacguccccgagaagcagacccgggggaucuucggcgccaucgccggguucaucgagaacggcugggagggcaugguggacgggugguacggcuuccgccaccagaacagcgaggggaccggccaggccgcggaccugaaguccacgcaggccgccaucaaccagaucaacgggaagcucaaccggcugaucgagaagaccaacgagaaguuccaccagaucgagaaggaguucagcgagguggagggccgcauccaggaccuggagaaguacgucgaggacaccaagaucgaccucugguccuacaacgccgagcugcugguggcccucgagaaccagcacaccaucgaccugacggacagcgagaugaacaagcuguucgagcggacccgcaagcagcuccgcgagaacgcggaggacaugggcaacgggugcuucaagaucuaccacaagugcgacaacgccugcaucggcuccauccggaacgggaccuacgaccacgacguguaccgcgacgaggcccugaacaaccgguuccagaucaagggcgucgagcugaaguccggguacaaggacuggauccucuggaucagcuucgccaucuccugcuuccugcugugcgugguccuccugggcuucaucaugugggccugccagaagggcaacauccgcugcaacaucugcaucuga

SEQ ID NO: 64236 - RNA, 1701 nt, Artificial Sequence; identical to SEQ ID NO: 64210
  derived and/or modified CDS sequence (opt1) from hemagglutinin__InfluenzaA__AAY98207

SEQ ID NO: 64237 - RNA, 1701 nt, Artificial Sequence; identical to SEQ ID NO: 64212
  derived and/or modified CDS sequence (opt1) from hemagglutinin__InfluenzaA__AAY98217

SEQ ID NO: 64238 - RNA, 1701 nt, Artificial Sequence; identical to SEQ ID NO: 64210
  derived and/or modified CDS sequence (opt1) from hemagglutinin__InfluenzaA__AAY98227

SEQ ID NO: 64239 - RNA, 1701 nt, Artificial Sequence; identical to SEQ ID NO: 64210
  derived and/or modified CDS sequence (opt1) from hemagglutinin__InfluenzaA__AAY98237

SEQ ID NO: 64240 - RNA, 1701 nt, Artificial Sequence
  derived and/or modified CDS sequence (opt1) from hemagglutinin__InfluenzaA__AAY98247
augaagaccaucaucgcccugagcuacauccucugccugguguucgcccagaagcugcccggcaacgacaacuccaccgcgacgcucugccuggggcaccacgccgucccgaacggcacccuggugaagaccaucaccaacgaccagaucgaggugacgaacgccaccgagcucguccagagcuccagcaccgggcgcaucugcgacagcccccaccagauccuggacggcgagaacugcacccugaucgacgcccuccugggggacccccacugcgacggcuuccagaacaaggagugggaccuguucguggagcggagcaaggccuacuccaacugcuaccccuacgacgugccggacuacgcgagccuccgcucccuggucgccagcuccggcacgcuggaguucaacaacgagagcuucaacuggaccgggguggcccagaacggcaccuccagcgccugcaagcggcgcuccaacaagagcuucuucucccggcucaacuggcugcaccagcugaaguacaaguaccccgcgcucaacgugaccaugcccaacaacgagaaguucgacaagcuguacaucuggggcguccaccaccccagcacggacuccgaccagaucagccuguacgcccaggccagcgggcgcgugaccguguccaccaagcggagccagcagaccgucaucccgaacaucgggucccgccccugggugcggggcgugagcucccgcaucagcaucuacuggacgaucgucaagcccggcgacauccuccugaucaacuccaccgggaaccugaucgcgccccggggcuacuucaagauccgcagcgggaaguccagcaucaugcgguccgacgccccgaucggcaagugcaacagcgagugcaucacccccaacggcuccauccccaacgacaagcccuuccagaacgugaaccgcaucaccuacggggccugcccgcgguacaucaagcagaacacgcucaagcuggccaccggcaugcgcaacgugcccgagaagcagacccgggggaucuucggcgccaucgccggguucaucgagaacggcugggagggcauggucgacgggugguacggcuuccgccaccagaacagcgaggggaccggccaggccgcggaccugaaguccacgcaggccgccaucaaccagaucaacgggaagcucaaccggcugaucgagaagaccaacgagaaguuccaccagaucgagaaggaguucagcgagguggagggccgcauccaggaccuggagaaguacguggaggacaccaagaucgaccucugguccuacaacgccgagcugcuggucgcccucgagaaccagcacaccaucgaccugacggacagcgagaugaacaagcuguucgagcggaccaagaagcagcuccgcgagaacgcggaggacaugggcaacgggugcuucaagaucuaccacaagugcgacaacgccugcaucggcuccauccgcaacgggaccuacgaccacgacguguaccgggacgaggcccugaacaaccgcuuccagaucaagggcguggagcugaaguccggguacaaggacuggauccucuggaucagcuucgccaucuccugcuuccugcugugcgucgugcuccugggcuucaucaugugggccugccagaagggcaacauccggugcaacaucugcaucuga

SEQ ID NO: 64241 - RNA, 1701 nt, Artificial Sequence; identical to SEQ ID NO: 64210
  derived and/or modified CDS sequence (opt1) from hemagglutinin__InfluenzaA__AAY98319

SEQ ID NO: 64242 - RNA, 1701 nt, Artificial Sequence
  derived and/or modified CDS sequence (opt1) from hemagglutinin__InfluenzaA__AAY98329
augaagaccaucaucgcccugagcuacauccucugccugguguucgcccagaagcugcccggcaacgacaacuccaccgcgacgcucugccuggggcaccacgccgucccgaacggcacccuggugaagaccaucaccaacgaccagaucgaggugacgaacgccaccgagcucguccagagcuccagcaccgggcgcaucugcgacagcccccaccagauccuggacggcgagaacugcacccugaucgacgcccuccugggggacccccacugcgacggcuuccagaacaaggagugggaccuguucguggagcggagcaaggccuacuccaacugcuaccccuacgacgugccggacuacgcgagccuccgcucccuggucgccagcuccggcacgcuggaguucaacaacgagagcuucaacuggaccgggguggcccagaacggcaccuccagcgccugcaagcggcgcuccaacaagagcuucuucucccggcucaacuggcugcaccagcugaaguacaaguaccccgcgcucaacgugaccaugcccaacaacgagaaguucgacaagcuguacaucuggggcguccaccaccccagcacggacuccgaccagaucagccuguacgcccaggcccucgggcgcgugaccgugagcaccaagcggucccagcagaccgucaucccgaacaucgggagccgccccugggugcggggcguguccagccgcaucuccaucuacuggacgaucgucaagcccggcgacauccugcugaucaacagcaccgggaaccucaucgcgccccggggcuacuucaagauccgcuccgggaaguccuccaucaugcggagcgacgccccgaucggcaagugcaacuccgagugcaucacccccaacggcagcauccccaacgacaagcccuuccagaacgugaaccgcaucaccuacggggccugcccgcgguacgugaagcagaacacgcugaagcuggccaccggcaugcgcaacguccccgagaagcagacccgggggaucuucggcgccaucgccggguucaucgagaacggcugggagggcaugguggacgggugguacggcuuccgccaccucaacuccgaggggaccggccaggccgcggaccucaagagcacgcaggccgccaucaaccagaucaacgggaagcugaaccggcugaucgagaagaccaacgagaaguuccaccagaucgagaaggaguucuccgagguggagggccgcauccaggaccuggagaaguacgucgaggacaccaagaucgaccuguggagcuacaacgccgagcuccugguggcccuggagaaccagcacaccaucgaccucacggacuccgagaugaacaagcuguucgagcggaccaagaagcagcugcgcgagaacgcggaggacaugggcaacgggugcuucaagaucuaccacaagugcgacaacgccugcaucggcagcauccgcaacgggaccuacgaccacgacguguaccgggacgaggcccucaacaaccgcuuccagaucaagggcgucgagcugaaguccggguacaaggacuggauccuguggaucagcuucgccaucagcugcuuccuccugugcgugguccugcucggcuucaucaugugggccugccagaagggcaacauccggugcaacaucugcaucuga

SEQ ID NO: 64243 - RNA, 1701 nt, Artificial Sequence; identical to SEQ ID NO: 64210
  derived and/or modified CDS sequence (opt1) from hemagglutinin__InfluenzaA__AAY98339

SEQ ID NO: 64244 - RNA, 1701 nt, Artificial Sequence; identical to SEQ ID NO: 64210
  derived and/or modified CDS sequence (opt1) from hemagglutinin__InfluenzaA__AAY98353

SEQ ID NO: 64245 - RNA, 1701 nt, Artificial Sequence
  derived and/or modified CDS sequence (opt1) from hemagglutinin__InfluenzaA__AAY98366
augaagaccaucaucgcccugagcuacauccucugccugguguucgcccagaagcugcccggcaacgacaacuccaccgcgacgcucugccuggggcaccacgccgucccgaacggcacccuggugaagaccaucaccagcgaccagaucgaggugacgaacgccaccgagcucguccaguccagcuccaccgggcgcaucugcgacagcccccaccggauccuggacggcgagaacugcacccugaucgacgcccuccugggggacccccacugcgacggcuuccagaacaaggagugggaccuguucguggagcgcuccaaggccuacagcaacugcuaccccuacgacgugccggacuacgcgucccuccggagccuggucgccuccagcggcacgcuggaguucaacaacgaguccuucaacuggaccgggguggcccagaacggcaccagcuucgccugcaagcgccgguccaucaagagcuucuucucccgccucaacuggcugcaccagcugaaguacaaguaccccgcgcucaacgugaccaugcccaacaacgacaaguucgacaagcuguacaucuggggcguccaccaccccgggacggacagcgaccagaccucccuguacgcccaggccagcgggcgggugaccgugagcaccaagcgcucccagcagacggucaucccgaacaucggcagccggcccugggugcgcggcguguccagccggaucuccaucuacuggaccaucgucaagcccggggacauccuccugaucaacagcaccggcaaccugaucgcgccccgcggguacuucaagauccgguccggcaagagcuccaucaugcgcagcgacgccccgaucggcaagugcaacuccgagugcaucacccccaacgggagcauccccaacgacaagcccuuccagaacgugaaccggaucacguacggcgccugcccgcgcuacgugaagcagaacacccucaagcuggccaccgggaugcggaacguccccgagaagcagacccgcggcaucuucggggccaucgccggcuucaucgagaacggcugggaggggaugguggacggcugguacggguuccggcaccagaacuccgagggcacggggcaggccgcggaccucaagagcacccaggccgccaucaaccagaucaacggcaagcugaaccgccugaucgagaagaccaacgagaaguuccaccagaucgagaaggaguucaccgagguggagggccggauccaggaccuggagaaguacgucgaggacacgaagaucgaccucugguccuacaacgccgagcugcugguggcccucgagaaccagcacaccaucgaccugaccgacagcgagaugaacaagcuguucgagcgcacccgcaagcagcuccgggagaacgcggaggacauggggaacggcugcuucaagaucuaccacaagugcgacaacgccugcaucggguccauccgcaacggcacguacgaccacgacguguaccgggacgaggcccugaacaaccgcuuccagaucaagggggucgagcucaagagcggcuacaaggacuggauccuguggaucuccuucgccaccagcugcuuccugcugugcgugguccuccugggcuucaucaugugggccugccagaaggggaacauccggugcaacaucugcaucuga

SEQ ID NO: 64246 - RNA, 1701 nt, Artificial Sequence
  derived and/or modified CDS sequence (opt1) from hemagglutinin__InfluenzaA__AAY98376
augaagaccaucaucgcccugagcuacauccucugccugguguucgcccagaagcugcccggcaacgacaacuccaccgcgacgcucugccuggggcaccacgccgucccgaacggcacccuggugaagaccaucaccaacgaccagaucgaggugacgaacgccaccgagcucguccagagcuccagcaccgggcgcaucugcgacagcccccaccagauccuggacggcgagaacugcacccugaucgacgcccuccugggggacccccacugcgacggcuuccagaacaaggagugggaccuguucguggagcggagcaaggccuacuccaacugcuaccccuacgacgugccggacuacgcgagccuccgcucccuggucgccagcuccggcacgcuggaguucaacaacgagagcuucaacuggaccgggguggcccagaacggcaccuccagcgccugcaagcggcgcuccaucaagagcuucuucucccggcucaacuggcugcaccagcugaaguacaaguaccccgcgcucaacgugaccaugcccaacaacgacaaguucgacaagcuguacaucuggggcguccaccaccccagcacggacuccgaccagaccagccuguacgcccaggccagcgggcgcgugaccguguccaccaagcggagccagcagacggucaucccgaacaucgggucccgccccugggugcggggcgugagcucccgcaucagcaucuacuggaccaucgucaagcccggcgacauccuccugaucaacuccaccgggaaccugaucgcgccccggggcuacuucaagauccgcagcgggaaguccagcaucaugcgguccgacgccccgaucggcaagugcaacagcgagugcaucacccccaacggcuccauccccaacgacaagcccuuccagaacgugaaccgcaucacguacggggccugcccgcgguacgugaagcagaacacccucaagcuggccaccggcaugcgcaacguccccgagaagcagacccgggggaucuucggcgccaucgccggguucaucgagaacggcugggagggcaugguggacgggugguacggcuuccgccaccagaacagcgaggggacgggccaggccgcggaccugaaguccacccaggccgccaucaaccagaucaacgggaagcucaaccggcugaucgagaagaccaacgagaaguuccaccagaucgagaaggaguucagcgagguggagggccgcauccaggaccuggagaaguacgucgaggacaccaagaucgaccucugguccuacaacgccgagcugcugguggcccucgagaaccagcacacgaucgaccugaccgacagcgagaugaacaagcuguucgagcggacccgcaagcagcuccgcgagaacgcggaggacaugggcaacgggugcuucaagaucuaccacaagugcgacaacgccugcaucggcuccauccggaacgggaccuacgaccacgacguguaccgcgacgaggcccugaacaaccgguuccagaucaagggcgucgagcugaaguccggguacaaggacuggauccucuggaucagcuucgccaucuccugcuuccugcugugcgugguccuccugggcuucaucaugugggccugccagaagggcaacauccgcugcaacaucugcaucuga

SEQ ID NO: 64247 - RNA, 1701 nt, Artificial Sequence
  derived and/or modified CDS sequence (opt1) from hemagglutinin__InfluenzaA__AAY98386
augaagaccaucaucgcccugagcuacauccucugccugguguucgcccagaagcugcccggcaacgacaacuccaccgcgacgcucugccuggggcaccacgccgucccgaacggcacccuggugaagaccaucaccaacgaccagaucgaggugacgaacgccaccgagcucguccagagcuccagcaccgggcgcaucugcgacagcccccaccagauccuggacggcgggaacugcacccugaucgacgcccuccugggcgacccccacugcgacggcuuccagaacaaggagugggaccuguucguggagcggagcaagguguacuccaacugcuaccccuacgacgucccggacuacgccagccuccgcucccugguggcgagcuccgggacgcuggaguucaacaacgagagcuucaacuggaccggcguggcccagaacgggaccuccagcgccugcaagcggcgcuccaucaagagcuucuucucccggcucaacuggcugcaccagcugaaguacaaguaccccgcccucaacgucaccaugcccaacaacgagaaguucgacaagcuguacaucuggggcgugcaccaccccagcacggacuccgaccagaucagccuguacgcgcaggccagcgggcgcgugaccgucuccaccaagcggagccagcagaccgugaucccgaacaucggcucccgccccugggugcggggcgucagcucccgcaucagcaucuacuggacgaucgugaagcccggggacauccuccugaucaacuccaccggcaaccugaucgcgccccggggguacuucaagauccgcagcggcaaguccagcaucaugcgguccgacgccccgaucggcaagugcaacagcgagugcaucacccccaacggguccauccccaacgacaagcccuuccagaacgugaaccgcaucaccuacggcgccugcccgcgguacgucaagcagaacacgcucaagcuggccaccgggaugcgcaacgugcccgagaagcagacccggggcaucuucggggccaucgccggcuucaucgagaacggcugggaggggaugguggacggcugguacggguuccgccaccagaacagcgagggcaccgggcaggccgccgaccugaaguccacgcaggcggccaucaaccagaucaacggcaagcucaaccggcugaucgagaagaccaacgagaaguuccaccagaucgagaaggaguucagcgaggucgagggccgcauccaggaccuggagaaguacguggaggacaccaagaucgaccucugguccuacaacgccgagcugcugguggcccucgagaaccagcacaccaucgaccugacggacagcgagaugaacaagcuguucgagcggaccaagaagcagcuccgcgagaacgccgaggacauggggaacggcugcuucaagaucuaccacaagugcgacaacgcgugcaucggguccauccgcaacggcaccuacgaccacgacgucuaccgggacgaggcccugaacaaccgcuuccagaucaaggggguggagcugaaguccggcuacaaggacuggauccucuggaucagcuucgccaucuccugcuuccugcugugcgucgugcuccugggcuucaucaugugggccugccagaaggggaacauccggugcaacaucugcaucuga

SEQ ID NO: 64248 - RNA, 1701 nt, Artificial Sequence; identical to SEQ ID NO: 64210
  derived and/or modified CDS sequence (opt1) from hemagglutinin__InfluenzaA__AAY98396

SEQ ID NO: 64249 - RNA, 1701 nt, Artificial Sequence; identical to SEQ ID NO: 64210
  derived and/or modified CDS sequence (opt1) from hemagglutinin__InfluenzaA__AAY98406

SEQ ID NO: 64250 - RNA, 1701 nt, Artificial Sequence
  derived and/or modified CDS sequence (opt1) from hemagglutinin__InfluenzaA__AAZ32946
augaagaccaucaucgcccugagcuacauccucugccugguguucgcccagaagcugcccggcaacgacaacuccaccgcgacgcucugccuggggcaccacgccgucccgaacggcaccaucgugaagaccaucaccaacgaccagaucgaggugacgaacgccaccgagcugguccagagcuccagcaccgggggcaucugcgacagcccccaccagauccucgacggggagaacugcacccugaucgacgcccugcucggcgacccccagugcgacggcuuccagaacaagaagugggaccuguucguggagcgcagcgaggccuacuccaacugcuaccccuacgacgugccggacuacgcgagccugcggucccucaucgccagcuccgggacgcuggaguucaccaacgagagcuucaacuggaccggcgucacccagaacgggacguccagcgccugcaagcgccgguccaacaagagcuucuucucccgccugaacuggcucacccaccugaaguacaaguaccccgcccugaacgugaccaugcccaacaacgagaaguucgacaagcucuacaucuggggcgugcaccaccccgggaccgacagcgaccagaucucccuguacgcgcaggccagcggccggaucacggucagcaccaagcgcucccagcagaccgugaucccgaacaucggcagccggccccgcgugcgggacgucuccagccgcaucuccaucuacuggaccaucgugaagcccggggacauccugcucaucaacagcacgggcaaccugaucgcgccccggggguacuucaagauccgcuccggcaagagcuccaucaugcggagcgacgccccgaucggcaagugcaacuccgagugcaucacccccaacgggagcauccccaacgacaagcccuuccagaacaucaaccgcaucaccuacgggaccugcccgcgguacgugaagcagaacacgcugaagcucgccaccggcaugcgcaacguccccgagaagcagacccggggcaucuucggggccaucgccggcuucaucgagaacggcugggaggggaugguggacggcugguacggguuccgccaccagaacuccgagggcaccgggcaggccgccgaccugaaguccacgcaggccgcgaucaaccagaucaacggcaagcugaaccggcucaucggcaagaccaacgagaaguuccaccagaucgagaaggaguucuccgagguggaggggcgcauccaggaccuggagaaguacgucgaggacaccaagaucgaccuguggagcuacaacgccgagcuccugguggcccuggagaaccagcacaccaucgaccucacggacuccgagaugaacaagcuguucgagcggaccaagaagcagcugcgcgagaacgccgaggacaugggcaacgggugcuucaagaucuaccacaagugcgacaacgccugcaucggcagcauccgcaacgggaccuacgaccacgacguguaccgggacgaggcgcucaacaaccgcuuccagaucaagggcgucgagcugaaguccggcuacaaggacuggauccuguggaucagcuucgccaucagcugcuuccuccugugcguggugcugcucggguucaucaugugggccugccagaagggcaacauccggugcaacaucugcaucuga

SEQ ID NO: 64251 - RNA, 1701 nt, Artificial Sequence
  derived and/or modified CDS sequence (opt1) from hemagglutinin__InfluenzaA__AAZ32949
augaagaccaucaucgcccugagcuacauccucugccugguguucgcccagaagcugcccggcaacgacaacuccaccgcgacgcucugccuggggcaccacgccgucccgaacggcaccaucgugaagaccaucaccaacgaccagaucgaggugacgaacgccaccgagcugguccagagcuccagcaccgggggcaucugcgacagcccccaccagauccucgacggggagaacugcacccugaucgacgcccugcucggcgacccccagugcgacggcuuccagaacaagaagugggaccuguucguggagcgcagcgaggccuacuccaacugcuaccccuacgacgugccggacuacgcgagccugcggucccucaucgccagcuccgggacgcuggaguucaccaacgagagcuucaacuggaccggcgucacccagaacgggacguccagcgccugcaagcgccgguccaacaagagcuucuucucccgccugaacuggcucacccaccugaaguacaaguaccccgcccugaacgugaccaugcccaacaacgagaaguucgacaagcucuacaucuggggcgugcaccaccccgggaccgacagcgaccagaucucccuguacgcgcaggccagcggccggaucacggucagcaccaagcgcucccagcagaccgugaucccgaacaucggcagccggccccgcgugcgggacaucuccagccgcaucuccaucuacuggaccaucgucaagcccggggacauccugcucaucaacagcacgggcaaccugaucgcgccccggggguacuucaagauccgcuccggcaagagcuccaucaugcggagcgacgccccgaucggcaagugcaacuccgagugcaucacccccaacgggagcauccccaacgacaagcccuuccagaacaucaaccgcaucaccuacggcgccugcccgcgguacgugaagcagaacacccugaagcucgccacggggaugcgcaacgugcccgagaagcagacccggggcaucuucggggccaucgccggcuucaucgagaacggcugggaggggauggucgacggcugguacggguuccgccaccagaacuccgagggcaccgggcaggccgccgaccugaaguccacccaggcggccaucaaccagaucaacggcaagcugaaccggcucaucggcaagacgaacgagaaguuccaccagaucgagaaggaguucuccgagguggaggggcgcauccaggaccuggagaaguacguggaggacaccaagaucgaccuguggagcuacaacgccgagcuccuggucgcccuggagaaccagcacaccaucgaccucaccgacuccgagaugaacaagcuguucgagcggacgaagaagcagcugcgcgagaacgccgaggacaugggcaacgggugcuucaagaucuaccacaagugcgacaacgcgugcaucggcagcauccgcaacgggaccuacgaccacgacguguaccgggacgaggcccucaacaaccgcuuccagaucaagggcguggagcugaaguccggcuacaaggacuggauccuguggaucagcuucgccaucagcugcuuccuccugugcgucgugcugcucggguucaucaugugggccugccagaagggcaacauccggugcaacaucugcaucuga

SEQ ID NO: 64252 - RNA, 1701 nt, Artificial Sequence
  derived and/or modified CDS sequence (opt1) from hemagglutinin__InfluenzaA__AAZ32950
augaagaccaucaucgcccugagcuacauccucugccugguguucgcccagaagcugcccggcaacgacaacuccaccgcgacgcucugccuggggcaccacgccgucccgaacggcaccaucgugaagaccaucaccaacgaccagaucgaggugacgaacgccaccgagcugguccagagcuccagcaccgggggcaucugcgacagcccccaccagauccucgacggggagaacugcacccugaucgacgcccugcucggcgacccccagugcgacggcuuccagaacaagaagugggaccuguucguggagcgcagcgaggccuacuccaacugcuaccccuacgacgugccggacuacgcgagccugcggucccucaucgccagcuccgggacgcuggaguucaccaacgagagcuucaacuggaccggcgucacccagaacgggacguccagcgccugcaagcgccgguccaacaagagcuucuucucccgccugaacuggcucacccaccugaaguacaaguaccccgcccugaacgugaccaugcccaacaacgagaaguucgacaagcucuacaucuggggcgugcaccaccccgggaccgacagcgaccagaucucccuguacgcgcaggccagcggccggaucacggucagcaccaagcgcucccagcagaccgugaucccgaacaucggcagccggccccgcgugcgggacgucuccagccgcaucuccaucuacuggaccaucgugaagcccggggacauccugcucaucaacagcacgggcaaccugaucgcgccccggggguacuucaagauccgcuccggcaagagcuccaucaugcggagcgacgccccgaucggcaagugcaacuccgagugcaucacccccaacgggagcauccccaacgacaagcccuuccagaacaucaaccgcaucaccuacggcgccugcccgcgguacgugaagcagaacacccugaagcucgccacggggaugcgcaacguccccgagaagcagacccggggcaucuucggggccaucgccggcuucaucgagaacggcugggaggggaugguggacggcugguacggguuccgccaccagaacuccgagggcaccgggcaggccgccgaccugaaguccacccaggcggccaucaaccagaucaacggcaagcugaaccggcucaucggcaagacgaacgagaaguuccaccagaucgagaaggaguucuccgagguggaggggcgcauccaggaccuggagaaguacgucgaggacaccaagaucgaccuguggagcuacaacgccgagcuccugguggcccuggagaaccagcacaccaucgaccucaccgacuccgagaugaacaagcuguucgagcggacgaaggagcagcugcgcgagaacgccgaggacaugggcaacgggugcuucaagaucuaccacaagugcgacaacgcgugcaucggcagcauccgcaacgggaccuacgaccacgacguguaccgggacgaggcccucaacaaccgcuuccagaucaagggcgucgagcugaaguccggcuacaaggacuggauccuguggaucagcuucgccaucagcugcuuccuccugugcguggugcugcucggguucaucaugugggccugccagaagggcaacauccggugcaacaucugcaucuga

SEQ ID NO: 64253 - RNA, 1701 nt, Artificial Sequence
  derived and/or modified CDS sequence (opt1) from hemagglutinin__InfluenzaA__AAZ32951
augaagaccaucaucgcccugagcuacauccucugccugguguucgcccagaagauccccggcaacgacaacuccaccgcgacgcugugccucgggcaccacgccgucccgaacggcacccuggugaagaccaucaccaacgaccagaucgaggugacgaacgccaccgagcugguccagagcuccagcaccgggggcaucugcgacagcccccaccagauccucgacggggagaacugcacccugaucgacgcccugcucggcgacccccacugcgacggcuuccagaacaagaagugggaccuguucguggagcgcagcaaggccuacuccaacugcuaccccuacgacgugccggacuacgcgagccugcggucccucgucgccagcuccgggacgcuggaguucaacaacgagagcuucaacuggaccggcgugacccagaacgggaccuccagcgccugcaagcgccgguccaacaagagcuucuucucccgccugaacuggcuccaccagcugaaguacaaguaccccgcccugaacguggcgaugcccaacaacgagaaguucgacaagcucuacaucuggggcguccaccaccccgggacggacagcgaccagaucucccuguacgcccaggccagcggccggaucaccgugagcaccaagcgcucccagcagaccgugaucccgaacaucggcagccggccccgcguccgggacaucuccagccgcaucuccaucuacuggacgaucgugaagcccggggacauccugcucaucaacagcaccggcaaccugaucgcgccccggggguacuucaagauccgcuccggcaagagcuccaucaugcggagcgacgccccgaucggcaagugcaacuccgagugcaucacccccaacgggagcauccccaacgacaagcccuuccagaacgugaaccgcaucaccuacggcgccugcccgcgguacgucaagcagaacacgcugaagcucgccaccgggaugcgcaacgugcccgagaagcagacccggggcaucuucggggccaucgccggcuucaucgagaacggcugggaggggaugguggacggcugguacggguuccgccaccagaacuccgagggcaccgggcaggccgcggaccugaaguccacgcaggccgccaucaaccagaucaacggcaagcugaaccggcucaucggcaagaccaacgagaaguuccaccagaucgagaaggaguucuccgaggucgaggggcgcauccaggaccuggagaaguacguggaggacaccaagaucgaccuguggagcuacaacgccgagcuccugguggcccuggagaaccagcacaccaucgaccucacggacuccgagaugaacaagcuguucgagcggaccaagaagcagcugcgcgagaacgcggaggacaugggcaacgggugcuucaagaucuaccacaagugcgacaacgccugcaucggcagcauccgcaacgggaccuacgaccacgacgucuaccgggacgaggcccucaacaaccgcuuccagaucaagggcguggagcugaaguccggcuacaaggacuggauccuguggaucagcuucgccaucagcugcuuccuccugugcguggcccugcucggguucaucaugugggcgugccagaagggcaacauccggugcaacaucugcaucuga

SEQ ID NO: 64254 - RNA, 1701 nt, Artificial Sequence
  derived and/or modified CDS sequence (opt1) from hemagglutinin__InfluenzaA__AAZ32952
augaagaccaucaucgcccugagcuacauccucugccugguguucgcccagaagauccccggcaacgacaacuccaccgcgacgcugugccucgggcaccacgccgucccgaacggcacccuggugaagaccaucaccaacgaccagaucgaggugacgaacgccaccgagcugguccagagcuccagcaccgggggcaucugcgacagcccccaccagauccucgacggggagaacugcacccugaucgacgcccugcucggcgacccccacugcgacggcuuccagaacaagaagugggaccuguucguggagcgcagcaaggccuacuccaacugcuaccccuacgacgugccggacuacgcgagccugcggucccucgucgccagcuccgggacgcuggaguucaacaacgagagcuucaacuggaccggcgugacccagaacgggaccuccagcgccugcaagcgccgguccaacaagagcuucuucucccgccugaacuggcuccaccagcugaaguacaaguaccccgcccugaacguggcgaugcccaacaacgagaaguucgacaagcucuacaucuggggcguccaccaccccgggacggacagcgaccagaucucccuguacgcccaggccagcggccggaucaccgugagcaccaagcgcucccagcagaccgugaucccgaacaucggcagccggccccgcguccgggacguguccagccgcaucuccaucuacuggacgaucgugaagcccggggacauccugcucaucaacagcaccggcaaccugaucgcgccccggggguacuucaagauccgcuccggcaagagcuccaucaugcggagcgacgccccgaucggcaagugcaacuccgagugcaucacccccaacgggagcauccccaacgacaagcccuuccagaacgucaacaagaucaccuacggcgccugcccgcgcuacgugaagcagaacacgcugaagcucgccaccgggaugcggaacgugcccgagaagcagacccgcggcaucuucggggccaucgccggcuucaucgagaacggcugggaggggauggucgacggcugguacggguuccggcaccagaacuccgagggcaccgggcaggccgcggaccugaaguccacgcaggccgccaucaaccagaucaacggcaagcugaaccgccucaucggcaagaccaacgagaaguuccaccagaucgagaaggaguucuccgagguggaggggcggauccaggaccuggagaaguacguggaggacaccaagaucgaccuguggagcuacaacgccgagcuccuggucgcccuggagaaccagcacaccaucgaccucacggacuccgagaugaacaagcuguucgagcgcaccaagaagcagcugcgggagaacgcggaggacaugggcaacgggugcuucaagaucuaccacaagugcgacaacgccugcaucggcagcauccgcaacgggaccuacgaccacgacguguaccgcgacgaggcccucaacaaccgguuccagaucaagggcguggagcugaaguccggcuacaaggacuggauccuguggaucagcuucgccaucagcugcuuccuccugugcgucgcccugcucggguucaucaugugggcgugccagaagggcaacauccgcugcaacaucugcaucuga

SEQ ID NO: 64255 - RNA, 1701 nt, Artificial Sequence
  derived and/or modified CDS sequence (opt1) from hemagglutinin__InfluenzaA__AAZ32953
augaagaccaucaucgcccugagcuacauccucugccugguguucgcccagaagauccccggcaacgacaacuccaccgcgacgcugugccucgggcaccacgccgucccgaacggcacccuggugaagaccaucaccaacgaccagaucgaggugacgaacgccaccgagcugguccagagcuccagcaccgggggcaucugcgacagcccccaccagauccucgacggggagaacugcacccugaucgacgcccugcucggcgacccccacugcgacggcuuccagaacaagaagugggaccuguucguggagcgcagcaaggccuacuccaacugcuaccccuacgacgugccggacuacgcgagccugcggucccucgucgccagcuccgggacgcuggaguucaacaacgagagcuucaacuggaccggcgugacccagaacgggaccuccagcgccugcaagcgccgguccaacaagagcuucuucucccgccugaacuggcuccaccagcugaaguacaaguaccccgcccugaacguggcgaugcccaacaacgagaaguucgacaagcucuacaucuggggcguccaccaccccgggacggacagcgaccagaucucccuguacgcccaggccagcggccggaucaccgugagcaccaagcgcucccagcagaccgugaucccgaacaucggcagccggccccgcguccgggacguguccagccgcaucuccaucuacuggacgaucgugaagcccggggacauccugcucaucaacagcaccggcaaccugaucgcgccccggggguacuucaagauccgcuccggcaagagcuccaucaugcggagcgacgccccgaucggcaagugcaacuccgagugcaucacccccaacgggagcauccccaacgacaagcccuuccagaacgucaaccgcaucaccuacggcgccugcccgcgguacgugaagcagaacacgcugaagcucgccaccgggaugcgcaacgugcccgagaagcagacccggggcaucuucggggccaucgccggcuucaucgagaacggcugggaggggauggucgacggcugguacggguuccgccaccagaacuccgagggcaccgggcaggccgcggaccugaaguccacgcaggccgccaucaaccagaucaacggcaagcugaaccggcucaucggcaagaccaacgagaaguuccaccagaucgagaaggaguucuccgagguggaggggcgcauccaggaccuggagaaguacguggaggacaccaagaucgaccuguggagcuacaacgccgagcuccuggucgcccuggagaaccagcacaccaucgaccucacggacuccgagaugaacaagcuguucgagcggaccaagaagcagcugcgcgagaacgcggaggacaugggcaacgggugcuucaagaucuaccacaagugcgacaacgccugcaucggcagcauccgcaacgggaccuacgaccacgacguguaccgggacgaggcccucaacaaccgcuuccagaucaagggcguggagcugaaguccggcuacaaggacuggauccuguggaucagcuucgccaucagcugcuuccuccugugcgucgcccugcucggguucaucaugugggcgugccagaagggcaacauccggugcaacaucugcaucuga

SEQ ID NO: 64256 - RNA, 1701 nt, Artificial Sequence
  derived and/or modified CDS sequence (opt1) from hemagglutinin__InfluenzaA__AAZ38462
augaagaccaucaucgcccugagcuacauccucugccugguguucgcccagaagcugcccggcaacgacaacuccaccgcgacgcucugccuggggcaccacgccgucccgaacggcacccuggugaagaccaucaccagcgaccagaucgaggugacgaacgccaccgagcucguccaguccagcuccaccgggcgcaucugcgacagcccccaccggauccuggacggcgagaacugcacccugaucgacgcccuccugggggacccccacugcgacggcuuccagaacaaggagugggaccuguucguggagcgcuccaaggccuacagcaacugcuaccccuacgacgugccggacuacgcgucccuccggagccuggucgccuccagcggcacgcuggaguucaacaacgaguccuucaacuggaccgggguggcccagaacggcaccagcuucgccugcaagcgccgguccaucaagagcuucuucucccgccucaacuggcugcaccagcugaaguacaaguaccccgcgcucaacgugaccaugcccaacaacgacaaguucgacaagcuguacaucuggggcguccacuaccccgggacggacagcgaccagaccucccuguacgcccaggccagcgggcgggugaccgugagcaccaagcgcucccagcagacggucaucccgaacaucggcagccggcccugggugcgcggcguguccagccggaucuccaucuacuggaccaucgucaagcccggggacauccuccugaucaacagcaccggcaaccugaucgcgccccgcggguacuucaagauccgguccggcaagagcuccaucaugcgcagcgacgccccgaucggcaagugcaacuccgagugcaucacccccaacgggagcauccccaacggcaagcccuuccagaacgugaaccggaucacguacggggccugcccgcgcuacgugaagcagaacacccucaagcuggccaccggcaugcggaacguccccgagaagcagacccgcgggaucuucggcgccaucgccggcuucaucgagaacgggugggagggcaugguggacgggugguacggcuuccggcaccagaacuccgaggggacgggccaggccgcggaccucaagagcacccaggccgccaucaaccagaucaacggcaagcugaaccgccugaucgagaagaccaacgagaaguuccaccagaucgagaaggaguucaccgagguggaggggcggauccaggaccuggagaaguacgucgaggacacgaagaucgaccucugguccuacaacgccgagcugcugguggcccucgagaaccagcacaccaucgaccugaccgacagcgagaugaacaagcuguucgagcgcacccgccggcagcuccgcgagaacgcggaggacaugggcaacgggugcuucaagaucuaccacaagugcgacaacgccugcaucggcuccauccggaacgggacguacgaccacgacguguaccgcgacgaggcccugaacaaccgguuccagaucaagggcgucgagcucaagagcggcuacaaggacuggauccuguggaucuccuucgccaccagcugcuuccugcugugcgugguccuccugggguucaucaugugggccugccagaagggcaacauccgcugcaacaucugcaucuga

SEQ ID NO: 64257 - RNA, 1701 nt, Artificial Sequence
  derived and/or modified CDS sequence (opt1) from hemagglutinin__InfluenzaA__AAZ38473
augaagaccaucaucgcccugagcuacauccucugccugguguucgcccagaagcugcccggcaacgacaacuccaccgcgacgcucugccuggggcaccacgccgucccgaacggcacccuggugaagaccaucaccagcgaccagaucgaggugacgaacgccaccgagcucguccaguccagcuccaccgggcgcaucugcgacagcccccaccggauccuggacggcgagaacugcacccugaucgacgcccuccugggggacccccacugcgacggcuuccagaacaaggagugggaccuguucguggagcgcuccaaggccuacagcaacugcuaccccuacgacgugccggacuacgcgucccuccggagccuggucgccuccagcggcacgcuggaguucaacaacgaguccuucaacuggaccgggguggcccagaacggcaccagcuucacgugcaagcgccgguccaucaagagcuucuucucccgccucaacuggcugcaccagcugaaguacaaguaccccgcccucaacgugaccaugcccaacaacgacaaguucgacaagcuguacaucuggggcguccaccaccccagcaccgacuccgaccagaccagccuguacgcgcaggccagcgggcgggugaccguguccacgaagcgcagccagcagaccgucaucccgaacaucgggucccggcccugggugcgcggcgugagcucccggaucagcaucuacuggaccaucgucaagcccggcgacauccuccugaucaacuccaccgggaaccugaucgcgccccgcggcuacuucaagauccggagcgggaaguccagcaucaugaaguccgacgccccgaucggcaagugcaacagcgagugcaucacgcccaacggcuccauccccaacgacaagcccuuccagaacgugaaccgcaucaccuacggggccugcccgcgguacgugaagcagaacacccucaagcuggccaccggcaugcgcaacguccccgagaagcagacgcgggggaucuucggcgccaucgccggguucaucgagaacggcugggagggcaugguggacgggugguacggcuuccgccaccagaacagcgaggggaccggccaggccgccgaccugaaguccacccaggcggccaucaaccagaucaacgggaagcucaaccggcugaucgagaagaccaacgagaaguuccaccagaucgagaaggaguucacggagguggagggccgcauccaggaccuggagaaguacgucgaggacaccaagaucgaccucuggagcuacaacgccgagcugcugguggcccucgagaaccagcacaccaucgaccugaccgacuccgagaugaacaagcuguucgagcggacgcgcaagcagcuccgcgagaacgccgaggacaugggcaacgggugcuucaagaucuaccacaagugcgacaacgugugcaucggcagcauccggaacgggaccuacgaccacgacgucuaccgcgacgaggcgcugaacaaccgguuccagaucaagggcguggagcugaaguccggguacaaggacuggauccucuggaucagcuucgccaccagcugcuuccugcugugcgucgugcuccugggcuucaucaugugggccugccagaagggcaacauccgcugcaacaucugcaucuga

SEQ ID NO: 64258 - RNA, 1701 nt, Artificial Sequence; identical to SEQ ID NO: 64210
  derived and/or modified CDS sequence (opt1) from hemagglutinin__InfluenzaA__AAZ38484

SEQ ID NO: 64259 - RNA, 1701 nt, Artificial Sequence
  derived and/or modified CDS sequence (opt1) from hemagglutinin__InfluenzaA__AAZ38495
augaagaccaucaucgcccugagcuacauccucugccugguguucgcccagaagcugcccggcaacgacaacuccaccgcgacgcucugccuggggcaccacgccgucccgaacggcacccuggugaagaccaucaccaacgaccagaucgaggugacgaacgccaccgagcucguccagagcuccagcaccgggcgcaucugcgacagcccccaccagauccuggacggcgagaacugcacccugaucgacgcccuccugggggacccccacugcgacggcuuccagaacaaggagugggaccuguucguggagcggagcaaggccuacuccaacugcuaccccuacgacgugccggacuacgcgagccuccgcucccuggucgccagcuccggcacgcuggaguucaacaacgagagcuucaacuggaccgggguggcccagaacggcaccuccagcgccugcaagcggcgcuccaacaagagcuucuucucccggcucaacuggcugcaccagcugaaguacaaguaccccgcgcucaacgugaccaugcccaacaacgagaaguucgacaagcuguacaucuggggcguccaccaccccagcacggacuccgaccagaucagccuguacgcccaggccagcgggcgcgugaccguguccaccaagcggagccagcagaccgucaucccgaacaucgggucccgccccugggugcggggcgugagcuccaagaucagcaucuacuggacgaucgucaagcccggcgacauccuccugaucaacuccaccgggaaccugaucgcgccccgcggcuacuucaagauccggagcgggaaguccagcaucaugcgcuccgacgccccgaucggcaagugcaacagcgagugcaucacccccaacggcuccauccccaacgacaagcccuuccagaacgugaaccggaucaccuacggggccugcccgcgcuacgugaagcagaacacgcucaagcuggccaccggcaugcggaacguccccgagaagcagacccgcgggaucuucggcgccaucgccggguucaucgagaacggcugggagggcaugguggacgggugguacggcuuccggcaccagaacagcgaggggaccggccaggccgcggaccugaaguccacgcaggccgccaucaaccagaucaacgggaagcucaaccgccugaucgagaagaccaacgagaaguuccaccagaucgagaaggaguucagcgagguggagggccggauccaggaccuggagaaguacgucgaggacaccaagaucgaccucugguccuacaacgccgagcugcugguggcccucgagaaccagcacaccaucgaccugacggacagcgagaugaacaagcuguucgagcgcaccaagaagcagcuccgggagaacgcggaggacaugggcaacgggugcuucaagaucuaccacaagugcgacaacgccugcaucggcuccauccgcaacgggaccuacgaccacgacguguaccgcgacgaggcccugaacaaccgguuccagaucaagggcgucgagcugaaguccggguacaaggacuggauccucuggaucagcuucgccaucuccugcuuccugcugugcgugguccuccugggcuucaucaugugggccugccagaagggcaacauccgcugcaacaucugcaucuga

SEQ ID NO: 64260 - RNA, 1701 nt, Artificial Sequence
  derived and/or modified CDS sequence (opt1) from hemagglutinin__InfluenzaA__AAZ38517
augaagaccaucaucgcccugagcuacauccucugccugguguucgcccagaagcugcccggcaacgacaacuccaccgcgacgcucugccuggggcaccacgccgucccgaacggcaccaucgugaagaccaucaccaacgaccagaucgaggugacgaacgccaccgagcugguccagagcuccagcaccgggggcaucugcgacagcccccaccagauccucgacggggagaacugcacccugaucgacgcccugcucggcgacccccagugcgacggcuuccagaacaagaagugggaccuguucguggagcgcagcaaggccuacuccaacugcuaccccuacgacgugccggacuacgcgagccugcggucccucgucgccagcuccgggacgcuggaguucaacaacgagagcuucaacuggaccggcgugacccagaacgggaccuccagcgccugcaagcgccgguccaacaacagcuucuucucccgccugaacuggcucacgcaccugaaguucaaguaccccgcccugaacgugaccaugcccaacaacgagaaguucgacaagcucuacaucuggggcguccaccaccccgggaccgacaacgaccagaucagccuguacgcgcaggccuccggccggaucaccgugagcacgaagcgcagccagcagaccgugaucccgaacaucggcucccggccccgcguccgggacauccccagccgcaucuccaucuacuggaccaucgugaagcccggggacauccugcucaucaacagcaccggcaaccugaucgccccgcggggguacuucaagauccgcuccggcaagagcuccaucaugcggagcgacgcccccaucggcaagugcaacuccgagugcaucacgcccaacgggagcauccccaacgacaagccguuccagaacgugaaccgcaucaccuacggcgccugcccccgguacgucaagcagaacacccugaagcucgcgaccgggaugcgcaacgugcccgagaagcagacgcggggcaucuucggggccaucgccggcuucaucgagaacggcugggaggggaugguggacggcugguacggguuccgccaccagaacuccgagggcaucgggcaggccgccgaccugaaguccacccaggcggccaucaaccagaucaacggcaagcugaaccggcucaucggcaagaccaacgagaaguuccaccagaucgagaaggaguucuccgaggucgaggggcgcauccaggaccuggagaaguacguggaggacaccaagaucgaccuguggagcuacaacgccgagcuccugguggcccuggagaaccagcacacgaucgaccucaccgacuccgagaugaacaagcuguucgagcggaccaagaagcagcugcgcgagaacgccgaggacaugggcaacgggugcuucaagaucuaccacaagugcaacaacgcgugcaucggcagcauccgcaacgggaccuacgaccacgacgucuaccgggacgaggcccucaacaaccgcuuccagaucaagggcguggagcugaaguccggcuacaaggacuggauccuguggaucagcuucgccaucuccugcuuccuccugugcgugguccugcucggguucaucaugugggccugccagaagggcaacauccggugcaacaucugcaucuga

SEQ ID NO: 64261 - RNA, 1701 nt, Artificial Sequence
  derived and/or modified CDS sequence (opt1) from hemagglutinin__InfluenzaA__AAZ38539
augaagaccaucaucgcccugagcuacauccucugccugguguucgcccagaagcugcccggcaacgacaacuccaccgcgacgcucugccuggggcaccacgccgucccgaacggcacccuggugaagaccaucaccaacgaccagaucgaggugacgaacgccaccgagcucguccagagcuccagcaccgggcgcaucugcgacagcccccaccagauccuggacggcgagaacugcacccugaucgacgcccuccugggggacccccacugcgacggcuuccagaacaaggagugggaccuguucguggagcggagcaaggccuacuccaacugcuaccccuacgacgugccggacuacgucagccuccgcucccugguggcgagcuccggcacgcuggaguucaacaacgagagcuucaacuggaccgggguggcccagaacggcaccuccagcgccugcaagcggcgcuccgacaagagcuucuucucccggcucaacuggcugcaccagcugaaguacaaguaccccgcccucaacgucaccaugcccaacaacgagaaguucgacaagcuguacaucuggggcgugcaccaccccgggacggacagcgaccagaucucccuguacgcgcaggccagcgggcgcgugaccgucagcaccaagcggucccagcagaccgugaucccgaacaucggcagccgccccugggugcggggcgucuccagcaagaucuccaucuacuggacgaucgugaagcccggggacaucuuccucaucaacagcaccggcaaccugaucgcgccccgcggguacuucaagauccgguccggcaagagcuccaucaugcgcagcgacgccccgaucggcaagugcaacuccgagugcaucacccccaacgggagcauccccaacgacaagcccuuccagaacgugaaccggaucaccuacggcccgugcccccgcuacgucaagcagaacacgcugaagcucgccaccgggaugcggaacgugcccgagaagcagacccgcggcaucuucggggccaucgccggcuucaucgagaacggcugggaggggaugauggacggcugguacggguuccggcaccagaacuccgagggcaccgggcaggccgccgaccugaaguccacgcaggccgcgaucaaccagaucaacggcaagcugaaccgccucaucgagaagaccaacgagaaguuccaccagaucgagaaggaguucuccgagguggagggccggauccaggaccuggagaaguacgucgaggacaccaagaucgaccuguggagcuacaacgccgagcuccugguggcccuggagaaccagcacaccaucgaccucacggacuccgagaugaacaagcuguucgagcgcaccaagaagcagcugcgggagaacgccgaggacauggggaacggcugcuucaagaucuaccacaagugcgacaacgccugcaucgggagcauccgcaacggcaccuacgaccacgacguguaccgcgacgaggcgcucaacaaccgguuccagaucaagggggucgagcugaaguccggcuacaaggacuggauccuguggaucagcuucgccaucagcugcuuccuccugugcaucgugcugcucggcuucaucaugugggccugccagaaggggaacauccgcugcaacaucugcaucuga

SEQ ID NO: 64262 - RNA, 1701 nt, Artificial Sequence; identical to SEQ ID NO: 64210
  derived and/or modified CDS sequence (opt1) from hemagglutinin__InfluenzaA__AAZ38561

SEQ ID NO: 64263 - RNA, 1701 nt, Artificial Sequence
  derived and/or modified CDS sequence (opt1) from hemagglutinin__InfluenzaA__AAZ38583
augaagaccaucaucgcccugagcuacauccucugccugguguucgcccagaagauccccggcaacgacaacuccaccgcgacgcugugccucgggcaccacgccgucccgaacggcaccaucgugaagaccaucaccaacgaccagaucgaggugacgaacgccaccgagcugguccagagcuccagcaccgggggcaucugcgacagcccccaccagauccuggacggggagaacugcacccucaucgacgcccugcugggcgacccccagugcgacggcuuccagaacaagaagugggaccucuucguggagcgcuccaaggccuacuccaacugcuaccccuacgacgugccggacuacgcgagccugcggucccuggucgccagcuccgggacgcucgaguucaacaacgagagcuucaacuggaccggcgugacccagaacgggaccuccagcgccugcaagcgccgguccaacaacagcuucuucucccgccugaacuggcugacgcaccucaaguucaaguaccccgcccugaacgugaccaugcccaacaacgagaaguucgacaagcuguacaucuggggcguccaccaccccgggaccaacaacgaccagaucagccucuacgcgcaggccuccggccggaucaccgugagcacgaagcgcagccagcagaccgugaucccgaacaucggcucccggccccgcguccgggacauccccagccgcaucuccaucuacuggaccaucgugaagcccggggacauccugcugaucaacagcaccggcaaccucaucgccccgcggggguacuucaagauccgcuccggcaagagcuccaucaugcggagcgacgcccccaucggcaagugcaacuccgagugcaucacgcccaacgggagcauccccaacgacaagccguuccagaacgugaaccgcaucaccuacggcgccugcccccgguacgucaagcagaacacccugaagcuggcgaccgggaugcgcaacgugcccgagaagcagacgcggggcaucuucggggccaucgccggcuucaucgagaacggcugggaggggaugguggacggcugguacggguuccgccaccagaacuccgagggcaucgggcaggccgccgaccucaagagcacccaggcggccaucaaccagaucaacggcaagcugaaccggcugaucggcaagaccaacgagaaguuccaccagaucgagaaggaguucuccgaggucgaggggcgcauccaggaccucgagaaguacguggaggacaccaagaucgaccuguggagcuacaacgccgagcugcucguggcccuggagaaccagcacacgaucgaccugaccgacuccgagaugaacaagcuguucgagcggaccaagaagcagcuccgcgagaacgccgaggacaugggcaacgggugcuucaagaucuaccacaagugcgacaacgcgugcaucggcagcauccgcaacgggaccuacgaccacgacgucuaccgggacgaggcccugaacaaccgcuuccagaucaagggcguggagcucaaguccggcuacaaggacuggaucaucuggaucagcuucgccaucuccugcuuccugcugugcguggcccuccugggguucaucaugugggccugccagaagggcaacauccggugcaacaucugcaucuga

SEQ ID NO: 64264 - RNA, 1701 nt, Artificial Sequence
  derived and/or modified CDS sequence (opt1) from hemagglutinin__InfluenzaA__AAZ38594
augaagaccaucaucgcccugagcuacauccucugccugguguucgcccagaagcugcccggcaacgacaacuccaccgcgacgcucugccuggggcaccacgccgucccgaacggcaccaucgugaagaccaucaccaacgaccagaucgaggugacgaacgccaccgagcugguccagagcuccagcaccgggggcaucugcgacagcccccaccagauccucgacggggagaacugcacccugaucgacgcccugcucggcgacccccagugcgacggcuuccagaacaagaagugggaccuguucguggagcgcagcaaggccuacuccaacugcuaccccuacgacgugccggacuacgcgagccugcggucccucgucgccagcuccgggacgcuggaguucaacaacgagagcuucaacuggaccggcgugacccagaacgggaccuccagcgccugcaagcgccgguccaacagcuccuucuucagccgccugaacuggcucacgcaccugaaguucaaguaccccgcccugaacgugaccaugcccaacaacgagaaguucgacaagcucuacaucuggggcguccaccaccccgggaccgacaacgaccagaucucccuguacgcgcaggccagcggccggaucaccgugagcacgaagcgcucccagcagaccgugaucccgaacaucggcagccggccccgcguccgggacauccccucccgcaucagcaucuacuggaccaucgugaagcccggggacauccugcucaucaacuccaccggcaaccugaucgccccgcggggguacuucaagauccgcagcggcaaguccagcaucaugcgguccgacgcccccaucggcaagugcaacagcgagugcaucacgcccaacggguccauccccaacgacaagccguuccagaacgugaaccgcaucaccuacggcgccugcccccgguacgucaagcagaacacccugaagcucgcgaccgggaugcgcaacgugcccgagaagcagacgcggggcaucuucggggccaucgccggcuucaucgagaacggcugggaggggaugguggacggcugguacggguuccgccaccagaacagcgagggcaucgggcaggccgccgaccugaaguccacccaggcggccaucaaccagaucaacggcaagcugaaccggcucaucggcaagaccaacgagaaguuccaccagaucgagaaggaguucagcgaggucgaggggcgcauccaggaccuggagaaguacguggaggacaccaagaucgaccugugguccuacaacgccgagcuccugguggcccuggagaaccagcacacgaucgaccucaccgacagcgagaugaacaagcuguucgagcggaccaagaagcagcugcgcgagaacgccgaggacaugggcaacgggugcuucaagaucuaccacaagugcgacaacgcgugcaucggcuccauccgcaacgggaccuacgaccacgacgucuaccgggacgaggcccucaacaaccgcuuccagaucaagggcguggagcugaaguccggcuacaaggacuggauccuguggaucuccuucgccaucagcugcuuccuccugugcguggcccugcucggguucaucaugugggccugccagaagggcaacauccggugcaacaucugcaucuga

SEQ ID NO: 64265 - RNA, 1701 nt, Artificial Sequence
  derived and/or modified CDS sequence (opt1) from hemagglutinin__InfluenzaA__AAZ38605
augaagaccaucaucgcccugagcuacauccucugccugguguucacccagaagcugcccggcaacgacaacuccacggccacccucugccuggggcaccacgcggucccgaacggcaccaucgugaagaccaucacgaacgaccagaucgaggugaccaacgccaccgagcugguccagagcuccagcaccgggggcaucugcgacagcccccaccagauccucgacggggagaacugcacgcugaucgacgcccugcucggcgacccccagugcgacggcuuccagaacaagaagugggaccuguucguggagcgcagcaaggccuacuccaacugcuaccccuacgacgugccggacuacgccagccugcggucccucgucgcgagcuccgggacccuggaguucaacaacgagagcuucaacuggaccggcgugacccagaacgggacguccagcgccugcaagcgccgguccaacaacagcuucuucucccgccugaacuggcucacccaccugaaguucaaguaccccgcccugaacgugaccaugcccaacaacgagaaguucgacaagcucuacaucuggggcguccaccaccccgggaccgacaacgaccagaucagccuguacgcccaggcguccggccggaucacggugagcaccaagcgcagccagcagaccgugaucccguccaucggcagccggccccgcauccgggacguccccucccgcaucagcaucuacuggaccaucgugaagcccggggacauccugcucaucaacuccacgggcaaccugaucgccccgcggggguacuucaagauccgcagcggcaaguccagcaucaugcgguccgacgcccccaucggcaagugcaacagcgagugcaucacccccaacggguccauccccaacgacaagccguuccagaacgugaaccgcaucaccuacggcgccugcccccgguacgucaagcagaacacccugaagcucgccacggggaugcgcaacgugcccgagaagcagacccggggcaucuucggggcgaucgccggcuucaucgagaacggcugggaggggaugguggacggcugguacggguuccgccaccagaacagcgagggcaccgggcaggccgccgaccugaaguccacccaggccgcgaucaaccagaucaacggcaagcugaaccggcucaucggcaagacgaacgagaaguuccaccagaucgagaaggaguucagcgaggucgaggggcgcauccaggaccuggagaaguacguggaggacaccaagaucgaccugugguccuacaacgccgagcuccugguggcccuggagaaccagcacaccaucgaccucaccgacagcgagaugaacaagcuguucgagcggacgaagaagcagcugcgcgagaacgccgaggacaugggcaacgggugcuucaagaucuaccacaagugcgacaacgccugcaucggcuccauccgcaacgggaccuacgaccacgacgucuaccgggacgaggcgcucaacaaccgcuuccagaucaagggcguggagcugaaguccggcuacaaggacuggauccuguggaucuccuucgccaucagcugcuuccuccugugcguggcccugcucggguucaucaugugggccugccagaagggcaacauccggugcaacaucugcaucuga

SEQ ID NO: 64266 - RNA, 1698 nt, Artificial Sequence
  derived and/or modified CDS sequence (opt1) from hemagglutinin__InfluenzaA__AAZ38627
augaaggccaagcugcucgugcugcugugcaccuucaccgccacguacgcggacaccaucugcaucggcuaccacgccaacaacagcaccgacaccgucgacacggugcucgagaagaacgugaccgucacccacuccgugaaccugcuggaggacagccacaacgggaagcucugccugcugaagggcaucgcgccccuccagcuggggaacugcuccguggccggcuggauccuggggaacccggagugcgagcuccugaucagcaaggaguccuggagcuacaucgucgagacccccaaccccgagaacggcacgugcuaccccggcuacuucgccgacuacgaggagcugcgcgagcagcucuccagcguguccagcuucgagcgguucgagaucuucccgaagggguccagcuggcccaaccacaccgugaccggcgucuccgccagcugcucccacaacggcaagagcuccuucuaccgcaaccugcuguggcucaccgggaagaacgggcuguaccccaaccugagcauguccuacgugaacaacaaggagaaggaggugcucguccuguggggcgugcaccacccgcccaacaucggcgaccagcgggcccuguaccacacggagaacgccuacgugagcgucgugagcucccacuacagccgccgguucacccccgagaucgccaagcgccccaaggugcgggaccaggaggggcgcaucaacuacuacuggacccuccuggagcccggcgacaccaucaucuucgaggcgaacgggaaccugaucgccccgugguacgccuucgcccucucccggggcuucggcagcgggaucaucacguccaacgcccccauggacgagugcgacgcgaagugccagacgccccagggcgccaucaacagcucccugcccuuccagaacguccacccggugaccaucggggagugccccaaguacgugcgcagcgccaagcugcggauggccaccggccuccgcaacauccccuccauccagagccgggggcuguucggcgccaucgcgggcuucaucgagggcggguggaccgggauggucgacggcugguacggguaccaccaccagaacgagcagggcuccggcuacgccgccgaccagaaguccacccagaacgccaucaacgggaucaccaacaaggugaacagcgugaucgagaagaugaacacccaguucacggccgucggcaaggaguucaacaagcuggagcgccggauggagaaccucaacaagaagguggacgacggguuccuggacaucuggaccuacaacgcggagcugcucguccugcuggagaacgagcgcacccucgacuuccacgacagcaacgugaagaaccuguacgagaaggugaagucccagcugaagaacaacgccaaggagaucggcaacgggugcuucgaguucuaccacaagugcaacaacgagugcauggagagcgucaagaacggcaccuacgacuaccccaaguacuccgaggagagcaagcucaaccgggagaagaucgacggcgugaagcuggaguccauggggguguaccagauccuggccaucuacagcacggucgccagcucccucgugcugcuggugagccucggcgccaucuccuucuggaugugcagcaacgggucccugcagugccgcaucugcaucuga

SEQ ID NO: 64267 - RNA, 1701 nt, Artificial Sequence
  derived and/or modified CDS sequence (opt1) from hemagglutinin__InfluenzaA__AAZ38638
augaagaccaucaucgcccugagcuacauccucugccugguguucgcccagaagcugcccggcaacgacaacuccaccgcgacgcucugccuggggcaccacgccgucccgaacggcaccaucgugaagaccaucaccaacgaccagaucgaggugacgaacgccaccgagcugguccagagcuccagcaccgggggcaucugcgacagcccccaccagauccucgacggggagaacugcacccugaucgacgcccugcucggcgacccccagugcgacggcuuccagaacaagaagugggaccuguucguggagcgcagcaaggccuacuccaacugcuaccccuacgacgugccggacuacgcgagccugcggucccucgucgccagcuccgggacgcuggaguucaacaacgagagcuucaacuggaccggcgugacccagaacgggaccuccagcgccugcaagcgccgguccaacaacagcuucuucucccgccugaacuggcucacgcaccugaaguucaaguaccccgcccugaacgugaccaugcccaacaacgagaaguucgacaagcucuacaucuggggcguccaccaccccgggaccgacaacgaccagaucagccuguacgcgcaggccuccggccggaucaccgugagcacgaagcgcagccagcagaccgugaucccgaacaucggcucccggccccgcguccgggacauccccagccgcaucuccaucuacuggaccaucgugaagcccggggacauccugcucaucaacagcaccggcaaccugaucgccccgcggggguacuucaagauccgcuccggcaagagcuccaucaugcggagcgacgcccccaucggcaagugcaacuccgagugcaucacgcccaacgggagcauccccaacgacaagccguuccagaacgugaaccgcaucaccuacggcgccugcccccgguacgucaagcagaacacccugaagcucgcgaccgggaugcgcaacgugcccgagaagcagacgcggggcaucuucggggccaucgccggcuucaucgagaacggcugggaggggaugguggacggcugguacggguuccgccaccagaacuccgagggcaucgggcaggccgccgaccugaaguccacccaggcggccaucaaccagaucaacggcaagcugaaccggcucaucggcaagaccaacgagaaguuccaccagaucgagaaggaguucuccgaggucgaggggcgcauccaggaccuggagaaguacguggaggacaccaagaucgaccuguggagcuacaacgccgagcuccugguggcccuggagaaccagcacacgaucgaccucaccgacuccgagaugaacaagcuguucgagcggaccaagaagcagcugcgcgagaacgccgaggacaugggcaacgggugcuucaagaucuaccacaagugcgacaacgcgugcaucggcagcauccgcaacgggaccuacgaccacgacgucuaccgggacgaggcccucaacaaccgcuuccagaucaagggcguggagcugaaguccggcuacaaggacuggauccuguggaucagcuucgccaucuccugcuuccuccugugcguggcccugcucggguucaucaugugggccugccagaagggcaacauccggugcaacaucugcaucuga

SEQ ID NO: 64268 - RNA, 1701 nt, Artificial Sequence; identical to SEQ ID NO: 64267
  derived and/or modified CDS sequence (opt1) from hemagglutinin__InfluenzaA__AAZ38650

SEQ ID NO: 64269 - RNA, 1701 nt, Artificial Sequence
  derived and/or modified CDS sequence (opt1) from hemagglutinin__InfluenzaA__AAZ43370
augaagaccaucaucgcccugagcuacaucuucugccucguguucgcccagaagcugcccggcaacgacaacuccaccgcgacgcugugccucgggcaccacgccgucccgaacggcacccuggugaagaccaucaccaacgaccagaucgaggugacgaacgccaccgagcugguccagagcuccagcaccgggcgcaucugcgacagcccccaccggauccucgacggcaagaacugcacccugaucgacgcccugcucggggacccccacugcgacggcuuccagaacgagaagugggaccuguucaucgagcgcagcaaggccuucuccaacugcuaccccuacgacgugccggacuacgcgagccugcggucccucguggccagcuccggcacgcuggaguucaucaacgagggguucaacuggaccggcgucacccagagcgggggcuccuacgccugcaagcgcgggagcgugaaguccuucuucagccggcugaacuggcucuacgaguccgaguacaaguaccccgcccugaacgugaccaugcccaacaacggcaaguucgacaagcuguacaucuggggcguccaccaccccagcacggagaaggagcagaccaaccucuacgugcgcgcguccgggcgggugaccgucagcaccaagcgcagccagcagacggugaucccgaacaucggcucccggcccugggugcgcgggcugagcucccggaucagcaucuacuggaccaucgucaagcccggcgacauccugcucaucaacuccaccggcaaccugaucgcgccccgcggguacuucaagauccggaccggcaagagcuccaucaugcgcagcgacgccccgaucgggacgugcuccagcgagugcaucacccccaacggcuccauccccaacgacaagcccuuccagaacgugaacaagaucaccuacggggccugcccgcgguacgugaagcagaacacccugaagcucgccacgggcaugcgcaacguccccgagaagcagacccggggcaucuucggggccaucgccggcuucaucgagaacgggugggagggcaugguggacgggugguacggcuuccgccaccagaacagcgagggcaccgggcaggccgccgaccugaaguccacccaggccgcgaucgaccagaucaacggcaagcugaaccggcucaucgagaagacgaacgagaaguuccaccagaucgagaaggaguucagcgagguggaggggcgcauccaggaccuggagaaguacgucgaggacaccaagaucgaccugugguccuacaacgccgagcuccugguggcccuggagaaccagcacaccaucgaccucaccgacagcgagaugaacaagcuguucgagaagacgcggaagcagcugcgcgagaacgccgaggacaugggcaacgggugcuucaagaucuaccacaagugcgacaacgccugcaucggcuccauccgcaacggcaccuacgaccacgacguguaccgggacgaggcgcucaacaaccgcuuccagaucaagggggucgagcugaaguccggcuacaaggacuggauccuguggaucuccuucgccaucagcugcuuccuccugugcgugguccugcucggguucaucaugugggccugccagaagggcaacauccggugcaacaucugcaucuga

SEQ ID NO: 64270 - RNA, 1701 nt, Artificial Sequence; identical to SEQ ID NO: 64142
  derived and/or modified CDS sequence (opt1) from hemagglutinin__InfluenzaA__AAZ43394

SEQ ID NO: 64271 - RNA, 1701 nt, Artificial Sequence
  derived and/or modified CDS sequence (opt1) from hemagglutinin__InfluenzaA__AAZ43405
augaagaccaucaucgcccugagcuacauccucugccugguguucgcccagaagcugcccggcaacgacaacuccaccgcgacgcucugccuggggcaccacgccgucccgaacggcacccuggugaagaccaucaccaacgaccagaucgaggugacgaacgccaccgagcucguccagagcuccagcaccgggcgcaucugcgacagcccccaccagauccuggacggcgagaacugcacccugaucgacgcccuccugggggacccccacugcgacggcuuccagaacaaggagugggaccuguucguggagcggagcaaggccuacuccaacugcuaccccuacgacgugccggacuacgcgagccuccgcucccuggucgccagcuccggcacgcuggaguucaacaacgagagcuucaacuggaccgggguggcccagaacggcaccuccagcgccugcaagcggcgcuccaacaagagcuucuucucccggcucaacuggcugcaccagcugaaguacaaguaccccgcgcucaacgugaccaugcccaacaacgagaaguucgacaagcuguacaucuggggcguccaccaccccagcacggacuccgaccagaucagccuguacgcccaggccagcgggcgcgugaccguguccaccaagcggagccagcagaccgucaucccgaacaucgggucccgccccugggugcggggcgugagcucccgcaucagcaucuacuggacgaucgucaagcccggcgacauccuccugaucaacugcaccgggaaccugaucgcgccccggggcuacuucaagauccgcuccgggaaguccuccaucaugcggagcgacgccuccaucggcaagugcaacagcgagugcaucaccccgaacggcuccauccccaacgacaagcccuuccagaacgugaaccgcaucaccuacggggccugcccccgguacgugaagcagaacacgcucaagcuggccaccggcaugcgcaacgucccggagaagcagacccgggggaucuucggcgccaucgccggguucaucgagaacggcugggagggcaugguggacgggugguacggcuuccgccaccagaacagcgaggggaccggccaggccgcggaccugaaguccacgcaggccgccaucaaccagaucaacgggaagcucaaccggcugaucgagaagaccaacgagaaguuccaccagaucgagaaggaguucagcgagguggagggccgcauccaggaccuggagaaguacgucgaggacaccaagaucgaccucugguccuacaacgccgagcugcugguggcccucgagaaccagcacaccaucgaccugacggacagcgagaugaacaagcuguucgagcggaccaagaagcagcuccgcgagaacgcggaggacaugggcaacgggugcuucaagaucuaccacaagugcgacaacgccugcaucggcuccauccgcaacgggaccuacgaccacgacguguaccgggacgaggcccugaacaaccgcuuccagaucaagggcgucgagcucaagagcggguacaaggacuggauccuguggaucagcuucgccaucuccugcuuccugcugugcgugguccuccugggcuucaucaugugggccugccagaagggcaacauccggugcaacaucugcaucuga

SEQ ID NO: 64272 - RNA, 1701 nt, Artificial Sequence; identical to SEQ ID NO: 64071
  derived and/or modified CDS sequence (opt1) from hemagglutinin__InfluenzaA__AAZ74352

SEQ ID NO: 64273 - RNA, 1701 nt, Artificial Sequence; identical to SEQ ID NO: 64227
  derived and/or modified CDS sequence (opt1) from hemagglutinin__InfluenzaA__AAZ74363

SEQ ID NO: 64274 - RNA, 1698 nt, Artificial Sequence
  derived and/or modified CDS sequence (opt1) from hemagglutinin__InfluenzaA__AAZ74374
augaaggugaagcugcucauccugcugugcaccuucaccgccacguacgccgacaccaucugcaucggcuaccacgcgaacaacagcaccgacaccgucgacacggugcucgagaagaacgugaccgucacccacuccgugaaccugcuggaggacagccacaacgggaagcucugccugcugaagggcaucgcgccccuccagcuggggaacugcuccguggccggcuggauccuggggaacccggagugcgagcuccugaucagcaaggaguccuggagcuacaucgucgagacccccaaccccgagaacggcgccugcuaccccggcuacuucgccgacuacgaggagcugcgcgagcagcucuccagcguguccagcuucgagcgguucgagaucuucccgaaggaguccagcuggcccaaccacacggugaccggggucuccgccagcugcucccacaacggcaagagcuccuucuaccgcaaccugcuguggcucaccgggaagaacggccuguaccccaaccugagcaaguccuacgccaacaacaaggagaaggaggugcucauccuguggggcgugcaccacccgcccaacaucggggaccagcggacccuguaccacacggagaacgccuacgucagcguggugagcucccacuacggccgccgguucacccccgagaucaccaagcgccccaagguccgggaccaggaggggcgcaucaacuacuacuggacccuccuggagcccggcgacacgaucaucuucgaggccaacgggaaccugaucgcgccgugguacgccuucgcccucagccggggcuucggcuccgggaucaucaccagcaacgcccccauggacgagugcgacgccaagugccagacgccccagggcgcgaucaacuccagccugcccuuccagaacgugcacccggugaccaucggggagugccccaaguacguccgcuccgccaagcugcggauggugaccggccuccgcaacauccccagcauccagucccgggggcuguucggcgccaucgccggcuucaucgagggcggguggaccgggaugguggacggcugguacggguaccaccaccagaacgagcagggcagcggcuacgccgcggaccagaaguccacccagaacgccaucaacgggaucaccaacaaggucaacagcgugaucgagaagaugaacacgcaguucaccgccgugggcaaggaguucaacaagcuggagcgccggauggagaaccucaacaagaaggucgacgacggguuccuggacguguggaccuacaacgccgagcugcucguccugcuggagaacgagcgcacccucgacuuccacgacuccaacgugaagaaccuguacgagaaggucaagagccagcugaagaacaacgccaaggagaucggcaacgggugcuucgaguucuaccacaagugcaacaacgagugcauggaguccgugaagaacggcacguacgacuaccccaaguacagcgaggaguccaagcucaaccgggagaagaucgacggcgugaagcuggacagcauggggguguaccagauccuggcgaucuacuccaccgucgccagcagccucgugcugcuggugucccucggcgccaucagcuucuggaugugcuccaacgggagccugcagugccgcaucugcaucuga

SEQ ID NO: 64275 - RNA, 1701 nt, Artificial Sequence
  derived and/or modified CDS sequence (opt1) from hemagglutinin__InfluenzaA__AAZ74397
augaacaccaucaucgcccugagcuacauccucugccugguguucgcccagaagcugcccggcaacgacaacuccaccgcgacgcucugccuggggcaccacgccgucccgaacggcacccuggugaagaccaucaccagcgaccagaucgaggugacgaacgccaccgagcucguccaguccagcuccaccgggcgcaucugcgacagcccccaccggauccuggacggcgagaacugcacccugaucgacgcccuccugggggacccccugugcgacggcuuccagaacaaggagugggaccucuucguggagcgcuccaaggccuacagcaacugcuaccccuacgacgugccggacuacgcgucccugcggagccuggucgccuccagcggcacgcucgaguucaacaacgaguccuucaacuggaccgggguggcccagaacggcaccagcuucgccugcaagcgccgguccaucaagagcuucuucucccgccugaacuggcugcaccagcucaaguacaaguaccccgcgcugaacgugaccaugcccaacaacgacaaguucgacaagcuguacaucuggggcguccaccaccccgggacggacagcgaccagaccucccucuacgcccaggccagcgggcgggugaccgugagcaccaagcgcucccagcagacggucaucccgaacaucggcagccggcccugggugcgcggcguguccagccggaucuccaucuacuggaccaucgucaagcccggggacauccugcugaucaacagcaccggcaaccucaucgcgccccgcggguacuucaagauccgguccggcaagagcuccaucaugcgcagcgacgccccgaucggcaagugcaacuccgagugcaucacccccaacgggagcauccccaacggcaagcccuuccagaacgugaaccggaucacguacggggccugcccgcgcuacgugaagcagaacacccugaagcuggccaccggcaugcggaacguccccgagaagcagacccgcgggaucuucggcgccaucgccggcuucaucgagaacgggugggagggcaugguggacgggugguacggcuuccggcaccagaacuccgaggggacgggccaggccgcggaccucaagagcacccaggccgccaucaaccagaucaacggcaagcugaaccgccugaucgagaagaccaacgagaaguuccaccagaucgagaaggaguucaccgagguggaggggcggauccaggaccucgagaaguacgucgaggacacgaagaucgaccugugguccuacaacgccgagcugcucguggcccuggagaaccagcacaccaucgaccugaccgacagcgagaugaacaagcuguucgagcgcacccgcaagcagcuccgggagaacgcggaggacaugggcaacgggugcuucaagaucuaccacaagugcgacaacgccugcaucggcuccauccgcaacgggacguacgaccacgacguguaccgggacgaggcccugaacaaccgcuuccagaucaagggcgucgagcucaagagcggcuacaaggacuggauccuguggaucuccuucgccaccagcugcuuccugcucugcgugguccugcugggguucaucaugugggccugccagaagggcaacauccggugcaacaucugcaucuga

SEQ ID NO: 64276 - RNA, 1701 nt, Artificial Sequence
  derived and/or modified CDS sequence (opt1) from hemagglutinin__InfluenzaA__AAZ74408
augaagaccaucaucgcccugagcuacauccucugccugguguucgcccagaagcugcccggcaacgacaacuccaccgcgacgcucugccuggggcaccacgccgucccgaacggcacccuggugaagaccaucaccaacgaccagaucgaggugacgaacgccaccgagcucguccagagcuccagcaccgggcgcaucugcgacagcccccaccagauccuggacggcgagaacugcacccugaucgacgcccuccugggggacccccacugcgacggcuuccagaacaaggagugggaccuguucguggagcggagcaaggccuacuccaacugcuaccccuacgacgugccggacuacgcgagccuccgcucccuggucgccagcuccggcacgcuggaguucaacaacgagagcuucaacuggaccgggguggcccagaacggcaccuccagcgccugcaagcggcgcuccaacaagagcuucuucucccggcucaacuggcugcaccagcugaaguacaaguaccccgcgcucaacgugaccaugcccaacaacgagaaguucgacaagcuguacaucuggggcguccaccaccccagcacggacuccgaccagaucagccuguacgcccaggccagcgggcgcgugaccguguccaccaagcggagccagcagaccgucaucccgaacaucgggucccgccccugggugcggggcgugagcucccgcaucagcaucuacuggacgaucgucaagcccggcgacauccuccugaucaacuccaccgggaaccugaucgcgccccggggcuacuucaagauccgcagcgggaaguccagcaucaugcgguccgacgccccgaucggcaagugcaacagcgagugcaucacccccaacggcuccauccccaacgacaagcccuuccagaacgugaaccgcaucaccuacggggccugcccgcgguacgugaagcagaacacgcucaagcuggccaccggcaugcgcaacguccccgagaagcagacccgggggaucuucggcgccaucgccggguucaucgagaacggcugggagggcaugguggacgggugguacggcuuccgccaccagaacagcgaggggaccggccaggccgcggaccugaaguccacgcaggccgccaucaaccagaucaacgggaagcucaaccggcugaucgagaagaccaacgagaaguuccaccagaucgagaaggaguucagcgagguggagggccgcauccaggaccuggagaaguacgucgaggacaccaagaucgaccucugguccuacaacgccgagcugcugguggcccucgagaaccagcacaccaucgaccugacggacagcgagaugaacaagcuguucgagcggaccaagaagcagcuccgcgagaacgcggaggacaugggcaacgggugcuucaagaucuaccacaagugcgacaacgccugcaucggcuccauccgcaacgggaccuacaaccacgacguguaccgggacgaggcccugaacaaccgcuuccagaucaagggcgucgagcugaaguccggguacaaggacuggauccucuggaucagcuucgccaucuccugcuuccugcugugcgugguccuccugggcuucaucaugugggccugccagaagggcaacauccggugcaacaucugcaucuga

SEQ ID NO: 64277 - RNA, 1701 nt, Artificial Sequence; identical to SEQ ID NO: 64210
  derived and/or modified CDS sequence (opt1) from hemagglutinin__InfluenzaA__AAZ74430

SEQ ID NO: 64278 - RNA, 1701 nt, Artificial Sequence; identical to SEQ ID NO: 64267
  derived and/or modified CDS sequence (opt1) from hemagglutinin__InfluenzaA__AAZ74441

SEQ ID NO: 64279 - RNA, 1701 nt, Artificial Sequence
  derived and/or modified CDS sequence (opt1) from hemagglutinin__InfluenzaA__AAZ74452
augaagaccaucaucgcccugagcuacauccucugccugguguucgcccagaagcugcccggcaacgacaacuccaccgcgacgcucugccuggggcaccacgccgucccgaacggcaccaucgugaagaccaucaccaacgaccagaucgaggugacgaacgccaccgagcugguccagagcuccagcaccgggggcaucugcgacagcccccaccagauccucgacggggagaacugcacccugaucgacgcccugcucggcgacccccagugcgacggcuuccagaacaagaagugggaccuguucaucgagcgcagcaaggccuacuccaacugcuaccccuacgacgugccggacuacgcgagccugcggucccucguggccagcuccgggacgcuggaguucaacaacgagagcuucaacuggaccggcgucacccagaacgggaccuccagcgccugcaagcgccgguccaacaacagcuucuucucccgccugaacuggcucacgcaccugaaguucaaguaccccgcccugaacgugaccaugcccaacaacgagaaguucgacaagcucuacaucuggggcgugcaccaccccgggaccgacaacgaccagaucagccuguacgcgcaggccuccggccggaucaccgucagcacgaagcgcagccagcagaccgugaucccgaacaucggcucccggccccgcgugcgggacauccccagccgcaucuccaucuacuggaccaucgucaagcccggggacauccugcucaucaacagcaccggcaaccugaucgccccgcggggguacuucaagauccgcuccggcaagagcuccaucaugcggagcgacgcccccaucggcaagugcaacuccgagugcaucacgcccaacgggagcauccccaacgacaagccguuccagaacgugaaccgcaucaccuacggcgccugcccccgguacgugaagcagaacacccugaagcucgcgaccgggaugcgcaacguccccgagaagcagacgcggggcaucuucggggccaucgccggcuucaucgagaacggcugggaggggaugguggacggcugguacggguuccgccaccagaacuccgagggcaucgggcaggccgccgaccugaaguccacccaggcggccaucaaccagaucaacggcaagcugaaccggcucaucggcaagaccaacgagaaguuccaccagaucgagaaggaguucuccgagguggaggggcgcauccaggaccuggagaaguacgucgaggacaccaagaucgaccuguggagcuacaacgccgagcuccugguggcccuggagaaccagcacacgaucgaccucaccgacuccgagaugaacaagcuguucgagcggaccaagaagcagcugcgcgagaacgccgaggacaugggcaacgggugcuucaagaucuaccacaagugcgacaacgcgugcaucggcagcauccgcaacgggaccuacgaccacgacguguaccgggacgaggcccucaacaaccgcuuccagaucaagggcgucgagcugaaguccggcuacaaggacuggauccuguggaucagcuucgccaucuccugcuuccuccugugcguggcccugcucggguucaucaugugggccugccagaagggcaacauccggugcaacaucugcaucuga

SEQ ID NO: 64280 - RNA, 1701 nt, Artificial Sequence
  derived and/or modified CDS sequence (opt1) from hemagglutinin__InfluenzaA__AAZ74463
augaagaccaucaucgcccugagcuacauccucugccugguguucgcccagaagcugcccggcaacgacaacuccaccgcgacgcucugccuggggcaccacgccgucccgaacggcaccaucgugaagaccaucaccaacgaccagaucgaggugacgaacgccaccgagcugguccagagcuccagcaccgggggcaucugcgacagcccccaccagauccucgacggggagaacugcacccugaucgacgcccugcucggcgacccccagugcgacggcuuccagaacaagaagugggaccuguucguggagcgcagcaaggccuacuccaacugcuaccccuacgacgugccggacuacgcgagccugcggucccucgucgccagcuccgggacgcuggaguucaacaacgagagcuucaacuggaccggcgugacccagaacgggaccuccagcgccugcaagcgccgguccaacaacagcuucuucucccgccugaacuggcucacgcaccugaaguucaaguaccccgcccugaacgugaccaugcccaacaacgagaaguucgacaagcucuacaucuggggcguccaccaccccgggaccgacaacgaccagaucagccuguacgcgcaggccuccggccggaucaccgugagcacgaagcgcagccagcagaccgugaucccgaacaucggcucccggccccgcguccgggacauccccagccgcaucuccaucuacuggaccaucgugaagcccggggacauccugcucaucaacagcaccggcaaccugaucgccccgcggggguacuucaagauccgcuccggcaagagcuccaucaugcggagcgacgcccccaucggcaagugcaacuccgagugcaucacgcccaacgggagcauccccaacgacaagccguuccagaacgugaaccgcaucaccuacggcgccugcccccgguacgucaagcagaacacccugaagcucgcgaccgggaugcgcaacgugcccgagaagcagacgcggggcaucuucggggccaucgccggcuucaucgagaacggcugggaggggaugguggacggcugguacggguuccgccaccagaacuccgagggcaucgggcaggccgccgaccugaaguccacccaggcggccaucaaccagaucaacggcaagcugaaccggcucaucggcaagaccaacgagaaguuccaccagaucgagaaggaguucuccgaggucgaggggcgcauccaggaccuggagaaguacguggaggacaccaagaucgaccuguggagcuacaacgccgagcuccugguggcccuggagaaccagcacacgaucgaccucaccgacuccgagaugaacaagcuguucgagcggaccaagaagcagcugcgcgagaacgccgaggacaugggcaacgggugcuucaagaucuaccacaagugcgacaacgcgugcaucggcagcauccgcaacgggaccuacgaccacgacgucuaccgggacgaggcccucaacaaccgcuuccagaucaagggcguggagcugaaguccggcuacaaggacuggauccuguggaucagcuucgccaucuccugcuuccuccugugcgugguccugcucggguucaucaugugggccugccagaagggcaacauccggugcaacaucugcaucuga

SEQ ID NO: 64281 - RNA, 1701 nt, Artificial Sequence
  derived and/or modified CDS sequence (opt1) from hemagglutinin__InfluenzaA__AAZ74474
augaagaccaucaucgcccugagcuacauccucugccugguguucgcccagaagcugcccggcaacgacaacuccaccgcgacgcucugccuggggcaccacgccgucccgaacggcaccaucgugaagaccaucaccaacgaccagaucgaggugacgaacgccaccgagcugguccagagcuccagcaccgggggcaucugcgacagcccccaccagauccucgacggggagaacugcacccugaucgacgcccugcucggcgacccccagugcgacggcuuccagaacaagaagugggaccuguucguggagcgcagcaaggccuacuccaacugcuaccccuacgacgugccggacuacgcgagccugcggucccucgucgccagcuccgggacgcuggaguucaacaacgagagcuucaacuggaccggcgugacccagaacgggaccuccagcgccugcaagaagcgcuccaacaacagcuucuucucccggcugaacuggcucacgcaccugaaguucaaguaccccgcccugaacgugaccaugcccaacaacgagaaguucgacaagcucuacaucuggggcguccaccaccccgggaccgacaacgaccagaucagccuguacgcgcaggccuccggccgcaucaccgugagcacgaagcggagccagcagaccgugaucccgaacaucggcucccgcccccggguccgcgacauccccagccggaucuccaucuacuggaccaucgugaagcccggggacauccugcucaucaacagcaccggcaaccugaucgccccgcgcggguacuucaagauccgguccggcaagagcuccaucaugcgcagcgacgcccccaucggcaagugcaacuccgagugcaucacgcccaacgggagcauccccaacgacaagccguuccagaacgugaaccggaucaccuacggcgccugcccccgcuacgucaagcagaacacccugaagcucgcgaccgggaugcggaacgugcccgagaagcagacgcgcggcaucuucggggccaucgccggcuucaucgagaacggcugggaggggaugguggacggcugguacggguuccggcaccagaacuccgagggcaucgggcaggccgccgaccugaaguccacccaggcggccaucaaccagaucaacggcaagcugaaccgccucaucggcaagaccaacgagaaguuccaccagaucgagaaggaguucuccgaggucgaggggcggauccaggaccuggagaaguacguggaggacaccaagaucgaccuguggagcuacaacgccgagcuccugguggcccuggagaaccagcacacgaucgaccucaccgacuccgagaugaacaagcuguucgagcgcaccaagaagcagcugcgggagaacgccgaggacaugggcaacgggugcuucaagaucuaccacaagugcgacaacgcgugcaucggcagcauccgcaacgggaccuacgaccacgacgucuaccgcgacgaggcccucaacaaccgguuccagaucaagggcguggagcugaaguccggcuacaaggacuggauccuguggaucagcuucgccaucuccugcuuccuccugugcguggcccugcucggguucaucaugugggccugccagaagggcaacauccgcugcaacaucugcaucuga

SEQ ID NO: 64282 - RNA, 1701 nt, Artificial Sequence; identical to SEQ ID NO: 64279
  derived and/or modified CDS sequence (opt1) from hemagglutinin__InfluenzaA__AAZ74485

SEQ ID NO: 64283 - RNA, 1701 nt, Artificial Sequence; identical to SEQ ID NO: 64280
  derived and/or modified CDS sequence (opt1) from hemagglutinin__InfluenzaA__AAZ74496

SEQ ID NO: 64284 - RNA, 1701 nt, Artificial Sequence; identical to SEQ ID NO: 64279
  derived and/or modified CDS sequence (opt1) from hemagglutinin__InfluenzaA__AAZ74507

SEQ ID NO: 64285 - RNA, 1701 nt, Artificial Sequence; identical to SEQ ID NO: 64280
  derived and/or modified CDS sequence (opt1) from hemagglutinin__InfluenzaA__AAZ74518

SEQ ID NO: 64286 - RNA, 1701 nt, Artificial Sequence; identical to SEQ ID NO: 64279
  derived and/or modified CDS sequence (opt1) from hemagglutinin__InfluenzaA__AAZ74529

SEQ ID NO: 64287 - RNA, 1701 nt, Artificial Sequence
  derived and/or modified CDS sequence (opt1) from hemagglutinin__InfluenzaA__AAZ74551
augaagaccaucaucgcccugagcuacauccucugccugguguucgcccagaagcugcccggcaacgacaacuccaccgcgacgcucugccuggggcaccacgccgucccgaacggcaccaucgugaagaccaucaccaacgaccagaucgaggugacgaacgccaccgagcugguccagagcuccagcaccgggggcaucugcgacagcccccaccagauccucgacggggagaacugcacccugaucgacgcccugcucggcgacccccagugcgacggcuuccagaacaagaagugggaccuguucguggagcgcagcaaggccuacuccaacugcuaccccuacgacgugccggacuacgcgagccugcggucccucgucgccagcuccgggacgcuggaguucaacaacgagagcuucaacuggaccggcgugacccagaacgggaccuccagcgccugcaagcgccgguccaacaacagcuucuucucccgccugaacuggcucacgcaccugaaguucaaguaccccgcccugaacgugaccaugcccaacaacgagaaguucgacaagcucuacaucuggggcguccaccaccccgggaccgacaacgaccagaucagccuguacgcgcaggccuccggccggaucaccgugagcacgaagcgcagccagcagaccgugaucccgaacaucggcucccggccccgcguccgggacauccccagccgcaucuccaucuacuggaccaucgugaagcccggggacauccugcucaucaacagcaccggcaaccugaucgccccgcggggguacuucaagauccgcuccggcaagagcuccaucaugcggagcgacgcccccaucggcaagugcaacuccgagugcaucacgcccaacgggagcauccccaacgacaagccguuccagaacgugaaccgcaucaccuacggcgccugcccccgguacgucaagcagaacacccugaagcucgcgaccgggaugcgcaacgugcccgagaagcagacgcggggcaucuucggggccaucgccggcuucaucgagaacggcugggaggggaugguggacggcugguacggguuccgccaccagaacuccgagggcaucgggcaggccgccgaccugaaguccacccaggcggccaucaaccagaucaacggcaagcugaaccggcucaucggcaagaccaacgagaaguuccaccagaucgagaaggaguucuccgaggucgaggggcgcauccaggaccuggagaaguacguggaggacaccaagaucgaccuguggagcuacaacgccgagcuccugguggcccuggagaaccagcacacgcucgaccugaccgacuccgagaugaacaagcuguucgagcggaccaagaagcagcuccgcgagaacgccgaggacaugggcaacgggugcuucaagaucuaccacaagugcgacaacgcgugcaucggcagcauccgcaacgggaccuacgaccacgacgucuaccgggacgaggcccugaacaaccgcuuccagaucaagggcguggagcugaaguccggcuacaaggacuggauccucuggaucagcuucgccaucuccugcuuccugcugugcguggcccuccugggguucaucaugugggccugccagaagggcaacauccggugcaacaucugcaucuga

SEQ ID NO: 64288 - RNA, 1701 nt, Artificial Sequence; identical to SEQ ID NO: 64210
  derived and/or modified CDS sequence (opt1) from hemagglutinin__InfluenzaA__AAZ74562

SEQ ID NO: 64289 - RNA, 1701 nt, Artificial Sequence
  derived and/or modified CDS sequence (opt1) from hemagglutinin__InfluenzaA__AAZ74573
augaagaccaucaucgcccugagcuacauccucugccugguguucgcccagaagcugcccggcaacgacaacuccaccgcgacgcucugccuggggcaccacgccgucccgaacggcaccaucgugaagaccaucaccaacgaccagaucgaggugacgaacgccaccgagcugguccagagcuccagcaccgggggcaucugcgacagcccccaccagauccucgacggggagaacugcacccugaucgacgcccugcucggcgacccccagugcgacggcuuccagaacaagaagugggaccuguucaucgagcgcagcaaggccuacuccaacugcuaccccuacgacgugccggacuacgcgagccugcggucccucguggccagcuccgggacgcuggaguucaacaacgagagcuucaacuggaccggcgucacccagaacgggaccuccagcgccugcaagcgccgguccaacaacagcuucuucucccgccugaacuggcucacgcaccugaaguucaaguaccccgcccugaacgugaccaugcccaacaacgagaaguucgacaagcucuacaucuggggcgugcaccaccccgggaccggcaacgaccagaucagccuguacgcgcaggccuccggccggaucaccgucagcacgaagcgcagccagcagaccgugaucccgaacaucgggucccggccccgcgugcgggacauccccagccgcaucuccaucuacuggaccaucgucaagcccggcgacauccugcucaucaacagcaccgggaaccugaucgccccgcggggcuacuucaagauccgcuccggcaagagcuccaucaugcggagcgacgcccccaucgggaagugcaacuccgagugcaucacgcccaacggcagcauccccaacgacaagccguuccagaacgugaaccgcaucaccuacggggccugcccccgguacgugaagcagaacacccugaagcucgcgaccggcaugcgcaacguccccgagaagcagacgcgggggaucuucggcgccaucgccggcuucaucgagaacgggugggagggcaugguggacgggugguacggcuuccgccaccagaacuccgaggggaucggccaggccgccgaccugaaguccacccaggcggccaucaaccagaucaacggcaagcugaaccggcucaucgggaagaccaacgagaaguuccaccagaucgagaaggaguucuccgagguggagggccgcauccaggaccuggagaaguacgucgaggacaccaagaucgaccuguggagcuacaacgccgagcuccugguggcccuggagaaccagcacacgaucgaccucaccgacuccgagaugaacaagcuguucgagcggaccaagaagcagcugcgcgagaacgccgaggacauggggaacggcugcuucaagaucuaccacaagugcgacaacgcgugcaucgggagcauccgcaacggcaccuacgaccacgacguguaccgggacgaggcccucaacaaccgcuuccagaucaagggcgucgagcugaaguccggguacaaggacuggauccuguggaucagcuucgccaucuccugcuuccuccugugcguggcccugcucggcuucaucaugugggccugccagaaggggaacauccggugcaacaucugcaucuga

SEQ ID NO: 64290 - RNA, 1701 nt, Artificial Sequence
  derived and/or modified CDS sequence (opt1) from hemagglutinin__InfluenzaA__AAZ74584
augaagaccaucaucgcccugagcuacauccucugccugguguucgcccagaagcugcccggcaacgacaacuccaccgcgacgcucugccuggggcaccacgccgucccgaacggcacccuggugaagaccaucgccaacgaccagaucgaggugaccaacgccacggagcucguccagagcuccagcaccgggcgcaucugcgacagcccccaccagauccuggacggcgagaacugcacccugaucgacgcccuccugggggacccccacugcgacggcuuccagaacaaggagugggaccuguucguggagcggagcaaggcguacuccaacugcuaccccuacgacgugccggacuacgccagccuccgcucccuggucgccagcuccggcacccuggaguucaacaacgagagcuucaacuggacggggguggcccagaacggcaccuccagcgcgugcaagcggcgcuccaacaagagcuucuucucccggcucaacuggcugcaccagcugaaguacaaguaccccgcccagaacgugaccaugcccaacaacgagaaguucgacaagcucuacaucuggggcguccaccaccccagcaccgacuccgaccagaucagccuguacgcccaggccagcgggcgcgugacgguguccaccaagcggagccagcagaccgucaucccgaacaucgggucccgccccugggugcggggcgugagcucccgcaucagcaucuacuggaccaucgucaagcccggcgacauccugcucaucaacuccacggggaaccugaucgcgccccggggcuacuucaagauccgcagcgggaaguccagcaucaugcgguccgacgccccgaucggcaagugcaacagcgagugcaucacccccaacggcuccauccccaacgacaagcccuuccagaacgugaaccgcaucaccuacggggccugcccgcgguacgugaagcagaacacccugaagcucgccacgggcaugcgcaacguccccgagaagcagacccgggggaucuucggcgccaucgccggguucaucgagaacggcugggagggcaugguggacgggugguacggcuuccgccaccagaacagcgaggggaccggccaggcggccgaccugaaguccacccaggccgccaucaaccagaucaacgggaagcugaaccggcucaucgagaagacgaacgagaaguuccaccagaucgagaaggaguucagcgagguggagggccgcauccaggaccuggagaaguacgucgaggacaccaagaucgaccugugguccuacaacgccgagcuccugguggcgcuggagaaccagcacaccaucgaccucaccgacagcgagaugaacaagcuguucgagcggacgaagaagcagcugcgcgagaacgccgaggacaugggcaacgggugcuucaagaucuaccacaagugcgacaacgccugcaucggcuccauccgcaacgggaccuacgaccacgacguguaccgggacgaggcccucaacaaccgcuuccagaucaagggcgucgagcugaaguccggguacaaggacuggauccuguggaucagcuucgccaucuccugcuuccuccugugcguggcgcugcucggcuucaucaugugggccugccagaagggcaacauccggugcaacaucugcaucuga

SEQ ID NO: 64291 - RNA, 1701 nt, Artificial Sequence; identical to SEQ ID NO: 64267
  derived and/or modified CDS sequence (opt1) from hemagglutinin__InfluenzaA__AAZ74595

SEQ ID NO: 64292 - RNA, 1701 nt, Artificial Sequence
  derived and/or modified CDS sequence (opt1) from hemagglutinin__InfluenzaA__AAZ74617
augaagaccaucaucgcccugagcuacauccucugccugguguucgcccagaagcugcccgucaacgacaacuccaccgcgacgcucugccugggccaccacgccgugccgaacgggacccuggugaagaccaucaccaacgaccacaucgaggucacgaacgccaccgagcucgugcagagcuccagcaccggccgcaucugcgacagcccccaccagauccuggacggggagaacugcacccugaucgacgcccuccugggcgacccccacugcgacggguuccagaacaaggagugggaccuguucguggagcggagcacggccuacuccaacugcuaccccuacgacgucccggacuacgcgagccuccgcucccugguggccagcuccggcacccuggaguucaacaacgagagcuucaacuggaccggcguggcccagaacgggaccuccagcgccugcaagcggcgcuccaucaagagcuucuucucccggcucaacuggcugcaccagcugaaguacaaguaccccgcgcucaacgucacgaugcccaacaacgagaaguucgacaagcuguacaucuggggcgugcaccaccccagcaccgacuccgaccagaucagccuguacgcccaggccagcgggcgcgugaccgucuccaccaagcggagccagcagacggugaucccgaacaucggcucccgccccugggugcgcggggucagcuccaagaucagcaucuacuggaccaucgugaagcccggcgacauccuccugaucaacuccaccggcaaccugaucgcgccccggggguacuucaagauccggagcggcaaguccagcaucaugcgcuccaacgccccgaucgggaagugcaacagcgagugcaucacccccaacggcuccauccccaacgacaagcccuuccagaacgugaaccggaucacguacggcgccugcccgcgcuacgucaagcagaacacccucaagcuggccaccgggaugcggaacgugcccgagaagcagacccgcggcaucuucggggccaucgccggcuucaucgagaacgggugggagggcaugguggacggcugguacggguuccggcaccagaacagcgagggcacggggcaggccgcggaccugaaguccacccaggccgccaucaaccagaucaacggcaagcucaaccgccugaucgagaagaccaacgagaaguuccaccagaucgagaaggaguucagcgaggucgaggggcggauccaggaccuggagaaguacguggaggacaccaagaucgaccucugguccuacaacgccgagcugcugguggcccucgagaaccagcacacgaucgaccugaccgacagcgagaugaacaagcuguucgagcgcacccggaagcagcuccgcgagaacgcggaggacaugggcaacggcugcuucaagaucuaccacaagugcgacaacgccugcaucggguccauccgcaacggcaccuacgaccacgacgucuaccgggacgaggcccugaacaaccgcuuccagaucaaggggguggagcugaaguccggcuacaaggacuggauccucuggaucagcuucgccaucuccugcuuccugcugugcgucgugcuccugggguucaucaugugggccugccagaagggcaacauccggugcaacaucugcaucuga

SEQ ID NO: 64293 - RNA, 1701 nt, Artificial Sequence; identical to SEQ ID NO: 64071
  derived and/or modified CDS sequence (opt1) from hemagglutinin__InfluenzaA__AAZ79505

SEQ ID NO: 64294 - RNA, 1701 nt, Artificial Sequence
  derived and/or modified CDS sequence (opt1) from hemagglutinin__InfluenzaA__AAZ79516
augaagaccaucaucgcccugagcuacauccucugccugguguucgcccagaagcugcccggcaacgacaacuccaccgcgacgcucugccuggggcaccacgccgucccgaacggcacccuggugaagaccaucaccaacgaccagaucgaggugacgaacgccaccgagcucguccagagcuccagcaccgggcgcaucugcgacagcccccaccagauccuggacggcgagaacugcacccugaucgacgcccuccugggggacccccacugcgacggcuuccagaacaaggagugggaccuguucguggagcgguccaaggccuacuccaacugcuaccccuacgacgugccggacuacgcgagccuccgcucccuggucgccagcuccggcacgcuggaguucaacaacgagagcuucaacuggaccgggguggcccagaacggcaccuccagcgccugcaagcggcgcuccaacaagagcuucuucucccggcucaacuggcugcaccagcugaaguacaaguaccccgcgcucaacgugaccaugcccaacaacgagaaguucgacaagcuguacaucuggggcguccaccaccccagcacggacuccgaccagaucagccuguacgcccaggccagcgggcgcgugaccguguccaccaagcggagccagcagaccgucaucccgaacaucgggucccgccccugggugcggggcgugagcucccgcaucagcaucuacuggacgaucgucaagcccggcgacauccuccugaucaacuccaccgggaaccugaucgcgccccggggcuacuucaagauccgcagcgggaaguccagcaucaugcgguccgacgccccgaucggcaagugcaacagcgagugcaucacccccaacggcuccauccccaacgacaagcccuuccagaacgugaaccgcaucaccuacggggccugcccgcgguacgugaagcagaacacgcucaagcuggccaccggcaugcgcaacguccccgagaagcagacccgggggaucuucggcgccaucgccggguucaucgagaacggcugggagggcaugguggacgggugguacggcuuccgccaccagaacagcgaggggaccggccaggccgcggaccugaaguccacgcaggccgccaucaaccagaucaacgggaagcucaaccggcugaucgagaagaccaacgagaaguuccaccagaucgagaaggaguucagcgagguggagggccgcauccaggaccuggagaaguacgucgaggacaccaagaucgaccucugguccuacaacgccgagcugcugguggcccucgagaaccagcacaccaucgaccugacggacagcgagaugaacaagcuguucgagcggaccaagaagcagcuccgcgagaacgcggaggacaugggcaacgggugccugaagaucuaccacaagugcgacaacgccugcaucggcuccauccgcaacgggaccuacgaccacgacguguaccgggacgaggcccugaacaaccgcuuccagaucaagggcgucgagcucaagagcggguacaaggacuggauccuguggaucagcuucgccaucuccugcuuccugcucugcgugguccugcugggcuucaucaugugggccugccagaagggcaacauccggugcaacaucugcaucuga

SEQ ID NO: 64295 - RNA, 1701 nt, Artificial Sequence
  derived and/or modified CDS sequence (opt1) from hemagglutinin__InfluenzaA__AAZ79527
augaagaccaucaucgcccugagcuacauccucugccugguguucgcccagaagcugcccggcaacgacaacuccaccgcgacgcucugccuggggcaccacgccgucccgaacggcaccaucgugaagaccaucaccaacgaccagaucgaggugacgaacgccaccgagcugguccagagcuccagcaccgggggcaucugcgacagcccccaccagauccucgacggggagaacugcacccugaucgacgcccugcucggcgacccccagugcgacggcuuccagaacaagaagugggaccuguucguggagcgcagcaaggccuacuccaacugcuaccccuacgacgugccggacuacgcgagccugcggucccucgucgccagcuccgggacgcuggaguucaacaacgagagcuucgacuggaccggcgugacccagaacgggaccuccagcgccugcaagcgccgguccaacaagagcuucuucucccgccugaacuggcucacgcaccugaaguacaaguaccccgcccugaacgugaccaugcccaacaacgagaaguucgacaagcucuacaucuggggcguccaccaccccgggaccgacagcgaccagaucucccuguacgcgcaggccagcggccggaucaccgugagcacgaagcgcucccagcagaccgugaucccgaacaucggcagccggccccgcguccgggacguguccagccgcaucuccaucuacuggaccaucgugaagcccggggacauccugcucaucaacagcaccggcaaccugaucgcgccccggggguacuucaagauccgcuccggcaagagcuccaucaugcggagcgacgccccgaucggcaagugcaacuccgagugcaucacgcccaacgggagcauccccaacgacaagcccuuccagaacgucaaccgcaucaccuacggcgccugcccgcgguacgugaagcagaacacccugaagcucgccaccgggaugcgcaacgugcccgagcggcagacgcgcggcaucuucggggccaucgccggcuucaucgagaacggcugggaggggauggucgacggcugguacggguuccggcaccagaacuccgagggcaccgggcaggccgccgaccugaaguccacccaggcggccaucaaccagaucaacggcaagcugaaccgccucaucggcaagaccaacgagaaguuccaccagaucgagaaggaguucuccgagguggaggggcggauccaggaccuggagcgcuacguggaggacacgaagaucgaccuguggagcuacaacgccgagcuccuggucgcccuggagaaccagcacaccaucgaccucaccgacuccgagaugaacaagcuguucgagcgcaccaagaagcagcugcgggagaacgccgaggacaugggcaacgggugcuucaagaucuaccacaagugcgacaacgcgugcaucggcagcauccgcaacgggacguacgaccacgacguguaccgggacgaggcccucaacaaccgcuuccagaucaagggcguggagcugaaguccggcuacaaggacuggauccuguggaucagcuucgccaucagcugcuuccuccugugcgucgcccugcucggguucaucaugugggccugccagaagggcaacauccggugcaacaucugcaucuga

SEQ ID NO: 64296 - RNA, 1698 nt, Artificial Sequence
  derived and/or modified CDS sequence (opt1) from hemagglutinin__InfluenzaA__AAZ79549
augaaggugaagcugcucauccugcugugcaccuucaccgccacguacgccgacaccaucugcaucggcuaccacgcgaacaacagcaccgacaccgucgacacggugcucgagaagaacgugaccgucacccacuccgugaaccugcuggaggacagccacaacgggaagcucugccugcugaagggcaucgcgccccuccagcuggggaacugcuccguggccggcuggauccuggggaacccggagugcgagcuccugaucagcaaggaguccuggagcuacaucgucgagacccccaaccccgagaacggcgccugcuaccccggcuacuucgccgacuacgaggagcugcgcgagcagcucuccagcguguccagcuucgagcgguucgagaucuucccgaaggaguccagcuggcccaaccacacggugaccggggucuccgccagcugcucccacaacggcaagagcuccuucuaccgcaaccugcuguggcucaccgggaagaacggccuguaccccaaccugagcaaguccuacgccaacaacaaggagaaggaggugcucauccuguggggcgugcaccacccgcccaacaucgggaaccagcggacccuguaccacacggagaacgccuacgucagcguggugagcucccacuacagccgccgguucacccccgagaucaccaagcgccccaagguccgggaccaggagggccgcaucaacuacuacuggacccuccuggagcccggggacacgaucaucuucgaggccaacggcaaccugaucgcgccgugguacgccuucgcccucucccggggguucggcagcggcaucaucaccuccaacgcccccauggacgagugcgacgccaagugccagacgccccagggggcgaucaacagcucccugcccuuccagaacgugcacccggugaccaucggcgagugccccaaguacguccgcagcgccaagcugcggauggugaccgggcuccgcaacauccccuccauccagagccggggccuguucggggccaucgccggcuucaucgagggcggguggaccggcaugguggacgggugguacggcuaccaccaccagaacgagcagggguccggcuacgccgcggaccagaaguccacccagaacgccaucaacggcaucaccaacaaggucaacagcgugaucgagaagaugaacacgcaguucaccgccguggggaaggaguucaacaagcuggagcgccggauggagaaccucaacaagaaggucgacgacggcuuccuggacaucuggaccuacaacgccgagcugcucgugcugcuggagaacgagcgcacccucgacuuccacgacagcaacgucaagaaccuguacgagaaggugaagucccagcugaagaacaacgccaaggagaucgggaacggcugcuucgaguucuaccacaagugcaacaacgagugcauggagagcgugaagaacgggacguacgacuaccccaaguacuccgaggagagcaagcucaaccgggagaagaucgacggcgucaagcuggacuccaugggcguguaccagauccuggcgaucuacagcaccguggccagcucccucguccugcuggugagccucggggccaucuccuucuggaugugcagcaacggcucccugcagugccgcaucugcaucuga

SEQ ID NO: 64297 - RNA, 1701 nt, Artificial Sequence
  derived and/or modified CDS sequence (opt1) from hemagglutinin__InfluenzaA__AAZ79560
augaagaccaucaucgcccugagcuacauccucugccugguguucgcccagaagcugcccggcaacgacaacuccaccgcgacgcucugccuggggcaccacgccgucccgaacggcacccuggugaagaccaucaccaacgaccagaucgaggugacgaacgccaccgagcucguccagagcuccagcaccgggcgcaucugcgacagcccccaccagauccuggacggcgagaacugcacccugaucgacgcccuccugggggacccccacugcgacggcuuccagaacaaggagugggaccuguucguggagcggagcaaggccuacuccaacugcuaccccuacgacgugccggacuacgcgagccucaagucccuggucgccagcuccggcacgcuggaguucaacaacgagagcuucaacuggaccgggguggcccagaacggcaccuccagcgccugcaagcgccgguccaacaagagcuucuucucccgccucaacuggcugcaccagcugaaguacaaguaccccgcgcucaacgugaccaugcccaacaacgagaaguucgacaagcuguacaucuggggcguccaccaccccagcacggacuccgaccagaucagccuguacgcccaggccagcgggcgggugaccguguccaccaagcgcagccagcagaccgucaucccgaacaucgggucccggcccugggugcgcggcgugagcucccggaucagcaucuacuggacgaucgucaagcccggcgacauccuccugaucaacuccaccgggaaccugaucgcgccccgcggcuacuucaagauccggagcgggaaguccagcaucaugcgcuccaacgccccgaucggcaagugcaacagcgagugcaucacccccaacggcuccauccccaacgacaagcccuuccagaacgugaaccggaucaccuacggggccugcccgcgcuacgugaagcagaacacgcucaagcuggccaccggcaugcggaacguccccgagaagcagacccgcgggaucuucggcgccaucgccggguucaucgagaacggcugggagggcaugguggacgggugguacggcuuccggcaccagaacagcgaggggaccggccaggccgcggaccugaaguccacgcaggccgccaucaaccagaucaacgggaagcucaaccgccugaucgagaagaccaacgagaaguuccaccagaucgagaaggaguucagcgagguggagggccggauccaggaccuggagaaguacgucgaggacaccaagaucgaccucugguccuacaacgccgagcugcugguggcccucgagaaccagcacaccaucgaccugacggacagcgagaugaacaagcuguucgagcgcaccaagaagcagcuccgggagaacgcggaggacaugggcaacgggugcuucaagaucuaccacaagugcgacaacgccugcaucggcuccauccgcaacgggaccuacgaccacgacguguaccgcgacgaggcccugaacaaccgguuccagaucaagggcgucgagcugaaguccggguacaaggacuggauccucuggaucagcuucgccaucuccugcuuccugcugugcgugguccuccugggcuucaucaugugggccugccagaagggcaacauccgcugcaacaucugcaucuga

SEQ ID NO: 64298 - RNA, 1701 nt, Artificial Sequence
  derived and/or modified CDS sequence (opt1) from hemagglutinin__InfluenzaA__AAZ79571
augaagaccaucaucgcccugagcuacauccucugccugguguucgcccagaagcugcccggcaacgacaacuccaccgcgacgcucugccuggggcaccacgccgucccgaacggcacccuggugaagaccaucaccaacgaccagaucgaggugacgaacgccaccgagcucguccagagcuccagcaccgggcgcaucugcgacagcccccaccagauccuggacggcgagaacugcacccugaucgacgcccuccugggggacccccggugcgacggcuuccagaacaaggagugggaccuguucguggagcgcagcaaggccuacuccaacugcuaccccuacgacgugccggacuacgcgagccuccggucccuggucgccagcuccggcacgcuggaguucaacaacgagagcuucaacuggaccgggguggcccagaacggcaccuccagcgccugcaagcgccgguccaacaagagcuucuucucccgccucaacuggcugcaccagcugaaguacaaguaccccgcgcucaacgugaccaugcccaacaacgagaaguucgacaagcuguacaucuggggcguccaccaccccagcacggacuccgaccagaucagccuguacgcccaggccagcgggcgggugaccguguccaccaagcgcagccagcagaccgucaucccgaacaucgggucccggcccugggugcgcggcgugagcucccggaucagcaucuacuggacgaucgucaagcccggcgacauccuccugaucaacuccaccgggaaccugaucgcgccccgcggcuacuucaagauccggagcgggaaguccagcaucaugcgcuccgacgccccgaucggcaagugcaacagcgagugcaucacccccaacggcuccauccccaacgacaagcccuuccagaacgugaaccggaucaccuacggggccugcccgcgcuacgugaagcagaacacgcucaagcuggccaccggcaugcggaacguccccgagaagcagacccgcgggaucuucggcgccaucgccggguucaucgagaacggcugggagggcaugguggacgggugguacggcuuccggcaccagaacagcgaggggaccggccaggccgcggaccugaaguccacgcaggccgccaucaaccagaucaacgggaagcucaaccgccugaucgagaagaccaacgagaaguuccaccagaucgagaaggaguucagcgagguggagggccggauccaggaccuggagaaguacgucgaggacaccaagaucgaccucugguccuacaacgccgagcugcugguggcccucgagaaccagcacaccaucgaccugacggacagcgagaugaacaagcuguucgagcgcaccaagaagcagcuccgcgagaacgcggaggacaugggcaacgggugcuucaagaucuaccacaagugcgacaacgccugcaucggcuccauccggaacgggaccuacgaccacgacguguaccgcgacgaggcccugaacaaccgguuccagaucaagggcgucgagcugaaguccggguacaaggacuggauccucuggaucagcuucgccaucuccugcuuccugcugugcgugguccuccugggcuucaucaugugggccugccagaagggcaacauccgcugcaacaucugcaucuga

SEQ ID NO: 64299 - RNA, 1701 nt, Artificial Sequence
  derived and/or modified CDS sequence (opt1) from hemagglutinin__InfluenzaA__AAZ79582
augaagaccaucaucgcccugagcuacauccucugccugguguucgcccagaagcugcccggcaacgacaacuccaccgcgacgcucugccuggggcaccacgccgucccgaacggcacccuggugaagaccaucaccaacgaccagaucgaggugacgaacgccaccgagcucguccagagcuccagcaccgggcgcaucugcgacagcccccaccagauccuggacggcgagaacugcacccugaucgacgcccuccugggggacccccacugcgacggcuuccagaacaaggagugggaccuguucguggagcggagcaaggccuacuccaacugcuaccccuacgacgugccggacuacgcgagccuccgcucccuggucgccagcuccggcacgcuggaguucaacaacgagagcuucaacuggaccgggguggcccagaacggcaccuccagcgccugcaagcggcgcuccaacaagagcuucuucucccggcucaacuggcugcaccagcugaaguacaaguaccccgcgcucaacgugaccaugcccaacaacgagaaguucgacaagcuguacaucuggggcguccaccaccccagcacggacuccgaccagaucagccuguacgcccaggccagcgggcgcgugaccguguccaccaagcggagccagcagaccgucaucccgaacaucggguccggccccugggugcgcggcgugagcucccggaucagcaucuacuggacgaucgucaagcccggggacauccuccugaucaacuccaccggcaaccugaucgcgccccgcggguacuucaagauccggagcggcaaguccagcaucaugcgcuccgacgccccgaucggcaagugcaacagcgagugcaucacccccaacggguccauccccaacgacaagcccuuccagaacgugaaccggaucaccuacggcgccugcccgcgcuacgugaagcagaacacgcucaagcuggccaccgggaugcggaacguccccgagaagcagacccgcggcaucuucggggccaucgccggcuucaucgagaacggcugggaggggaugguggacggcugguacggguuccggcaccagaacagcgagggcaccgggcaggccgcggaccugaaguccacgcaggccgccaucaaccagaucaacggcaagcucaaccgccugaucgagaagaccaacgagaaguuccaccagaucgagaaggaguucagcgagguggagggccggauccaggaccuggagaaguacgucgaggacaccaagaucgaccucugguccuacaacgccgagcugcugguggcccucgagaaccagcacaccaucgaccugacggacagcgagaugaacaagcuguucgagcgcaccaagaagcagcuccgggagaacgcggaggacauggggaacggcugcuucaagaucuaccacaagugcgacaacgccugcaucggguccauccgcaacggcaccuacgaccacgacguguaccgcgacgaggcccugaacaaccgguuccagaucaagggggucgagcugaaguccggcuacaaggacuggauccucuggaucagcuucgccaucuccugcuuccugcugugcgugguccuccugggcuucaucaugugggccugccagaaggggaacauccgcugcaacaucugcaucuga

SEQ ID NO: 64300 - RNA, 1698 nt, Artificial Sequence
  derived and/or modified CDS sequence (opt1) from hemagglutinin__InfluenzaA__AAZ79604
augaaggccaagcugcucgugcugcugugcaccuucaccgccacguacgcggacaccaucugcaucggcuaccacgccaacaacagcaccgacaccgucgacacggugcucgagaagaacgugaccgucacccacuccgugaaccugcuggaggacagccacaacgggaagcucugccugcugaagggcaucgcgccccuccagcuggggaacugcuccguggccggcuggauccuggggaacccggagugcgagcuccugaucagcaaggaguccuggagcuacaucgucgagacccccaaccccgagaacggcacgugcuaccccggcuacuucgccgacuacgaggagcugcgcgagcagcucuccagcguguccagcuucgagcgguucgagaucuucccgaagggguccagcuggcccaaccacaccgugaccggcgucuccgccagcugcucccacaacggcaagagcuccuucuaccgcaaccugcuguggcucaccgggaagaacgggcuguaccccaaccugagcauguccuacgugaacaacaaggagaaggaggugcucguccuguggggcgugcaccacccgcccaacaucggcgaccagcgggcccuguaccacacggagaacgccuacgugagcgucgugagcucccacuacagccgccgguucacccccgagaucgccaagcgccccaaggugcgggaccaggaggggcgcaucaacuacuacuggacccuccuggagcccggcgacaccaucaucuucgaggcgaacgggaaccugaucgccccgugguacgccuucgcccucucccggggcuucggcagcgggaucaucacguccaacgcccccauggacgagugcgacgcgaagugccagacgccccagggcgccaucaacagcucccugcccuuccagaacguccacccggugaccaucggggagugccccaaguacgugcgcagcgccaagcugcggauggucaccggccuccgcaacauccccuccauccagagccgggggcuguucggcgccaucgccggcuucaucgagggcggguggaccgggaugguggacggcugguacggguaccaccaccagaacgagcagggcuccggcuacgcggccgaccagaaguccacccagaacgccaucaaccgcaucaccaacaaggugaacagcgucaucgagaagaugaacacccaguucacggccguggggaaggaguucaacaagcuggagcggcgcauggagaaccucaacaagaaggucgacgacggcuuccuggacaucuggaccuacaacgccgagcugcucgugcugcuggagaacgagcggacccucgacuuccacgacagcaacgugaagaaccuguacgagaaggucaagucccagcugaagaacaacgcgaaggagaucgggaacggcugcuucgaguucuaccacaagugcaacaacgagugcauggagagcgugaagaacgggaccuacgacuaccccaaguacuccgaggagagcaagcucaaccgcgagaagaucgacggcgugaagcuggaguccaugggcgucuaccagauccuggccaucuacagcacgguggccagcucccucgugcugcuggucagccucggggccaucuccuucuggaugugcagcaacggcucccugcagugccggaucugcaucuga

SEQ ID NO: 64301 - RNA, 1701 nt, Artificial Sequence
  derived and/or modified CDS sequence (opt1) from hemagglutinin__InfluenzaA__AAZ79615
augaagaccaucaucgcccugagcuacauccucugccugguguucgcccagaagauccccggcaacgacaacuccaccgcgacgcugugcgucgggcaccacgccgugccgaacggcaccaucgugaagaccaucaccaacgaccagaucgaggucacgaacgccaccgagcucgugcagagcuccagcaccgggggcaucugcgacagcccccaccagauccuggacggggagaacugcacccugaucgacgcccuccugggcgacccccagugcgacggcuuccagaacaagaagugggaccuguucguggagcgcagcaaggccuacuccaacugcuaccccuacgacgucccggacuacgcgagccuccggucccugguggccagcuccgggacgcuggaguucaacaacgagagcuucaacuggaccggcgugacccagaacgggaccuccagcgccugcaagcgccgguccaacaacagcuucuucucccgccucaacuggcugacgcaccugaaguucaaguaccccgcccucaacgucaccaugcccaacaacgagaaguucgacaagcuguacaucuggggcgugcaccaccccgggaccgacaacgaccagaucagccuguacgcgcaggccuccggccggaucaccgugagcacgaagcgcagccagcagaccgucaucccgaacaucggcucccggccccgcgugcgggacauccccagccgcaucuccaucuacuggaccaucgugaagcccggggacauccuccugaucaacagcaccggcaaccugaucgccccgcggggguacuucaagauccgcuccggcaagagcuccaucaugcggagcgacgcccccaucggcaagugcaacuccgagugcaucacgcccaacgggagcauccccaacgacaagccguuccagaacgucaaccgcaucaccuacggcgccugcccccgguacgugaagcagaacacccucaagcuggcgaccgggaugcgcaacgugcccgagaagcagacgcggggcaucuucggggccaucgccggcuucaucgagaacggcugggaggggauggucgacggcugguacggguuccgccaccagaacuccgagggcaucgggcaggccgccgaccugaaguccacccaggcggccaucaaccagaucaacggcaagcucaaccggcugaucggcaagaccaacgagaaguuccaccagaucgagaaggaguucuccgagguggaggggcgcauccaggaccuggagaaguacguggaggacaccaagaucgaccucuggagcuacaacgccgagcugcuggucgcccucgagaaccagcacacgaucgaccugaccgacuccgagaugaacaagcuguucgagcggaccaagaagcagcuccgcgagaacgccgaggacaugggcaacgggugcuucaagaucuaccacaagugcgacaacgcgugcaucggcagcauccgcaacgggaccuacgaccacgacguguaccgggacgaggcccugaacaaccgcuuccagaucaagggcguggagcugaaguccggcuacaaggacuggauccucuggaucagcuucgccaucuccugcuuccugcugugcgucgugcuccugggguucaucaugugggccugccagaagggcaacauccggugcaacaucugcaucuga

SEQ ID NO: 64302 - RNA, 1701 nt, Artificial Sequence
  derived and/or modified CDS sequence (opt1) from hemagglutinin__InfluenzaA__AAZ79627
augaagaccaucaucgcccugagcuacauccucugccugguguucgcccagaagcugcccggcaacgacaacuccaccgcgacgcucugccuggggcaccacgccgucccgaacggcaccaucgugaagaccaucaccaacgaccagaucgaggugacgaacgccaccgagcugguccagagcuccagcaccgggggcaucugcgacagcccccaccagauccucgacggggagaacugcacccugaucgacgcccugcucggcgacccccagugcgacggcuuccagaacaagaagugggaccuguucguggagcgcagcaaggccuacuccaacugcuaccccuacgacgugccggacuacgcgagccugcggucccucgucgccagcuccgggacgcuggaguucaacaacgagagcuucaacuggaccggcgugacccagaacgggaccuccagcgccugcaagcgccgguccaacagcuccuucuucagccgccugaacuggcucacgcaccugaaguucaaguaccccgcccugaaggugaccaugcccaacaacgagaaguucgacaagcucuacaucuggggcguccaccaccccgggaccgacaacgaccagaucucccuguacgcgcaggccagcggccggaucaccgugagcacgaagcgcucccagcagaccgugaucccgaacaucggcagccggccccgcguccgggacauccccucccgcaucagcaucuacuggaccaucgugaagcccggggacauccugcucaucaacuccaccggcaaccugaucgccccgcggggguacuucaagauccgcagcggcaaguccagcaucaugcgguccgacgcccccaucggcaagugcaacagcgagugcaucacgcccaacggguccauccccaacgacaagccguuccagaacgugaaccgcaucaccuacggcgccugcccccgguacgucaagcagaacacccugaagcucgcgaccgggaugcgcaacgugcccgagaagcagacgcggggcaucuucggggccaucgccggcuucaucgagaacggcugggaggggaugguggacggcugguacggguuccgccaccagaacagcgagggcaucgggcaggccgccgaccugaaguccacccaggcggccaucaaccagaucaacggcaagcugaaccggcucaucggcaagaccaacgagaaguuccaccagaucgagaaggaguucagcgaggucgaggggcgcauccaggaccuggagaaguacguggaggacaccaagaucgaccugugguccuacaacgccgagcuccugguggcccuggagaaccagcacacgaucgaccucaccgacagcgagaugaacaagcuguucgagcggaccaagaagcagcugcgcgagaacgccgaggacaugggcaacgggugcuucaagaucuaccacaagugcgacaacgcgugcaucggcuccauccgcaacgggaccuacgaccacgacgucuaccgggacgaggcccucaacaaccgcuuccagaucaagggcguggagcugaaguccggcuacaaggacuggauccuguggaucuccuucgccaucagcugcuuccuccugugcguggcccugcucggguucaucaugugggccugccagaagggcaacauccggugcaacaucugcaucuga

SEQ ID NO: 64303 - RNA, 1701 nt, Artificial Sequence; identical to SEQ ID NO: 64280
  derived and/or modified CDS sequence (opt1) from hemagglutinin__InfluenzaA__AAZ79941

SEQ ID NO: 64304 - RNA, 1701 nt, Artificial Sequence; identical to SEQ ID NO: 64279
  derived and/or modified CDS sequence (opt1) from hemagglutinin__InfluenzaA__AAZ79944

SEQ ID NO: 64305 - RNA, 1701 nt, Artificial Sequence
  derived and/or modified CDS sequence (opt1) from hemagglutinin__InfluenzaA__AAZ79963
augaagaccaucaucgcccugagcuacauccucugccugguguucgcccagaagcugcccggcaacgacaacuccaccgcgacgcucugccuggggcaccacgccgucccgaacggcaccaucgugaagaccaucaccaacgaccagaucgaggugacgaacgccaccgagcugguccagagcuccagcaccgggggcaucugcgacagcccccaccagauccucgacggggagaacugcacccugaucgacgcccugcucggcgacccccagugcgacggcuuccagaacaagaagugggaccuguucguggagcgcagcaaggccuacuccaacugcuaccccuacgacgugccggacuacgcgagccugcggucccucgucgccagcuccgggacgcuggaguucaacaacgagagcuucaacuggaccggcgugacccagaacgggaccuccagcgccugcaagcgccgguccaacaacagcuucuucucccgccugaacuggcucacgcaccugaaguucaaguaccccgcccugaacgugaccaugcccaacaacgagaaguucgacaagcucuacaucuggggcguccaccaccccgggaccgacaacgaccagaucagccuguacgcgcaggccuccggccggaucaccgugagcacgaagcgcagccagcagaccgugaucccguccaucggcagccggccccgcauccgggacguccccucccgcaucagcaucuacuggaccaucgugaagcccggggacauccugcucaucaacuccaccggcaaccugaucgccccgcggggguacuucaagauccgcagcggcaaguccagcaucaugcgguccgacgcccccaucggcaagugcaacagcgagugcaucacgcccaacggguccauccccaacgacaagccguuccagaacgugaaccgcaucaccuacggcgccugcccccgguacgucaagcagaacacccugaagcucgcgaccgggaugcgcaacgugcccgagaagcagacgcggggcaucuucggggccaucgccggcuucaucgagaacggcugggaggggaugguggacggcugguacggguuccgccaccagaacagcgagggcaccgggcaggccgccgaccugaaguccacccaggcggccaucaaccagaucaacggcaagcugaaccggcucaucggcaagaccaacgagaaguuccaccagaucgagaaggaguucagcgaggucgaggggcgcauccaggaccuggagaaguacguggaggacacgaagaucgaccugugguccuacaacgccgagcuccugguggcccuggagaaccagcacaccaucgaccucaccgacagcgagaugaacaagcuguucgagcggaccaagaagcagcugcgcgagaacgccgaggacaugggcaacgggugcuucaagaucuaccacaagugcgacaacgcgugcaucggcuccauccgcaacgggacguacgaccacgacgucuaccgggacgaggcccucaacaaccgcuuccagaucaagggcguggagcugaaguccggcuacaaggacuggauccuguggaucuccuucgccaucagcugcuuccuccugugcguggcccugcucggguucaucaugugggccugccagaagggcaacauccggugcaacaucugcaucuga

SEQ ID NO: 64306 - RNA, 1701 nt, Artificial Sequence
  derived and/or modified CDS sequence (opt1) from hemagglutinin__InfluenzaA__AAZ79974
augaagaccaucaucgcccugagcuacauccucugccugguguucgcccagaagcugcccggcaacgacaacuccaccgcgacgcucugccuggggcaccacgccgucccgaacggcaccaucgugaagaccaucaccaacgaccagaucgaggugacgaacgccaccgagcugguccagagcuccagcaccgggggcaucugcgacagcccccaccagauccucgacggggagaacugcacccugaucgacgcccugcucggcgacccccagugcgacggcuuccagaacaagaagugggaccuguucguggagcgcagcaaggccuacuccaacugcuaccccuacgacgugccggacuacgcgagccugcggucccucgucgccagcuccgggacgcuggaguucaacaacgagagcuucaacuggaccggcgugacccagaacgggaccuccagcgccugcaagcgccgguccaacaacagcuucuucucccgccugaacuggcucacgcaccugaaguucaaguaccccgcccugaacgugaccaugcccaacaacgagaaguucgacaagcucuacaucuggggcguccaccaccccgggaccaacaacgaccagaucagccuguacgcgcaggccuccggccggaucaccgugagcacgaagcgcagccagcagaccgugaucccgaacaucggcucccggccccgcguccgggacauccccagccgcaucuccaucuacuggaccaucgugaagcccggggacauccugcucaucaacagcaccggcaaccugaucgccccgcggggguacuucaagauccgcuccggcaagagcuccaucaugcggagcgacgcccccaucggcaagugcaacuccgagugcaucacgcccaacgggagcauccccaacgacaagccguuccagaacgugaaccgcaucaccuacggcgccugcccccgguacgucaagcagaacacccugaagcucgcgaccgggaugcgcaacgugcccgagaagcagacgcggggcaucuucggggccaucgccggcuucaucgagaacggcugggaggggaugguggacggcugguacggguuccgccaccagaacuccgagggcaucgggcaggccgccgaccugaaguccacccaggcggccaucaaccagaucaacggcaagcugaaccggcucaucggcaagaccaacgagaaguuccaccagaucgagaaggaguucuccgaggucgaggggcgcauccaggaccuggagaaguacguggaggacaccaagaucgaccuguggagcuacaacgccgagcuccugguggcccuggagaaccagcacacgaucgaccucaccgacuccgagaugaacaagcuguucgagcggaccaagaagcagcugcgcgagaacgccgaggacaugggcaacgggugcuucaagaucuaccacaagugcgacaacgcgugcaucggcagcauccgcaacgggaccuacgaccacgacgucuaccgggacgaggcccucaacaaccgcuuccagaucaagggcguggagcugaaguccggcuacaaggacuggauccuguggaucagcuucgccaucuccugcuuccuccugugcguggcccugcucggguucaucaugugggccugccagaagggcaacauccggugcaacaucugcaucuga

SEQ ID NO: 64307 - RNA, 1701 nt, Artificial Sequence; identical to SEQ ID NO: 64279
  derived and/or modified CDS sequence (opt1) from hemagglutinin__InfluenzaA__AAZ79996

SEQ ID NO: 64308 - RNA, 1701 nt, Artificial Sequence
  derived and/or modified CDS sequence (opt1) from hemagglutinin__InfluenzaA__AAZ80007
augaagaccaucaucgcccugagccacaucuucugccucgugcugggccaguaccugcccgggaacgacaacuccaccgccacgcucugccugggccaccacgcggucccgaacgggacccuggugaagaccaucaccaacgaccagaucgaggugacgaacgccaccgagcucguccagagcuccagcaccggcaagaucugcaacaacccccaccgcauccuggacgggaucgacugcacccugaucgacgcccuccugggcgacccccacugcgacggcuuccagaacgagacgugggaccuguucguggagcgguccaaggccuucagcaacugcuaccccuacgacgugccggacuacgccucccuccgcagccuggucgcguccagcgggacccuggaguucaucaccgagggcuucaccuggacgggggugacccagaacggcggguccaacgccugcaagcggggccccggcagcggguucuucucccgccucaacuggcugaccaagagcgaguccaccuaccccgugcugaacgucacgaugcccaacaacgacaacuucgacaagcucuacaucuggggcgugcaccacccgagcaccaaccaggagcagaccucccuguacgugcaggccagcgggcgggucaccguguccacgcgccggagccagcagaccaucauccccaacaucggcagccgccccugggugcggggccuguccagccgcaucuccaucuacuggaccaucgucaagcccggggacgugcucgugaucaacagcaacggcaaccugaucgccccgcggggguacuucaagaugcgcaccggcaaguccagcaucaugcgguccgacgcgcccaucgacacgugcaucagcgagugcaucacccccaacggguccauccccaacgacaagccguuccagaacgucaacaagaucaccuacggcgccugccccaaguacgugaagcagaacacccugaagcucgccacgggcaugcgcaacgugcccgagaagcagacccgggggcuguucggcgccaucgccggguucaucgagaacggcugggaggggaugaucgacggcugguacggcuuccgccaccagaacagcgaggggaccggccaggcggccgaccugaaguccacccaggccgccaucgaccagaucaacgggaagcucaaccgggucaucgagaagacgaacgagaaguuccaccagaucgagaaggaguucagcgagguggagggccgcauccaggaccuggagaaguacguggaggacaccaagaucgaccugugguccuacaacgccgagcuccuggucgcgcuggagaaccagcacaccaucgaccucaccgacagcgagaugaacaagcuguucgagaagacgcggcgccagcugcgggagaacgccgaggacauggggaacggcugcuucaagaucuaccacaagugcgacaacgccugcaucgaguccauccgcaacggcaccuacgaccacgacguguaccgcgacgaggcccucaacaaccgguuccagaucaagggggucgagcucaagagcggcuacaaggacuggauccuguggaucuccuucgccaucagcugcuuccugcugugcguggugcugcucggguucaucaugugggcgugccagcgcggcaacauccggugcaacaucugcaucuga

SEQ ID NO: 64309 - RNA, 1701 nt, Artificial Sequence; identical to SEQ ID NO: 64280
  derived and/or modified CDS sequence (opt1) from hemagglutinin__InfluenzaA__AAZ80017

SEQ ID NO: 64310 - RNA, 1701 nt, Artificial Sequence
  derived and/or modified CDS sequence (opt1) from hemagglutinin__InfluenzaA__AAZ80030
augaagaccaucaucgcccugagcuacauccucugccugguguucgcccaggagcugcccggcaacgacaacuccaccgcgacgcucugccuggggcaccacgccgucccgaacggcaccaucgugaagaccaucaccaacgaccagaucgaggugacgaacgccaccgagcugguccagagcuccagcaccgggggcaucugcgacagcccccaccagauccucgacggggagaacugcacccugaucgacgcccugcucggcgacccccagugcgacggcuuccagaacaagaagugggaccuguucguggagcgcagcaaggccuacuccaacugcuaccccuacgacgugccggacuacgcgagccugcggucccucgucgccagcuccgggacgcuggaguucaacaacgagagcuucaacuggaccggcgugacccagaacgggaccuccagcgccugcaagcgccgguccaacaacagcuucuucucccgccugaacuggcucacgcaccugaaguucaaguaccccgcccugaacgugaccaugcccaacaacgagaaguucgacaagcucuacaucuggggcguccaccaccccgggaccgacaacgaccagaccagccuguacgcgcaggccuccggccggaucacggugagcaccaagcgcagccagcagaccgugaucccgaacaucggcucccggccccgcguccgggacauccccagccgcaucuccaucuacuggaccaucgugaagcccggggacauccugcucaucaacagcacgggcaaccugaucgccccgcggggguacuucaagauccgcuccggcaagagcuccaucaugcggagcgacgcccccaucggcaagugcaacuccgagugcaucacccccaacgggagcauccccaacgacaagccguuccagaacgugaaccgcaucaccuacggcgccugcccccgguacgucaagcagaacacccugaagcucgcgacggggaugcgcaacgugcccgagaagcagacccggggcaucuucggggccaucgccggcuucaucgagaacggcugggaggggaugguggacggcugguacggguuccgccaccagaacuccgagggcaucgggcaggccgccgaccugaaguccacccaggcggccaucaaccagaucaacggcaagcugaaccggcucaucggcaagaccaacgagaaguuccaccagaucgagaaggaguucuccgaggucgaggggcgcauccaggaccuggagaaguacguggaggacacgaagaucgaccuguggagcuacaacgccgagcuccugguggcccuggagaaccagcacaccaucgaccucaccgacuccgagaugaacaagcuguucgagcggaccaagaagcagcugcgcgagaacgccgaggacaugggcaacgggugcuucaagaucuaccacaagugcgacaacgcgugcaucggcagcauccgcaacgggacguacgaccacgacgucuaccgggacgaggcccucaacaaccgcuuccagaucaagggcguggagcugaaguccggcuacaaggacuggauccuguggaucagcuucgccaucuccugcuuccuccugugcguggcccugcucggguucaucaugugggccugccagaagggcaacauccggugcaacaucugcaucuga

SEQ ID NO: 64311 - RNA, 1701 nt, Artificial Sequence
  derived and/or modified CDS sequence (opt1) from hemagglutinin__InfluenzaA__AAZ83242
augaagaccaucaucgcccugagcuacauccucugccugguguucgcccagaagcugcccggcaacgacaacuccaccgcgacgcucugccuggggcaccacgccgucccgaacggcaccaucgugaagaccaucaccaacgaccagaucgaggugacgaacgccaccgagcugguccagagcuccagcaccggggagaucugcgacagcccccaccagauccucgacggcgagaacugcacccugaucgacgcccugcucggggacccccagugcgacggcuuccagaacaagaagugggaccuguucguggagcgcaacaaggccuacagcaacugcuaccccuacgacgugccggacuacgcgucccugcggagccucgucgccuccagcggcacgcuggaguucaacaacgaguccuucaacuggaccggggugacccagaacggcaccagcuccgccugcaagcgccggagcaacaaguccuucuucagccgccugaacuggcucacgcaccugaaguacaaguaccccgcccugaacgugaccaugcccaacaacgagaaguucgacaagcucuacaucuggggcguccaccaccccgggaccgacuccgaccagaucaaccuguacgcgcaggccagcgggcggaucaccguguccacgaagcgcagccagcagaccgugaucccgaacaucggcuaccggccccgcguccgggacgugcccagccgcaucuccaucuacuggaccaucgugaagcccggcgacauccugcucaucaacagcaccgggaaccugaucgccccgcggggcuacuucaagauccgcuccgggaaguccuccaucaugcggagcgacgcccccaucggcaagugcaacuccgagugcaucacgcccaacggcagcauccccaacgacaagccguuccagaacgucaaccgcaucaccuacggggccugcccccgguacgugaagcagaacacccugaagcucgcgaccggcaugcgcaacgugcccgagaagcagacgcgggggaucuucggcgccaucgccggguucaucgagaacggcugggagggcauggucgacgggugguacggcuuccgccaccagaacuccgaggggaccggccaggccgccgaccucaagagcacccaggcggccaucaaccagaucaacgggaagcugaaccggcugaucggcaagaccaacgagaaguuccaccagaucgagaaggaguucuccgagguggagggccgcauccaggaccuggagaaguacguggaggacacgaagaucgaccuguggagcuacaacgccgagcuccuggucgcccuggagaaccagcacaccaucgaccucaccgacuccgagaugaacaagcuguucgagcggaccaagaagcagcugcgcgagaacgccgaggacauggggaacggcugcuucaagaucuaccacaagugcgacaacgcgugcaucgggagcauccgcaacggcacguacgaccacgacguguaccgggacgaggcccucaacaaccgcuuccagaucaaggggguggagcugaaguccggcuacaaggacuggauccuguggaucagcuucgccaucuccugcuuccuccugugcgucgcccugcucggcuucaucaugugggccugccagaaggggaacauccggugcaacaucugcaucuga

SEQ ID NO: 64312 - RNA, 1701 nt, Artificial Sequence
  derived and/or modified CDS sequence (opt1) from hemagglutinin__InfluenzaA__AAZ83266
augaagaccaucaucgcccugagcuacauccucugccugguguucgcccagaagcugcccggcaacgacaacuccaccgcgacgcucugccuggggcaccacgccgucccgaacggcacccuggugaagaccaucaccaacgaccagaucgaggugacgaacgccaacgagcucguccagagcuccagcaccgggcgcaucugcgacagcccccaccagauccuggacggcgagaacugcacccugaucgacgcccuccugggggacccccggugcgacggcuuccagaacaaggagugggaccuguucguggagcgcagcaaggccuacuccaacugcuaccccuacgacgugccggacuacgcgagccuccggucccuggucgccagcuccggcacccuggaguucaacaacgagagcuucaacuggacggggguggcccagaacggcaccuccagcgccugcaagcgccgguccaacaagagcuucuucucccgccucaacuggcugcaccagcugaaguacaaguaccccgcgcucaacgugaccaugcccaacaacgagaaguucgacaagcuguacaucuggggcguccaccaccccagcaccgacuccgaccagaucagccuguacgcccaggccagcgggcgggugacgguguccaccaagcgcagccagcagaccgucaucccgaacaucgggucccggcccugggugcgcggcgugagcucccggaucagcaucuacuggaccaucgucaagcccggcgacauccuccugaucaacuccacggggaaccugaucgcgccccgcggcuacuucaagauccggagcgggaaguccagcaucaugcgcuccgacgccccgaucggcaagugcaacagcgagugcaucacccccaacggcuccauccccaacgacaagcccuuccagaacgugaaccggaucaccuacggggccugcccgcgcuacgugaagcagaacacccucaagcuggccacgggcaugcggaacguccccgagaagcagacccgcgggaucuucggcgccaucgccggguucaucgagaacggcugggagggcaugguggacgggugguacggcuuccggcaccagaacagcgaggggaccggccaggccgcggaccugaaguccacccaggccgccaucaaccagaucaacgggaagcucaaccgccugaucgagaagacgaacgagaaguuccaccagaucgagaaggaguucagcgagguggagggccggauccaggaccuggagaaguacgucgaggacaccaagaucgaccucugguccuacaacgccgagcugcugguggcccucgagaaccagcacaccaucgaccugaccgacagcgagaugaacaagcuguucgagcgcacgaagaagcagcuccgcgagaacgcggaggacaugggcaacgggugcuucaagaucuaccacaagugcgacaacgccugcaucggcuccauccggaacgggaccuacgaccacgacguguaccgcgacgaggcccugaacaaccgguuccagaucaagggcgucgagcugaaguccggguacaaggacuggauccucuggaucagcuucgccaucuccugcuuccugcugugcgugguccuccugggcuucaucaugugggccugccagaagggcaacauccgcugcaacaucugcaucuga

SEQ ID NO: 64313 - RNA, 1701 nt, Artificial Sequence; identical to SEQ ID NO: 64210
  derived and/or modified CDS sequence (opt1) from hemagglutinin__InfluenzaA__AAZ83277

SEQ ID NO: 64314 - RNA, 1701 nt, Artificial Sequence; identical to SEQ ID NO: 64096
  derived and/or modified CDS sequence (opt1) from hemagglutinin__InfluenzaA__AAZ83288

SEQ ID NO: 64315 - RNA, 1701 nt, Artificial Sequence
  derived and/or modified CDS sequence (opt1) from hemagglutinin__InfluenzaA__AAZ83312
augaagaccaucaucgcccugagcuacauccucugccugguguucgcccagaagcugcccggcaacgacaacuccaccgcgacgcucugccuggggcaccacgccgucccgaacggcacccuggugaagaccaucaccaacgaccagaucgaggugacgaacgccaccgagcucguccagagcuccagcaccgggcgcaucugcgacagcccccaccagauccuggacggcgagaacugcacccugaucgacgcccuccugggggacccccacugcgacggcuuccagaacaaggagugggaccuguucguggagcggagcaaggccuacuccaacugcuaccccuacgacgugccggacuacgcgagccuccgcucccuggucgccagcuccggcacgcuggaguucaacaacgagagcuucaacuggaccgggguggcccagaacggcaccuccagcgccugcaagcggcgcuccaucaagagcuucuucucccggcucaacuggcugcaccagcugaaguacaaguaccccgcgcucaacgugaccaugcccaacaacgacaaguucgacaagcuguacaucuggggcguccaccaccccagcacggacuccgaccagaccagccuguacgcccaggccagcgggcgcgugaccguguccaccaagcggagccagcagacggucaucccgaacaucgggucccgccccugggugcggggcgugagcucccgcaucagcaucuacuggaccaucgucaagcccggcgacauccuccugaucaacuccaccgggaaccugaucgcgccccggggcuacuucaagauccgcagcgggaaguccagcaucauccgguccgacgccccgaucggcaagugcaacagcgagugcaucacccccaacggcuccauccccaacgacaagcccuuccagaacgugaaccgcaucacguacggggccugcccgcgguacgugaagcagaacacccucaagcuggccaccggcaugcgcaacguccccgagaagcagacccgggggaucuucggcgccaucgccggguucaucgagaacggcugggagggcaugguggacgggugguacggcuuccgccaccagaacagcgaggggacgggccaggccgcggaccugaaguccacccaggccgccaucaaccagaucaacgggaagcucaaccggcugaucgagaagaccaacgagaaguuccaccagaucgagaaggaguucagcgagguggagggccgcauccaggaccuggagaaguacgucgaggacaccaagaucgaccucugguccuacaacgccgagcugcugguggcccucgagaaccagcacacgaucgaccugaccgacagcgagaugaacaagcuguucgagcggacccgcaagcagcuccgcgagaacgcggaggacaugggcaacgggugcuucaagaucuaccacaagugcgacaacgccugcaucggcuccauccggaacgggaccuacgaccacgacguguaccgcgacgaggcccugaacaaccgguuccagaucaagggcgucgagcugaaguccggguacaaggacuggauccucuggaucagcuucgccaucuccugcuuccugcugugcgugguccuccugggcuucaucaugugggccugccagaagggcaacauccgcugcaacaucugcaucuga

SEQ ID NO: 64316 - RNA, 1701 nt, Artificial Sequence
  derived and/or modified CDS sequence (opt1) from hemagglutinin__InfluenzaA__AAZ83323
augaagaccaucaucgcccugagcuacauccucugccugguguucgcccagaagcugcccggcaacgacaacuccaccgcgacgcucugccuggggcaccacgccgucccgaacggcacccuggugaagaccaucaccaacgaccagaucgaggugacgaacgccaccgagcucguccagagcuccagcaccgggcgcaucugcgacagcccccaccggauccuggacggcgagaacugcacccugaucgacgcccuccugggggacccccacugcgacggcuuccagaacaaggagugggaccuguucguggagcgcagcaaggccuacuccaacugcuaccccuacgacgugcaggacuacgcgagccuccggucccuggucgccagcuccggcacgcuggaguucaacaacgagagcuucaacuggaccgggguggcccagaacggcaccuccuacgccugcaagcgccggagcaucaaguccuucuucagccgccucaacuggcugcaccagcugaaguacaaguacccggcgcucaacgugaccaugcccaacaacgacaaguucgacaagcuguacaucuggggcguccaccaccccuccacggacagcgaccagaccucccuguacgcccaggccagcgggcgggugaccgugagcaccaagcgcucccagcagacggucaucagcaacaucgggucccggcccugggugcgcggcgugagcucccggaucagcaucuacuggaccaucgucaagccgggcgacauccuccugaucaccuccaccgggaaccugaucgcgccccgcggcuacuucaagauccggagcgggaaguccagcaucaugcgcuccgacgcccccaucggcaagugcaacagcgagugcaucacgcccaacggcuccaucccgaacgacaagcccuuccagaacgugaaccggaucaccuacggggccugcccccgcuacgugaagcagaacacccucaagcuggccaccggcaugcggaacguccccgagaagcagacgcgcgggaucuucggcgccaucgccggguucaucgagaacggcugggagggcaugguggacgggugguacggcuuccggcaccagaacagcgaggggaccggccaggccgcggaccugaaguccacccaggccgccaucaaccagaucaacgggaagcucaaccgccugaucgagaagaccaacgagaaguuccaccagaucgagaaggaguucagcgagguggagggccggauccaggaccuggagaaguacgucgaggacacgaagaucgaccucugguccuacaacgccgagcugcugguggcccucgagaaccagcacaccaucgaccugaccgacagcgagaugaacaagcuguucgagcgcacccgcaagcagcuccgggagaacgcggaggacaugggcaacgggugcuucaagaucuaccacaagugcgacaacgccugcaucggcuccauccgcaacgggacguacgaccacgacguguaccgggacgaggcccugaacaaccgcuuccagaucaagggcgucgagcugaaguccggguacaaggacuggauccucuggaucagcuucgccaucuccugcuuccugcugugcgugguccuccugggcuucaucaugugggccugccagaagggcaacauccggugcaacaucugcaucuga

SEQ ID NO: 64317 - RNA, 1701 nt, Artificial Sequence; identical to SEQ ID NO: 64306
  derived and/or modified CDS sequence (opt1) from hemagglutinin__InfluenzaA__AAZ83371

SEQ ID NO: 64318 - RNA, 1701 nt, Artificial Sequence; identical to SEQ ID NO: 64279
  derived and/or modified CDS sequence (opt1) from hemagglutinin__InfluenzaA__AAZ83688

SEQ ID NO: 64319 - RNA, 1698 nt, Artificial Sequence
  derived and/or modified CDS sequence (opt1) from hemagglutinin__InfluenzaA__ABA06510
augaaggugaagcugcucauccugcugugcaccuucaccgccacguacgccgacaccaucugcaucggcuaccacgcgaacaacagcaccgacaccgucgacacggugcucgagaagaacgugaccgucacccacuccgugaaccugcuggaggacagccacaacgggaagcucugccugcugaagggcaucgcgccccuccagcuggggaacugcuccguggccggcuggauccuggggaacccggagugcgagcuccugaucgccaaggagagcugguccuacaucgucgagacccccaaccccgagaacggcgccugcuaccccggcuacuucgccgacuacgaggagcugcgcgagcagcucagcuccgugagcuccuucgagcgguucgagaucuucccgaaggagagcuccuggcccaaccacacggugaccggggucagcgccuccugcagccacaacggcaaguccagcuucuaccgcaaccugcuguggcucaccgggaagaacggccuguaccccaaccuguccaagagcuacgccaacaacaaggagaaggaggugcucauccuguggggcgugcaccacccgcccaacaucggggaccagcggacccuguaccacacggagaacgccuacgucuccguggugagcagccacuacucccgccgguucacccccgagaucaccaagcgccccaagguccgggaccaggagggccgcaucaacuacuacuggacccuccuggagcccggggacacgaucaucuucgaggcgaacggcaaccugaucgccccgugguacgccuucgcccucagccggggguucggcuccggcaucaucaccagcaacgcccccauggacgagugcgacgcgaagugccagacgccccagggggccaucaacuccagccugcccuuccagaacgugcacccggugaccaucggcgagugccccaaguacguccgcuccgccaagcugcggauggugaccgggcuccgcaacauccccagcauccagucccggggccuguucggggccaucgccggcuucaucgagggcggguggaccggcaugguggacgggugguacggcuaccaccaccagaacgagcaggggagcggcuacgcggccgaccagaaguccacccagaacgccaucaacggcaucaccaacaaggucaacagcgugaucgagaagaugaacacgcaguucaccgccguggggaaggaguucaacaagcuggagcgccggauggagaaccucaacaagaaggucgacgacggcuuccuggacaucuggaccuacaacgccgagcugcucgugcugcuggagaacgagcgcacccucgacuuccacgacuccaacgucaagaaccuguacgagaaggucaagagccagcugaagaacaacgcgaaggagaucgggaacggcugcuucgaguucuaccacaagugcaacaacgagugcauggaguccgugaagaacgggacguacgacuaccccaaguacagcgaggaguccaagcucaaccgggagaagaucgacggcgugaagcuggacagcaugggcguguaccagauccuggccaucuacuccaccguggccagcagccucguccugcuggugucccucggggccaucagcuucuggaugugcuccaacggcagccugcagugccgcaucugcaucuga

SEQ ID NO: 64320 - RNA, 1698 nt, Artificial Sequence
  derived and/or modified CDS sequence (opt1) from hemagglutinin__InfluenzaA__ABA08464
augaaggccaagcugcucgugcugcugugcaccuucaccgccacguacgcggacaccaucugcaucggcuaccacgccaacaacagcaccgacaccgucgacacggugcucgagaagaacgugaccgucacccacuccgugaaccugcuggaggacagccacaacgggaagcucugccugcugaagggcaucgcgccccuccagcuggggaacugcuccguggccggcuggauccuggggaacccggagugcgagcuccugaucagcaaggaguccuggagcuacaucgucgagacccccaaccccgagaacggcacgugcuaccccggcuacuucgccgacuacgaggagcugcgcgagcagcucuccagcguguccagcuucgagcgguucgagaucuucccgaagggguccagcuggcccaaccacaccgugaccggcgucuccgccagcugcucccacaacggcaagagcuccuucuaccgcaaccugcuguggcucaccgggaagaacgggcuguaccccaaccugagcauguccuacgugaacaacaaggagaaggaggugcucguccuguggggcgugcaccacccgcccaacaucggcgaccagcgggcccuguaccacacggagaacgccuacgugagcgucgugagcucccacuacagccgccgguucacccccgagaucgccaagcgccccaaggugcgggaccaggaggggcgcaucaacuacuacuggacccuccuggagcccggcgacaccaucaucuucgaggcgaacgggaaccugaucgccccgugguacgccuucgcccucucccggggcuucggcagcgggaucaucacguccaacgcccccauggacgagugcgacgcgaagugccagacgccccagggcgccaucaacagcucccugcccuuccagaacguccacccggugaccaucggggagugccccaaguacgugcgcagcgccaagcugcggauggucaccggccuccgcaacauccccuccauccagagccgggggcuguucggcgccaucgccggcuucaucgagggcggguggaccgggaugguggacggcugguacggguaccaccaccagaacgagcagggcuccggcuacgcggccgaccagaaguccacccagaacgccaucaacgggaucaccaacaaggugaacagcgucaucgagaagaugaacacccaguucacggccgugggcaaggaguucaacaagcuggagcgccggauggagaaccucaacaagaaggucgacgacggguuccuggacaucuggaccuacaacgccgagcugcucgugcugcuggagaacgagcgcacccucgacuuccacgacagcaacgugaagaaccuguacgagaaggucaagucccagcugaagaacaacgcgaaggagaucggcaacgggugcuucgaguucuaccacaagugcaacaacgagugcauggagagcgugaagaacggcaccuacgacuaccccaaguacuccgaggagagcaagcucaaccgggagaagaucgacggcgugaagcuggaguccaugggggucuaccagauccuggccaucuacagcacgguggccagcucccucgugcugcuggucagccucggcgccaucuccuucuggaugugcagcaacgggucccugcagugccgcaucugcaucuga

SEQ ID NO: 64321 - RNA, 1698 nt, Artificial Sequence; identical to SEQ ID NO: 64320
  derived and/or modified CDS sequence (opt1) from hemagglutinin__InfluenzaA__ABA08486

SEQ ID NO: 64322 - RNA, 1698 nt, Artificial Sequence
  derived and/or modified CDS sequence (opt1) from hemagglutinin__InfluenzaA__ABA08508
augaaggugaagcugcucauccugcugugcaccuucaccgccacguacgccgacaccaucugcaucggcuaccacgcgaacaacagcaccgacaccgucgacacggugcucgagaagaacgugaccgucacccacuccgugaaccugcuggaggacagccacaacgggaagcucugccugcugaagggcaucgcgccccuccagcuggggaacugcuccguggccggcuggauccuggggaacccggagugcgagcuccugaucagcaaggaguccuggagcuacaucgucgagacccccaaccccgagaacggcgccugcuaccccggcuacuucgccgacuacgaggagcugcgcgagcagcucuccagcguguccagcuucgagcgguucgagaucuucccgaaggaguccagcuggcccaaccacacggugaccggggucuccgccagcugcucccacaacggcaagagcuccuucuaccgcaaccugcuguggcucaccgggaagaacggccuguaccccaaccugagcaaguccuacgccaacaacaagaagaaggaggugcucauccuguggggcgugcaccacccgcccaacaucgggguccagcggacccuguacuacacggagaacgccuacgugagcguggucagcucccacuacagccgccgguucacccccgagaucaccaagcgccccaaggugcgggaccaggagggccgcaucaacuacuacuggacccuccuggagcccggggacacgaucaucuucgaggccaacggcaaccugaucgcgccgugguacgccuucgcccucucccggggguucggcagcggcaucaucaccuccaacgcccccauggacgagugcgacgccaagugccagacgccccagggggcgaucaacagcucccugcccuuccagaacgugcacccggucaccaucggcgagugccccaaguacgugcgcagcgccaagcugcggauggugaccgggcuccgcaacauccccuccauccagagccggggccuguucggggccaucgccggcuucaucgagggcggguggaccggcauggucgacgggugguacggcuaccaccaccagaacgagcagggguccggcuacgccgcggaccagaaguccacccagaacgccaucaacggcaucaccaacaaggugaacagcgugaucgagaagaugaacacgcaguucaccgccgucgggaaggaguucaacaagcuggagcgccggauggagaaccucaacaagaagguggacgacggcuuccuggacaucuggaccuacaacgccgagcugcucguccugcuggagaacgagcgcacccucgacuuccacgacagcaacgugaagaaccuguacgagaaggugaagucccagcugaagaacaacgccaaggagaucgggaacggcugcuucgaguucuaccacaagugcaacaacgagugcauggagagcgucaagaacgggacguacgacuaccccaaguacuccgaggagagcaagcucaaccgggagaagaucgacggcgugaagcuggacuccaugggcguguaccagauccuggcgaucuacagcaccgucgccagcucccucgugcugcuggugagccucggggccaucuccuucuggaugugcagcaacggcucccugcagugccgcaucugcaucuga

SEQ ID NO: 64323 - RNA, 1698 nt, Artificial Sequence
  derived and/or modified CDS sequence (opt1) from hemagglutinin__InfluenzaA__ABA12707
augaaggugaagcugcucguccugcugugcaccuucaccgccacguacgccgacaccaucugcaucggcuaccacgcgaacaacagcaccgacaccguggacacggugcucgagaagaacgucaccgugacccacuccgugaaccugcuggaggacagccacaacgggaagcucugccugcugaagggcaucgcgccccuccagcuggggaacugcuccgucgccggcuggauccuggggaacccggagugcgagcuccugaucagcaaggaguccuggagcuacaucguggagacccccaaccccgagaacggcacgugcuaccccggcuacuucgccgacuacgaggagcugcgcgagcagcucuccagcguguccagcuucgagcgguucgagaucuucccgaaggaguccagcuggcccaaccacaccgucaccgggguguccgccagcugcucccacaacggcaagagcuccuucuaccgcaaccugcuguggcucaccgggaagaacggccuguaccccaaccugagcaaguccuacgccaacaacaaggagaaggaggugcucguccuguggggcgugcaccacccgcccaacaucggggaccagcgggcccuguaccacacggagaacgccuacgugagcgucgugagcucccacuacagccgccgguucacccccgagaucgccaagcgccccaaggugcgggaccaggagggccgcaucaacuacuacuggacccuccuggagcccggggacaccaucaucuucgaggcgaacggcaaccugaucgccccgcgguacgccuucgcccucucccgcggguucggcagcggcaucaucacguccaacgcccccauggacgagugcgacgcgaagugccagacgccccagggggccaucaacagcucccugcccuuccagaacguccacccggugaccaucggcgagugccccaaguacgugcggagcgccaagcugcgcauggucaccgggcuccggaacauccccuccauccagagccgcggccuguucggggccaucgccggcuucaucgagggcggguggaccggcaugguggacgggugguacggcuaccaccaccagaacgagcagggguccggcuacgcggccgaccagaaguccacccagaacgccaucaacggcaucaccaacaaggugaacagcgucaucgagaagaugaacacccaguucacggccguggggaaggaguucaacaagcuggagcggcgcauggagaaccucaacaagaaggucgacgacggcuuccuggacaucuggaccuacaacgccgagcugcucgugcugcuggagaacgagcggacccucgacuuccacgacagcaacgugaagaaccuguacgagaaggucaagucccagcugaagaacaacgcgaaggagaucgggaacggcugcuucgaguucuaccacaagugcaacgacgagugcauggagagcgugaagaacgggaccuacgacuaccccaaguacuccgaggagagcaagcucaaccgcgagaagaucgacggcgugaagcuggaguccaugggcgucuaccagauccuggccaucuacagcacgguggccagcucccucgugcugcuggucagccucggggccaucuccuucuggaugugcagcaacggcucccugcagugccggaucugcaucuga

SEQ ID NO: 64324 - RNA, 1698 nt, Artificial Sequence
  derived and/or modified CDS sequence (opt1) from hemagglutinin__InfluenzaA__ABA12715
augaaggccaagcugcucgugcugcugugcaccuucaccgccacguacgcggacaccaucugcaucggcuaccacgccaacaacagcaccgacaccgucgacacggugcucgagaagaacgugaccgucacccacuccgugaaccugcuggaggacagccacaacgggaagcucugccugcugaagggcaucgcgccccuccagcuggggaacugcuccguggccggcuggauccuggggaacccggagugcgagcuccugaucagcaaggaguccuggagcuacaucgucgagacccccaaccccgagaacggcacgugcuaccccggcuacuucgccgacuacgaggagcugcgcgagcagcucuccagcguguccagcuucgagcgguucgagaucuucccgaagggguccagcuggcccaaccacaccgugaccggcgucuccgccagcugcucccacaacggcaagagcuccuucuaccgcaaccugcuguggcucaccgggaagaacgggcuguaccccaaccugagcauguccuacgugaacaacaaggagaaggaggugcucguccuguggggcgugcaccacccgcccaacaucggcgaccagcgggcccuguaccacacggagaacgccuacgugagcgucgugagcucccacuacagccgccgguucacccccgagaucgccaagcgccccaaggugcgggaccaggaggggcgcaucaacuacuacuggacccuccuggagcccggcgacaccaucaucuucgaggcgaacgggaaccugaucgccccgugguacgccuucgcccucucccggggcuucggcagcgggaucaucacguccaacgcccccauggacgagugcgacgcgaagugccagacgccccagggcgccaucaacagcucccugcccuuccagaacguccacccggugaccaucggggagugccccaaguacgugcgcagcaccaagcugcggauggucaccggccuccgcaacauccccuccauccagagccgggggcuguucggcgccaucgccggcuucaucgagggcggguggaccgggaugguggacggcugguacggguaccaccaccagaacgagcagggcuccggcuacgccgcggaccagaaguccacccagaacgccaucaacgggaucaccaacaaggugaacagcgucaucgagaagaugaacacgcaguucaccgccgugggcaaggaguucaacaagcuggagcgccggauggagaaccucaacaagaaggucgacgacggguuccuggacaucuggaccuacaacgccgagcugcucgugcugcuggagaacgagcgcacccucgacuuccacgacagcaacgugaagaaccuguacgagaaggucaagucccagcugaagaacaacgccaaggagaucggcaacgggugcuucgaguucuaccacaagugcgacaacgagugcauggagagcgugaagaacggcacguacgacuaccccaaguacuccgaggagagcaagcucaaccgggagaagaucgacggcgugaagcuggaguccaugggggucuaccagauccuggcgaucuacagcaccguggccagcucccucguguuccuggucagccugggcgccaucuccuucuggaugugcagcaacgggucccuccagugccgcaucugcaucuga

SEQ ID NO: 64325 - RNA, 1698 nt, Artificial Sequence
  derived and/or modified CDS sequence (opt1) from hemagglutinin__InfluenzaA__ABA12729
augaaggugaagcugcucguccugcugugcaccuucaccgccacguacgccgacaccaucugcaucggcuaccacgcgaacaacagcaccgacaccguggacacggugcucgagaagaacgucaccgugacccacuccgugaaccugcuggaggacagccacaacgggaagcucugccugcugaagggcaucgcgccccuccagcuggggaacugcuccgucgccggcuggauccuggggaacccggagugcgagcuccugaucagcaaggaguccuggagcuacaucguggagacccccaaccccgagaacggcacgugcuaccccggcuacuucgccgacuacgaggagcugcgcgagcagcucuccagcguguccagcuucgagcgguucgagaucuucccgaaggaguccagcuggcccaaccacaccgucaccgggguguccgccagcugcucccacaacggcaagagcuccuucuaccgcaaccugcuguggcucaccgggaagaacggccuguaccccaaccugagcaaguccuacgccaacaacaaggagaaggaggugcucguccuguggggcgugcaccacccgcccaacaucggggaccagcgggcccuguaccacacggagaacgccuacaucagcguggucagcucccacuacagccgccgguucacccccgagaucgccaagcgccccaaggugcgggaccaggagggccgcaucaacuacuacuggacccuccuggagcccggggacaccaucaucuucgaggcgaacggcaaccugaucgccccgcgguacgccuucgcccucucccgcggguucggcagcggcaucaucacguccaacgcccccauggacgagugcgacgcgaagugccagacgccccagggggccaucaacagcucccugcccuuccagaacgugcacccggucaccaucggcgagugccccaaguacgugcggagcgccaagcugcgcauggugaccgggcuccggaacauccccuccauccagagccgcggccuguucggggccaucgccggcuucaucgagggcggguggaccggcauggucgacgggugguacggcuaccaccaccagaacgagcagggguccggcuacgcggccgaccagaaguccacccagaacgccaucaacggcaucaccaacaaggugaacagcgugaucgagaagaugaacacccaguucacggccgucgggaaggaguucaacaagcuggagcggcgcauggagaaccucaacaagaagguggacgacggcuuccuggacaucuggaccuacaacgccgagcugcucguccugcuggagaacgagcggacccucgacuuccacgacagcaacgugaagaaccuguacgagaaggugaagucccagcugaagaacaacgcgaaggagaucgggaacggcugcuucgaguucuaccacaagugcaacgacgagugcauggagagcgucaagaacgggaccuacgacuacccccgcuacuccgaggagagcaagcucaaccgggagaagaucgacggcgugaagcuggaguccaugggcguguaccagauccuggccaucuacagcacggucgccagcucccucgugcugcuggugagccucggggccaucuccuucuggaugugcagcaacggcucccugcagugccgcaucugcaucuga

SEQ ID NO: 64326 - RNA, 1701 nt, Artificial Sequence; identical to SEQ ID NO: 64310
  derived and/or modified CDS sequence (opt1) from hemagglutinin__InfluenzaA__ABA12740

SEQ ID NO: 64327 - RNA, 1701 nt, Artificial Sequence; identical to SEQ ID NO: 64279
  derived and/or modified CDS sequence (opt1) from hemagglutinin__InfluenzaA__ABA12751

SEQ ID NO: 64328 - RNA, 1701 nt, Artificial Sequence
  derived and/or modified CDS sequence (opt1) from hemagglutinin__InfluenzaA__ABA12762
augaagaccaucaucgcccugagcuacauccucugccugguguucgcccagaaguuccccggcaacgacaacuccaccgcgacgcugugccucgggcaccacgccgucccgaacggcaccaucgugaagaccaucaccaacgaccagaucgaggugacgaacgccaccgagcugguccagagcuccagcaccgggggcaucugcgacagcccccaccagauccuggacggggagaacugcacccucaucgacgcccugcugggcgacccccagugcgacggcuuccagaacaagaagugggaccucuucguggagcgcuccaaggccuacuccaacugcuaccccuacgacgugccggacuacgcgagccugcggucccuggucgccagcuccgggacgcucgaguucaacaacgagagcuucaacuggaccggcgugacccagaacgggaccuccagcgccugcaagcgccgguccaacaacagcuucuucucccgccugaacuggcugacgcaccucaaguucaaguaccccgcccugaacgugaccaugcccaacaacgagaaguucgacaagcuguacaucuggggcguccaccaccccgggaccgacaacgaccagaucagccucuacgcgcaggccuccggccggaucaccgugagcacgaagcgcagccagcagaccgugaucccgaacaucggcucccggccccgcguccgggacauccccagccgcaucuccaucuacuggaccaucgugaagcccggggacauccugcugaucaacagcaccggcaaccucaucgccccgcggggguacuucaagauccgcuccggcaagagcuccaucaugcggagcgacgcccccaucggcaagugcaacuccgagugcaucacgcccaacgggagcauccccaacgacaagccguuccagaacgugaaccgcaucaccuacggcgccugcccccgguacgucaagcagaacacccugaagcuggcgaccgggaugcgcaacgugcccgagaagcagacgcggggcaucuucggggccaucgccggcuucaucgagaacggcugggaggggaugguggacggcugguacggguuccgccaccagaacuccgagggcaucgggcaggccgccgaccucaagagcacccaggcggccaucaaccagaucaacggcaagcugaaccggcugaucggcaagaccaacgagaaguuccaccagaucgagaaggaguucuccgaggucgaggggcgcauccaggaccucgagaaguacguggaggacaccaagaucgaccuguggagcuacaacgccgagcugcucguggcccuggagaaccagcacacgaucgaccugaccgacuccgagaugaacaagcuguucgagcggaccaagaagcagcuccgcgagaacgccgaggacaugggcaacgggugcuucaagaucuaccacaagugcgacaacgcgugcaucggcagcauccgcaacgggaccuacgaccacgacgucuaccgggacgaggcccugaacaaccgcuuccagaucaagggcguggagcucaaguccggcuacaaggacuggauccuguggaucagcuucgccaucuccugcuuccugcucugcgugguccugcugggguucaucaugugggccugccagaagggcaacauccggugcaacaucugcaucuga

SEQ ID NO: 64329 - RNA, 1701 nt, Artificial Sequence
  derived and/or modified CDS sequence (opt1) from hemagglutinin__InfluenzaA__ABA12773
augaagaccaucaucgcccugagcuacaucuucugccucgugcugggccaggacuuccccgggaacgacaacuccaccgccacgcugugccucggccaccacgcggucccgaacgggacccuggugaagaccaucaccaacgaccagaucgaggugacgaacgccaccgagcugguccagagcuccagcaccggcaagaucugcaacaacccccaccgcauccucgacgggaucgacugcacccugaucgacgcccugcucggcgacccccacugcgacggcuuccagaacgagacgugggaccuguucguggagcgguccaaggccuucagcaacugcuaccccuacgacgugccggacuacgccucccugcgcagccucgucgcguccagcgggacccuggaguucaucaacgagggcuucaccuggaccggggugacgcagaacggcggguccaacgccugcaagcggggccccgacagcggcuucuucucccgccugaacuggcucuacaagagcggguccaccuaccccgugcugaacgucaccaugcccaacaacgacaacuucgacaagcuguacaucuggggcgugcaccacccgagcaccgaccaggagcagacgucccucuacgugcaggccagcgggcgggucaccguguccaccaagcgcagccagcagaccaucauccccaacaucggcagccggcccugggugcgcggccuguccagccggaucuccaucuacuggacgaucgucaagcccggggacauccuggugaucaacagcaacggcaaccucaucgccccgcgcggguacuucaagaugcggaccggcaaguccagcaucaugcgcuccgacgcgcccaucgggaccugcaucagcgagugcaucacccccaacggcuccauccccaacgacaagccguuccagaacgugaacaagaucacguacggcgccugccccaaguacgucaagcagaacacccugaagcuggccaccgggaugcggaacgugcccgagaagcagacccgcggccucuucggggccaucgccggcuucaucgagaacgggugggagggcaugaucgacggcugguacggguuccggcaccagaacagcgagggcacggggcaggcggccgaccugaaguccacccaggccgccaucgaccagaucaacggcaagcugaaccgcgugaucgagaagaccaacgagaaguuccaccagaucgagaaggaguucagcgaggucgaggggcggauccaggaccucgagaaguacguggaggacaccaagaucgaccugugguccuacaacgccgagcugcucguggcgcuggagaaccagcacacgaucgaccugaccgacagcgagaugaacaagcuguucgagaagacccgccggcagcuccgcgagaacgccgaggacaugggcaacggcugcuucaagaucuaccacaagugcgacaacgccugcaucggguccauccggaacggcaccuacgaccacgacgucuaccgcgacgaggcccugaacaaccgcuuccagaucaaggggguggagcucaagagcggcuacaaggacuggauccuguggaucuccuucgccaucagcugcuuccugcucugcgucgugcugcugggcuucaucaugugggcgugccagaaggggaacauccggugcaacaucugcaucuga

SEQ ID NO: 64330 - RNA, 1701 nt, Artificial Sequence
  derived and/or modified CDS sequence (opt1) from hemagglutinin__InfluenzaA__ABA12780
augaagaccaucaucgcccugagcuacauccucugccugguguucgcccagaagcugcccggcaacgacaacuccaccgcgacgcucugccuggggcaccacgccgucccgaacggcaccaucgugaagaccaucaccaacgaccagaucgaggugacgaacgccaccgagcugguccagagcuccagcaccgggggcaucugcgacagcccccaccagauccucgacggggagaacugcacccugaucgacgcccugcucggcgacccccagugcgacggcuuccagaacaagaagugggaccuguucguggagcgcagcaaggccuacuccaacugcuaccccuacgacgugccggacuacgcgagccugcggucccucgucgccagcuccgggacgcuggaguucaacaacgagagcuucaacuggaccggcgugacccagaacgggaccuccagcgccugcaagcgccgguccaacaacagcuucuucucccgccugaacuggcucacgcaccugaaguucaaguaccccgcccugaacgugaccaugcccaacaacgagaaguucgacaagcucuacaucuggggcguccaccaccccgggaccaacaacgaccagaucagccuguacgcgcaggccuccggccggaucaccgugagcacgaagcgcagccagcagaccgugaucccgaacaucgagucccggccccgcguccgggacauccccagccgcaucuccaucuacuggaccaucgugaagcccggcgacauccugcucaucaacagcaccgggaaccugaucgccccgcggggcuacuucaagauccgcuccgggaaguccuccaucaugcggagcgacgcccccaucggcaagugcaacuccgagugcaucacgcccaacggcagcauccccaacgacaagccguuccagaacgugaaccgcaucaccuacggggccugcccccgguacgucaagcagaacacccugaagcucgcgaccggcaugcgcaacgugcccgagaagcagacgcgggggaucuucggcgccaucgccggguucaucgagaacggcugggagggcaugguggacgggugguacggcuuccgccaccagaacuccgaggggaucggccaggccgccgaccucaagagcacccaggcggccaucaaccagaucaacgggaagcugaaccggcugaucggcaagaccaacgagaaguuccaccagaucgagaaggaguucuccgaggucgagggccgcauccaggaccuggagaaguacguggaggacaccaagaucgaccuguggagcuacaacgccgagcuccugguggcccuggagaaccagcacacgaucgaccucaccgacuccgagaugaacaagcuguucgagcggaccaagaagcagcugcgcgagaacgccgaggacauggggaacggcugcuucaagaucuaccacaagugcgacaacgcgugcaucgggagcauccgcaacggcaccuacgaccacgacgucuaccgggacgaggcccucaacaaccgcuuccagaucaaggggguggagcugaaguccggcuacaaggacuggauccuguggaucagcuucgccaucuccugcuuccuccugugcguggcccugcucggcuucaucaugugggccugccagaaggggaacauccggugcaacaucugcaucuga

SEQ ID NO: 64331 - RNA, 1701 nt, Artificial Sequence
  derived and/or modified CDS sequence (opt1) from hemagglutinin__InfluenzaA__ABA16214
augaagaccaucaucgcccugagcuacaucuccugccucguguucgcccagaagcugcccggcaacgacaacagcaccgcgacgcugugccucgggcaccacgccgucccgaacggcacccuggugaagaccaucaccaacgaccagaucgaggugacgaacgccaccgagcugguccaguccagcuccaccgggcgcaucugcgacagcccccaccggauccucgacggcaagaacugcacccugaucgacgcccugcucggggacccccacugcgacggcuuccagaacgagaagugggaccuguucguggagcgcuccaaggccuucagcaacugcuaccccuacgacgugccggacuacgcgucccugcggagccucgucgccuccagcggcacgcuggaguucaucaacgagggguucaacuggaccggcgugacccaguccgggggcagcuacgccugcaagcgcggguccgucaagagcuucuucucccggcugaacuggcucuacgagagcgaguccaaguaccccgcccugaacgugaccaugcccaacaacggcaaguucgacaagcuguacaucuggggcgugcaccaccccagcacggacaaggagcagaccaaccucuacgugcgcgcgagcgggcgggucaccguguccaccaagcgcagccagcagacggugaucccgaacaucggcccccggcccuggguccgcgggcuguccagccggaucuccaucuacuggaccaucgugaagcccggcgacauccugcucaucaacagcaccggcaaccugaucgccccgcgcggguacuucaagauccggaccggcaaguccagcaucaugcgcuccgacgcccccaucgggacgugcagcuccggcugcaucacccccaacgggagcauccccaacgacaagccguuccagaacgugaacaagaucaccuacggcgccugcccccgguacgucaagcagaacacccugaagcucgccacgggcaugcgcaacgugcccgagaagcagacccgggggaucuucggcgcgaucgccggguucaucgagaacggcugggaggggaugguggacggcugguacggcuuccgccaccagaacuccgaggggaccggccaggccgccgaccucaagagcacccaggccgcgaucgaccagaucaacgggaagcugaaccggcucaucgagaagacgaacgagaaguuccaccagaucgagaaggaguucuccgaggucgagggccgcauccaggaccuggagaaguacguggaggacaccaagaucgaccuguggagcuacaacgccgagcuccugguggcccuggagaaccagcacaccaucgacaugaccgacuccgagaugaacaagcuguucgagaagacgcggaagcagcugcgcgagaacgccgaggacauggggaacggcugcuucaagaucuaccacaagugcgacaacgccugcaucggcagcauccgcaacgggaccuacgaccacgacgucuaccgggacgaggcgcugaacaaccgcuuccagaucaagggcguggagcucaaguccggguacaaggacuggauccuguggaucagcuucgccaucagcugcuuccugcucugcgucgugcugcugggcuucaucaugugggccugccagaagggcaacauccggugcaacaucugcaucuga

SEQ ID NO: 64332 - RNA, 1701 nt, Artificial Sequence; identical to SEQ ID NO: 64280
  derived and/or modified CDS sequence (opt1) from hemagglutinin__InfluenzaA__ABA18026

SEQ ID NO: 64333 - RNA, 1698 nt, Artificial Sequence
  derived and/or modified CDS sequence (opt1) from hemagglutinin__InfluenzaA__ABA18037
augaaggccaagcugcucgugcugcugugcaccuucaccgccacguacgcggacaccaucugcaucggcuaccacgccaacaacagcaccgacaccgucgacacggugcucgagaagaacgugaccgucacccacuccgugaaccugcuggaggacagccacaacgggaagcucugccugcugaagggcaucgcgccccuccagcuggggaacugcuccguggccggcuggauccuggggaacccggagugcgagcuccugaucagcaaggaguccuggagcuacaucgucgagacccccaaccccgagaacggcacgugcuaccccggcuacuucgccgacuacgaggagcugaaggagcagcucuccagcguguccagcuucgagcgcuucgagaucuucccgaagggguccagcuggcccaaccacaccgugaccggcgucuccgccagcugcucccacaacggcaagagcuccuucuaccggaaccugcuguggcucaccgggaagaacgggcuguaccccaaccugagcauguccuacgugaacaacaaggagaaggaggugcucguccuguggggcgugcaccacccgcccaacaucggcgaccagcgcgcccuguaccacacggagaacgccuacgugagcgucgugagcucccacuacagccggcgcuucacccccgagaucgccaagcggcccaaggugcgcgaccaggaggggcggaucaacuacuacuggacccuccuggagcccggcgacaccaucaucuucgaggcgaacgggaaccugaucgccccgugguacgccuucgcccucucccgcggcuucggcagcgggaucaucacguccaacgcccccauggacgagugcgacgcgaagugccagacgccccagggcgccaucaacagcucccugcccuuccagaacguccacccggugaccaucggggagugccccaaguacgugcggagcgccaagcugcgcauggucaccggccuccggaacauccccuccauccagagccgcgggcuguucggcgccaucgccggcuucaucgagggcggguggaccgggaugguggacggcugguacggguaccaccaccagaacgagcagggcuccggcuacgcggccgaccagaaguccacccagaacgccaucaacgggaucaccaacaaggugaacagcgucaucgagaagaugaacacccaguucacggccgugggcaaggaguucaacaagcuggagcggcgcauggagaaccucaacaagaaggucgacgacggguuccuggacaucuggaccuacaacgccgagcugcucgugcugcuggagaacgagcggacccucgacuuccacgacagcaacgugaagaaccuguacgagaaggucaagucccagcugaagaacaacgcgaaggagaucggcaacgggugcuucgaguucuaccacaagugcaacaacgagugcauggagagcgugaagaacggcaccuacgacuaccccaaguacuccgaggagagcaagcucaaccgcgagaagaucgacggcgugaagcuggaguccaugggggucuaccagauccuggccaucuacagcacgguggccagcucccucgugcugcuggucagccucggcgccaucuccuucuggaugugcagcaacgggucccugcagugccggaucugcaucuga

SEQ ID NO: 64334 - RNA, 1701 nt, Artificial Sequence; identical to SEQ ID NO: 64279
  derived and/or modified CDS sequence (opt1) from hemagglutinin__InfluenzaA__ABA18048

SEQ ID NO: 64335 - RNA, 1701 nt, Artificial Sequence
  derived and/or modified CDS sequence (opt1) from hemagglutinin__InfluenzaA__ABA18123
augaagaccaucaucgcccugagcuacauccucugccugguguucgcccagaagcugcccggcaacgacaacuccaccgcgacgcucugccuggggcaccacgccgucccgaacggcacccuggugaagaccaucaccaacgaccagaucgaggugacgaacgccaccgagcucguccagagcuccagcaccgggcgcaucugcgacagcccccaccagauccuggacggcgagaacugcacccugaucgacgcccuccugggggacccccacugcgacggcuuccagaacaaggagugggaccuguucguggagcggagcaaggccuacuccaacugcuaccccuacgacgugccggacuacgucagccuccgcucccugguggcgagcuccggcacgcuggaguucaacaacgagagcuucaacuggaccgggguggcccagaacggcaccuccagcgccugcaagcggcgcuccaacaagagcuucuucucccggcucaacuggcugcaccagcugaaguacaaguaccccgcccucaacgucaccaugcccaacaacgagaaguucgacaagcuguacaucuggggcgugcaccaccccgggacggacagcgaccagaucucccuguacgcgcaggccagcgggcgcgugaccgucagcaccaagcggucccagcagaccgugaucccgaacaucggcagcggccccugggugcgcggggucuccagccggaucuccaucuacuggacgaucgugaagcccggcgacauccuccugaucaacagcaccgggaaccugaucgcgccccgcggcuacuucaagauccgguccggcaagagcuccaucaugcgcagcgacgccccgaucgggaagugcaacuccgagugcaucacccccaacggcagcauccccaacgacaagcccuuccagaacgugaaccggaucaccuacggggccugcccgcgcuacgucaagcagaacacgcucaagcuggccaccggcaugcggaacgugcccgagaagcagacccgcgggaucuucggcgccaucgccggcuucaucgagaacgggugggagggcaugauggacgggugguacggcuuccggcaccagaacuccgaggggaccggccaggccgccgaccugaaguccacgcaggcggccaucaaccagaucaacggcaagcucaaccgccugaucgagaagaccaacgagaaguuccaccagaucgagaaggaguucuccgagguggaggggcggauccaggaccuggagaaguacgucgaggacaccaagaucgaccucuggagcuacaacgccgagcugcugguggcccucgagaaccagcacaccaucgaccugacggacuccgagaugaacaagcuguucgagcgcaccaagaagcagcuccgggagaacgccgaggacaugggcaacgggugcuucaagaucuaccacaagugcgacaacgcgugcaucggcagcauccgcaacgggaccuacgaccacgacguguaccgcgacgaggcccugaacaaccgguuccagaucaagggcgucgagcugaaguccggcuacaaggacuggauccucuggaucagcuucgccaucagcugcuuccugcugugcaucgugcuccugggguucaucaugugggccugccagaagggcaacauccgcugcaacaucugcaucuga

SEQ ID NO: 64336 - RNA, 1701 nt, Artificial Sequence; identical to SEQ ID NO: 64279
  derived and/or modified CDS sequence (opt1) from hemagglutinin__InfluenzaA__ABA18134

SEQ ID NO: 64337 - RNA, 1698 nt, Artificial Sequence; identical to SEQ ID NO: 64323
  derived and/or modified CDS sequence (opt1) from hemagglutinin__InfluenzaA__ABA18145

SEQ ID NO: 64338 - RNA, 1701 nt, Artificial Sequence; identical to SEQ ID NO: 64280
  derived and/or modified CDS sequence (opt1) from hemagglutinin__InfluenzaA__ABA18156

SEQ ID NO: 64339 - RNA, 1701 nt, Artificial Sequence
  derived and/or modified CDS sequence (opt1) from hemagglutinin__InfluenzaA__ABA26700
augaagaccaucaucgcccugagcuacauccucugccugguguucgcccagaagcugcccggcaacgacaacuccaccgcgacgcucugccuggggcaccacgccgucccgaacggcaccaucgugaagaccaucaccaacgaccagaucgaggugacgaacgccaccgagcugguccagagcuccagcaccgggggcaucugcaacagcccccaccagauccucgacggggagaacugcacccugaucgacgcccugcucggcgacccccagugcgacggcuuccagaacaagaagugggaccuguucguggagcgcagcaaggccuacuccaacugcuaccccuacgacgugccggacuacgcgagccugcggucccucgucgccagcuccgggacgcuggaguucaacaacgagagcuucaacuggaccggcgugacccagaacgggaccuccagcgccugcaagcgccgguccaacaacagcuucuucucccgccugaacuggcucacgcaccugaaguucaaguaccccgcccugaacgugaccaugcccaacaacgagaaguucgacaagcucuacaucuggggcguccaccaccccgggaccgacaacgaccagaucagccuguacgcgcaggccccgggccggaucaccguguccacgaagcgcagccagcagaccgugauccccaacaucggcagccggccccgcguccgggacauccccucccgcaucagcaucuacuggaccaucgugaagccgggggacauccugcucaucaacuccaccggcaaccugaucgcgccccggggguacuucaagauccgcagcggcaaguccagcaucaugcgguccgacgcccccaucggcaagugcaacagcgagugcaucacgcccaacggguccaucccgaacgacaagcccuuccagaacgugaaccgcaucaccuacggcgccugcccccgguacgucaagcagaacacccugaagcucgccaccgggaugcgcaacgugcccgagaagcagacgcggggcaucuucggggccaucgccggcuucaucgagaacggcugggaggggaugguggacggcugguacggguuccgccaccagaacagcgagggcaucgggcaggccgccgaccugaaguccacccaggcggccaucaaccagaucaacggcaagcugaaccggcucaucggcaagaccaacgagaaguuccaccagaucgagaaggaguucagcgaggucgaggggcgcauccaggaccuggagaaguacguggaggacaccaagaucgaccugugguccuacaacgccgagcuccugguggcccuggagaaccagcacacgaucgaccucaccgacagcgagaugaacaagcuguucgagcggaccaagaagcagcugcgcgagaacgccgaggacaugggcaacgggugcuucaagaucuaccacaagugcgacaacgcgugcaucggcuccauccgcaacgggaccuacgaccacgacgucuaccgggacgaggcccucaacaaccgcuuccagaucaagggcguggagcugaaguccggcuacaaggacuggauccuguggaucuccuucgccaucagcugcuuccuccugugcguggcccugcucggguucaucaugugggccugccagaagggcaacauccggugcaacaucugcaucuga

SEQ ID NO: 64340 - RNA, 1701 nt, Artificial Sequence
  derived and/or modified CDS sequence (opt1) from hemagglutinin__InfluenzaA__ABA26711
augaagaccaucaucgcccugagcuacauccucugccugguguucgcccagaagcugcccggcaacgacaacuccaccgcgacgcucugccuggggcaccacgccgucccgaacggcaccaucgugaagaccaucaccaacgaccagaucgaggugacgaacgccaccgagcugguccagagcuccagcaccgggggcaucugcgacagcccccaccagauccucgacggggagaacugcacccugaucgacgcccugcucggcgacccccagugcgacggcuuccagaacaagaagugggaccuguucguggagcgcagcaaggccuacuccaacugcuaccccuacgacgugccggacuacgcgagccugcggucccucgucgccagcuccgggacgcuggaguucaacaacgagagcuucaacuggaccggcgugacccagaacgggaccuccagcgccugcaagcgccgguccaacaacagcuucuucucccgccugaacuggcucacgcaccugaaguucaaguaccccgcccugaacgugaccaugcccaacaacgagaaguucgacaagcucuacaucuggggcguccaccaccccgggaccgacaacgaccagaucagccuguacgcgcaggccuccggccggaucaccgugagcacgaagcgcagccagcagaccgugaucccgaacaucggcucccggccccgcguccgggacauccccagccgcaucuccaucuacuggaccaucgugaagcccggggacauccugcucaucaacagcaccggcaaccugaucgccccgcggggguacuucaagauccgcuccggcaagagcuccaucaugcggagcgacgcccccaucggcaagugcaaguccgagugcaucacgcccaacgggagcauccccaacgacaagccguuccagaacgugaaccgcaucaccuacggcgccugcccccgguacgucaagcagaacacccugaagcucgcgaccgggaugcgcaacgugcccgagaagcagacgcggggcaucuucggggccaucgccggcuucaucgagaacggcugggaggggaugguggacggcugguacggguuccgccaccagaacuccgagggcaucgggcaggccgccgaccugaaguccacccaggcggccaucaaccagaucaacggcaagcugaaccggcucaucggcaagaccaacgagaaguuccaccagaucgagaaggaguucuccgaggucgaggggcgcauccaggaccuggagaaguacguggaggacaccaagaucgaccuguggagcuacaacgccgagcuccugguggcccuggagaaccagcacacgaucgaccucaccgacuccgagaugaacaagcuguucgagcggaccaagaagcagcugcgcgagaacgccgaggacaugggcaacgggugcuucaagaucuaccacaagugcgacaacgcgugcaucggcagcauccgcaacgggaccuacgaccacgacgucuaccgggacgaggcccucaacaaccgcuuccagaucaagggcguggagcugaaguccggcuacaaggacuggauccuguggaucagcuucgccaucuccugcuuccuccugugcguggcccugcucggguucaucaugugggccugccagaagggcaacauccggugcaacaucugcaucuga

SEQ ID NO: 64341 - RNA, 1701 nt, Artificial Sequence
  derived and/or modified CDS sequence (opt1) from hemagglutinin__InfluenzaA__ABA26722
augaagaccaucaucgcccugagcuacauccucugccugguguucgcccagaagcugcccggcaacgacaacuccaccgcgacgcucugccuggggcaccacgccgucccgaacggcaccaucgugaagaccaucaccaacgaccagaucgaggugacgaacgccaccgagcugguccagagcucccccaccgggggcaucugcgacagcccccaccagauccucgacggggagaacugcacccugaucgacgcccugcucggcgacccccagugcgacggcuuccagaacaagaagugggaccuguucguggagcgcuccaaggcccacagcaacugcuacccguacgacgugcccgacuacgcgucccugcggagccucgucgccuccagcgggacgcuggaguucaacaacgaguccuucaacuggaccggcgugacccagaacgggaccagcuccgccugcaagcgccggagcaacaaguccuucuucagccgccugaacuggcucacgcaccugaaguucaaguaccccgcccugaacgugaccaugcccaacaacgagaaguucgacaagcucuacaucuggggcguccaccacccggggaccgacaacgaccagaucucccuguacgcgcaggccagcggccggaucaccguguccacgaagcgcagccagcagaccgugauccccaacaucggcagccggccccgcguccgggacgugcccucccgcaucagcaucuacuggaccaucgugaagccgggggacauccugcucaucaacuccaccggcaaccugaucgcgccccggggguacuucaagauccgcagcggcaaguccagcaucaugcgguccgacgcccccaucggcaagugcaacagcgggugcaucacgcccaacggcuccaucccgaacgacaagcccuuccagaacgucaaccgcaucaccuacggggccugcccccgguacgugaagcagaacacccugaagcucgccaccggcaugcgcaacgugcccgagaagcagacgcgggggaucuucggcgccaucgccggcuucaucgagaacgggugggagggcauggucgacgggugguacggcuuccgccaccagaacagcgaggggaccggccaggccgccgaccugaaguccacccaggcggccaucaaccagaucaacggcaagcugaaccggcucaucgggaagaccaacgagaaguuccaccagaucgagaaggaguucagcgagguggagggccgcauccaggaccuggagaaguacguggaggacacgaagaucgaccugugguccuacaacgccgagcuccuggucgcccuggagaaccagcacaccaucgaccucaccgacagcgagaugaacaagcuguucgagcggaccaagaagcagcugcgcgagaacgccgaggacauggggaacggcugcuucaagaucuaccacaagugcgacaacgcgugcaucggguccauccgcaacggcacguacgaccacgacguguaccgggacgaggcccucaacaaccgcuuccagaucaagggcguggagcucaagagcggguacaaggacuggauccuguggaucuccuucgccaucagcugcuuccugcugugcgucgcccugcucggcuucaucaugugggccugccagaaggggaacauccggugcaacaucugcaucuga

SEQ ID NO: 64342 - RNA, 1701 nt, Artificial Sequence; identical to SEQ ID NO: 64267
  derived and/or modified CDS sequence (opt1) from hemagglutinin__InfluenzaA__ABA26733

SEQ ID NO: 64343 - RNA, 1701 nt, Artificial Sequence; identical to SEQ ID NO: 64267
  derived and/or modified CDS sequence (opt1) from hemagglutinin__InfluenzaA__ABA26755

SEQ ID NO: 64344 - RNA, 1701 nt, Artificial Sequence; identical to SEQ ID NO: 64306
  derived and/or modified CDS sequence (opt1) from hemagglutinin__InfluenzaA__ABA26766

SEQ ID NO: 64345 - RNA, 1701 nt, Artificial Sequence; identical to SEQ ID NO: 64306
  derived and/or modified CDS sequence (opt1) from hemagglutinin__InfluenzaA__ABA26788

SEQ ID NO: 64346 - RNA, 1701 nt, Artificial Sequence; identical to SEQ ID NO: 64306
  derived and/or modified CDS sequence (opt1) from hemagglutinin__InfluenzaA__ABA26799

SEQ ID NO: 64347 - RNA, 1698 nt, Artificial Sequence
  derived and/or modified CDS sequence (opt1) from hemagglutinin__InfluenzaA__ABA42247
augaaggugaagcugcucguccugcugugcaccuucaccgccacguacgccgacaccaucugcaucggcuaccacgcgaacaacagcaccgacaccguggacacggugcucgagaagaacgucaccgugacccacuccgugaaccugcuggaggacagccacaacgggaagcucugccugcugaagggcaucgcgccccuccagcuggggaacugcuccgucgccggcuggauccuggggaacccggagugcgagcuccugaucagcaaggaguccuggagcuacaucguggagacccccaaccccgagaacggcacgugcuaccccggcuacuucgccgacuacgaggagcugcgcgagcagcucuccagcguguccagcuucgagcgguucgagaucuucccgaaggaguccagcuggcccaaccacaccgucaccgggguguccgccagcugcucccacaacggcaagagcuccuucuacaagaaccugcuguggcucaccgggaagaacggccuguaccccaaccugagcaaguccuacgccaacaacaaggagaaggaggugcucguccuguggggcgugcaccacccgcccaacaucggggaccagcgcgcccuguaccacacggagaacgccuacgugagcgucgugagcucccacuacagccggcgcuucacccccgagaucgccaagcggcccaaggugcgcgaccaggagggccggaucaacuacuacuggacccuccuggagcccggggacaccaucaucuucgaggcgaacggcaaccugaucgccccgcgcuacgccuucgcccucucccggggguucggcagcggcaucaucacguccaacgcccccauggacgagugcgacgcgaagugccagacgccccagggggccaucaacagcucccugcccuuccagaacguccacccggugaccaucggcgagugccccaaguacgugcgcagcgccaagcugcggauggucaccgggcuccgcaacauccccuccauccagagccggggccuguucggggccaucgccggcuucaucgagggcggguggaccggcaugguggacgggugguacggcuaccaccaccagaacgagcagggguccggcuacgcggccgaccagaaguccacccagaacgccaucaacggcaucaccaacaaggugaacagcgucaucgagaagaugaacacccaguucacggccguggggaaggaguucaacaagcuggagcgccggauggagaaccucaacaagaaggucgacgacggcuuccuggacaucuggaccuacaacgccgagcugcucgugcugcuggagaacgagcgcacccucgacuuccacgacagcaacgugaagaaccuguacgagaaggucaagucccagcugaagaacaacgcgaaggagaucgggaacggcugcuucgaguucuaccacaagugcaacgacgagugcauggagagcgugaagaacgggaccuacgacuaccccaaguacuccgaggagagcaagcucaaccgggagaagaucgacggcgugaagcuggaguccaugggcgucuaccagauccuggccaucuacagcacgguggccagcucccucgugcugcuggucagccucggggccaucuccuucuggaugugcagcaacggcucccugcagugccgcaucugcaucuga

SEQ ID NO: 64348 - RNA, 1698 nt, Artificial Sequence; identical to SEQ ID NO: 64320
  derived and/or modified CDS sequence (opt1) from hemagglutinin__InfluenzaA__ABA42258

SEQ ID NO: 64349 - RNA, 1701 nt, Artificial Sequence; identical to SEQ ID NO: 64279
  derived and/or modified CDS sequence (opt1) from hemagglutinin__InfluenzaA__ABA42269

SEQ ID NO: 64350 - RNA, 1698 nt, Artificial Sequence
  derived and/or modified CDS sequence (opt1) from hemagglutinin__InfluenzaA__ABA42280
augaaggugaagcugcucauccugcugugcaccuucaccgccacguacgccgacaccaucugcaucggcuaccacgcgaacaacagcaccgacaccgucgacacggugcucgagaagaacgugaccgucacccacuccgugaaccugcuggaggacagccacaacgggaagcucugccugcugaagggcaucgcgccccuccagcuggggaacugcuccguggccggcuggauccuggggaacccggagugcgagcuccugaucagcaaggaguccuggagcuacaucgucgagacccccaaccccgagaacggcgccugcuaccccggcuacuucgccgacuacgaggagcugcgcgagcagcucuccagcguguccagcuucgagcgguucgagaucuucccgaaggaguccagcuggcccaaccacacggugaccggggucuccgccagcugcucccacaacggcaagagcuccuucuaccgcaaccugcuguggcucaccgggaagaacggccuguaccccaaccugagcaaguccuacgccaacaacaaggagaaggaggugcucauccuguggggcgugcaccacccgcccaacaucggggaccagcggacccuguaccacacggagaacgccuacgucagcguggugagcucccacuacagccgccgguucacccccgagaucaccaagcgccccaagguccgggaccaggagggccgcaucaacuacuacuggacccuccuggagcccggggacacgaucaucuucgaggccaacggcaaccugaucgcgccgugguacgccuucgcccucucccggggguucggcagcggcaucaucaccuccaacgcccccauggacgagugcgacgccaagugccagacgccccagggggcgaucaacagcucccugcccuuccagaacgugcacccggugaccaucggcgagugccccaaguacguccgcagcgccaagcugcggauggugaccgggcuccgcaacauccccuccauccagagccggggccuguucggggccaucgccggcuucaucgagggcggguggaccggcaugguggacgggugguacggcuaccaccaccagaacgagcagggguccggcuacgccgcggaccagaaguccacccagaacgccaucaacggcaucaccaacaaggucaacagcgugaucgagaagaugaacacgcaguucaccgccguggggaaggaguucaacaagcuggagcgccggauggagaaccucaacaagaaggucgacgacggcuuccuggacaucuggaccuacaacgccgagcugcucgugcugcuggagaacgagcgcacccucgacuuccacgacagcaacgucaagaaccuguacgagaaggugaagucccagcugaagaacaacgccaaggagaucgggaacggcugcuucgaguucuaccacaagugcaacaacgagugcauggagagcgugaagaacgggacguacgacuaccccaaguacuccgaggagagcaagcucaaccgggagaagaucgacggcgucaagcuggacuccaugggcguguaccagauccuggcgaucuacagcaccguggccagcucccucguccugcuggugagccucggggccaucuccuucuggaugugcagcaacggcucccugcagugccgcaucugcaucuga

SEQ ID NO: 64351 - RNA, 1701 nt, Artificial Sequence
  derived and/or modified CDS sequence (opt1) from hemagglutinin__InfluenzaA__ABA42291
augaagaccaucaucgcccugagcuacauccucugccugguguucgcccagaagcugcccggcaacgacaacuccaccgcgacgcucugccuggggcaccacgccgucccgaacggcaccaucgugaagaccaucaccaacgaccagaucgaggugacgaacgccaccgagcugguccagagcuccagcaccgggggcaucugcgacagcccccaccagauccucgacggggagaacugcacccugaucgacgcccugcucggcgacccccagugcgacggcuuccagaacaagaagugggaccuguucguggagcgcagcaaggccuacuccaacugcuaccccuacgacgugccggacuacgcgagccugcggucccucgucgccagcuccgggacgcuggaguucaacaacgagagcuucaacuggaccggcgugacccagaacgggaccuccagcgccugcaagcgccgguccaacaacagcuucuucucccgccugaacuggcucacgcaccugaaguucaaguaccccgcccugaacgugaccaugcccaacaacgagaaguucgacaagcucuacaucuggggcguccaccaccccgggaccgacaacgaccagaucagccuguacgcgcaggccuccggccggaucaccgugagcacgaagcgcagccagcagaccgugaucccgaacaucggcucccggccccgcguccgggacauccccagccgcaucuccaucuacuggaccaucgugaagcccggggacauccugcucaucaacagcaccggcaaccugaucgccccgcggggguacuucaagauccgcuccggcaagagcuccaucaugcggagcgacgcccccaucggcaagugcaaguccgagugcaucacgcccaacgggagcauccccaacgacaagccguuccagaacgugaaccgcaucaccuacggcgccugcccccgguacgucaagcagaacacccugaagcucgcgaccgggaugcgcaacgugcccgagaagcagacgcggggcaucuucggggccaucgccggcuucaucgagaacggcugggaggggaugguggacggcugguacggguuccgccaccagaacuccgagggcaucgggcaggccgccgaccugaaguccacccaggcggccaucaaccagaucaacggcaagcugaaccggcucaucggcaagaccaacgagaaguuccaccagaucgagaaggaguucuccgaggucgaggggcgcauccaggaccuggagaaguacguggaggacaccaagacggaccuguggagcuacaacgccgagcuccugguggcccuggagaaccagcacaccaucgaccucaccgacuccgagaugaacaagcuguucgagcggaccaagaagcagcugcgcgagaacgccgaggacaugggcaacgggugcuucaagaucuaccacaagugcgacaacgcgugcaucggcagcauccgcaacgggacguacgaccacgacgucuaccgggacgaggcccucaacaaccgcuuccagaucaagggcguggagcugaaguccggcuacaaggacuggauccuguggaucagcuucgccaucuccugcuuccuccugugcguggcccugcucggguucaucaugugggccugccagaagggcaacauccggugcaacaucugcaucuga

SEQ ID NO: 64352 - RNA, 1701 nt, Artificial Sequence; identical to SEQ ID NO: 64075
  derived and/or modified CDS sequence (opt1) from hemagglutinin__InfluenzaA__ABA42302

SEQ ID NO: 64353 - RNA, 1701 nt, Artificial Sequence; identical to SEQ ID NO: 64129
  derived and/or modified CDS sequence (opt1) from hemagglutinin__InfluenzaA__ABA42313

SEQ ID NO: 64354 - RNA, 1701 nt, Artificial Sequence; identical to SEQ ID NO: 64075
  derived and/or modified CDS sequence (opt1) from hemagglutinin__InfluenzaA__ABA42346

SEQ ID NO: 64355 - RNA, 1701 nt, Artificial Sequence; identical to SEQ ID NO: 64129
  derived and/or modified CDS sequence (opt1) from hemagglutinin__InfluenzaA__ABA42357

SEQ ID NO: 64356 - RNA, 1701 nt, Artificial Sequence
  derived and/or modified CDS sequence (opt1) from hemagglutinin__InfluenzaA__ABA42379
augaagaccaucaucgcccugagcuacauccucugccugguguucgcccagaagcugcccggcaacgacaacuccaccgcgacgcucugccuggggcaccacgccgucccgaacggcacccuggugaagaccaucaccaacgaccagaucgaggugacgaacgccaccgagcucguccagagcuccagcaccgggcgcaucugcgacagcccccaccagauccuggacggcgagaacugcacccugaucgacgcccuccugggggacccccacugcgacggcuuccagaacaaggagugggaccuguucguggagcggagcaaggccuacuccaacugcuaccccuacgacgugccggacuacgucagccuccgcucccugguggcgagcuccggcacgcuggaguucaacaacgagagcuucaacuggaccgggguggcccagaacggcaccuccagcgccugcaagcggcgcuccgacaagagcuucuucucccggcucaacuggcugcaccagcugaaguacaaguaccccgcccucaacgucaccaugcccaacaacgagaaguucgacaagcuguacaucuggggcgugcaccaccccgggacggacagcgaccagaucucccuguacgcgcaggccagcgggcgcgugaccgucagcaccaagcggucccagcagaccgugaucccgaacaucggcagccgccccugggugcggggcgucuccagcaagaucuccaucuacuggacgaucgugaagcccggggacauccuccugaucaacagcaccggcaaccugaucgcgccccgcggguacuucaagauccgguccggcaagagcuccaucaugcgcagcgacgccccgaucggcaagugcaacuccgagugcaucacccccaacgggagcauccccaacgacaagcccuuccagaacgugaaccggaucaccuacggcccgugcccccgcuacgucaagcagaacacgcucaagcuggccaccgggaugcggaacgugcccgagaagcagacccgcggcaucuucggggccaucgccggcuucaucgagaacggcugggaggggaugauggacggcugguacggguuccggcaccagaacuccgagggcaccgggcaggccgccgaccugaaguccacgcaggccgcgaucaaccagaucaacggcaagcucaaccgccugaucgagaagaccaacgagaaguuccaccagaucgagaaggaguucuccgagguggagggccggauccaggaccuggagaaguacgucgaggacaccaagaucgaccucuggagcuacaacgccgagcugcugguggcccucgagaaccagcacaccaucgaccugacggacuccgagaugaacaagcuguucgagcgcaccaagaagcagcuccgggagaacgccgaggacauggggaacggcugcuucaagaucuaccacaagugcgacaacgccugcaucgggagcauccgcaacggcaccuacgaccacgacguguaccgcgacgaggcgcugaacaaccgguuccagaucaagggggucgagcugaaguccggcuacaaggacuggauccucuggaucagcuucgccaucagcugcuucgugcugugcaucguccugcucggcuucaucaugugggccugccagaaggggaacauccgcugcaacaucugcaucuga

SEQ ID NO: 64357 - RNA, 1701 nt, Artificial Sequence; identical to SEQ ID NO: 64104
  derived and/or modified CDS sequence (opt1) from hemagglutinin__InfluenzaA__ABA42390

SEQ ID NO: 64358 - RNA, 1701 nt, Artificial Sequence
  derived and/or modified CDS sequence (opt1) from hemagglutinin__InfluenzaA__ABA42401
augaagaccaucaucgcccugagcuacauccucugccugguguucgcccagaagcugcccggcaacgacaacuccaccgcgacgcucugccuggggcaccacgccgucccgaacggcacccuggugaagaccaucaccaacgaccagaucgaggugacgaacgccaccgagcucguccagagcuccagcaccucccgcaucugcgacagcccccaccagauccuggacggggagaacugcacccugaucgacgcccuccugggcgacccccacugcgacggguuccagaacaaggagugggaccuguucguggagcgguccaaggccuacagcaacugcuaccccuacgacgugccggacuacgucucccuccgcagccugguggcguccagcggcacgcuggaguucaacaacgaguccuucaacuggaccggcguggcccagaacgggaccagcuccgccugcaagcggcgcagcgacaaguccuucuucagccggcucaacuggcugcaccagcugaaguacaaguaccccgcccucaacgucaccaugcccaacaacgagaaguucgacaagcuguacaucuggggcgugcaccaccccgggacggacuccgaccagaucagccuguacgcgcagagcuccggccgcgugaccgucagcaccaagcggucccagcagaccgugaucccgaacaucgggagcggccccugggugcgcggcgucuccagccggaucuccaucuacuggacgaucgugaagcccggggacauccuccugaucaacagcaccggcaaccugaucgcgccccgcggguacuucaagauccgguccggcaagagcuccaucaugcgcagcgacgccccgaucggcaagugcaacuccaagugcaucacccccaacgggagcauccccaacgacaagcccuuccagaacgugaaccggaucaccuacggcgccugcccgcgcuacgucaagcagaacacgcucaagcuggccaccgggaugcggaacgugcccgagaagcagacccgcggcaucuucggggccaucgccggcuucaucgagaacggcugggaggggaugauggacggcugguacggguuccggcaccagaacuccgagggcaccgggcaggccgccgaccucaagagcacgcaggccgcgaucaaccagaucaacggcaagcugaaccgccugaucgagaagaccaacgagaaguuccaccagaucgagaaggaguucuccgagguggagggccggauccaggaccuggagaaguacgucgaggacaccaagaucgaccucuggagcuacaacgccgagcugcugguggcccucgagaaccagcacaccaucgaccugacggacuccgagaugaacaagcuguucgagcgcaccaagaagcagcuccgggagaacgccgaggacauggggaacggcugcuucaagaucuaccacaagugcgacaacgccugcaucgggagcauccgcaacggcaccuacgaccacgacguguaccgcgacgaggcgcugaacaaccgguuccagaucaagggggucgagcucaagagcggcuacaaggacuggauccuguggaucuccuucgccaucagcugcuuccugcugugcaucgugcuccugggcuucaucaugugggccugccagaaggggaacauccgcugcaacaucugcaucuga

SEQ ID NO: 64359 - RNA, 1701 nt, Artificial Sequence
  derived and/or modified CDS sequence (opt1) from hemagglutinin__InfluenzaA__ABA42412
augaagaccaucaucgcccugagcuacauccucugccugguguucgcccagaagcugcccggcaacgacaacuccaccgcgacgcucugccuggggcaccacgccgucccgaacggcacccuggugaagaccaucaccaacgaccagaucgaggugacgaacgccaccgagcucguccagagcuccagcaccgggcgcaucugcgacagcccccaccagauccuggacggcgagaacugcacccugaucgacgcccuccugggggacccccacugcgacggcuuccagaacaaggagugggaccuguucguggagcggagcaaggccuacuccaacugcuaccccuacgacgugccggacuacgucagccuccgcucccugguggcgagcuccggcacgcuggaguucaacaacgagagcuucaacuggaccgggguggcccagaacggcaccuccagcgccugcaagcggcgcuccgacaagagcuucuucucccggcucaacuggcugcaccagcugaaguacaaguaccccgcccucaacgucaccaugcccaacaacgagaaguucgacaagcuguacaucuggggcgugcaccaccccgggacggacagcgaccagaucucccuguacgcgcaggccagcgggcgcgugaccgucagcaccaagcggucccagcagaccgugaucccgaacaucggcagccgccccugggugcggggcgucuccagcaagaucuccaucuacuggacgaucgugaagcccggggacauccuccugaucaacagcaccggcaaccugaucgcgccccgcggguacuucaagauccgguccggcaagagcuccaucaugcgcagcgacgccccgaucggcaagugcaacuccgagugcaucacccccagcggguccauccccaacgacaagcccuuccagaacgugaaccggaucaccuacggcccgugcccccgcuacgucaagcagaacacgcucaagcuggccaccgggaugcggaacgugcccgagaagcagacccgcggcaucuucggggccaucgccggcuucaucgagaacggcugggaggggaugauggacggcugguacggguuccggcaccagaacagcgagggcaccgggcaggccgccgaccugaaguccacgcaggccgcgaucaaccagaucaacggcaagcucaaccgccugaucgagaagaccaacgagaaguuccaccagaucgagaaggaguucagcgagguggagggccggauccaggaccuggagaaguacgucgaggacaccaagaucgaccucugguccuacaacgccgagcugcugguggcccucgagaaccagcacaccaucgaccugacggacagcgagaugaacaagcuguucgagcgcaccaagaagcagcuccgggagaacgccgaggacauggggaacggcugcuucaagaucuaccacaagugcgacaacgccugcaucggguccauccgcaacggcaccuacgaccacgacguguaccgcgacgaggcgcugaacaaccgguuccagaucaagggggucgagcugaaguccggcuacaaggacuggauccucuggaucagcuucgccaucuccugcuuccugcugugcaucgugcuccugggcuucaucaugugggccugccagaaggggaacauccgcugcaacaucugcaucuga

SEQ ID NO: 64360 - RNA, 1701 nt, Artificial Sequence; identical to SEQ ID NO: 64071
  derived and/or modified CDS sequence (opt1) from hemagglutinin__InfluenzaA__ABA42443

SEQ ID NO: 64361 - RNA, 1701 nt, Artificial Sequence; identical to SEQ ID NO: 64075
  derived and/or modified CDS sequence (opt1) from hemagglutinin__InfluenzaA__ABA42454

SEQ ID NO: 64362 - RNA, 1701 nt, Artificial Sequence
  derived and/or modified CDS sequence (opt1) from hemagglutinin__InfluenzaA__ABA42465
augaagaccaucaucgcccugagcuacauccucugccugguguucgcccagaagcugcccggcaacgacaacuccaccgcgacgcucugccuggggcaccacgccgucccgaacggcacccuggugaagaccaucaccaacgaccagaucgaggugacgaacgccaccgagcucguccagagcuccagcaccucccgcaucugcgacagcccccaccagauccuggacggggagaacugcacccugaucgacgcccuccugggcgacccccacugcgacggguuccagaacaaggagugggaccuguucguggagcgguccaaggccuacagcaacugcuaccccuacgacgugccggacuacgucucccuccgcagccugguggcguccagcggcacgcuggaguucaacaacgaguccuucaacuggaccggcguggcccagaacgggaccagcuccgccugcaagcggcgcagcgacaaguccuucuucagccggcucaacuggcugcaccagcugaaguacaaguaccccgcccucaacgucaccaugcccaacaacgagaaguucgacaagcuguacaucuggggcgugcaccaccccgggacggacuccgaccagaucagccuguacgcgcaggccagcggccgcgugaccgucuccaccaagcggagccagcagaccgugaucccgaacaucgggucccgccccuggggccggggcgugagcucccgcaucagcaucuacuggacgaucgucaagcccggggacauccuccugaucaacuccaccggcaaccugaucgcgccccggggguacuucaagauccgcagcggcaaguccagcaucaugcgguccgacgccccgaucggcaagugcaacagcgagugcaucacccccaacggguccauccccaacgacaagcccuuccagaacgugaaccgcaucaccuacggcgccugcccgcgguacgugaagcagaacacgcucaagcuggccaccgggaugcgcaacguccccgagaagcagacccggggcaucuucggggccaucgccggcuucaucgagaacggcugggaggggaugauggacggcugguacggguuccgccaccagaacagcgagggcaccgggcaggccgccgaccugaaguccacgcaggcggccaucaaccagaucaacggcaagcucaaccggcugaucgagaagaccaacgagaaguuccaccagaucgagaaggaguucagcgagguggagggccgcauccaggaccuggagaaguacguggaggacaccaagaucgaccucugguccuacaacgccgagcugcuggucgcccucgagaaccagcacaccaucgaccugacggacagcgagaugaacaagcuguucgagcggaccaagaagcagcuccgcgagaacgccgaggacauggggaacggcugcuucaagaucuaccacaagugcgacaacgcgugcaucggguccauccgcaacggcaccuacgaccacgacguguaccgggacgaggcccugaacaaccgcuuccagaucaaggggguggagcucaagagcggcuacaaggacuggauccuguggaucagcuucgccaucuccugcuuccugcugugcaucguccuccugggcuucaucaugugggccugccagaaggggaacauccggugcaacaucugcaucuga

SEQ ID NO: 64363 - RNA, 1701 nt, Artificial Sequence
  derived and/or modified CDS sequence (opt1) from hemagglutinin__InfluenzaA__ABA42476
augaagaccaucaucgcccugagcuacauccucugccugguguucgcccagaagcugcccggcaacgacaacuccaccgcgacgcucugccuggggcaccacgccgucccgaacggcacccuggugaagaccaucaccaacgaccagaucgaggugacgaacgccaccgagcucguccagagcuccagcaccgggcgcaucugcgacagcccccaccagauccuggacggcgagaacugcacccugaucgacgcccuccugggggacccccacugcgacggcuuccagaacaaggagugggaccuguucguggagcggagcaaggccuacuccaacugcuaccccuacgacgugccggacuacgucagccuccgcucccugguggcgagcuccggcacgcuggaguucaacaacgagagcuucaacuggaccgggguggcccagaacggcaccuccagcgccugcaagcggcgcuccgacaagagcuucuucucccggcucaacuggcugcaccagcugaaguacaaguaccccgcccucaacgucaccaugcccaacaacgagaaguucgacaagcuguacaucuggggcgugcaccaccccgggacggacagcgaccagaucucccuguacgcgcaggccagcgggcgcgugaccgucagcaccaagcggucccagcagaccgugaucccgaacaucggcagccgccccugggugcggggcgucuccagccgcaucuccaucuacuggacgaucgugaagcccggggacauccuccugaucaacagcaccggcaaccugaucgcgccccggggguacuucaagauccgcuccggcaagagcuccaucaugcggagcgacgccccgaucggcaagugcaacuccgagugcaucacccccaacgggagcauccccaacgacaagcccuuccagaacgugaaccgcaucaccuacggcccgugcccccgguacgucaagcagaacacgcucaagcuggccaccgggaugcgcaacgugcccgagaagcagacccggggcaucuucggggccaucgccggcuucaucgagaacggcugggaggggaugauggacggcugguacggguuccgccaccagaacuccgagggcaccgggcaggccgccgaccugaaguccacgcaggccgcgaucaaccagaucaacggcaagcucaaccggcugaucgagaagaccaacgagaaguuccaccagaucgagaaggaguucuccgagguggagggccgcauccaggaccuggagaaguacgucgaggacaccaagaucgaccucuggagcuacaacgccgagcugcugguggcccucgagaaccagcacaccaucgaccugacggacuccgagaugaacaagcuguucgagcggaccaagaagcagcuccgcgagaacgccgaggacauggggaacggcugcuucaagaucuaccacaagugcgacaacgccugcaucgggagcauccgcaacggcaccuacgaccacgacguguaccggaacgaggcgcugaacaaccgcuuccagaucaagggggucgagcugaaguccggcuacaaggacuggauccucuggaucagcuucgccaucagcugcuuccugcugugcaucgugcuccugggcuucaucaugugggccugccagaaggggaacauccggugcaacaucugcaucuga

SEQ ID NO: 64364 - RNA, 1701 nt, Artificial Sequence
  derived and/or modified CDS sequence (opt1) from hemagglutinin__InfluenzaA__ABA42498
augaagaccaucaucgcccugagcuacauccucugccugguguucgcccagaagcugcccggcaacgacaacuccaccgcgacgcucugccuggggcaccacgccgucccgaacggcacccuggugaagaccaucaccaacgaccagaucgaggugacgaacgccaccgagcucguccagagcuccagcaccucccgcaucugcgacagcccccaccagauccuggacggggagaacugcacccugaucgacgcccuccugggcgacccccacugcgacggguuccagaacaaggagugggaccuguucguggagcgguccaaggccuacagcaacugcuaccccuacgacgugccggacuacgucucccuccgcagccugguggcguccagcggcacgcuggaguucaacaacgaguccuucaacuggaccggcguggcccagaacgggaccagcuccgccugcaagcggcgcagcgacaaguccuucuucagccggcucaacuggcugcaccagcugaaguacaaguaccccgcccucaacgucaccaugcccaacaacgagaaguucgacaagcuguacaucuggggcgugcaccaccccgggacggacuccgaccagaucagccuguacgcgcaggccagcggccgcgugaccgucuccaccaagcggagccagcagaccgugaucccgaacaucgggucccgccccugggugcggggcgucagcuccaucaucagcaucuacuggacgaucgugaagcccggcgacauccuccugaucaacuccaccgggaaccugaucgcgccccgcggcuacuucaagauccggagcgggaaguccagcaucaugcgcuccgacgccccgaucggcaagugcaacagcgagugcaucacccccaacggcuccauccccaacgacaagcccuuccagaacgugaaccggaucaccuacggggccugcccgcgcuacgucaagcagaacacgcucaagcuggccaccggcaugcggaacgugcccgagaagcagacccgcgggaucuucggcgccaucgccggguucaucgagaacggcugggagggcaugauggacgggugguacggcuuccggcaccagaacagcgaggggaccggccaggccgccgaccugaaguccacgcaggcggccaucaaccagaucaacgggaagcucaaccgccugaucgagaagaccaacgagaaguuccaccagaucgagaaggaguucagcgagguggagggccggauccaggaccuggagaaguacgucgaggacaccaagaucgaccucugguccuacaacgccgagcugcugguggcccucgagaaccagcacaccaucgaccugacggacagcgagaugaacaagcuguucgagcgcaccaagaagcagcuccgggagaacgccgaggacaugggcaacgggugcuucaagaucuaccacaagugcgacaacgcgugcaucggcuccauccgcaacgggaccuacgaccacgacguguaccgcgacgaggcccugaacaaccgguuccagaucaagggcgucgagcucaagagcggguacaaggacuggauccuguggaucagcuucgccaucuccugcuuccugcugugcaucgugcuccugggcuucaucaugugggccugccagaagggcaacauccgcugcaacaucugcaucuga

SEQ ID NO: 64365 - RNA, 1701 nt, Artificial Sequence; identical to SEQ ID NO: 64096
  derived and/or modified CDS sequence (opt1) from hemagglutinin__InfluenzaA__ABA42509

SEQ ID NO: 64366 - RNA, 1701 nt, Artificial Sequence
  derived and/or modified CDS sequence (opt1) from hemagglutinin__InfluenzaA__ABA42520
augaagaccaucaucgcccugagcuacauccucugccugguguucgcccagaagcugcccgucaacgacaacuccaccgcgacgcucugccugggccaccacgccgugccgaacgggacccuggugaagaccaucaccaacgacuacaucgaggucacgaacgccaccgagcucgugcagagcuccagcaccggccgcaucugcgacagcccccaccagauccuggacggggagaacugcacccugaucgacgcccuccugggcgacccccacugcgacggguuccagaacaaggagugggaccuguucguggagcggagcacggccuacuccaacugcuaccccuacgacgucccggacuacgcgagccuccgcucccugguggccagcuccggcacccuggaguucaacaacgagagcuucaacuggaccggcguggcccagaacgggaccuccagcgccugcaagcggcgcuccaucaagagcuucuucucccggcucaacuggcugcaccagcugaaguacaaguaccccgcgcucaacgucacgaugcccaacaacgagaaguucgacaagcuguacaucuggggcgugcaccaccccagcaccgacuccgaccagaucagccuguacgcccaggccagcgggcgcgugaccgucuccaccaagcggagccagcagacggugaucccgaacaucggcucccgccccugggugcgcggggucagcuccaucaucagcaucuacuggaccaucgugaagcccggcgacauccuccugaucaacuccaccggcaaccugaucgcgccccggggguacuucaagauccggagcggcaaguccagcaucaugcgcuccaacgccccgaucgggaagugcaacagcgagugcaucacccccaacggcuccauccccaacgacaagcccuuccagaacgugaaccggaucacguacggcgccugcccgcgcuacgucaagcagaacacccucaagcuggccaccgggaugcggaacgugcccgagaagcagacccgcggcaucuucggggccaucgccggcuucaucgagaacgggugggagggcaugguggacggcugguacggguuccggcaccagaacagcgagggcacggggcaggccgcggaccugaaguccacccaggccgccaucaaccagaucaacggcaagcucaaccgccugaucgagaagaccaacgagaaguuccaccagaucgagaaggaguucagcgaggucgaggggcggauccaggaccuggagaaguacguggaggacaccaagaucgaccucugguccuacaacgccgagcugcugguggcccucgagaaccagcacacgaucgaccugaccgacagcgagaugaacaagcuguucgagcgcacccggaagcagcuccgcgagaacgcggaggacaugggcaacggcugcuucaagaucuaccacaagugcgacaacgccugcaucggguccauccgcaacggcaccuacgaccacgacgucuaccgggacgaggcccugaacaaccgcuuccagaucaaggggguggagcugaaguccggcuacaaggacuggauccucuggaucagcuucgccaucuccugcuuccugcugugcgucgugcuccugggguucaucaugugggccugccagaagggcaacauccggugcaacaucugcaucuga

SEQ ID NO: 64367 - RNA, 1701 nt, Artificial Sequence
  derived and/or modified CDS sequence (opt1) from hemagglutinin__InfluenzaA__ABA42531
augaagaccaucaucgcccugagcuacauccucugccugguguucgcccagaagcugcccgucaacgacaacuccaccgcgacgcucugccugggccaccacgccgugccgaacgggacccuggugaagaccaucaccaacgaccacaucgaggucacgaacgccaccgagcucgugcagagcuccagcaccggccgcaucugcgacagcccccaccagauccuggacggggagaacugcacccugaucgacgcccuccugggcgacccccacugcgacggguuccagaacaaggagugggaccuguucguggagcgguccacggccuacuccaacugcuaccucuacgacguccccgacuacgcgagccugcgcucccugguggccagcuccggcacccucgaguucaacaacgagagcuucaacuggaccggcguggcccagaacgggaccuccagcgccugcaagcggcgcuccaucaagagcuucuucucccggcugaacuggcugcaccagcucaaguacaaguacccggcgcugaacgucacgaugcccaacaacgagaaguucgacaagcuguacaucuggggcgugcaccaccccagcaccgacuccgaccagaucagccucuacgcccaggccagcgggcgcgugaccgucuccaccaagcggagccagcagacggugauccccaacaucggcucccgcccgugggugcgcggggucagcucccggaucagcaucuacuggaccaucgugaagcccggcgacauccugcugaucaacuccaccggcaaccucaucgcgccccggggguacuucaagauccgcagcggcaaguccagcaucaugcgguccaacgcccccaucgggaagugcaacagcgagugcaucaccccgaacggcuccauccccaacgacaagcccuuccagaacgugaaccgcaucacguacggcgccugcccccgguacgucaagcagaacacccugaagcuggccaccgggaugcgcaacgugccggagaagcagacccggggcaucuucggggccaucgccggcuucaucgagaacgggugggagggcaugguggacggcugguacggguuccgccaccagaacagcgagggcacggggcaggccgcggaccucaaguccacccaggccgccaucaaccagaucaacggcaagcugaaccggcugaucgagaagaccaacgagaaguuccaccagaucgagaaggaguucagcgaggucgaggggcgcauccaggaccucgagaaguacguggaggacaccaagaucgaccugugguccuacaacgccgagcugcucguggcccuggagaaccagcacacgaucgaccugaccgacagcgagaugaacaagcuguucgagcggacccgcaagcagcuccgcgagaacgcggaggacaugggcaacggcugcuucaagaucuaccacaagugcgacaacgccugcaucggguccauccggaacggcaccuacgaccacgacgucuaccgcgacgaggcccugaacaaccgguuccagaucaaggggguggagcucaagagcggcuacaaggacuggauccuguggaucagcuucgccaucuccugcuuccugcucugcgucgugcugcugggguucaucaugugggccugccagaagggcaacauccgcugcaacaucugcaucuga

SEQ ID NO: 64368 - RNA, 1701 nt, Artificial Sequence; identical to SEQ ID NO: 64096
  derived and/or modified CDS sequence (opt1) from hemagglutinin__InfluenzaA__ABA42542

SEQ ID NO: 64369 - RNA, 1701 nt, Artificial Sequence
  derived and/or modified CDS sequence (opt1) from hemagglutinin__InfluenzaA__ABA42553
augaagaccaucaucgcccugagcuacauccucugccugguguucgcccagaagcugcccgucaacgacaacuccaccgcgacgcucugccugggccaccacgccgugccgaacgggacccuggugaagaccaucaccaacgaccacaucgaggucacgaacgccaccgagcucgugcagagcuccagcaccggccgcaucugcgacagcccccaccagauccuggacggggagaacugcacccugaucgacgcccuccugggcgacccccacugcgacggguuccagaacaaggagugggaccuguucguggagcggagcacggcccacuccaacugcuaccccuacgacgucccggacuacgcgagccuccgcucccugguggccagcuccggcacccuggaguucaacaacgagagcuucaacuggaccggcguggcccagaacgggaccuccagcgccugcaagcggcgcuccaucaagagcuucuucucccggcucaacuggcugcaccagcugaaguacaaguaccccgcgcucaacgucacgaugcccaacaacgagaaguucgacaagcuguacaucuggggcgugcaccaccccagcaccgacuccgaccagaucagccuguacgcccaggccagcgggcgcgugaccgucuccaccaagcggagccagcagacggugaucccgaacaucggcucccgccccugggugcgcggggucagcucccggaucagcaucuacuggaccaucgugaagcccggcgacauccuccugaucaacuccaccggcaaccugaucgcgccccggggguacuucaagauccgcagcggcaaguccagcaucaugcgguccaacgccccgaucgggaagugcaacagcgagugcaucacccccaacggcuccauccccaacgacaagcccuuccagaacgugaaccgcaucacguacggcgccugcccgcgguacgucaagcagaacacccucaagcuggccaccgggaugcgcaacgugcccgagaagcagacccggggcaucuucggggccaucgccggcuucaucgagaacgggugggagggcaugguggacggcugguacggguuccgccaccagaacagcgagggcacggggcaggccgcggaccugaaguccacccaggccgccaucaaccagaucaacggcaagcucaaccggcugaucgagaagaccaacgagaaguuccaccagaucgagaaggaguucagcgaggucgaggggcgcauccaggaccuggagaaguacguggaggacaccaagaucgaccucugguccuacaacgccgagcugcugguggcccucgagaaccagcacacgaucgaccugaccgacagcgagaugaacaagcuguucgagcggacccgcaagcagcuccgcgagaacgcggaggacaugggcaacggcugcuucaagaucuaccacaagugcgacaacgccugcaucggguccauccggaacggcaccuacgaccacgacgucuaccgcgacgaggcccugaacaaccgguuccagaucaaggggguggagcugaaguccggcuacaaggacuggauccucuggaucagcuucgccaucuccugcuuccugcugugcgucgugcuccugggguucaucaugugggccugccagaagggcaacauccgcugcaacaucugcaucuga

SEQ ID NO: 64370 - RNA, 1701 nt, Artificial Sequence; identical to SEQ ID NO: 64096
  derived and/or modified CDS sequence (opt1) from hemagglutinin__InfluenzaA__ABA42564

SEQ ID NO: 64371 - RNA, 1701 nt, Artificial Sequence
  derived and/or modified CDS sequence (opt1) from hemagglutinin__InfluenzaA__ABA42928
augaagaccaucaucgcccugagcuacauccucugccugguguucgcccagaagcugcccgucaacgacaacuccaccgcgacgcucugccugggccaccacgccgugccgaacgggacccuggugaagaccaucaccaacgaccacaucgaggucacgaacgccaccgagcucgugcagagcuccagcaccggccgcaucugcgacagcccccaccagauccuggacggggagaacugcacccugaucgacgcccuccugggcgacccccacugcgacggguuccagaacaaggagugggaccuguucguggagcggagcacggccuacuccaacugcuaccccuacgacgucccggacuacgcgagccuccgcucccugguggccagcuccggcacccuggaguucaacaacgagagcuucaacuggaccggcguggcccagaacgggaccuccagcgccugcaagcggcgcuccaucaagagcuucuucucccggcucaacuggcugcaccagcugaaguacaaguaccccgcgcucaacgucacgaugcccaacaacgagaaguucgacaagcuguacaucuggggcgugcaccaccccagcaccgacuccgaccagaucagccuguacgcccaggccagcgggcgcgugaccgucuccaccaagcggagccagcagacggugaucccgaacaucggcucccgccccugggugcgcggggucagcuccaagaucagcaucuacuggaccaucgugaagcccggcgacauccuccugaucaacuccaccggcaaccugaucgcgccccggggguacuucaagauccggagcggcaaguccagcaucaugcgcuccaacgccccgaucgggaagugcaacagcgagugcaucacccccaacggcuccauccccaacgacaagcccuuccagaacgugaaccggaucacguacggcgccugcccgcgcuacgucaagcagaacacccucaagcuggccaccgggaugcggaacgugcccgagaagcagacccgcggcaucuucggggccaucgccggcuucaucgagaacgggugggagggcauggugaacggcugguacggguuccggcaccagaacagcgagggcacggggcaggccgcggaccugaaguccacccaggccgccaucaaccagaucaacggcaagcucaaccgccugaucgagaagaccaacgagaaguuccaccagaucgagaaggaguucagcgaggucgaggggcggauccaggaccuggagaaguacguggaggacaccaagaucgaccucugguccuacaacgccgagcugcugguggcccucgagaaccagcacacgaucgaccugaccgacagcgagaugaacaagcuguucgagcgcacccggaagcagcuccgcgagaacgcggaggacaugggcaacggcugcuucaagaucuaccacaagugcgacaacgccugcaucggguccauccgcaacggcaccuacgaccacgacgucuaccgggacgaggcccugaacaaccgcuuccagaucaaggggguggagcugaaguccggcuacaaggacuggauccucuggaucagcuucgccaucuccugcuuccugcugugcgucgugcuccugggguucaucaugugggccugccagaagggcaacauccggugcaacaucugcaucuga

SEQ ID NO: 64372 - RNA, 1701 nt, Artificial Sequence; identical to SEQ ID NO: 64096
  derived and/or modified CDS sequence (opt1) from hemagglutinin__InfluenzaA__ABA42939

SEQ ID NO: 64373 - RNA, 1701 nt, Artificial Sequence
  derived and/or modified CDS sequence (opt1) from hemagglutinin__InfluenzaA__ABA42978
augaagaccaucaucgcccugagcuacauccucugccugguguucgcccagaagcugcccgucaacgacaacuccaccgcgacgcucugccugggccaccacgccgugccgaacgggacccuggugaagaccaucaccaacgaccacaucgaggucacgaacgccaccgagcucgugcagagcuccagcaccggccgcaucugcgacagcccccaccagauccuggacggggagaacugcacccugaucgacgcccuccugggcgacccccacugcgacggguuccagaacaaggagugggaccuguucguggagcggagcacggccuacuccaacugcuaccccuacgacgucccggacuacgcgagccuccgcucccugguggccagcuccggcacccuggaguucaacaacgagagcuucaacuggaccggcguggcccagaacgggaccuccagcgccugcaagcggcgcuccaucaagagcuucuucucccggcucaacuggcugcaccagcugaaguacaaguaccccgcgcucaacgucacgauccccaacaacgagaaguucgacaagcuguacaucuggggcgugcaccaccccagcaccgacuccgaccagaucagccuguacgcccaggccagcgggcgcgugaccgucuccaccaagcggagccagcagacggugaucccgaacaucggcucccgccccugggugcgcggggucagcucccggaucagcaucuacuggaccaucgugaagcccggcgacauccuccugaucaacuccaccggcaaccugaucgcgccccggggguacuucaagauccgcagcggcaaguccagcaucaugcgguccaacgccccgaucgggaagugcaacagcgagugcaucacccccaacggcuccauccccaacgacaagcccuuccagaacgugaaccgcaucacguacggcgccugcccgcgguacgucaagcagaacacccucaagcuggccaccgggaugcgcaacgugcccgagaagcagacccggggcaucuucggggccaucgccggcuucaucgagaacgggugggagggcaugguggacggcugguacggguuccgccaccagaacagcgagggcacggggcaggccgcggaccugaaguccacccaggccgccaucaaccagaucaacggcaagcucaaccggcugaucgagaagaccaacgagaaguuccaccagaucgagaaggaguucagcgaggucgaggggcgcauccaggaccuggagaaguacguggaggacaccaagaucgaccucugguccuacaacgccgagcugcugguggcccucgagaaccagcacacgaucgaccugaccgacagcgagaugaacaagcuguucgagcggacccgcaagcagcuccgcgagaacgcggaggacaugggcaacggcugcuucaagaucuaccacaagugcgacaacgccugcaucggguccauccggaacggcaccuacgaccacgacgucuaccgcgacgaggcccugaacaaccgguuccagaucaaggggguggagcugaaguccggcuacaaggacuggauccucuggaucagcuucgccaucuccugcuuccugcugugcgucgugcuccugggguucaucaugugggccugccagaagggcaacauccgcugcaacaucugcaucuga

SEQ ID NO: 64374 - RNA, 1701 nt, Artificial Sequence; identical to SEQ ID NO: 64267
  derived and/or modified CDS sequence (opt1) from hemagglutinin__InfluenzaA__ABA43167

SEQ ID NO: 64375 - RNA, 1701 nt, Artificial Sequence
  derived and/or modified CDS sequence (opt1) from hemagglutinin__InfluenzaA__ABA43178
augaagaccaucaucgcccugagcuacauccucugccugguguucgcccagaagcugcccggcaacgacaacuccaccgcgacgcucugccuggggcaccacgccgucccgaacggcaccaucgugaagaccaucaccaacgaccagaucgaggugacgaacgccaccgagcugguccagagcuccagcaccgggggcaucugcgacagcccccaccagauccucgacggggagaacugcacccugaucgacgcccugcucggcgacccccagugcgacggcuuccagaacaagaagugggaccuguucguggagcgcagcaaggccuacuccaacugcuaccccuacgacgugccggacuacgcgagccugcggucccucgucgccagcuccgggacgcuggaguucaacaacgagagcuucaacuggaccggcgugacccagaacgggaccuccagcgccugcaagcgccgguccaacaacagcuucuucucccgccugaacuggcucacgcaccugaaguucaaguaccccgcccugaacgugaccaugcccaacaacgagaaguucgacaagcucuacaucuggggcguccaccaccccgggaccgacaacgaccagaucagccuguacgcgcaggccuccggccggaucaccgugagcacgaagcgcagccagcagaccgugaucccgaacaucggcucccggccccgcguccgggacauccccagccgcaucuccaucuacuggaccaucgugaagcccggggacauccugcucaucaacagcaccggcaaccugaucgccccgcggggguacuucaagauccgcuccggcaagagcuccaucaugcggagcgacgcccccaucggcaagugcaacuccgagugcaucacgcccaacgggagcauccccaacgacaagccguuccagaacgugaaccgcaucaccuacggcgccugcccccgguacgucaagcagaacacccugaagcucgcgaccgggaugcgcaacgugcccgagaagcagacgcggggcaucuucggggccaucgccggcuucaucgagaacggcugggaggggaugguggacggcugguacggguuccgccaccagaacuccgagggcaucgggcaggccgccgaccugaaguccacccaggcggccaucaaccagaucaacggcaagcugaaccggcucaucggcaagaccaacgagaaguuccaccagaucgagaaggaguucuccgaggucgaggggcgcauccaggaccuggagaaguacguggaggacaccaagaucgaccuguggagcuacaacgccgagcuccugguggcccuggagaaccagcacacgaucgaccucaccgacuccgagaugaacaagcuguucgagcggaccaagaagcagcugcgcgagaacgccgaggacaugggcaacgggugcuucaagaucuaccacaagugcgacaacgcgugcaucggcagcauccgcaacgggaccuacgaccacgacgucuaccgggacgaggcccucaacaaccgcuuccagaucaagggcguggagcugaaguccggcuacaaggacuggauccuguggaucagcuucgccaucuccugcuuccuccugugcaucgcccugcucggguucaucaugugggccugccagaagggcaacauccggugcaacaucugcaucuga

SEQ ID NO: 64376 - RNA, 1698 nt, Artificial Sequence
  derived and/or modified CDS sequence (opt1) from hemagglutinin__InfluenzaA__ABA43189
augaaggccaagcugcucgugcugcugugcaccuucaccgccacguacgcggacaccaucugcgucggcuaccacgccaacaacagcaccgacaccguggacacggugcucgagaagaacgucaccgugacccacuccgugaaccugcuggaggacagccacaacgggaagcucugccugcugaagggcaucgcgccccuccagcuggggaacugcuccgucgccggcuggauccuggggaacccggagugcgagcuccugaucagcaaggaguccuggagcuacaucguggagacccccaaccccgagaacggcacgugcuaccccggcuacuucgccgacuacgaggagcugcgcgagcagcucuccagcguguccagcuucgagcgguucgagaucuucccgaagggguccagcuggcccaaccacaccgucaccggcguguccgccagcugcucccacaacggcaagagcuccuucuaccgcaaccugcuguggcucaccgggaagaacgggcuguaccccaaccugagcauguccuacgugaacaacaaggagaaggagguccucgugcuguggggcgugcaccacccgcccaacaucggcgaccagcgggcccuguaccacacggagaacgccuacgucagcguggugagcucccacuacagccgccgguucacccccgagaucgccaagcgccccaagguccgggaccaggaggggcgcaucaacuacuacuggacccuccuggagcccggcgacaccaucaucuucgaggcgaacgggaaccugaucgccccgugguacgccuucgcccucucccggggcuucggcagcgggaucaucacguccaacgcccccauggacgagugcgacgcgaagugccagacgccccagggcgccaucaacagcucccugcccuuccagaacgugcacccggugaccaucggggagugccccaaguacguccgcagcgccaagcugcggauggugaccggccuccgcaacauccccuccauccagagccgggggcuguucggcgccaucgccggcuucaucgagggcggguggaccgggaugguggacggcugguacggguaccaccaccagaacgagcagggcuccggcuacgcggccgaccagaaguccacccagaacgccaucaacgggaucaccaacaaggucaacagcgugaucgagaagaugaacacccaguucacggccgucggcaaggaguucaacaagcuggagcgccggauggagaaccucaacaagaagguggacgacggguuccuggacaucuggaccuacaacgccgagcugcucgugcugcuggagaacgagcgcacccucgacuuccacgacagcaacgucaagaaccuguacgagaaggugaagucccagcugaagaacaacgcgaaggagaucggcaacgggugcuucgaguucuaccacaagugcaacaacgagugcauggagagcgugaagaacggcaccuacgacuaccccaaguacuccgaggagagcaagcucaaccgggagaagaucgacggcgucaagcuggaguccauggggguguaccagauccuggccaucuacagcacgguggccagcucccucguccugcuggugagccucggcgccaucuccuucuggaugugcagcaacgggucccugcagugccgcaucugcaucuga

SEQ ID NO: 64377 - RNA, 1701 nt, Artificial Sequence
  derived and/or modified CDS sequence (opt1) from hemagglutinin__InfluenzaA__ABA43200
augaagaccaucaucgcccugagcuacauccucugccugguguucgcccagaagcugcccggcaacgacaacuccaccgcgacgcucugccuggggcaccacgccgucccgaacggcaccaucgugaagaccaucaccaacgaccagaucgaggugacgaacgccaccgagcugguccagagcuccagcaccgggggcaucugcgacagcccccaccagauccucgacggggagaacugcacccugaucgacgcccugcucggcgacccccagugcgacggcuuccagaacaagaagugggaccuguucguggagcgcagcaaggccuacuccaacugcuaccccuacgacgugccggacuacgcgagccugcggucccucgucgccagcuccgggacgcuggaguucaacaacgagagcuucaacuggaccggcgugacccagaacgggaccuccagcgccugcaagcgccgguccaacaacagcuucuucucccgccugaacuggcucacgcaccugaaguucaaguaccccgcccugaacgugaccaugcccaacaacgagaaguucgacaagcucuacaucuggggcguccaccaccccgggaccgacaacgaccagaucagccuguacgcgcaggccuccggccggaucaccgugagcacgaagcgcagccagcagaccgugaucccgaacaucggcucccggccccgcguccgggacauccccagccgcaucuccaucuacuggaccaucgugaagcccggggacauccugcucaucaacagcaccggcaaccugaucgccccgcggggguacuucaagauccgcuccggcaagagcuccaucaugcggagcgacgcccccaucggcaagugcaacuccgagugcaucacgcccaacgggagcauccccaacgacaagccguuccagaacgugaaccgcaucaccuacggcgccugcccccgguacgucaagcagaacacccugaagcucgcgaccgggaugcgcaacgugcccgagaagcagacgcggggcaucuucggggccaucgccggcuucaucgagaacggcugggaggggaugguggacggcugguacggguuccgccaccagaacuccgagggcaucgggcaggccgccgaccugaaguccacccaggcggccaucaaccagaucaacggcaagcugaaccggcucaucggcaagaccaacgagaaguuccaccagaucgagaaggaguucuccgaggucgaggggcgcauccaggaccuggagaaguacguggaggacaccaagaucgaccuguggagcuacaacgccgagcuccuggugguccuggagaaccagcacacgaucgaccucaccgacuccgagaugaacaagcuguucgagcggaccaagaagcagcugcgcgagaacgccgaggacaugggcaacgggugcuucaagaucuaccacaagugcgacaacgccugcaucggcagcauccgcaacgggaccuacgaccacgacguguaccgggacgaggcgcucaacaaccgcuuccagaucaagggcguggagcugaaguccggcuacaaggacuggauccuguggaucagcuucgccaucuccugcuuccuccugugcgucgugcugcucggguucaucaugugggccugccagaagggcaacauccggugcaacaucugcaucuga

SEQ ID NO: 64378 - RNA, 1701 nt, Artificial Sequence
  derived and/or modified CDS sequence (opt1) from hemagglutinin__InfluenzaA__ABA43336
augaagaccaucaucgcccugagcuacaucuucugccucguguucgcccagaagcugcccggcaacgacaacuccaccgcgacgcugugccucgggcaccacgccgucccgaacggcacccuggugaagaccaucaccaacgaccagaucgaggugacgaacgccaccgagcugguccagaacagcuccaccgggcgcaucugcgacagcccccaccggauccucgacggcaagaacugcacccugaucgacgcccugcucggggacccccacugcgacggcuuccagaacaaggagugggaccuguucguggagcgcuccaaggccuacagcaacugcuaccccuacgacgugccggacuacgcgucccugcggagccucgucgccuccagcggcacgcuggaguucaucaacgaggacuucaacuggaccgggguggcccaguccggcgggagcuacgccugcaagcgcggcuccgugaacagcuucuucucccggcugaacuggcuccacgagagcgaguacaaguaccccgcgcugaacgucaccaugcccaacaacgggaaguucgacaagcuguacguguggggcgugcaccaccccaucaccgaccgcgagcagacgaagcucuacguccgggccuccggccgcgugaccgugagcaccaagcggucccagcagaccgucaucccgaacaucgggagccgccccugggugcggggccugagcucccgcaucagcaucuacuggacgaucgugaagcccggggacauccugcucaucaacuccaccggcaaccugaucgcgccccggggcuacuucaagauccgcaccggcaagagcuccaucaugcggagcgacgccccgaucgggaccugcuccagcgagugcaucacgcccaacggguccauccccaacgacaagcccuuccagaacgucaaccgcaucaccuacggcgccugcccgcgguacgugaagcagaacacccugaagcucgccaccgggaugcgcaacgugcccgagaagcagacgcggggcaucuucggcgccaucgccggguucaucgagaacggcugggaggggauggucgacggcugguacggguuccgccaccagaacagcgagggcaccggccaggccgccgaccugaaguccacccaggcggccaucgaccagaucaacgggaagcugaaccggcucaucgagaagaccaacgagaaguuccaccagaucgagaaggaguucagcgagguggagggccgcauccaggaccuggagaaguacguggaggacacgaagaucgaccugugguccuacaacgccgagcuccuggucgcccuggagaaccagcacaccaucgaccucaccgacagcgagaugaacaagcuguucgagaagacccgcaagcagcugcgggagaacgccgaggacauggggaacggcugcuucaagaucuaccacaagugcgacaacgcgugcaucggguccauccgcaacggcacguacgaccacgacguguaccgggacgaggcccucaacaaccgcuuccagaucaagggcgucgagcucaagagcggguacaaggacuggauccuguggaucuccuucgccaucagcugcuuccugcugugcguggugcugcucggcuucaucaugugggccugccagaaggggaacauccggugcaacaucugcaucuga

SEQ ID NO: 64379 - RNA, 1707 nt, Artificial Sequence
  derived and/or modified CDS sequence (opt1) from hemagglutinin__InfluenzaA__ABA54915
auggagaaggugguccugcuccuggccaccgccagccuggugaaguccgaccagaucugcaucggcuaccacgcgaacaacagcaccgagcaggucgacacgaucauggagaagaacgugaccgugacccacgcccaggacauccucgagaagacccacaacgggaagcugugcgaccuggacggcgugaagccccucauccugcgcgacugcuccgucgccggguggcugcucggcaacccgaugugcgacgaguucaucaacgugcccgaguggagcuacaucguggagaaggccucccccgccaacgaccugugcuaccccggggacuucaacgacuacgaggagcugaagcaccuccugagccggaucaaccacuucgagaagauccagaucaucccgaaguccagcugguccaaccacgaggcgagcuccggcgucagcgccgccugccccuaccacggcaagcccuccuucuuccgcaacgugguguggcugaucaagaagaacagcgccuaccccacgaucaagcgguccuacaacaacaccaaccaggaggaccuccugguccugugggggauccaccacccgaacgacgcggccgagcagaccaagcucuaccagaaccccaccacguacaucagcgugggcaccuccacccugaaccagcgccuggugcccaagaucgccacccggagcaaggucaacgggcaguccggccgcauggaguucuucuggacgauccucaagcccaacgacgccaucaacuucgagagcaacgggaacuucaucgccccggaguacgcguacaagaucgugaagaagggcgacagcgccaucaugaaguccgagcuggaguacggcaacugcaacaccaagugccagacccccaugggggccaucaacagcuccaugcccuuccacaacauccacccccugaccaucggcgagugcccgaaguacgucaagagcaaccggcucgugcuggccacggggcugcgcaacacgccccagcgggagcgccggcgcaagaagcggggccucuucggcgccaucgcgggguucaucgagggcggguggcagggcaugguggacgggugguacggcuaccaccacuccaacgagcagggcagcggguacgccgccgacaaggaguccacccagaaggccaucgacggcgugaccaacaaggucaacagcaucaucgacaagaugaacacccaguucgaggccguggggcgcgaguucaacaaccuggagcggcgcaucgagaaccugaacaagaagauggaggacggcuuccucgacguguggaccuacaacgcggagcugcugguccucauggagaacgagcggacccuggacuuccacgacuccaacgugaagaaccuguacaacaagguccgccuccagcugcgggacaacgccaaggagcuggggaacggcugcuucgaguucuaccacaagugcgacaacgagugcauggagagcgugaagaacggcaccuacgacuacccccaguacuccgaggaggcccgccucaaccgggaggagaucagcggggugaagcuggaguccaugggcacguaccagauccugagcaucuacuccaccgucgccagcucccucgcccuggcgaucaugguggccgggcugagccucuggaugugcuccaacggcagccugcagugccgcaucugcaucuga

SEQ ID NO: 64380 - RNA, 1698 nt, Artificial Sequence
  derived and/or modified CDS sequence (opt1) from hemagglutinin__InfluenzaA__ABA87080
augaaggugaagcugcucguccugcugugcaccuucaccgccacguacgccgacaccaucugcaucggcuaccacgcgaacaacagcaccgacaccguggacacggugcucgagaagaacgucaccgugacccacuccgugaaccugcuggaggacagccacaacgggaagcucugccugcugaagggcaucgcgccccuccagcuggggaacugcuccgucgccggcuggauccuggggaacccggagugcgagcuccugaucagcaaggaguccuggagcuacaucaucgagacccccaaccccgagaacggcacgugcuaccccggcuacuucgccgacuacgaggagcugcgcgagcagcucuccagcguguccagcuucgagcgguucgagaucuucccgaaggaguccagcuggcccaaccacaccgugaccggggucuccgccagcugcucccacaacggcaagagcuccuucuaccgcaaccugcuguggcucaccgggaagaacggccuguaccccaaccugagcaaguccuacgccaacaacaaggagaaggaggugcucgugcuguggggcguccaccacccgcccaacaugggggaccagcgggcccuguaccacacggagaacgccuacgugagcguggucagcucccacuacagccgccgguucacccccgagaucgccaagcgccccaaggugcgggaccaggagggccgcaucaacuacuacuggacccuccuggagcccggggacaccaucaucuucgaggcgaacggcaaccugaucgccccgcgguacgccuucgcccucucccgcggguucggcagcggcaucaucacguccaacgcccccauggacgagugcgacgcgaagugccagacgccccagggggccaucaacagcucccugcccuuccagaacgugcacccggucaccaucggcgagugccccaaguacgugcggagcgccaagcugcgcauggugaccgggcuccggaacauccccuccauccagagccgcggccuguucggggccaucgccggcuucaucgagggcggguggaccggcauggucgacgggugguacggcuaccaccaccagaacgagcagggguccggcuacgcggccgaccagaaguccacccagaacgccaucaacggcaucaccaacaaggugaacagcgugaucgagaagaugaacacccaguucacggccgucgggaaggaguucaacaagcuggagcggcgcauggagaaccucaacaagaagguggacgacggcuuccuggacaucuggaccuacaacgccgagcugcucguccugcuggagaacgagcggacccucgacuuccacgacagcaacgugaagaaccuguacgagaaggugaagucccagcugaagaacaacgcgaaggagaucgggaacggcugcuucgaguucuaccacaagugcaacgacgagugcauggagagcgucaagaacgggaccuacgacuaccccaaguacuccgaggagagcaagcucaaccgcgagaagaucgacggcgugaagcuggaguccaugggcguguaccagauccuggccaucuacagcacggucgccagcucccucgugcugcuggugagccucggggccaucuccuucuggaugugcagcaacggcucccugcagugccggaucugcaucuga

SEQ ID NO: 64381 - RNA, 1698 nt, Artificial Sequence; identical to SEQ ID NO: 64320
  derived and/or modified CDS sequence (opt1) from hemagglutinin__InfluenzaA__ABA87091

SEQ ID NO: 64382 - RNA, 1698 nt, Artificial Sequence; identical to SEQ ID NO: 64320
  derived and/or modified CDS sequence (opt1) from hemagglutinin__InfluenzaA__ABA87231

SEQ ID NO: 64383 - RNA, 1701 nt, Artificial Sequence; identical to SEQ ID NO: 64279
  derived and/or modified CDS sequence (opt1) from hemagglutinin__InfluenzaA__ABA87242

SEQ ID NO: 64384 - RNA, 1701 nt, Artificial Sequence; identical to SEQ ID NO: 64280
  derived and/or modified CDS sequence (opt1) from hemagglutinin__InfluenzaA__ABA87253

SEQ ID NO: 64385 - RNA, 1698 nt, Artificial Sequence
  derived and/or modified CDS sequence (opt1) from hemagglutinin__InfluenzaA__ABB02781
augaaggugaagcugcucauccugcugugcaccuucaccgccacguacgccgacaccaucugcaucggcuaccacgcgaacaacagcaccgacaccgucgacacggugcucgagaagaacgugaccgucacccacuccgugaaccugcuggaggacagccacaacgggaagcucugccugcugaagggcaucgcgccccuccagcuggggaacugcuccguggccggcuggauccuggggaacccggagugcgagcuccugaucagcaaggaguccuggagcuacaucgucgagacccccaaccccgagaacggcgccugcuaccccggcuacuucgccgacuacgaggagcugcgcgagcagcucuccagcguguccagcuucgagcgguucgagaucuucccgaaggaguccagcuggcccaaccacacggugaccggggucuccgccagcugcucccacaacggcaagagcuccuucuaccgcaaccugcuguggcucaccgggaagaacggccuguaccccaaccugagcaaguccuacgccaacaacaaggagaaggaggugcucauccuguggggcgugcaccacccgcccaacaucggggaccagcggacccuguaccacacggagaacgccuacgucagcguggugagcucccacuacagccgccgguucacccccgagaucaccaagcgccccaagguccgggaccaggagggccgcaucaacuacuacuggacccuccuggagcccggggacacgaucaucuucgaggccaacggcaaccugaucgcgccgugguacgccuucgcccucucccggggguucggcagcggcaucaucaccuccaacgcccccauggacgagugcgacgccaagugccagacgccccagggggcgaucaacagcucccugcccuuccagaacgugcacccggugaccaucggcgagugccccaaguacguccgcagcgccaagcugcggauggugaccgggcuccgcaacauccccuccauccagagccggggccuguucggggccaucgccggcuucaucgagggcggguggaccggcaugguggacgggugguacggcuaccaccaccagaacgagcagggguccggcuacgccgcggaccagaaguccacccagaacgccaucaacggcaucaccaacaaggucaacagcgugaucgagaagaugaacacgcaguucaccgccguggggaaggaguucaacaagcuggagcgccggauggagaaccucaacaagaaggucgacgacggcuuccuggacaucuggaccuacaacgccgagcugcucgugcugcuggagaacgagcgcacccucgacuuccacgacagcaacgucaagaaccuguacgagaaggugaagucccagcugaagaacaacgccaaggagaucgggaacggcugcuucgaguucuaccacaagugcaacaacgagugcauggagagcgugaagaacgggacguacgacuaccccaaguacuccgaggagagcaagcucaaccgggagaagaucgacggcgucaagcuggacuccaugggcguguaccagauccuggcgaucuacagcaccguggccagcucccucguccugcuggugagccucggggccaucuccuucuggaugugcagcaacggcucccugcagugccgcgugugcaucuga

SEQ ID NO: 64386 - RNA, 1698 nt, Artificial Sequence; identical to SEQ ID NO: 64325
  derived and/or modified CDS sequence (opt1) from hemagglutinin__InfluenzaA__ABB02792

SEQ ID NO: 64387 - RNA, 1698 nt, Artificial Sequence; identical to SEQ ID NO: 64323
  derived and/or modified CDS sequence (opt1) from hemagglutinin__InfluenzaA__ABB02803

SEQ ID NO: 64388 - RNA, 1698 nt, Artificial Sequence
  derived and/or modified CDS sequence (opt1) from hemagglutinin__InfluenzaA__ABB02814
augaaggccaagcugcucgugcugcugugcaccuucaccgccacguacgcggacaccaucugcaucggcuaccacgccaacaacagcaccgacaccgucgacacggugcucgagaagaacgugaccgucacccacuccgugaaccugcuggaggacagccacaacgggaagcucugccugcugaagggcaucgcgccccuccagcuggggaacugcuccguggccggcuggauccuggggaacccggagugcgagcuccugaucagcaaggaguccuggagcuacaucgucgagacccccaaccccgagaacggcacgugcuaccccggcuacuucgccgacuacgaggagcugcgcgagcagcucuccagcguguccagcuucgagcgguucgagaucuucccgaagggguccagcuggcccaaccacaccgugaccggcgucuccgccagcugcucccacaacggcaagagcuccuucuaccgcaaccugcuguggcucaccgggaagaacgggcuguaccccaaccugagcauguccuacgugaacaacaaggagaaggaggugcucguccuguggggcgugcaccacccgcccaacaucggcgaccagcgggcccuguaccacacggagaacgccuacgugagcgucgugagcucccacuacagccgccgguucacccccgagaucgccaagcgccccaaggugcgggaccaggaggggcgcaucaacuacuacuggacccuccuggagcccggcgacaccaucaucuucgaggcgaacgggaaccugaucgccccgugguacgccuucgcccucucccggggcuucggcagcgggaucaucacguccaacgcccccauggacgagugcgacgcgaagugccagacgccccagggcgccaucaacagcucccugcccuuccagaacguccacccggugaccaucggggagugccccaaguacgugcgcagcgccaagcugcggauggucaccggccuccgcaacauccccuccauccagagccgggggcuguucggcgccaucgccggcuucaucgagggcggguggaccgggaugguggacggcugguacggguaccaccaccagaacgagcagggcuccggcuacgcggccgaccagaaguccacccagaacgccaucaacgggaucaccaacaaggugaacagcgucaucgagaagaugaacacccaguucacggccgugggcaaggaguucaacaagcuggagcgccggauggagaaccucaacaagaaggucgacgacggguuccuggacaucuggaccuacaacgccgagcugcucgugcugcuggagaacgagcgcacccucgacuuccacgacagcaacgugaagaaccuguacgagaaggucaagucccagcugaagaacaacgcgaaggagaucggcaacgggugcuucgaguucuaccacaagugcgacaacgagugcauggagagcgugaagaacggcaccuacgacuaccccaaguacuccgaggagagcaagcucaaccgggagaagaucgacggcgugaagcuggaguccaugggggucuaccagauccuggccaucuacagcacgguggccagcucccucgugcugcuggucagccucggcgccaucuccuucuggaugugcagcaacgggucccugcagugccgcaucugcaucuga

SEQ ID NO: 64389 - RNA, 1698 nt, Artificial Sequence
  derived and/or modified CDS sequence (opt1) from hemagglutinin__InfluenzaA__ABB02825
augaaggccaagcugcucgugcugcugugcaccuucaccgccacguacgcggacaccaucugcaucggcuaccacgccaacaacagcaccgacaccgucgacacggugcucgagaagaacgugaccgucacccacuccgugaaccugcuggaggacagccacaacgggaagcucugccugcugaagggcaucgcgccccuccagcuggggaacugcuccguggccggcuggauccuggggaacccggagugcgagcuccugaucagcaaggaguccuggagcuacaucgucgagacccccaaccccgagaacggcacgugcuaccccggcuacuucgccgacuacgaggagcugcgcgagcagcucuccagcguguccagcuucgagcgguucgagaucuucccgaagggguccagcuggcccaaccacaccgugaccggcgucuccgccagcugcucccacaacggcaagagcuccuucuaccgcaaccugcuguggcucaccgggaagaacgggcuguaccccaaccugagcauguccuacgugaacaacaaggagaaggaggugcucguccuguggggcgugcaccacccgcccaacaucggcgaccagcgggcccuguaccacacggagaacgccuacgugagcgucgugagcucccacuacagccgccgguucacccccgagaucgccaagcgccccaaggugcgggaccaggaggggcgcaucaacuacuacuggacccuccuggagcccggcgacaccaucaucuucgaggcgaacgggaaccugaucgccccgugguacgccuucgcccucucccggggcuucggcagcgggaucaucacguccaacgcccccauggacgagugcgacgcgaagugccagacgccccagggcgccaucaacagcucccugcccuuccagaacguccacccggugaccaucggggagugccccaaguacgugcgcagcgccaagcugcggauggucaccggccuccgcaacauccccuccauccagagccgggggcuguucggcgccaucgccggcuucaucgagggcggguggaccgggaugguggacggcugguacggguaccaccaccagaacgagcagggcuccggcuacgcggccgaccagaaguccacccagaacgccaucaacgggaucaccaacaaggugaacagcgucaucgagaagaugaacacccaguucacggccgugggcaaggaguucaacaagcuggagcgccggauggagaaccucaacaagaaggucgacgacggguuccuggacaucuggaccuacaacgccgagcugcucgugcugcuggagaacgagcgcacccucgacuuccacgacagcaacgugaagaaccuguacgagaaggucaagucccagcugaagaacaacgcgaaggagaucggcaacgggugcuucgaguucuaccacaagugcgacaacgagugcauggagagcgugaagaacggcaccuacgacuaccccaaguacuccgaggagagcaagcucaaccgggagcgcaucgacggcgugaagcuggaguccaugggggucuaccagauccuggccaucuacagcacgguggccagcucccucgugcugcuggucagccucggcgccaucuccuucuggaugugcagcaacgggucccugcagugccggaucugcaucuga

SEQ ID NO: 64390 - RNA, 1701 nt, Artificial Sequence
  derived and/or modified CDS sequence (opt1) from hemagglutinin__InfluenzaA__ABB02836
augaagaccaucaucgcccugagcuacauccucugccugguguucgcccagaagcugcccggcaacgacaacuccaccgcgacgcucugccuggggcaccacgccgucccgaacggcaccaucgugaagaccaucaccaacgaccagaucgaggugacgaacgccaccgagcugguccagagcuccagcaccgggggcaucugcgacagcccccaccagauccucgacggggagaacugcacccugaucgacgcccugcucggcgacccccagugcgacggcuuccagaacaagaagugggaccuguucguggagcgcagcaaggccuacuccaacugcuaccccuacgacgugccggacuacgcgagccugcggucccucgucgccagcuccgggacgcuggaguucaacaacgagagcuucaacuggaccggcgugacccagaacgggaccuccagcgccugcaagcgccgguccaacaacagcuucuucucccgccugaacuggcucacgcaccugaaguucaaguaccccgcccugaacgugaccaugcccaacaacgagaaguucgacaagcucuacaucuggggcguccaccaccccgggaccgacaacgaccagaucagccuguacgcgcaggccuccggccggaucaccgugagcacgaagcgcaaccagcagaccgugaucccgaacaucggcagccggccccgcguccgggacauccccucccgcaucagcaucuacuggaccaucgugaagcccggggacauccugcucaucaacuccaccggcaaccugaucgccccgcggggguacuucaagauccgcagcggcaaguccagcaucaugcgguccgacgcccccaucggcaagugcaagagcgagugcaucacgcccaacggguccauccccaacgacaagccguuccagaacgugaaccgcaucaccuacggcgccugcccccgguacgucaagcagaacacccugaagcucgcgaccgggaugcgcaacgugcccgagaagcagacgcggggcaucuucggggccaucgccggcuucaucgagaacggcugggaggggaugguggacggcugguacggguuccgccaccagaacagcgagggcaucgggcaggccgccgaccugaaguccacccaggcggccaucaaccagaucaacggcaagcugaaccggcucaucggcaagaccaacgagaaguuccaccagaucgagaaggaguucagcgaggucgaggggcgcauccaggaccuggagaaguacguggaggacaccaagaucgaccugugguccuacaacgccgagcuccugguggcccuggagaaccagcacacgaucgaccucaccgacagcgagaugaacaagcuguucgagcggaccaagaagcagcugcgcgagaacgccgaggacaugggcaacgggugcuucaagaucuaccacaagugcgacaacgcgugcaucggcuccauccgcaacgggaccuacgaccacgacgucuaccgggacgaggcccucaacaaccgcuuccagaucaagggcguggagcugaaguccggcuacaaggacuggauccuguggaucuccuucgccaucagcugcuuccuccugugcguggcccugcucggguucaucaugugggccugccagaagggcaacauccggugcaacaucugcaucuga

SEQ ID NO: 64391 - RNA, 1701 nt, Artificial Sequence
  derived and/or modified CDS sequence (opt1) from hemagglutinin__InfluenzaA__ABB02847
augaagaccaucaucgcccugagcuacauccucugccugguguucgcccagaagcugcccggcaacgacaacuccaccgcgacgcucugccuggggcaccacgccgucccgaacggcaccaucgugaagaccaucaccaacgaccagaucgaggugacgaacgccaccgagcugguccagagcuccagcaccgggggcaucugcgacagcccccaccagauccucgacggggagaacugcacccugaucgacgcccugcucggcgacccccagugcgacggcuuccagaacaagaagugggaccuguucguggagcgcagcaaggccuacuccaacugcuaccccuacgacgugccggacuacgcgagccugcggucccucgucgccagcuccgggacgcuggaguucaacaacgagagcuucaacuggaucggcgugacccagaacgggaccuccagcgccugcaagcgccgguccaacaacagcuucuucucccgccugaacuggcucacccaccugaaguucaaguaccccgcccugaacgugacgaugcccaacaacgagaaguucgacaagcucuacaucuggggcguccaccaccccgggaccgacaacgaccagaucagccuguacgcgcaggccuccggccggaucaccgugagcaccaagcgcagccagcagacggugaucccgaacaucggcucccggccccgcguccgggacauccccagccgcaucuccaucuacuggaccaucgugaagcccggggacauccugcucaucaacagcaccggcaaccugaucgccccgcggggguacuucaagauccgcuccggcaagagcuccaucaugcggagcgacgcccccaucggcaagugcaacuccgagugcaucacccccaacgggagcauccccaacgacaagccguuccagaacgugaaccgcaucacguacggcgccugcccccgguacgucaagcagaacacccugaagcucgcgaccgggaugcgcaacgugcccgagaagcagacccggggcaucuucggggccaucgccggcuucaucgagaacggcugggaggggaugguggacggcugguacggguuccgccaccagaacuccgagggcaucgggcaggccgccgaccugaaguccacgcaggcggccaucaaccagaucaacggcaagcugaaccggcucaucggcaagaccaacgagaaguuccaccagaucgagaaggaguucuccgaggucgaggggcgcauccaggaccuggagaaguacguggaggacaccaagaucgaccuguggagcuacaacgccgagcuccugguggcccuggagaaccagcacaccaucgaccucacggacuccgagaugaacaagcuguucgagcggaccaagaagcagcugcgcgagaacgccgaggacaugggcaacgggugcuucaagaucuaccacaagugcgacaacgcgugcaucggcagcauccgcaacgggaccuacgaccacgacgucuaccgggacgaggcccucaacaaccgcuuccagaucaagggcguggagcugaaguccggcuacaaggacuggauccuguggaucagcuucgccaucuccugcuuccuccugugcgugguccugcucggguucaucaugugggccugccagaagggcaacauccggugcaacaucugcaucuga

SEQ ID NO: 64392 - RNA, 1701 nt, Artificial Sequence; identical to SEQ ID NO: 64071
  derived and/or modified CDS sequence (opt1) from hemagglutinin__InfluenzaA__ABB02858

SEQ ID NO: 64393 - RNA, 1701 nt, Artificial Sequence
  derived and/or modified CDS sequence (opt1) from hemagglutinin__InfluenzaA__ABB02869
augaagaccaucaucgcccugagcuacauccucugccugguguucgcccagaagcugcccgucaacgacaacuccaccgcgacgcucugccugggccaccacgccgugccgaacgggacccuggugaagaccaucaccaacgaccacaucgaggucacgaacgccaccgagcucgugcagagcuccagcaccggccgcaucugcgacagcccccaccagauccuggacggggagaacugcacccugaucgacgcccuccugggcgacccccacugcgacggguuccagaacaaggagugggaccuguucguggagcggagcacggccuacuccaacugcuaccccuacgacgucccggacuacgcgagccuccgcucccugguggccagcuccggcacccuggaguucaacaacgagagcuucaacuggaccggcguggcccagaacgggaccuccagcgccugcaagcggcgcuccaucaagagcuucuucucccggcucaacuggcugcaccagcugaaguacaaguaccccgcgcucaacgucacgaugcccaacaacgagaaguucgacaagcuguacaucuggggcgugcaccaccccagcaccgacuccgaccagaucagccuguacgcccaggccagcgggcgcgugaccgucuccaccaagcggagccagcagacggugaucccgaacaucggcucccgccccugggugcgcggggucagcucccggaucagcaucuacuggaccaucgugaagcccggcgacauccuccugaucaacuccaccggcaaccugaucgcgccccggggguacuucaagauccgcagcggcaaguccagcaucaugcgguccaacgccccgaucgggaagugcaacagcgagugcaucacccccaacggcuccauccccaacgacaagcccuuccagaacgugaaccgcaucacguacggcgccugcccgcgguacgucaagcagaacacccucaagcuggccaccgggaugcgcaacgugcccgagaagcagacccggggcaucuucggggccaucgccggcuucguggagaacgggugggagggcauggucgacggcugguacggguuccgccaccagaacagcgagggcacggggcaggccgcggaccugaaguccacccaggccgccaucaaccagaucaacggcaagcucaaccggcugaucgagaagaccaacgagaaguuccaccagaucgagaaggaguucagcgagguggaggggcgcauccaggaccuggagaaguacguggaggacaccaagaucgaccucugguccuacaacgccgagcugcuggucgcccucgagaaccagcacacgaucgaccugaccgacagcgagaugaacaagcuguucgagcggacccgcaagcagcuccgcgagaacgcggaggacaugggcaacggcugcuucaagaucuaccacaagugcgacaacgccugcaucggguccauccggaacggcaccuacgaccacgacguguaccgcgacgaggcccugaacaaccgguuccagaucaagggggucgagcugaaguccggcuacaaggacuggauccucuggaucagcuucgccaucuccugcuuccugcugugcguggugcuccugggguucaucaugugggccugccagaagggcaacauccgcugcaacaucugcaucuga

SEQ ID NO: 64394 - RNA, 1701 nt, Artificial Sequence
  derived and/or modified CDS sequence (opt1) from hemagglutinin__InfluenzaA__ABB02880
augaagaccaucaucgcccugagcuacauccucugccugguguucgcccagaagcugcccgucaacgacaacuccaccgcgacgcucugccugggccaccacgccgugccgaacgggacccuggugaagaccaucaccaacgaccacaucgaggucacgaacgccaccgagcucgugcagagcuccagcaccggccgcaucugcgacagcccccaccagauccuggacggggagaacugcacccugaucgacgcccuccugggcgacccccacugcgacggguuccagaacaaggagugggaccuguucguggagcggagcacggccuacuccaacugcuaccccuacgacgucccggacuacgcgagccuccgcucccugguggccagcuccggcacccuggaguucaacaacgagagcuucaacuggaccggcguggcccagaacgggaccuccagcgccugcaagcggcgcuccaucaagagcuucuucucccggcucaacuggcugcaccagcugaaguacaaguaccccgcgcucaacgucacgaugcccaacaacgagaaguucgacaagcuguacaucuggggcgugcaccaccccagcaccgacuccgaccagaucagccuguacgcccaggccagcgggcgcgugaccgucuccaccaagcggagccagcagacggugaucccgaacaucggcucccgccccugggugcgcggggucagcucccggaucagcaucuacuggaccaucgugaagcccggcgacauccuccugaucaacuccaccggcaaccugaucgcgccccggggguacuucaagauccgcagcggcaaguccagcaucaugcgguccaacgccccgaucgggaagugcaacagcgagugcaucacccccaacggcuccauccccaacgacaagcccuuccagaacgugaaccgcaucacguacggcgccugcccgcgguacgucaagcagaacacccucaagcuggccaccgggaugcgcaacgugcccgagaagcagacccggggcaucuucggggccaucgccggcuucaucgagaacgggugggagggcaugguggacggcugguacggguuccgccaccagaacagcgagggcacggggcaggccgcggaccugaaguccacccaggccgccaucaaccagaucaaccggaagcucaaccgccugaucgagaagaccaacgagaaguuccaccagaucgagaaggaguucagcgaggucgagggccggauccaggaccuggagaaguacguggaggacaccaagaucgaccucugguccuacaacgccgagcugcugguggcccucgagaaccagcacacgaucgaccugaccgacagcgagaugaacaagcuguucgagcgcacccgcaagcagcuccgggagaacgcggaggacauggggaacggcugcuucaagaucuaccacaagugcgacaacgccugcaucggcuccauccgcaacgggaccuacgaccacgacgucuaccgggacgaggcccugaacaaccgcuuccagaucaagggcguggagcugaaguccggguacaaggacuggauccucuggaucagcuucgccaucuccugcuuccugcugugcgucgugcuccugggcuucaucaugugggccugccagaaggggaacauccggugcaacaucugcaucuga

SEQ ID NO: 64395 - RNA, 1701 nt, Artificial Sequence
  derived and/or modified CDS sequence (opt1) from hemagglutinin__InfluenzaA__ABB02891
augaagaccaucaucgcccugagcuacauccucugccugguguucgcccagaagcugcccgucaacgacaacuccaccgcgacgcucugccugggccaccacgccgugccgaacgggacccuggugaagaccaucaccaacgaccacaucgaggucacgaacgccaccgagcucgugcagagcuccagcaccggccgcaucugcgacagcccccaccagauccuggacggggagaacugcacccugaucgacgcccuccugggcgacccccacugcgacggguuccagaacaaggagugggaccuguucguggagcggagcacggccuacuccaacugcuaccccuacgacgucccggacuacgcgagccuccgcucccugguggccagcuccggcacccuggaguucaacaacgagagcuucaacuggaccggcguggcccagaacgggaccuccagcgccugcaagcggcgcuccaucaagagcuucuucucccggcucaacuggcugcaccagcugaaguacaaguaccccgcgcucaacgucacgaugcccaacaacgagaaguucgacaagcuguacaucuggggcgugcaccaccccagcaccgacuccgaccagaucagccuguacgcccaggccagcgggcgcgugaccgucuccaccaagcggagccagcagacggugaucccgaacaucggcucccgccccugggugcgcggggucagcuccaucaucagcaucuacuggaccaucgugaagcccggcgacauccuccugaucaacuccaccggcaaccugaucgcgccccggggguacuucaagauccggagcggcaaguccagcaucaugcgcuccaacgccccgaucggggagugcaacagcgagugcaucacccccaacggcuccauccccaacgacaagcccuuccagaacgugaaccggaucacguacggcgccugcccgcgcuacgucaagcagaacacccucaagcuggccaccgggaugcggaacgugcccgagaagcagacccgcggcaucuucggggccaucgccggcuucaucgagaacgggugggagggcaugguggacggcugguacggguuccggcaccagaacagcgagggcacggggcaggccgcggaccugaaguccacccaggccgccaucaaccagaucaacggcaagcucaaccgccugaucgagaagaccaacgagaaguuccaccagaucgagaaggaguucagcgaggucgaggggcggauccaggaccuggagaaguacguggaggacaccaagaucgaccucugguccuacaacgccgagcugcugguggcccucgagaaccagcacacgaucgaccugaccgacagcgagaugaacaagcuguucgagcgcacccggaagcagcuccgcgagaacgcggaggacaugggcaacggcugcuucaagaucuaccacaagugcgacaacgccugcaucggguccauccgcaacggcaccuacgaccacgacgucuaccgggacgaggcccugaacaaccgcuuccagaucaaggggguggagcugaaguccggcuacaaggacuggauccucuggaucagcuucgccaucuccugcuuccugcugugcgucgugcuccugggguucaucaugugggccugccagaagggcaacauccggugcaacaucugcaucuga

SEQ ID NO: 64396 - RNA, 1701 nt, Artificial Sequence
  derived and/or modified CDS sequence (opt1) from hemagglutinin__InfluenzaA__ABB02902
augaagaccaucaucgcccugagcuacauccucugccugguguucgcccagaagcugcccgucaacgacaacuccaccgcgacgcucugccugggccaccacgccgugccgaacgggacccuggugaagaccaucaccaacgaccacaucgaggucacgaacgccaccgagcucgugcagagcuccagcaccggccgcaucugcgacagcccccaccagauccuggacggggagaacugcacccugaucgacgcccuccugggcgacccccacugcgacggguuccagaacaaggagugggaccuguucguggagcggagcacggccuacuccaacugcuaccccuacgacgucccggacuacgcgagccuccgcucccugguggccagcuccggcacccuggaguucaacaacgagagcuucaacuggaccggcguggcccagaacgggaccuccagcgccugcaagcggcgcuccaucaagagcuucuucucccggcucaacuggcugcaccagcugaaguacaaguaccccgcgcucaacgucacgaugcccaacaacgagaaguucgacaagcuguacaucuggggcgugcaccaccccagcaccgacuccgaccagaucagccuguacgcccaggccagcgggcgcgugaccgucuccaccaagcggagccagcagacggugaucccgaacaucggcucccgccccugggugcgcggggucagcucccggaucagcaucuacuggaccaucgugaagcccggcgacauccuccugaucaacuccaccggcaaccugaucgcgccccggggguacuucaagauccgcagcggcaaguccagcaucaugcgguccaacgccccgaucgggaagugcaacagcgagugcaucacccccaacggcuccauccccaacgacaagcccuuccagaacgugaaccgcaucacguacggcgccugcccgcgguacgucaagcagaacacccucaagcuggccaccgggaugcgcaacgugcccgagaagcagacccggggcaucuucggggccaucgccggcuucaucgagaacgggugggagggcaugauggacggcugguacggguuccgccaccagaacagcgagggcacggggcaggccgcggaccugaaguccacccaggccgccaucaaccagaucaacggcaagcucaaccggcugaucgagaagaccaacgagaaguuccaccagaucgagaaggaguucagcgagguggaggggcgcauccaggaccuggagaaguacgucgaggacaccaagaucgaccucugguccuacaacgccgagcugcugguggcccucgagaaccagcacacgaucgaccugaccgacagcgagaugaacaagcuguucgagcggacccgcaagcagcuccgcgagaacgcggaggacaugggcaacggcugcuucaagaucuaccacaagugcgacaacgccugcaucggguccauccggaacggcaccuacgaccacgacguguaccgcgacgaggcccugaacaaccgguuccagaucaagggggucgagcugaaguccggcuacaaggacuggauccucuggaucagcuucgccaucuccugcuuccugcugugcgugguccuccugggguucaucaugugggccugccagaagggcaacauccgcugcaacaucugcaucuga

SEQ ID NO: 64397 - RNA, 1698 nt, Artificial Sequence
  derived and/or modified CDS sequence (opt1) from hemagglutinin__InfluenzaA__ABB02913
augaaggccaagcugcucgugcugcugugcaccuucaccgccacguacgcggacaccaucugcaucggcuaccacgccaacaacagcaccgacaccgucgacacggugcucgagaagaacgugaccgucacccacuccgugaaccugcuggaggacagccacaacgggaagcucugccugcugaagggcaucgcgccccuccagcuggggaacugcuccguggccggcuggauccuggggaacccggagugcgagcuccugaucagcaaggaguccuggagcuacaucgucgagacccccaaccccgagaacggcacgugcuaccccggcuacuucgccgacuacgaggagcugcgcgagcagcucuccagcguguccagcuucgagcgguucgagaucuucccgaagggguccagcuggcccaaccacaccgugaccggcgucuccgccagcugcucccacaacggcaagagcuccuucuaccgcaaccugcuguggcucaccgggaagaacgggcuguaccccaaccugagcauguccuacgugaacaacaaggagaaggaggugcucguccuguggggcgugcaccggcccccgaacaucggcgaccagcgcgcccuguaccacacggagaacgccuacgugagcgucgugagcucccacuacagccggcgcuucacccccgagaucgccaagcggcccaaggugcgcgaccaggaggggcggaucaacuacuacuggacccuccuggagcccggcgacaccaucaucuucgaggcgaacgggaaccugaucgccccgugguacgccuucgcccucucccgcggcuucggcagcgggaucaucacguccaacgcccccauggacgagugcgacgcgaagugccagacgccccagggcgccaucaacagcucccugcccuuccagaacguccacccggugaccaucggggagugccccaaguacgugcggagcgccaagcugcgcauggucaccggccuccggaacauccccuccauccagagccgcgggcuguucggcgccaucgccggcuucaucgagggcggguggaccgggaugguggacggcugguacggguaccaccaccagaacgagcagggcuccggcuacgcggccgaccagaaguccacccagaacgccaucaaccggaucaccaacaaggugaacagcgucaucgagaagaugaacacccaguucacggccguggggaaggaguucaacaagcuggagcgccggauggagaaccucaacaagaaggucgacgacggcuuccuggacaucuggaccuacaacgccgagcugcucgugcugcuggagaacgagcgcacccucgacuuccacgacagcaacgugaagaaccuguacgagaaggucaagucccagcugaagaacaacgcgaaggagaucgggaacggcugcuucgaguucuaccacaagugcaacaacgagugcauggagagcgugaagaacgggaccuacgacuaccccaaguacuccgaggagagcaagcucaaccgggagaagaucgacggcgugaagcuggaguccaugggcgucuaccagauccuggccaucuacagcacgguggccagcucccucgugcugcuggucagccucggggccaucuccuucuggaugugcagcaacggcucccugcagugccgcaucugcaucuga

SEQ ID NO: 64398 - RNA, 1698 nt, Artificial Sequence
  derived and/or modified CDS sequence (opt1) from hemagglutinin__InfluenzaA__ABB02924
augaaggugaagcugcucguccugcugugcaccuucaccgccacguacgccgacaccaucugcaucggcuaccacgcgaacaacagcaccgacaccguggacacggugcucgagaagaacgucaccgugacccacuccgugaaccugcuggaggacagccacaacgggaagcucugccugcugaagggcaucgcgccccuccagcuggggaacugcuccgucgccggcuggauccuggggaacccggagugcgagcuccugaucagcaaggaguccuggagcuacaucguggagacccccaaccccgagaacggcacgugcuaccccggcuacuucgccgacuacgaggagcugcgcgagcagcucuccagcguguccagcuucgagcgguucgagaucuucccgaaggaguccagcuggcccaaccacaccgucaccgggguguccgccagcugcucccacaacggcaagagcuccuucuaccgcaaccugcuguggcucaccgggaagaacggccuguaccccaaccugagcaaguccuacgccaacaacaaggagaaggaggugcucguccuguggggcgugcaccacccgcccaacaucggggaccagcgggcccuguaccacacggagaacgccuacgugagcgucgugagcucccacuacagccgccgguucacccccgagaucgccaagcgccccaaggugcgggaccaggagggccgcaucaacuacuacuggacccuccuggagcccggggacaccaucaucuucgaggcgaacggcaaccugaucgccccgcgguacgccuucgcccucucccgcggguucggcagcggcaucaucacguccaacgcccccauggacgagugcgacgcgaagugccagacgccccagggggccaucaacagcucccugcccuuccagaacguccacccggugaccaucggcgagugccccaaguacgugcggagcgccaagcugcgcauggucaccgggcuccggaacauccccuccauccagagccgcggccuguucggggccaucgccggcuucaucgagggcggguggaccggcaugguggacgggugguacggcuaccaccaccagaacgagcagggguccggcuacgcggccgaccagaaguccacccagaacgccaucaacggcaucaccaacaaggugaacgccgucaucgagaagaugaacacccaguucacggccguggggaaggaguucaacaagcuggagcggcgcauggagaaccucaacaagaaggucgacgacggcuuccuggacaucuggaccuacaacgcggagcugcucgugcugcuggagaacgagcggacccucgacuuccacgacagcaacgugaagaaccuguacgagaaggucaagagccagcugaagaacaacgccaaggagaucgggaacggcugcuucgaguucuaccacaagugcaacgacgagugcauggaguccgugaagaacgggaccuacgacuaccccaaguacagcgaggaguccaagcucaaccgcgagaagaucgacggcgugaagcuggagagcaugggcgucuaccagauccuggccaucuacuccacgguggccagcagccucgugcugcuggucucccucggggccaucagcuucuggaugugcuccaacggcagccugcagugccggaucugcaucuga

SEQ ID NO: 64399 - RNA, 1698 nt, Artificial Sequence
  derived and/or modified CDS sequence (opt1) from hemagglutinin__InfluenzaA__ABB02936
augaaggccaagcugcucgugcugcugugcaccuucaccgccacguacgcggacaccaucugcaucggcuaccacgccaacaacagcaccgacaccgucgacacggugcucgagaagaacgugaccgucacccacuccgugaaccugcuggaggacagccacaacgggaagcucugccugcugaagggcaucgcgccccuccagcuggggaacugcuccguggccggcuggauccuggggaacccggagugcgagcuccugaucagcaaggaguccuggagcuacaucgucgagacccccaaccccgagaacggcacgugcuaccccggccacuucgccgacuacgaggagcugcgcgagcagcucuccagcguguccagcuucgagcgguucgagaucuucccgaagggguccagcuggcccaaccacaccgugaccggcgucuccgccagcugcucccacaacggcaagagcuccuucuaccgcaaccugcuguggcucaccgggaagaacgggcuguaccccaaccugagcauguccuacgugaacaacaaggagaaggaggugcucguccuguggggcgugcaccacccgcccaacaucggcgaccagcgggcccuguaccacacggagaacgccuacgugagcgucgugagcucccacuacagccgccgguucacccccgagaucgccaagcgccccaaggugcgggaccaggaggggcgcaucaacuacuacuggacccuccuggagcccggcgacaccaucaucuucgaggcgaacgggaaccugaucgccccgugguacgccuucgcccucucccggggcuucggcagcgggaucaucacguccaacgcccccauggacgagugcgacgcgaagugccagacgccccagggcgccaucaacagcucccugcccuuccagaacguccacccggugaccaucggggagugccccaaguacgugcgcagcgccaagcugcggauggucaccggccuccgcaacauccccuccauccagagccgggggcuguucggcgccaucgccggcuucaucgagggcggguggaccgggaugguggacggcugguacggguaccaccaccagaacgagcagggcuccggcuacgcggccgaccagaaguccacccagaacgccaucaacgggaucaccaacaaggugaacagcgucaucgagaagaugaacacccaguucacggccgugggcaaggaguucaacaagcuggagcgccggauggagaaccucaacaagaaggucgacgacggguuccuggacaucuggaccuacaacgccgagcugcucgugcugcuggagaacgagcgcacccucgacuuccacgacagcaacgugaagaaccuguacgagaaggucaagucccagcugaagaacaacgcgaaggagaucggcaacgggugcuucgaguucuaccacaagugcaacaacgagugcauggagagcgugaagaacggcaccuacgacuaccccaaguacuccgaggagagcaagcucaaccgggagaagaucgacggcgugaagcuggaguccaugggggucuaccagauccuggccaucuacagcacgguggccagcucccucgugcugcuggucagccucggcgccaucuccuucuggaugugcagcaacgggucccugcagugccgcaucugcaucuga

SEQ ID NO: 64400 - RNA, 1701 nt, Artificial Sequence
  derived and/or modified CDS sequence (opt1) from hemagglutinin__InfluenzaA__ABB02947
augaagaccaucaucgcccugagcuacauccucugccugguguucgcccagaagauccccggcaacgacaacuccaccgcgacgcugugccucgggcaccacgccgucccgaacggcacccuggugaagaccaucaccaacgaccagaucgaggugacgaacgccaccgagcugguccagagcuccagcaccgggcgcaucugcgacagcccccaccggauccucgacggcgagaacugcacccugaucgacgcccugcucggggacccccacugcgacggcuuccagaacaaggagugggaccuguucguggagcgcagcaaggccuacuccaacugcuaccccuacgacgugcaggacuacgcgagccugcggucccucgucgccagcuccggcacgcuggaguucaacaacgagagcuucaacuggaccgggguggcccagaacggcaccuccuacgccugcaagcgccggagcaucaaguccuucuucagccgccugaacuggcuccaccagcugaaguacaaguacccggcgcugaacgugaccaugcccaacaacgacaaguucgacaagcucuacaucuggggcguccaccaccccuccacggacagcgaccagaccucccuguacgcccaggccagcgggcgggugaccgugagcaccaagcgcucccagcagacggucauccccaacaucgggagccggccgugggugcgcggcguguccagccggaucuccaucuacuggaccaucgucaagcccggcgacauccugcucaucaacagcaccgggaaccugaucgcgccccgcggcuacuucaagauccgguccgggaaguccuccaucaugcgcagcgacgcccccaucggcaagugcaacuccgagugcaucaccccgaacggcagcauccccaacgacaagcccuuccagaacgugaaccggaucacguacggggccugcccccgcuacgugaagcagaacacccugaagcucgccaccggcaugcggaacgucccggagaagcagacccgcgggaucuucggcgccaucgccggguucaucgagaacggcugggagggcaugguggacgggugguacggcuuccggcaccagaacuccgaggggacgggccaggccgcggaccucaagagcacccaggccgccaucaaccagaucaacgggaagcugaaccgccugaucgagaagaccaacgagaaguuccaccagaucgagaaggaguucuccgagguggagggccggauccaggaccuggagaaguacgucgaggacaccaagaucgaccuguggagcuacaacgccgagcuccugguggcccuggagaaccagcacacgaucgaccucaccgacuccgagaugaacaagcuguucgagcgcacccgcaagcagcugcgggagaacgcggaggacaugggcaacgggugcuucaagaucuaccacaagugcgacaacgccugcaucggcagcauccgcaacgggaccuacgaccacgacguguaccgggacgaggcccucaacaaccgcuuccagaucaagggcgucgagcugaaguccggguacaaggacuggauccuguggaucagcuucgccaucagcugcuuccuccugugcgugguccugcucggcuucaucaugugggccugccagaagggcaacauccggugcaacaucugcaucuga

SEQ ID NO: 64401 - RNA, 1701 nt, Artificial Sequence; identical to SEQ ID NO: 64210
  derived and/or modified CDS sequence (opt1) from hemagglutinin__InfluenzaA__ABB02958

SEQ ID NO: 64402 - RNA, 1701 nt, Artificial Sequence; identical to SEQ ID NO: 64210
  derived and/or modified CDS sequence (opt1) from hemagglutinin__InfluenzaA__ABB02969

SEQ ID NO: 64403 - RNA, 1701 nt, Artificial Sequence
  derived and/or modified CDS sequence (opt1) from hemagglutinin__InfluenzaA__ABB02980
augaagaccaucaucgcccugagcuacauccucugccugguguucgcccagaagcugcccggcaacgacaacuccaccgcgacgcucugccuggggcaccacgccgucccgaacggcacccuggugaagaccaucaccaacgaccagaucgaggugacgaacgccaccgagcucguccagagcuccagcaccgggcgcaucugcgacagcccccaccagauccuggacggcgagaacugcacccugaucgacgcccuccugggggacccccacugcgacggcuuccagaacaaggagugggaccuguucguggagcggagcaaggccuacuccaacugcuaccccuacgacgugccggacuacgcgagccuccgcucccuggucgccagcuccggcacgcuggaguucaacaacgagagcuucaacuggaccgggguggcccagaacggcaccuccagcgccugcaagcggcgcuccaacaagagcuucuucucccggcucaacuggcugcaccagcugaaguacaaguaccccgcgcucaacgugaccaugcccaacaacgagaaguucgacaagcuguacaucuggggcguccaccaccccagcacggacuccgaccagaucagccuguacgcccaggccagcgggcgcgugaccguguccaccaagcggagccagcagaccgucaucccgaacaucgggucccgccccugggugcggggcgugagcuccaucaucagcaucuacuggacgaucgucaagcccggcgacauccuccugaucaacuccaccgggaaccugaucgcgccccgcggcuacuucaagauccggagcgggaaguccagcaucaugcgcuccgacgccccgaucggcaagugcaacagcgagugcaucacccccaacggcuccauccccaacgacaagcccuuccagaacgugaaccggaucaccuacggggccugcccgcgcuacgugaagcagaacacgcucaagcuggccaccggcaugcggaacguccccgagaagcagacccgcgggaucuucggcgccaucgccggguucaucgagaacggcugggagggcaugguggacgggugguacggcuuccggcaccagaacagcgaggggaccggccaggccgcggaccugaaguccacgcaggccgccaucaaccagaucaacgggaagcucaaccgccugaucgagaagaccaacgagaaguuccaccagaucgagaaggaguucagcgagguggagggccggauccaggaccuggagaaguacgucgaggacaccaagaucgaccucugguccuacaacgccgagcugcugguggcccucgagaaccagcacaccaucgaccugacggacagcgagaugaacaagcuguucgagcgcaccaagaagcagcuccgggagaacgcggaggacaugggcaacgggugcuucaagaucuaccacaagugcgacaacgccugcaucggcuccauccgcaacgggaccuacgaccacgacguguaccgcgacgaggcccugaacaaccgguuccagaucaagggcgucgagcugaaguccggguacaaggacuggauccucuggaucagcuucgccaucuccugcuuccugcugugcgugguccuccugggcuucaucaugugggccugccagaagggcaacauccgcugcaacaucugcaucuga

SEQ ID NO: 64404 - RNA, 1701 nt, Artificial Sequence
  derived and/or modified CDS sequence (opt1) from hemagglutinin__InfluenzaA__ABB02991
augaagaccaucaucgcccugagcuacauccucugccugguguucgcccagaagcugcccggcaacgacaacuccaccgcgacgcucugccuggggcaccacgccgucccgaacggcacccuggugaagaccaucaccaacgaccagaucgaggugacgaacgccaccgagcucguccagagcuccagcaccgggcgcaucugcgacaacccccaccagauccuggacggcgagaacugcacccugaucgacgcccuccugggggacccccacugcgacggcuuccagaacaaggagugggaccuguucguggagcgguccaaggccuacagcaacugcuaccccuacgacgugccggacuacgcgucccuccgcagccuggucgccuccagcggcacgcuggaguucaacaacgaguccuucaacuggaccgggguggcccagaacggcaccagcuccgccugcaagcggcgcagcaacaaguccuucuucagccggcucaacuggcugcaccagcugaaguacaaguaccccgcgcucaacgugaccaugcccaacaacgagaaguucgacaagcuguacaucuggggcguccaccaccccuccacggacagcgaccagaucucccuguacgcccaggccagcgggcgcgugaccgugagcaccaagcggucccagcagaccgucaucccgaacaucgggagccgccccugggugcggggcguguccagcaucaucuccaucuacuggacgaucgucaagcccggcgacauccuccugaucaacagcaccgggaaccugaucgcgccccgcggcuacuucaagauccgguccggcaagagcuccaucaugcgcagcgacgccccgaucgggaagugcaacuccgagugcaucacccccaacggcagcauccccaacgacaagcccuuccagaacgugaaccggaucaccuacggggccugcccgcgcuacgugaagcagaacacgcucaagcuggccaccggcaugcggaacguccccgagaagcagacccgcgggaucuucggcgccaucgccggguucaucgagaacggcugggagggcaugguggacgggugguacggcuuccggcaccagaacuccgaggggaccggccaggccgcggaccucaagagcacgcaggccgccaucaaccagaucaacgggaagcugaaccgccugaucgagaagaccaacgagaaguuccaccagaucgagaaggaguucuccgagguggagggccggauccaggaccuggagaaguacgucgaggacaccaagaucgaccucuggagcuacaacgccgagcugcugguggcccucgagaaccagcacaccaucgaccugacggacuccgagaugaacaagcuguucgagcgcaccaagaagcagcuccgggagaacgcggaggacaugggcaacgggugcuucaagaucuaccacaagugcgacaacgccugcaucggcagcauccgcaacgggaccuacgaccacgacguguaccgcgacgaggcccugaacaaccgguuccagaucaagggcgucgagcugaaguccggguacaaggacuggauccucuggaucagcuucgccaucagcugcuuccugcugugcgugguccuccugggcuucaucaugugggccugccagaagggcaacauccgcugcaacaucugcaucuga

SEQ ID NO: 64405 - RNA, 1701 nt, Artificial Sequence
  derived and/or modified CDS sequence (opt1) from hemagglutinin__InfluenzaA__ABB03002
augaagaccaucaucgcccugagcuacauccucugccugguguucgcccagaagcugcccggcaacgacaacuccaccgcgacgcucugccuggggcaccacgccgucccgaacggcacccuggugaagaccaucaccaacgaccagaucgaggugacgaacgccaccgagcucguccagagcuccagcaccgggcgcaucugcaacagcccccaccagauccuggacggcgagaacugcacccugaucgacgcccuccugggggacccccacugcgacggcuuccagaacaaggagugggaccuguucguggagcggagcaaggccuacuccaacugcuaccccuacgacgugccggacuacgcgagccuccgcucccuggucgccagcuccggcacgcuggaguucaacaacgagagcuucaacuggaccgggguggcccagaacggcaccuccagcgccugcaagcggcgcuccaacaagagcuucuucucccggcucaacuggcugcaccagcugaaguacaaguaccccgcgcucaacgugaccaugcccaacaacgagaaguucgacaagcuguacaucuggggcguccaccaccccagcacggacuccgaccagaucagccuguacgcccaggccagcgggcgcgugaccguguccaccaagcggagccagcagaccgucaucccgaacaucggguccggccccugggugcgcggcgugagcucccggaucagcaucuacuggacgaucgucaagcccggggacauccuccugaucaacuccaccggcaaccugaucgcgccccgcggguacuucaagauccggagcggcaaguccagcaucaugcgcuccgacgccccgaucggcaagugcaacagcgagugcaucacccccaacggguccauccccaacgacaagcccuuccagaacgugaaccggaucaccuacggcgccugcccgcgcuacgugaagcagaacacgcucaagcuggccaccgggaugcggaacguccccgagaagcagacccgcggcaucuucggggccaucgccggcuucaucgagaacggcugggaggggaugguggacggcugguacggguuccggcaccagaacagcgagggcaccgggcaggccgcggaccugaaguccacgcaggccgccaucaaccagaucaacggcaagcucaaccgccugaucgagaagaccaacgagaaguuccaccagaucgagaaggaguucagcgagguggagggccggauccaggaccuggagaaguacgucgaggacaccaagaucgaccucugguccuacaacgccgagcugcugguggcccucgagaaccagcacaccaucgaccugacggacagcgagaugaacaagcuguucgagcgcaccaagaagcagcuccgggagaacgcggaggacauggggaacggcugcuucaagaucuaccacaagugcgacaacgccugcaucggguccauccgcaacggcaccuacgaccacgacguguaccgcgacgaggcccugaacaaccgguuccagaucaagggggucgagcugaaguccggcuacaaggacuggauccucuggaucagcuucgccaucuccugcuuccugcugugcgugguccuccugggcuucaucaugugggccugccagaaggggaacauccgcugcaacaucugcaucuga

SEQ ID NO: 64406 - RNA, 1701 nt, Artificial Sequence
  derived and/or modified CDS sequence (opt1) from hemagglutinin__InfluenzaA__ABB03013
augaagaccaucaucgcccugagcuacauccucugccugguguucgcccagaagcugcccggcaacgacaacuccaccgcgacgcucugccuggggcaccacgccgucccgaacggcacccuggugaagaccaucaccagcgaccagaucgaggugacgaacgccaccgagcucguccaguccagcuccaccgggcgcaucugcgacagcccccaccggauccuggacggcgagaacugcacccugaucgacgcccuccugggggacccccacugcgacggcuuccagaacaaggagugggaccuguucguggagcgcuccaaggccuacagcaacugcuaccccuacgacgugccggacuacgcgucccuccggagccuggucgccuccagcggcacgcuggaguucaacaacgaguccuucaacuggaccgggguggcccagaacggcaccagcuucgccugcaagcgccgguccaucaagagcuucuucucccgccucaacuggcugcaccagcugaaguacaaguaccccgcgcucaacgugaccaugcccaacaacgacaaguucgacaagcuguacaucuggggcguccaccaccccgggacggacagcgaccagaccucccuguacgcccaggccagcgggcgggugaccgugagcaccaagcgcucccagcagacggucaucccgaacaucggcagcggccccugggugcgcgggguguccagccggaucuccaucuacuggaccaucgucaagcccggcgacauccuccugaucaacagcaccgggaaccugaucgcgccccggggcuacuucaagauccgcuccggcaagagcuccaucaugcggagcgacgccccgaucgggaagugcaacuccgagugcaucacccccaacggcagcauccccaacgacaagcccuuccagaacgugaaccgcaucacguacggggccugcccgcgguacgugaagcagaacacccucaagcuggccaccggcaugcgcaacguccccgagaagcagacccgggggaucuucggcgccaucgccggcuucaucgagaacgggugggagggcaugguggacgggugguacggcuuccgccaccagaacuccgaggggacgggccaggccgcggaccucaagagcacccaggccgccaucaaccagaucaacggcaagcugaaccggcugaucgagaagaccaacgagaaguuccaccagaucgagaaggaguucaccgagguggaggggcgcauccaggaccuggagaaguacgucgaggacacgaagaucgaccucugguccuacaacgccgagcugcugguggcccucgagaaccagcacaccaucgaccugaccgacagcgagaugaacaagcuguucgagcggacccgcaagcagcuccgcgagaacgcggaggacaugggcaacgggugcuucaagaucuaccacaagugcgacaacgccugcaucggcuccauccggaacgggacguacgaccacgacguguaccgcgacgaggcccugaacaaccgguuccagaucaagggcgucgagcucaagagcggcuacaaggacuggauccuguggaucuccuucgccaccagcugcuuccugcugugcgugguccuccugggguucaucaugugggccugccagaagggcaacauccgcugcaacaucugcaucuga

SEQ ID NO: 64407 - RNA, 1701 nt, Artificial Sequence
  derived and/or modified CDS sequence (opt1) from hemagglutinin__InfluenzaA__ABB03024
augaagaccaucaucgcccugagcuacauccucugccugguguucgcccagaagcugcccggcaacgacaacuccaccgcgacgcucugccuggggcaccacgccgucccgaacggcacccuggugaagaccaucaccaacgaccagaucgaggugacgaacgccaccgagcucguccagagcuccagcaccgggcgcaucugcgacagcccccaccagauccuggacggcgagaacugcacccugaucgacgcccuccugggggacccccacugcgacggcuuccagaacaaggagugggaccuguucguggagcggagcaaggccuacuccaacugcuaccccuacgacgugccggacuacgcgagccuccgcucccuggucgccagcuccggcacgcuggaguucaacaacgagagcuucaacuggaccgggguggcccagaacggcaccuccagcgccugcaagcggcgcuccaacaagagcuucuucucccggcucaacuggcugcaccagcugaaguacaaguaccccgcgcucaacgugaccaugcccaacaacgagaaguucgacaagcuguacaucuggggcguccaccaccccagcacggacuccgaccagaucagccuguacgcccaggccagcgggcgcgugaccguguccaccaagcggagccagcagaccgucaucccgaacaucgggucccgccccuggauccggggcgugagcucccgcaucagcaucuacuggacgaucgugaagcccggcgacauccuccugaucaacuccaccgggaaccugaucgcgccccggggcuacuucaagauccgcagcgggaaguccagcaucaugcgguccgacgccccgaucggcaagugcaacagcgagugcaucacccccaacggcuccauccccaacgacaagcccuuccagaacgucaaccgcaucaccuacggggccugcccgcgguacgugaagcagaacacgcucaagcuggccaccggcaugcgcaacgugcccgagaagcagacccgggggaucuucggcgccaucgccggguucaucgagaacggcugggagggcauggucgacgggugguacggcuuccgccaccagaacagcgaggggaccggccaggccgcggaccugaaguccacgcaggccgccaucaaccagaucaacgggaagcucaaccggcugaucgagaagaccaacgagaaguuccaccagaucgagaaggaguucagcgagguggagggccgcauccaggaccuggagaaguacguggaggacaccaagaucgaccucugguccuacaacgccgagcugcuggucgcccucgagaaccagcacaccaucgaccugacggacagcgagaugaacaagcuguucgagcggaccaagaagcagcuccgcgagaacgcggaggacaugggcaacgggugcuucaagaucuaccacaagugcgacaacgccugcaucggcuccauccgcaacgggaccuacgaccacgacguguaccgggacgaggcccugaacaaccgcuuccagaucaagggcguggagcugaaguccggguacaaggacuggauccucuggaucagcuucgccaucuccugcuuccugcugugcgucgugcuccugggcuucaucaugugggccugccagaagggcaacauccggugcaacaucugcaucuga

SEQ ID NO: 64408 - RNA, 1701 nt, Artificial Sequence
  derived and/or modified CDS sequence (opt1) from hemagglutinin__InfluenzaA__ABB03035
augaagaccaucaucgcccugagcuacauccucugccugguguucgcccagaagcugcccggcaacgacaacuccaccgcgacgcucugccuggggcaccacgccgucccgaacggcacccuggugaagaccaucaccagcgaccagaucgaggugacgaacgccaccgagcucguccaguccagcuccaccgggcgcaucugcgacagcccccaccggauccuggacggcgagaacugcacccugaucgacgcccuccugggggacccccacugcgacggcuuccagaacaaggagugggaccuguucguggagcgcuccaaggccuacagcaacugcuaccccuacgacgugccggacuacgcgucccuccggagccuggucgccuccagcggcacgcuggaguucaacaacgaguccuucaacuggaccgggguggcccagaacggcaccagcuucgccugcaagcgccgguccaucaagagcuucuucucccgccucaacuggcugcaccagcugaaguacaaguaccccgcgcucaacguggccaugcccaacaacgacaaguucgacaagcuguacaucuggggcguccaccaccccgggaccgacagcgaccagacgucccuguacgcccaggccagcgggcgggugaccgugagcaccaagcgcucccagcagaccgucaucccgaacaucggcagccggcccugggugcgcggcguguccagccggaucuccaucuacuggacgaucgucaagcccggggacauccuccugaucaacagcaccggcaaccugaucgcgccccgcggguacuucaagauccgguccggcaagagcuccaucaugcgcagcgacgccccgaucggcaagugcaacuccgagugcaucacccccaacgggagcauccccaacgacaagcccuuccagaacgugaaccggaucaccuacggcgccugcccgcgcuacgugaagcagaacacgcucaagcuggccaccgggaugcggaacguccccgagaagcagacccgcggcaucuucggggccaucgccggcuucaucgagaacggcugggaggggaugguggacggcugguacggguuccggcaccagaacuccgagggcaccgggcaggcggccgaccucaagagcacgcaggccgccaucaaccagaucaacggcaagcugaaccgccugaucgagaagaccaacgagaaguuccaccagaucgagaaggaguucaccgagguggagggccggauccaggaccuggagaaguacgucgaggacaccaagaucgaccucugguccuacaacgccgagcugcugguggcgcucgagaaccagcacacgaucgaccugaccgacagcgagaugaacaagcuguucgagcgcacccgcaagcagcuccgggagaacgccgaggacauggggaacggcugcuucaagaucuaccacaagugcgacaacgccugcaucggguccauccgcaacggcaccuacgaccacgacguguaccgggacgaggcccugaacaaccgcuuccagaucaagggggucgagcucaagagcggcuacaaggacuggauccuguggaucuccuucgccacgagcugcuuccugcugugcgugguccuccugggcuucaucaugugggcgugccagaaggggaacauccggugcaacaucugcaucuga

SEQ ID NO: 64409 - RNA, 1701 nt, Artificial Sequence
  derived and/or modified CDS sequence (opt1) from hemagglutinin__InfluenzaA__ABB03046
augaagaccaucaucgcccugagcuacauccucugccugguguucgcccagaagcugcccggcaacgacaacuccaccgcgacgcucugccuggggcaccacgccgucccgaacggcacccuggugaagaccaucaccaacgaccagaucgaggugacgaacgccaccgagcucguccagagcuccagcaccgggcgcaucugcgacagcccccaccagauccuggacggcgagaacugcacccugaucgacgcccuccugggggacccccacugcgacggcuuccagaacaaggagugggaccuguucguggagcggagcaaggccuacuccaacugcuaccccuacgacgugccggacuacgcgagccuccgcucccuggucgccagcuccggcacgcuggaguucaacaacgagagcuucaacuggaccgggguggcccagaacggcaccuccagcgccugcaagcggcgcuccaacaagagcuucuucucccggcucaacuggcugcaccagcugaaguacaaguaccccgcgcucaacgugaccaugcccaacaacgagaaguucgacaagcuguacaucuggggcguccaccaccccagcacggacuccgaccagaucagccuguacgcccaggccagcgggcgcgugaccguguccaccaagcggagccagcagaccgucaucccgaacaucgggucccgccccugggugcggggcgugagcuccggcaucagcaucuacuggacgaucgucaagcccggggacauccuccugaucaacuccaccggcaaccugaucgcgccccgcggguacuucaagauccggagcggcaaguccagcaucaugcgcuccgacgccccgaucggcaagugcaacagcgagugcaucacccccaacggguccauccccaacgacaagcccuuccagaacgugaaccggaucaccuacggcgccugcccgcgcuacgugaagcagaacacgcucaagcuggccaccgggaugcggaacguccccgagaagcagacccgcggcaucuucggggccaucgccggcuucaucgagaacggcugggaggggaugguggacggcugguacggguuccggcaccagaacagcgagggcaccgggcaggccgcggaccugaaguccacgcaggccgccaucaaccagaucaacggcaagcucaaccgccugaucgagaagaccaacgagaaguuccaccagaucgagaaggaguucagcgagguggagggccggauccaggaccuggagaaguacgucgaggacaccaagaucgaccucugguccuacaacgccgagcugcugguggcccucgagaaccagcacaccaucgaccugacggacagcgagaugaacaagcuguucgagcgcaccaagaagcagcuccgggagaacgcggaggacauggggaacggcugcuucaagaucuaccacaagugcgacaacgccugcaucggguccauccgcaacggcaccuacgaccacgacguguaccgcgacgaggcccugaacaaccgguuccagaucaagggggucgagcugaaguccggcuacaaggacuggauccucuggaucagcuucgccaucuccugcuuccugcugugcguggcccuccugggcuucaucaugugggcgugccagaaggggaacauccgcugcaacaucugcaucuga

SEQ ID NO: 64410 - RNA, 1701 nt, Artificial Sequence
  derived and/or modified CDS sequence (opt1) from hemagglutinin__InfluenzaA__ABB03057
augaagaccaucaucgcccugagcuacauccucugccugguguucgcccaggagcugcccggcaacgacaacuccaccgcgacgcucugccuggggcaccacgccgucccgaacggcaccaucgugaagaccaucaccaacgaccagaucgaggugacgaacgccaccgagcugguccagagcuccagcaccgggggcaucugcgacagcccccaccagauccucgacggggagaacugcacccugaucgacgcccugcucggcgacccccagugcgacggcuuccagaacaagaagugggaccuguucguggagcgcagcaaggccuacuccaacugcuaccccuacgacgugccggacuacgcgagccugcggucccucgucgccagcuccgggacgcuggaguucaacaacgagagcuucaacuggaccggcgugacccagaacgggaccuccagcgccugcaagcgccgguccaacaacagcuucuucucccgccugaacuggcucacgcaccugaaguucaaguaccccgcccugaacgugaccaugcccaacaacgagaaguucgacaagcucuacaucuggggcguccaccaccccgggaccgacaacgaccagaccagccuguacgcgcaggccuccggccggaucacggugagcaccaagcgcagccagcagaccgugaucccgaacaucggcucccggccccgcguccgggacauccccagccgcaucuccaucuacuggaccaucgugaagcccggggacauccugcucaucaacagcacgggcaaccugaucgccccgcggggguacuucaagauccgcuccggcaagagcuccaucaugcggagcgacgcccccaucggcaagugcaacuccgagugcaucacccccaacgggagcauccccaacgacaagccguuccagaacgugaaccgcaucaccuacggcgccugcccccgguacgucaagcagaacacccugaagcucgcgacggggaugcgcaacgugcccgagaagcagacccggggcaucuucggggccaucgccggcuucaucgagaacggcugggaggggaugguggacggcugguacggguuccgccaccagaacuccgagggcaucgggcaggccgccgaccugaaguccacccaggcggccaucaaccagaucaacggcaagcugaaccggcucaucggcaagaccaacgagaaguuccaccagaucgagaaggaguucuccgaggucgaggggcgcauccaggaccuggagaaguacguggaggacacgaagaucgaccuguggagcuacaacgccgagcuccugguggcccuggagaaccagcacaccaucgaccucaccgacuccgagaugaacaagcuguucgagcggaccaagaagcagcugcgcgagaacgccgaggacaugggcaacgggugcuucaagaucuaccacaagugcgacaacgcgugcaucggcagcauccgcaacgggacguacgaccacgacgucuaccgggacgaggcccucaacaaccgcuuccagaucaagggcguggagcugaagcugggcuacaaggacuggauccucuggaucuccuucgccaucagcugcuuccugcugugcguggcccuccugggguucaucaugugggccugccagaagggcaacauccggugcaacaucugcaucuga

SEQ ID NO: 64411 - RNA, 1701 nt, Artificial Sequence; identical to SEQ ID NO: 64310
  derived and/or modified CDS sequence (opt1) from hemagglutinin__InfluenzaA__ABB03068

SEQ ID NO: 64412 - RNA, 1701 nt, Artificial Sequence; identical to SEQ ID NO: 64267
  derived and/or modified CDS sequence (opt1) from hemagglutinin__InfluenzaA__ABB03079

SEQ ID NO: 64413 - RNA, 1701 nt, Artificial Sequence; identical to SEQ ID NO: 64267
  derived and/or modified CDS sequence (opt1) from hemagglutinin__InfluenzaA__ABB03090

SEQ ID NO: 64414 - RNA, 1698 nt, Artificial Sequence
  derived and/or modified CDS sequence (opt1) from hemagglutinin__InfluenzaA__ABB03101
augaaggugaagcugcucauccugcugugcaccuucaccgccacguacgccgacaccaucugcaucggcuaccacgcgaacaacagcaccgacaccgucgacacggugcucgagaagaacgugaccgucacccacuccgugaaccugcuggaggacagccacaacgggaagcucugccugcugaagggcaucgcgccccuccagcuggggaacugcuccguggccggcuggauccuggggaacccggagugcgagcuccugaucagcaaggaguccuggagcuacaucgucgagacccccaaccccgagaacggcgccugcuaccccggcuacuucgccgacuacgaggagcugcgcgagcagcucuccagcguguccagcuucgagcgguucgagaucuucccgaagaaguccagcuggcccaaccacacggugaccggggucuccgccagcugcucccacaacggcaagagcuccuucuaccgcaaccugcuguggcucaccgggaagaacggccuguaccccaaccugagcaaguccuacgccaacaacaaggagaaggaggugcucauccuguggggcgugcaccacccgcccaacaucggggaccagcggacccuguaccacacggagaacgccuacgucagcguggugagcucccacuacagccgccgguucacccccgagaucaccaagcgccccaagguccgggaccaggagggccgcaucaacuacuacuggacccuccuggagcccggggacacgaucaucuucgagaccaacggcaaccugaucgccccgugguacgcguucgcccucucccggggguucggcagcggcaucaucaccuccaacgcccccauggacgagugcgacgccaagugccagacgccccagggggccaucaacagcucccugcccuuccagaacgugcacccggugaccaucggcgagugccccaaguacguccgcagcgcgaagcugcggauggugaccgggcuccgcaacauccccuccauccagagccggggccuguucggggccaucgccggcuucaucgagggcggguggaccggcaugguggacgggugguacggcuaccaccaccagaacgagcagggguccggcuacgccgccgaccagaaguccacccagaacgcgaucaacggcaucacgaacaaggucaacagcgugaucgagaagaugaacacccaguucaccgccguggggaaggaguucaacaagcuggagcgccggauggagaaccucaacaagaaggucgacgacggcuuccuggacaucuggaccuacaacgccgagcugcucgugcugcuggagaacgagcgcacgcucgacuuccacgacagcaacgucaagaaccuguacgagaaggugaagucccagcugaagaacaacgccaaggagaucgggaacggcugcuucgaguucuaccacaagugcaacaacgagugcauggagagcgugaagaacgggaccuacgacuaccccaaguacuccgaggagagcaagcucaaccgggagaagaucgacggcgucaagcuggacuccaugggcguguaccagauccuggccaucuacagcaccguggcgagcucccucguccugcuggugagccucggggccaucuccuucuggaugugcagcaacggcucccugcagugccgcaucugcaucuga

SEQ ID NO: 64415 - RNA, 1701 nt, Artificial Sequence
  derived and/or modified CDS sequence (opt1) from hemagglutinin__InfluenzaA__ABB03112
augaagaccaucaucgcccugagcuacauccucugccugguguucgcccagaagcugcccggcaacgacaacuccaccgcgacgcucugccuggggcaccacgccgucccgaacggcaccaucgugaagaccaucaccaacgaccagaucgaggugacgaacgccaccgagcugguccagagcuccagcaccgggggcaucugcgacagcccccaccagauccucgacggggagaacugcacccugaucgacgcccugcucggcgacccccagugcgacggcuuccagaacaagaagugggaccuguucguggagcgcagcaaggccuacuccaacugcuaccccuacgacgugccggacuacgcgagccugcggucccucgucgccagcuccgggacgcuggaguucaacaacgagagcuucaacuggaccggcgugacccagaacgggaccuccagcgccugcaagcgccgguccaacaagagcuucuucucccgccugaacuggcucacgcaccugaaguacaaguaccccgcccugaacgugaccaugcccaacaacgagaaguucgacaagcucuacaucuggggcguccaccaccccgggaccgacagcgaccagaucucccuguacgcgcaggccagcggccggaucaccgugagcacgaagcgcucccagcagaccgugaucccgaacaucggcagccggccccgcguccgggacguguccagccgcaucuccaucuacuggaccaucgugaagcccggggacauccugcucaucaacagcaccggcaaccugaucgcgccccggggguacuucaagauccgcuccggcaagagcuccaucaugcggagcgacgccccgaucggcaagugcaacuccgagugcaucacgcccaacgggagcauccccaacgacaagcccuuccagaacgucaacaagaucaccuacggcgccugcccgcgcuacgugaagcagaacacccugaagcucgccaccgggaugcggaacgugcccgagaagcagacgcgcggcaucuucggggccaucgccggcuucaucgagaacggcugggaggggauggucgacggcugguacggguuccggcaccagaacuccgagggcaccgggcaggccgccgaccugaaguccacccaggcggccaucaaccagaucaacggcaagcugaaccgccucaucggcaagaccaacgagaaguuccaccagaucgagaaggaguucuccgagguggaggggcggauccaggaccuggagaaguacguggaggacacgaagaucgaccuguggagcuacaacgccgagcuccuggucgcccuggagaaccagcacaccaucgaccucaccgacuccgagaugaacaagcuguucgagcgcaccaagaagcagcugcgggagaacgccgaggacaugggcaacgggugcuucaagaucuaccacaagugcgacaacacgugcaucgagagcauccgcaacggcaccuacgaccacgacguguaccgcgacgaggcgcucaacaaccgguuccagaucaaggggguggagcugaaguccggcuacaaggacuggauccuguggaucagcuucgccaucagcugcuuccuccugugcgucgcccugcucggcuucaucaugugggccugccagaaggggaacauccgcugcaacaucugcaucuga

SEQ ID NO: 64416 - RNA, 1698 nt, Artificial Sequence
  derived and/or modified CDS sequence (opt1) from hemagglutinin__InfluenzaA__ABB03123
augaaggugaagcugcucguccugcugugcaccuucaccgccacguacgccgacaccaucugcaucggcuaccacgcgaacaacagcaccgacaccguggacacggugcucgagaagaacgucaccgugacccacuucgugaaccugcuggaggacucccacaacgggaagcucugccugcugaagggcaucgcgccccuccagcuggggaacugcagcgucgccggcuggauccuggggaacccggagugcgagcuccugaucuccaaggagagcugguccuacaucguggagacccccaaccccgagaacggcacgugcuaccccggcuacuucgccgacuacgaggagcugcgcgagcagcucagcuccgugagcuccuucgagcgguucgagaucuucccgaaggagagcuccuggcccaaccacaccgucaccggggugagcgccuccugcagccacaacggcaaguccagcuucuaccgcaaccugcuguggcucaccgggaagaacggccuguaccccaaccuguccaagagcuacgccaacaacaaggagaaggaggugcucguccuguggggcgugcaccacccgcccaacaucggggaccagcgggcccuguaccacacggagaacgccuacguguccgucgugagcagccacuacucccgccgguucacccccgagaucgccaagcgccccaaggugcgggaccaggagggccgcaucaacuacuacuggacccuccuggagcccggggacaccaucaucuucgaggcgaacggcaaccugaucgccccgcgguacgccuucgcccucagccgcggguucggcuccggcaucaucacgagcaacgcccccauggacgagugcgacgcgaagugccagacgccccagggggccaucaacuccagccugcccuuccagaacguccacccggugaccaucggcgagugccccaaguacgugcgguccgccaagcugcgcauggucaccgggcuccggaacauccccagcauccagucccgcggccuguucggggccaucgccggcuucaucgagggcggguggaccggcaugguggacgggugguacggcuaccaccaccagaacgagcaggggagcggcuacgcggccgaccagaaguccacccagaacgccaucaacggcaucaccaacaaggugaacagcgucaucgagaagaugaacacccaguucacggccguggggaaggaguucaacaagcuggagcggcgcauggagaaccucaacaagaaggucgacgacggcuuccuggacaucuggaccuacaacgccgagcugcucgugcugcuggagaacgagcggacccucgacuuccacgacuccaacgugaagaaccuguacgagaaggucaagagccagcugaagaacaacgcgaaggagaucgggaacggcugcuucgaguucuaccacaagugcaacgacgagugcauggaguccgugaagaacgggaccuacgacuaccccaaguacagcgaggaguccaagcucaaccgcgagaagaucgacggcgugaagcuggagagcaugggcgucuaccagauccuggccaucuacuccacgguggccagcagccucgugcugcuggucucccucggggccaucagcuucuggaugugcuccaacggcagccugcagugccggaucugcaucuga

SEQ ID NO: 64417 - RNA, 1698 nt, Artificial Sequence
  derived and/or modified CDS sequence (opt1) from hemagglutinin__InfluenzaA__ABB03134
augaaggugaagcugcucauccugcugugcaccuucaccgccacguacgccgacaccaucugcaucggcuaccacgcgaacaacagcaccgacaccgucgacacggugcucgagaagaacgugaccgucacccacuccgugaaccugcuggaggacagccacaacgggaagcucugccugcugaagggcaucgcgccccuccagcuggggaacugcuccguggccggcuggauccuggggaacccggagugcgagcuccugaucagcaaggaguccuggagcuacaucgucgagacccccaaccccgagaacggcacgugcuaccccggcuacuucgccgacuacgaggagcugcgcgagcagcucuccagcguguccagcuucgagcgguucgagaucuucccgaaggaguccagcuggcccaaccacaccgugaccggggucuccgccagcugcucccacaacggcaagagcuccuucuaccgcaaccugcuguggcucaccgagaagaacgggcuguaccccacgcugagcaaguccuacgccaacaacaaggagaaggaggugcucauccuguggggcgugcaccacccgcccaacaucggggaccagcggacccuguaccacaccgagaacgccuacgucagcguggugagcucccacuacagccgccgguucacccccgagaucacgaagcgccccaagguccgggaccaggagggccgcaucaacuacuacuggacccuccuggagcccggcgacaccaucaucuucgaggccaacgggaaccugaucgccccgugguacgcguucgcccucucccggggcuucgggagcggcaucaucaccuccaacgcccccauggacgagugcgacgccaagugccagacgccccagggcgccaucaacagcucccugcccuuccagaacgugcacccggugaccaucggggagugccccaaguacguccgcagcgcgaagcugcggauggugaccggccuccgcaacauccccuccauccagagccgggggcuguucggcgccaucgccggguucaucgagggcggcuggaccgggaugguggacggcugguacggguaccaccaccagaacgagcagggcuccggguacgccgccgaccagaaguccacgcagaacgcgaucaacggcaucaccaacaaggucaacagcgugaucgagaagaugaacacccaguucaccgccgugggcaaggaguucaacaagcuggagcgccggauggagaaccucaacaagaaggucgacgacggguuccuggacaucuggacguacaacgccgagcugcucgugcugcuggagaacgagcgcacccucgacuuccacgacagcaacgucaagaaccuguacgagaaggugaagucccagcugaagaacaacgccaaggagaucggcaacgggugcuucgaguucuaccacaagugcaacaacgagugcauggagagcgugaagaacggcaccuacgacuaccccaaguacuccgaggagagcaagcucaaccgggagaagaucgacggggucaagcuggaguccaugggcguguaccagauccuggccaucuacagcaccguggcgagcucccucguccugcuggugagccucggcgccaucuccuucuggaugugcagcaacgggucccugcagugccgcaucugcaucuga

SEQ ID NO: 64418 - RNA, 1698 nt, Artificial Sequence; identical to SEQ ID NO: 64323
  derived and/or modified CDS sequence (opt1) from hemagglutinin__InfluenzaA__ABB03145

SEQ ID NO: 64419 - RNA, 1701 nt, Artificial Sequence
  derived and/or modified CDS sequence (opt1) from hemagglutinin__InfluenzaA__ABB04283
augaagaccaucaucgcccugagcuacaucuucugccucguguucgcccagaaccugcccggcaacgacaacuccaccgcgacgcugugccucgggcaccacgccgucccgaacggcacccuggugaagaccaucaccaacgaccagaucgaggugacgaacgccaccgagcugguccagagcuccagcaccgggcgcaucugcgacagcccccaccggauccucgacggcaagaacugcacccugaucgacgcccugcucggggacccccacugcgacggcuuccagaacgagaagugggaccuguucguggagcgcuccaaggccuucuccaacugcuaccccuacgacgugccggacuacgcgagccugcggucccucgucgccagcuccggcacgcuggaguucaucaacgagggguucaacuggaccggcgugacccagagcgggggcuccuacgccugcaagcgcgggagcgacaaguccuucuucagccggcugaacuggcucuacgaguccgagagcaaguaccccgcccugaacgugaccaugcccaacaacggcaacuucgacaagcuguacaucuggggcguccaccaccccuccacggacaaggagcagaccaaccucuacgugcgcgcgagcgggcgggugaccgucagcaccaagcgcucccagcagacgaucaucccgaacaucggcccccggcccugggugcgcgggcugagcucccggaucagcaucuacuggaccaucgugaagcccggcgacauccugcucaucaacuccagcggcaaccugaucgccccgcgcggguacuucaagauccggaccggcaaguccagcaucaugcgcuccgacgcccccaucgggaccugcagcuccgagugcaucacgcccaacggcagcauccccaacgacaagccguuccagaacgucaacaagaucaccuacggggccugccccaaguacgugaagcagaacacccugaagcucgccaccggcaugcggaacauccccgagaagcagacgcgcggcaucuucggggcgaucgccggcuucaucgagaacgggugggagggcaugguggacgggugguacggcuuccggcaccagaacuccgagggcaccgggcaggccgccgaccucaagagcacccaggccgcgaucgaccagaucaacggcaagcugaaccgcgucaucgagaagaccaacgagaaguuccaccagaucgagaaggaguucuccgagguggaggggcggauccaggaccucgagaaguacguggaggacacgaagaucgaccuguggagcuacaacgccgagcugcucgucgcccuggagaaccagcacaccaucgaccugaccgacuccgagaugaacaagcuguucgagaagacccgccggcagcugcgcgagaacgccgaggacaugggcaacgggugcuucaagaucuaccacaagugcgacaacgccugcaucggcagcauccgcaacggcacguacgaccacgacguguaccgggacgaggcgcugaacaaccgcuuccagaucaaggggguggagcucaaguccggcuacaaggacuggauccuguggaucagcuucgccaucagcugcuuccugcucugcgucgugcugcugggguucaucaugugggccugccagaagggcaacauccggugcaacaucugcaucuga

SEQ ID NO: 64420 - RNA, 1701 nt, Artificial Sequence
  derived and/or modified CDS sequence (opt1) from hemagglutinin__InfluenzaA__ABB04294
augaagaccaucaucgcccugagcuacaucuucugccucgugcugggccaggaccugcccgggaacgacaacuccaccgccacgcucugccugggccaccacgcggucccgaacgggacccuggugaagaccaucaccaacgaccagaucgaggugacgaacgccaccgagcucguccagagcuccagcaccggcaagaucugcaacaacccccaccgcauccuggacgggaucaacugcacccugaucgacgcccuccugggcgacccccacugcgacggcuuccagaacgagaagugggaccuguucguggagcgguccaaggccuucagcaacugcuaccccuacgacgugccggacuacgccucccuccgcagccuggucgcguccagcgggacgcuggaguucaucaacgagggcuucaacuggaccggggugacccagaacggcggguccaacgccugcaagcggggccccgacagcggcuucuucucccgccucaacuggcuguacaagagcggguccaccuaccccgugcugaacgucacgaugcccaacaacgacaacuucgacaagcucuacaucuggggcgugcaccacccgagcaccgaccaggagcagaccaaccuguacgugcaggccuccgggcgggucaccgugagcacgaagcgcucccagcagaccaucauccccaacaucggcagccggcccugggugcgcggccugagcucccggaucagcaucuacuggaccaucgucaagcccggggacauccucgugaucaacuccaacggcaaccugaucgccccgcgcggguacuucaagaugcggaccggcaagagcuccaucaugcgcagcgacgcgcccaucgggacgugcaucuccgagugcaucacccccaacggcagcauccccaacgacaagccguuccagaacgugaacaagaucaccuacggcgccugccccaaguacgucaagcagaacacccugaagcucgccacggggaugcggaacgugcccgagaagcagacccgcggcaucuucggggccaucgccggcuucaucgagaacgggugggagggcaugaucgacggcugguacggguuccggcaccagaacuccgagggcaccgggcaggcggccgaccucaagagcacccaggccgccaucgaccagaucaacggcaagcugaaccgcgugaucgagaagacgaacgagaaguuccaccagaucgagaaggaguucuccgaggucgaggggcggauccaggaccucgagaaguacguggaggacaccaagaucgaccuguggagcuacaacgccgagcugcucguggcgcuggagaaccagcacaccaucgaccugaccgacuccgagaugaacaagcuguucgagaagacgcgccggcagcugcgcgagaacgccgaggacaugggcaacggcugcuucaagaucuaccacaagugcgacaacgccugcaucgggagcauccggaacggcaccuacgaccacgacgucuaccgcgacgaggcccugaacaaccgcuuccagaucaaggggguggagcucaaguccggcuacaaggacuggauccuguggaucagcuucgccaucuccugcuuccugcucugcgucgugcugcugggcuucaucaugugggcgugccagaaggggaacauccggugcaacaucugcaucuga

SEQ ID NO: 64421 - RNA, 1701 nt, Artificial Sequence
  derived and/or modified CDS sequence (opt1) from hemagglutinin__InfluenzaA__ABB04305
augaagaccaucaucgcccugagcuacaucuucugccucguguucgcccagaagcugcccgagaacgacaacuccaccgcgacgcugugccucggccaccacgccgucccgaacgggacccuggugaagaccaucaccaacgaccagaucgaggugacgaacgccaccgagcugguccagagcuccagcaccggccgcaucugcgacagcccccaccggauccucgacgggaagaacugcacccugaucgacgcccugcucggcgacccccacugcgacggguuccagaacgagaagugggaccuguucguggagcgcagcaaggccuucuccaacugcuaccccuacgacgugccggacuacgcgagccugcggucccucgucgccagcuccggcacgcuggaguucaucaacgagggcuucaacuggaccggggugacccagagcggcggguccuacgccugcaagcgcggcagcgugaacuccuucuucagccggcugaacuggcucuacaaguccgagagcaaguaccccguccugaacgugaccaugcccaacaacgggaaguucgacaagcuguacaucuggggcgugcaccaccccuccacggacaaggagcagaccaaccucuacguccgcgccagcggcaaggugaccgugagcaccaagcggucccagcagacggucaucccgaacaucgggagccgccccugggugcggggccuguccagccgcaucuccaucuacuggaccaucgugaagcccggggacauccugcucaucaacagcaccggcaaccugaucgcgccccggggcuacuucaagauccgcaccgggaaguccagcaucaugcgguccgacgccccgaucggcacgugcagcuccgagugcaucacccccaacgggagcauccccaacgacaagcccuuccagaacgucaacaagaucaccuacggcgccugcccgcgcuacgugaagcagaacacccugaagcucgccacggggaugcggaacgugcccgagaagcagacccgcggcaucuucggcgccaucgcgggguucaucgagaacggcugggaggggauggucgacggcugguacggguuccggcaccagaacuccgagggcaccggccaggccgccgaccugaaguccacccaggccgccaucgaccagaucaacgggaagcugaaccgccucaucgagaagacgaacgagaaguuccaccagaucgagaaggaguucuccgagguggagggccggauccaggaccuggagaaguacguggaggacaccaagaucgaccuguggagcuacaacgcggagcuccuggucgcccuggagaaccagcacaccaucgaccucaccgacuccgagaugaacaagcuguucgagaagacgcgcaagcagcugcgggagaacgccgaggacauggggaacggcugcuucaagaucuaccacaagugcgacaacgccugcaucgggagcauccgcaacggcaccuacgaccacgacguguaccgcgacgaggcccucaacaaccgguuccagaucaagggcgucgagcugaaguccggguacaaggacuggauccuguggaucagcuucgcgaucagcugcuuccuccugugcguggugcugcucggcuucaucaugugggccugccagaaggggaacauccgcugcaacaucugcaucuga

SEQ ID NO: 64422 - RNA, 1701 nt, Artificial Sequence
  derived and/or modified CDS sequence (opt1) from hemagglutinin__InfluenzaA__ABB04316
augaagaccaucaucgcccugagcuacaucuucugccucguguucgcccagaagcugcccggcaacgacaacuccaccgcgacgcugugccucgggcaccacgccgucccgaacggcacccuggugaagaccaucaccaacgaccagaucgaggugacgaacgccaccgagcugguccagagcuccagcaccgggcgcaucugcgacagcccccaccggauccucgacggcaagaacugcacccugaucgacgcccugcucggggacccccacugcgacggcuuccagaacgagaagugggaccuguucguggagcgcagcaaggccuacuccaacugcuaccccuacgacgugccggacuacgcgagccugcggucccucgucgccagcuccggcacgcuggaguucaucaacgaggacuucaacuggaccggggugacccagagcggcggguccuacgccugcaagcgcggcagcgugaaguccuucuucagccggcugaacuggcuccacgaguccgaguacaaguaccccgcccugaacgucaccaugcccaacaacgggaaguucgacaagcuguacaucuggggcgugcaccaccccagcacggaccgcgagcagaccaaccucuacgugcgggcguccggccgcgucaccgugagcaccaagcggagccagcagacggugaucccgaacaucgggucccgccccuggguccggggccugagcucccgcaucagcaucuacuggaccaucgugaagcccggggacauccugcucaucaacuccaccggcaaccugaucgcgccccggggcuacuucaagauccgcaccgggaaguccuccaucaugcggagcgacgccccgaucggcacgugcuccagcgagugcaucacccccaacggguccauccccaacgacaagcccuuccagaacgugaacaagaucaccuacggcgccugcccgcgcuacgucaagcagaacacccugaagcucgccacggggaugcggaacgugcccgagaagcagacccgcggcaucuucggcgccaucgccggguucaucgagaacggcugggaggggaugguggacggcugguacggguuccggcaccagaacagcgagggcaccggccaggccgccgaccugaaguccacccaggccgcgaucgaccagaucaacgggaagcugaaccgccucaucgagaagacgaacgagaaguuccaccagaucgagaaggaguucagcgaggucgagggccggauccaggaccuggagaaguacguggaggacaccaagaucgaccugugguccuacaacgccgagcuccugguggcccuggagaaccagcacaccaucgaccucaccgacagcgagaugaacaagcuguucgagaagacgcgcaagcagcugcgcgagaacgccgaggacauggggaacggcugcuucaagaucuaccacaagugcgacaacgccugcaucggguccauccggaacggcaccuacgaccacgacgucuaccgcgacgaggcgcucaacaaccgguuccagaucaagggcguggagcucaagagcggguacaagaacuggauccuguggaucuccuucgccaucagcugcuuccugcugugcgucgugcugcucggcuucaucaugugggccugccagaaggggaacauccgcugcaacaucugcaucuga

SEQ ID NO: 64423 - RNA, 1701 nt, Artificial Sequence
  derived and/or modified CDS sequence (opt1) from hemagglutinin__InfluenzaA__ABB04327
augaagaccaucaucgcccugagcuacaucuucugccucguguucgcccagaagcugcccggcaacgacaacuccaccgcgacgcugugccucgggcaccacgccgucccgaacggcacccuggugaagaccaucaccaacgaccagaucgaggugacgaacgccaccgagcugguccagagcuccagcaccgggcgcaucugcgacagcccccaccggauccucgacggcaagaacugcacccugaucgacgcccugcucggggacccccacugcgacggcuuccagaacgagaagugggaccuguucguggagcgcagcaaggccuucuccaacugcuaccccuacgacgugccggacuacgcgagccugcggucccucgucgccagcuccggcacgcuggaguucaucaacgagggguucaacuggaccggcgugacccagagcgggggcuccuacgccugcaagcgcgggagcgugaacuccuucuucagccggcugaacuggcucuacaaguccgaguacaaguaccccgcccugaacgucaccaugcccaacaacggcaaguucgacaagcuguacaucuggggcgugcaccaccccagcacggagaaggagcagaccaaccucuacgugcgcgcguccgggcgggucaccgugagcaccaagcgcagccagcagacggugaucccgaacaucggcuccauccccuggguccgggggcugagcucccgcaucagcaucuacuggaccaucgugaagcccggcgacauccugcucaucaacuccaccggcaaccugaucgcgccccggggguacuucaagauccgcaccggcaagagcuccaucaugcggagcgacgccccgaucgggacgugcuccagcgagugcaucacccccaacggcuccauccccaacgacaagcccuuccagaacgugaacaagaucaccuacggggccugcccgcgcuacgucaagcagaacacccugaagcucgccacgggcaugcggaacgugcccgagaagcagacccgcggcaucuucggggccaucgccggcuucaucgagaacgggugggagggcaugguggacgggugguacggcuuccggcaccagaacagcgagggcaccgggcaggccgccgaccugaaguccacccaggccgcgaucgaccagaucaacggcaagcugaaccgccucaucgagaagacgaacgagaaguuccaccagaucgagaaggaguucagcgaggucgaggggcggauccaggaccuggagaaguacguggaggacaccaagaucgaccugugguccuacaacgccgagcuccugguggcccuggagaaccagcacaccaucgaccucaccgacagcgagaugaacaagcuguucgagaagacgcgcaagcagcugcgggagaacgccgaggacaugggcaacgggugcuucaagaucuaccacaagugcgacaacgccugcaucggcuccauccgcaacggcaccuacgaccacgacgucuaccgcgacgaggcgcucaacaaccgguuccagaucaaggggguggagcugaaguccggcuacaaggacuggauccuguggaucuccuucgccaucagcugcuuccuccugugcgucgugcugcucggguucaucaugugggccugccagaagggcaacauccgcugcaacaucugcaucuga

SEQ ID NO: 64424 - RNA, 1701 nt, Artificial Sequence
  derived and/or modified CDS sequence (opt1) from hemagglutinin__InfluenzaA__ABB04338
augaagaccaucaucgcccugagcuacaucuucugccucgugcugggccaggacuuccccgggaacgacaacuccaccgccacgcugugccucggccaccacgcggucccgaacgggacccuggugaagaccaucaccaacgaccagaucgaggugacgaacgccaccgagcugguccagagcuccagcaccggcaagaucugcaacaacccccaccgcauccucgacgggaucgacugcacccugaucgacgcccugcucggcgacccccacugcgacggcuuccagaacgagacgugggaccuguucguggagcgguccaaggccuucagcaacugcuaccccuacgacgugccggacuacgccucccugcgcagccucgucgcguccagcgggacccuggaguucaucaacgagggcuucaccuggaccggggugacgcagaacggcggguccaacgccugcaagcggggccccgacagcggcuucuucucccgccugaacuggcucuacaagagcggguccaccuaccccgugcugaacgucaccaugcccaacaacgacaacuucgacaagcuguacaucuggggcgugcaccacccgagcaccgaccaggagcagacgucccucuacgugcaggccagcgggcgggucaccguguccaccaagcgcagccagcagaccaucauccccaacaucggcagccggcccugggugcgcggccuguccagccggaucuccaucuacuggacgaucgucaagcccggggacauccuggugcucaacagcaacggcaaccugaucgccccgcgcggguacuucaagaugcggaccggcaaguccagcaucaugcgcuccgacgcgcccaucgggaccugcaucagcgagugcaucacccccaacggcuccauccccaacgacaagccguuccagaacgugaacaagaucacguacggcgccugccccaaguacgucaagcagaacacccugaagcucgccaccgggaugcggaacgugcccgagaagcagacccgcggccuguucggggccaucgccggcuucaucgagaacgggugggagggcaugaucgacggcugguacggguuccggcaccagaacagcgagggcacggggcaggcggccgaccugaaguccacccaggccgccaucgaccagaucaacggcaagcucaaccgcgugaucgagaagaccaacgagaaguuccaccagaucgagaaggaguucagcgaggucgaggggcggauccaggaccuggagaaguacguggaggacaccaagaucgaccugugguccuacaacgccgagcuccugguggcgcuggagaaccagcacacgaucgaccucaccgacagcgagaugaacaagcuguucgagaagacccgccggcagcugcgcgagaacgccgaggacaugggcaacggcugcuucaagaucuaccacaagugcgacaacgccugcaucggguccauccggaacggcaccuacgaccacgacgucuaccgcgacgaggcccucaacaaccgcuuccagaucaaggggguggagcucaagagcggcuacaaggacuggauccuguggaucuccuucgccaucagcugcuuccugcugugcgucgugcugcucggcuucaucaugugggcgugccagaaggggaacauccggugcaacaucugcaucuga

SEQ ID NO: 64425 - RNA, 1701 nt, Artificial Sequence
  derived and/or modified CDS sequence (opt1) from hemagglutinin__InfluenzaA__ABB04349
augaagaccaucaucgcccugagcuacaucuucugccucguguucgcccagaagcugcccggcaacgacaacuccaccgcgacgcugugccucgggcaccacgccgucccgaacggcacccuggugaagaccaucaccaacgaccagaucgaggugacgaacgccaccgagcugguccagagcuccagcaccgggcgcaucugcgacagcccccaccggauccucgacggcaagaacugcacccugaucgacgcccugcucggggacccccacugcgacggcuuccagaacgagaagugggaccuguucguggagcgcagcaaggccuucuccaacugcuaccccuacgacgugccggacuacgcgagccugcggucccucgucgccagcuccggcacgcuggaguucaucaacgagggguucaacuggaccggcgugacccagagcgggggcuccuacgccugcaagcgcgggagcgugaacuccuucuucagccggcugaacuggcucuacaaguccgagagcaaguaccccguccugaacgugaccaugcccaacaacggcaaguucgacaagcuguacaucuggggcgugcaccaccccuccacggacaaggagcagaccaaccucuacguccgcgccagcgggaaggugaccgugagcaccaagcggucccagcagacggucaucccgaacaucggcagccgccccugggugcgggggcuguccagccgcaucuccaucuacuggaccaucgugaagcccggcgacauccugcucaucaacagcaccggcaaccugaucgcgccccggggguacuucaagauccgcaccggcaaguccagcaucaugcgguccgacgccccgaucgggacgugcaacagcgagugcaucacccccaacggcuccauccccaacgacaagcccuuccagaacgucaacaagaucaccuacggggccugcccgcgcuacgugaagcagaacacccugaagcucgccacgggcaugcggaacgugcccgagaagcagacccgcggcaucuucggggccaucgcgggcuucaucgagaacgggugggagggcauggucgacgggugguacggcuuccggcaccagaacagcgagggcaccgggcaggccgccgaccugaaguccacccaggccgccaucgaccagaucaacggcaagcugaaccgccucaucgagaagacgaacgagaaguuccaccagaucgagaaggaguucagcgagguggaggggcggauccaggaccuggagaaguacguggaggacaccaagaucgaccugugguccuacaacgcggagcuccuggucgcccuggagaaccagcacaccaucgaccucaccgacagcgagaugaacaagcuguucgagaagacgcgcaagcagcugcgggagaacgccgaggacaugggcaacgggugcuucaagaucuaccacaagugcgacaacgccugcaucggcuccauccgcaacggcaccuacgaccacgacguguaccgcgacgaggcccucaacaaccgguuccagaucaagggggucgagcugaaguccggcuacaaggacuggauccuguggaucuccuucgcgaucagcugcuuccuccugugcguggugcugcucggguucaucaugugggccugccagaagggcaacauccgcugcaacaucugcaucuga

SEQ ID NO: 64426 - RNA, 1701 nt, Artificial Sequence
  derived and/or modified CDS sequence (opt1) from hemagglutinin__InfluenzaA__ABB04360
augaagaccaucaucgcccugagcuacaucuucugccucguguucgcccagaagcugcccggcaacgacaacuccaccgcgacgcugugccucgggcaccacgccgucccgaacggcacccuggugaagaccaucaccaacgaccagaucgaggugacgaacgccaccgagcugguccagagcuccagcaccgggcgcaucugcgacagcccccaccggauccucgacggcaagaacugcacccugaucgacgcccugcucggggacccccacugcgacggcuuccagaacgagaagugggaccuguucguggagcgcagcaaggccuacuccaacugcuaccccuacgacgugccggacuacgcgagccugcggucccucgucgccagcuccggcacgcuggaguucaucaacgaggacuucaacuggaccggggugacccagagcggcggguccuacgccugcaagcgcggcagcgugaacuccuucuucagccggcugaacuggcuccacaaguccgaguacaaguaccccgcccugaacgucaccaugcccaacaacgggaaguucgacaagcuguacaucuggggcgugcaccaccccagcacggaccgcgagcagaccaaccucuacgugcgggcguccggccgcgucaccgugagcaccaagcggagccagcagacggugaucccgaacaucgggucccgccccuggguccggggccugagcucccgcaucagcaucuacuggaccaucgugaagcccggggacauccugcucaucaacuccaccggcaaccugaucgcgccccggggcuacuucaagauccgcaccgggaaguccuccaucaugcggagcgacgccccgaucggcacgugcuccagcgagugcaucacccccaacggguccauccccaacgacaagcccuuccagaacgugaacaagaucaccuacggcgccugcccgcgcuacgucaagcagaacacccugaagcucgccacggggaugcggaacgugcccgagaagcagacccgcggcaucuucggcgccaucgccggguucaucgagaacggcugggaggggaugguggacggcugguacggguuccggcaccagaacagcgagggcaccggccaggccgccgaccugaaguccacccaggccgcgaucgaccagaucaacgggaagcugaaccgccucaucgagaagacgaacgagaaguuccaccagaucgagaaggaguucagcgaggucgagggccggauccaggaccuggagaaguacguggaggacaccaagaucgaccugugguccuacaacgccgagcuccugguggcccuggagaaccagcacaccaucgaccucaccgacagcgagaugaacaagcuguucgagaagacgcgcaagcagcugcgcgagaacgccgaggacauggggaacggcugcuucaagaucuaccacaagugcgacaacgccugcaucggguccauccggaacggcaccuacgaccacgacgucuaccgcgacgaggcgcucaacaaccgguuccagaucaagggcguggagcucaagagcggguacaaggacuggauccuguggaucuccuucgccaucagcugcuuccugcugugcgucgugcugcucggcuucaucaugugggccugccagaaggggaacauccgcugcaacaucugcaucuga

SEQ ID NO: 64427 - RNA, 1701 nt, Artificial Sequence
  derived and/or modified CDS sequence (opt1) from hemagglutinin__InfluenzaA__ABB04371
augaagaccaucaucgcccugagcuacaucuucuaccucgcccugggccaggaccugcccgggaacgacaacuccaaggcgacccucugccugggccaccacgccgugccgaacgggacgcuggucaagaccaucaccgacgaccagaccgaggugacgaacgccaccgagcucgugcagagcuccagcaccggcaagaucugcaacaacccccaccgcauccuggacgggauggacugcacccugaucgacgcccuccugggcgacccccacugcgacgucuuccagaacgagacgugggaccuguucguggagcgguccaaggccuucagcaacugcuaccccuacgacgugccggacuacgcgucccuccgcagccuggucgccuccagcggcaccauggaguucaucaccgagggguucaccuggacggaggugacccagaacggcggguccaacgccugcaagcggggccccgacagcggguucuucucccgccugaacuggcucaccaagagcggccggaccuaccccgugcugaacgucacgaugcccaacaacgacaacuucgacaagcuguacaucuggggcgugcaccacccguccaccgaccaggagcagaccaaccucuacgugcagaccagcgggcgcgucacgguguccacccggcgcagccagcagaccaucauccccaacaucggcucccggcccugggugcgcgggcugagcagccggaucuccaucuacuggaccaucgucaagcccggcgacgugcuggugaucaacagcaacggcaaccucaucgccccgcgcggguacuucaagaugcggacgggcaaguccagcaucaugcgcuccgacgcgcccaucgacacgugcaucagcgagugcaucacccccaacggguccauccccaacgacaagccguuccagaacgucaacaagaucaccuacggcgccugccccaaguacgugaagcagaacacccugaagcuggccaccgggaugcggaacgugcccgagaagcagacccgcggccucuucggcgccaucgccggguucaucgagaacggcugggaggggaugaucgacggcugguacggguuccggcaccagaacagcgagggcaccggccaggcggccgaccugaaguccacgcaggccgccaucgaccagaucaacgggaagcugaaccgcaucaucgagaagaccaacgagaaguuccaccagaucgagaaggaguucagcgaggucgagggccggauccaggaccucgagaaguacguggaggacaccaagaucgaccugugguccuacaacgccgagcugcucguggcgcuggagaaccagcacaccaucgaccugacggacagcgagaugaacaagcuguucgagaagacccgccggcagcuccgcgagaacgccgaggacauggggaacggcugcuucaagaucuaccacaagugcgacaacgccugcaucgaguccauccgcaacgggaccuacgaccacgacgucuaccgggacgaggcccugaacaaccgcuuccagaucaagggcguggagcucaagagcggcuacaaggacuggauccuguggaucuccuucgccaucagcugcuuccugcucugcgucgugcugcugggguucaucaugugggcgugccagcggggcaacauccgcugcaacaucugcaucuga

SEQ ID NO: 64428 - RNA, 1701 nt, Artificial Sequence
  derived and/or modified CDS sequence (opt1) from hemagglutinin__InfluenzaA__ABB04906
augaagaccaucaucgcccugagcuacauccucugccugguguucgcccagaagcugcccggcaacgacaacuccaccgcgacgcucugccuggggcaccacgccgucccgaacggcacccuggugaagaccaucaccaacgaccagaucgaggugacgaacgccaccgagcucguccagagcuccagcaccgggcgcaucugcgacagcccccaccggauccuggacggcaagaacugcacccugaucgacgcccuccugggggacccccacugcgacggcuuccagaacaaggagugggaccuguucguggagcgcagcaaggccuacuccaacugcuaccccuacgacgugccggacuacgcgagccuccggucccuggucgccagcuccggcacgcuggaguucaucaacgaggacuucaacuggaccgggguggcccagaacggcgacagcuacgccugcaagcgcggguccgugaaguccuucuucucccggcucaacuggcugcacaagagcgaguacaaguaccccgcgcugaacgucaccaugcccaacaacgacaaguucgacaagcucuacaucuggggcgugcaccaccccuccaccgaccgcgagcagacgagccuguacauccgggccuccgggaaggugaccgucagcaccaagcgcagccagcagaccgugaucccgaacaucggcucccggcccugggugcgcggccugagcucccggaucagcaucuacuggacgaucgucaagcccggggacauccuccugaucaacuccaccggcaaccugaucgcgccccgcggguacuucaagauccggaccggcaagagcuccaucaugcgcagcgacgccccgaucgggaccugcuccagcgagugcaucacgcccaacggcuccauccccaacgacaagcccuuccagaacgugaaccggaucaccuacggcgccugcccgcgcuacgugaagcagaacacccucaagcuggccaccgggaugcggaacguccccgagaagcagacgcgcggcaucuucggggccaucgccggcuucaucgagaacggcugggaggggaugguggacggcugguacggguuccggcaccagaacagcgagggcaccgggcaggccgccgaccugaaguccacccaggcggccaucgaccagaucaacggcaagcucaaccgccugaucgagaagaccaacgagaaguuccaccagaucgagaaggaguucagcgagguggagggccggauccaggaccuggagaaguacgucgaggacacgaagaucgaccucugguccuacaacgccgagcugcugguggcccucgagaaccagcacaccaucgaccugaccgacagcgagaugaacaagcuguucgagaagacccgcaagcagcuccgcgagaacgccgaggacauggggaacggcugcuucaagaucuaccacaagugcgacaacgcgugcaucggguccauccggaacggcacguacgaccacgacguguaccgcgacgaggcccugaacaaccgguuccagaucaagggggucgagcucaagagcggcuacaaggacuggauccuguggaucuccuucgccaucagcugcuuccugcugugcgugguccuccugggcuucaucaugugggccugccagaaggggaacauccgcugcaacaucugcaucuga

SEQ ID NO: 64429 - RNA, 1701 nt, Artificial Sequence
  derived and/or modified CDS sequence (opt1) from hemagglutinin__InfluenzaA__ABB04917
augaagaccaucaucgcccugagcuacaucuucugccucguguucgcccagaagcugcccggcaacgacaacuccaccgcgacgcugugccucgggcaccacgccgucccgaacggcacccuggugaagaccaucaccaacgaccagaucgaggugacgaacgccaccgagcugguccagaucagcuccaccgggcgcaucugcgacagcccccaccggauccucgacggcaagaacugcacccugaucgacgcccugcucggggacccccacugcgacggcuuccagaacgagaagugggaccuguucguggagcgcuccaaggccuucagcaacugcuaccccuacgacgugccggacuacgcgucccugcggagccucgucgccuccagcggcacgcuggaguucaucaacgagggguucaacuggaccggcgugacccaguccgggggcagcuacacgugcaagcgcggguccgugaacagcuucuucucccggcugaacuggcucuacgagagcgaguccaaguaccccguccugaacgugaccaugcccaacaacggcaaguucgacaagcuguacaucuggggcgugcaccaccccagcaccgacaaggagcagaccaaccucuacguccgcgccuccgggcgggugaccgugagcacgaagcgcagccagcagaccgucaucccgaacaucggcucccggcccugggugcgcgggcugagcucccggaucagcaucuacuggaccaucgugaagcccggcgacauccugcucaucaacuccaccggcaaccugaucgcgccccgcggguacuucaagauccggacgggcaagagcuccaucaugcgcagcgacgccccgaucgggaccugcuccagcgagugcaucacccccaacggcuccauccccaacgacaagcccuuccagaacgucaacaagaucaccuacggggccugcccgcgguacgugaagcagaacacgcugaagcucgccaccggcaugcgcaacgugcccgagaagcagacccggggcaucuucggggccaucgccggcuucaucgagaacgggugggagggcauggucgacgggugguacggcuuccgccaccagaacagcgagggcaccgggcaggcggccgaccugaaguccacgcaggccgccaucgaccagaucaacggcaagcugaaccggcucaucgagaagaccaacgagaaguuccaccagaucgagaaggaguucagcgagguggaggggcgcauccaggaccuggagaaguacguggaggacaccaagaucgaccugugguccuacaacgccgagcuccuggucgcgcuggagaaccagcacaccaucgaccucacggacagcgagaugaacaagcuguucgagaagacccggaagcagcugcgcgagaacgccgaggacaugggcaacgggugcuucaagaucuaccacaagugcgacaacgccugcaucggcuccauccgcaacggcaccuacgaccacgacguguaccgggacgaggcccucaacaaccgcuuccagaucaagggggucgagcucaagagcggcuacaaggacuggauccuguggaucuccuucgccaucagcugcuuccugcugugcguggugcugcucggguucaucaugugggcgugccagaagggcaacauccggugcaacaucugcaucuga

SEQ ID NO: 64430 - RNA, 1701 nt, Artificial Sequence
  derived and/or modified CDS sequence (opt1) from hemagglutinin__InfluenzaA__ABB04928
augaagaccaucaucgcccugagcuacaucuucugccucguguucgcccaggaccugcccggcaacgacaacuccaccgcgacgcugugccucgggcaccacgccgucccgaacggcacccuggugaagaccaucaccaacgaccagaucgaggugacgaacgccaccgagcugguccagagcuccagcaccgggaagaucugcaacaacccccaccgcauccucgacggcaucaacugcacccugaucgacgcccugcucggggacccccacugcgacggcuuccagaacgagaagugggaccuguucguggagcgguccaaggccuucagcaacugcuaccccuacgacgugccggacuacgcgucccugcgcagccucgucgccuccagcggcacgcuggaguucaucaacgagggguucaacuggaucggcgugacccagaacgggggcuccaacgccugcaagcgggggaccgacagcggcuucuucucccgccugaacuggcucuacaagagcggcuccaccuaccccgugcagaacgucacgaugcccaacaacgacaacagcgacaagcuguacaucuggggcgugcaccaccccuccaccgacaaggagcagaccgaccuguacgugcaggccagcgggaaggucaccguguccacgaagcggagccagcagaccaucaucccgaacguggggagccgccccuggguccggggccucuccagccgcaucuccaucuacuggaccaucgugaagcccggcgacauccuggugaucaacagcaacgggaaccugaucgcgccccggggcuacuucaagaugcgcaccgggaaguccagcaucaugcgguccgacgccccgaucggcacgugcagcuccgagugcaucacccccaacgggagcauccccaacgacaagcccuuccagaacgucaacaagaucaccuacggcgccugcccgaaguacgugaagcagaacacccucaagcuggccacgggcaugcgcaacgugcccgagaagcagacccgggggaucuucggcgccaucgcgggguucaucgagaacggcugggaggggaugaucgacggcugguacggcuuccgccaccagaacuccgaggggaccggccaggccgccgaccucaagagcacccaggccgccaucgaccagaucaacgggaagcugaaccgggucaucgagaagacgaacgagaaguuccaccagaucgagaaggaguucuccgagguggagggccgcauccaggaccuggagaaguacguggaggacaccaagaucgaccuguggagcuacaacgcggagcuccuggucgcccuggagaaccagcacaccaucgaccucaccgacuccgagaugaacaagcuguucgagaagacgcggcgccagcugcgggagaacgccgaggacauggggaacggcugcuucaagaucuaccacaagugcgacaacgccugcaucggcagcauccgcaacgggaccuacgaccacgacguguaccgggacgaggcccucaacaaccgcuuccagaucaagggcgucgagcugaaguccggguacaaggacuggauccuguggaucagcuucgcgaucuccugcuuccuccugugcguggugcugcucggcuucaucaugugggccugccagaagggcaacauccgcugcaacaucugcaucuga

SEQ ID NO: 64431 - RNA, 1701 nt, Artificial Sequence
  derived and/or modified CDS sequence (opt1) from hemagglutinin__InfluenzaA__ABB04939
augaagaccaucaucgcccugagcuacaucuucugccucguguucgcccagaagcugcccggcaacgacaacuccaccgcgacgcugugccucgggcaccacgccgucccgaacggcacccuggugaagaccaucaccaacgaccagaucgaggugacgaacgccaccgagcugguccagagcuccagcaccgggcgcaucugcgacagcccccaccggauccucgacggcaagaacugcacccugaucgacgcccugcucggggacccccacugcgacggcuuccagaacgagaagugggaccuguucguggagcgcagcaaggccuucuccaacugcuaccccuacgacgugccggacuacgcgagccugcggucccucgucgccagcuccggcacgcuggaguucaucaacgagggguucaacuggaccggcgugacccagagcgggggcuccuacacgugcaagcgcgggagcgugaacuccuucuucagccggcugaacuggcucuacgaguccgagagcaaguaccccguccugaacgugaccaugcccaacaacggcaaguucgacaagcuguacaucuggggcgugcaccaccccuccaccgacaaggagcagaccaaccucuacguccgcgccagcgggcgggugaccgugagcacgaagcgcucccagcagaccgucaucccgaacaucggcagccggcccugggugcgcgggcuguccagccggaucuccaucuacuggaccaucgugaagcccggcgacauccugcucaucaacagcaucggcaaccugaucgcgccccgcggguacuucaagauccggaccggcaaguccagcaucaugcgcuccgacgccccgaucgggaucugcagcuccgagugcaucacgcccaacggcagcauccccaacgacaagcccuuccagaacgucaacaagaucaccuacggggccugcccgcgguacgugaagcagaacacccugaagcucgccaccggcaugcgcaacgugcccgagaagcagacgcggggcaucuucggggccaucgccggcuucaucgagaacgggugggagggcauggucgacgggugguacggcuuccgccaccagaacuccgagggcaccgggcaggcggccgaccugaaguccacccaggccgccguggaccagaucaacggcaagcugaaccggcucaucgagaagaccaacgagaaguuccaccagaucgagaaggaguucuccgagguggaggggcgcauccaggaccuggagaaguacgucgaggacacgaagaucgaccuguggagcuacaacgccgagcuccugguggcgcuggagaaccagcacaccaucgaccucaccgacuccgagaugaacaagcuguucgagaagacccggaagcagcugcgcgagaacgccgaggacaugggcaacgggugcuucaagaucuaccacaagugcgacaacgccugcaucggcagcauccgcaacggcacguacgaccacgacgucuaccgggacgaggcccucaacaaccgcuuccagaucaaggggguggagcugaaguccggcuacaaggacuggauccuguggaucagcuucgccaucagcugcuuccuccugugcgugguccugcucggguucaucaugugggcgugccagaagggcaacauccggugcaacaucugcaucuga

SEQ ID NO: 64432 - RNA, 1701 nt, Artificial Sequence
  derived and/or modified CDS sequence (opt1) from hemagglutinin__InfluenzaA__ABB04950
augaagaccaucaucgcccugagcuacaucuucugccucguguucgcccagaagcugcccggcaacgacaacuccaccgcgacgcugugccucgggcaccacgccgucccgaacggcacccuggugaagaccaucaccaacgaccagaucgaggugacgaacgccaccgagcugguccagagcuccagcaccgggcgcaucugcgacagcccccaccggauccucgacggcaagaacugcacccugaucgacgcccugcucggggacccccacugcgacggcuuccagaacgagaagugggaccuguucguggagcgcagcaaggccuucuccaacugcuaccccuacgacgugccggacuacgcgagccugcggucccucgucgccagcuccggcacgcuggaguucaucaacgagggguucaacuggaccggcgugacccagagcgggggcuccuacacgugcaagcgcgggagcgugaacuccuucuucagccggcugaacuggcucuacgaguccgagagcaaguaccccguccugaacgugaccaugcccaacaacggcaaguucgacaagcuguacaucuggggcgugcaccaccccuccaccgacaaggagcagaccaaccucuacguccgcgccagcgggaaggugaccgugagcacgaagcggucccagcagaccgucaucccgaacaucggcagccgccccugggugcgggggcuguccagccgcaucuccaucuacuggaccaucgugaagcccggcgacauccugcucaucaacagcaccggcaaccugaucgcgccccggggguacuucaagauccgcacgggcaaguccagcaucaugcgguccgacgccccgaucgggaccugcagcuccgagugcaucacccccaacggcagcauccccaacgacaagcccuuccagaacgucaacaagaucaccuacggggccugcccgcgcuacgugaagcagaacacgcugaagcucgccaccggcaugcggaacgugcccgagaagcagacccgcggcaucuucggggccaucgccggcuucaucgagaacgggugggagggcauggucgacgggugguacggcuuccggcaccagaacuccgagggcaccgggcaggcggccgaccugaaguccacgcaggccgccaucgaccagaucaacggcaagcugaaccgccucaucgagaagaccaacgagaaguuccaccagaucgagaaggaguucuccgagguggaggggcggauccaggaccuggagaaguacguggaggacaccaagaucgaccuguggagcuacaacgccgagcuccuggucgcgcuggagaaccagcacaccaucgaccucacggacuccgagaugaacaagcuguucgagaagacccgcaagcagcugcgggagaacgccgaggacaugggcaacgggugcuucaagaucuaccacaagugcgacaacgccugcaucggcagcauccgcaacggcaccuacgaccacgacguguaccgcgacgaggcccucaacaaccgguuccagaucaagggggucgagcugaaguccggcuacaaggacuggauccuguggaucagcuucgccaucagcugcuuccuccugugcguggugcugcucggguucaucaugugggcgugccagaagggcaacauccgcugcaacaucugcaucuga

SEQ ID NO: 64433 - RNA, 1701 nt, Artificial Sequence
  derived and/or modified CDS sequence (opt1) from hemagglutinin__InfluenzaA__ABB04983
augaagaccaucaucgcccugagcuacauccucugccugguguucgcccagaagcugcccggcaacgacaacuccaccgcgacgcucugccuggggcaccacgccgucccgaacggcacccuggugaagaccaucaccaacgaccagaucgaggugacgaacgccaccgagcucguccagagcuccagcaccgaccgcaucugcgacagcccccaccagauccuggacggggagaacugcacccugaucgacgcccuccugggcgacccccacugcgacggguuccagaacaaggagugggaccuguucguggagcggagcaaggccuacuccaacugcuaccccuacgacgugccggacuacgucagccuccgcucccugguggcgagcuccggcacgcuggaguucaacaacgagagcuucaacuggaccggcguggcccagaacgggaccuccagcgccugcaagcggcgcuccgacaagagcuucuucucccggcucaacuggcugcaccagcugaaguacaaguaccccgcccucaacgucaccaugcccaacaacgagaaguucgacaagcuguacaucuggggcgugcaccaccccgggacggacagcgaccagaucucccuguacgcgcaggccagcggccgcgugaccgucagcaccaagcggucccagcagaccgugaucccgaacaucgggagccgccccugggugcggggcgucuccagccgcaucuccaucuacuggacgaucgugaagcccggcgacauccuccugaucaacagcaccgggaaccugaucgcgccccggggcuacuucaagauccgcuccgggaaguccuccaucaugcggagcgacgccccgaucggcaagugcaacuccgagugcaucacccccaacggcagcauccccaacgacaagcccuuccagaacgugaaccgcaucaccuacgggccgugcccccgguacgucaagcagaacacgcucaagcuggccaccggcaugcgcaacgugcccgagaagcagacccgggggaucuucggcgccaucgccggguucaucgagaacggcugggagggcaugauggacgggugguacggcuuccgccaccagaacuccgaggggaccggccaggccgccgaccucaagagcacgcaggccgcgaucaaccagaucaacgggaagcugaaccggcugaucgagaagaccaacgagaaguuccaccagaucgagaaggaguucuccgagguggagggccgcauccaggaccuggagaaguacgucgaggacaccaagaucgaccucuggagcuacaacgccgagcugcugguggcccucgagaaccagcacaccaucgaccugacggacuccgagaugaacaagcuguucgagcggaccaagaagcagcuccgcgagaacgccgaggacaugggcaacgggugcuucaagaucuaccacaagugcgacaacgccugcaucggcagcauccgcaacgggaccuacgaccacgacguguaccgggacgaggcgcugaacaaccgcuuccagaucaagggcgucgagcugaaguccggguacaaggacuggauccucuggaucagcuucgccaucagcugcuuccugcugugcaucgugcuccugggcuucaucaugugggccugccagaagggcaacauccggugcaacaucugcaucuga

SEQ ID NO: 64434 - RNA, 1701 nt, Artificial Sequence; identical to SEQ ID NO: 64196
  derived and/or modified CDS sequence (opt1) from hemagglutinin__InfluenzaA__ABB04994

SEQ ID NO: 64435 - RNA, 1701 nt, Artificial Sequence
  derived and/or modified CDS sequence (opt1) from hemagglutinin__InfluenzaA__ABB05005
augaagaccaucaucgcccugagccacauccucugccugguguucgcccagaagcugcccgucaacgacaacuccaccgcgacgcucugccugggccaccacgccgugccgaacgggacccuggugaagaccaucaccaacgaccacaucgaggucacgaacgccaccgagcucgugcagagcuccagcaccggccgcaucugcgacagcccccaccagauccuggacggggagaacugcacccugaucgacgcccuccugggcgacccccacugcgacggguuccagaacaaggagugggaccuguucguggagcggagcacggccuacuccaacugcuaccccuacgacgucccggacuacgcgagccuccgcucccugguggccagcuccggcacccuggaguucaacaacgagagcuucaacuggaccggcguggcccagaacgggaccuccagcgccugcaagcggcgcuccaucaagagcuucuucucccggcucaacuggcugcaccagcugaaguacaaguaccccgcgcucaacgucacgaugcccaacaacgagaaguucgacaagcuguacaucuggggcgugcaccaccccagcaccgacuccgaccagaucagccuguacgcccaggccagcgggcgcgugaccgucuccaccaagcggagccagcagacggugaucccggacaucggcucccgccccugggugcgcggggucagcucccggaucagcaucuacuggaccaucgugaagcccggcgacauccuccugaucaacuccaccggcaaccugaucgcgccccggggguacuucaagauccgcagcggcaaguccagcaucaugcgguccaacgccccgaucgggaagugcaacagcgagugcaucacccccaacggcuccgugcccaacgacaagcccuuccagaacgucaaccgcaucacguacggcgccugcccgcgguacgugaagcagaacacccucaagcuggccaccgggaugcgcaacgugcccgagaagcagacccggggcaucuucggggccaucgccggcuucaucgagaacgggugggagggcauggucgacggcugguacggguuccgccaccagaacagcgagggcacggggcaggccgcggaccugaaguccacccaggccgccaucaaccagaucaacggcaagcucaaccggcugaucgagaagaccaacgagaaguuccaccagaucgagaaggaguucagcgagguggaggggcgcauccaggaccuggagaaguacguggaggacaccaagaucgaccucugguccuacaacgccgagcugcuggucgcccucgagaaccagcacacgaucgaccugaccgacagcgagaugaacaagcuguucgagcggacccgcaagcagcuccgcgagaacgcggaggacaugggcaacggcugcuucaagaucuaccacaagugcgacaacgccugcaucggguccauccggaacggcaccuacgaccacgacguguaccgcgacgaggcccugaacaaccgguuccagaucaagggggucgagcugaaguccggcuacaaggacuggauccucuggaucagcuucgccaucuccugcuuccugcugugcguggugcuccugggguucaucaugugggccugccagaagggcaacauccgcugcaacaucugcaucuga

SEQ ID NO: 64436 - RNA, 1701 nt, Artificial Sequence
  derived and/or modified CDS sequence (opt1) from hemagglutinin__InfluenzaA__ABB05183
augaagaccaucaucgcccugagcuacauccucugccugguguucgcccagaagcugcccgucaacgacaacuccaccgcgacgcucugccugggccaccacgccgugccgaacgggacccuggugaagaccaucaccaacgagcacaucgaggucacgaacgccaccgagcucgugcagagcuccagcaccggccgcaucugcgacagcccccaccagauccuggacggggagaacugcacccugaucgacgcccuccugggcgacccccacugcgacggguuccagaacaaggagugggaccuguucguggagcggagcacggccuacuccaacugcuaccccuacgacgucccggacuacgcgagccuccgcucccugguggccagcuccggcacccuggaguucaacaacgagagcuucaacuggaccggcguggcccagaacgggaccuccagcgccugcaagcggcgcuccaucaagagcuucuucucccggcucaacuggcugcaccagcugaaguacaaguaccccgcgcucaacgucacgaugcccaacaacgagaaguucgacaagcuguacaucuggggcgugcaccaccccagcaccgacuccgaccagaucagccuguacgcccaggccagcgggcgcgugaccgucuccaccaagcggagccagcagacggugaucccgaacaucggcucccgccccugggugcgcggggucagcucccggaucagcaucuacuggaccaucgugaagcccggcgacauccuccugaucaacuccaccggcaaccugaucgcgccccggggguacuucaagauccgcagcggcaaguccagcaucaugcgguccaacgccccgaucgggaagugcaacagcgagugcaucacccccaacggcuccauccccaacgacaagcccuuccagaacgugaaccgcaucacguacggcgccugcccgcgguacgucaagcagaacacccucaagcuggccaccgggaugcgcaacgugcccgagaagcagacccggggcaucuucggggccaucgccggcuucaucgagaacgggugggagggcaugguggacggcugguacggguuccgccaccagaacagcgagggcacggggcaggccgcggaccugaaguccacccaggccgccaucaaccagaucaacggcaagcucaaccggcugaucgagaagaccaacgagaaguuccaccagaucgagaaggaguucagcgaggucgaggggcgcauccaggaccuggagaaguacguggaggacaccaagaucgaccucugguccuacaacgccgagcugcugguggcccucgagaaccagcacacgaucgaccugaccgacagcgagaugaacaagcuguucgagcggacccgcaagcagcuccgcgagaacgcggaggacaugggcaacggcugcuucaaggucuaccacaagugcgacaacgccugcaucggguccauccggaacggcaccuacgaccacgacguguaccgcgacgaggcccugaacaaccgguuccagaucaagggggucgagcugaaguccggcuacaaggacuggauccucuggaucagcuucgccaucuccugcuuccugcugugcguggugcuccugggguucaucaugugggccugccagaagggcaacauccgcugcaacaucugcaucuga

SEQ ID NO: 64437 - RNA, 1701 nt, Artificial Sequence
  derived and/or modified CDS sequence (opt1) from hemagglutinin__InfluenzaA__ABB05194
augaagaccaucaucgcccugagcuacauccucugccugguguucgcccagaagcugcccggcaacgacaacuccaccgcgacgcucugccuggggcaccacgccgucccgaacggcacccuggugaagaccaucaccaacgaccagaucgaggugacgaacgccaccgagcucguccagagcuccagcaccgggcgcaucugcgacagcccccaccagauccuggacggcgagaacugcacccugaucgacgcccuccugggggacccccacugcgacggcuuccagaacaaggagugggaccuguucguggagcggagcaaggccuacuccaacugcuaccccuacgacgugccggacuacgcgagccuccgcucccuggucgccagcuccggcacgcuggaguucaacaacgagagcuucaacuggaccgggguggcccagaacggcaccuccagcgccugcaagcggcgcuccaacaagagcuucuucucccggcucaacuggcugcaccagcugaaguacaaguaccccgcgcucaacgugaucaugcccaacaacgagaaguucgacaagcuguacaucuggggcguccaccaccccagcaccgacuccgaccagaucagccuguacgcccaggccagcgggcgcgugacgguguccaccaagcggagccagcagaccgucaucccgaacaucgggucccgccccugggugcggggcgugagcucccgcaucagcaucuacuggaccaucgucaagcccggcgacauccuccugaucaacuccacggggaaccugaucgcgccccggggcuacuucaagauccgcagcgggaaguccagcgugaugcgguccgacgccagcaucggcaagugcaacuccgagugcaucaccccgaacggcagcauccccaacgacaagcccuuccagaacgugaaccgcaucaccuacggggccugcccccgguacgucaagcagaacacccucaagcuggccacgggcaugcgcaacgugccggagaagcagacccgggggaucuucggcgccaucgccggguucaucgagaacggcugggagggcaugguggacgggugguacggcuuccgccaccagaacuccgaggggaccggccaggccgcggaccugaaguccacccaggccgccaucaaccagaucaacgggaagcucaaccggcugaucgagaagacgaacgagaaguuccaccagaucgagaaggaguucuccgaggucgagggccgcauccagaaccuggagaaguacguggaggacaccaagaucgaccucuggagcuacaacgccgagcugcugguggcccucgagaaccagcacaccaucgaccugaccgacuccgagaugaacaagcuguucgagcggacgaagaagcagcuccgcgagaacgcggaggacaugggcaacgggugcuucaagaucuaccacaagugcgacaacgccugcaucggcagcauccgcaacgggaccuacgaccacgacgucuaccgggacgaggcccugaacaaccgcuuccagaucaagggcguggagcucaagagcggguacaaggacuggauccuguggaucuccuucgccaucagcugcuuccugcugugcgucgugcuccugggcuucaucaugugggccugccagaagggcaacauccggugcaacaucugcaucuga

SEQ ID NO: 64438 - RNA, 1701 nt, Artificial Sequence
  derived and/or modified CDS sequence (opt1) from hemagglutinin__InfluenzaA__ABB05205
augaagaccaucaucgcccugagcuacauccucugccugguguucgcccagaagcugcccggcaacgacaacuccaccgcgacgcucugccuggggcaccacgccgucccgaacggcacccuggugaagaccaucaccaacgaccagaucgaggugacgaacgccaccgagcucguccagagcuccagcaccgggcgcaucugcgacagcccccaccagauccuggacggcgagaacugcacccugaucgacgcccuccugggggacccccacugcgacggcuuccagaacaaggagugggaccuguucguggagcggagcaacgccuacuccaacugcuaccccuacgacgugccggacuacgcgagccuccgcucccuggucgccagcuccggcacgcuggaguucaacagcgaguccuucaacuggaccgggguggcccagaacggcaccagcuccgccugcaagcggcgcagcaacaaguccuucuucagccggcucaacuggcugcaccagcugaaguacaaguaccccgcgcucaacgugaccaugcccaacaacgagaaguucgacaagcuguacaucuggggcguccaccaccccgggacggacuccgaccagaucagccuguacgcccaggccagcgggcgcgugaccguguccaccaagcggagccagcagaccgucaucccgaacaucggcucccgccccugggugcggggcgugagcucccgcaucagcaucuacuggacgaucgucaagcccggggacauccuccugaucaacuccaccggcaaccugaucgcgccccggggguacuucaagauccgcagcggcaaguccagcaucaugcgguccgacgccccgaucggcaagugcaacagcgagugcaucacccccaacggguccauccccaacaacaagcccuuccagaacgugaaccgcaucaccuacggcgccugcccgcgguacgugaagcagaacacgcucaagcuggccaccgggaugcgcaacguccccgagaagcagacccggggcaucuucggggccaucgccggcuucaucgagaacggcugggaggggaugguggacggcugguacggguuccgccaccagaacagcgagggcaccgggcaggccgcggaccugaaguccacgcaggccgccaucaaccagaucaacggcaagcucaaccggcugaucgagaagaccaacgagaaguuccaccagaucgagaaggaguucagcgagguggagggccgcauccaggaccuggagaaguacgucgaggacaccaagaucgaccucugguccuacaacgccgagcugcugguggcccucgagaaccagcacaccaucgaccugacggacagcgagaugaacaagcuguucgagcggaccaagaagcagcuccgcgagaacgcggaggacauggggaacggcugcuucaagaucuaccacaagugcgacaacgccugcaucggguccauccgcaacggcaccuacgaccacgacguguaccgggacgaggcccugaacaaccgcuuccagaucaagggggucgagcugaaguccggcuacaaggacuggauccucuggaucagcuucgccaucuccugcuuccugcugugcgugguccuccugggcuucaucaugugggccugccagaaggggaacauccggugcaacaucugcaucuga

SEQ ID NO: 64439 - RNA, 1701 nt, Artificial Sequence; identical to SEQ ID NO: 64096
  derived and/or modified CDS sequence (opt1) from hemagglutinin__InfluenzaA__ABB05216

SEQ ID NO: 64440 - RNA, 1701 nt, Artificial Sequence
  derived and/or modified CDS sequence (opt1) from hemagglutinin__InfluenzaA__ABB46392
augaagaccaucaucgcccugagcuacaucuucugccucgccuucgcgcaggaccugcccggcaacgacaacuccaccgccacgcugugccucgggcaccacgccgugccgaacggcacccuggucaagaccaucaccaacgaccagaucgaggugacgaacgccaccgagcuggugcagagcuccagcaccgggaagaucugcgacaacccccaccgcauccucgacggcaucaacugcacccugaucgacgcccugcucggggacccccacugcgacggcuuccagaacgagaagugggaccuguucgucgagcgguccaaggcguucagcaacugcuaccccuacgacgugccggacuacgccucccugcgcagccucguggccuccagcggcacgcuggaguucaucaacgagggguucaacuggaccggcgucacccagaacgggggcuccagcgccugcaagcgggggcccgacaacggcuucuucucccgccugaacuggcucuacaagagcggcuccaccuaccccgugcagaacgugacgaugcccaacaacgacaacagcgacaagcuguacaucuggggcguccaccacccgaacaccgacaaggagcagaccgaccuguacgugcaggcguccgggaaggugaccgucagcacgaagcggucccagcagaccaucauccccaacguggggagccgccccugggugcggggccucagcucccgcgucagcaucuacuggaccaucgugaagcccggcgacauccuggugaucaacuccaacgggaaccugaucgccccgcggggcuacuucaagaugcgcaccggcaagagcuccaucaugcggagcgacgcccccaucgggacgugcuccagcgagugcaucacccccaacggguccauccccaacgacaagccguuccagaacgucaacaagaucaccuacggcgccugccccaaguacgugaagcagaacacccucaagcuggccacgggcaugcgcaacgugcccgagaagcagacccgggggaucuucggcgcgaucgccggguucaucgagaacggcugggaggggaugaucgacggcugguacggcuuccgccaccagaacagcgaggggaccggccaggccgccgaccugaaguccacccagacggccaucgaccagaucaacgggaagcucaaccgggucaucgagaagaccaacgagaaguuccaccagaucgagaaggaguucagcgagguggagggccgcauccaggaccuggagaaguacguggaggacaccaagaucgaccugugguccuacaacgcggagcuccuggucgcccuggagaaccagcacaccaucgaccucacggacagcgagaugaacaagcuguucgagaagacccggcgccagcugcgggagaacgccgaggacauggggaacggcugcuucaagaucuaccacaagugcgacaacgccugcaucggcuccauccgcaacgggaccuacgaccacgacguguaccgggacgaggcccucaacaaccgcuuccagaucaagggcgucgagcucaagagcggguacaaggacuggauccuguggaucuccuucgcgaucagcugcuuccugcugugcguggugcugcucggcuucaucaugugggccugccagaagggcaacauccgcugcaacaucugcaucuga

SEQ ID NO: 64441 - RNA, 1701 nt, Artificial Sequence
  derived and/or modified CDS sequence (opt1) from hemagglutinin__InfluenzaA__ABB46414
augaagaccaucaucgcccugagcuacauccucugccugguguucgcccagaagcugcccggcaacgacaacuccaccgcgacgcucugccuggggcaccacgccgucccgaacggcacccuggugaagaccaucaccaacgaccagaucgaggugacgaacgccaccgagcucguccagagcuccagcaccgggcgcaucugcgacagcccccaccggauccuggacggcgagaacugcacccugaucgacgcccuccugggggacccccacugcgacggcuuccagaacaaggagugggaccuguucguggagcgcagcaaggccuacuccaacugcuaccccuacgacgugccggacuacgcgagccuccggucccuggucgccagcuccggcacgcuggaguucaacaacgagagcuucaacuggaccgggguggcccagaacggcaccuccagcgccugcaagcgccgguccaucaagagcuucuucucccgccucaacuggcugcaccagcugaaguacaaguaccccgcgcucaacgugaccaugcccaacaacgacaaguucgacaagcuguacaucuggggcguccaccaccccagcacggacuccgaccagaccagccuguacgcccaggccagcgggcgggugaccguguccaccaagcgcagccagcagacggucaucccgaacaucgggucccggcccugggugcgcggcgugagcucccggaucagcaucuacuggaccaucgucaagcccggcgacauccuccugaucaacuccaccgggaaccugaucgcgccccgcggcuacuucaagauccggagcgggaaguccagcaucaugcgcuccgacgccccgaucggcaagugcaacagcgagugcaucacccccaacggcuccauccccaacgacaagcccuuccagaacgugaaccggaucacguacggggccugcccgcgcuacgugaagcagaacacccucaagcuggccaccggcaugcggaacguccccgagaagcagacccgcgggaucuucggcgccaucgccggguucaucgagaacggcugggagggcaugguggacgggugguacggcuuccggcaccagaacagcgaggggacgggccaggccgcggaccugaaguccacccaggccgccaucaaccagaucaacgggaagcucaaccgccugaucgagaagaccaacgagaaguuccaccagaucgagaaggaguucagcgagguggagggccggauccaggaccuggagaaguacgucgaggacaccaagaucgaccucugguccuacaacgccgagcugcugguggcccucgagaaccagcacacgaucgaccugaccgacagcgagaugaacaagcuguucgagcgcacccgcaagcagcuccgggagaacgcggaggacaugggcaacgggugcuucaagaucuaccacaagugcgacaacgccugcaucggcuccauccgcaacgggaccuacgaccacgacguguaccgggacgaggcccugaacaaccgcuuccagaucaagggcgucgagcugaaguccggguacaaggacuggauccucuggaucagcuucgccaucuccugcuuccuguucugcgugguccugcucggcuucaucaugugggccugccagaagggcaacauccggugcaacaucugcaucuga

SEQ ID NO: 64442 - RNA, 1701 nt, Artificial Sequence
  derived and/or modified CDS sequence (opt1) from hemagglutinin__InfluenzaA__ABB46425
augaagaccaucaucgcccugagcuacauccucugccugguguucgcccagaagcugcccggcaacgacaacuccaccgcgacgcucugccuggggcaccacgccgucccgaacggcacccuggugaagaccaucaccagcgaccagaucgaggugacgaacgccaccgagcucguccaguccagcuccaccgggaagaucugcgacagcccccaccgcauccuggacggcgagaacugcacccugaucgacgcccuccugggggacccccacugcgacggcuuccagaacaaggagugggaccuguucguggagcgguccaaggccuacagcaacugcuaccccuacgacgugccggacuacgcgucccuccgcagccuggucgccuccagcggcacgcuggaguucaacaacgaguccuucaacuggaccgggguggcccagaacggcaccagcuucgccugcaagcggcgcuccaucaagagcuucuucucccggcucaacuggcugcaccagcugaaguacaaguaccccgcgcucaacgugaccaugcccaacaacgacaaguucgacaagcuguacaucuggggcguccaccaccccagcacggacuccgaccagaccagccuguacgcccaggccagcgggcgcgugaccguguccaccaagcggagccagcagacggucaucccgaacaucgggucccgccccugggugcggggcgugagcucccgcaucagcaucuacuggaccaucgucaagcccggcgacauccuccugaucaacuccaccgggaaccugaucgcgccccggggcuacuucaagauccgcagcgggaaguccagcaucaugcgguccgacgccccgaucggcaagugcaacagcgagugcaucacccccaacggcuccauccccaacgacaagcccuuccagaacgugaaccgcaucacguacggggccugcccgcgguacgugaagcagaacacccucaagcuggccaccggcaugcgcaacguccccgagaagcagacccgggggaucuucggcgccaucgccggguucaucgagaacggcugggagggcaugguggacgggugguacggcuuccgccaccagaacagcgaggggacgggccaggccgcggaccugaaguccacccaggccgccaucaaccagaucaacgggaagcucaaccggcugaucgagaagaccaacgagaaguuccaccagaucgagaaggaguucagcgagguggagggccgcauccaggaccuggagaaguacgucgaggacaccaagaucgaccucugguccuacaacgccgagcugcugguggcccucgagaaccagcacacgaucgaccugaccgacagcgagaugaacaagcuguucgagcggacccgcaagcagcuccgcgagaacgcggaggacaugggcaacgggugcuucaagaucuaccacaagugcgacaacgccugcaucggcuccauccggaacgggaccuacgaccacgacguguaccgcgacgaggcccugaacaaccgguuccagaucaagggcgucgagcucaagagcggguacaaggacuggauccuguggaucagcuucgccaucuccugcuuccugcugugcgugguccuccugggcuucaucaugugggccugccagaagggcaacauccgcugcaacaucugcaucuga

SEQ ID NO: 64443 - RNA, 1701 nt, Artificial Sequence
  derived and/or modified CDS sequence (opt1) from hemagglutinin__InfluenzaA__ABB46436
augaagaccaucaucgcccugagcuacauccucugccugguguucgcccagaagcugcccggcaacgacaacuccaccgcgacgcucugccuggggcaccacgccgucccgaacggcaccaucgugaagaccaucaccaacgaccagaucgaggugacgaacgccaccgagcugguccagagcuccagcaccgggggcaucugcgacagcccccaccagauccucgacggggagaacugcacccugaucgacgcccugcucggcgacccccagugcgacggcuuccagaacaagaagugggaccuguucguggagcgcagcaaggccuacuccaacugcuaccccuacgacgugccggacuacgcgagccugcggucccucgucgccagcuccgggacgcuggaguucaacaacgagagcuucaacuggaccggcgugacccagaacgggaccuccagcgccugcaagcgccgguccaacaacagcuucuucucccgccugaacuggcucacgcaccugaaguucaaguaccccgcccugaacgugaccaugcccaacaacgagaaguacgacaagcucuacaucuggggcguccaccaccccgggaccgacaacgaccagaucagccuguacgcgcaggccuccggccggaucaccgugagcacgaagcgcagccagcagaccgugaucccgaacaucggcucccggccccgcguccgggacauccccagccgcaucuccaucuacuggaccaucgugaagcccggggacauccugcucaucaacagcaccggcaaccugaucgccccgcggggguacuucaagauccgcuccggcaagagcuccaucaugcggagcgacgcccccaucggcaagugcaacuccgagugcaucacgcccaacgggagcauccccaacgacaagccguuccagaacgugaaccgcaucaccuacggcgccugcccccgguacgucaagcagaacacccugaagcucgcgaccgggaugcgcaacgugcccgagaagcagacgcggggcaucuucggggccaucgccggcuucaucgagaacggcugggaggggaugguggacggcugguacggguuccgccaccagaacuccgagggcaucgggcaggccgccgaccugaaguccacccaggcggccaucaaccagaucaacggcaagcugaaccggcucaucggcaagaccaacgagaaguuccaccagaucgagaaggaguucuccgaggucgaggggcgcauccaggaccuggagaaguacguggaggacaccaagaucgaccuguggagcuacaacgccgagcuccugguggcccuggagaaccagcacacgaucgaccucaccgacuccgagaugaacaagcuguucgagcggaccaagaagcagcugcgcgagaacgccgaggacaugggcaacgggugcuucaagaucuaccacaagugcgacaacgcgugcaucggcagcauccgcaacgggaccuacgaccacgacgucuaccgggacgaggcccucaacaaccgcuuccagaucaagggcguggagcugaaguccggcuacaaggacuggauccuguggaucagcuucgccaucuccugcuuccuccugugcguggcccugcucggguucaucaugugggccugccagaagggcaacauccggugcaacaucugcaucuga

SEQ ID NO: 64444 - RNA, 1701 nt, Artificial Sequence; identical to SEQ ID NO: 64377
  derived and/or modified CDS sequence (opt1) from hemagglutinin__InfluenzaA__ABB46447

SEQ ID NO: 64445 - RNA, 1701 nt, Artificial Sequence
  derived and/or modified CDS sequence (opt1) from hemagglutinin__InfluenzaA__ABB46458
augaagaccaucaucgcccugagcuacauccucugccugguguucgcccagaagcugcccggcaacgacaacuccaccgcgacgcucugccuggggcaccacgccgucccgaacggcaccaucgugaagaccaucaccaacgaccagaucgaggugacgaacgccaccgagcugguccagagcuccagcaccgggggcaucugcgacagcccccaccagauccucgacggggagaacugcacccugaucgacgcccugcucggcgacccccagugcgacggcuuccagaacaagaagugggaccuguucguggagcgcagcaaggccuacuccaacugcuaccccuacgacgugccggacuacgcgagccugcggucccucgucgccagcuccgggacgcuggaguucaacaacgagagcuucaacuggaccggcgugacccagaacgggaccuccagcgccugcaagcgccgguccaacaacagcuucuucucccgccugaacuggcucacgcaccugaaguucaaguaccccgcccugaacgugaccaugcccaacaacgagaaguucgacaagcucuacaucuggggcguccaccaccccgggaccgacaacgaccagaucagccuguacgcgcaggccuccggccggaucaccgugagcacgaagcgcaaccagcagaccgugaucccgaacaucggcagccggccccgcguccgggacauccccucccgcaucagcaucuacuggaccaucgugaagcccggggacauccugcucaucaacuccaccggcaaccugaucgccccgcggggguacuucaagauccgcagcggcaaguccagcaucaugcgguccgacgcccccaucggcaagugcaagagcgagugcaucacgcccaacggguccauccccaacgacaagccguuccagaacgugaaccgcaucaccuacggcgccugcccccgguacgucaagcagaacacccugaagcucgcgaccgggaugcgcaacgugcccgagaagcagacgcggggcaucuucggggccaucgccggcuucaucgagaacggcugggaggggaugguggacggcugguacggguuccgccaccagaacagcgagggcaucgggcaggccgccgaccugaaguccacccaggcggccaucaaccagaucaacggcaagcugaaccggcucaucggcaagaccaacgagaaguuccaccagaucgagaaggaguucagcgaggucgaggggcgcauccaggaccuggagaaguacguggaggacaccaagaucgaccugugguccuacaacgccgagcuccugguggcccuggagaaccagcacacgaucgaccucaccgacagcgagaugaacaagcuguucgagcggaccaagaagcagcugcgcgagaacgccgaggacaugggcaacgggugcuucaagaucuaccacaagugcgacaacgcgugcaucggcuccauccgcaacgggaccuacgaccacgacgucuaccgggacgaggcccucaacaaccgcuuccagaucaagggcguggagcugaaguccggcuacaaggacuggauccuguggaucuccuucgccaucagcugcuuccuccugugcguggcccugcucggguucaucauguggggcugccagaaggggaacauccggugcaacaucugcaucuga

SEQ ID NO: 64446 - RNA, 1701 nt, Artificial Sequence
  derived and/or modified CDS sequence (opt1) from hemagglutinin__InfluenzaA__ABB51961
augaagaccaucaucgcccugagcuacauccucugccugguguucgcccagaagcugcccggcaacgacaacuccaccgcgacgcucugccuggggcaccacgccgucccgaacggcaccaucgugaagaccaucaccaacgaccagaucgaggugacgaacgccaccgagcugguccagagcuucuccaccgggggcaucugcgacagcccccaccagauccucgacggggagaacugcacccugaucgacgcccugcucggcgacccccagugcgacggcuuccagaacaagaagugggaccuguucguggagcgcuccaaggccuacagcaacugcuaccccuacgacgugccggacuacgcgugcguccggucccugguggccagcuccgggacgcucgaguucaacaacgagagcuucaacugggccggcgugacccagaacgggaccuccagcgccugcaagcgccgguccaacaagagcuucuucucccgccugaacuggcugacccaccucaaguacaaguaccccgcgcugaacgucacgaugcccaacaacgagaaguucgacaagcuguacaucuggggcgugcaccaccccgggaccgacagcgaccagaucucccucuacgcccaggccagcggccggaucaccguguccacccagcgcugcaagcagcuggucaucccgaacaucggcagccggccccgcgugcgggacgugagcucccgcaucagcaucuacuggacgaucgucaaccccggggacauccugcucaucaacuccaccggcaaccugaucgcgccccggggguacuucaagauccgcagcggcaaguccagcaucaugcgguccgacgccccgaucggcaagugcaacagcgagugcaucacccccaacggguccauccccaacgacaagcccuuccagaacgugaaccgcaucaccuacggcgccugcccgcgguacgugaagcagaacacgcugaagcucgccaccgggaugcgcaacguccccgagaagcagacccggggcaucuucggggccaucgccggcuucaucgagaacggcugggaggggaugguggacggcugguacggguuccgccaccagaacagcgagggcaccgggcaggccgcggaccugaaguccacgcaggccgccaucaaccagaucaacggcaagcugaaccggcucaucggcaagaccaacgagaaguuccaccagaucgagaaggaguucagcgagguggaggggcgcauccaggaccuggagaaguacgucgaggacaccaagaucgaccugugguccuacaacgccgagcuccugguggcccuggagaaccagcacaccaucgaccucacggacagcgagaugaacaagcuguucgagcggaccaagaagcagcugcgcgagaacgcggaggacaugggcaacgggugcuucaagaucuaccacaagugcgacaacgccugcaucgaguccauccgcaacggcaccuacgaccacgacguguaccgggacgaggcccucaacaaccgcuuccagaucaagggggucgagcucaagagcggcuacaaggacuggauccuguggaucuccuucgccaucagcugcuuccugcugugcguggcccugcucggcuucaucaugugggcgugccagaaggggaacauccggugcaacaucugcaucuga

SEQ ID NO: 64447 - RNA, 1698 nt, Artificial Sequence
  derived and/or modified CDS sequence (opt1) from hemagglutinin__InfluenzaA__ABB51962
augaaggccaagcugcucgugcugcugugcaccuucaccgccacguacgcggacaccaucugcaucggcuaccacgccaacaacagcaccgacaccgucgacacggugcucgagaagaacgugaccgucacccacuccgugaaccugcuggaggacagccacaacgggaagcucugccugcugaagggcaucgcgccccuccagcuggggaacugcuccguggccggcuggauccuggggaacccggagugcgagcuccugaucagcaaggaguccuggagcuacaucgucgagacccccaaccccgagaacggcacgugcuaccccggcuacuucgccgacuacgaggagcugcgcgagcagcucuccagcguguccagcuucgagcgguucgagaucuucccgaagggguccagcuggcccaaccacaccgugaccggcgucuccgccagcugcucccacaacggcaagagcuccuucuaccgcaaccugcuguggcucaccgggaagaacgggcuguaccccaaccugagcauguccuacgugaacaacaaggagaaggaggugcucguccuguggggcgugcaccacccgcccaacaucggcaaccagcgggcccuguaccacacggagaacgccuacgugagcgucgugagcucccacuacagccgccgguucacccccgagaucgccaagcgccccaaggugcgggaccaggaggggcgcaucaacuacuacuggacccuccuggagcccggcgacaccaucaucuucgaggcgaacgggaaccugaucgccccgugguacgccuucgccaugucccggggcuucggcagcgggaucuccacgagcaacgcccccaugggcgagugcgacgcgaaguuccagacgccccagggcgggaucaacaucucccuccccuuccagaacguccacccggugaccaucggggagugccccaacuacgugcgcagcgccaagcugcggauggucaccggccugcgcaacauccccuccauccagagccggggccucuucggggccaucgccggcuucaucgagggcggguggaccgggaugguggacggcugguacggcuaccaccaccagaacgagcagggguccggcuacgccgcggaccagaaguccacccagaacgccaucaacgggaucaccaacaaggugaacagcgucaucgagaagaugaacacccaguucacggccgugggcaaggaguucaacaagcuggagcgccggauggagaaccugaacaagaaggucgacgacggguuccucgacaucuggaccuacaacgccgagcugcuggugcuccuggagaacgagcgcacccuggacuuccacgacagcaacgugaagaaccucuacgagaaggucaagucccagcugaagaacaacgccaaggagaucggcaacggcugcagcgaguucuaccacaagugcaacaacgagugcauggaguccgugaagaacgggaccuacgacuaccccaaguacagcgaggaguccaagcugaaccgggagaagaucgacggcgugaagcucgagagcaugggggucuaccagauccuggcgaucuacagcacgguggccuccagccuggugcuccuggucucccugggcgccaucagcuucuggaugugcuccaacggcagccuccagugccgcaucugcaucuga

SEQ ID NO: 64448 - RNA, 1701 nt, Artificial Sequence
  derived and/or modified CDS sequence (opt1) from hemagglutinin__InfluenzaA__ABB51963
augaagaccaucaucgcccugagcuacauccucugccugguguucgcccagaagcugcccggcaacgacaacuccaccgcgacgcucugccuggggcaccacgccgucccgaacggcaccaucgugaagaccaucaccaacgaccgcaucgaggugacgaacgccaccgagcugguccagagcuccagcaccgggggcaucugcgacagcccccaccagauccucgacggggagaacugcacccugaucgacgcccugcucggcgacccccagugcgacggcuuccagaacaagaagugggaccuguucguggagcggagcaaggccuacuccaacugcuaccccuacgacgugccggacuacgcgagccugcgcucccucgucgccagcuccgggacgcuggaguucaacaacgagagcuucaacuggaccggcgugacccagaacgggaccuccagcgccugcaagcggcgcuccaacaacagcuucuucucccggcugaacuggcucacgcaccugaaguucaaguaccccgcccugaacgugaccaugcccaacaacgagaaguucgacaagcucuacaucuggggcguccaccaccccgggaccgacaacgaccagaucagccuguacgcgcaggccuccggccgcaucaccgugagcacgaagcggagccagcagaccgugaucccgaacaucggcucccgcccccggguccgccacauccccagccggaucuccaucuacuggaccaucgugaaccccggggacauccugcucaucaacagcaccggcaaccugaucgccccgcgcggguacuucaagauccgguccggcaagagcuccaucaugcgcagcgacgcccccaucggcaagugcaacuccgagugcaucacgcccaacgggagcauccccaacgacaagccguuccagaacgugaaccggaucaccuacggcgccugcccccgcuacgucaagcagaacacccugaagcucgcgaccgggaugcggaacgugcccgagaagcagaaccgcggcaucuucggggccaucgccggcuucaucgagaacggcugggaggggaugguggacggcugguacggguuccggcaccagaacuccgagggcaucgggcaggccgccgaccugaaguccacgcaggcggccaucaaccagaucaacgagaagcugaaccgccucaucggcaagaccaacgagaaguuccaccagaucgagaaggaguucuccgaggucgagggccggauccaggaccuggagaaguacguggaggacaccaagaucgaccuguggagcuacaacgccgagcuccugguggcccuggagaaccagcacaccaucgaccucacggacuccgagaugaacaagcuguucgagcgcaccaagaagcagcugcgcgagaacgccgaggacauggggaacggcugcuucaaggucuaccacaagugcgacaacgcgugcaucgggagcauccggaacggcaccuacgaccacaacguguaccgcgacgaggcccucaacaaccgguuccagaucaaggggguggagcugaaguccggcuacaaggacuggauccuguggaucagcuucgccaucuccugcuuccuccugugcgucgcccugcucggcuucaucaugugggccugccagaaggggaacauccgcugcaacaucugcaucuga

SEQ ID NO: 64449 - RNA, 1701 nt, Artificial Sequence; identical to SEQ ID NO: 64306
  derived and/or modified CDS sequence (opt1) from Hemagglutinin__InfluenzaA__ABB51964

SEQ ID NO: 64450 - RNA, 1698 nt, Artificial Sequence
  derived and/or modified CDS sequence (opt1) from hemagglutinin__InfluenzaA__ABB53603
augaaggugaagcugcucauccugcugugcaccuucaccgccacguacgccgacaccaucugcaucggcuaccacgcgaacaacagcaccgacaccgucgacacggugcucgagaagaacgugaccgucacccacuccgugaaccugcuggaggacagccacaacgggaagcucugccugcugaagggcaucgcgccccuccagcuggggaacugcuccguggccggcuggauccuggggaacccggagugcgagcuccugaucagcaaggaguccuggagcuacaucgucgagacccccaaccccgagaacggcgccugcuaccccggcuacuucgccgacuacgaggagcugcgcgagcagcucuccagcguguccagcuucgagcgguucgagaucuucccgaaggaguccagcuggcccaaccacacggugaccggggucuccgccagcugcucccacaacggcaagagcuccuucuaccgcaaccugcuguggcucaccgggaagaacggccuguaccccaaccugagcaaguccuacgccaacaacaagaagaaggaggugcucauccuguggggcgugcaccacccgcccaacaucgggaaccagcggacccuguacuacacggagaacgccuacgucagcguggugagcucccacuacagccgccgguucacccccgagaucaccaagcgccccaagguccgggaccaggagggccgcaucaacuacuacuggacccuccuggagcccggggacacgaucaucuucgaggccaacggcaaccugaucgcgccgugguacgccuucgcccucucccggggguucggcagcggcaucaucaccuccaacgcccccauggacgagugcgacgccaagugccagacgccccagggggcgaucaacagcucccugcccuuccagaacgugcacccggugaccaucggcgagugccccaaguacguccgcagcgccaagcugcggauggugaccgggcuccgcaacauccccuccauccagagccggggccuguucggggccaucgccggcuucaucgagggcggguggaccggcaugguggacgggugguacggcuaccaccaccagaacgagcagggguccggcuacgccgcggaccagaaguccacccagaacgccaucaacggcaucaccaacaaggucaacagcgugaucgagaagaugaacacgcaguucaccgccguggggaaggaguucaacaagcuggagcgccggauggagaaccucaacaagaaggucgacgacggcuuccuggacaucuggaccuacaacgccgagcugcucgugcugcuggagaacgagcgcacccucgacuuccacgacagcaacgucaagaaccuguacgagaaggugaagucccagcugaagaacaacgccaaggagaucgggaacggcugcuucgaguucuaccacaagugcaacaacgagugcauggagagcgugaagaacgggacguacgacuaccccaaguacuccgaggagagcaagcucaaccgggagaagaucgacggcgucaagcuggacuccaugggcguguaccagauccuggcgaucuacagcaccguggccagcucccucguccugcuggugagccucggggccaucuccuucuggaugugcagcaacggcucccugcagugccgcaucugcaucuga

SEQ ID NO: 64451 - RNA, 1701 nt, Artificial Sequence; identical to SEQ ID NO: 64279
  derived and/or modified CDS sequence (opt1) from hemagglutinin__InfluenzaA__ABB53614

SEQ ID NO: 64452 - RNA, 1701 nt, Artificial Sequence; identical to SEQ ID NO: 64279
  derived and/or modified CDS sequence (opt1) from hemagglutinin__InfluenzaA__ABB53625

SEQ ID NO: 64453 - RNA, 1701 nt, Artificial Sequence; identical to SEQ ID NO: 64306
  derived and/or modified CDS sequence (opt1) from hemagglutinin__InfluenzaA__ABB53652

SEQ ID NO: 64454 - RNA, 1701 nt, Artificial Sequence
  derived and/or modified CDS sequence (opt1) from hemagglutinin__InfluenzaA__ABB53663
augaagaccaucuucgcccugagcuacauccucugccugguguucgcccagaagcugcccggcaacgacaacuccaccgcgacgcucugccuggggcaccacgccgucccgaacggcaccaucgugaagaccaucaccaacgaccagaucgaggugacgaacgccaccgagcugguccagagcuccagcaccgggggcaucugcgacagcccccaccagauccucgacggggagaacugcacccugaucgacgcccugcucggcgacccccagugcgacggcuuccagaacaagaagugggaccuguucguggagcgcagcaaggcccacuccaacugcuaccccuacgacgugccggacuacgcgagccugcggucccucgucgccagcuccgggacgcuggaguucaacaacgagagcuucaacuggaccggcgugacccagaacgggaccuccagcgccugcaagcgccgguccaacaacagcuucuucucccgccugaacuggcucacgcaccugaaguucaaguaccccgcccugaacgugaccaugcccaacaacgagaacuucgacaagcucuacaucuggggcguccaccaccccgggaccgacaacgaccagaucagccuguacgcgcaggccuccggccggaucaccgugagcacgaagcgcagccagcagaccgugaucccgaacaucggcucccggccccgcguccgggacauccccagccgcaucuccaucuacuggaccaucgugaagcccggggacauccugcucaucaacagcaccggcaaccugaucgccccgcggggguacuucaagauccgcuccggcaagagcuccaucaugcggagcgacgcccccaucggcaagugcaacuccgagugcaucacgcccaacgggagcauccccaacgacaagccguuccagaacgugaaccgcaucaccuacggcgccugcccccgguacgucaagcagaacacccugaagcucgcgaccgggaugcgcaacgugcccgagaagcagacgcggggcaucuucggggccaucgccggcuucaucgagaacggcugggaggggaugguggacggcugguacggguuccgccaccagaacuccgagggcaucgggcaggccgccgaccugaaguccacccaggcggccaucaaccagaucaacggcaagcugaaccggcucaucggcaagaccaacgagaaguuccaccagaucgagaaggaguucuccgaggucgaggggcgcauccaggaccuggagaaguacguggaggacaccaagaucgaccuguggagcuacaacgccgagcuccugguggcccuggagaaccagcacacgaucgaccucaccgacuccgagaugaacaagcuguucgagcggaccaagaagcagcugcgcgagaacgccgaggacaugggcaacgggugcuucaagaucuaccacaagugcgacaacgcgugcaucggcagcauccgcaacgggaccuacgaccacgacgucuaccgggacgaggcccucaacaaccgcuuccagaucaagggcguggagcugaaguccggcuacaaggacuggauccuguggaucagcuucgccaucuccugcuuccuccugugcguggcccugcucggguucaucaugugggccugccagaagggcaacauccggugcaacaucugcaucuga

SEQ ID NO: 64455 - RNA, 1701 nt, Artificial Sequence; identical to SEQ ID NO: 64279
  derived and/or modified CDS sequence (opt1) from hemagglutinin__InfluenzaA__ABB53685

SEQ ID NO: 64456 - RNA, 1701 nt, Artificial Sequence
  derived and/or modified CDS sequence (opt1) from hemagglutinin__InfluenzaA__ABB53696
augaagaccaucaucgcccugagcuacauccucugccugguguucgcccagaagcugcccggcaacgacaacuccaccgcgacgcucugccuggggcaccacgccgucccgaacggcacccuggugaagaccaucaccaacgaccagaucgaggugacgaacgccaccgagcucguccagagcuccagcaccgggcgcaucugcgacagcccccaccagauccuggacggcgagaacugcacccugaucgacgcccuccugggggacccccacugcgacggcuuccagaacaaggagugggaccuguucguggagcggagcaaggccuacuccaacugcuaccccuacgacgugccggacuacgcgagccuccgcucccuggucgccagcuccggcacgcuggaguucaacaacgagagcuucaacuggaccgggguggcccagaacggcaccuccagcgccugcaagcggcgcuccaacaagagcuucuucucccggcucaacuggcugcaccagcugaaguacaaguaccccgcgcucaacgugaccaugcccaacaacgagaaguucgacaagcuguacaucuggggcguccaccaccccagcacggacuccgaccagaucagccuguacgcccaggccagcgggcgcgugaccguguccaccaagcggagccagcagaccgucaucccgaacaucgggucccgccccugggugcggggcgugagcucccgcaucagcaucuacuggacgaucgucaagcccggcgacauccuccugaucaacuccaccgggaaccugaucgcgccccggggcuacuucaagauccgcagcgggaaguccagcaucaugcgguccgacgccccgaucggcaagugcaacagcgagugcaucacccccaacggcuccauccccaacgacaagcccuuccagaacgugaaccgcaucaccuacggggccugcccgcgguacgugaagcagaacacgcucaagcuggccaccggcaugcgcaacguccccgagaagcagacccgggggaucuucggcgccaucgccggguucaucgagaacggcugggagggcaugguggacgggugguacggcuuccgccaccagaacagcgaggggaccggccaggccgcggaccugaaguccacgcaggccgccaucaaccagaucaacgggaagcucaaccggcugaucgagaagaccaacgagaaguuccaccagaucgagaaggaguucagcgagguggagggccgcauccaggaccuggagaaguacgucgaggacaccaagaucgaccucugguccuacaacgccgagcugcugguggcccucgagaaccagcacaccaucgaccugacggacagcgagaugaacaagcuguucgagcggaccaagaagcagcuccgcgagaacgcggaggacaugggcaacgggugcuucaagaucuaccacaagugcgacaacgccugcaucggcuccauccgcaacgggaccuacgaccacgacguguaccgggacgaggcccugaacaaccgcuuccagaucaagggcgucgagcugaaguccggguacaaggacuggauccucuggaucagcuucgccaucuccugcuuccugcugugcaucgcccuccugggcuucaucaugugggcgugccagaagggcaacauccggugcaacgugugcaucuga

SEQ ID NO: 64457 - RNA, 1698 nt, Artificial Sequence; identical to SEQ ID NO: 64320
  derived and/or modified CDS sequence (opt1) from hemagglutinin__InfluenzaA__ABB53707

SEQ ID NO: 64458 - RNA, 1701 nt, Artificial Sequence; identical to SEQ ID NO: 64267
  derived and/or modified CDS sequence (opt1) from hemagglutinin__InfluenzaA__ABB53718

SEQ ID NO: 64459 - RNA, 1698 nt, Artificial Sequence
  derived and/or modified CDS sequence (opt1) from hemagglutinin__InfluenzaA__ABB53740
augaaggugaagcugcucguccugcugugcaccuucaccgccacguacgccgacaccaucugcaucggcuaccacgcgaacaacagcaccgacaccguggacacggugcucgagaagaacgucaccgugacccacuccgugaaccugcuggaggacagccacaacgggaagcucugccugcugaagggcaucgcgccccuccagcuggggaacugcuccgucgccggcuggauccuggggaacccggagugcgagcuccugaucagcaaggaguccuggagcuacaucguggagacccccaaccccgagaacggcacgugcuaccccggcuacuucgccgacuacgaggagcugcgcgagcagcucuccagcguguccagcuucgagcgguucgagaucuucccgaaggaguccagcuggcccaaccacaccgucaccgggguguccgccagcugcucccacaacggcaagagcuccuucuaccgcaaccugcuguggcucaccgggaagaacggccuguaccccaaccugagcaaguccuacgccaacaacaaggagaaggaggugcucguccuguggggcgugcaccacccgcccaacaugggggaccagcgggcccuguaccacacggagaacgccuacgugagcgucgugagcucccacuacagccgccgguucacccccgagaucgccaagcgccccaaggugcgggaccaggagggccgcaucaacuacuacuggacccuccuggagcccggggagaccaucaucuucgaggcgaacggcaaccugaucgccccgcgguacgccuucgcccucucccgcggguucggcagcggcaucaucacguccaacgcccccauggacgagugcgacgcgaagugccagacgccccagggggccaucaacagcucccugcccuuccagaacguccacccggugaccaucggcgagugccccaaguacgugcggagcaccaagcugcgcauggucaccgggcuccggaacauccccuccauccagagccgcggccuguucggggccaucgccggcuucaucgagggcggguggaccggcaugguggacgggugguacggcuaccaccaccagaacgagcagggguccggcuacgccgcggaccagaaguccacccagaacgccaucaacggcaucaccaacaaggugaacagcgucaucgagaagaugaacacgcaguucaccgccguggggaaggaguucaacaagcuggagcggcgcauggagaaccucaacaagaaggucgacgacggcuuccuggacaucuggaccuacaacgccgagcugcucgugcugcuggagaacgagcggacccucgacuuccacgacagcaacgugaagaaccuguacgagaaggucaagucccagcugaagaacaacgccaaggagaucgggaacggcugcuucgaguucuaccacaagugcaacgacgagugcauggagagcgugaagaacgggacguacgacuaccccaaguacuccgaggagagcaagcucaaccgcgagaagaucgacggcgugaagcuggaguccaugggcgucuaccagauccuggcgaucuacagcaccguggccagcucccucgugcugcuggucagccucggggccaucuccuucuggaugugcagcaacggcucccugcagugccggaucugcaucuga

SEQ ID NO: 64460 - RNA, 1701 nt, Artificial Sequence
  derived and/or modified CDS sequence (opt1) from hemagglutinin__InfluenzaA__ABB53751
augaagaccaucaucgcccugagcuacaucuccugccucguguucgcccagaaccugcccggcaacgacaacagcaccgcgacgcugugccucgggcaccacgccgucccgaacggcacccuggugaagaccaucaccaacgaccagaucgaggugacgaacgccaccgagcugguccaguccagcuccaccgggcgcaucugcgacagcccccaccggauccucgacggcaagaacugcacccugaucgacgcccugcucggggacccccacugcgacggcuuccagaacgagaagugggaccuguucguggagcgcuccaaggccuucagcaacugcuaccccuacgacgugccggacuacgcgucccugcggagccucgucgccuccagcggcacgcuggaguucaucaacgagggguucaacuggaccggcgugacccaguccgggggcagcuacgccugcaagcgcggguccgacaacagcuucuucucccggcugaacuggcucuacaagagcgaguccaaguaccccgugcugaacgucaccaugcccaacaacggcaacuucgacaagcuguacaucuggggcgugcaccaccccagcacggacaaggagcagaccaaccucuacgugcgcgccagcgggcgggucaccguguccaccaagcgcagccagcagacgaucaucccgaacaucggcucccggcccugggugcgcgggcugagcuccggcaucagcaucuacuggaccaucgucaagcccggcgacauccugcucaucaacuccaacgggaaccugaucgcgccccggggcuacuucaagauccgcaccggcaagagcuccauccugcggagcgacgccccgaucgggaccugcuccagcgagugcaucacgcccaacggguccauccccaacgacaagcccuuccagaacgugaacaagaucaccuacggcgccugcccgaaguacgugaagcagaacacccucaagcuggccaccggcaugcgcaacguccccgagaagcagacgcgggggaucuucggcgccaucgcgggguucaucgagaacggcugggaggggaugguggacggcugguacggcuuccgccaccagaacagcgaggggaccggccaggccgccgaccugaaguccacccaggccgccaucgaccagaucaacgggaagcucaaccgggugaucgagaagaccaacgagaaguuccaccagaucgagaaggaguucagcgaggucgagggccgcauccaggaccuggagaaguacguggaggacacgaagaucgaccugugguccuacaacgcggagcuccugguggcccuggagaaccagcacaccaucgaccucaccgacagcgagaugaacaagcuguucgagaagacccggcgccagcugcgggagaacgccgaggacauggggaacggcugcuucaagaucuaccacaagugcgacaacgccugcaucggcuccauccgcaacgggacguacgaccacgacgucuaccgcgacgaggcccucaacaaccgguuccagaucaagggcguggagcucaagagcggguacaaggacuggauccuguggaucagcuucgcgaucuccugcuuccugcugugcgucgugcugcucggcuucaucaugugggccugccagaagggcaacauccgcugcaacaucugcaucuga

SEQ ID NO: 64461 - RNA, 1701 nt, Artificial Sequence
  derived and/or modified CDS sequence (opt1) from hemagglutinin__InfluenzaA__ABB60007
augaagaccaucaucgcccugagcuacauccucugccugguguucgcccagaagcugcccggcaacgacaacuccaccgcgacgcucugccuggggcaccacgccgucccgaacggcacccuggugaagaccaucaccaacgaccagaucgaggugacgaacgccaccgagcucguccagagcuccagcaccgaccgcaucugcgacagcccccaccggauccuggacggggagaacugcacccugaucgacgcccuccugggcgacccccacugcgacggguuccagaacaaggagugggaccuguucguggagcgcagcaaggccuacuccaacugcuaccccuacgacgugccggacuacgcgagccuccggucccuggucgccagcuccggcacgcuggaguucaacaacgagagcuucaacuggaccggcguggcccagaacgggaccuccuacgccugcaagcgccggagcaucaaguccuucuucagccgccucaacuggcugcaccagcugaaguacaaguaccccgcgcucaacgugaccaugcccaacaacgacaaguucgacaagcuguacaucuggggcguccaccaccccuccacggacagcgaccagaccucccuguacgcccaggccagcgggcgggugaccgugagcaccaagcgcucccagcagacggucaucccgaacaucggcagccggcccugggugcgcgggguguccagccggaucuccaucuacuggaccaucgucaagcccggcgacauccuccugaucaacagcaccggcaaccugaucgcgccccgcggguacuucaagauccgguccggcaagagcuccaucaugcgcagcgacgccccgaucgggaagugcaacuccgagugcaucacccccaacggcagcauccccaacgacaagcccuuccagaacgugaaccggaucacguacggcgccugcccgcgcuacgugaagcagaacacccucaagcuggccaccgggaugcggaacguccccgagaagcagacccgcggcaucuucggggccaucgccggcuucaucgagaacgggugggagggcaugguggacggcugguacggguuccggcaccagaacuccgagggcacggggcaggccgcggaccugaaguccacccaggccgccaucaaccagaucaacggcaagcucaaccgccugaucgagaagaccaacgagaaguuccaccagaucgagaaggaguucuccgagguggaggggcggauccaggaccuggagaaguacgucgaggacaccaagaucgaccucuggagcuacaacgccgagcugcugguggcccucgagaaccagcacacgaucgaccugaccgacuccgagaugaacaagcuguucgagcgcacccgcaagcagcuccgggagaacgcggaggacaugggcaacggcugcuucaagaucuaccacaagugcgacaacgccugcaucgggagcauccgcaacggcaccuacgaccacgacguguaccgggacgaggcccugaacaaccgcuuccagaucaagggggucgagcugaaguccggcuacaaggacuggauccucuggaucagcuucgccaucagcugcuuccugcugugcgugguccuccugggguucaucaugugggccugccagaagggcaacauccggugcaacaucugcaucuga

SEQ ID NO: 64462 - RNA, 1701 nt, Artificial Sequence
  derived and/or modified CDS sequence (opt1) from hemagglutinin__InfluenzaA__ABB77853
augaagaccaucaucgcccugagcuacaucuccugccucguguucgcccagaagcugcccggcaacgacaacagcaccgcgacgcugugccucgggcaccacgccgucccgaacggcacccuggugaagaccaucaccaacgaccagaucgaggugacgaacgccaccgagcugguccaguccagcuccaccgggcgcaucugcgacagcccccaccggauccucgacggcgagaacugcacccugaucgacgcccugcucggggacccccacugcgacggcuuccagaacaaggagugggaccuguucguggagcgcuccaaggccuacagcaacugcuaccccuacgacgugccggacuacgcgucccugcggagccucgucgccuccagcggcacgcuggaguucaacaacgaguccuucaacuggaccgggguggcccagaacggcaccagcuacgccugcaagcgccgguccaucaagagcuucuucucccgccugaacuggcuccaccagcugaaguacaaguaccccgcgcugaacgugaccaugcccaacaacgacaaguucgacaagcucuacaucuggggcguccaccaccccagcacggacuccgaccagaccagccuguacgcccaggccagcgggcgggugaccguguccaccaagcgcagccagcagacggucaucccgaacaucgggucccggcccugggugcgcggcgugagcucccggaucagcaucuacuggaccaucgucaagcccggcgacauccugcucaucaacuccaccgggaaccugaucgcgccccgcggcuacuucaagauccggagcgggaaguccagcaucaugcgcuccgacgccccgaucggcaagugcaacagcgagugcaucacccccgacggcuccauccccaacgacaagcccuuccagaacgugaaccggaucacguacggggccugcccgcgcuacgugaagcagaacacccugaagcucgccaccggcaugcggaacguccccgagaagcagacccgcgggaucuucggcgccaucgccggguucaucgagaacggcugggagggcaugguggacgggugguacggcuuccggcaccagaacagcgaggggacgggccaggccgcggaccugaaguccacccaggccgccaucaaccagaucaacgggaagcugaaccgccucaucgagaagaccaacgagaaguuccaccagaucgagaaggaguucagcgagguggagggccggauccaggaccuggagaaguacgucgaggacaccaagaucgaccugugguccuacaacgccgagcuccugguggcccuggagaaccagcacacgaucgaccucaccgacagcgagaugaacaagcuguucgagcgcacccgcaagcagcugcgggagaacgcggaggacaugggcaacgggugcuucaagaucuaccacaagugcgacaacgccugcaucggcuccauccgcaacgggaccuacgaccacgacguguaccgggacgaggcccucaacaaccgcuuccagaucaagggcgucgagcucaagagcggguacaaggacuggauccuguggaucagcuucgccaucuccugcuuccugcugugcgugguccugcucggcuucaucaugugggccugccagaagggcaacauccggugcaacaucugcaucuga

SEQ ID NO: 64463 - RNA, 1701 nt, Artificial Sequence
  derived and/or modified CDS sequence (opt1) from hemagglutinin__InfluenzaA__ABB79731
augaagaccaucaucgcccugagcuacauccucugccugguguucgcccaggagcugcccggcaacgacaacuccaccgcgacgcucugccuggggcaccacgccgucccgaacggcaccaucgugaagaccaucaccaacgaccagaucgaggugacgaacgccaccgagcugguccagaacagcuccaccgggggcaucugcgacagcccccaccagauccucgacggggagaacugcacccugaucgacgcccugcucggcgacccccagugcgacggcuuccagaacaagaagugggaccuguucguggagcgcuccaaggccuacagcaacugcuaccccuacgacgugccggacuacgcgucccugcggagccucgucgccuccagcgggacgcuggaguucaacaacgaguccuucaacuggaccggcgugacccagaacgggaccagcuccgccugcaagcgccggagcaacaacuccuucuucagccgccugaacuggcucacgcaccugaaguucaaguaccccgcccugaacgugaccaugcccaacaacgagaaguucgacaagcucuacaucuggggcguccaccaccccgggaccgacaacgaccagaccucccuguacgcgcaggccagcggccggaucacgguguccaccaagcgcagccagcagaccgugaucccgaacaucggcagccggccccgcguccgggacauccccucccgcaucagcaucuacuggaccaucgugaagcccggggacauccugcucaucaacuccacgggcaaccugaucgccccgcggggguacuucaagauccgcagcggcaaguccagcaucaugcgguccgacgcccccaucggcaagugcaacagcgagugcaucacccccaacggguccauccccaacgacaagccguuccagaacgugaaccgcaucaccuacggcgccugcccccgguacgucaagcagaacacccugaagcucgcgacggggaugcgcaacgugcccgagaagcagacccggggcaucuucggggccaucgccggcuucaucgagaacggcugggaggggaugguggacggcugguacggguuccgccaccagaacagcgagggcaucgggcaggccgccgaccugaaguccacccaggcggccaucaaccagaucaacggcaagcugaaccggcucaucggcaagaccaacgagaaguuccaccagaucgagaaggaguucagcgaggucgaggggcgcauccaggaccuggagaaguacguggaggacacgaagaucgaccugugguccuacaacgccgagcuccugguggcccuggagaaccagcacaccaucgaccucaccgacagcgagaugaacaagcuguucgagcggaccaagaagcagcugcgcgagaacgccgaggacaugggcaacgggugcuucaagaucuaccacaagugcgacaacgcgugcaucggcuccauccgcaacgggacguacgaccacgacgucuaccgggacgaggcccucaacaaccgcuuccagaucaagggcguggagcucaagagcggcuacaaggacuggauccuguggaucuccuucgccaucagcugcuuccugcugugcguggcccugcucggguucaucaugugggccugccagaagggcaacauccggugcaacaucugcaucuga

SEQ ID NO: 64464 - RNA, 1701 nt, Artificial Sequence
  derived and/or modified CDS sequence (opt1) from hemagglutinin__InfluenzaA__ABB79788
augaagaccaucaucgcccugagcuacaucuucugccucguguucgcccagaagcugcccggcaacgacaacuccaccgcgacgcugugccucgggcaccacgccgucccgaacggcacccuggugaagaccaucaccaacgaccagaucgaggugacgaacgccaccgagcugguccagagcuccagcaccgggcgcaucugcgacagcccccaccggauccucgacggcaagaacugcacccugaucgacgcccugcucggggacccccacugcgacggcuuccagaacgagaagugggaccuguucguggagcgcagcaaggccuucuccaacugcuaccccuacgacgugccggacuacgcgagccugcggucccucgucgccagcuccggcacgcuggaguucaucaacgagggguucaacuggaccggcgugacccagagcgggggcuccuacgccugcaagcgcgggagcgugaacuccuucuucagccggcugaacuggcucuacgaguccgagagcaaguaccccguccugaacgugaccaugcccaacaacggcaaguucgacaagcuguacaucuggggcgugcaccaccccaucacggacaaggagcagaccaaccucuacguccgcgccuccgggcgggugaccgugagcaccaagcgcagccagcagacggucaucccgaacaucggcucccggcccugggugcgcgggcugagcucccggaucagcaucuacuggaccaucgugaagcccggcgacauccugcucaucaacuccaccggcaaccugaucgcgccccgcggguacuucaagauccggaccggcaagagcuccaucaugcgcagcgacgccccgaucgggacgugcuccagcgagugcaucacccccaacggcuccauccccaacgacaagcccuuccagaacgucaacaagaucaccuacggggccugcccgcgguacgugaagcagaacacccugaagcucgccacgggcaugcgcaacgugcccgagaagcagacccggggcaucuucggggccaucgcgggcuucaucgagaacgggugggagggcauggucgacgggugguacggcuuccgccaccagaacagcgagggcaccgggcaggccgccgaccugaaguccacccaggccgccaucgaccagaucaacggcaagcugaaccggcucaucgagaagacgaacgagaaguuccaccagaucgagaaggaguucagcgagguggaggggcgcauccaggaccuggagaaguacguggaggacaccaagaucgaccugugguccuacaacgcggagcuccuggucgcccuggagaaccagcacaccaucgaccucaccgacagcgagaugaacaagcuguucgagaagacgcggaagcagcugcgcgagaacgccgaggacaugggcaacgggugcuucaagaucuaccacaagugcgacaacgccugcaucggcuccauccgcaacggcaccuacgaccacgacguguaccgggacgaggcccucaacaaccgcuuccagaucaagggggucgagcugaaguccggcuacaaggacuggauccuguggaucuccuucgcgaucagcugcuuccuccugugcguggugcugcucggguucaucaugugggccugccagaagggcaacauccggugcaacaucugcaucuga

SEQ ID NO: 64465 - RNA, 1701 nt, Artificial Sequence
  derived and/or modified CDS sequence (opt1) from hemagglutinin__InfluenzaA__ABB79799
augaagaccaucaucgcccugagcuacaucuucugccucguguucgcccagaagcugcccggcaacgacaacuccaccgcgacgcugugccucgggcaccacgccgucccgaacggcacccuggugaagaccaucaccaacgaccagaucgaggugacgaacgccaccgagcugguccagagcuccagcaccgggcgcaucugcgacagcccccaccggauccucgacggcaagaacugcacccugaucgacgcccugcucggggacccccacugcgacggcuuccagaacgagaagugggaccuguucguggagcgcagcaaggccuucuccaacugcuaccccuacgacgugccggacuacgcgagccugcggucccucgucgccagcuccggcacgcuggaguucaucaacgagggguucaacuggaccggcgugacccagagcgggggcuccuacgccugcaagcgcgggagcgugaacuccuucuucagccggcugaacuggcucuacgaguccgagagcaaguaccccguccugaacgugaccaugcccaacaacggcaaguucgacaagcuguacaucuggggcgugcaccaccccuccacggacaaggagcagaccaaccucuacguccgcgccagcgggaaggugaccgugagcaccaagcggucccagcagacggucaucccgaacaucggcagccgccccugggugcgggggcuguccagccgcaucuccaucuacuggaccaucgugaagcccggcgacauccugcucaucaacagcaccggcaaccugaucgcgccccggggguacuucaagauccgcaccggcaaguccagcaucaugcgguccgacgccccgaucgggacgugcagcuccgagugcaucacccccaacggcagcauccccaacgacaagcccuuccagaacgucaacaagaucaccuacggggccugcccgcgcuacgugaagcagaacacccugaagcucgccacgggcaugcggaacgugcccgagaagcagacccgcggcaucuucggggccaucgcgggcuucaucgagaacgggugggagggcauggucgacgggugguacggcuuccggcaccagaacuccgagggcaccgggcaggccgccgaccugaaguccacccaggccgccaucgaccagaucaacggcaagcugaaccgccucaucgagaagacgaacgagaaguuccaccagaucgagaaggaguucuccgagguggaggggcggauccaggaccuggagaaguacguggaggacaccaagaucgaccuguggagcuacaacgcggagcuccuggucgcccuggagaaccagcacaccaucgaccucaccgacuccgagaugaacaagcuguucgagaagacgcgcaagcagcugcgggagaacgccgaggacaugggcaacgggugcuucaagaucuaccacaagugcgacaacgccugcaucggcagcauccgcaacggcaccuacgaccacgacguguaccgcgacgaggcccucaacaaccgguuccagaucaagggggucgagcugaaguccggcuacaaggacuggauccuguggaucagcuucgcgaucagcugcuuccuccugugcguggugcugcucggguucaucaugugggccugccagaagggcaacauccgcugcaacaucugcaucuga

SEQ ID NO: 64466 - RNA, 1701 nt, Artificial Sequence
  derived and/or modified CDS sequence (opt1) from hemagglutinin__InfluenzaA__ABB79810
augaagaccaucaucgcccugagcuacauccucugccugguguucgcccagaagcugcccggcaacgacaacuccaccgcgacgcucugccuggggcaccacgccgucccgaacggcacccuggugaagaccaucaccaacgaccagaucgaggugacgaacgccaccgagcucguccagagcuccagcaccgggcgccugugcgacagcccccaccggauccuggacggcaagaacugcacccucaucgacgcccugcugggggacccccacugcgacggcuuccagaacaaggagugggaccucuucguggagcgcagcaaggccuacuccaacugcuaccccuacgacgugccggacuacgcgagccugcggucccuggucgccagcuccggcacgcucgaguucaucaacgaggacuucaacuggaccgggguggcccaggacggcgggagcuacgccugccgccggggcuccgugaacagcuucuucucccgccugaacuggcugcacaagcucgaguacaaguaccccgcgcugaacgucaccaugcccaacaacgggaaguucgacaagcuguacaucuggggcgugcaccaccccagcaccgacuccgaccagacgagccucuacgugcgggccuccggccgcgucaccgugagcaccaagcggagccagcagaccgugaucccgaacaucgggucccgccccuggguccggggccagagcucccgcaucagcaucuacuggacgaucgugaagcccggggacauccugcugaucgacuccaccggcaaccucaucgcgccccggggcuacuucaagauccgcaacgggaaguccuccaucaugcggagcgacgccccgaucggcaacugcuccagcgagugcaucacccccaacggguccauccccaacgacaagcccuuccagaacgugaaccgcaucaccuacggcgccugcccgcgguacgucaagcagcacacgcugaagcuggccaccgggaugcgcaacgugcccgagaagcagacccggggcaucuucggcgccaucgccggguucaucgagaacggcugggaggggaugguggacggcugguacggguuccgccaccagaacagcgagggcaccggccaggccgccgaccucaaguccacgcaggcggccaucgaccagaucaacgggaagcugaaccggcugaucgagaagaccaacgagaaguuccaccagaucgagaaggaguucagcgaggucgagggccgcauccaggaccucgagaaguacguggaggacaccaagaucgaccugugguccuacaacgccgagcugcucguggcccuggagaaccagcacaccaucgaccugacggacagcgagaugaacaagcuguucgagcgcacccggaagcagcuccgcgagaacgccgaggacauggggaacggcugcuucaagaucuaccacaagugcgacaacgcgugcaucggguccauccggaacggcaccuacgaccacgacgucuaccgcgacgaggcccugaacaaccgguuccagaucaagggcguggagcucaagagcggguacaaggacuggauccuguggaucuccuucgccaucagcugcuuccugcucugcgucgugcugcugggcuucaucaugugggccugccagaaggggaacauccgcugcaacaucugcaucuga

SEQ ID NO: 64467 - RNA, 1701 nt, Artificial Sequence
  derived and/or modified CDS sequence (opt1) from hemagglutinin__InfluenzaA__ABB79957
augaagaccaucaucgcccugagcuacauccucugccugguguucgcccagaagcugcccggcaacgacaacuccaccgcgacgcucugccuggggcaccacgccgucccgaacggcacccuggugaagaccaucaccaacgaccagaucgaggugacgaacgccaccgagcucguccagagcuccagcaccgggcgccugugcgacagcccccaccggauccuggacggcaagaacugcacccucaucgacgcccugcugggggacccccacugcgacggcuuccagaacaaggagugggaccucuucguggagcgcuccaaggccuacuccaacugcuaccccuacgacgugccggacuacgcgagccugcggucccuggucgccagcuccggcacgcucgaguucaucaacgaggacuucaacuggaccgggguggcccaggacggcgggagcuacgccugccgccggggcuccgugaacagcuucuucucccgccugaacuggcugcacaagcucgaguacaaguaccccgcgcugaacgucaccaugcccaacaacgggaaguucgacaagcuguacaucuggggcgugcaccaccccagcaccgacuccgaccagacgagccucuacgugcgggccuccggccgcgucaccgugagcaccaagcggagccagcagaccgugaucccgaacaucgggucccgccccuggguccggggccagagcucccgcaucgggaucuacuggacgaucgugaagcccggcgacauccugcugaucaacagcaccggcaaccucaucgcgccccggggguacuucaagauccgcaacggcaaguccagcaucaugcgguccgacgccccgaucgggaacugcagcuccgagugcaucacccccaacggcagcauccccaacgacaagcccuuccagaacgugaaccgcaucaccuacggggccugcccgcgguacgucaagcagcacacgcugaagcuggccaccggcaugcgcaacgugcccgagaagcagacccggggcaucuucggggccaucgccggcuucaucgagaacgggugggagggcaugguggacgggugguacggcuuccgccaccagaacuccgagggcaccgggcaggccgccgaccucaagagcacgcaggcggccaucgaccagaucaacggcaagcugaaccggcugaucgagaagaccaacgagaaguuccaccagaucgagaaggaguucuccgaggucgaggggcgcauccaggaccucgagaaguacguggaggacaccaagaucgaccuguggagcuacaacgccgagcugcucguggcccuggagaaccagcacaccaucgaccugacggacuccgagaugaacaagcuguucgagcgcacccggaagcagcuccgcgagaacgccgaggacaugggcaacgggugcuucaagaucuaccacaagugcgacaacgcgugcaucggcagcauccggaacggcaccuacgaccacgacgucuaccgcgacgaggcccugaacaaccgguuccagaucaaggggguggagcucaaguccggcuacaaggacuggauccuguggaucagcuucgccaucuccugcuuccugcucugcgucgugcugcugggguucaucaugugggccugccagaagggcaacauccgcugcaacaucugcaucuga

SEQ ID NO: 64468 - RNA, 1701 nt, Artificial Sequence
  derived and/or modified CDS sequence (opt1) from hemagglutinin__InfluenzaA__ABB79968
augaagaccaucaucgcccugagcuacauccucugccugguguucgcccagaagcugcccggcaacgacaacuccaccgcgacgcucugccuggggcaccacgccgucccgaacggcacccuggugaagaccaucaccaacgaccagaucgaggugacgaacgccaccgagcucguccagagcuccagcaccgggcgccugugcgacagcccccaccggauccuggacggcaagaacugcacccucaucgacgcccugcugggggacccccacugcgacggcuuccagaacaaggagugggaccucuucguggagcgcagcaaggccuacuccaacugcuaccccuacgacgugccggacuacgcgagccugcggucccuggucgccagcuccggcacgcucgaguucaucaacgaggacuucaacuggaccgggguggcccaggacggcgggagcuacgccugccgccggggcuccgugaacagcuucuucucccgccugaacuggcugcacaagcucgaguacaaguaccccgcgcugaacgucaccaugcccaacaacgggaaguucgacaagcuguacaucuggggcgugcaccaccccagcaccgacuccgaccagacgagccucuacgugcgggccuccggccgcgucaccgugagcaccaagcggagccagcagaccgugaucccgaacaucgggucccgccccuggguccggggccagagcucccgcaucagcaucuacuggacgaucgugaagcccggggacauccugcugaucaacuccaccggcaaccucaucgcgccccggggcuacuucaagauccgcaacgggaaguccuccaucaugcggagcgacgccccgaucggcaacugcuccagcgagugcaucacccccaacggguccauccccaacgacaagcccuuccagaacgugaaccgcaucaccuacggcgccugcccgcgguacgucaagcagcacacgcugaagcuggccaccgggaugcgcaacgugcccgagaagcagacccggggcaucuucggcgccaucgccggguucaucgagaacggcugggaggggaugguggacggcugguacggguuccgccaccagaacagcgagggcaccggccaggccgccgaccucaaguccacgcaggcggccaucgaccagaucaacgggaagcugaaccggcugaucgagaagaccaacgagaaguuccaccagaucgagaaggaguucagcgaggucgagggccgcauccaggaccucgagaaguacguggaggacaccaagaucgaccugugguccuacaacgccgagcugcucguggcccuggagaaccagcacaccaucgaccugacggacagcgagaugaacaagcuguucgagcgcacccggaagcagcuccgcgagaacgccgaggacauggggaacggcugcuucaagaucuaccacaagugcgacaacgcgugcaucggguccauccggaacggcaccuacgaccacgacgucuaccgcgacgaggcccugaacaaccgguuccagaucaagggcguggagcucaagagcggguacaaggacuggauccuguggaucuccuucgccaucagcugcuuccugcucugcgucgugcugcugggcuucaucaugugggccugccagaaggggaacauccgcugcaacaucugcaucuga

SEQ ID NO: 64469 - RNA, 1698 nt, Artificial Sequence
  derived and/or modified CDS sequence (opt1) from hemagglutinin__InfluenzaA__ABB79979
augaaggccaagcugcucgugcugcugugcaccuucaccgccacguacgcggacaccaucugcaucggcuaccacgccaacaacagcaccgacaccgucgacacggugcucgagaagaacgugaccgucacccacuccgugaaccugcuggaggacagccacaacgggaagcucugccugcugaagggcaucgcgccccuccagcuggggaacugcuccguggccggcuggauccuggggaacccggagugcgagcuccugaucagcaaggaguccuggagcuacaucgucgagacccccaaccccgagaacggcacgugcuaccccggcuacuucgccgacuacgaggagcugcgcgagcagcucuccagcguguccagcuucgagcgguucgagaucuucccgaagggguccagcuggcccaaccacaccgugaccggcgucuccgccagcugcucccacaacggcaagagcuccuucuaccgcaaccugcuguggcucaccgggaagaacgggcuguaccccaaccugagcauguccuacgugaacaacaaggagaaggaggugcucguccuguggggcgugcaccacccgcccaacaucggcgaccagcgggcccuguaccacacggagaacgccuacgugagcgucgugagcucccacuacagccgccgguucacccccgagaucgccaagcgccccaaggugcgggaccaggaggggcgcaucaacuaccacuggacccuccuggagcccggcgacaccaucaucuucgaggcgaacgggaaccugaucgccccgugguacgccuucgcccucucccggggcuucggcagcgggaucaucacguccaacgcccccauggacgagugcgacgcgaagugccagacgccccagggcgccaucaacagcucccugcccuuccagaacguccacccggugaccaucggggagugccccaaguacgugcgcagcgccaagcugcggauggucaccggccuccgcaacauccccuccauccagagccgggggcuguucggcgccaucgccggcuucaucgagggcggguggaccgggaugguggacggcugguacggguaccaccaccagaacgagcagggcuccggcuacgcggccgaccagaaguccacccagaacgccaucaacgggaucaccaacaaggugaacagcgucaucgagaagaugaacacccaguucacggccgugggcaaggaguucaacaagcuggagcgccggauggagaaccucaacaagaaggucgacgacggguuccuggacaucuggaccuacaacgccgagcugcucgugcugcuggagaacgagcgcacccucgacuuccacgacagcaacgugaagaaccuguacgagaaggucaagucccagcugaagaacaacgcgaaggagaucggcaacgggugcuucgaguucuaccacaagugcaacaacgagugcauggagagcgugaagaacggcaccuacgacuaccccaaguacuccgaggagagcaagcucaaccgggagaagaucgacggcgugaagcuggaguccaugggggucuaccagauccuggccaucuacagcacgguggccagcucccucgugcugcuggucagccucggcgccaucuccuucuggaugugcagcaacgggucccugcagugccgcaucugcaucuga

SEQ ID NO: 64470 - RNA, 1698 nt, Artificial Sequence
  derived and/or modified CDS sequence (opt1) from hemagglutinin__InfluenzaA__ABB79990
augaaggccaagcugcucgugcugcugugcaccuucaccgccacguacgcggacaccaucugcaucggcuaccacgccaacaacagcaccgacaccgucgacacggugcucgagaagaacgugaccgucacccacuccgugaaccugcuggaggacagccacaacgggaagcucugccugcugaagggcaucgcgccccuccagcuggggaacugcuccguggccggcuggauccuggggaacccggagugcgagcuccugaucagcaaggaguccuggagcuacaucgucgagacccccaaccccgagaacggcacgugcuaccccggcuacuucgccgacuacgaggagcugcgcgagcagcucuccagcguguccagcuucgagcgguucgagaucuucccgaagggguccagcuggcccaaccacaccgugaccggcgucuccgccagcugcucccacaacggcaagagcuccuucuaccgcaaccugcuguggcucaccgggaagaacgggcuguaccccaaccugagcauguccuacgugaacaacaaggagaaggaggugcucguccuguggggcgugcaccacccgcccaacaucggcgaccagaaggcccuguaccacacggagaacgccuacgugagcgucgugagcucccacuacagccggcgcuucacccccgagaucgccaagcggcccaaggugcgcgaccaggaggggcggaucaacuacuacuggacccuccuggagcccggcgacaccaucaucuucgaggcgaacgggaaccugaucgccccgugguacgccuucgcccucucccgcggcuucggcagcgggaucaucacguccaacgcccccauggacgagugcgacgcgaagugccagacgccccagggcgccaucaacagcucccugcccuuccagaacguccacccggugaccaucggggagugccccaaguacgugcggagcgccaagcugcgcauggucaccggccuccggaacauccccuccauccagagccgcgggcuguucggcgccaucgccggcuucaucgagggcggguggaccgggaugguggacggcugguacggguaccaccaccagaacgagcagggcuccggcuacgcggccgaccagaaguccacccagaacgccaucaacgggaucaccaacaaggugaacagcgucaucgagaagaugaacacccaguucacggccgugggcaaggaguucaacaagcuggagcggcgcauggagaaccucaacaagaaggucgacgacggguuccuggacaucuggaccuacaacgccgagcugcucgugcugcuggagaacgagcggacccucgacuuccacgacagcaacgugaagaaccuguacgagaaggucaagucccagcugaagaacaacgcgaaggagaucggcaacgggugcuucgaguucuaccacaagugcaacaacgagugcauggagagcgugaagaacggcaccuacgacuaccccaaguacuccgaggagagcaagcucaaccgcgagaagaucgacggcgugaagcuggaguccaugggggucuaccagauccuggccaucuacagcacgguggccagcucccucgugcugcuggucagccucggcgccaucuccuucuggaugugcagcaacgggucccugcagugccggaucugcaucuga

SEQ ID NO: 64471 - RNA, 1701 nt, Artificial Sequence
  derived and/or modified CDS sequence (opt1) from hemagglutinin__InfluenzaA__ABB80001
augaagaccaucaucgcccugagcuacacccucugccugguguucgcccagaagcugcccggcaacgacaacuccacggcgacccucugccuggggcaccacgccgucccgaacggcaccaucgugaagaccaucacgaacgaccagaucgaggugaccaacgccaccgagcugguccagagcuccagcaccgggggcaucugcgacagcccccaccagauccucgacggggagaacugcacgcugaucgacgcccugcucggcgacccccagugcgacggcuuccagaacaagaagugggaccuguucguggagcgcagcaaggccuacuccaacugcuaccccuacgacgugccggacuacgcgagccugcggucccucgucgccagcuccgggacccuggaguucaacaacgagagcuucaacuggaccggcgugacccagaacgggacguccagcgccugcaagcgccgguccaacaacagcuucuucucccgccugaacuggcucacccaccugaaguucaaguaccccgcccugaacgugaccaugcccaacaacgagaaguucgacaagcucuacaucuggggcguccaccaccccgggaccgacaacgaccagaucagccuguacgcgcaggccuccggccggaucacggugagcaccaagcgcagccagcagaccgugaucccgaacaucggcucccggccccgcguccgggacauccccagccgcaucuccaucuacuggaccaucgugaagcccggggacauccugcucaucaacagcacgggcaaccugaucgccccgcggggguacuucaagauccgcuccggcaagagcuccaucaugcggagcgacgcccccaucggcaagugcaacuccgagugcaucacccccaacgggagcauccccaacgacaagccguuccagaacgugaaccgcaucaccuacggcgccugcccccgguacgucaagcaguccacccugaagcucgcgacggggaugcgcaacgugcccgagaagcagacccggggcaucuucggggccaucgccggcuucaucgagaacggcugggaggggaugguggacggcugguacggguuccgccaccagaacagcgagggcaucgggcaggccgccgaccugaaguccacccaggcggccaucaaccagaucaacggcaagcugaaccggcucaucggcaagaccaacgagaaguuccaccagaucgagaaggaguucagcgaggucgaggggcgcauccaggaccuggagaaguacguggaggacacgaagaucgaccugugguccuacaacgccgagcuccugguggcccuggagaaccagcacaccaucgaccucaccgacagcgagaugaacaagcuguucgagcggaccaagaagcagcugcgcgagaacgccgaggacaugggcaacgggugcuucaagaucuaccacaagugcgacaacgcgugcaucggcuccauccgcaacgggacguacgaccacgacgucuaccgggacgaggcccucaacaaccgcuuccagaucaagggcguggagcugaaguccggcuacaaggacuggauccuguggaucuccuucgccaucagcugcuuccuccugugcguggcccugcucggguucaucaugugggccugccagaagggcaacauccggugcaacaucugcaucuga

SEQ ID NO: 64472 - RNA, 1701 nt, Artificial Sequence; identical to SEQ ID NO: 64267
  derived and/or modified CDS sequence (opt1) from hemagglutinin__InfluenzaA__ABB80012

SEQ ID NO: 64473 - RNA, 1701 nt, Artificial Sequence
  derived and/or modified CDS sequence (opt1) from hemagglutinin__InfluenzaA__ABB80023
augaagaccaucaucgcccugagcuacaucuucuaccucgcccugggccaggaccugcccgggaacgacaacuccaaggcgacccucugccugggccaccacgccgugccgaacgggacgcuggucaagaccaucaccaacgaccagaccgaggugacgaacgccaccgagcucgugcagagcuccagcaccggcaagaucugcaacaacccccaccgcauccuggacgggauggacugcacccugaucgacgcccuccugggcgacccccacugcgacgucuuccagaacgagacgugggaccuguucguggagcgguccaaggccuucagcaacugcuaccccuacgacgugccggacuacgcgucccuccgcagccuggucgccuccagcggcacccuggaguucaucaccgagggguucaccuggacggaggugacccagaacggcggguccaacgccugcaagcggggccccgacagcggguucuucucccgccucaacuggcugaccaagagcggccggaccuaccccgugcugaacgucacgaugcccaacaacgacaacuucgacaagcucuacaucuggggcgugcaccacccguccaccgaccaggagcagaccaaccuguacgugcagaccagcgggcgcgucacgguguccacccggcgcagccagcagaccaucauccccaacaucggcucccggcccugggugcgcgggcugagcagccggaucuccaucuacuggaccaucgucaagcccggcgacgugcucgugaucaacagcaacggcaaccugaucgccccgcgcggguacuucaagaugcggacgggcaaguccagcaucaugcgcuccgacgcgcccaucgacacgugcaucagcgagugcaucacccccaacggguccauccccaacgacaagccguuccagaacgucaacaagaucaccuacggcgccugccccaaguacgugaagcaggacacccugaagcucgccaccgggaugcggaacgugcccgagaagcagacccgcggccuguucggcgccaucgccggguucaucgagaacggcugggaggggaugaucgacggcugguacggguuccggcaccagaacagcgagggcaccggccaggcggccgaccugaaguccacgcaggccgccaucgaccagaucaacgggaagcucaaccgcaucaucgagaagaccaacgagaaguuccaccagaucgagaaggaguucagcgaggucgagggccggauccaggaccuggagaaguacguggaggacaccaagaucgaccugugguccuacaacgccgagcuccugguggcgcuggagaaccagcacaccaucgaccucacggacagcgagaugaacaagcuguucgagaagacccgccggcagcugcgcgagaacgccgaggacauggggaacggcugcuucaagaucuaccacaagugcgacaacgccugcaucgaguccauccgcaacgggaccuacgaccacgacgucuaccgggacgaggcccucaacaaccgcuuccagaucaagggcguggagcucaagagcggcuacaaggacuggauccuguggaucuccuucgccaucagcugcuuccugcugugcgucgugcugcucggguucaucaugugggcgugccagcggggcaacauccgcugcaacaucugcaucuga

SEQ ID NO: 64474 - RNA, 1701 nt, Artificial Sequence
  derived and/or modified CDS sequence (opt1) from hemagglutinin__InfluenzaA__ABB80034
augaagaccaucaucgcccugagcuacaucuucugccucgugcugggccaggaccugcccgggaacgacaacuccaccgccacgcucugccugggccaccacgcggucccgaacgggacccuggugaagaccaucaccgacgaccagaucgaggugacgaacgccaccgagcucguccagagcuccagcaccggcaagaucugcaacaacccccaccgcauccuggacgggcuggacugcacccucaucgacgcccugcugggcgacccccacugcgacguguuccagaacgagacgugggaccucuucguggagcgguccaaggccuucagcaacugcuaccccuacgacgucccggacuacgccucccugcgcagccugguggcguccagcggcacccucgaguucaucaccgagggguucaccuggacgggcgugacccagaacgggggcuccaacgccugcaagcgggggcccggcagcggcuucuucucccgccugaacuggcugaccaagagcggguccaccuaccccguccucaacgugacgaugcccaacaacgacaacuucgacaagcuguacaucuggggcgugcaccacccgagcaccaaccaggagcagaccucccuguacguccaggccagcgggcgggugaccguguccacgcgccggagccagcagaccaucauccccaacaucggcagccgccccuggguccggggccucuccagccgcaucuccaucuacuggaccaucgugaagcccggggacgugcuggucaucaacagcaacggcaaccugaucgccccgcggggguacuucaagaugcgcaccggcaaguccagcaucaugcgguccgacgcgacgaucgacacgugcaucagcgagugcaucacccccaacggguccauccccaacgacaagcccuuccagaacgugaacaagaucaccuacggcgccugcccgaaguacgugaagcagaacacccucaagcuggccaccggcaugcgcaacguccccgagaagcagacccgggggcuguucggcgccaucgccggguucaucgagaacggcugggaggggaugaucgacggcugguacggcuuccgccaccagaacagcgaggggaccggccaggcggccgaccucaaguccacgcaggccgccaucgaccagaucaacgggaagcugaaccgggugaucgagaagaccaacgagaaguuccaccagaucgagaaggaguucagcgagguggagggccgcauccaggaccuggagaaguacgucgaggacaccaagaucgaccucugguccuacaacgccgagcugcugguggcgcucgagaaccagcacaccaucgaccugacggacagcgagaugaacaagcuguucgagaagacccggcgccagcuccgggagaacgccgaggacauggggaacggcugcuucaagaucuaccacaagugcgacaacgccugcaucgaguccauccgcaacggcaccuacgaccacgacgucuaccgcgacgaggcccugaacaaccgguuccagaucaaggggguggagcucaagagcggcuacaaggacuggauccuguggaucuccuucgccaucagcugcuuccugcugugcgugguccuccugggguucaucaugugggcgugccagcgcggcaacauccggugcaacaucugcaucuga

SEQ ID NO: 64475 - RNA, 1698 nt, Artificial Sequence; identical to SEQ ID NO: 64388
  derived and/or modified CDS sequence (opt1) from hemagglutinin__InfluenzaA__ABB80045

SEQ ID NO: 64476 - RNA, 1701 nt, Artificial Sequence
  derived and/or modified CDS sequence (opt1) from hemagglutinin__InfluenzaA__ABB80081
augaagaccaucaucgcccugagcuacaucuccugccucguguucgcccagaagcugcccggcaacgacaacagcaccgcgacgcugugccucgggcaccacgccgucccgaacggcacccuggugaagaccaucaccaacgaccagaucgaggugacgaacgccaccgagcugguccaguccagcuccaccgggcgcaucugcgacagcccccaccggauccucgacggcgagaacugcacccugaucgacgcccugcucggggacccccacugcgacggcuuccagaacaaggagugggaccuguucguggagcgcuccaaggccuacagcaacugcuaccccuacgacgugccggacuacgcgucccugcggagccucgucgccuccagcggcacgcuggaguucaacaacgaguccuucaacuggaccgggguggcccagaacggcaccagcuacgccugcaagcgccgguccaucaagagcuucuucucccgccugaacuggcuccaccagcugaaguacaaguaccccgcgcugaacgugaccaugcccaacaacgacaaguucgacaagcucuacaucuggggcguccaccaccccagcacggacuccgaccagaccagccuguacgcccaggccagcgggcgggugaccguguccaccaagcgcagccagcagacggucaucccgaacaucgggucccggcccugggugcgcggcgugagcucccggaucagcaucuacuggaccaucgucaagcccggcgacauccugcucaucaacuccaccgggaaccugaucgcgccccgcggcuacuucaagauccggagcgggaaguccagcaucaugcgcuccgacgccccgaucggcaagugcaacagcgagugcaucacccccaacggcuccauccccaacgacaagcccuuccagaacgugaaccggaucacguacggggccugcccgcgcuacgugaagcagaacacccugaagcucgccaccggcaugcggaacguccccgagaagcagacccgcgggaucuucggcgccaucgccggguucaucgagaacggcugggagggcaugguggacgggugguacggcuuccggcaccagaacagcgaggggacgggccaggccgcggaccugaaguccacccaggccgccaucaaccagaucaacgggaagcugaaccgccucaucgagaagaccaacgagaaguuccaccagaucgagaaggaguucagcgagguggagggccggauccaggaccuggagaaguacgucgaggacaccaagaucgaccugugguccuacaacgccgagcuccugguggcccuggagaaccagcacacgaucgaccucaccgacagcgagaugaacaagcuguucgagcgcacccgcaagcagcugcgggagaacgcggaggacaugggcaacgggugcuucaagaucuaccacaagugcgacaacgccugcaucggcuccauccgcaacgggaccuacgaccacgacguguaccgggacgaggcccucaacaaccgcuuccagaucaagggcgucgagcucaagagcggguacaaggacuggauccuguggaucagcuucgccaucuccugcuuccugcugugcgugguccugcucggcuucaucaugugggccugccagaagggcaacauccggugcaacaucugcaucuga

SEQ ID NO: 64477 - RNA, 1701 nt, Artificial Sequence
  derived and/or modified CDS sequence (opt1) from hemagglutinin__InfluenzaA__ABB80092
augaagaccaucaucgcccugagcuacaucuccugccucguguucgcccagaagcugcccggcaacgacaacagcaccgcgacgcugugccucgggcaccacgccgucccgaacggcacccuggugaagaccaucaccaacgaccagaucgaggugacgaacgccaccgagcugguccaguccagcuccaccgggcgcaucugcgacagcccccaccggauccucgacggcgagaacugcacccugaucgacgcccugcucggggacccccacugcgacggcuuccagaacaaggagugggaccuguucguggagcgcuccaaggccuacagcaacugcuaccccuacgacgugccggacuacgcgucccugcggagccucgucgccuccagcggcacgcuggaguucaacaacgaguccuucaacuggaccgggguggcccagaacggcaccagcuacgccugcaagcgccgguccaucaagagcuucuucucccgccugaacuggcuccaccagcugaaguacaaguaccccgcgcugaacgugaccaugcccaacaacgacaaguucgacaagcucuacaucuggggcguccaccaccccagcacggacuccgaccagaccagccuguacgcccaggccagcgggcgggugaccguguccaccaagcgcagccagcagacggucaucccgaacaucgggucccggcccugggugcgcggcgugagcucccggaucagcaucuacuggacccuggucaagcccggcgacauccuccugaucaacuccaccgggaaccugaucgcgccccgcggcuacuucaagauccggagcgggaaguccagcaucaugcgcuccgacgccccgaucggcaagugcaacagcgagugcaucacccccaacggcuccauccccaacgacaagcccuuccagaacgugaaccggaucacguacggggccugcccgcgcuacgugaagcagaacacccucaagcuggccaccggcaugcggaacguccccgagaagcagacccgcgggaucuucggcgccaucgccggguucaucgagaacggcugggagggcaugguggacgggugguacggcuuccggcaccagaacagcgaggggacgggccaggccgcggaccugaaguccacccaggccgccaucaaccagaucaacgggaagcucaaccgccugaucgagaagaccaacgagaaguuccaccagaucgagaaggaguucagcgagguggagggccggauccaggaccuggagaaguacgucgaggacaccaagaucgaccucugguccuacaacgccgagcugcugguggcccucgagaaccagcacacgaucgaccugaccgacagcgagaugaacaagcuguucgagcgcacccgcaagcagcuccgggagaacgcggaggacaugggcaacgggugcuucaagaucuaccacaagugcgacaacgccugcaucggcuccauccgcaacgggaccuacgaccacgacguguaccgggacgaggcccugaacaaccgcuuccagaucaagggcgucgagcucaagagcggguacaaggacuggauccuguggaucagcuucgccaucuccugcuuccugcugugcgugguccuccugggcuucaucaugugggccugccagaagggcaacauccggugcaacaucugcaucuga

SEQ ID NO: 64478 - RNA, 1701 nt, Artificial Sequence; identical to SEQ ID NO: 64279
  derived and/or modified CDS sequence (opt1) from hemagglutinin__InfluenzaA__ABB80137

SEQ ID NO: 64479 - RNA, 1701 nt, Artificial Sequence; identical to SEQ ID NO: 64476
  derived and/or modified CDS sequence (opt1) from hemagglutinin__InfluenzaA__ABB80159

SEQ ID NO: 64480 - RNA, 1701 nt, Artificial Sequence; identical to SEQ ID NO: 64047
  derived and/or modified CDS sequence (opt1) from hemagglutinin__InfluenzaA__ABB80185

SEQ ID NO: 64481 - RNA, 1701 nt, Artificial Sequence
  derived and/or modified CDS sequence (opt1) from hemagglutinin__InfluenzaA__ABB80207
augaagaccaucaucgcccugagcuacauccucugccugguguucgcccagaagcugcccggcaacgacaacuccaccgcgacgcucugccuggggcaccacgccgucccgaacggcacccuggugaagaccaucaccaacgaccagaucgaggugacgaacgccaccgagcucguccagagcuccagcaccgggcgcaucugcgacagcccccaccggauccuggacggcgagaacugcacccugaucgacgcccuccugggggacccccacugcgacgacuuccagaacaaggagugggaccuguucguggagcgcagcaaggccuacuccaacugcuaccccuacgacgugccggacuacgcgagccuccggucccuggucgccagcuccggcacgcuggaguucaacaacgagagcuucaacuggaccggcguggcccagaacgggaccuccuacgccugcaagcgccggagcaucaaguccuucuucagccgccucaacuggcugcaccagcugaaguacaaguaccccgcgcucaacgugaccaugcccaacaacgacaaguucgacaagcuguacaucuggggcguccaccaccccuccacggacagcgaccagaccucccuguacgcccaggccagcgggcgggugaccgugagcaccaagcgcucccagcagacggucaucccgaacaucggcagccggcccugggugcgcgggguguccagccggaucuccaucuacuggaccaucgucaagcccggcgacauccuccugaucaacagcaccggcaaccugaucgcgccccgcggguacuucaagauccgguccggcaagagcuccaucaugcgcagcgacgccccgaucgggaagugcaacuccgagugcaucacccccaacggcagcauccccaacgacaagcccuuccagaacgugaaccggaucacguacggcgccugcccgcgcuacgugaagcagaacacccucaagcuggccaccgggaugcggaacguccccgagaagcagacccgcggcaucuucggggccaucgccggcuucaucgagaacgggugggagggcaugguggacggcugguacggguuccggcaccagaacuccgagggcacggggcaggccgcggaccugaaguccacccaggccgccaucaaccagaucaacggcaagcucaaccgccugaucgagaagaccaacgagaaguuccaccagaucgagaaggaguucuccgagguggaggggcggauccaggaccuggagaaguacgucgaggacaccaagaucgaccucuggagcuacaacgccgagcugcugguggcccucgagaaccagcacacgaucgaccugaccgacuccgagaugaacaagcuguucgagcgcacccgcaagcagcuccgggagaacgcggaggacaugggcaacggcugcuucaagaucuaccacaagugcgacaacgccugcaucgggagcauccgcaacggcaccuacgaccacgacguguaccgggacgaggcccugaacaaccgcuuccagaucaagggggucgagcugaaguccggcuacaaggacuggauccucuggaucagcuucgccaugagcugcuuccugcugugcgugguccuccugggguucaucaugugggccugccagaagggcaacauccggugcaacaucugcaucuga

SEQ ID NO: 64482 - RNA, 1701 nt, Artificial Sequence
  derived and/or modified CDS sequence (opt1) from hemagglutinin__InfluenzaA__ABB80229
augaagaccaucaucgcccugagcuacauccucugccugguguucgcccagaagcugcccggcaacgacaacuccaccgcgacgcucugccuggggcaccacgccgucccgaacggcacccuggugaagaccaucaccaacgaccagaucgaggugacgaacgccaccgagcucguccagagcuccagcaccgggcgcaucugcgacagcccccaccggauccuggacggcgagaacugcacccugaucgacgcccuccugggggacccccacugcgacggcuuccagaacaaggagugggaccuguucguggagcgcagcaaggccuacuccaacugcuaccccuacgacgugccggacuacgcgagccuccggucccuggucgccagcuccggcacgcuggaguucaacaacgagagcuucaacuggaccgggguggcccagaacggcaccuccuacgccugcaagcgccggagcaucaaguccuucuucagccgccucaacuggcugcaccagcugaaguacaaguaccccgcgcucaacgugaccaugcccaacaacgacaaguucgacaagcuguacaucuggggcguccaccaccccuccacggacagcgaccagaccucccuguacgcccaggccagcgggcgggugaccgugagcaccaagcgcucccagcagacggucaucccgaacaucgggagccggcccugggugcgcggcguguccagccggaucuccaucuacuggaccaucgucaagcccggcgacauccuccugaucaacagcaccgggaaccugaucgcgccccgcggcuacuucaagauccgguccgggaaguccuccaucaugcgcagcgacgccccgaucggcaagugcaacuccgagugcaucacccccaacggcagcauccccaacgacaagcccuuccagaacgugaaccggaucacguacggggccugcccgcgcuacgugaagcagaacacccucaagcuggccaccggcaugcggaacguccccgagaagcagacccgcgggaucuucggcgccaucgccggguucaucgagaacggcugggagggcaugguggacgggugguacggcuuccggcaccagaacuccgaggggacgggccaggccgcggaccucaagagcacccaggccgccaucaaccagaucaacgggaagcugaaccgccugaucgagaagaccaacgagaaguuccaccagaucgagaaggaguucuccgagguggagggccggauccaggaccuggagaaguacgucgaggacaccaagaucgaccucuggagcuacaacgccgagcugcugguggcccucgagaaccagcacacgaucgaccugaccgacuccgagaugaacaagcuguucgagcgcacccgcaagcagcuccgggagaacgcggaggacaugggcaacgggugcuucaagaucuaccacaagugcgacaacgccugcaucggcagcauccgcaacgggaccuacgaccacgacguguaccgggacgaggcccugaacaaccgcuuccagaucaagggcgucgagcugaaguccggguacaaggacuggauccucuggaucagcuucgccaugagcugcuuccugcugugcgugguccuccugggcuucaucaugugggccugccagaagggcaacauccggugcaacaucugcaucuga

SEQ ID NO: 64483 - RNA, 1701 nt, Artificial Sequence; identical to SEQ ID NO: 64476
  derived and/or modified CDS sequence (opt1) from hemagglutinin__InfluenzaA__ABB80240

SEQ ID NO: 64484 - RNA, 1701 nt, Artificial Sequence
  derived and/or modified CDS sequence (opt1) from hemagglutinin__InfluenzaA__ABB80251
augaagaccaucaucgcccugagcuacauccucugccugguguucgcccagaagcugcccggcaacgacaacuccaccgcgacgcucugccuggggcaccacgccgucccgaacggcacccuggugaagaccaucaccaacgaccagaucgaggugacgaacgccaccgagcucguccagagcuccagcaccgggcgcaucugcgacagcccccaccggauccuggacggcgagaacugcacccugaucgacgcccuccugggggacccccacugcgacggcuuccagaacaaggagugggaccuguucguggagcgcagcaaggccuacuccaacugcuaccccuacgacgugccggacuacgcgagccuccggucccuggucgccagcuccggcacgcuggaguucaacaacgagagcuucaacuggaccgggguggcccagaacggcaccuccagcgccugcaagcgccgguccaucaagagcuucuucucccgccucaacuggcugcaccagcugaaguacaaguaccccgcgcucaacgugaccaugcccaacaacgacaaguucgacaagcuguacaucuggggcguccaccaccccagcacggacuccgaccagaccagccuguacgcccaggccagcgggcgggugaccguguccaccaagcgcagccagcagacggucaucccgaacaucgggucccggcccugggugcgcggcgugagcucccggaucagcaucuacuggaccaucgucaagcccggcgacauccuccugaucaacuccaccgggaaccugaucgcgccccgcggcuacuucaagauccggagcgggaaguccagcaucaugcgcuccgacgccccgaucggcaagugcaacagcgagugcaucacccccaacggcuccauccccaacgacaagcccuuccagaacgugaaccggaucacguacggggccugcccgcgcuacgugaagcagaacacccucaagcuggccaccggcaugcggaacguccccgagaagcagacccgcgggaucuucggcgccaucgccggguucaucgagaacggcugggagggcaugguggacgggugguacggcuuccggcaccagaacagcgaggggacgggccaggccgcggaccugaaguccacccaggccgccaucaaccagaucaacgggaagcucaaccgccugaucgagaagaccaacgagaaguuccaccagaucgagaaggaguucagcgagguggagggccggauccaggaccuggagaaguacgucgaggacaccaagaucgaccucugguccuacaacgccgagcugcugguggcccucgagaaccagcacacgaucgaccugaccgacagcgagaugaacaagcuguucgagcgcacccgcaagcagcuccgggagaacgcggaggacaugggcaacgggugcuucaagaucuaccacaagugcgacaacgccugcaucggcuccauccgcaacgggaccuacgaccacgacguguaccgggacgaggcccugaacaaccgcuuccagaucaagggcgucgagcugaaguccggguacaaggacuggauccucuggaucagcuucgccaucuccugcuuccugcugugcgugguccuccugggccugaucaugugggccugccagaagggcaacauccggugcaacaucugcaucuga

SEQ ID NO: 64485 - RNA, 1701 nt, Artificial Sequence
  derived and/or modified CDS sequence (opt1) from hemagglutinin__InfluenzaA__ABB80492
augaagaccaucaucgcccugagcuacauccucugccugguguucgcccagaagcugcccggcaacgacaacuccaccgcgacgcucugccuggggcaccacgccgucccgaacggcacccuggugaagaccaucaccaacgaccagaucgaggugacgaacgccaccgagcucguccagaacagcuccaccgggcgcaucugcgacagcccccaccggauccuggacggcgagaacugcacccugaucgacgcccuccugggggacccccacugcgacggcuuccagaacaaggagugggaccuguucguggagcgcuccaaggccuacagcaacugcuaccccuacgacgugccggacuacgcgucccuccggagccuggucgccuccagcggcacgcuggaguucaacaacgaguccuucaacuggaccgggguggcccagaacggcaccagcuacgccugcaagcgccgguccaucaagagcuucuucucccgccucaacuggcugcaccagcugaaguacaaguaccccgcgcucaacgugaccaugcccaacaacgacaaguucgacaagcuguacaucuggggcguccaccaccccagcacggacuccgaccagaccagccuguacgcccaggccuccgggcgggugaccgugagcaccaagcgcagccagcagacggucaucccgaacaucgggucccggcccugggugcgcggcgugagcucccggaucagcaucuacuggaccaucgucaagcccggcgacauccuccugaucaacuccaccgggaaccugaucgcgccccgcggcuacuucaagauccggagcgggaaguccagcaucaugcgcuccgacgccccgaucggcaagugcaacagcgagugcaucacccccaacggcuccauccccaacgacaagcccuuccagaacgugaaccggaucacguacggggccugcccgcgcuacgugaagcagaacacccucaagcuggccaccggcaugcggaacguccccgagaagcagacccgcgggaucuucggcgccaucgccggguucaucgagaacggcugggagggcaugguggacgggugguacggcuuccggcaccagaacagcgaggggacgggccaggccgcggaccugaaguccacccaggccgccaucaaccagaucaacgggaagcucaaccgccugaucgagaagaccaacgagaaguuccaccagaucgagaaggaguucagcgagguggagggccggauccaggaccuggagaaguacgucgaggacaccaagaucgaccucugguccuacaacgccgagcugcugguggcccucgagaaccagcacacgaucgaccugaccgacagcgagaugaacaagcuguucgagcgcacccgcaagcagcuccgggagaacgcggaggacaugggcaacgggugcuucaagaucuaccacaagugcgacaacgccugcaucggcuccauccgcaacgggaccuacgaccacgacguguaccgggacgaggcccugaacaaccgcuuccagaucaagggcgucgagcucaagagcggguacaaggacuggauccuguggaucuccuucgccaugagcugcuuccugcugugcgugguccuccugggcuucaucaugugggccugccagaagggcaacauccggugcaacaucugcaucuga

SEQ ID NO: 64486 - RNA, 1701 nt, Artificial Sequence
  derived and/or modified CDS sequence (opt1) from hemagglutinin__InfluenzaA__ABB80503
augaagaccaucaucgcccugagcuacaucuccugccucguguucgcccagaagcugcccggcaacgacaacaacaccgcgacgcugugccucgggcaccacgccgucccgaacggcacccuggugaagaccaucaccaacgaccagaucgaggugacgaacgccaccgagcugguccagagcuccagcaccgggcgcaucugcgacagcccccaccggauccucgacggcgagaacugcacccugaucgacgcccugcucggggacccccacugcgacggcuuccagaacaaggagugggaccuguucguggagcgcagcaaggccuacuccaacugcuaccccuacgacgugccggacuacgcgagccugcggucccucgucgccagcuccggcacgcuggaguucaacaacgagagcuucaacuggaccgggguggcccagaacggcaccuccuacgccugcaagcgccggagcaucaaguccuucuucagccgccugaacuggcuccaccagcugaaguacaaguaccccgcgcugaacgugaccaugcccaacaacgacaaguucgacaagcucuacaucuggggcguccaccaccccuccacggacagcgaccagaccucccuguacgcccaggccagcgggcgggugaccgugagcaccaagcgcucccagcagacggucaucccgaacaucgggagccggcccugggugcgcggcguguccagccggaucuccaucuacuggaccaucgucaagcccggcgacauccugcucaucaacagcaccgggaaccugaucgcgccccgcggcuacuucaagauccgguccgggaaguccuccaucaugcgcagcgacgccccgaucggcaagugcaacuccgagugcaucacccccaacggcagcauccccaacgacaagcccuuccagaacgugaaccggaucacguacggggccugcccgcgcuacgugaagcagaacacccugaagcucgccaccggcaugcggaacguccccgagaagcagacccgcgggaucuucggcgccaucgccggguucaucgagaacggcugggagggcaugguggacgggugguacggcuuccggcaccagaacuccgaggggacgggccaggccgcggaccucaagagcacccaggccgccaucaaccagaucaacgggaagcugaaccgccugaucgagaagaccaacgagaaguuccaccagaucgagaaggaguucuccgagguggagggccggauccaggaccuggagaaguacgucgaggacaccaagaucgaccuguggagcuacaacgccgagcuccugguggcccuggagaaccagcacacgaucgaccucaccgacuccgagaugaacaagcuguucgagcgcacccgcaagcagcugcgggagaacgcggaggacaugggcaacgggugcuucaagaucuaccacaagugcgacaacgccugcaucggcagcauccgcaacgggaccuacgaccacgacguguaccgggacgaggcccucaacaaccgcuuccagaucaagggcgucgagcugcgguccggguacaaggacuggauccuguggaucagcuucgccaucagcugcuuccuccugugcgugguccugcucggcuucaucaugugggccugccagaagggcaacauccgcugcaacaucugcaucuga

SEQ ID NO: 64487 - RNA, 1701 nt, Artificial Sequence; identical to SEQ ID NO: 64476
  derived and/or modified CDS sequence (opt1) from hemagglutinin__InfluenzaA__ABB80514

SEQ ID NO: 64488 - RNA, 1701 nt, Artificial Sequence
  derived and/or modified CDS sequence (opt1) from hemagglutinin__InfluenzaA__ABB80529
augaagaccaucaucgcccugagcuacaucuccugccucguguucgcccagaagcugcccggcaacgacaacagcaccgcgacgcugugccucgggcaccacgccgucccgaacggcacccuggugaagaccaucaccaacgaccagaucgaggugacgaacgccaccgagcugguccaguccagcuccaccgggcgcaucugcgacagcccccaccggauccucgacggcgagaacugcacccugaucgacgcccugcucggggacccccacugcgacggcuuccagaacaaggagugggaccuguucguggagcgcuccaaggccuacagcaacugcuaccccuacgacgugccggacuacgcgucccugcggagccucgucgccuccagcggcacgcuggaguucaacaacgaguccuucaacuggaccgggguggcccagaacggcaccagcuacgccugcaagcgccgguccaucaagagcuucuucucccgccugaacuggcuccaccagcugaaguacaaguaccccgcgcugaacgugaccaugcccaacaacgacaaguucgacaagcucuacaucuggggcguccaccaccccagcacggacuccgaccagaccagccuguacgcccaggccagcgggcgggugaccguguccaccaagcgcagccagcagacggucaucccgaacaucgggucccggcccugggugcgcggcgugagcucccggaucagcaucuacuggaccaucgucaagcccggcgacauccugcucaucaacuccaccgggaaccugaucgcgccccgcggcuacuucaagauccggagcgggaaguccagcaucaugcgcuccgacgccccgaucggcaagugcaacagcgagugcaucacccccaacggcuccauccccaacgacaagcccuuccagaacgugaaccggaucacguacggggccugcccgcgcuacgugaagcagaacacccugaagcucgccaccggcaugcggaacguccccgacaagcagacccgcgggaucuucggcgccaucgccggguucaucgagaacggcugggagggcaugguggacgggugguacggcuuccggcaccagaacagcgaggggacgggccaggccgcggaccugaaguccacccaggccgccaucaaccagaucaacgggaagcugaaccgccucaucgagaagaccaacgagaaguuccaccagaucgagaaggaguucagcgagguggagggccggauccaggaccuggagaaguacgucgaggacaccaagaucgaccugugguccuacaacgccgagcuccugguggcccuggagaaccagcacacgaucgaccucaccgacagcgagaugaacaagcuguucgagcgcacccgcaagcagcugcgggagaacgcggaggacaugggcaacgggugcuucaagaucuaccacaagugcgacaacgccugcaucggcuccauccgcaacgggaccuacgaccacgacguguaccgggacgaggcccucaacaaccgcuuccagaucaagggcgucgagcucaagagcggguacaaggacuggauccuguggaucagcuucgccaucuccugcuuccugcugugcgugguccugcucggcuucaucaugugggccugccagaagggcaacauccggugcaacaucugcaucuga

SEQ ID NO: 64489 - RNA, 1701 nt, Artificial Sequence
  derived and/or modified CDS sequence (opt1) from hemagglutinin__InfluenzaA__ABB80641
augaagaccaucaucgcccugagcuacauccucugccugguguucgcccagaagauccccggcaacgacaacuccaccgcgacgcugugccucgggcaccacgccgucccgaacggcacccuggugaagaccaucaccaacgaccagaucgaggugacgaacgccaccgagcugguccagagcuccagcaccgggcgcaucugcgacagcccccaccggauccucgacggcgagaacugcacccugaucgacgcccugcucggggacccccacugcgacggcuuccagaacaaggagugggaccuguucguggagcgcagcaaggccuacuccaacugcuaccccuacgacgugagcgacuacgcgucccugcggagccucgucgccuccagcggcacgcuggaguucaacaacgaguccuucaacuggaccgggguggcccagaacggcaccagcuacgccugcaagcgccgguccaucaagagcuucuucucccgccugaacuggcuccaccagcugaaguacaaguacccggcgcugaacgugaccaugcccaacaacgacaaguucgacaagcucuacaucuggggcguccaccaccccagcacggacuccgaccagaccagccuguacgcccaggccagcgggcgggugaccguguccaccaagcgcagccagcagacggucauccccaacaucgggucccggccgugggugcgcggcgugagcucccggaucagcaucuacuggaccaucgucaagcccggcgacauccugcucaucaacuccaccgggaaccugaucgcgccccgcggcuacuucaagauccggagcgggaaguccagcaucaugcgcuccgacgcccccaucggcaagugcaacagcgagugcaucaccccgaacggcuccauccccaacgacaagcccuuccagaacgugaaccggaucacguacggggccugcccccgcuacgugaagcagaacacccugaagcucgccaccggcaugcggaacgucccggagaagcagacccgcgggaucuucggcgccaucgccggguucaucgagaacggcugggagggcaugguggacgggugguacggcuuccggcaccagaacagcgaggggacgggccaggccgcggaccugaaguccacccaggccgccaucaaccagaucaacgggaagcugaaccgccucaucgagaagaccaacgagaaguuccaccagaucgagaaggaguucagcgagguggagggccggauccaggaccuggagaaguacgucgaggacaccaagaucgaccugugguccuacaacgccgagcuccugguggcccuggagaaccagcacacgaucgaccucaccgacagcgagaugaacaagcuguucgagcgcacccgcaagcagcugcgggagaacgcggaggacaugggcaacgggugcuucaagaucuaccacaagugcgacaacgccugcaucggcuccauccgcaacgggaccuacgaccacgacguguaccgggacgaggcccucaacaaccgcuuccagaucaagggcgucgagcugaaguccggguacaaggacuggauccuguggaucagcuucgccaucuccugcuuccuccugugcgugguccugcucggcuucaucaugugggccugccagaagggcaacauccggugcaacaucugcaucuga

SEQ ID NO: 64490 - RNA, 1701 nt, Artificial Sequence
  derived and/or modified CDS sequence (opt1) from hemagglutinin__InfluenzaA__ABB80661
augaagaccaucaucgcccugagcuacauccucugccugguguucgcccagaagauccccggcaacgacaacuccaccgcgacgcugugccucgggcaccacgccgucccgaacggcacccuggugaagaccaucaccaacgaccagaucgaggugacgaacgccaccgagcugguccagagcuccagcaccgggcgcaucugcgacagcccccaccggauccucgacggcgagaacugcacccugaucgacgcccugcucggggacccccacugcgacggcuuccagaacaaggagugggaccuguucguggagcgcagcaaggccuacuccaacugcuaccccuacgacgugccggacuacgcgagccugcggucccucgucgccagcuccggcacgcuggaguucaacaacgagagcuucaacuggaccgggguggcccagaacggcaccuccuacgccugcaagcgccggagcaucaaguccuucuucagccgccugaacuggcuccaccagcugaaguacaaguaccccgcgcugaacgugaccaugcccaacaacgacaaguucgacaagcucuacaucuggggcguccaccaccccuccacggacagcgaccaggccucccuguacgcccaggccagcgggcgggugaccgugagcaccaagcgcucccagcagaccgucaucccgaacaucgggagccggcccugggugcgcggcguguccagccggaucuccaucuacuggacgaucgucaagcccggcgacauccugcucaucaacagcaccgggaaccugaucgcgccccgcggcuacuucaagauccgguccgggaaguccuccaucaugcgcagcgacgccccgaucggcaagugcaacuccgagugcaucacccccaacggcagcauccccaacgacaagcccuuccagaacgugaaccggaucaccuacggggccugcccgcgcuacgugaagcagaacacgcugaagcucgccaccggcaugcggaacguccccgagaagcagacccgcgggaucuucggcgccaucgccggguucaucgagaacggcugggagggcaugguggacgggugguacggcuuccggcaccagaacuccgaggggaccggccaggcggccgaccucaagagcacgcaggccgccaucaaccagaucaacgggaagcugaaccgccugaucgagaagaccaacgagaaguuccaccagaucgagaaggaguucuccgagguggagggccggauccaggaccuggagaaguacgucgaggacaccaagaucgaccuguggagcuacaacgccgagcuccugguggcgcuggagaaccagcacaccaucgaccucacggacuccgagaugaacaagcuguucgagcgcacccgcaagcagcugcgggagaacgccgaggacaugggcaacgggugcuucaagaucuaccacaagugcgacaacgccugcaucggcagcauccgcaacgggaccuacgaccacgacguguaccgggacgaggcccucaacaaccgcuuccagaucaagggcgucgagcugaaguccggguacaaggacuggauccuguggaucagcuucgccaucagcugcuuccuccugugcgugguccugcucggcuucaucaugugggcgugccagaagggcaacauccggugcaacaucugcaucuga

SEQ ID NO: 64491 - RNA, 1701 nt, Artificial Sequence
  derived and/or modified CDS sequence (opt1) from hemagglutinin__InfluenzaA__ABB80672
augaagaccaucaucgcccugagcuacauccucugccugguguucgcccagaagcugcccggcaacgacaacuccaccgcgacgcucugccuggggcaccacgccgucccgaacggcacccuggugaagaccaucaccaacgaccagaucgaggugacgaacgccaccgagcucguccaggggagcuccaccggccgcaucugcgacagcccccaccagauccuggacgggaagaacugcacccugaucgacgcccuccugggcgacccccacugcgacggcuuccagaacaaggagugggaccuguucguggagcgguccacggccuacagcaacugcuaccccuacgacgugccggacuacgcgucccuccgcagccuggucgccuccagcgggacccuggaguucaccaaggagggcuucaacuggaccgggguggcccaggacggcacguccuacgccugcaagcgggggagcgugaaguccuucuucagccgccucaacuggcugcacaagcuggaguacaaguaccccgcgcucaacgucaccaugcccaacaacgacaaguucgacaagcuguacaucuggggcgugcaccaccccuccaccgacagcgaccagaccucccuguacgugcaggccagcggccgggucacgguguccaccaagcgcagccagcagaccgugaucccgaacaucgggagccggcccuggguccgcggcguguccagccggaucuccaucuacuggaccaucgugaagcccggggacauccuccugaucaacagcacgggcaaccugaucgcgccccgcggcuacuucaagauccgguccggcaagagcuccaucaugcgcagcgacgccccgaucgacaacugcaacuccgagugcaucacccccaacgggagcauccccaacgacaagcccuuccagaacgucaaccggaucaccuacggggccugcccgcgcuacgugaagcagaacacccucaagcuggccacgggcaugcggaacgugcccgagaagcagacccgcgggaucuucggcgccaucgccggcuucaucgagaacgggugggagggcauggucgacgggugguacggcuuccggcaccagaacuccgaggggaccggccaggccgccgaccucaagagcacccaggcggccaucaaccagaucaacggcaagcugaaccgccugaucgagaagacgaacgagaaguuccaccagaucgagaaggaguucuccgagguggaggggcggauccaggaccuggagaaguacguggaggacaccaagaucgaccucuggagcuacaacgccgagcugcuggucgcccucgagaaccagcacaccaucgaccugaccgacuccgagaugaacaagcuguucgagcgcacgcggaagcagcuccgcgagaacgccgaggacaugggcaacgggugcuucaagaucuaccacaagugcgacaacgcgugcaucggcagcauccgcaacgggaccuacgaccacgacguguaccgggacgaggcccugaacaaccgcuuccagaucaagggcgucgagcugaaguccggcuacaaggacuggauccucuggaucagcuucgccaucuccugcuuccugcugugcguggugcuccugggguucaucaugugggccugccagaagggcaacauccggugcaacaucugcaucuga

SEQ ID NO: 64492 - RNA, 1701 nt, Artificial Sequence
  derived and/or modified CDS sequence (opt1) from hemagglutinin__InfluenzaA__ABB80682
augaagaccaucaucgcccugagcuacaucuccugccucguguucgcccagaagcugcccggcaacgacaacagcaccgcgacgcugugccucgggcaccacgccgucccgaacggcacccuggugaagaccaucaccaacgaccagaucgaggugacgaacgccaccgagcugguccaguccagcuccaccgggcgcaucugcgacagcccccaccggauccucgacggcgagaacugcacccugaucgacgcccugcucggggacccccacugcgacggcuuccagaacaaggagugggaccuguucguggagcgcuccaaggccuacagcaacugcuaccccuacgacgugccggacuacgcgucccugcggagccucgucgccuccagcggcacgcuggaguucaacaacgaguccuucaacuggaccgggguggcccagaacggcaccagcuacgccugcaagcgccgguccaucaagagcuucuucucccgccugaacuggcuccaccagcugaaguacaaguaccccgcgcugaacgugaccaugcccaacaacgacaaguucgacaagcucuacaucuggggcguccaccaccccagcacggacuccgaccagaccagccuguacgcccaggccagcgggcgggugaccguguccaccaagcgcagccagcagacggucaucccgaacaucgggucccggcccugggugcgcggcgugagcucccggaucagcaucuacuggaccaucgucaagcccggcgacauccugcucaucaacuccaccgggaaccugaucgcgccccgcggcuacuucaagauccggagcgggaaguccagcaucaugcgcuccgacgccccgaucggcaagugcaacagcgagugcaucacccccaacggcuccauccccaacgacaagcccuuccagaacgugaaccggaucacguacggggccugcccgcgcuacgugaagcagaacacccugaagcucgccaccggcaugcggaacguccccgagaagcagacccgcgggaucuucggcgccaucgccggguucaucgagaacggcugggagggcaugguggacgggugguacggcuuccggcaccagaacagcgaggggacgggccaggccgcggaccugaaguccacccaggccgccaucaaccagaucaacgggaagcugaaccgccucaucgagaagaccaacgagaaguuccaccagaucgagaaggaguucagcgagguggagggccggauccaggaccuggagaaguacgucgaggacaccaagaucgaccugugguccuacaacgccgagcuccugguggcccuggagaaccagcacacgaucgaccucaccgacagcgagaugaacaagcugcuggagcgcacccgcaagcagcuccgggagaacgcggaggacaugggcaacgggugcuucaagaucuaccacaagugcgacaacgccugcaucggcuccauccgcaacgggaccuacgaccacgacguguaccgggacgaggcccugaacaaccgcuuccagaucaagggcgucgagcucaagagcggguacaaggacuggauccuguggaucagcuucgccaucuccugcuuccugcugugcgugguccuccugggcuucaucaugugggccugccagaagggcaacauccggugcaacaucugcaucuga

SEQ ID NO: 64493 - RNA, 1701 nt, Artificial Sequence
  derived and/or modified CDS sequence (opt1) from hemagglutinin__InfluenzaA__ABB80693
augaagaccaucaucgcccugagcuacaucuccugccucguguucgcccagaagcugcccggcaacgacaacagcaccgcgacgcugugccucgggcaccacgccgucccgaacggcacccuggugaagaccaucaccaacgaccagaucgaggugacgaacgccaccgagcugguccaguccagcuccaccgggcgcaugugcgacagcccccaccggauccucgacggcgagaacugcacccugaucgacgcccugcucggggacccccacugcgacggcuuccagaacaaggagugggaccuguucguggagcgcuccaaggccuacagcaacugcuaccccuacgacgugccggacuacgcgucccugcggagccucgucgccuccagcggcacgcuggaguucaacaacgaguccuucaacuggaccgggguggcccagaacggcaccagcuacgccugcaagcgccgguccaucaagagcuucuucucccgccugaacuggcuccaccagcugaaguacaaguaccccgcgcugaacgugaccaugcccaacaacgacaaguucgacaagcucuacaucuggggcguccaccaccccagcacggacuccgaccagaccagccuguacgcccaggccagcgggcgggugaccguguccaccaagcgcagccagcagacggucaucccgaacaucgggucccggcccugggugcgcggcgugagcucccggaucagcaucuacuggaccaucgucaagcccggcgacauccugcucaucaacuccaccgggaaccugaucgcgccccgcggcuacuucaagauccggagcgggaaguccagcaucaugcgcuccgacgccccgaucggcaagugcaacagcgagugcaucacccccaacggcuccauccccaacgacaagcccuuccagaacgugaaccggaucacguacggggccugcccgcgcuacgugaagcagaacacccugaagcucgccaccggcaugcggaacguccccgagaagcagacccgcgggaucuucggcgccaucgccggguucaucgagaacggcugggagggcaugguggacgggugguacggcuuccggcaccagaacagcgaggggacgggccaggccgcggaccugaaguccacccaggccgccaucaaccagaucaacgggaagcugaaccgccucaucgagaagaccaacgagaaguuccaccagaucgagaaggaguucagcgagguggagggccggauccaggaccuggagaaguacgucgaggacaccaagaucgaccugugguccuacaacgccgagcuccugguggcccuggagaaccagcacacgaucgaccucaccgacagcgagaugaacaagcuguucgagcgcacccgcaagcagcugcgggagaacgcggaggacaugggcaacgggugcuucaagaucuaccacaagugcgacaacgccugcaucggcuccauccgcaacgggaccuacgaccacgacguguaccgggacgaggcccucaacaaccgcuuccagaucaagggcgucgagcucaagagcggguacaaggacuggauccuguggaucagcuucgccaucuccugcuuccugcugugcgugguccugcucggcuucaucaugugggccugccagaagggcaacauccggugcaacaucugcaucuga

SEQ ID NO: 64494 - RNA, 1701 nt, Artificial Sequence
  derived and/or modified CDS sequence (opt1) from hemagglutinin__InfluenzaA__ABB80704
augaagaccaucaucgcccugagcuacauccucugccugguguucgcccagaagauccccggcaacgacaacuccaccgcgacgcugugccucgggcaccacgccgucccgaacggcacccuggugaagaccaucaccaacgaccagaucgaggugacgaacgccaccgagcugguccagagcuccagcaccgggcgcaucugcgacagcccccaccggauccucgacggcgagaacugcacccugaucgacgcccugcucggggacccccacugcgacggcuuccagaacaaggagugggaccuguucguggagcgcagcaaggccuacuccaacugcuaccccuacgacgugccggacuacgcgagccugcggucccucgucgccagcuccggcacgcuggaguucaacaacgagagcuucaacuggaccgggguggcccagaacggcaccuccuacgccugcaagcgccggagcaucaaguccuucuucagccgccugaacuggcuccaccagcugaaguacaaguaccccgcgcugaacgugaccaugcccaacaacgacaaguucgacaagcucuacaucuggggcguccaccaccccuccacggacagcgaccagaccucccuguacgcccaggccagcgggcgggugaccgugagcaccaagcgcucccagcagacggucaucccgaacaucgggagccggcccugggugcgcggcguguccagccggaucuccaucuacuggaccaucgucaagcccggcgacauccugcucaucaacagcaccgggaaccugaucgcgccccgcggcuacuucaagauccgguccgggaaguccuccaucaugcgcagcgacgccccgaucggcaagugcaacuccgagugcaucacccccaacggcagcauccccaacgacaagcccuuccagaacgugaaccggaucacguacggggccugcccgcgcuacgugaagcagaacacccugaagcucgccaccggcaugcggaacguccccgagaagcagacccgcgggaucuucggcgccaucgccggguucaucgagaacggcugggagggcaugguggacgggugguacggcuuccggcaccagaacuccgaggggacgggccaggccgcggaccucaagagcacccaggccgccaucaaccagaucaacgggaagcugaaccgccugaucgagaagaccaacgagaaguuccaccagaucgagaaggaguucuccgagguggagggccggauccaggaccuggagaaguacgucgaggacaccaagaucgaccuguggagcuacaacgccgagcuccugguggcccuggagaaccagcacacgaucgaccucaccgacuccgagaugaacaagcuguucgagcgcacccgcaagcagcugcgggagaacgcggaggacaugggcaacgggugcuucaagaucuaccacaagugcgacaacgccugcaucggcagcauccgcaacgggaccuacgaccacgacguguaccgggacgaggcccucaacaaccgcuuccagaucaagggcgucgagcugaaguccggguacaaggacuggauccuguggaucagcuucgccaucagcugcuuccuccugugcgugguccugcucggcuucaucaugugggccugccagaagggcaacauccggugcaacaucugcaucuga

SEQ ID NO: 64495 - RNA, 1701 nt, Artificial Sequence; identical to SEQ ID NO: 64476
  derived and/or modified CDS sequence (opt1) from hemagglutinin__InfluenzaA__ABB80715

SEQ ID NO: 64496 - RNA, 1701 nt, Artificial Sequence
  derived and/or modified CDS sequence (opt1) from hemagglutinin__InfluenzaA__ABB80724
augaagaccaucaucgcccugagcuacauccucugccugguguucgcccagaagcugcccggcaacgacaacuccaccgcgacgcucugccuggggcaccacgccgucccgaacggcacccuggugaagaccaucaccaacgaccagaucgaggugacgaacgccaccgagcucguccagagcuccagcaccgggcgcaucugcgacagcccccaccggauccuggacggcgagaacugcacccugaucgacgcccuccugggggacccccacugcgacggcuuccagaacaaggagugggaccuguucguggagcgcagcaaggccuacuccaacugcuaccccuacgacgugccggacuacgcgagccuccggucccuggucgccagcuccggcacgcuggaguucaacaacgagagcuucaacuggaccgggguggcccagaacggcaccuccuacgccugcaagcgccggagcaucaaguccuucuucagccgccucaacuggcugcaccagcugaaguacaaguaccccgcgcucaacgugaccaugcccaacaacgacaaguucgacaagcuguacaucuggggcguccaccaccccuccacggacagcgaccaggccucccuguacgcccaggccagcgggcgggugaccgugagcaccaagcgcucccagcagaccgucaucccgaacaucgggagccggcccugggugcgcggcguguccagccggaucuccaucuacuggacgaucgucaagcccggcgacauccuccugaucaacagcaccgggaaccugaucgcgccccgcggcuacuucaagauccgguccgggaaguccuccaucaugcgcagcgacgccccgaucggcaagugcaacuccgagugcaucacccccaacggcagcauccccaacgacaagcccuuccagaacgugaaccggaucaccuacggggccugcccgcgcuacgugaagcagaacacgcucaagcuggccaccggcaugcggaacguccccgagaagcagacccgcgggaucuucggcgccaucgccggguucaucgagaacggcugggagggcaugguggacgggugguacggcuuccggcaccagaacuccgaggggaccggccaggcggccgaccucaagagcacgcaggccgccaucaaccagaucaacgggaagcugaaccgccugaucgagaagaccaacgagaaguuccaccagaucgagaaggaguucuccgagguggagggccggauccaggaccuggagaaguacgucgaggacaccaagaucgaccucuggagcuacaacgccgagcugcugguggcgcucgagaaccagcacaccaucgaccugacggacuccgagaugaacaagcuguucgagcgcacccgcaagcagcuccgggagaacgccgaggacaugggcaacgggugcuucaagaucuaccacaagugcgacaacgccugcaucggcagcauccgcaacgggaccuacgaccacgacguguaccgggacgaggcccugaacaaccgcuuccagaucaagggcgucgagcugaaguccggguacaaggacuggauccucuggaucagcuucgccaugagcugcuuccugcugugcgugguccuccugggcuucaucaugugggcgugccagaagggcaacauccggugcaacaucugcaucuga

SEQ ID NO: 64497 - RNA, 1701 nt, Artificial Sequence; identical to SEQ ID NO: 64482
  derived and/or modified CDS sequence (opt1) from hemagglutinin__InfluenzaA__ABB80737

SEQ ID NO: 64498 - RNA, 1701 nt, Artificial Sequence
  derived and/or modified CDS sequence (opt1) from hemagglutinin__InfluenzaA__ABB80748
augaagaccaucaucgcccugagcuacaucuccugccucguguucgcccagaagcugcccggcaacgacaacagcaccgcgacgcugugccucgggcaccacgccgucccgaacggcacccuggugaagaccaucaccaacgaccagaucgaggugacgaacgccaccgagcugguccaguccagcuccaccgggcgcaucugcgacagcccccaccggauccucgacggcgagaacugcacccugaucgacgcccugcucggggacccccacugcgacggcuuccagaacaaggagugggaccuguucguggagcgcuccaaggccuacagcaacugcuaccccuacgacgugccggacuacgcgucccugcggagccucgucgccuccagcggcacgcuggaguucaacaacgaguccuucaacuggaccgggguggcccagaacggcaccagcuacgccugcaagcgccgguccaucaagagcuucuucucccgccugaacuggcuccaccagcugaaguacaaguaccccgcgcugaacgugaccaugcccaacaacgacaaguucgacaagcucuacaucuggggcguccaccaccccagcacggacuccgaccagaccagccuguacgcccaggccagcgggcgggugaccguguccacccagcgcagccagcagacggucaucccgaacaucgggucccggcccugggugcgcggcgugagcucccggaucagcaucuacuggaccaucgucaagcccggcgacauccugcucaucaacuccaccgggaaccugaucgcgccccgcggcuacuucaagauccggagcgggaaguccagcaucaugcgcuccgacgccccgaucggcaagugcaacagcgagugcaucacccccaacggcuccauccccaacgacaagcccuuccagaacgugaaccggaucacguacggggccugcccgcgcuacgugaagcagaacacccugaagcucgccaccggcaugcggaacguccccgagaagcagacccgcgggaucuucggcgccaucgccggguucaucgagaacggcugggagggcaugguggacgggugguacggcuuccggcaccagaacagcgaggggacgggccaggccgcggaccugaaguccacccaggccgccaucaaccagaucaacgggaagcugaaccgccucaucgagaagaccaacgagaaguuccaccagaucgagaaggaguucagcgagguggagggccggauccaggaccuggaggaguacgucgaggacaccaagaucgaccugugguccuacaacgccgagcuccugguggcccuggagaaccagcacacgaucgaccucaccgacagcgagaugaacaagcuguucgagcgcacccgcaagcagcugcgggagaacgcggaggacaugggcaacgggugcuucaagaucuaccacaagugcgacaacgccugcaucggcuccauccgcaacgggaccuacgaccacgacguguaccgggacgaggcccucaacaaccgcuuccagaucaagggcgucgagcucaagagcggguacaaggacuggauccuguggaucagcuucgccaucuccugcuuccugcugugcgugguccugcucggcuucaucaugugggccugccagaagggcaacauccggugcaacaucugcaucuga

SEQ ID NO: 64499 - RNA, 1701 nt, Artificial Sequence
  derived and/or modified CDS sequence (opt1) from hemagglutinin__InfluenzaA__ABB82183
augaagaccaucaucgcccugagcuacauccucugccugguguucgcccagaagcugcccggcaacgacaacuccaccgcgacgcucugccuggggcaccacgccgucccgaacggcacccuggugaagaccaucaccaacgaccagaucgaggugacgaacgccaccgagcucguccagagcuccagcaccgggcgcaucugcgacagcccccaccagauccuggacggcgagaacugcacccugaucgacgcccuccugggggacccccacugcgacggcuuccagaacaaggagugggaccuguucguggagcggagcaaggccuacuccaacugcuaccccuacgacgugccggacuacgcgagccuccgcucccuggucgccagcuccggcacgcuggaguucaacaacgagagcuucaacuggaccgggguggcccagaacggcaccuccagcgccugcaagcggcgcuccaacaagagcuucuucucccggcucaacuggcugcaccagcugaaguacaaguaccccgcgcucaacgugaccaugcccaacaacgagaaguucgacaagcuguacaucuggggcguccaccaccccagcacggacuccgaccagaucagccuguacgcccaggccagcgggcgcgugaccguguccaccaagcggagccagcagaccgucaucccgaacaucgggucccgccccugggugcggggcgugagcucccgcaucagcaucuacuggacgaucgucaagcccggcgacauccuccugaucaacuccaccgggaaccugaucgcgccccggggcuacuucaagauccgcagcgggaaguccagcgugaugcgguccgacgccagcaucggccgcugcaacuccgagugcaucaccccgaacggcagcauccccaacgacaagcccuuccagaacgugaaccggaucaccuacggggccugcccccgcuacgucaagcagaacacgcucaagcuggccaccggcaugcggaacgugccggagaagcagacccgcgggaucuucggcgccaucgccggguucaucgagaacggcugggagggcaugguggacgggugguacggcuuccggcaccagaacuccgaggggaccggccaggccgcggaccugaaguccacgcaggccgccaucaaccagaucaacgggaagcucaaccgccugaucgagaagaccaacgagaaguuccaccagaucgagaaggaguucuccgaggucgagggccggauccaggaccuggagaaguacguggaggacaccaagaucgaccucuggagcuacaacgccgagcugcugguggcccucgagaaccagcacaccaucgaccugacggacuccgagaugaacaagcuguucgagcgcaccaagaagcagcuccgcgagaacgcggaggacaugggcaacgggugcuucaagaucuaccacaagugcgacaacgccugcaucggcagcauccggaacgggaccuacgaccacgacgucuaccgcgacgaggcccugaacaaccgguuccagaucaagggcguggagcucaagagcggguacaaggacuggauccuguggaucuccuucgccaucagcugcuuccugcugugcgucgugcuccugggcuucaucaugugggccugccagaagggcaacauccgcugcaacaucugcaucuga

SEQ ID NO: 64500 - RNA, 1698 nt, Artificial Sequence; identical to SEQ ID NO: 64320
  derived and/or modified CDS sequence (opt1) from hemagglutinin__InfluenzaA__ABB82194

SEQ ID NO: 64501 - RNA, 1698 nt, Artificial Sequence
  derived and/or modified CDS sequence (opt1) from hemagglutinin__InfluenzaA__ABB82205
augaaggugaagcugcucguccugcugugcaccuucaccgccacguacgccgacaccaucugcaucggcuaccacgcgaacaacagcaccgacaccguggacacggugcucgagaagaacgucaccgugacccacuccgugaaccugcuggaggacagccacaacgggaagcucugccugcugaagggcaucgcgccccuccagcuggggaacugcuccgucgccggcuggauccuggggaacccggagugcgagcuccugaucagcaaggaguccuggagcuacaucguggagacccccaaccccgagaacggcacgugcuaccccggcuacuucgccgacuacgaggagcugcgcgagcagcucuccagcguguccagcuucgagcgguucgagaucuucccgaaggaguccagcuggcccaaccacaccgucaccgggguguccgccagcugcucccacaacggcaagagcuccuucuacaagaaccugcuguggcucaccgggaagaacggccuguaccccaaccugagcaaguccuacgccaacagcaaggagaaggaggugcucguccuguggggcgugcaccacccgcccaacaucggggaccagcgcgcccuguaccacacggagaacgccuacgugagcgucguguccagccacuacucccggcgcuucacccccgagaucgccaagcggcccaaggugcgcgaccaggagggccggaucaacuacuacuggacccuccuggagcccggggacaccaucaucuucgaggcgaacggcaaccugaucgccccgcgcuacgccuucgcccucagccggggguucggcuccggcaucaucacgagcaacgcccccauggacgagugcgacgcgaagugccagacgccccagggggccaucaacuccagccugcccuuccagaacguccacccggugaccaucggcgagugccccaaguacgugcgcuccgccaagcugcggauggucaccgggcuccgcaacauccccagcauccagucccggggccuguucggggccaucgccggcuucaucgagggcggguggaccggcaugguggacgggugguacggcuaccaccaccagaacgagcaggggagcggcuacgcggccgaccagaaguccacccagaacgccaucaacggcaucaccaacaaggugaacagcgucaucgagaagaugaacacccaguucacggccguggggaaggaguucaacaagcuggagcgccggauggagaaccucaacaagaaggucgacgacggcuuccuggacaucuggaccuacaacgccgagcugcucgugcugcuggagaacgagcgcacccucgacuuccacgacuccaacgugaagaaccuguacgagaaggucaagagccagcugaagaacaacgcgaaggagaucgggaacggcugcuucgaguucuaccacaagugcaacgacgagugcauggaguccgugaagaacgggaccuacgacuaccccaaguacagcgaggaguccaagcucaaccgggagaagaucgacggcgugaagcuggagagcaugggcgucuaccagauccuggccaucuacagcacgguggccuccagccucgugcugcuggucucccucggggccaucagcuucuggaugugcuccaacggcagccugcagugccgcaucugcaucuga

SEQ ID NO: 64502 - RNA, 1698 nt, Artificial Sequence
  derived and/or modified CDS sequence (opt1) from hemagglutinin__InfluenzaA__ABB82216
augaaggugaagcugcucguccugcugugcaccuucaccgccacguacgccgacaccaucugcaucggcuaccacgcgaacaacagcaccgacaccguggacacggugcucgagaagaacgucaccgugacccacuccgugaaccugcuggaggacagccacaacgggaagcucugccugcugaagggcaucgcgccccuccagcuggggaacugcuccgucgccggcuggauccuggggaacccggagugcgagcuccugaucagcaaggaguccuggagcuacaucguggagacccccaaccccgagaacggcacgugcuaccccggcuacuucgccgacuacgaggagcugcgcgagcagcucuccagcguguccagcuucgagcgguucgagaucuucccgaaggaguccagcuggcccaaccacaccgucaccgggguguccagcuccugcagccacaacggcaaguccagcuucuaccgcaaccugcuguggcucaccgggaagaacggccuguaccccaaccuguccaagagcuacgugaacaacaaggagaaggagguccucgugcuguggggcgugcaccacccgcccaacaucggggaccagcgggcccuguaccacacggagaacgccuacgucagcgugguguccagccacuacucccgccgguucacccccgagaucgccaagcgccccaagguccgggaccaggagggccgcaucaacuacuacuggacccuccuggagcccggggacaccaucaucuucgaggccaacggcaaccugaucgccccgcgguacgcguucgcccucagccgcggguucggcuccggcaucaucacgagcaacgcccccauggacgagugcgacgccaagugccagacgccccagggggccaucaacuccagccugcccuuccagaacgugcacccggugaccaucggcgagugccccaaguacguccgguccgcgaagcugcgcauggugaccgggcuccggaacauccccagcauccagucccgcggccuguucggggccaucgccggcuucaucgagggcggguggaccggcaugguggacgggugguacggcuaccaccaccagaacgagcaggggagcggcuacgccgccgaccagaaguccacccagaacgcgaucaacggcaucaccaacaaggucaacagcgugaucgagaagaugaacacccaguucacggccgucgggaaggaguucaacaagcuggagcggcgcauggagaaccucaacaagaagguggacgacggcuuccuggacaucuggaccuacaacgccgagcugcucgugcugcuggagaacgagcggacccucgacuuccacgacuccaacgucaagaaccuguacgagaaggucaagagccagcugaagaacaacgccaaggagaucgggaacggcugcuucgaguucuaccacaagugcaacgacgagugcauggaguccgugaagaacgggaccuacgacuaccccaaguacagcgaggaguccaagcucaaccgcgagaagaucgacggcgugaagcuggagagcaugggcguguaccagauccuggccaucuacagcacgguggcguccagccucguccugcuggugucccucggggccaucagcuucuggaugugcuccaacggcagccugcagugccggaucugcaucuga

SEQ ID NO: 64503 - RNA, 1701 nt, Artificial Sequence
  derived and/or modified CDS sequence (opt1) from hemagglutinin__InfluenzaA__ABB82227
augaagaccaucaucgcccugagcuacaucuucugccucacccugggccaggaccugcccgggaacgacaacuccaaggccacgcucugccugggccaccacgcggugccgaacgggacccuggucaagaccaucaccgacgaccagacggaggugaccaacgccaccgagcucgugcagagcuccagcaccggcaagaucugcaacaacccccaccgcauccuggacgggauggacugcacgcugaucgacgcccuccugggcgacccccacugcgacgucuuccagaacgagaccugggaccuguucguggagcgguccaaggccuucagcaacugcuaccccuacgacgugccggacuacgccucccuccgcagccuggcggccuccagcggcacccuggaguucaucaccgagggguucacguggaccggcgucacccagaacgggggcuccaacgccugcaagcgggggcccggcagcggcuucuucucccgccucaacuggcugaccaagagcgggaacacguaccccgugcugaacgugaccaugcccaacaacgacaacuucgacaagcucuacaucuggggcguccaccacccguccaccgaccaggagcagaccagccuguacgugcaggccuccgggcgggugacggucagcacccgccggucccagcagaccaucauccccaacaucggcagccgccccugggugcggggccugagcucccgcaucagcaucuacuggaccaucgugaagcccggggacguccucgugaucaacuccaacggcaaccugaucgcgccgcggggguacuucaagaugcgcacgggcaagagcuccaucaugcggagcgacgcccccaucgacacgugcaucuccgagugcaucacccccaacgggagcauccccaacgacaagccguuccagaacaucaacaagaucaccuacggcgccugccccaaguacgugaagcagaacacccugaagcucgccaccggcaugcgcaacguccccgagaagcagacccgggggcuguucggcgccaucgcgggguucaucgagaacggcugggaggggaugaucgacggcugguacggcuuccgccaccagaacuccgaggggaccggccaggccgccgaccucaagagcacgcaggccgccaucgaccagaucaacgggaagcucaaccggaucaucgagaagaccaacgagaaguuccaccagaucgagaaggaguucuccgagguggagggccgcauccaggaccuggagaaguacguggaggacaccaagaucgaccuguggagcuacaacgcggagcuccuggucgccauggagaaccagcacaccaucgaccugacggacuccgagaugaacaagcuguucgagaagacccggcgccagcugcgggagaacgccgaggacauggggaacggcugcuucaagaucuaccacaagugcgacaacgccugcaucgagagcauccgcaacggcaccuacgaccacgacguguaccgcgacgaggcccugaacaaccgguuccagaucaaggggguggagcucaaguccggcuacaaggacuggauccuguggaucagcuucgcgaucuccugcuuccugcucugcgucgugcugcugggguucaucaugugggccugccagcgcggcaacauccggugcaacaucugcaucuga

SEQ ID NO: 64504 - RNA, 1698 nt, Artificial Sequence
  derived and/or modified CDS sequence (opt1) from hemagglutinin__InfluenzaA__ABB83026
augaaggugaagcugcucauccugcugugcaccuucaccgccacguacgccgacaccaucugcaucggcuaccacgcgaacaacagcaccgacaccgucgacacggugcucgagaagaacgugaccgucacccacuccgugaaccugcuggaggacagccacaacgggaagcucugccugcugaagggcaucgcgccccuccagcuggggaacugcuccguggccggcuggauccuggggaacccggagugcgagcuccugaucagcaaggaguccuggagcuacaucgucgagacccccaaccccgagaacggcacgugcuaccccggcuacuucgccgacuacgaggagcugcgcgagcagcucuccagcguguccagcuucgagcgguucgagaucuucccgaaggaguccagcuggcccaaccacaccgugaccggggucuccgccagcugcucccacaacggcaagagcuccuucuaccgcaaccugcuguggcucaccgagaagaacgggcuguaccccaaccugagcaaguccuacgccaacaacaaggagaaggaggugcucauccuguggggcgugcaccacccgcccaacaucggggaccagcggacgcuguaccacaccgagaacgccuacgucagcguggugagcucccacuacagccgccgguucacccccgagaucaccaagcgccccaagguccgggaccaggagggccgcaucaacuacuacuggacgcuccuggagcccggcgacaccaucaucuucgaggccaacgggaaccugaucgccccgugguacgcguucgcccucucccggggcuucgggagcggcaucaucaccuccaacgcccccauggacgagugcgacgccaagugccagacgccccagggcgccaucaacagcucccugcccuuccagaacgugcacccggugaccaucggggagugccccaaguacguccgcagcgcgaagcugcggauggugaccggccuccgcaacauccccuccauccagagccgggggcuguucggcgccaucgccggguucaucgagggcggcuggaccgggaugguggacggcugguacggguaccaccaccagaacgagcagggcuccggguacgccgccgaccagaaguccacccagaacgcgaucaacggcaucacgaacaaggucaacagcgugaucgagaagaugaacacccaguucaccgccgugggcaaggaguucaacaagcuggagcgccggauggagaaccucaacaagaaggucgacgacggguuccuggacaucuggaccuacaacgccgagcugcucgugcugcuggagaacgagcgcacgcucgacuuccacgacagcaacgucaagaaccuguacgagaaggugaagucccagcugaagaacaacgccaaggagaucggcaacgggugcuucgaguucuaccacaagugcaacaacgagugcauggagagcgugaagaacggcaccuacgacuaccccaaguacuccgaggagagcaagcucaaccgggagaagaucgacggggucaagcuggaguccaugggcguguaccagauccuggccaucuacagcaccguggcgagcucccucguccugcuggugagccucggcgccaucuccuucuggaugugcagcaacgggucccugcagugccgcaucugcaucuga

SEQ ID NO: 64505 - RNA, 1698 nt, Artificial Sequence
  derived and/or modified CDS sequence (opt1) from hemagglutinin__InfluenzaA__ABB83127
augaaggugaagcugcucauccugcugugcaccuucaccgccacguacgccgacaccaucugcaucggcuaccacgcgaacaacagcaccgacaccgucgacacggugcucgagaagaacgugaccgucacccacuccgugaaccugcuggaggacagccacaacgggaagcucugccugcugaagggcaucgcgccccuccagcuggggaacugcuccguggccggcuggauccuggggaacccggagugcgagcuccugaucagcaaggaguccuggagcuacaucgucgagacccccaaccccgagaacggcgccugcuaccccggcuacuucgccgacuacgaggagcugcgcgagcagcucuccagcguguccagcuucgagcgguucgagaucuucccgaaggaguccagcuggcccaaccacacggugaccggggucuccgccagcugcucccacaacggcaagagcuccuucuaccgcaaccugcuguggcucaccgggaagaacggccuguaccccaaccugagcaaguccuacgccaacaacaaggagaaggaggugcucauccuguggggcgugcaccacccgcccaacaucggggaccagcggacccuguaccacacggagaacgccuacgucagcguggugagcucccacuacagccgccgguucacccccgagaucaccaagcgccccaagguccgggaccaggagggccgcaucaacuacuacuggacccuccuggagcccggggacacgaucaucuucgaggccaacggcaaccugaucgcgccgugguacgccuucgcccucucccggggguucggcagcggcaucaucaucuccaacgcccccauggacgagugcgacgccaagugccagacgccccagggggcgaucaacagcucccugcccuuccagaacgugcacccggugaccaucggcgagugccccaaguacguccgcagcgccaagcugcggauggugaccgggcuccgcaacauccccuccauccagagccggggccuguucggggccaucgccggcuucaucgagggcggguggaccggcaugguggacgggugguacggcuaccaccaccagaacgagcagggguccggcuacgccgcggaccagaaguccacccagaacgccaucaacggcaucaccaacaaggucaacagcgugaucgagaagaugaacacccaguucacggccguggggaaggaguucaacaagcuggagcgccggauggagaaccucaacaagaaggucgacgacggcuuccuggacaucuggaccuacaacgccgagcugcucgugcugcuggagaacgagcgcacccucgacuuccacgacagcaacgucaagaaccuguacgagaaggugaagucccagcugaagaacaacgccaaggagaucgggaacggcugcuucgaguucuaccacaagugcaacaacgagugcauggagagcgugaagaacgggaccuacgacuaccccaaguacuccgaggagagcaagcucaaccgggagaagaucgacggcgucaagcuggacuccaugggcguguaccagauccuggcgaucuacagcacgguggccagcucccucguccugcuggugagccucggggccaucuccuucuggaugugcagcaacggcucccugcagugccgcaucugcaucuga

SEQ ID NO: 64506 - RNA, 1698 nt, Artificial Sequence
  derived and/or modified CDS sequence (opt1) from hemagglutinin__InfluenzaA__ABB83138
augaaggugaagcugcucauccugcugugcaccuucaccgccacguacgccgacaccaucugcaucggcuaccacgcgaacaacagcaccgacaccgucgacacggugcucgagaagaacgugaccgucacccacuccgugaaccugcuggaggacagccacaacgggaagcucugccugcugaagggcaucgcgccccuccagcuggggaacugcuccguggccggcuggauccuggggaacccggagugcgagcuccugaucagcaaggaguccuggagcuacaucgucgagacccccaaccccgagaacggcgccugcuaccccggcuacuucgccgacuacgaggagcugcgcgagcagcucuccagcaucuccagcuucgagcgguucgagaucuucccgaaggaguccagcuggcccaaccacacggugaccgggguguccgccagcugcucccacaacggcaagagcuccuucuaccgcaaccugcuguggcucaccgggaagaacggccuguaccccaaccugagcaaguccuacgccaacaacaaggagaaggagguccucauccuguggggcgugcaccacccgcccaacaucggggaccagcggacccuguaccacacggagaacgccuacgugagcgucgugagcucccacuacagccgccgguucacccccgagaucaccaagcgccccaaggugcgggaccaggagggccgcaucaacuacuacuggacccuccuggagcccggggacacgaucaucuucgaggccaacggcaaccugaucgcgccgugguacgccuucgcccucucccggggguucggcagcggcaucaucaccuccaacgcccccauggacgagugcgacgccaagugccagacgccccagggggcgaucaacagcucccugcccuuccagaacguccacccggugaccaucggcgagugccccaaguacgugcgcagcgccaagcugcggauggucaccgggcuccgcaacauccccuccauccagagccggggccuguucggggccaucgccggcuucaucgagggcggguggaccggcaugguggacgggugguacggcuaccaccaccagaacgagcagggguccggcuacgccgcggaccagaaguccacccagaacgccaucaacggcaucaccaacaaggugaacagcgucaucgagaagaugaacacgcaguucaccgccguggggaaggaguucaacaagcuggagcgccggauggagaaccucaacaagaagguggacgacggcuuccuggacaucuggaccuacaacgccgagcugcucguccugcuggagaacgagcgcacccucgacuuccacgacagcaacgugaagaaccuguacgagaaggucaagucccagcugaagaacaacgccaaggagaucgggaacggcugcuucgaguucuaccacaagugcaacaacgagugcauggagagcgugaagaacgggacguacgacuaccccaaguacuccgaggagagcaagcucaaccgggagaagaucgacggcgugaagcuggacuccaugggcgucuaccagauccuggcgaucuacagcaccguggccagcucccucgugcugcuggucagccucggggccaucuccuucuggaugugcagcaacggcucccugcagugccgcaucugcaucuga

SEQ ID NO: 64507 - RNA, 1701 nt, Artificial Sequence
  derived and/or modified CDS sequence (opt1) from hemagglutinin__InfluenzaA__ABB86877
augaaggccauccugcucauccugcuguacaccuucaccgccaccaacgcggacacccucugcaucggcuaccacgccaacaacagcaccgacaccguggacacgguccuggagaagaacgugaccgugacccacuccgucaaccugcucgaggaccgccacaacgggaagcugugcaaccugggcgggaucgcgccccucuaccugggcaacugcaacaucgccggguggcugcucggcaacccggagugcgagcugcuguucaccgugagcuccuggagcuacaucguggagacguccaacagcgacaacgggaccugcuaccccggcgacuucaucaacuacgaggagcuccgggagcagcuguccagcauguccagcuacgagcgcuucgagaucuuccccaaggaguccagcuggcccaaccacgagaccaaccggggcgucaccgccgccugcccguacgccggggccaacuccuucuaccgcaaccugaucuggcucgugaagaagggcaacagcuaccccaagaucaacaaguccuacgugaacaacaaggagaaggagguccuggugcugugggggauccaccacccgcccacgagcgccgaccagcagucccucuaccagaacgcggacgccuacgugagcgucgaguccagcaaguacaacaagaaguucaagcccgagaucgccacccggcccaaggugcgcggccaggccggccggaugaacuacuacuggacccugguggagcccggggacaccaucacguucgaggccaccggcaaccuggucgugccccgcuacgcguucgccaugaaccgggggagcggcuccggcaucaucaucagcgacaccccggugcacgacugcaacaccacgugccagacccccaagggggccaucaacaccucccuccccuuccagaacguccaccccgugaccaucggcgagugcccgaaguacgucaagagcacgaagcugcgcauggccaccgggcugcggaacauccccuccauccagagccgcggccucuucgaggccaucgcgggguucaucgagggcggcuggaccgggaugaucgacggcugguacggguaccaccaccagaacgagcagggcuccggguacgccgccgaccgcaagagcacccagaacgccaucgacggcaucacgaacaaggugaacuccgugaucgagaagaugaacacccaguucaccgccgugggcaaggaguucaaccaccuggagaagcggaucgagaaccugaacaagaaggucgacgacggguuccucgacguguggaccuacaacgcggagcugcugguccuccuggagaacgagcggacgcuggacuuccacgacagcaacgugaagaaccucuacgagaaggugcgcucccagcugcggaacaacgccaaggagaucggcaacgggugcuucgaguucuaccacaagugcgacgacacgugcauggagagcguccgcaacggcaccuacgacuaccugaaguacuccgaggagagcaagcucaaccgggagaagaucgagggggugaagcuggacuccgcccgcaucuaccagauccuggccaucuacagcaccguggccuccagccucguccugcuggugucccucggcgcgaucagcuucuggaugugcagcaacggcucccugcagugccggaucugcaucuga

SEQ ID NO: 64508 - RNA, 1701 nt, Artificial Sequence
  derived and/or modified CDS sequence (opt1) from hemagglutinin__InfluenzaA__ABB86887
augaaggccauccugcucauccugcuguacaccuucaccgccaccaacgcggacacccucugcaucggcuaccacgccaacaacagcaccgacaccguggacacgguccuggagaagaacgugaccgugacccacuccgucaaccugcucgaggaccgccacaacgggaagcugugcaaccugggcgggaucgcgccccucuaccugggcaacugcaacaucgccggguggcugcucggcaacccggagugcgagcugcuguucaccgugagcuccuggagcuacaucguggagacguccaacagcgacaacgggaccugcuaccccggcgacuucaucaacuacgaggagcuccgggagcagcuguccagcauguccagcuacgagcgcuucgagaucuuccccaaggaguccagcuggcccaaccacgagaccaaccggggcgucaccgccgccugcccguacgccggggccaacuccuucuaccgcaaccugaucuggcucgugaagaagggcaacagcuaccccaagaucaacaaguccuacgugaacaacaaggagaaggagguccuggugcugugggggauccaccacccgcccacgagcgccgaccagcagucccucuaccagaacgcggacgccuacgugagcgucgaguccagcaaguacaacaagaaguucaagcccgagaucgccacccggcccaaggugcgcggccaggccggccggaugaacuacuacuggacccugguggagcccggggacaccaucacguucgaggccaccggcaaccuggucgugccccgcuacgcguucgccaugaagcgggggagcggcuccggcaucaucaucagcgacaccccggugcacgacugcaacaccacgugccagacccccaagggggccaucaacaccucccuccccuuccagaacauccaccccgucaccaucggcgagugcccgaaguacgucaagagcacgaagcugcgcauggccaccgggcugcggaacauccccuccauccagagccgcggccucuucggggccaucgcgggcuucaucgagggcggguggaccggcaugaucgacgggugguacggcuaccaccaccagaacgagcagggguccggcuacgccgccgaccgcaagagcacccagaacgccaucgacggcaucacgaacaaggugaacuccgugaucgagaagaugaacacccaguucaccgccguggggaaggaguucaaccaccuggagaagcggaucgagaaccugaacaagaagguggacgacggcuuccucgacgucuggaccuacaacgcggagcugcuggugcuccuggagaacgagcggacgcuggacuuccacgacagcaacgucaagaaccucuacgagaaggugcgcucccagcugcggaacaacgccaaggagaucgggaacggcugcuucgaguucuaccacaagugcgacgacacgugcauggagagcgugcgcaacgggaccuacgacuaccugaaguacuccgaggagagcaagcucaaccgggagaagaucgagggcgucaagcuggacuccgcccgcaucuaccagauccuggccaucuacagcaccguggccuccagccucgugcugcuggucucccucggcgcgaucagcuucuggaugugcagcaacgggucccugcagugccggaucugcaucuga

SEQ ID NO: 64509 - RNA, 1698 nt, Artificial Sequence
  derived and/or modified CDS sequence (opt1) from hemagglutinin__InfluenzaA__ABB86899
augaaggugaagcugcucauccugcugugcaccuucaccgccacguacgccgacaccaucugcaucggcuaccacgcgaacaacagcaccgacaccgucgacacggugcucgagaagaacgugaccgucacccacuccgugaaccugcuggaggacagccacaacgggaagcucugccugcugaagggcaucgcgccccuccagcuggggaacugcuccguggccggcuggauccuggggaacccggagugcgagcuccugaucagcaaggaguccuggagcuacaucgucgagacccccaaccccgagaacggcgccugcuaccccggccacuucgccgacuacgaggagcugcgcgagcagcucuccagcguguccagcuucgagcgguucgagaucuucccgaaggaguccagcuggcccaaccacacgaucaccgggguguccgccagcugcucccacaacggcaagcgcagcuucuaccggaaccugcuguggcucaccgggaagaacggccuguaccccaaccuguccaagagcuacgccaacaacaaggagaaggagguccucauccuguggggcgugcaccacccgcccaacaucggggaccagcgcacccuguaccacacggagaacgccuacguguccgucgugagcagccacuacucccggcgcuucacccccgagaucaccaagcggcccaaggugcgcgaccaggagggccggaucaacuacuacuggacccuccuggagcccggggacacgaucaucuucgaggccaacggcaaccugaucgcgccgugguacgccuucgcccucagccgcggguucggcuccggcaucaucaccagcaacgcccccauggacgagugcgacgccaagugccagacgccccagggggcgaucaacuccagccugcccuuccagaacguccacccggugaccaucggcgagugccccaaguacgugcgguccgccaagcugcgcauggucaccgggcuccggaacauccccagcauccagucccgcggccuguucggggccaucgccggcuucaucgagggcggguggaccggcaugguggacgggugguacggcuaccaccaccagaacgagcaggggagcggcuacgccgcggaccagaaguccacccagaacgccaucaacggcaucaccaacaaggugaacagcgucaucgagaagaugaacacgcaguucaccgccguggggaaggaguucuccaagcuggagcggcgcauggagaaccucaacaagaagguggacgacggcuuccuggacaucuggaccuacaacgccgagcugcucguccugcuggagaacgagcggacccucgacuuccacgacagcaacgugaagaaccuguacgagaaggucaaggggcagcugaagaacaacgccaaggagaucggcaacgggugcuucgaguucuaccacaagugcaacaacgagugcauggaguccgugaagaacggcacguacgacuaccccaaguacagcgaggaguccaagcucaaccgcgagaagaucgacggcgugaagcuggacagcaugggggucuaccagauccuggcgaucuacuccaccguggccagcagccucauccugcuggugucccucggcgccaucagcuucuggaugugcuccaacgggagccugcagugccggaucugcaucuga

SEQ ID NO: 64510 - RNA, 1701 nt, Artificial Sequence
  derived and/or modified CDS sequence (opt1) from hemagglutinin__InfluenzaA__ABB86907
augaaggccauccugcucgugcugcuguacaccuucaccagcacgaacgccgacacccucugcaucggcuaccacgcgaacaacuccaccgacaccgucgacacggugcuggagaagaacgugaccgucacccacagcgugaaccugcucgaggacaagcacaacgggaagcugugccgccugggcgggaucgcgccccuccaccugggcaagugcaacaucgccggguggcugcucggcaacccggagugcgaccugcugcucaccguguccagcugguccuacaucgucgagacgagcaacuccuacaacgggaccugcuaccccggggacuucaccaacuacgaggagcugcgggagcagcugagcuccgugagcuccuucgagcgcuucgagaucuuccccaaggccagcuccuggcccaaccacgagaccaaccggggcgugacggccgccugcccgcacgccgggaccaacagcuucuaccgcaaccucaucuggcuggucaagaagggcaacaccuaccccaagcuguccaagagcuacgugaacaacaaggggaaggaggugcucguccuguggggcauccaccaccccuccaccagcacggaccagcagucccuguaccagaacgccgacaccuacguguucgugggcaccagcaaguacaacaagaaguucaagcccgagaucgccguccggccgaaggugaaggaccaggcggggcgcaugaacuacuacuggacccucguggagcccggcgacacgaucaccuucgaggccaccgggaaccuggucgugccccgguacgccuucgccaugaaccgcggccacggcagcgggaucaucaucuccgacacccccgugcacgacugcaacacgaccugccagaccccgaagggcgccaucaacaccagccugcccuuccagaacguccaccccgugacgaucgggaagugccccaaguacgugaaguccacccggcuccgcauggcgaccggccugcggaacaucccgagcauccagucccgcgggcuguucggcgccaucgccggcuucaucgagggcggcuggaccgggaugaucgacggcugguacggguaccaccaccagaacggccagggcagcggguacgccgccgaccagaaguccacgcagaacgcgaucgacggcaucaccaacaaggucaacagcgugaucgagaagaugaacacccaguucaccgccgucgggaaggaguucaaccaccucgagaagcggaucgagaaccugaacaagaagguggacgacggcuuccuggacguguggacguacaacgccgagcuccugguccugcucgagaacgagcgcacccuggacuuccacgacuccaacgugaagaaccuguacgagaaggugcggcgccagcucaagaacaacgccaaggagaucgggaacggcugcuucgaguucuaccacaacugcgacgacgccugcauggagagcgucaagaacggcaccuacgacuaccccaaguacuccgaggagagccggcugaaccgcgaggagaucaacgggaucaagcuggacuccacccggaucuaccagauccucgcgaucuacagcaccguggccuccagcuccgugcugcuggucagccucggcgccaucuccuucuggaugugcagcaacgggagccugcagugccgcaucugcaucuga

SEQ ID NO: 64511 - RNA, 1698 nt, Artificial Sequence
  derived and/or modified CDS sequence (opt1) from hemagglutinin__InfluenzaA__ABB86917
augaaggugaagcugcucauccugcugugcaccuucaccgccacguacgccgaccccaucugcaucggcuaccacgcgaacaacagcaccgacaccgucgacaccgugcucgagaagaacguggccgucacgcacuccgugaaccugcuggaggacagccacaacgggaagcucugccugcugaagggcaucgccccgcuccagcuggggaacugcuccguggccggcuggauccuggggaaccccgagugcgagcuccugaucagcaaggaguccuggagcuacaucgucgagacccccaaccccgagaacggcgccugcuacccgggcuacuucgcggacuacgaggagcugcgcgagcagcucuccagcguguccagcuucgagcgguucgagaucuuccccaaggaguccagcuggcccaaccacaccgugaccggggucuccgccagcugcucccacaacggcaagagcuccuucuaccgcaaccugcuguggcucacggggaagaacggccuguaccccaaccugagcaaguccuacgccaacaacaaggagaaggaggugcucauccuguggggcgugcaccacccgcccaacaucggggaccagcggacccuguaccacaccgagaacgccuacgucagcguggugagcucccacuacagccgccgguucacccccgagaucacgaagcgccccaagguccgggaccaggagggccgcaucaacuacuacuggacccuccuggagccgggggacaccaucaucuucgaggcgaacggcaaccugaucgcccccugguacgccuucgcccucucccggggguucggcagcggcaucaucaccuccaacgcccccauggacgagugcgacgcgaagugccagacgccccagggggccaucaacagcucccugccguuccagaacgugcaccccgugaccaucggcgagugccccaaguacguccgcagcgccaagcugcggauggugaccgggcuccgcaacauccccuccauccagagccggggccuguucggggccaucgccggcuucaucgagggcggguggaccggcaugguggacgggugguacggcuaccaccaccagaacgagcagggguccggcuacgcggccgaccagaaguccacgcagaacgccaucaacggcaucaccaacaaggucaacagcgugaucgagaagaugaacacccaguucaccgccguggggaaggaguucaacaagcuggagcgccggauggagaaccucaacaagaaggucgacgacggcuuccuggacaucuggacguacaacgccgagcugcucgugcugcuggagaacgagcgcacccucgacuuccacgacagcaacgucaagaaccuguacgagaaggugaagucccagcugaagaacaacgcgaaggagaucgggaacggcugcuucgaguucuaccacaagugcaacaacgagugcauggagagcgugaagaacgggaccuacgacuacccgaaguacuccgaggagagcaagcucaaccgggagaagaucgacggcgucaagcuggacuccaugggcguguaccagauccuggccaucuacagcaccguggccagcucccucguccugcuggugagccucggggccaucuccuucuggaugugcagcaacggcucccugcagugccgcaucugcaucuga

SEQ ID NO: 64512 - RNA, 1698 nt, Artificial Sequence
  derived and/or modified CDS sequence (opt1) from hemagglutinin__InfluenzaA__ABB86929
augaaggugaagcugcucauccugcuguacaccuucaccgccacguacgccgacaccaucugcaucggcuaccacgcgaacaacagcaccgacaccgucgacacggugcucgagaagaacgugaccgucacccacuccgugaaccugcuggaggacagccacaacgggaagcucugccugcugaagggcaucgcgccccuccagcuggggaacugcuccguggccggcuggauccuggggaacccggagugcgagcuccugaucagcaaggaguccuggagcuacaucgucgagacccccaaccccgagaacggcgccugcuaccccggccacuucgccgacuacgaggagcugcgcgagcagcucuccagcguguccagcuucgagcgguucgagaucuucccgaaggaguccagcuggcccaaccacacgaucaccgggguguccgccagcugcucccacaacggcaagcgcagcuucuaccggaaccugcuguggcucaccgggaagaacggccuguaccccaaccuguccaagagcuacgccaacaacaaggagaaggagguccucauccuguggggcgugcaccacccgcccaacaucggggaccagcgcacccuguaccacacggagaacgccuacguguccgucgugagcagccacuacucccggcgcuucacccccgagaucaccaagcggcccaaggugcgcgaccaggagggccggaucaacuacuacuggacccuccuggagcccggggacacgaucaucuucgaggccaacggcaaccugaucgcgccgugguacgccuucgcccucagccgcggguucggcuccggcaucaucaccagcaacgcccccauggacgagugcgacgccaagugccagacgccccagggggcgaucaacuccagccugcccuuccagaacguccacccggugaccaucggcgagugccccaaguacgugcgguccgccaagcugcgcauggucaccgggcuccggaacauccccagcauccagucccgcggccuguucggggccaucgccggcuucaucgagggcggguggaccggcaugguggacgggugguacggcuaccaccaccagaacgagcaggggagcggcuacgccgcggaccagaaguccacccagaacgccaucaacggcaucaccaacaaggugaacagcgucaucgagaagaugaacacgcaguucaccgccguggggaaggaguucuccaagcuggagcggcgcauggagaaccucaacaagaagguggacgacggcuuccuggacaucuggaccuacaacgccgagcugcucguccugcuggagaacgagcggacccucgacuuccacgacagcaacgugaagaaccuguacgagaaggucaaggggcagcugaagaacaacgccaaggagaucggcaacgggugcuucgaguucuaccacaagugcaacaacgagugcauggaguccgugaagaacggcacguacgacuaccccaaguacagcgaggaguccaagcucaaccgcgagaagaucgacggcgugaagcuggacagcaugggggucuaccagauccuggcgaucuacuccaccguggccagcagccucauccugcuggugucccucggcgccaucagcuucuggaugugcuccaacgggagccugcagugccggaucugcaucuga

SEQ ID NO: 64513 - RNA, 1701 nt, Artificial Sequence
  derived and/or modified CDS sequence (opt1) from hemagglutinin__InfluenzaA__ABB86937
augaaggccauccugcucgugcugcuguacaccuucaccagcacgaacgccgacacccucugcaucggcuaccacgcgaacaacuccaccgacaccgucgacacggugcuggagaagaacgugaccgucacccacagcgugaaccugcucgaggacaagcacaacgggcgccugugcaagcugggcgggaucgcgccccuccaccugggcaagugcaacaucgccggguggcugcucggcaacccggagugcgagcugcuguucaccguguccagcugguccuacaucgucgagacgagcaacuccuacaacgggaccugcuaccccggcgacuucaucaacuacgaggagcuccgggagcagcugagcuccgugagcuccuucgagcgcuucgagaucuuccccaaggccagcuccuggcccaaccacgagaccaaccggggcgugaccgccgccugcccgcacgccgggacgaacagcuucuaccgcaaccugaucuggcucgucaagaagggcaacaccuaccccaagaucuccaagagcuacgugaacaacaaggggaaggaggugcugguccuguggggcauccaccaccccuccaccagcaacgaccagcagucccucuaccagaacgccgacaccuacguguucgugggccccagcaaguacaacaagaaguucaagccggagaucgccacgcggcccaagguccgcgaccaggcggggcggaugaacuacuacuggacccugguggagcccggcgacaccaucaccuucgaggccacggggaaccugguggucccccgcuacgccuucgccaugaaccggggcagcgaguccggcaucaucaucagcgacaccccggugcacgacugcaacacgaccugccagacccccaagggggccaucaacaccucccuccccuuccagaacgugcaccccgucaccaucggcgagugcccgaaguacgucaagagcacccgccugcggauggcgacggggcugcgcaacauccccuccauccagagccggggccucuucggggccaucgccggcuucaucgaggagggcuggaccgggaugaucgacggcugguacggguaccaccaccagaacggccagggguccggcuacgccgccgaccagaaguccacccagaacgcgaucgacggcaucaccaacaaggugaacagcgugaucgagaagaugaacacgcaguucaccgccguggggaaggaguucaaccaccuggagaagcgcaucgagaaccugaacaagaaggucgacgacggcuuccucgacguguggaccuacaacgccgagcugcuggugcuccuggagaacgagcggacccuggacuuccacgacagcaacgucaagaaccucuacgagaaggugcgccggcagcugaagaacaacgccaaggagaucgggaacggcugcuucgaguucuaccacaagugcgacgacgccugcauggaguccgugaagaacgggacguacgacuaccccaaguacagcgaggagucccgccugaaccgggaggagaucaacggcaucaagcucgacagcacccgcaucuaccagauccuggcgaucuacuccaccgucgccagcuccagcgugcugcucgugucccugggcgccaucagcuucuggaugugcagcaacgggucccugcagugccggaucugcaucuga

SEQ ID NO: 64514 - RNA, 1701 nt, Artificial Sequence
  derived and/or modified CDS sequence (opt1) from hemagglutinin__InfluenzaA__ABB86946
augaaggccauccugcucgugcugcuguacaccuucaccgccgcgaacgccgacacgcucugcaucggcuaccacgccaacaacagcaccgacaccgucgacaccgugcuggagaagaacgugacggucacccacuccgugaaccugcucgaggaccgccacaacgggaagcugugcaagcugcggggcaucgcgccccuccaccuggggaagugcaacaucgccggcuggcugcucgggaacccggagugcgagagccuguccaccgugagcuccuggagcuacaucgucgagaccuccaacagcgacaacggcacgugcuaccccggcgacuucaucaacuacgaggagcugcgcgagcagcucuccagcguguccagcuucgagcgguucgagaucuuccccaaggccuccagcuggcccaaccacgagaccaaccgcgggaccaccgccgccugcccguacgccggcgcgaacuccuucuaccggaaccugaucuggcuggugaagaaggggaacagcuaccccaagcucaacaaguccuacgucaacaacaagggcaaggaggugcuggugcugugggggauccaccaccccagcacguccaacgagcagcagagccucuaccagaacgccgacaccuacgucuucgugggcagcuccaaguacaacaagaaguucaagcccgagaucgccacccgcccgaaggugcgggaccaggccggccgcaugaacuacuacuggacccugaucgagcccggggacacgaucaccuucgaggccaccggcaaccuggucgugccccgguacgcguucgccaugaaccgcgggagcggcuccggcaucaucaucagcgacacccccgugcacgacugcaacacgaccugccagaccccgaagggggccaucaacaccucccuccccuuccagaacguccaccccgugacgaucggcgagugccccaaguacgucaagagcaccaagcugcggauggccaccgggcugcgcaacaucccguccauccagagccggggccucuucggggccaucgcgggcuucaucgagggcggguggaccggcaugaucgacgggugguacggcuaccaccaccagaacgagcagggguccggcuacgccgccgaccagaaguccacgcagaacgccaucgacggcaucaccaacaaggugaacagcgugaucgagaagaugaacacccaguucaccgccguggggaaggaguucaaccaccuggagaagcgcaucgagaaccugaacaagaaggucgacgacggcuuccucgacguguggacguacaacgcggagcugcugguccuccuggagaacgagcggacccuggacuuccacgacagcaacgugaagaaccucuacgagaaggugcgcucccagcugaagaacaacgccaaggagaucgggaacggcugcuucgaguucuaccacaagugcgacgacgccugcauggagagcgucaagaacgggaccuacgacuaccccaaguacuccgaggagagccggcugaaccgcgaggagaucgacggcaucaagcucgacuccacccggaucuaccagauccuggccaucuacagcacgguggccuccagcagcgugcugcucgucucccugggcgcgaucagcuucuggaugugcuccaacgggagccugcagugccgcaucugcaucuga

SEQ ID NO: 64515 - RNA, 1701 nt, Artificial Sequence
  derived and/or modified CDS sequence (opt1) from hemagglutinin__InfluenzaA__ABB96319
augaagaccaucaucgcccugagcuacaucuucugccagguguucgcccagaaccuccccggcaacgacaacuccaccgcgacgcugugccuggggcaccacgccgucccgaacggcacccucgugaagaccaucaccaacgaccagaucgaggugacgaacgccaccgagcugguccagagcuccagcaccgggcgcaucugcgacaacccccaccggauccuggacggcaagaacugcacccucaucgacgcccugcugggggacccccacugcgacggcuuccagaacgagaagugggaccucuucguggagcgcuccaaggccuucagcaacugcuaccccuacgacgugccggacuacgcgucccugcggagccuggucgccuccagcggcacgcucgaguucuucaacgagggguucaacuggaccggcgugacccagaacgggggcuccuacgccugcaagcgcgggcccgacaacagcuucuucucccggcugaacuggcuguacaagagcgaguccaccuaccccgugcucaacgucacgaugcccaacaacgacaacuucgacaagcuguacaucuggggcgugcaccacccgagcaccgacaaggagcagaccaaccuguacgugcaggccuccggccgcgucaccgugagcacgaagcggucccagcagaccaucauccccaacguggggccccgccccuggguccggggccucagcagccgcaucuccaucuacuggaccaucgugaagccgggggacgugcugcugaucaacagcaacggcaaccucaucgcgccccggggcuacuucaagauccgcaccgggaaguccagcaucaugcgguccgacgcccccaucggcacgugcagcuccgagugcaucacccccaacgggagcaucccgaacgacaagcccuuccagaacgucaacaagaucaccuacggcgccugccccaaguacgugaagcagaacacccugaagcuggccacggggaugcgcaacgugcccgagaagcagacccggggcaucuucggcgccaucgcgggguucaucgagaacggcugggaggggaugaucgacggcugguacggguuccgccaccagaacuccgagggcaccggccaggccgccgaccucaagagcacccaggccgccaucgaccagaucaacgggaagcugaaccgggucaucgagaagacgaacgagaaguuccaccagaucgagaaggaguucuccgagguggagggccgcauccaggaccuggagaaguacguggaggacaccaagaucgaccucuggagcuacaacgcggagcugcuggucgcccucgagaaccagcacaccaucgaccugaccgacuccgagaugaacaagcuguucgagaagacgcggcgccagcuccgggagaacgccgaggacauggggaacggcugcuucaagaucuaccacaagugcgacaacgccugcaucgggagcauccgcaacggcaccuacgaccacgacguguaccgcgacgaggcccugaacaaccgguuccagaucaagggcgucgagcugaaguccggguacaaggacuggauccucuggaucagcuucgcgaucuccugcuuccugcugugcguggugcuccugggcuucaucaugugggccugccagaaggggaacauccgcugcaacaucugcaucuga

SEQ ID NO: 64516 - RNA, 1701 nt, Artificial Sequence
  derived and/or modified CDS sequence (opt1) from hemagglutinin__InfluenzaA__ABB96330
augaagaccaucaucgcccugagcuacaucuucugccagguguucgcccagaaccuccccggcaacgacaacuccaccgcgacgcugugccuggggcaccacgccgucccgaacggcacccucgugaagaccaucaccaacgaccagaucgaggugacgaacgccaccgagcugguccagagcuccagcaccgggcgcaucugcgacaacccccaccggauccuggacggcaagaacugcacccucaucgacgcccugcugggggacccccacugcgacggcuuccagaacgagaagugggaccucuucguggagcgcuccaaggccuucagcaacugcuaccccuacgacgugccggacuacgcgucccugcggagccuggucgccuccagcggcacgcucgaguucuucaacgagggguucaacuggaccggcgugacccagaacgggggcuccuacgccugcaagcgcgggcccgacaacagcuucuucucccggcugaacuggcuguacaagagcgaguccaccuaccccgugcucaacgucacgaugcccaacaacgacaacuucgacaagcuguacaucuggggcgugcaccacccgagcaccgacaaggagcagaccaaccuguacgugcaggccuccggccgcgucaccgugagcacgaagcggucccagcagaccaucauccccaacguggggagccgccccuggguccggggccucagcucccgcaucagcaucuacuggaccaucgugaagcccggggacgugcugcugaucaacuccaacggcaaccucaucgcgccgcggggcuacuucaagauccgcaccggcaagagcuccaucaugcggagcgacgcccccaucgggacgugcuccagcgagugcaucacccccaacggguccauccccaacgaccgcccguuccagaacgucaacaagaucaccuacggcgccugccccaaguacgugaagcagaacacccugaagcuggccacggggaugcggaacgugcccgagaagcagacccgcggcaucuucggcgccaucgcgggguucaucgagaacggcugggaggggauggucgacggcugguacggguuccggcaccagaacagcgagggcaccggccaggccgccgaccucaaguccacccaggccgccaucgaccagaucaacgggaagcugaaccgcgugaucgagaagacgaacgagaaguuccaccagaucgagaaggaguucagcgagguggagggccggauccagaaccuggagaaguacgucgaggacaccaagaucgaccucugguccuacaacgcggagcugcugguggcccucgagaaccagcacaccaucgaccugaccgacagcgagaugaacaagcuguucgagaagacgcgccggcagcuccgcgagaacgccgaggacauggggaacggcugcuucaagaucuaccacaagugcgacaacgccugcaucggguccauccgcaacggcaccuacgaccacgacgucuaccgggacgaggcccugaacaaccgcuuccagaucaagggcguggagcucaagagcggguacaaggacuggauccuguggaucuccuucgcgaucagcugcuuccugcugugcgugguccuccugggcuucaucaugugggccugccagaaggggaacauccggugcaacaucugcaucuga

SEQ ID NO: 64517 - RNA, 1701 nt, Artificial Sequence
  derived and/or modified CDS sequence (opt1) from hemagglutinin__InfluenzaA__ABB96341
augaagaccaucaucgcccugagcuacaucuucugccagguguucgcccagaaccuccccggcaacgacaacuccaccgcgacgcugugccuggggcaccacgccgucccgaacggcacccucgugaagaccaucaccaacgaccagaucgaggugacgaacgccaccgagcugguccagagcuccagcaccgggcgcaucugcgacaacccccaccggauccuggacggcaagaacugcacccucaucgacgcccugcugggggacccccacugcgacggcuuccagaacgagaagugggaccucuucguggagcgcuccaaggccuucagcaacugcuaccccuacgacgugccggacuacgcgucccugcggagccuggucgccuccagcggcacgcucgaguucuucaacgagggguucaacuggaccggcgugacccagaacgggggcuccuacgccugcaagaaggggcccgacaacagcuucuucucccgccugaacuggcuguacaagagcgaguccaccuaccccgugcucaacgucacgaugcccaacaacgacaacuucgacaagcuguacaucuggggcgugcaccacccgagcaccgacaaggagcagaccaaccuguacgugcaggccuccggccgggucaccgugagcacgaagcgcucccagcagaccaucauccccaacguggggagccggcccuggguccgcggccucagcucccggaucagcaucuacuggaccaucgugaagcccggggacgugcugcugaucaacuccaacggcaaccucaucgcgccgcgcggcuacuucaagauccggaccggcaagagcuccaucaugcgcagcgacgcccccaucgggacgugcuccagcgagugcaucacccccaacggguccauccccaacgacaagccguuccagaacgucaacaagaucaccuacggcgccugccccaaguacgugaagcagaacacccugaagcuggccacggggaugcggaacgugcccgagaagcagacccgcggcaucuucggcgccaucgcgggguucaucgagaacggcugggaggggaugaucgacggcugguacggguuccggcaccagaacagcgagggcaccggccaggccgccgaccucaaguccacccaggccgccaucgaccagaucaacgggaagcugaaccgcgucaucgagaagacgaacgagaaguuccaccagaucgagaaggaguucagcgagguggagggccggauccaggaccuggagaaguacguggaggacaccaagaucgaccucugguccuacaacgcggagcugcuggucgcccucgagaaccagcacaccaucgaccugaccgacagcgagaugaacaagcuguucgagaagacgcgccggcagcuccgcgagaacgccgaggacauggggaacggcugcuucaagaucuaccacaagugcgacaacgccugcaucggguccauccggaacggcaccuacgaccacgacguguaccgcgacgaggcccugaacaaccgcuuccagaucaagggcgucgagcucaagagcggguacaaggacuggauccuguggaucuccuucgcgaucagcugcuuccugcugugcguggugcuccugggcuucaucaugugggccugccagaaggggaacauccggugcaacaucugcaucuga

SEQ ID NO: 64518 - RNA, 1701 nt, Artificial Sequence
  derived and/or modified CDS sequence (opt1) from hemagglutinin__InfluenzaA__ABB96395
augaagaccaucaucgcccugagcuacaucuucugccagguguucgcccagaaccuccccggcaacgacaacuccaccgcgacgcugugccuggggcaccacgccgucccgaacggcacccucgugaagaccaucaccaacgaccagaucgaggugacgaacgccaccgagcugguccagagcuccagcaccgggcgcaucugcgacagcccccaccggauccuggacggcaagaacugcacccucauggacgcccugcugggggacccccacugcgacggcuuccagaacgagaagugggaccucuucguggagcgcuccaaggccuucuccaacugcuaccccuacgacgugccggacuacgcgagccugcggucccuggucgccagcuccggcacgcucgaguucaucaacgagggguucaacuggaccggcgugacccagaacgggggcagcuacgccugcaagcgcgggcccgacaacuccuucuucagccggcugaacuggcuguacaaguccgagagcaccuaccccgugcucaacgucacgaugcccaacaacgacaacuucgacaagcuguacaucuggggcgugcaccacccguccaccgacaaggagcagaccaaccuguacgugcaggccagcggccgcgucaccguguccacgaagcggagccagcagaccaucauccccaacguggggagccgccccuggguccggggccucuccagccgcaucuccaucuacuggaccaucgugaagcccggggacauccugcugaucaacagcaacggcaaccucaucgcgccgcggggcuacuucaagauccgcaccgggaaguccagcaucaugcgguccgacgcccccaucggcacgugcagcuccgagugcaucacccccaacgggagcauccccaacgacaagccguuccagaacgugaacaagaucaccuacggcgccugccccaaguacgucaagcagaacacccugaagcuggccacggggaugcgcaacgugcccgagaagcagacccggggcaucuucggcgccaucgcgggguucaucgagaacggcugggaggggaugaucgacggcugguacggguuccgccaccagaacuccgagggcaccggccaggccgccgaccucaagagcacccaggccgccaucgaccagaucaacgggaagcugaaccgggugaucgagcgcacgaacgagaaguuccaccagaucgagaaggaguucuccgaggucgagggccggauccaggaccuggagaaguacguggaggacaccaagaucgaccucuggagcuacaacgcggagcugcugguggcccucgagaaccagcacaccaucgaccugaccgacuccgagaugaacaagcuguucgagaagacgcgccggcagcuccgcgagaacgccgaggacauggggaacggcugcuucaagaucuaccacaagugcgacaacgccugcaucgggagcauccgcaacggcaccuacgaccacgacgucuaccgggacgaggcccugaacaaccgcuuccagaucaagggcguggagcugaaguccggguacaaggacuggauccucuggaucagcuucgcgaucuccugcuuccugcugugcgucgugcuccugggcuucaucaugugggccugccagaaggggaacauccggugcaacaucugcaucuga

SEQ ID NO: 64519 - RNA, 1698 nt, Artificial Sequence
  derived and/or modified CDS sequence (opt1) from hemagglutinin__InfluenzaA__ABB96487
augaaggugaagcugcucauccugcugugcaccuucaccgccacguacgccgacaccaucugcaucggcuaccacgcgaacaacagcaccgacaccgucgacacggugcucgagaagaacgugaccgucacccacuccgugaaccugcuggaggacagccacaacgggaagcucugccugcugaagggcaucgcgccccuccagcuggggaacugcuccguggccggcuggauccuggggaacccggagugcgagcuccugaucagcaaggaguccuggagcuacaucgucgagacccccaaccccgagaacggcgccugcuaccccggcuacuucgccgacuacgaggagcugcgcgagcagcucuccagcguguccagcuucgagcgguucgagaucuucccgaagaaguccagcuggcccaaccacacggugaccggggucuccgccagcugcucccacgacggcaagagcuccuucuaccgcaaccugcuguggcucaccgggaagaacggccuguaccccaaccugagcaaguccuacgccaacaacaaggagaaggaggugcucauccuguggggcgugcaccacccgcccaacaucggggaccagcggacccuguaccacacggagaacgccuacgucagcguggugagcucccacuacagccgccgguucacccccgagaucaccaagcgccccaagguccgggaccaggagggccgcaucaacuacuacuggacccuccuggagcccggggacacgaucaucuucgaggccaacggcaaccugaucgcgccgugguacgccuucgcccucucccggggguucggcagcggcaucaucaccuccaacgcccccauggacgagugcgacgccaagugccagacgccccagggggcgaucaacagcucccugcccuuccagaacgugcacccggugaccaucggcgagugccccaaguacguccgcagcgccaagcugcggauggugaccgggcuccgcaacauccccuccauccagagccggggccuguucggggccaucgccggcuucaucgagggcggguggaccggcaugguggacgggugguacggcuaccaccaccagaacgagcagggguccggcuacgccgcggaccagaaguccacccagaacgccaucaacggcaucaccaacaaggucaacagcgugaucgagaagaugaacacgcaguucaccgccguggggaaggaguucaacaagcuggagcgccggauggagaaccucaacaagaaggucgacgacggcuuccuggacaucuggaccuacaacgccgagcugcucgugcugcuggagaacgagcgcacccucgacuuccacgacagcaacgucaagaaccuguacgagaaggugaagucccagcugaagaacaacgccaaggagaucgggaacggcugcuucgaguucuaccacaagugcaacaacgagugcauggagagcgugaagaacgggacguacgacuaccccaaguacuccgaggagagcaagcucaaccgggagaagaucgacggcgucaagcuggacuccaugggcguguaccagauccuggcgaucuacagcaccguggccagcucccucguccugcuggugagccucggggccaucuccuucuggaugugcagcaacggcucccugcagugccgcaucugcaucuga

SEQ ID NO: 64520 - RNA, 1701 nt, Artificial Sequence
  derived and/or modified CDS sequence (opt1) from hemagglutinin__InfluenzaA__ABB96520
augaagaccaucaucgcccugagcuacaucuucugccucgcccugggccaggaccugcccgggaacggcaacuccaccgcgacgcucugccuggggcaccacgccgugccgaacggcacccuggucaagaccaucaccgacgaccagaucgaggugacgaacgccaccgagcucgugcagagcuccagcaccgggaagaucugcaacaacccccaccgcauccuggacggcaucgacugcacccugaucgacgcccuccugggcgacccccacugcgacgucuuccagaacgagacgugggaccuguucguggagcgguccaaggccuucagcaacugcuaccccuacgacgugccggacuacgcgucccuccgcagccuggucgccuccagcgggacccuggaguucaucaccgagggcuucaccuggacgggggugacccagaacggcggguccaacgccugcaagcggggccccggcagcggguucuucucccgccucaacuggcugaccaagagcggcuccaccuaccccgugcugaacgucacgaugcccaacaacgacaacuucgacaagcucuacaucuggggcgugcaccacccgagcaccgaccaggagcagaccucccuguacgugcaggccagcgggcgggucaccguguccacgcgccggagccagcagaccaucauccccaacaucggcagccgccccugggugcgggggcuguccagccgcaucuccaucuacuggaccaucgucaagcccggcgacgugcucgugaucaacagcaacgggaaccugaucgcgccgcggggcuacuucaagaugcgcaccgggaaguccagcaucaugcgguccgacgcccccaucgacacgugcaucagcgagugcaucacccccaacggcuccauccccaacgacaagccguuccagaacgucaacaagaucaccuacggcgccugccccaaguacgugaagcagaagacccugaagcucgccacggggaugcgcaacauccccgagaagaagacccggggcaucuucggggccaucgcgggcuucaucgagaacgggugggagggcaugaucgacggcugguacggguuccgccaccagaacagcgagggcaccgggcaggccgccgaccugaaguccacccaggccgccaucgaccagaucaacggcaagcugaaccgggugaucgagaagacgaacgagaaguuccaccagaucgagaaggaguucagcgaggucgaggggcgcauccaggaccucgagaaguacguggaggacaccaagaucgaccugugguccuacaacgcggagcugcucguggcccuggagaaccagcacaccaucgaccugaccgacagcgagaugaacaagcuguucgagaagacgcggcgccagcuccgggagaacgccgaggacaugggcaacggcugcuucaagaucuaccacaagugcgacaacgccugcaucgaguccauccgcaacgggaccuacgaccacgacgucuaccgcgacgaggcccugaacaaccgguuccagaucaagggcguggagcucaagagcggguacaaggacuggauccuguggaucuccuucgcgaucagcugcuuccugcucugcgucgugcugcugggcuucaucaugugggccugccagcgcggcaacauccggugcaacaucugcaucuga

SEQ ID NO: 64521 - RNA, 1701 nt, Artificial Sequence
  derived and/or modified CDS sequence (opt1) from hemagglutinin__InfluenzaA__ABB96531
augaagaccaucaucgcccugagcuacauccucugccugguguccgcccagaagauccccggcaacgacagcuccaccgcgacgcugugccucgggcaccacgccgucccgaacggcacccuggugaagaccaucaccaacgaccagaucgaggugacgaacgccaccgagcugguccagagcuccagcaccgggcgcaucugcgacagcccccaccggauccucgacggcgagaacugcacccugaucgacgcccugcucggggacccccacugcgacggcuuccagaacaaggagugggaccuguucguggagcgcagcaaggccuacuccaacugcuaccccuacgacgugccggacuacgcgagccugcggucccucgucgccagcuccggcacgcuggaguucaacaacgagagcuucaacuggaccgggguggcccagaacggcaccuccuacgccugcaagcgccggagcaucaaguccuucuucagccgccugaacuggcuccaccagcugaaguacaaguaccccgcgcugaacgugaccaugcccaacaacgacaaguucgacaagcucuacaucuggggcguccaccaccccuccacggacagcgaccagaccagccuguacgcccaggccuccgggcgggugaccgugagcaccaagcgcucccagcagacggucaucccgaacaucgggagccggcccugggugcgcggcguguccagccggaucuccaucuacuggaccaucgucaagcccggcgacauccugcucaucaacagcaccgggaaccugaucgcgccccgcggcuacuucaagauccgguccgggaaguccuccaucaugcgcagcgacgccccgaucggcaagugcaacuccgagugcaucacccccaacggcagcauccccaacgacaagcccuuccagaacgugaaccggaucacguacggggccugcccgcgcuacgugaagcagaacacccugaagcucgccaccggcaugcggaacguccccgagaagcagacccgcgggaucuucggcgccaucgccggguucaucgagaacggcugggagggcaugguggacgggugguacggcuuccggcaccagaacuccgaggggacgggccaggccgcggaccucaagagcacccaggccgccaucaaccagaucaacgggaagcugaaccgccugaucgagaagaccaacgagaaguuccaccagaucgagaaggaguucuccgagguggagggccggauccaggaccuggagaaguacgucgaggacaccaagaucgaccuguggagcuacaacgccgagcuccugguggcccuggagaaccagcacacgaucgaccucaccgacuccgagaugaacaagcuguucgagcgcacccgcaagcagcugcgggagaacgcggaggacaugggcaacgggugcuucaagaucuaccacaagugcgacaacgccugcaucggcagcauccgcaacgggaccuacgaccacgacguguaccgggacgaggcccucaacaaccgcuuccagaucaagggcgucgagcucaagagcggguacaaggacuggauccuguggaucuccuucgccaucagcugcuuccugcugugcgugguccugcucggcuucaucaugugggccugccagaagggcaacauccggugcaacaucugcaucuga

SEQ ID NO: 64522 - RNA, 1701 nt, Artificial Sequence
  derived and/or modified CDS sequence (opt1) from hemagglutinin__InfluenzaA__ABC02234
augaagaccaucaucgcccugagcuacauccucugccugguguucgcccagaagcugcccggcaacgacaacuccaccgcgacgcucugccuggggcaccacgccgucccgaacggcacccuggugaagaccaucaccaacgaccagaucgaggugacgaacgccaccgagcucguccagagcuccagcaccgggcgcaucugcgacagcccccaccggauccuggacggcgagaacugcacccugaucgacgcccuccugggggacccccacugcgacggcuuccagaacaaggagugggaccuguucguggagcgcagcaaggccuacuccaacugcuaccccuacgacgugccggacuacgcgagccuccggucccuggucgccagcuccggcacgcuggaguucaacaacgagagcuucaacuggaccgggguggcccagaacggcaccuccuacgccugcaagcgccggagcaucaaguccuucuucagccgccucaacuggcugcaccagcugaaguacaaguaccccgcgcucaacgugaccaugcccaacaacgacaaguucgacaagcuguacaucuggggcguccaccaccccuccacggacagcgaccagaccucccuguacgcccaggccagcgggcgggugaccgugagcaccaagaucucccagcagacggucaucccgaacaucgggagccgccccugggugcggggcguguccagccgcaucuccaucuacuggaccaucgucaagcccggcgacauccuccugaucaacagcaccgggaaccugaucgcgccccggggcuacuucaagauccgcuccgggaaguccuccaucaugcggagcgacgccccgaucggcaagugcaacuccgagugcaucacccccaacggcagcauccccaacgacaagcccuuccagaacgugaaccgcaucacguacggggccugcccgcgguacgugaagcagaacacccucaagcuggccaccggcaugcgcaacguccccgagaagcagacccgggggaucuucggcgccaucgccggguucaucgagaacggcugggagggcaugguggacgggugguacggcuuccgccaccagaacuccgaggggacgggccaggccgcggaccucaagagcacccaggccgccaucaaccagaucaacgggaagcugaaccggcugaucgagaagaccaacgagaaguuccaccagaucgagaaggaguucuccgagguggagggccgcauccaggaccuggagaaguacgucgaggacaccaagaucgaccucuggagcuacaacgccgagcugcugguggcccucgagaaccagcacacgaucgaccugaccgacuccgagaugaacaagcuguucgagcggacccgcaagcagcuccgcgagaacgcggaggacaugggcaacgggugcuucaagaucuaccacaagugcgacaacgccugcaucggcagcauccggaacgggaccuacgaccacgacguguaccgcgacgaggcccugaacaaccgguuccagaucaagggcgucgagcugaaguccggguacaaggacuggauccucuggaucagcuucgccaugagcugcuuccuguucugcgugguccugcucggcuucaucaugugggccugccagaagggcaacauccgcugcaacaucugcaucuga

SEQ ID NO: 64523 - RNA, 1701 nt, Artificial Sequence
  derived and/or modified CDS sequence (opt1) from hemagglutinin__InfluenzaA__ABC02255
augaagaccaucaucgcccugagcuacaucuucugccucgugcuggcccaggaccugcccggcaacgacaacuccaccgcgacgcucugccuggggcaccacgccgucccgaacggcacccuggugaagaccaucaccaacgaccagaucgaggugacgaacgccaccgagcucguccagagcuccagcaccgggaagaucugcaacaacccccaccgcauccuggacggcaucaacugcacccugaucgacgcccuccugggggacccccacugcgacggcuuccagaacgagaagugggaccuguucguggagcgguccaaggccuucagcaacugcuaccccuacgacgugccggacuacgcgucccuccgcagccuggucgccuccagcggcacgcuggaguucaucaacgagggguucaacuggaccggcgugacccagaacgggggcuccaacgccugcaagcgggggcccgacagcggcuucuucucccgccucaacuggcuguacaagagcggcuccaccuaccccgugcugaacgucacgaugcccaacaacgacaacuucgacaagcucuacaucuggggcgugcaccacccgagcaccgaccaggagcagaccaaccuguacgugcaggccuccgggcgggucaccgugagcacgaagcgcucccagcagaccaucauccccaacguggggagccggcccuggguccgcggccugagcucccggaucagcaucuacuggaccaucgugaagcccggcgacauccucgugaucaacuccaacgggaaccugaucgcgccgcgcggccacuucaagaugcggaccggcaagagcuccaucaugcgcagcgacgcccccaucgggacgugcuccagcgagugcaucacccccaacggguccauccccaacgacaagccguuccagaacgucaacaagaucaccuacggcgccugccccaaguacgugaagcagaacacccugaagcucgccacgggcaugcggaacgugcccgagaagcagacccgcgggaucuucggcgccaucgcgggguucaucgagaacggcugggaggggaugaucgacggcugguacggcuuccggcaccagaacagcgaggggaccggccaggccgccgaccugaaguccacccaggccgccaucgaccagaucaacgggaagcugaaccgcgucaucgagaagacgaacgagaaguuccaccagaucgagaaggaguucagcgagguggagggccggauccaggaccucgagaaguacguggaggacaccaagaucgaccugugguccuacaacgcggagcugcucgucgcccuggagaaccagcacaccaucgaccugaccgacagcgagaugaacaagcuguucgagaagacgcgccggcagcuccgcgagaacgccgaggacauggggaacggcugcuucaagaucuaccacaagugcgacaacgccugcaucggcuccauccggaacgggaccuacgaccacgacguguaccgcgacgaggcccugaacaaccgcuuccagaucaagggcgucgagcucaagagcggguacaaggacuggauccuguggaucuccuucgcgaucagcugcuuccugcucugcguggugcugcugggcuucaucaugugggccugccagaagggcaacauccggugcaacaucugcaucuga

SEQ ID NO: 64524 - RNA, 1701 nt, Artificial Sequence
  derived and/or modified CDS sequence (opt1) from hemagglutinin__InfluenzaA__ABC02266
augaagaccaucaucgcccugagcuacaucuucugccucguguucgcccaggaccugcccggcaacgacaacuccaccgcgacgcugugccucgggcaccacgccgucccgaacggcacccuggugaagaccaucaccaacgaccagaucgaggugacgaacgccaccgagcugguccagagcuccagcaccgggaagaucugcgacaacccccaccgcauccucgacggcaucaacugcacccugaucgacgcccugcucggggacccccacugcgacggcuuccagaacgagaagugggaccuguucguggagcgguccaaggccuucagcaacugcuaccccuacgacgugccggacuacgcgucccugcgcagccucgucgccuccagcggcacgcuggaguucaucaacgagggguucaacuggaccggcgugacccagaacgggggcucccgggccugcaagcgcgggcccgacaacggcuucuucagccggcugaacuggcucuacaaguccggcagcaccuaccccgugcagaacgucacgaugcccaacaacgacaacuccgacaagcuguacaucuggggcgugcaccacccgagcaccgacaaggagcagaccgaccuguacgugcaggccuccgggaaggucaccgugagcacgaagcgcucccagcagaccgugauccccaacgucgggagccggcccugggugcgcggccucagcucccgggugagcaucuacuggaccaucgucaagcccggcgacauccuggugaucaacuccaacgggaaccugaucgcgccgcgcggcuacuucaagaugcggaccggcaagagcuccaucaugcgcagcgacgcccccaucgggacgugcuccagcgagugcaucacccccaacggguccauccccaacgacaagccguuccagaacgugaacaagaucaccuacggcgccugccccaaguacgucaagcagaacacccucaagcuggccacgggcaugcggaacgugcccgagaagcagacccgcgggaucuucggcgccaucgcgggguucaucgagaacggcugggaggggaugaucgacggcugguacggcuuccggcaccagaacagcgaggggaccggccaggccgccgaccugaaguccacccaggccgccaucgaccagaucaacgggaagcucaaccgcgugaucgagaagacgaacgagaaguuccaccagaucgagaaggaguucagcgaggucgagggccggauccaggaccuggagaaguacguggaggacaccaagaucgaccugugguccuacaacgcggagcuccuggucgcccuggagaaccagcacaccaucgaccucaccgacagcgagaugaacaagcuguucgagaagacgcgccggcagcugcgcgagaacgccgaggacauggggaacggcugcuucaagaucuaccacaagugcgacaacgccugcaucggcuccauccggaacgggaccuacgaccacgacguguaccgcgacgaggcccucaacaaccgcuuccagaucaagggcguggagcucaagagcggguacaaggacuggauccuguggaucuccuucgcgaucagcugcuuccugcugugcgucgugcugcucggcuucaucaugugggccugccagaagggcaacauccggugcaacaucugcaucuga

SEQ ID NO: 64525 - RNA, 1701 nt, Artificial Sequence
  derived and/or modified CDS sequence (opt1) from hemagglutinin__InfluenzaA__ABC02288
augaagaccaucaucgcccugagcuacauccucugccugguguucgcccagaagauccccggcaacgacaacuccaccgcgacgcugugccucgggcaccacgccgucccgaacggcacccuggugaagaccaucaccaacgaccagaucgaggugacgaacgccaccgagcugguccagagcuccagcaccgggcgcaucugcgacagcccccaccggauccucgacggcgagaacugcacccugaucgacgcccugcucggggacccccacugcgacggcuuccagaacaaggagugggaccuguucguggagcgcagcaaggccuacuccaacugcuaccccuacgacgugccggacuacgcgagccugcggucccucgucgccagcuccggcacgcuggaguucaacaacgagagcuucaacuggaccgggguggcccagaacggcaccuccuacgccugcaagcgccggagcaucaaguccuucuucagccgccugaacuggcuccaccagcugaaguacaaguaccccgcgcugaacgugaccaugcccaacaacgacaaguucgacaagcucuacaucuggggcguccaccaccccuccacggacagcgaccagaccucccuguacgcccaggccagcgggcgggugaccgugagcaccaagcgcucccagcagacggucaucccgaacaucgggagccggcccugggugcgcggcguguccagccggaucuccaucuacuggaccaucgucaagcccggcgacauccugcucaucaacagcaccgggaaccugaucgcgccccgcggcuacuucaagauccgguccgggaaguccuccaucaugcgcagcgacgccccgaucggcaagugcaacuccgagugcaucacccccaacggcagcauccccaacgacaagcccuuccagaacgugaaccggaucacguacggggccugcccgcgcuacgugaagcagaacacccugaagcucgccaccggcaugcggaacguccccgagaagcagacccgcgggaucuucggcgccaucgccggguucaucgagaacggcugggagggcaugguggacgggugguacggcuuccggcaccagaacuccgaggggacgggccaggccgcggaccucaagagcacccaggccgccaucaaccagaucaacgggaagcugaaccgccugaucgagaagaccaacgagaaguuccaccagaucgagaaggaguucuccgagguggagggccggauccaggaccuggagaaguacgucgaggacaccaagaucgaccuguggagcuacaacgccgagcuccugguggcccuggagaaccagcacacgaucgaccucaccgacuccgagaugaacaagcuguucgagcgcacccgcaagcagcugcgggagaacgcggaggacaugggcaacgggugcuucaagaucuaccacaagugcgacaacgccugcaucggcagcauccgcaacgggaccuacgaccacgacguguaccgggacgaggcccucaacaaccgcuuccagaucaagggcgucgagcugaaguccgggcacaaggacuggauccuguggaucagcuucgccaucagcugcuuccuccugugcgugguccugcucggcuucaucaugugggccugccagaagggcaacauccggugcaacaucugcaucuga

SEQ ID NO: 64526 - RNA, 1701 nt, Artificial Sequence; identical to SEQ ID NO: 64494
  derived and/or modified CDS sequence (opt1) from hemagglutinin__InfluenzaA__ABC02299

SEQ ID NO: 64527 - RNA, 1701 nt, Artificial Sequence; identical to SEQ ID NO: 64518
  derived and/or modified CDS sequence (opt1) from hemagglutinin__InfluenzaA__ABC02310

SEQ ID NO: 64528 - RNA, 1701 nt, Artificial Sequence; identical to SEQ ID NO: 64523
  derived and/or modified CDS sequence (opt1) from hemagglutinin__InfluenzaA__ABC02321

SEQ ID NO: 64529 - RNA, 1701 nt, Artificial Sequence; identical to SEQ ID NO: 64329
  derived and/or modified CDS sequence (opt1) from hemagglutinin__InfluenzaA__ABC02332

SEQ ID NO: 64530 - RNA, 1701 nt, Artificial Sequence
  derived and/or modified CDS sequence (opt1) from hemagglutinin__InfluenzaA__ABC39805
augaagaccaucaucgcccugagcuacauccucugccugguguucgcccagaaccugcccggcaacgacaacuccaccgcgacgcucugccuggggcaccacgccgucccgaacggcacccuggugaagaccaucaccaacgaccagaucgaggugacgaacgccaccgagcucguccagagcuccagcgccgggcgcaucugcgacagcccccaccggauccuggacggcaagaacugcacccugaucgacgcccuccugggggacccccacugcgacggcuuccagaacgagaagugggaccuguucguggagcgcagcaaggcguucuccaacugcuaccccuacgacgugcaggacuacgccagccuccggucccuggucgccagcuccggcacccuggaguucaucaacgagggguucaacuggacgggcgugacccagagcgggggcuccuacgccugcaagcgcgggagcggcaacuccuucuucagccggcucaacuggcuguacaaguccgagagcaaguacccggcgcugaacgugaccaugcccaacaacggcaacuucgacaagcucuacaucuggggcguccaccaccccuccaccgacaaggagcagacgaaccuguacgugcgcgccagcggccgggugaccgucagcaccaagcgcucccagcagaccgugauccccaacaucgggccgcggcccugggugcgcggccugagcucccggaucagcaucuacuggacgaucgucaagcccggcgacauccuccugaucaacuccagcgggaaccugaucgcgccccgcggcuacuucaagauccggaccgggaaguccagcaucaugcgcuccgacgccccgaucgggaccugcagcuccgagugcaucacccccaacgggagcauccccaacgacaagcccuuccagaacgugaacaagaucacguacggcgccugcccgaaguacgugaagcagaacacccucaagcuggccaccggcaugcggaacauccccgagaagcagacccgcgggaucuucggcgccaucgccggguucaucgagaacggcugggaggggauggucgacggcugguacggcuuccggcaccagaacuccgaggggacgggccaggccgccgaccugaaguccacccaggcggccaucgaccagaucaacgggaagcucaaccgcgugaucgagaagaccaacgagaaguuccaccagaucgagaaggaguucuccgagguggagggccggauccaggaccuggagaaguacgucgaggacaccaagaucgaccuguggagcuacaacgccgagcuccugguggcccuggagaaccagcacacgaucgaccucaccgacuccgagaugaacaagcuguucgagaagacccgccggcagcugcgcgagaacgccgaggacauggggaacggcugcuucaagaucuaccacaagugcgacaacgcgugcaucggcagcauccgcaacgggaccuacgaccacgacguguaccgggacgaggcccucaacaaccgcuuccagaucaagggcgucgagcugaaguccggguacaaggacuggauccuguggaucagcuucgccaucagcugcuuccuccugugcgugguccugcucggcuucaucaugugggccugccagaagggcaacauccggugcaacaucugcaucuga

SEQ ID NO: 64531 - RNA, 1698 nt, Artificial Sequence
  derived and/or modified CDS sequence (opt1) from hemagglutinin__InfluenzaA__ABC40522
augaaggugaagcugcucauccugcugugcaccuucaccgccacguacgccgacaccaucugcaucggcuaccacgcgaacaacagcaccgacaccgucgacacggugcucgagaagaacgugaccgucacccacuccgugaaccugcuggaggacagccacaacgggaagcucugccugcugaagggcaucgcgccccuccagcuggggaacugcuccguggccggcuggauccuggggaacccggagugcgagcuccugaucagcaaggaguccuggagcuacaucgucgagacccccaaccccgagaacggcgccugcuaccccggcuacuucgccgacuacgaggagcugcgcgagcagcucuccagcguguccagcuucgagcgguucgagaucuucccgaaggaguccagcuggcccaaccacacggugaccggggucuccgccagcugcucccacaacggcaagagcuccuucuacaagaaccugcuguggcucaccgggaagaacggccuguaccccaaccugagcaaguccuacgccaacaacaaggagaaggaggugcucauccuguggggcgugcaccacccgcccaacaucggggaccagcgcacccuguaccacacggagaacgccuacgucagcguggugagcucccacuacagccggcgcuucacccccgagaucaccaagcggcccaagguccgcgaccaggagggccggaucaacuacuacuggacccuccuggagcccggggacacgaucaucuucgaggccaacggcaaccugaucgcgccgugguacgccuucgcccucucccgcggguucggcagcggcaucaucaccuccaacgcccccauggacgagugcgacgccaagugccagacgccccagggggcgaucaacagcucccugcccuuccagaacgugcacccggugaccaucggcgagugccccaaguacguccggagcgccaagcugcgcauggugaccgggcuccggaacauccccuccauccagagccgcggccuguucggggccaucgccggcuucaucgagggcggguggaccggcaugguggacgggugguacggcuaccaccaccagaacgagcagggguccggcuacgccgcggaccagaaguccacccagaacgccaucaacggcaucaccaacaaggucaacagcgugaucgagaagaugaacacgcaguucaccgccguggggaaggaguucaacaagcuggagcggcgcauggagaaccucaacaagaaggucgacgacggcuuccuggacaucuggaccuacaacgccgagcugcucgugcugcuggagaacgagcggacccucgacuuccacgacagcaacgucaagaaccuguacgagaaggugaagucccagcugaagaacaacgccaaggagaucgggaacggcugcuucgaguucuaccacaagugcaacaacgagugcauggagagcgugaagaacgggacguacgacuaccccaaguacuccgaggagagcaagcucaaccgcgagaagaucgacggcgucaagcuggacuccaugggcguguaccagauccuggcgaucuacagcaccguggccagcucccucguccugcuggugagccucggggccaucuccuucuggaugugcagcaacggcucccugcagugccggaucugcaucuga

SEQ ID NO: 64532 - RNA, 1698 nt, Artificial Sequence; identical to SEQ ID NO: 64320
  derived and/or modified CDS sequence (opt1) from hemagglutinin__InfluenzaA__ABC40533

SEQ ID NO: 64533 - RNA, 1701 nt, Artificial Sequence
  derived and/or modified CDS sequence (opt1) from hemagglutinin__InfluenzaA__ABC40555
augaagaccaucaucgcccugagcuacaucuucugccucguguucgcccagaaccugccccgcaacgacaaguccaccgcgacgcugugccucggccaccacgccgucccgaacgggacccuggugaagaccaucaccaacgaccagaucgaggugacgaacgccaccgagcugguccagagcuccagcaccggccggaucugcgacagcccccaccgcauccucgacgggaagaacugcacccugguggacgcccugcucggcgacccccacugcgacggguuccagaacgagaagugggaccuguucguggagcgguccaaggccuucuccaacugcuaccccuacgacgucccggacuacgcgagccugcgcucccucguggccagcuccggcacgcuggaguucaucaacgagagcuucaacuggaccggcgugacccaguccgggggcagcuacgccugcaagcggggguccgacaacagcuucuucucccgccugaacuggcucuacgagagcgaguccaaguaccccguccugaacgugaccaugcccaacaacggcaacuucgacaagcuguacaucuggggcgugcaccaccccagcacggacaaggagcagaccaaccucuacguccgggccagcgggcgcgugaccguguccaccaagcggagccagcagacgaucaucccgaacaucggcucccgccccuggguccgggggcugagcucccgcaucagcaucuacuggaccaucgugaagcccggcgacauccugcucaucaacuccaacgggaaccugaucgcgccccggggcuacuucaagauccgcaccggcaagagcuccaucaugcggagcgacgccccgaucgggaccugcuccagcgagugcaucacgcccaacggcuccauccccaacgacaagcccuuccagaacgugaacaagaucaccuacggggccugcccgaaguacgucaagcagaacacccugaagcucgccaccggcaugcgcaacgugcccgagaagcagacgcgggggaucuucggcgccaucgcgggcuucaucgagaacgggugggagggcaugguggacgggugguacggcuuccgccaccagaacagcgaggggaccggccaggccgccgaccugaaguccacccaggccgccaucgaccagaucaacggcaagcugaaccgggucaucgagaagaccaacgagaaguuccaccagaucgagaaggaguucagcgagguggaggggcgcauccaggaccucgagaaguacguggaggacacgaagaucgaccugugguccuacaacgcggagcugcucgucgcccuggagaaccagcacaccaucgaccugaccgacagcgagaugaacaagcuguucgagaagacccggcgccagcuccgcgagaacgccgaggacaugggcaacgggugcuucaagaucuaccacaagugcgacaacgccugcaucggcuccauccggaacgggacguacgaccacgacguguaccgcgacgaggcccugaacaaccgguuccagaucaagggcgucgagcucaagagcggcuacaaggacuggauccuguggaucagcuucgcgaucuccugcuuccugcucugcguggugcugcugggguucaucaugugggccugccagaagggcaacauccgcugcaacaucugcaucuga

SEQ ID NO: 64534 - RNA, 1701 nt, Artificial Sequence
  derived and/or modified CDS sequence (opt1) from hemagglutinin__InfluenzaA__ABC40608
augaagaccaucaucgcccugagcuacauccucugccugguguucgcccagaagcugcccggcaacgacaacuccaccgcgacgcucugccuggggcaccacgccgucccgaacggcacccuggugaagaccaucaccaacgaccagaucgaggugacgaacgccaccgagcucguccagagcuccagcaccgggcgcaucugcgacagcccccaccggauccuggacggcgagaacugcacccugaucgacgcccuccugggggacccccacugcgacggcuuccagaacaaggagugggaccuguucguggagcgcagcaaggccuacuccaacugcuaccccuacgacgugccggacuacgcgagccuccggucccuggucgccagcuccggcacgcuggaguucaacaacgagagcuucaacuggaccgggguggcccagaacggcaccuccagcgccugcaagcgccgguccaucaagagcuucuucucccgccucaacuggcugcaccagcugaaguacaaguaccccgcgcucaacgugaccaugcccaacaacgacaaguucgacaagcuguacaucuggggcguccaccaccccagcacggacuccgaccagaccagccuguacgcccaggccagcgggcgggugaccguguccacccgccggagccagcagacggucaucccgaacaucgggucccgccccugggugcggggcgugagcucccgcaucagcaucuacuggaccaucgucaagcccggcgacauccuccugaucaacuccaccgggaaccugaucgcgccccggggcuacuucaagauccgcagcgggaaguccagcaucaugcgguccgacgccccgaucggcaagugcaacagcgagugcaucacccccaacggcuccauccccaacgacaagcccuuccagagcgugaaccgcaucacguacggggccugcccgcgguacgugaagcagaacacccucaagcuggccaccggcaugcgcaacguccccgagaagcagacccgggggaucuucggcgccaucgccggguucaucgagaacggcugggagggcaugguggacgggugguacggcuuccgccaccagaacuccgaggggacgggccaggccgcggaccugaaguccacccaggccgccaucaaccagaucaacgggaagcucaaccggcugaucgagaagaccaacgagaaguuccaccagaucgagaaggaguucuccgagguggagggccgcauccaggaccuggagaaguacgucgaggacaccaagaucgaccucuggagcuacaacgccgagcugcugguggcccucgagaaccagcacacgaucgaccugaccgacuccgagaugaacaagcuguucgagcgcacccggaagcagcuccgcgagaacgcggaggacaugggcaacgggugcuucaagaucuaccacaagugcgacaacgccugcaucggcagcauccggaacgggaccuacgaccacgacguguaccgcgacgaggcccugaacaaccgguuccagaucaagggcgucgagcucaagagcggguacaaggacuggauccuguggaucuccuucgccaucagcugcuuccugcugugcgugguccuccugggcuucaucaugugggccugccagaagggcaacauccgcugcaacaucugcaucuga

SEQ ID NO: 64535 - RNA, 1701 nt, Artificial Sequence
  derived and/or modified CDS sequence (opt1) from hemagglutinin__InfluenzaA__ABC40619
augaagaccaucaucgcccugagcuacaucuucugccucgugcugggccaggacuucuccgggaacgacaacagcaccgccacgcugugccucggccaccacgcgguccccaacgggacccuggugaagaccaucaccaacgaccagaucgaggugacgaacgccaccgagcugguccaguccagcuccaccggcaagaucugcaacaacccgcaccgcauccucgacgggaucgacugcacccugaucgacgcccugcucggcgacccccacugcgacggcuuccagaacgagacgugggaccuguucguggagcggagcaaggccuucuccaacugcuaccccuacgacgugcccgacuacgccagccugcgcucccucgucgcgagcuccgggacccuggaguucaucaacgagggcuucaacuggaccggggugacccagaacggcgggagcaacgccugcaagcggggcccggacuccggcuucuucagccgccugaacuggcucuacaaguccgggagcacguaccccgugcugaacgucuccaugcccaacaacgacaacuucgacaagcuguacaucuggggcgugcaccaccccagcaccgaccaggagcagaccaaccucuacgugcaggccuccgggcgggucaccgugagcacgaagcgcagccagcagaccaucaucccgaacaucggcucccggcccugggugcgcggccugagcucccggaucagcaucuacuggaccaucgucaagcccggggacauccuggugaucaacuccaacggcaaccucaucgcgccccgcggguacuucaagaugcggaccggcaagagcuccaucaugcgcagcgacgccccgaucgggacgugcaucuccgagugcaucacccccaacggcagcauccccaacgacaagcccuuccagaacgugaacaagaucaccuacggcgccugcccgaaguacgucaagcagaacacccugaagcuggccacggggaugcggaacgugcccgagaagcagacccgcggcaucuucggggccaucgccggcuucaucgagaacgggugggagggcaugaucgacggcugguacggguuccggcaccagaacuccgagggcaccgggcaggcggccgaccucaagagcacccaggccgccaucgaccagaucaacggcaagcugaaccgcaucaucgagaagacgaacgagaaguuccaccagaucgagaaggaguucuccgagguggaggggcggauccaggaccuggagaaguacgucgaggacaccaagaucgaccucuggagcuacaacgccgagcugcugguggcgcucgagaaccagcacaccaucgaccugaccgacuccgagaugaacaagcuguucgagaagacgcgccggcagcuccgcgagaacgccgaggacaugggcaacggcugcuucaagaucuaccacaagugcgacaacgccugcaucgggagcauccggaacggcaccuacgaccacgacguguaccgcgacgaggcccugaacaaccgcuuccagaucaagggggucgagcugaaguccggcuacaaggacuggauccucuggaucagcuucgccaucuccugcuuccugcugugcgugguccuccugggcuucaucaugugggcgugccagaaggggaacauccggugcaacaucugcaucuga

SEQ ID NO: 64536 - RNA, 1698 nt, Artificial Sequence
  derived and/or modified CDS sequence (opt1) from hemagglutinin__InfluenzaA__ABC40631
augaaggugaagcugcucauccugcugugcaccuucaccgccacguacgccgacaccaucugcaucggcuaccacgcgaacaacagcaccgacaccgucgacacggugcucgagaagaacgugaccgucacccacuccgugaaccugcuggaggacagccacaacgggaagcucugccugcugaagggcaucgcgccccuccagcuggggaacugcuccguggccggcuggauccuggggaacccggagugcgagcuccugaucagcaaggaguccuggagcuacaucgucgagacccccaaccccgagaacggcacgugcuaccccggcuacuucgccgacuacgaggagcugcgcgagcagcucuccagcguguccagcuucgagcgguucgagaucuucccgaaggaguccagcuggcccaaccacaccgugaccggggucuccgccagcugcucccacaacggcaagagcuccuucuaccgcaaccugcuguggcucaccgggaagaacggccuguaccccaaccugagcaaguccuacgccaacaacaaggagaaggaggugcucauccuguggggcgugcaccacccgcccaacaucggggaccagcggacgcuguaccacaccgagaacgccuacgucagcguggugagcucccacuacagccgccgguucacccccgagaucaccaagcgccccaagguccgggaccaggagggccgcaucaacuacuacuggacgcuccuggagcccggggacaccaucaucuucgaggccaacggcaaccugaucgccccgugguacgcguucgcccucucccggggguucggcagcggcaucaucaccuccaacgcccccauggacgagugcgacgccaagugccagacgccccagggggccaucaacagcucccugcccuuccagaacgugcacccggugaccaucggcgagugccccaaguacguccgcagcgcgaagcugcggauggugaccgggcuccgcaacauccccuccauccagagccggggccuguucggggccaucgccggcuucaucgagggcggguggaccggcaugguggacgggugguacggcuaccaccaccagaacgagcagggguccggcuacgccgccgaccagaaguccacccagaacgcgaucaacggcaucacgaacaaggucaacagcgugaucgagaagaugaacacccaguucaccgccguggggaaggaguucaacaagcuggagcgccggauggagaaccucaacaagaaggucgacgacggcuuccuggacaucuggaccuacaacgccgagcugcucgugcugcuggagaacgagcgcacgcucgacuuccacgacagcaacgucaagaaccuguacgagaaggugaagucccagcugaagaacaacgccaaggagaucgggaacggcugcuucgaguucuaccacaagugcaacaacgagugcauggagagcgugaagaacgggaccuacgacuaccccaaguacuccgaggagagcaagcucaaccgggagaagaucgacggcgucaagcuggaguccaugggcguguaccagauccuggccaucuacagcaccguggcgagcucccucguccugcuggugagccucggggccaucuccuucuggaugugcagcaacggcucccugcagugccgcaucugcaucuga

SEQ ID NO: 64537 - RNA, 1701 nt, Artificial Sequence
  derived and/or modified CDS sequence (opt1) from hemagglutinin__InfluenzaA__ABC41692
augaagaccaucaucgcccugagcuacauccucugccugguguucgcccagaagcccccgggcaacgacaacuccaccgcgacgcugugccucgggcaccacgccguccccaacggcaccaucgugaagaccaucaccaacgaccagaucgaggugacgaacgccaccgagcugguccagagcuccagcaccgggggcaucugcgacagcccccaccagauccuggacggggagaacugcacccucaucgacgcccugcugggcgacccccagugcgacggcuuccagaacaagaagugggaccucuucguggagcgcuccaaggccuacuccaacugcuacccguacgacgugcccgaccacgcgagccugcggucccuggucgccagcuccgggacgcucgaguucaacaacgagagcuucgacuggaccggcgugacccagaacgggaccuccagcgccugcaagcgccgguccaacaagagcuucuucucccgccugaacuggcugacgcaccucaaguacaaguaccccgcccugaacgugaccaugcccaacaacgagaaguucgacaagcuguacaucuggggcguccaccacccggggaccgacagcgaccagaucucccucuacgcgcaggccagcggccggaucaccgugagcacgaagcgcucccagcagaccgugauccccaacaucggcagccggccccgcguccgggacguguccagccgcaucuccaucuacuggaccaucgugaagcccggggacauccugcugaucaacagcaccggcaaccucaucgccccgcggggguacuucaagauccgcuccggcaagagcuccaucaugcggagcgacgcccccaucggcaagugcaacuccgagugcaucacgcccaacgggagcauccccaacgacaagccguuccagaacgucaaccgcaucaccuacggcgccugcccccgguacgugaagcagaacacccugaagcuggcgaccgggaugcgcaacgugcccgagaagcagacgcggggcaucuucggggccaucgccggcuucaucgagaacggcugggaggggauggucgacggcugguacggguuccgccaccagaacuccgagggcaccgggcaggccgccgaccucaagagcacccaggcggccaucaaccagaucaacggcaagcugaaccggcugaucggcaagaccaacgagaaguuccaccagaucgagaaggaguucuccgagguggaggggcgcauccaggaccucgagaaguacguggaggacacgaagaucgaccuguggagcuacaacgccgagcugcucgucgcccuggagaaccagcacaccaucgaccugaccgacuccgagaugaacaagcuguucgagcggaccaagaagcagcuccgcgagaacgccgaggacaugggcaacgggugcuucaagaucuaccacaagugcgacaacgcgugcaucggcagcauccgcaacgggacguacgaccacgacguguaccgggacgaggcccugaacaaccgcuuccagaucaagggcguggagcucaaguccggcuacaaggacuggauccuguggaucagcuucgccaucagcugcuuccugcucugcgucgcccugcugggguucaucaugugggccugccagaagggcaacauccggugcaacaucugcaucuga

SEQ ID NO: 64538 - RNA, 1698 nt, Artificial Sequence; identical to SEQ ID NO: 64323
  derived and/or modified CDS sequence (opt1) from hemagglutinin__InfluenzaA__ABC41714

SEQ ID NO: 64539 - RNA, 1701 nt, Artificial Sequence
  derived and/or modified CDS sequence (opt1) from hemagglutinin__InfluenzaA__ABC41725
augaagaccaccaucgcccugagcuacauccucugccugguguucgcccagaagcugcccggcaacgacaacuccacggcgacccucugccuggggcaccacgccgucccgaacggcaccaucgugaagaccaucacgaacgaccagaucgaggugaccaacgccaccgagcugguccagagcuccagcaccgggggcaucugcgacagcccccaccagauccucgacggggagaacugcacgcugaucgacgcccugcucggcgacccccagugcgacggcuuccagaacaagaagugggaccuguucguggagcgcagcaaggccuacuccaacugcuaccccuacgacgugccggaccacgcgagccugcggucccucgucgccagcuccgggacccuggaguucaacaacgagagcuucgacuggaccggcgugacccagaacgggacguccagcgccugcaagcgccgguccaacaagagcuucuucucccgccugaacuggcucacccaccugaaguacaaguaccccgcccugaacgugaccaugcccaacaacgagaaguucgacaagcucuacaucuggggcguccaccaccccgggaccgacagcgaccagaucucccuguacgcgcaggccagcggccggaucacggugagcaccaagcgcucccagcagaccgugaucccgaacaucggcagccggccccgcguccgggacguguccagccgcaucuccaucuacuggaccaucgugaagcccggggacauccugcucaucaacagcacgggcaaccugaucgcgccccggggguacuucaagauccgcuccggcaagagcuccaucaugcggagcgacgccccgaucggcaagugcaacuccgagugcaucacccccaacgggagcauccccaacgacaagcccuuccagaacgucaaccgcaucaccuacggcgccugcccgcgguacgugaagcagaacacccugaagcucgccacggggaugcgcaacgugcccgagaagcagacccggggcaucuucggggccaucgccggcuucaucgagaacggcugggaggggauggucgacggcugguacggguuccgccaccagaacuccgagggcaccgggcaggccgccgaccugaaguccacccaggcggccaucaaccagaucaacggcaagcugaaccggcucaucggcaagacgaacgagaaguuccaccagaucgagaaggaguucuccgagguggaggggcgcauccaggaccuggagaaguacguggaggacaccaagaucgaccuguggagcuacaacgccgagcuccuggucgcccuggagaaccagcacaccaucgaccucaccgacuccgagaugaacaagcuguucgagcggacgaagaagcagcugcgcgagaacgccgaggacaugggcaacgggugcuucaagaucuaccacaagugcgacaacgcgugcaucggcagcauccgcaacgggaccuacgaccacgacguguaccgggacgaggcccucaacaaccgcuuccagaucaagggcguggagcugaaguccggcuacaaggacuggauccuguggaucagcuucgccaucagcugcuuccuccugugcgucgcccugcucggguucaucaugugggccugccagaagggcaacauccggugcaacaucugcaucuga

SEQ ID NO: 64540 - RNA, 1701 nt, Artificial Sequence
  derived and/or modified CDS sequence (opt1) from hemagglutinin__InfluenzaA__ABC41736
augaagaccaucaucgcccugagcuacauccucugccugguguucgcccagaagcugcccggcaacgacaacuccaccgcgacgcucugccuggggcaccacgccgucccgaacggcaccaucgugaagaccaucaccaacgaccagaucgaggugacgaacgccaccgagcugguccagagcuccagcaccgggggcaucugcgacagcccccaccagauccucgacggggagaacugcacccugaucgacgcccugcucggcgacccccagugcgacggcuuccagaacaagaagugggaccuguucguggagcgcagcaaggccuacuccaacugcuaccccuacgacgugccggaccacgcgagccugcggucccucgucgccagcuccgggacgcuggaguucaacaacgagagcuucgacuggaccggcgugacccagaacgggaccuccagcgccugcaagcgccgguccaacaagagcuucuucucccgccugaacuggcucacgcaccugaaguacaaguaccccgcccugaacgugaccaugcccaacaacgagaaguucgacaagcucuacaucuggggcguccaccaccccgggaccgacagcgaccagaucucccuguacgcgcaggccagcggccggaucaccgugagcacgaagcgcucccagcagaccgugaucccgaacaucggcagccggccccgcguccgggacguguccagccgcaucuccaucuacuggaccaucgugaagcccggggacauccugcucaucaacagcaccggcaaccugaucgcgccccggggguacuucaagauccgcuccggcaagagcuccaucaugcggagcgacgccccgaucggcaagugcaacuccgagugcaucacgcccaacgggagcauccccaacgacaagcccuuccagaacgucaaccgcaucaccuacggcgccugcccgcgguacgugaagcagaacacccugaagcucgccaccgggaugcgcaacgugcccgagaagcagacgcggggcaucuucggggccaucgccggcuucaucgagaacggcugggaggggauggucgacggcugguacggguuccgccaccagaacuccgagggcaccgggcaggccgccgaccugaaguccacccaggcggccaucaaccagaucaacggcaagcugaaccggcucaucggcaagaccaacgagaaguuccaccagaucgagaaggaguucuccgagguggaggggcgcauccaggaccuggagaaguacguggaggacacgaagaucgaccuguggagcuacaacgccgagcuccuggucgcccuggagaaccagcacaccaucgaccucaccgacuccgagaugaacaagcuguucgagcggaccaagaagcagcugcgcgagaacgccgaggacaugggcaacgggugcuucaagaucuaccacaagugcgacaacgcgugcaucggcagcauccgcaacgggacguacgaccacgacguguaccgggacgaggcccucaacaaccgcuuccagaucaagggcguggagcugaaguccggcuacaaggacuggauccuguggaucagcuucgccaucagcugcuuccuccugugcgucgcccugcucggguucaucaugugggccugccagaagggcaacauccggugcaacaucugcaucuga

SEQ ID NO: 64541 - RNA, 1701 nt, Artificial Sequence; identical to SEQ ID NO: 64540
  derived and/or modified CDS sequence (opt1) from hemagglutinin__InfluenzaA__ABC41952

SEQ ID NO: 64542 - RNA, 1701 nt, Artificial Sequence; identical to SEQ ID NO: 64540
  derived and/or modified CDS sequence (opt1) from hemagglutinin__InfluenzaA__ABC41953

SEQ ID NO: 64543 - RNA, 1701 nt, Artificial Sequence; identical to SEQ ID NO: 64540
  derived and/or modified CDS sequence (opt1) from hemagglutinin__InfluenzaA__ABC41964

SEQ ID NO: 64544 - RNA, 1701 nt, Artificial Sequence; identical to SEQ ID NO: 64540
  derived and/or modified CDS sequence (opt1) from hemagglutinin__InfluenzaA__ABC42014

SEQ ID NO: 64545 - RNA, 1701 nt, Artificial Sequence; identical to SEQ ID NO: 64540
  derived and/or modified CDS sequence (opt1) from hemagglutinin__InfluenzaA__ABC42114

SEQ ID NO: 64546 - RNA, 1701 nt, Artificial Sequence; identical to SEQ ID NO: 64540
  derived and/or modified CDS sequence (opt1) from hemagglutinin__InfluenzaA__ABC42125

SEQ ID NO: 64547 - RNA, 1701 nt, Artificial Sequence; identical to SEQ ID NO: 64540
  derived and/or modified CDS sequence (opt1) from hemagglutinin__InfluenzaA__ABC42136

SEQ ID NO: 64548 - RNA, 1701 nt, Artificial Sequence
  derived and/or modified CDS sequence (opt1) from hemagglutinin__InfluenzaA__ABC42147
augaagaccaucaucgcccugagcuacauccucugccugguguucgcccagaagcugcccggcaacgacaacuccaccgcgacgcucugccuggggcaccacgccgucccgaacggcaccaucgugaagaccaucaccaacgaccagaucgaggugacgaacgccaccgagcugguccagagcuccagcaccgggggcaucugcgacagcccccaccagauccucgacggggagaacugcacccugaucgacgcccugcucggcgacccccagugcgacggcuuccagaacaagaagugggaccuguucguggagcgcagcaaggccuacuccaacugcuaccccuacgacgugccggaccacgcgagccugcggucccucgucgccagcuccgggacgcuggaguucaacaacgagagcuucgacuggaccggcgugacccagaacgggaccuccagcgccugcaagcgccgguccaacaagagcuucuucucccgccugaacuggcucacgcaccugaaguacaaguaccccgcccugaacgugaccaugcccaacaacgagaaguucgacaagcucuacaucuggggcguccaccaccccgggaccgacagcgaccagaucucccuguacgcgcaggccagcggccggaucaccgugagcacgaagcgcucccagcagaccgugaucccgaacaucggcagccggccccgcguccgggacguguccagccgcaucuccaucuacuggaccaucgugaagcccggggacauccugcucaucaacagcaccggcaaccugaucgcgccccggggguacuucaagauccgcuccggcaagagcuccaucaugcggagcgacgucccgaucggcaagugcaacuccgagugcaucacgcccaacgggagcauccccaacgacaagcccuuccagaacgugaaccgcaucaccuacggcgccugcccgcgguacgugaagcagaacacccugaagcucgccaccgggaugcgcaacguccccgagaagcagacgcggggcaucuucggggccaucgccggcuucaucgagaacggcugggaggggaugguggacggcugguacggguuccgccaccagaacuccgagggcaccgggcaggccgccgaccugaaguccacccaggccgcgaucaaccagaucaacggcaagcugaaccggcucaucggcaagaccaacgagaaguuccaccagaucgagaaggaguucuccgagguggaggggcgcauccaggaccuggagaaguacgucgaggacacgaagaucgaccuguggagcuacaacgccgagcuccugguggcccuggagaaccagcacaccaucgaccucaccgacuccgagaugaacaagcuguucgagcggaccaagaagcagcugcgcgagaacgccgaggacaugggcaacgggugcuucaagaucuaccacaagugcgacaacgccugcaucggcagcauccgcaacgggacguacgaccacgacguguaccgggacgaggcgcucaacaaccgcuuccagaucaagggcgucgagcugaaguccggcuacaaggacuggauccuguggaucagcuucgccaucagcugcuuccuccugugcguggcccugcucggguucaucaugugggccugccagaagggcaacauccggugcaacaucugcaucuga

SEQ ID NO: 64549 - RNA, 1701 nt, Artificial Sequence; identical to SEQ ID NO: 64540
  derived and/or modified CDS sequence (opt1) from hemagglutinin__InfluenzaA__ABC42158

SEQ ID NO: 64550 - RNA, 1701 nt, Artificial Sequence; identical to SEQ ID NO: 64540
  derived and/or modified CDS sequence (opt1) from hemagglutinin__InfluenzaA__ABC42169

SEQ ID NO: 64551 - RNA, 1701 nt, Artificial Sequence; identical to SEQ ID NO: 64540
  derived and/or modified CDS sequence (opt1) from hemagglutinin__InfluenzaA__ABC42180

SEQ ID NO: 64552 - RNA, 1701 nt, Artificial Sequence; identical to SEQ ID NO: 64540
  derived and/or modified CDS sequence (opt1) from hemagglutinin__InfluenzaA__ABC42192

SEQ ID NO: 64553 - RNA, 1701 nt, Artificial Sequence; identical to SEQ ID NO: 64540
  derived and/or modified CDS sequence (opt1) from hemagglutinin__InfluenzaA__ABC42307

SEQ ID NO: 64554 - RNA, 1701 nt, Artificial Sequence
  derived and/or modified CDS sequence (opt1) from hemagglutinin__InfluenzaA__ABC42318
augaagaccaucaucgcccugagcuacauccucugccugguguucgcccagaagcugcccggcaacgacaacuccaccgcgacgcucugccuggggcaccacgccgucccgaacggcaccaucgugaagaccaucaccaacgaccagaucgaggugacgaacgccaccgagcugguccagagcuccagcaccgggggcaucugcgacagcccccaccagauccucgacggggagaacugcacccugaucgacgcccugcucggcgacccccagugcgacggcuuccagaacaagaagugggaccuguucguggagcgcuccaaggccuacuccaacugcuaccccuacgacgugccggaccacgcgagccugcggucccucgucgccagcuccgggacgcuggaguucaacaacgagagcuucgacuggaccggcgugacccagaacgggaccuccagcgccugcaagcgccgguccaacaagagcuucuucucccgccugaacuggcucacgcaccugaaguacaaguaccccgcccugaacgugaccaugcccaacaacgagaaguucgacaagcucuacaucuggggcguccaccaccccgggaccgacagcgaccagaucucccuguacgcgcaggccagcggccggaucaccgugagcacgaagcgcucccagcagaccgugaucccgaacaucggcagccggccccgcguccgggacguguccagccgcaucuccaucuacuggaccaucgugaagcccggggacauccugcucaucaacagcaccggcaaccugaucgcgccccggggguacuucaagauccgcuccggcaagagcuccaucaugcggagcgacgccccgaucggcaagugcaacuccgagugcaucacgcccaacgggagcauccccaacgacaagcccuuccagaacgucaaccgcaucaccuacggcgccugcccgcgguacgugaagcagaacacccugaagcucgccaccgggaugcgcaacgugcccgagaagcagacgcggggcaucuucggggccaucgccggcuucaucgagaacggcugggaggggauggucgacggcugguacggguuccgccaccagaacuccgagggcaccgggcaggccgccgaccucaagagcacccaggcggccaucaaccagaucaacggcaagcugaaccggcucaucggcaagaccaacgagaaguuccaccagaucgagaaggaguucuccgagguggaggggcgcauccaggaccuggagaaguacguggaggacacgaagaucgaccuguggagcuacaacgccgaguuccucgucgcccuggagaaccagcacaccaucgaccugaccgacuccgagaugaacaagcuguucgagcggaccaagaagcagcugcgcgagaacgccgaggacaugggcaacgggugcuucaagaucuaccacaagugcgacaacgcgugcaucggcagcauccgcaacgggacguacgaccacgacguguaccgggacgaggcccugaacaaccgcuuccagaucaagggcguggagcucaaguccggcuacaaggacuggauccuguggaucagcuucgccaucagcugcuuccugcucugcgucgcccugcugggguucaucaugugggccugccagaagggcaacauccggugcaacaucugcaucuga

SEQ ID NO: 64555 - RNA, 1701 nt, Artificial Sequence; identical to SEQ ID NO: 64540
  derived and/or modified CDS sequence (opt1) from hemagglutinin__InfluenzaA__ABC42346

SEQ ID NO: 64556 - RNA, 1701 nt, Artificial Sequence; identical to SEQ ID NO: 64540
  derived and/or modified CDS sequence (opt1) from hemagglutinin__InfluenzaA__ABC42461

SEQ ID NO: 64557 - RNA, 1701 nt, Artificial Sequence; identical to SEQ ID NO: 64540
  derived and/or modified CDS sequence (opt1) from hemagglutinin__InfluenzaA__ABC42494

SEQ ID NO: 64558 - RNA, 1701 nt, Artificial Sequence; identical to SEQ ID NO: 64540
  derived and/or modified CDS sequence (opt1) from hemagglutinin__InfluenzaA__ABC42505

SEQ ID NO: 64559 - RNA, 1701 nt, Artificial Sequence
  derived and/or modified CDS sequence (opt1) from hemagglutinin__InfluenzaA__ABC42516
augaagaccaucaucgcccugagcuacauccucugccugguguucgcccagaagcugcccggcaacgacaacuccaccgcgacgcucugccuggggcaccacgccgucccgaacggcaccaucgugaagaccaucaccaacgaccagaucgaggugacgaacgccaccgagcugguccagagcuccagcaccgggggcaucugcgacagcccccaccagauccucgacggggagaacugcacccugaucgacgcccugcucggcgacccccagugcgacggcuuccagaacaagaagugggaccuguucguggagcgcagcaaggccuacuccaacugcuaccccuacgacgugccggaccacgcgagccugcggucccucgucgccagcuccgggacgcuggaguucaacaacgagagcuucgacuggaccggcgugacccagaacgggaccuccagcgccugcaagcgccgguccaacaagagcuucuucucccgccugaacuggcucacgcaccugaaguacaaguaccccgcccugaacgugaccaugcccaacaacgagaaguucgacaagcucuacaucuggggcguccaccaccccgggaccgacagcgaccagaucucccuguacgcgcaggccagcggccggaucaccgugagcacgaagcgcucccagcagaccgugaucccgaacaucggcagccggccccgcguccgggacguguccagccgcaucuccaucuacuggaccaucgugaagcccggggacauccugcucaucaacagcaccggcaaccugaucgcgccccggggguacuucaagauccgcuccggcaagagcuccaucaugcggagcgacgccccgaucggcaagugcaacuccgagugcaucacgcccaacgggagcauccccaacgacaagcccuuccagaacgucaaccgcaucaccuacggcgccugcccgcgguacgugaagcagaacacccugaagcucgccaccgggaugcgcaacgugcccgagaagcagacgcggggcaucuucggggccaucgccggcuucaucgagaacggcugggaggggauggucgacggcugguacggguuccgccaccagaacuccgagggcaccgggcaggccgccgaccugaaguccacccaggcggccaucaaccagaucaacggcaagcugaacaagcucaucggcaagaccaacgagaaguuccaccagaucgagaaggaguucuccgagguggaggggcggauccaggaccuggagaaguacguggaggacacgaagaucgaccuguggagcuacaacgccgagcuccuggucgcccuggagaaccagcacaccaucgaccucaccgacuccgagaugaacaagcuguucgagcgcaccaagaagcagcugcgggagaacgccgaggacaugggcaacgggugcuucaagaucuaccacaagugcgacaacgcgugcaucggcagcauccgcaacgggacguacgaccacgacguguaccgcgacgaggcccucaacaaccgguuccagaucaagggcguggagcugaaguccggcuacaaggacuggauccuguggaucagcuucgccaucagcugcuuccuccugugcgucgcccugcucggguucaucaugugggccugccagaagggcaacauccgcugcaacaucugcaucuga

SEQ ID NO: 64560 - RNA, 1701 nt, Artificial Sequence; identical to SEQ ID NO: 64540
  derived and/or modified CDS sequence (opt1) from hemagglutinin__InfluenzaA__ABC42527

SEQ ID NO: 64561 - RNA, 1701 nt, Artificial Sequence; identical to SEQ ID NO: 64540
  derived and/or modified CDS sequence (opt1) from hemagglutinin__InfluenzaA__ABC42574

SEQ ID NO: 64562 - RNA, 1701 nt, Artificial Sequence; identical to SEQ ID NO: 64540
  derived and/or modified CDS sequence (opt1) from hemagglutinin__InfluenzaA__ABC42585

SEQ ID NO: 64563 - RNA, 1701 nt, Artificial Sequence; identical to SEQ ID NO: 64267
  derived and/or modified CDS sequence (opt1) from hemagglutinin__InfluenzaA__ABC42596

SEQ ID NO: 64564 - RNA, 1701 nt, Artificial Sequence; identical to SEQ ID NO: 64306
  derived and/or modified CDS sequence (opt1) from hemagglutinin__InfluenzaA__ABC42607

SEQ ID NO: 64565 - RNA, 1701 nt, Artificial Sequence; identical to SEQ ID NO: 64306
  derived and/or modified CDS sequence (opt1) from hemagglutinin__InfluenzaA__ABC42618

SEQ ID NO: 64566 - RNA, 1701 nt, Artificial Sequence
  derived and/or modified CDS sequence (opt1) from hemagglutinin__InfluenzaA__ABC42629
augaagaccaucaucgcccugagcuacauccucugccugguguucgcccagaagcugcccggcaacgacaacuccaccgcgacgcucugccuggggcaccacgccgucccgaacggcaccaucgugaagaccaucaccaacgaccagaucgaggugacgaacgccaccgagcugguccagagcuccagcaccgggggcaucugcgacagcccccaccagauccucgacggggagaacugcacccugaucgacgcccugcucggcgacccccagugcgacggcuuccagaacaagaagugggaccuguucguggagcgcagcaaggccuacuccaacugcuaccccuacgacgugccggaccacgcgagccugcggucccucgucgccagcuccgggacgcuggaguucaacaacgagagcuucaacuggaccggcgugacccagaacgggaccuccagcgccugcaagcgccgguccaacaacagcuucuucucccgccugaacuggcucacgcaccugaaguucaaguaccccgcccugaacgugaccaugcccaacaacgagaaguucgacaagcucuacaucuggggcguccaccaccccgggaccgacaacgaccagaucagccuguacgcgcaggccuccggccggaucaccgugagcacgaagcgcagccagcagaccgugaucccgaacaucggcucccggccccgcguccgggacauccccagccgcaucuccaucuacuggaccaucgugaagcccggggacauccugcucaucaacagcaccggcaaccugaucgccccgcggggguacuucaagauccgcuccggcaagagcuccaucaugcggagcgacgcccccaucggcaagugcaacuccgagugcaucacgcccaacgggagcauccccaacgacaagccguuccagaacgugaaccgcaucaccuacggcgccugcccccgguacgucaagcagaacacccugaagcucgcgaccgggaugcgcaacgugcccgagaagcagacgcggggcaucuucggggccaucgccggcuucaucgagaacggcugggaggggaugguggacggcugguacggguuccgccaccagaacuccgagggcaccgggcaggccgccgaccugaaguccacccaggcggccaucaaccagaucaacggcaagcugaaccggcucaucggcaagaccaacgagaaguuccaccagaucgagaaggaguucuccgaggucgaggggcgcauccaggaccuggagaaguacguggaggacacgaagaucgaccuguggagcuacaacgccgagcuccugguggcccuggagaaccagcacaccaucgaccucaccgacuccgagaugaacaagcuguucgagcggaccaagaagcagcugcgcgagaacgccgaggacaugggcaacgggugcuucaagaucuaccacaagugcgacaacgcgugcaucggcagcauccgcaacgggacguacgaccacgacgucuaccgggacgaggcccucaacaaccgcuuccagaucaagggcguggagcugaaguccggcuacaaggacuggauccuguggaucagcuucgccaucuccugcuuccuccugugcguggcccugcucggguucaucaugugggccugccagaagggcaacauccggugcaacaucugcaucuga

SEQ ID NO: 64567 - RNA, 1701 nt, Artificial Sequence
  derived and/or modified CDS sequence (opt1) from hemagglutinin__InfluenzaA__ABC42640
augaagaccaucaucgcccugagcuacauccucugccugguguucgcccagaagauccccggcaacgacaacuccaccgcgacgcugugccucgggcaccacgccgucccgaacggcaccaucgugaagaccaucaccaacgaccagaucgaggugacgaacgccaccgagcugguccagagcuccagcaccgggggcaucugcgacagcccccaccagauccuggacggggagaacugcacccucaucgacgcccugcugggcgacccccagugcgacggcuuccagaacaagaagugggaccucuucguggagcgcuccaaggccuacuccaacugcuaccccuacgacgugccggacuacgcgagccugcggucccuggucgccagcuccgggacgcucgaguucaacaacgagagcuucaacuggaccggcgugacccagaacgggaccuccagcgccugcaagcgccgguccaacaacagcuucuucucccgccugaacuggcugacgcaccucaaguucaaguaccccgcccugaacgugaccaugcccaacaacgagaaguucgacaagcuguacaucuggggcguccaccaccccgggaccgacaacgaccagaucagccucuacgcgcaggccuccggccggaucaccgugagcacgaagcgcagccagcagaccgugaucccgaacaucggcucccggccccgcguccgggacauccccagccgcaucuccaucuacuggaccaucgugaagcccggggacauccugcugaucaacagcaccggcaaccucaucgccccgcggggguacuucaagauccgcuccggcaagagcuccaucaugcggagcgacgcccccaucggcaagugcaacuccgagugcaucacgcccaacgggagcauccccaacgacaagccguuccagaacgugaaccgcaucaccuacggcgccugcccccgguacgucaagcagaacacccugaagcuggcgaccgggaugcgcaacgugcccgagaagcagacgcggggcaucuucggggccaucgccggcuucaucgagaacggcugggaggggaugguggacggcugguacggguuccgccaccagaacuccgagggcaucgggcaggccgccgaccucaagagcacccaggcggccaucaaccagaucaacggcaagcugaaccggcugaucggcaagaccaacgagaaguuccaccagaucgagaaggaguucuccgaggucgaggggcgcauccaggaccucgagaaguacguggaggacaccaagaucgaccuguggagcuacaacgccgagcugcucguggcccuggagaaccagcacacgaucgaccugaccgacuccgagaugaacaagcuguucgagcggaccaagaagcagcuccgcgagaacgccgaggacaugggcaacgggugcuucaagaucuaccacaagugcgacaacgcgugcaucggcagcauccgcaacgggaccuacgaccacgacgucuaccgggacgaggcccugaacaaccgcuuccagaucaagggcguggagcucaaguccggcuacaaggacuggauccuguggaucagcuucgccaucuccugcuuccugcucugcguggcccugcugggguucaucaugugggccugccagaagggcaacauccggugcaacaucugcaucuga

SEQ ID NO: 64568 - RNA, 1701 nt, Artificial Sequence; identical to SEQ ID NO: 64267
  derived and/or modified CDS sequence (opt1) from hemagglutinin__InfluenzaA__ABC42651

SEQ ID NO: 64569 - RNA, 1701 nt, Artificial Sequence
  derived and/or modified CDS sequence (opt1) from hemagglutinin__InfluenzaA__ABC42662
augaagaccaucaucgcccugagcuacauccucugccugguguucgcccagaagcugcccggcaacgacaacuccaccgcgacgcucugccuggggcaccacgccgucccgaacggcaccaucgugaagaccaucaccaacgaccagaucgaggugacgaacgccaccgagcugguccagagcuccagcaccgggggcaucugcgacagcccccaccagauccucgacggggagaacugcacccugaucgacgcccugcucggcgacccccagugcgacggcuuccagaacaagaagugggaccuguucguggagcgcuccaaggccuacuccaacugcuaccccuacgacgugccggacuacgcgagccugcggucccucgucgccagcuccgggacgcuggaguucaacaacgagagcuucaacuggaccggcgugacccagaacgggaccuccagcgccugcaagcgccgguccaacaacagcuucuucucccgccugaacuggcucacgcaccugaaguucaaguaccccgcccugaacgugaccaugcccaacaacgagaaguucgacaagcucuacaucuggggcguccaccaccccgggaccgacaacgaccagaucagccuguacgcgcaggccuccggccggaucaccgugagcacgaagcgcagccagcagaccgugaucccgaacaucggcucccggccccgcguccgggacauccccagccgcaucuccaucuacuggaccaucgugaagcccggggacauccugcucaucaacagcaccggcaaccugaucgccccgcggggguacuucaagauccgcuccggcaagagcuccaucaugcggagcgacgcccccaucggcaagugcaacuccgagugcaucacgcccaacgggagcauccccaacgacaagccguuccagaacgugaaccgcaucaccuacggcgccugcccccgguacgucaagcagaacacccugaagcucgcgaccgggaugcgcaacgugcccgagaagcagacgcggggcaucuucggggccaucgccggcuucaucgagaacggcugggaggggaugguggacggcugguacggguuccgccaccagaacuccgagggcaucgggcaggccgccgaccucaagagcacccaggcggccaucaaccagaucaacggcaagcugaaccggcucaucggcaagaccaacgagaaguuccaccagaucgagaaggaguucuccgaggucgaggggcgcauccaggaccuggagaaguacguggaggacaccaagaucgaccuguggagcuacaacgccgaguuccucguggcccuggagaaccagcacacgaucgaccugaccgacuccgagaugaacaagcuguucgagcggaccaagaagcagcugcgcgagaacgccgaggacaugggcaacgggugcuucaagaucuaccacaagugcgacaacgcgugcaucggcagcauccgcaacgggaccuacgaccacgacgucuaccgggacgaggcccugaacaaccgcuuccagaucaagggcguggagcucaaguccggcuacaaggacuggauccuguggaucagcuucgccaucuccugcuuccugcucugcguggcccugcugggguucaucaugugggccugccagaagggcaacauccggugcaacaucugcaucuga

SEQ ID NO: 64570 - RNA, 1701 nt, Artificial Sequence
  derived and/or modified CDS sequence (opt1) from hemagglutinin__InfluenzaA__ABC42673
augaagaccaucaucgcccugagcuacauccucugccugaucuucgcccagaagcugcccggcaacgacaacuccaccgcgacgcucugccuggggcaccacgccgugccgaacggcaccaucgucaagaccaucaccaacgaccagaucgaggugacgaacgccaccgagcuggugcagagcuccagcaccgggggcaucugcgacagcccccaccagauccucgacggggagaacugcacccugaucgacgcccugcucggcgacccccagugcgacggcuuccagaacaagaagugggaccuguucgucgagcgcagcaaggccuacuccaacugcuaccccuacgacgugccggacuacgcgagccugcggucccucguggccagcuccgggacgcuggaguucaacaacgagagcuucaacuggaccggcgucacccagaacgggaccuccagcgccugcaagcgccgguccaacaacagcuucuucucccgccugaacuggcucacgcaccugaaguucaaguaccccgcccugaacgugaccaugcccaacaacgagaaguucgacaagcucuacaucuggggcgugcaccaccccgggaccgacaacgaccagaucagccuguacgcgcaggccuccggccggaucaccgucagcacgaagcgcagccagcagaccgugaucccgaacaucggcucccggccccgcgugcgggacauccccagccgcaucuccaucuacuggaccaucgucaagcccggggacauccugcucaucaacagcaccggcaaccugaucgccccgcggggguacuucaagauccgcuccggcaagagcuccaucaugcggagcgacgcccccaucggcaagugcaacuccgagugcaucacgcccaacgggagcauccccaacgacaagccguuccagaacgugaaccgcaucaccuacggcgccugcccccgguacgugaagcagaacacccugaagcucgcgaccgggaugcgcaacguccccgagaagcagacgcggggcaucuucggggccaucgccggcuucaucgagaacggcugggaggggaugguggacggcugguacggguuccgccaccagaacuccgagggcaucgggcaggccgccgaccugaaguccacccaggcggccaucaaccagaucaacggcaagcugaaccggcucaucggcaagaccaacgagaaguuccaccagaucgagaaggaguucuccgagguggaggggcgcauccaggaccuggagaaguacgucgaggacaccaagaucgaccuguggagcuacaacgccgagcuccugguggcccuggagaaccagcacacgaucgaccucaccgacuccgagaugaacaagcuguucgagcggaccaagaagcagcugcgcgagaacgccgaggacaugggcaacgggugcuucaagaucuaccacaagugcgacaacgcgugcaucggcagcauccgcaacgggaccuacgaccacgacguguaccgggacgaggcccucaacaaccgcuuccagaucaagggcgucgagcugaaguccggcuacaaggacuggauccuguggaucagcuucgccaucuccugcuuccuccugugcguggcccugcucggguucaucaugugggccugccagaagggcaacauccggugcaacaucugcaucuga

SEQ ID NO: 64571 - RNA, 1701 nt, Artificial Sequence; identical to SEQ ID NO: 64267
  derived and/or modified CDS sequence (opt1) from hemagglutinin__InfluenzaA__ABC42684

SEQ ID NO: 64572 - RNA, 1701 nt, Artificial Sequence; identical to SEQ ID NO: 64267
  derived and/or modified CDS sequence (opt1) from hemagglutinin__InfluenzaA__ABC42695

SEQ ID NO: 64573 - RNA, 1701 nt, Artificial Sequence
  derived and/or modified CDS sequence (opt1) from hemagglutinin__InfluenzaA__ABC42706
augaagaccaucaucgcccugagcuacauccucugccugguguucgcccagaagcugcccggcaacgacaacuccaccgcgacgcucugccuggggcaccacgccgucccgaacggcaccaccgugaagaccaucacgaacgaccagaucgaggugaccaacgccaccgagcugguccagagcuccagcaccgggggcaucugcgacagcccccaccagauccucgacggggagaacugcacgcugaucgacgcccugcucggcgacccccagugcgacggcuuccagaacaagaagugggaccuguucguggagcgcagcaaggccuacuccaacugcuaccccuacgacgugccggacuacgcgagccugcggucccucgucgccagcuccgggacccuggaguucaacaacgagagcuucaacuggaccggcgugacccagaacgggacguccagcgccugcaagcgccgguccaacaacagcuucuucucccgccugaacuggcucacccaccugaaguucaaguaccccgcccugaacgugaccaugcccaacaacgagaaguucgacaagcucuacaucuggggcguccaccaccccgggaccgacaacgaccagaucagccuguacgcgcaggccuccggccggaucacggugagcaccaagcgcagccagcagaccgugaucccgaacaucggcucccggccccgcguccgggacauccccagccgcaucuccaucuacuggaccaucgugaagcccggggacauccugcucaucaacagcacgggcaaccugaucgccccgcggggguacuucaagauccgcuccggcaagagcuccaucaugcggagcgacgcccccaucggcaagugcaacuccgagugcaucacccccaacgggagcauccccaacgacaagccguuccagaacgugaaccgcaucaccuacggcgccugcccccgguacgucaagcagaacacccugaagcucgcgacggggaugcgcaacgugcccgagaagcagacccggggcaucuucggggccaucgccggcuucaucgagaacggcugggaggggaugguggacggcugguacggguuccgccaccagaacuccgagggcaucgggcaggccgccgaccugaaguccacccaggcggccaucaaccagaucaacggcaagcugaaccggcucaucggcaagaccaacgagaaguuccaccagaucgagaaggaguucuccgaggucgaggggcgcauccaggaccuggagaaguacguggaggacacgaagaucgaccuguggagcuacaacgccgagcuccugguggcccuggagaaccagcacaccaucgaccucaccgacuccgagaugaacaagcuguucgagcggaccaagaagcagcugcgcgagaacgccgaggacaugggcaacgggugcuucaagaucuaccacaagugcgacaacgcgugcaucggcagcauccgcaacgggacguacgaccacgacgucuaccgggacgaggcccucaacaaccgcuuccagaucaagggcguggagcugaaguccggcuacaaggacuggauccuguggaucagcuucgccaucuccugcuuccuccugugcgugguccugcucggguucaucaugugggccugccagaagggcaacauccggugcaacaucugcaucuga

SEQ ID NO: 64574 - RNA, 1701 nt, Artificial Sequence; identical to SEQ ID NO: 64267
  derived and/or modified CDS sequence (opt1) from hemagglutinin__InfluenzaA__ABC42717

SEQ ID NO: 64575 - RNA, 1701 nt, Artificial Sequence
  derived and/or modified CDS sequence (opt1) from hemagglutinin__InfluenzaA__ABC42728
augaagaccaucaucgcccugagcuacauccucugccugguguucgcccagaagcugcccggcaacgacaacuccaccgcgacgcucugccuggggcaccacgccgucccgaacggcaccguggugaagaccaucaccaacgaccagaucgaggucacgaacgccaccgagcuggugcagagcuccagcaccgggggcaucugcgacagcccccaccagauccucgacggggagaacugcacccugauggacgcccugcucggcgacccccagugcgacggcuuccagaacaagaagugggaccuguucguggagcgcagccgggccuacuccaacugcuaccccuacgacgucccggacuacgcgagccugcgcucccucguggccagcuccgggacgcuggaguucaacaacgagagcuucaacuggaccggcgugacccagaacgggaccuccagcgccugcaagcggcgcuccaacaacagcuucuucucccggcugaacuggcucacgcaccugaaguucaaguaccccgcccugaacgucaccaugcccaacaacgagaaguucgacaagcucuacaucuggggcgugcaccaccccgggaccgacaacgaccagaucagccuguacgcgcaggccuccggccgcaucaccgugagcacgaagcggagccagcagaccgucaucccgaacaucggcucccgcccccgggugcgcgacauccccagccggaucuccaucuacuggaccaucgugaagcccggggacauccugcucaucaacagcaccggcaaccugaucgccccgcgcggguacuucaagauccgguccggcaagagcuccaucaugcgcagcgacgcccccaucggcaagugcaacuccgagugcaucacgcccaacgggagcauccccaacgacaagccguuccagaacgucaaccggaucaccuacggcgccugcccccgcuacgugaagcagaacacccugaagcucgcgaccgggaugcggaacgugcccgagaagcagacgcgcggcaucuucggggccaucgccggcuucaucgagaacggcugggaggggauggucgacggcugguacggguuccggcaccagaacuccgagggcaccgggcaggccgccgaccugaaguccacccaggcggccaucaaccagaucaacggcaagcugaaccgccucaucggcaagaccaacgagaaguuccaccagaucgagaaggaguucuccgagguggaggggcggauccaggaccuggagaaguacguggaggacacgaagaucgaccuguggagcuacaacgccgagcuccuggucgcccuggagaaccagcacaccaucgaccucaccgacuccgagaugaacaagcuguucgagcgcaccaagaagcagcugcgcgagaacgccgaggacaugggcaacgggugcuucaagaucuaccacaagugcgacaacgcgugcaucggcagcauccggaacgggacguacgaccacgacguguaccgcgacgaggcccucaacaaccgguuccagaucaagggcguggagcugaaguccggcuacaaggacuggauccuguggaucagcuucgccaucuccugcuuccuccugugcgucgugcugcucggguucaucaugugggccugccagaagggcaacauccgcugcaacaucugcaucuga

SEQ ID NO: 64576 - RNA, 1701 nt, Artificial Sequence; identical to SEQ ID NO: 64267
  derived and/or modified CDS sequence (opt1) from hemagglutinin__InfluenzaA__ABC42739

SEQ ID NO: 64577 - RNA, 1698 nt, Artificial Sequence
  derived and/or modified CDS sequence (opt1) from hemagglutinin__InfluenzaA__ABC42750
augaaggugaagcugcucguccugcugugcaccuucaccgccacguacgccgacaccaucugcaucggcuaccacgcgaacaacagcaccgacaccguggacacggugcucgagaagaacgucaccgugacccacuccgugaaccugcuggaggacagccacaacgggaagcucugccugcugaagggcaucgcgccccuccagcuggggaacugcuccgucgccggcuggauccuggggaacccggagugcgagcuccugaucagcaaggaguccuggagcuacaucguggagaagcccaaccccgagaacgggaccugcuaccccggccacuucgccgacuacgaggagcugcgcgagcagcucuccagcguguccagcuucgagcgguucgagaucuucccgaaggaguccagcuggcccaaccacacggucaccgggguguccgccagcugcucccacaacggcaagagcuccuucuacaagaaccugcuguggcucaccgggaagaacggccuguaccccaaccugagcaaguccuacgccaacaacaaggagaaggaggugcucguccuguggggcgugcaccacccgcccaacaucggcgaccagaaggcccuguaccacaccgagaacgccuacgugagcgucgugagcucccacuacagccgcaaguucacgcccgagaucgccaagcggcccaaggugcgcgaccaggagggccggaucaacuacuacuggacccuccuggagcccggggacaccaucaucuucgaggcgaacggcaaccugaucgccccgcgcuacgccuucgcccucucccggggguucggcagcggcaucaucaacuccaacgcccccauggacgagugcgacgcgaagugccagacgccccagggggccaucaacagcucccugcccuuccagaacguccacccggugaccaucggcgagugccccaaguacgugcgcagcgccaagcugcggauggucaccgggcuccgcaacauccccuccauccagagccggggccuguucggggccaucgccggcuucaucgagggcggguggaccggcaugguggacgggugguacggcuaccaccaccagaacgagcagggguccggcuacgcggccgaccagaaguccacccagaacgccaucaacggcaucacgaacaaggugaacagcgucaucgagaagaugaacacccaguucaccgccguggggaaggaguucaacaagcuggagcgccggauggagaaccucaacaagaaggucgacgacggcuucaucgacaucuggaccuacaacgccgagcugcuggugcuccuggagaacgagcgcacgcuggacuuccacgacagcaacgugaagaaccucuacgagaaggucaagucccagcugaagaacaacgcgaaggagaucgggaacggcugcuucgaguucuaccacaagugcaacgacgagugcauggagagcgugaagaacgggaccuacgacuaccccaaguacuccgaggagagcaagcugaaccgggagaagaucgacggcgugaagcucgaguccaugggcgucuaccagauccuggccaucuacagcaccguggccagcucccuggugcuccuggucagccugggggccaucuccuucuggaugugcagcaacggcucccuccagugccgcaucugcaucuga

SEQ ID NO: 64578 - RNA, 1701 nt, Artificial Sequence; identical to SEQ ID NO: 64267
  derived and/or modified CDS sequence (opt1) from hemagglutinin__InfluenzaA__ABC42761

SEQ ID NO: 64579 - RNA, 1701 nt, Artificial Sequence
  derived and/or modified CDS sequence (opt1) from hemagglutinin__InfluenzaA__ABC42772
augaagaccaucaucgcccugagcuacauccucugccugguguucgcccagaagcugcccggcaacgacaacuccaccgcgacgcucugccuggggcaccacgccgucccgaacggcaccaucgugaagaccaucaccaacgaccagaucgaggugacgaacgccaccgagcugguccagagcuccagcaccgggggcaucugcgacagcccccaccagauccucgacggggagaacugcacccugaucgacgcccugcucggcgacccccagugcgacggcuuccagaacaagaagugggaccuguucguggagcgcagcaaggccuacuccaacugcuaccccuacgacgugccggacuacgcgagccugcggucccucgucgccagcuccgggacgcuggaguucaacaacgagagcuucaacuggaccggcgugacccagaacgggaccuccagcgccugcaagcgccgguccaacaacagcuucuucucccgccugaacuggcucacgcaccugaaguucaaguaccccgcccugaacgugaccaugcccaacaacgagaaguucgacaagcucuacaucuggggcguccaccaccccgggaccgacaacgaccagaucagccuguacgcgcaggccuccggccggaucaccgugagcacgaagcgcagccagcagaccgugaucccgaacaucggcucccggccccgcguccgggacauccccagccgcaucuccaucuacuggaccaucgugaagcccggggacauccugcucaucaacagcaccggcaaccugaucgccccgcggggguacuucaagauccgcuccggcaagagcuccaucaugcggagcgacgcccccaucggcaagugcaacuccgagugcaucacgcccaacgggagcauccccaacgacaagccguuccagaacgugaaccgcaucaccuacggcgccugcccccgguacgucaagcagaacacccugaagcucgcgaccgggaugcgcaacgugcccgagaagcagacgcggggcaucuucggggccaucgccggcuucaucgagaacggcugggaggggaugguggacggcugguacggguuccgccaccagaacuccgagggcaucgggcaggccgccgaccugaaguccacccaggcggccaucaaccagaucaacggcaagcugaaccggcucaucggcaagaccaacgagaaguuccaccagaucgagaaggaguucuccgaggucgaggggcgcauccaggaccuggagaaguacguggaggacaccaagaucgaccuguggagcuacaacgccgagcuccugguggcccuggagaaccagcacacgaucgaccucaccgacuccgagaugaacaagcuguucgagcggaccaagaagcagcugcgcgagaacgccgaggacaugggcaacgggugcuucaagaucuaccacaagugcgacaacgcgugcaucggcagcauccgcaacgggaccuacgaccacgacgucuaccgggacgaggcccucaacaaccgcuuccagaucaaguccguggagcucaagagcggcuacaaggacuggauccuguggaucuccuucgccaucagcugcuuccugcugugcguggcccugcucggcuucaucaugugggccugccagaaggggaacauccggugcaacaucugcaucuga

SEQ ID NO: 64580 - RNA, 1701 nt, Artificial Sequence; identical to SEQ ID NO: 64267
  derived and/or modified CDS sequence (opt1) from hemagglutinin__InfluenzaA__ABC42783

SEQ ID NO: 64581 - RNA, 1701 nt, Artificial Sequence; identical to SEQ ID NO: 64267
  derived and/or modified CDS sequence (opt1) from hemagglutinin__InfluenzaA__ABC42794

SEQ ID NO: 64582 - RNA, 1701 nt, Artificial Sequence; identical to SEQ ID NO: 64267
  derived and/or modified CDS sequence (opt1) from hemagglutinin__InfluenzaA__ABC42805

SEQ ID NO: 64583 - RNA, 1701 nt, Artificial Sequence; identical to SEQ ID NO: 64306
  derived and/or modified CDS sequence (opt1) from hemagglutinin__InfluenzaA__ABC42816

SEQ ID NO: 64584 - RNA, 1701 nt, Artificial Sequence
  derived and/or modified CDS sequence (opt1) from hemagglutinin__InfluenzaA__ABC42827
augaagaccaucaucgcccugagcuacauccucugccugguguucgcccagaagcugcccggcaacgacaacuccaccgcgacgcucugccuggggcaccacgccgucccgaacggcaccaucgugaagaccaucaccaacgaccagaucgaggugacgaacgccaccgagcugguccagagcuccagcaccgggggcaucugcgacagcccccaccagauccucgacggggagaacugcacccugaucgacgcccugcucggcgacccccagugcgacggcuuccagaacaagaagugggaccuguucguggagcgcagcaaggccuacuccaacugcuaccccuacgacgugccggacuacgcgagccugcggucccucgucgccagcuccgggacgcuggaguucaacaacgagagcuucaacuggaccggcgugacccagaacgggaccuccagcgccugcaagcgccgguccaacaacagcuucuucucccgccugaacuggcucacgcaccugaaguucaaguaccccgcccugaacgugaccaugcccaacaacgagaaguucgacaagcucuacaucuggggcguccaccaccccgggaccgacaacgaccagaucagccuguacgcgcaggccuccggccggaucaccgugagcacgaagcgcagccagcagaccgugaucccgaacaucggcucccggccccgcguccgggacauccccagccgcauguccaucuacuggaccaucgugaagcccggggacauccugcucaucaacagcaccggcaaccugaucgccccgcggggguacuucaagauccgcuccggcaagagcuccaucaugcggagcgacgcccccaucggcaagugcaacuccgagugcaucacgcccaacgggagcauccccaacgacaagccguuccagaacgugaaccgcaucaccuacggcgccugcccccgguacgucaagcagaacacccugaagcucgcgaccgggaugcgcaacgugcccgagaagcagacgcggggcaucuucggggccaucgccggcuucaucgagaacggcugggaggggaugguggacggcugguacggguuccgccaccagaacuccgagggcaucgggcaggccgccgaccugaaguccacccaggcggccaucaaccagaucaacggcaagcugaaccggcucaucggcaagaccaacgagaaguuccaccagaucgagaaggaguucuccgaggucgaggggcgcauccaggaccuggagaaguacguggaggacaccaagaucgaccuguggagcuacaacgccgagcuccugguggcccuggagaaccagcacacgaucgaccucaccgacuccgagaugaacaagcuguucgagcggaccaagaagcagcugcgcgagaacgccgaggacaugggcaacgggugcuucaagaucuaccacaagugcgacaacgcgugcaucggcagcauccgcaacgggaccuacgaccacgacgucuaccgggacgaggcccucaacaaccgcuuccagaucaagggcguggagcugaaguccggcuacaaggacuggauccuguggaucagcuucgccaucuccugcuuccuccugugcguggcccugcucggguucaucaugugggccugccagaagggcaacauccggugcaacaucugcaucuga

SEQ ID NO: 64585 - RNA, 1701 nt, Artificial Sequence; identical to SEQ ID NO: 64267
  derived and/or modified CDS sequence (opt1) from hemagglutinin__InfluenzaA__ABC42849

SEQ ID NO: 64586 - RNA, 1701 nt, Artificial Sequence
  derived and/or modified CDS sequence (opt1) from hemagglutinin__InfluenzaA__ABC42882
augaagaccaucaucgcccugagcuacauccucugccugguguucgcccagaagcugcccggcaacgacaacuccaccgcgacgcucugccuggggcaccacgccgucccgaacggcacccuggugaagaccaucaccaacgaccagaucgaggugacgaacgccaccgagcucguccagagcuccagcaccgggcgcaucugcgacagcccccaccagauccuggacggcgagaacugcacccugaucgacgcccuccugggggacccccacugcgacggcuuccagaacaaggagugggaccuguucguggagcggagcaaggccuacuccaacugcuaccccuacgacgugccggacuacgucagccuccgcucccugguggcgagcuccggcacgcuggaguucaacaacgagagcuucaacuggaccgggguggcccagaacggcaccuccagcgccugcaagcggcgcuccgacaagagcuucuucucccggcucaacuggcugcaccagcugaaguacaaguaccccgcccucaacgucaccaugcccaacaacgagaaguucgacaagcuguacaucuggggcgugcaccaccccgggacggacagcgaccagaucucccuguacgcgcaggccagcgggcgcgugaccgucagcaccaagcggucccagcagaccgugaucccgaacaucggcagccgccccugggugcggggcgucuccagccgcaucuccaucuacuggacgaucgugaagcccggggacauccuccugaucaacagcaccggcaaccugaucgcgccccggggguacuucaagauccgcuccggcaagagcuccaucaugcggagcgacgccccgaucggcaagugcaacuccgagugcaucacccccaacgggagcauccccaacgacaagcccuuccagaacgugaaccgcaucaccuacggcgccugcccgcgguacgucaagcagaacacgcucaagcuggccaccgggaugcgcaacgugcccgagaagcagacccggggcaucuucggggccaucgccggcuucaucgagaacggcugggaggggaugauggacggcugguacggguuccgccaccagaacuccgagggcaccgggcaggccgccgaccugaaguccacgcaggcggccaucaaccagaucaacggcaagcucaaccggcugaucgagaagaccaacgagaaguuccaccagaucgagaaggaguucuccgagguggagggccgcauccaggaccuggagaaguacgucgaggacaccaagaucgaccucuggagcuacaacgccgagcugcugguggcccucgagaaccagcacaccaucgaccugacggacuccgagaugaacaagcuguucgagcggaccaagaagcagcuccgcgagaacgccgaggacauggggaacggcugcuucaagaucuaccacaagugcgacaacgcgugcaucgggagcauccgcaacggcaccuacgaccacgacguguaccgggacgaggcccugaacaaccgcuuccagaucaagggggucgagcugaaguccggcuacaaggacugggugcucuggaucagcuucgccaucagcugcuuccugcugugcaucguccuccugggcuucaucaugugggccugccagaaggggaacauccggugcaacaucugcaucuga

SEQ ID NO: 64587 - RNA, 1701 nt, Artificial Sequence; identical to SEQ ID NO: 64586
  derived and/or modified CDS sequence (opt1) from hemagglutinin__InfluenzaA__ABC42893

SEQ ID NO: 64588 - RNA, 1701 nt, Artificial Sequence; identical to SEQ ID NO: 64540
  derived and/or modified CDS sequence (opt1) from hemagglutinin__InfluenzaA__ABC42929

SEQ ID NO: 64589 - RNA, 1701 nt, Artificial Sequence; identical to SEQ ID NO: 64540
  derived and/or modified CDS sequence (opt1) from hemagglutinin__InfluenzaA__ABC42940

SEQ ID NO: 64590 - RNA, 1701 nt, Artificial Sequence; identical to SEQ ID NO: 64540
  derived and/or modified CDS sequence (opt1) from hemagglutinin__InfluenzaA__ABC42951

SEQ ID NO: 64591 - RNA, 1701 nt, Artificial Sequence; identical to SEQ ID NO: 64540
  derived and/or modified CDS sequence (opt1) from hemagglutinin__InfluenzaA__ABC42962

SEQ ID NO: 64592 - RNA, 1701 nt, Artificial Sequence; identical to SEQ ID NO: 64540
  derived and/or modified CDS sequence (opt1) from hemagglutinin__InfluenzaA__ABC42973

SEQ ID NO: 64593 - RNA, 1701 nt, Artificial Sequence; identical to SEQ ID NO: 64540
  derived and/or modified CDS sequence (opt1) from hemagglutinin__InfluenzaA__ABC42995

SEQ ID NO: 64594 - RNA, 1701 nt, Artificial Sequence; identical to SEQ ID NO: 64540
  derived and/or modified CDS sequence (opt1) from hemagglutinin__InfluenzaA__ABC43006

SEQ ID NO: 64595 - RNA, 1701 nt, Artificial Sequence; identical to SEQ ID NO: 64540
  derived and/or modified CDS sequence (opt1) from hemagglutinin__InfluenzaA__ABC43028

SEQ ID NO: 64596 - RNA, 1701 nt, Artificial Sequence; identical to SEQ ID NO: 64540
  derived and/or modified CDS sequence (opt1) from hemagglutinin__InfluenzaA__ABC43039

SEQ ID NO: 64597 - RNA, 1701 nt, Artificial Sequence; identical to SEQ ID NO: 64540
  derived and/or modified CDS sequence (opt1) from hemagglutinin__InfluenzaA__ABC43050

SEQ ID NO: 64598 - RNA, 1701 nt, Artificial Sequence; identical to SEQ ID NO: 64540
  derived and/or modified CDS sequence (opt1) from hemagglutinin__InfluenzaA__ABC43061

SEQ ID NO: 64599 - RNA, 1701 nt, Artificial Sequence
  derived and/or modified CDS sequence (opt1) from hemagglutinin__InfluenzaA__ABC43072
augaagaccaucaucgcccugagcuacauccucugccugguguucgcccagaagcugcccggcaacgacaacuccaccgcgacgcucugccuggggcaccacgccgucccgaacggcaccaucgugaagaccaucaccaacgaccagaucgaggugacgaacgccaccgagcugguccagagcuccagcaccgggggcaucugcgacagcccccaccagauccucgacggggagaacugcacccugaucgacgcccugcucggcgacccccagugcgacggcuuccagaacaagaagugggaccuguucguggagcgcagcaaggccuacuccaacugcuaccccuacgacgugccggaccacgcgagccugcggucccucgucgccagcuccgggacgcuggaguucaacaacgagagcuucgacuggaccggcgugacccagaacgggaccuccagcgccugcaagcgccgguccaacaagagcuucuucucccgccugaacuggcucacgcaccugaaguacaaguaccccgcccugaacgugaccaugcccaacaacgagaaguucgacaagcucuacaucuggggcguccaccaccccgggaccgacagcgaccagaucucccuguacgcgcaggccagcggccggaucaccgugagcacgaagcgcucccagcagaccgugaucccgaacaucggcagccggccccgcguccgggacguguccagccgcaucuccaucuacuggaccaucgugaagcccggggacauccugcucaucaacagcaccggcaaccugaucgcgccccggggguacuucaagauccgcuccggcaagagcuccaucaugcggagcgacgccccgaucggcaagugcaacuccgagugcaucacgcccaacgggagcauccccaacgacaagcccuuccagaacgucaaccgcaucaccuacggcgccugcccgcgguacgugaagcagaacacccugaagcucgccaccgggaugcgcaacgugcccgagaagcagacgcggggcaucuucggggccaucgccggcuucaucgagaacggcugggaggggauggucgacggcugguacggguuccgccaccagaacuccgagggcaccgggcaggccgccgaccugaaguccacccaggcggccaucaaccagaucaacggcaagcugaaccggcucaucggcaagaccaacgagaaguuccaccagaucgagaaggaguucuccgagguggaggggcgcauccaggaccuggagaaguacguggaggacacgaagaucgaccuguggagcuacaacgccgagcuccuggucgcccuggagaaccagcacaccaucgaccucaccgacuccgagaugaacaagcuguucgagaagaccaagaagcagcugcgggagaacgccgaggacaugggcaacgggugcuucaagaucuaccacaagugcgacaacgcgugcaucggcagcauccgcaacgggacguacgaccacgacguguaccgcgacgaggcccucaacaaccgguuccagaucaagggcguggagcugaaguccggcuacaaggacuggauccuguggaucagcuucaccaucagcugcuuccuccugugcgucgcccugcucggguucaucaugugggccugccagaagggcaacauccgcugcaacaucugcaucuga

SEQ ID NO: 64600 - RNA, 1701 nt, Artificial Sequence; identical to SEQ ID NO: 64540
  derived and/or modified CDS sequence (opt1) from hemagglutinin__InfluenzaA__ABC43083

SEQ ID NO: 64601 - RNA, 1701 nt, Artificial Sequence; identical to SEQ ID NO: 64540
  derived and/or modified CDS sequence (opt1) from hemagglutinin__InfluenzaA__ABC43094

SEQ ID NO: 64602 - RNA, 1701 nt, Artificial Sequence; identical to SEQ ID NO: 64540
  derived and/or modified CDS sequence (opt1) from hemagglutinin__InfluenzaA__ABC43116

SEQ ID NO: 64603 - RNA, 1701 nt, Artificial Sequence; identical to SEQ ID NO: 64267
  derived and/or modified CDS sequence (opt1) from hemagglutinin__InfluenzaA__ABC43127

SEQ ID NO: 64604 - RNA, 1701 nt, Artificial Sequence; identical to SEQ ID NO: 64306
  derived and/or modified CDS sequence (opt1) from hemagglutinin__InfluenzaA__ABC43138

SEQ ID NO: 64605 - RNA, 1701 nt, Artificial Sequence; identical to SEQ ID NO: 64267
  derived and/or modified CDS sequence (opt1) from hemagglutinin__InfluenzaA__ABC43149

SEQ ID NO: 64606 - RNA, 1701 nt, Artificial Sequence; identical to SEQ ID NO: 64267
  derived and/or modified CDS sequence (opt1) from hemagglutinin__InfluenzaA__ABC43160

SEQ ID NO: 64607 - RNA, 1701 nt, Artificial Sequence; identical to SEQ ID NO: 64267
  derived and/or modified CDS sequence (opt1) from hemagglutinin__InfluenzaA__ABC43171

SEQ ID NO: 64608 - RNA, 1701 nt, Artificial Sequence; identical to SEQ ID NO: 64267
  derived and/or modified CDS sequence (opt1) from hemagglutinin__InfluenzaA__ABC43182

SEQ ID NO: 64609 - RNA, 1701 nt, Artificial Sequence
  derived and/or modified CDS sequence (opt1) from hemagglutinin__InfluenzaA__ABC43475
augaagaccaucaucgcccugagcuacauccucugccugguguucgcccagaagcugcccggcaacgacaacuccaccgcgacgcucugccuggggcaccacgccgucccgaacggcaccaccgugaagaccaucacgaacgaccagaucgaggugaccaacgccaccgagcugguccagagcuccagcaccgggggcaucugcgacagcccccaccagauccucgacggggagaacugcacgcugaucgacgcccugcucggcgacccccagugcgacggcuuccagaacaagaagugggaccuguucguggagcgcagcaaggccuacuccaacugcuaccccuacgacgugccggacuacgcgagccugcggucccucgucgccagcuccgggacccuggaguucaacaacgagagcuucaacuggaccggcgugacccagaacgggacguccagcgccugcaagcgccgguccaacaacagcuucuucucccgccugaacuggcucacccaccugaaguucaaguaccccgcccugaacgugaccaugcccaacaacgagaaguucgacaagcucuacaucuggggcguccaccaccccgggaccgacaacgaccagaucagccuguacgcgcaggccuccggccggaucacggugagcaccaagcgcagccagcagaccgugaucccgaacaucggcucccggccccgcguccgggacauccccagccgcaucuccaucuacuggaccaucgugaagcccggggacauccugcucaucaacagcacgggcaaccugaucgccccgcggggguacuucaagauccgcuccggcaagagcuccaucaugcggagcgacgcccccaucggcaagugcaacuccgagugcaucacccccaacgggagcauccccaacgacaagccguuccagaacgugaaccgcaucaccuacggcgccugcccccgguacgucaagcagaacacccugaagcucgcgacggggaugcgcaacgugcccgagaagcagacccggggcaucuucggggccaucgccggcuucaucgagaacggcugggaggggaugguggacggcugguacggguuccgccaccagaacuccgagggcaucgggcaggccgccgaccugaaguccacccaggcggccaucaaccagaucaacggcaagcugaaccggcucaucggcaagaccaacgagaaguuccaccagaucgagaaggaguucuccgaggucgaggggcgcauccaggaccuggagaaguacguggaggacacgaagaucgaccuguggagcuacaacgccgagcuccugguggcccuggagaaccagcacaccaucgaccucaccgacuccgagaugaacaagcuguucgagcggaccaagaagcagcugcgcgagaacgccgaggacaugggcaacgggugcuucaagaucuaccacaagugcgacaacgcgugcaucggcagcauccgcaacgggacguacgaccacgacgucuaccgggacgaggcccucaacaaccgcuuccagaucaagggcguggagcugaaguccggcuacaaggacuggauccuguggaucagcuucgccaucuccugcuuccuccugugcguggcccugcucggguucaucaugugggccugccagaagggcaacauccggugcaacaucugcaucuga

SEQ ID NO: 64610 - RNA, 1701 nt, Artificial Sequence; identical to SEQ ID NO: 64267
  derived and/or modified CDS sequence (opt1) from hemagglutinin__InfluenzaA__ABC43486

SEQ ID NO: 64611 - RNA, 1701 nt, Artificial Sequence; identical to SEQ ID NO: 64267
  derived and/or modified CDS sequence (opt1) from hemagglutinin__InfluenzaA__ABC43497

SEQ ID NO: 64612 - RNA, 1701 nt, Artificial Sequence; identical to SEQ ID NO: 64306
  derived and/or modified CDS sequence (opt1) from hemagglutinin__InfluenzaA__ABC43508

SEQ ID NO: 64613 - RNA, 1701 nt, Artificial Sequence; identical to SEQ ID NO: 64306
  derived and/or modified CDS sequence (opt1) from hemagglutinin__InfluenzaA__ABC43519

SEQ ID NO: 64614 - RNA, 1701 nt, Artificial Sequence; identical to SEQ ID NO: 64306
  derived and/or modified CDS sequence (opt1) from hemagglutinin__InfluenzaA__ABC43530

SEQ ID NO: 64615 - RNA, 1701 nt, Artificial Sequence
  derived and/or modified CDS sequence (opt1) from hemagglutinin__InfluenzaA__ABC43552
augaagaccaucaucgcccugagcuacauccucugccugguguucgcccagaagcugcccggcaacgacaacuccaccgcgacgcucugccuggggcaccacgccgucccgaacggcaccaucgugaagaccaucaccaacgaccagaucgaggugacgaacgccaccgagcugguccagagcuccagcaccgggggcaucugcgacagcccccaccagauccucgacggggagaacugcacccugaucgacgcccugcucggcgacccccagugcgacggcuuccagaacaagaagugggaccuguucguggagcgcagcaaggccuacuccaacugcuaccccuacgacgugccggacuacgcgagccugcggucccucgucgccagcuccgggacgcuggaguucaacaacgagagcuucaacuggaccggcgugacccagaacgggaccuccagcgccugcaagcgccgguccaacaacagcuucuucucccgccugaacuggcucacgcaccugaaguucaaguaccccgcccugaacgugaccaugcccaacaacgagaaguucgacaagcucuacaucuggggcguccaccaccccgggaccgacaacgaccagaucagccuguacgcgcaggccccgggccggaucaccguguccacgaagcgcagccagcagaccgugauccccaacaucggcagccggccccgcguccgggacauccccucccgcaucagcaucuacuggaccaucgugaagccgggggacauccugcucaucaacuccaccggcaaccugaucgcgccccggggguacuucaagauccgcagcggcaaguccagcaucaugcgguccgacgcccccaucggcaagugcaacagcgagugcaucacgcccaacggguccaucccgaacgacaagcccuuccagaacgugaaccgcaucaccuacggcgccugcccccgguacgucaagcagaacacccugaagcucgccaccgggaugcgcaacgugcccgagaagcagacgcggggcaucuucggggccaucgccggcuucaucgagaacggcugggaggggaugguggacggcugguacggguuccgccaccagaacagcgagggcaucgggcaggccgccgaccugaaguccacccaggcggccaucaaccagaucaacggcaagcugaaccggcucaucggcaagaccaacgagaaguuccaccagaucgagaaggaguucagcgaggucgaggggcgcauccaggaccuggagaaguacguggaggacaccaagaucgaccugugguccuacaacgccgagcuccugguggcccuggagaaccagcacacgaucgaccucaccgacagcgagaugaacaagcuguucgagcggaccaagaagcagcugcgcgagaacgccgaggacaugggcaacgggugcuucaagaucuaccacaagugcgacaacgcgugcaucggcuccauccgcaacgggaccuacgaccacgacgucuaccgggacgaggcccucaacaaccgcuuccagaucaagggcguggagcugaaguccggcuacaaggacuggauccuguggaucuccuucgccaucagcugcuuccuccugugcguggcccugcucggguucaucaugugggccugccagaagggcaacauccggugcaacaucugcaucuga

SEQ ID NO: 64616 - RNA, 1701 nt, Artificial Sequence
  derived and/or modified CDS sequence (opt1) from hemagglutinin__InfluenzaA__ABC46554
augaagaccaucaucgcccugagcuacaucuucugccagguguucgcccagaaccuccccggcaacgacaacuccaccgcgacgcugugccuggggcaccacgccgucccgaacggcacccucgugaagaccaucaccaacgaccagaucgaggugacgaacgccaccgagcugguccagagcuccagcaccgggcgcaucugcgacagcccccaccggauccuggacggcaagaacugcacccucaucgacgcccugcugggggacccccacugcgacggcuuccagaacgagaagugggaccucuucguggagcgcuccaaggccuucuccaacugcuaccccuacgacgugccggacuacgcgagccugcggucccuggucgccagcuccggcacgcucgaguucaucaacgagggguucaacuggaccggcgugacccaggacgggggcagcuacgccugcaagcgcgggcccgacaacuccuucuucagccggcugaacuggcuguacaaguccgagagcaccuaccccgugcucaacgucacgaugcccaacaacgacaacuucgacaagcuguacaucuggggcgugcaccacccguccaccgacaaggagcagaccaaccuguacgugcaggccagcggccgcgucaccguguccacgaagcggagccagcagaccaucauccccaacguggggagccgccccuggguccggggccucuccagccgcaucuccaucuacuggaccaucgugaagcccggggacauccugcugaucaacagcaacggcaaccucaucgcgccgcggggcuacuucaagauccgcaccgggaaguccagcaucaugcgguccgacgcccccaucggcacgugcagcuccgagugcaucacccccaacgggagcauccccaacgacaagccguuccagaacgugaacaagaucaccuacggcgccugccccaaguacgucaagcagaacacccugaagcuggccacggggaugcgcaacgugcccgagaagcagacccggggcaucuucggcgccaucgcgggguucaucgagaacggcugggaggggaugaucgacggcugguacggguuccgccaccagaacuccgagggcaccggccaggccgccgaccucaagagcacccaggccgccaucgaccagaucaacgggaagcugaaccgggugaucgagaagacgaacgagaaguuccaccagaucgagaaggaguucuccgaggucgagggccgcauccaggaccuggagaaguacguggaggacaccaagaucgaccucuggagcuacaacgcggagcugcugguggcccucgagaaccagcacaccaucgaccugaccgacuccgagaugaacaagcuguucgagaagacgcggcgccagcuccgggagaacgccgaggacauggggaacggcugcuucaagaucuaccacaagugcgacaacgccugcaucgggagcauccgcaacggcaccuacgaccacgacgucuaccgcgacgaggcccugaacaaccgguuccagaucaagggcguggagcugaaguccggguacaaggacuggauccucuggaucagcuucgcgaucuccugcuuccugcugugcgucgugcuccugggcuucaucaugugggccugccagaaggggaacauccgcugcaacaucugcaucuga

SEQ ID NO: 64617 - RNA, 1701 nt, Artificial Sequence
  derived and/or modified CDS sequence (opt1) from hemagglutinin__InfluenzaA__ABC46576
augaagaccaucaucgcccugagcuacaucuucugccucguguucgcccagaaccugcccggcaacgacaaguccaccgcgacgcugugccucgggcaccacgccgucccgaacggcacccuggugaagaccaucaccaacgaccagaucgaggugacgaacgccaccgagcugguccagagcuccagcaccgggcgcaucugcgacagcccccaccggauccucgacggcaagaacugcacccugguggacgcccugcucggggacccccacugcgacggcuuccagaacgagaagugggaccuguucguggagcgcuccaaggccuucuccaacugcuaccccuacgacgucccggacuacgcgagccugcggucccucguggccagcuccggcacgcuggaguucaucaacgagagcuucaacuggaccggggugacccaguccggcgggagcuacgccugcaagcgcggcuccgacaacagcuucuucucccggcugaacuggcucuacgagagcgaguccaaguaccccguccugaacgugaccaugcccaacaacgggaacuucgacaagcuguacaucuggggcgugcaccaccccagcacggacaaggagcagaccaaccucuacguccgcgccagcggccgggugaccguguccaccaagcgcagccagcagacgaucaucccgaacaucgggucccggcccuggguccgcggccugagcucccggaucagcaucuacuggaccaucgugaagcccggggacauccugcucaucaacuccaacggcaaccugaucgcgccccgcggcuacuucaagauccggaccggcaagagcuccaucaugcgcagcgacgccccgaucgggaccugcuccagcgagugcaucacgcccaacggguccauccccaacgacaagcccuuccagaacgugaacaagaucaccuacggcgccugcccgaaguacgucaagcagaacacccugaagcucgccaccgggaugcggaacgugcccgagaagcagacgcgcggcaucuucggcgccaucgcgggguucaucgagaacggcugggaggggaugguggacggcugguacggguuccggcaccagaacagcgagggcaccggccaggccgccgaccugaaguccacccaggccgccaucgaccagaucaacgggaagcugaaccgcgucaucgagaagaccaacgagaaguuccaccagaucgagaaggaguucagcgagguggagggccggauccaggaccucgagaaguacguggaggacacgaagaucgaccugugguccuacaacgcggagcugcucgucgcccuggagaaccagcacaccaucgaccugaccgacagcgagaugaacaagcuguucgagaagacccgccggcagcuccgcgagaacgccgaggacauggggaacggcugcuucaagaucuaccacaagugcgacaacgccugcaucggguccauccgcaacggcacguacgaccacgacguguaccgggacgaggcccugaacaaccgcuuccagaucaagggcgucgagcucaagagcggguacaaggacuggauccuguggaucagcuucgcgaucuccugcuuccugcucugcguggugcugcugggcuucaucaugugggccugccagaaggggaacauccggugcaacaucugcaucuga

SEQ ID NO: 64618 - RNA, 1701 nt, Artificial Sequence; identical to SEQ ID NO: 64476
  derived and/or modified CDS sequence (opt1) from hemagglutinin__InfluenzaA__ABC50167

SEQ ID NO: 64619 - RNA, 1701 nt, Artificial Sequence; identical to SEQ ID NO: 64476
  derived and/or modified CDS sequence (opt1) from hemagglutinin__InfluenzaA__ABC50178

SEQ ID NO: 64620 - RNA, 1701 nt, Artificial Sequence; identical to SEQ ID NO: 64476
  derived and/or modified CDS sequence (opt1) from hemagglutinin__InfluenzaA__ABC50189

SEQ ID NO: 64621 - RNA, 1701 nt, Artificial Sequence; identical to SEQ ID NO: 64586
  derived and/or modified CDS sequence (opt1) from hemagglutinin__InfluenzaA__ABC50200

SEQ ID NO: 64622 - RNA, 1701 nt, Artificial Sequence; identical to SEQ ID NO: 64586
  derived and/or modified CDS sequence (opt1) from hemagglutinin__InfluenzaA__ABC50211

SEQ ID NO: 64623 - RNA, 1701 nt, Artificial Sequence; identical to SEQ ID NO: 64586
  derived and/or modified CDS sequence (opt1) from hemagglutinin__InfluenzaA__ABC50222

SEQ ID NO: 64624 - RNA, 1701 nt, Artificial Sequence; identical to SEQ ID NO: 64586
  derived and/or modified CDS sequence (opt1) from hemagglutinin__InfluenzaA__ABC50233

SEQ ID NO: 64625 - RNA, 1701 nt, Artificial Sequence; identical to SEQ ID NO: 64586
  derived and/or modified CDS sequence (opt1) from hemagglutinin__InfluenzaA__ABC50244

SEQ ID NO: 64626 - RNA, 1701 nt, Artificial Sequence; identical to SEQ ID NO: 64586
  derived and/or modified CDS sequence (opt1) from hemagglutinin__InfluenzaA__ABC50266

SEQ ID NO: 64627 - RNA, 1701 nt, Artificial Sequence; identical to SEQ ID NO: 64586
  derived and/or modified CDS sequence (opt1) from hemagglutinin__InfluenzaA__ABC50277

SEQ ID NO: 64628 - RNA, 1701 nt, Artificial Sequence
  derived and/or modified CDS sequence (opt1) from hemagglutinin__InfluenzaA__ABC50299
augaagaccaucaucgcccugagcuacauccucugccugguguucgcccagaagcugcccggcaacgacaacuccaccgcgacgcucugccuggggcaccacgccgucccgaacggcacccuggugaagaccaucaccaacgaccagaucgaggugacgaacgccaccgagcucguccagagcuccagcaccgggcgcaucugcgacagcccccaccagauccuggacggcgagaacugcacccugaucgacgcccuccugggggacccccacugcgacggcuuccagaacaaggagugggaccuguucguggagcggagcaaggccuacuccaacugcuaccccuacgacgugccggacuacgucagccuccgcucccugguggcgagcuccggcacgcuggaguucaacaacgagagcuucaacuggaccgggguggcccagaacggcaccuccagcgccugcaagcggcgcuccgacaagagcuucuucucccggcucaacuggcugcaccagcugaaguacaaguaccccgcccucaacgucaccaugcccaacaacgagaaguucgacaagcuguacaucuggggcgugcaccaccccgggacggacagcgaccagaucucccuguacgcgcaggccagcgggcgcgugaccgucagcaccaagcggucccagcagaccgugaucccgaacaucggcagccgccccugggugcggggcgucuccagccgcaucuccaucuacuggacgaucgugaagcccggggacauccuccugaucaacagcaccggcaaccugaucgcgccccggggguacuucaagauccgcuccggcaagagcuccaucaugcggagcgacgccccgaucggcaagugcaacuccgagugcaucacccccaacgggagcauccccaacgacaagcccuuccagaacgugaaccgcaucaccuacggcgccugcccgcgguacgucaagcagaacacgcucaagcuggccaccgggaugcgcaacgugcccgagaagcagacccggggcaucuucggggccaucgccggcuucaucgagaacggcugggaggggaugauggacggcugguacggguuccgccaccagaacuccgagggcaccgggcaggccgccgaccugaaguccacgcaggcggccaucaaccagaucaacggcaagcucaaccggcugaucgagaagaccaacgagaaguuccaccagaucgagaaggaguucuccgagguggagggccgcauccaggaccuggagaaguacgucgaggacaccaagaucgaccucuggagcuacaacgccgagcugcugguggcccucgagaaccagcacaccaucgaccugacggacuccgagaugaacaagcuguucgagcggaccaagaagcagcuccgcgagaacgccgaggacauggggaacggcugcuucaagaucuaccacaagugcgacaacgcgugcaucgggagcauccgcaacggcaccuacgaccacgacguguaccgggacgaggcccugaacaaccgcuuccagaucaagggggucgagcugaaguccggcuacaaggacugggugcucuggaucagcuucgccaccagcugcuuccugcugugcaucguccuccugggcuucaucaugugggccugccagaaggggaacauccggugcaacaucugcaucuga

SEQ ID NO: 64629 - RNA, 1701 nt, Artificial Sequence; identical to SEQ ID NO: 64586
  derived and/or modified CDS sequence (opt1) from hemagglutinin__InfluenzaA__ABC50310

SEQ ID NO: 64630 - RNA, 1701 nt, Artificial Sequence
  derived and/or modified CDS sequence (opt1) from hemagglutinin__InfluenzaA__ABC50321
augaagaccaucaucgcccugagcuacauccucugccugguguucgcccagaagcugcccggcaacgacaacuccaccgcgacgcucugccuggggcaccacgccgucccgaacggcacccuggugaagaccaucaccaacgaccagaucgaggugacgaacgccaccgagcucguccagagcuccagcaccgggcgcaucugcgacagcccccaccagauccuggacggcgagaacugcacccugaucgacgcccuccugggggacccccacugcgacggcuuccagaacaaggagugggaccuguucguggagcggagcaaggccuacuccaacugcuaccccuacgacgugccggacuacgucagccuccgcucccugguggcgagcuccggcacgcuggaguucaacaacgagagcuucaacuggaccgggguggcccagaacggcaccuccagcgccugcaagcggcgcuccgacaagagcuucuucucccggcucaacuggcugcaccagcugaaguacaaguaccccgcccucaacgucaccaugcccaacaacgagaaguucgacaagcuguacaucuggggcgugcaccaccccgggacggacagcgaccagaucucccuguacgcgcaggccagcgggcgcgugaccgucagcaccaagcggucccagcagaccgugaucccgaacaucggcagccgccccugggugcggggcgucuccagccgcaucuccaucuacuggacgaucgugaagcccggggacauccuccugaucaacagcaccggcaaccugaucgcgccccggggguacuucaagauccgcuccggcaagagcuccaucaugcggagcgacgccccgaucggcaagugcaacuccgagugcaucacccccaacgggagcauccccaacgacaagcccuuccagaacgugaaccgcaucaccuacggcgccugcccgcgguacgucaagcagaacacgcucaagcuggccaccgggaugcgcaacgugcccggcaagcagacccgggggaucuucggcgccaucgccggcuucaucgagaacgggugggagggcaugauggacgggugguacggcuuccgccaccagaacuccgaggggaccggccaggccgccgaccugaaguccacgcaggcggccaucaaccagaucaacggcaagcucaaccggcugaucgagaagaccaacgagaaguuccaccagaucgagaaggaguucuccgagguggaggggcgcauccaggaccuggagaaguacgucgaggacaccaagaucgaccucuggagcuacaacgccgagcugcugguggcccucgagaaccagcacaccaucgaccugacggacuccgagaugaacaagcuguucgagcggaccaagaagcagcuccgcgagaacgccgaggacaugggcaacgggugcuucaagaucuaccacaagugcgacaacgcgugcaucggcagcauccgcaacgggaccuacgaccacgacguguaccgggacgaggcccugaacaaccgcuuccagaucaagggcgucgagcugaaguccggcuacaaggacugggugcucuggaucagcuucgccaucagcugcuuccugcugugcaucguccuccugggguucaucaugugggccugccagaagggcaacauccggugcaacaucugcaucuga

SEQ ID NO: 64631 - RNA, 1701 nt, Artificial Sequence
  derived and/or modified CDS sequence (opt1) from hemagglutinin__InfluenzaA__ABC50332
augaagaccaucaucgcccugagcuacauccucugccugguguucgcccagaagcugcccggcaacgacaacuccaccgcgacgcucugccuggggcaccacgccgucccgaacggcacccuggugaagaccaucaccaacgaccagaucgaggugacgaacgccaccgagcucguccagagcuccagcaccgggcgcaucugcgacagcccccaccagauccuggacggcgagaacugcacccugaucgacgcccuccugggggacccccacugcgacggcuuccagaacaaggagugggaccuguucguggagcggagcaaggccuacuccaacugcuaccccuacgacgugccggacuacgucagccuccgcucccugguggcgagcuccggcacgcuggaguucaacaacgagagcuucaacuggaccgggguggcccagaacggcaccuccagcgccugcaagcggcgcuccgacaagagcuucuucucccggcucaacuggcugcaccagcugaaguacaaguaccccgcccucaacgucaccaugcccaacaacgagaaguucgacaagcuguacaucuggggcgugcaccaccccgggacggacagcgaccagaucucccuguacgcgcaggccagcgggcgcgugaccgucagcaccaagcggucccagcagaccgugaucccgaacaucggcagccgccccugggugcggggcgucuccagccgcaucuccaucuacuggacgaucgugaagcccggggacauccuccugaucaacagcaccggcaaccugaucgcgccccggggguacuucaagauccgcuccggcaagagcuccaucaugcggagcgacgccccgaucggcaagugcaacuccgagugcaucacccccaacgggagcauccccaacggcaagcccuuccagaacgugaaccgcaucaccuacggggccugcccgcgguacgucaagcagaacacgcucaagcuggccaccggcaugcgcaacgugcccgagaagcagacccgggggaucuucggcgccaucgccggcuucaucgagaacgggugggagggcaugauggacgggugguacggcuuccgccaccagaacuccgaggggaccggccaggccgccgaccugaaguccacgcaggcggccaucaaccagaucaacggcaagcucaaccggcugaucgagaagaccaacgagaaguuccaccagaucgagaaggaguucuccgagguggaggggcgcauccaggaccuggagaaguacgucgaggacaccaagaucgaccucuggagcuacaacgccgagcugcugguggcccucgagaaccagcacaccaucgaccugacggacuccgagaugaacaagcuguucgagcggaccaagaagcagcuccgcgagaacgccgaggacaugggcaacgggugcuucaagaucuaccacaagugcgacaacgcgugcaucggcagcauccgcaacgggaccuacgaccacgacguguaccgggacgaggcccugaacaaccgcuuccagaucaagggcgucgagcugaaguccggcuacaaggacuggauccucuggaucagcuucgccaucagcugcuuccugcugugcaucgugcuccugggguucaucaugugggccugccagaagggcaacauccggugcaacaucugcaucuga

SEQ ID NO: 64632 - RNA, 1701 nt, Artificial Sequence; identical to SEQ ID NO: 64586
  derived and/or modified CDS sequence (opt1) from hemagglutinin__InfluenzaA__ABC50343

SEQ ID NO: 64633 - RNA, 1701 nt, Artificial Sequence
  derived and/or modified CDS sequence (opt1) from hemagglutinin__InfluenzaA__ABC50354
augaagaccaucaucgcccugagcuacauccucugccugguguucgcccagaagcugcccggcaacgacaacuccaccgcgacgcucugccuggggcaccacgccgucccgaacggcacccuggugaagaccaucaccaacgaccagaucgaggugacgaacgccaccgagcucguccagagcuccagcaccgggcgcaucugcgacagcccccaccagauccuggacggcgagaacugcacccugaucgacgcccuccugggggacccccacugcgacggcuuccagaacaaggagugggaccuguucguggagcggagcaaggccuacuccaacugcuaccccuacgacgugccggacuacgucagccuccgcucccugguggcgagcuccggcacgcuggaguucaacaacgagagcuucaacuggaccgggguggcccagaacggcaccuccagcuccugcaagcggcgcagcgacaaguccuucuucagccggcucaacuggcugcaccagcugaaguacaaguaccccgcccucaacgucaccaugcccaacaacgagaaguucgacaagcuguacaucuggggcgugcaccaccccgggacggacuccgaccagaucagccuguacgcccaggcgagcgggcgcgugaccgucuccaccaagcggagccagcagaccgugaucccgaacaucggcucccgccccugggugcggggcgucagcucccgcaucagcaucuacuggacgaucgugaagcccggggacauccuccugaucaacuccaccggcaaccugaucgcgccccggggguacuucaagauccgcagcggcaaguccagcaucaugcgguccgacgccccgaucggcaagugcaacagcgagugcaucacccccaacggguccauccccaacgacaagcccuuccagaacgugaaccgcaucaccuacggcgccugcccgcgguacgucaagcagaacacgcucaagcuggccaccgggaugcgcaacgugcccgagaagcagacccggggcaucuucggggccaucgccggcuucaucgagaacggcugggaggggaugauggacggcugguacggguuccgccaccagaacagcgagggcaccgggcaggccgccgaccugaaguccacgcaggccgcgaucaaccagaucaacggcaagcucaaccggcugaucgagaagaccaacgagaaguuccaccagaucgagaaggaguucagcgagguggagggccgcauccaggaccuggagaaguacgucgaggacaccaagaucgaccucugguccuacaacgccgagcugcugguggcccucgagaaccagcacaccaucgaccugacggacagcgagaugaacaagcuguucgagcggaccaagaagcagcuccgcgagaacgccgaggacauggggaacggcugcuucaagaucuaccacaagugcgacaacgccugcaucggguccauccgcaacggcaccuacgaccacgacguguaccgggacgaggcgcugaacaaccgcuuccagaucaagggggucgagcugaaguccggcuacaaggacugggugcucuggaucagcuucgccaucuccugcuuccugcugugcaucguccuccugggcuucaucaugugggccugccagaaggggaacauccggugcaacaucugcaucuga

SEQ ID NO: 64634 - RNA, 1701 nt, Artificial Sequence
  derived and/or modified CDS sequence (opt1) from hemagglutinin__InfluenzaA__ABC50376
augaagaccaucaucgcccugagcuacauccucugccugguguucgcccagaagcugcccggcaacgacaacuccaccgcgacgcucugccuggggcaccacgccgucccgaacggcacccuggugaagaccaucaccaacgaccagaucgaggugacgaacgccaccgagcucguccagagcuccagcaccgggcgcaucugcgacagcccccaccagauccuggacggcgagaacugcacccugaucgacgcccuccugggggacccccacugcgacggcuuccagaacaaggagugggaccuguucguggagcggagcaaggccuacuccaacugcuaccccuacgacgugccggacuacgucagccuccgcucccugguggcgagcuccggcacgcuggaguucaacaacgagagcuucaacuggaccgggguggcccagaacggcaccuccagcgccugcaagcggcgcuccgacaagagcuucuucucccggcucaacuggcugcaccagcugaaguacaaguaccccgcccucaacgucaccaugcccaacaacgagaaguucgacaagcuguacaucuggggcgugcaccaccccgggacggacagcgaccagaucucccuguacgcgcaggccagcgggcgcgugaccgucagcaccaagcggucccagcagaccgugaucccgaacacgggcagccgccccugggugcggggcgucuccagccgcaucuccaucuacuggaccaucgugaagcccggggacauccuccugaucaacagcaccggcaaccugaucgcgccccggggguacuucaagauccgcuccggcaagagcuccaucaugcggagcgacgccccgaucggcaagugcaacuccgagugcaucacccccaacgggagcauccccaacgacaagcccuuccagaacgugaaccgcaucacguacggcgccugcccgcgguacgucaagcagaacacccucaagcuggccaccgggaugcgcaacgugcccgagaagcagacccggggcaucuucggggccaucgccggcuucaucgagaacggcugggaggggaugauggacggcugguacggguuccgccaccagaacuccgagggcacggggcaggccgccgaccugaaguccacccaggcggccaucaaccagaucaacggcaagcucaaccggcugaucgagaagaccaacgagaaguuccaccagaucgagaaggaguucuccgagguggagggccgcauccaggaccuggagaaguacgucgaggacaccaagaucgaccucuggagcuacaacgccgagcugcugguggcccucgagaaccagcacacgaucgaccugaccgacuccgagaugaacaagcuguucgagcggaccaagaagcagcuccgcgagaacgccgaggacauggggaacggcugcuucaagaucuaccacaagugcgacaacgcgugcaucgggagcauccgcaacggcaccuacgaccacgacguguaccgggacgaggcccugaacaaccgcuuccagaucaagggggucgagcugaaguccggcuacaaggacugggugcucuggaucagcuucgccaucagcugcuuccugcugugcaucguccuccugggcuucaucaugugggccugccagaaggggaacauccggugcaacaucugcaucuga

SEQ ID NO: 64635 - RNA, 1701 nt, Artificial Sequence
  derived and/or modified CDS sequence (opt1) from hemagglutinin__InfluenzaA__ABC50387
augaagaccaucaucgcccugagcuacauccucugccugguguucgcccagaagcugcccggcaacgacaacuccaccgcgacgcucugccuggggcaccacgccgucccgaacggcacccuggugaagaccaucaccaacgaccagaucgaggugacgaacgccaccgagcucguccagagcuccagcaccgggcgcaucugcgacagcccccaccagauccuggacggcgagaacugcacccugaucgacgcccuccugggggacccccacugcgacggcuuccagaacaaggagugggaccuguucguggagcggagcaaggccuacuccaacugcuaccccuacgacgugccggacuacgucagccuccgcucccugguggcgagcuccggcacgcuggaguucaacaacgagagcuucaacuggaccgggguggcccagaacggcaccuccagcgccugcaagcggcgcuccgacaagagcuucuucucccggcucaacuggcugcaccagcugaaguacaaguaccccgcccucaacgucaccaugcccaacaacgagaaguucgacaagcuguacguguggggcgugcaccaccccgggacggacagcgaccagaucucccuguacgcgcaggccagcgggcgcgucaccgugagcaccaagcggucccagcagaccgugaucccgaacaucggcagccgccccuggguccggggcguguccagccgcaucuccaucuacuggacgaucgugaagcccggggacauccuccugaucaacagcaccggcaaccugaucgcgccccggggguacuucaagauccgcuccggcaagagcuccaucaugcggagcgacgccccgaucggcaagugcaacuccgagugcaucacccccaacgggagcauccccaacgacaagcccuuccagaacgucaaccgcaucaccuacggcgccugcccgcgguacgugaagcagaacacgcucaagcuggccaccgggaugcgcaacgugcccgagaagcagacccggggcaucuucggggccaucgccggcuucaucgagaacggcugggaggggaugauggacggcugguacggguuccgccaccagaacuccgagggcaccgggcaggccgccgaccugaaguccacgcaggcggccaucaaccagaucaacggcaagcucaaccggcugaucgagaagaccaacgagaaguuccaccagaucgagaaggaguucuccgaggucgagggccgcauccaggaccuggagaaguacguggaggacaccaagaucgaccucuggagcuacaacgccgagcugcugguggcccucgagaaccagcacaccaucgaccugacggacuccgagaugaacaagcuguucgagcggaccaagaagcagcuccgcgagaacgccgaggacauggggaacggcugcuucaagaucuaccacaagugcgacaacgcgugcaucgggagcauccgcaacggcaccuacgaccacgacgucuaccgggacgaggcccugaacaaccgcuuccagaucaaggggguggagcugaaguccggcuacaaggacuggguccucuggaucagcuucgccaucagcugcuuccugcugugcaucgugcuccugggcuucaucaugugggccugccagaaggggaacauccggugcaacaucugcaucuga

SEQ ID NO: 64636 - RNA, 1701 nt, Artificial Sequence
  derived and/or modified CDS sequence (opt1) from hemagglutinin__InfluenzaA__ABC50409
augaagaccaucaucgcccugagcuacauccucugccugguguucgcccagaagcugcccggcaacgacaacuccaccgcgacgcucugccuggggcaccacgccgucccgaacggcaccaucgugaagaccaucaccaacgaccagaucgaggugacgaacgccaccgagcugguccagagcuccagcaccgggggcaucugcgacagcccccaccagauccucgacggggagaacugcacccugaucgacgcccugcucggcgacccccagugcgacggcuuccagaacaagaagugggaccuguucguggagcgcagcaaggccuacuccaacugcuaccccuacgacgugccggacuacgucagccugcggucccucguggcgagcuccgggacgcuggaguucaacaacgagagcuucaacuggaccggcgugacccagaacgggaccuccagcgccugcaagcgccgguccaacaacagcuucuucucccgccugaacuggcucacgcaccugaaguucaaguaccccgcccugaacgucaccaugcccaacaacgagaaguucgacaagcucuacaucuggggcgugcaccaccccgggaccgacaacgaccagaucagccuguacgcccaggcguccggccggaucaccgugagcacgaagcgcagccagcagaccgucaucccgaacaucggcucccggccccgcgugcgggacauccccagccgcaucuccaucuacuggaccaucgugaagcccggggacauccugcucaucaacagcaccggcaaccugaucgccccgcggggguacuucaagauccgcuccggcaagagcuccaucaugcggagcgacgcccccaucggcaagugcaacuccgagugcaucacgcccaacgggagcauccccaacgacaagccguuccagaacgucaaccgcaucaccuacggcgccugcccccgguacgugaagcagaacacccugaagcucgccaccgggaugcgcaacgugcccgagaagcagacgcggggcaucuucggggcgaucgccggcuucaucgagaacggcugggaggggauggucgacggcugguacggguuccgccaccagaacuccgagggcaucgggcaggccgccgaccugaaguccacccaggccgcgaucaaccagaucaacggcaagcugaaccggcucaucggcaagaccaacgagaaguuccaccagaucgagaaggaguucuccgagguggaggggcgcauccaggaccuggagaaguacguggaggacaccaagaucgaccuguggagcuacaacgccgagcuccuggucgcccuggagaaccagcacacgaucgaccucaccgacuccgagaugaacaagcuguucgagcggaccaagaagcagcugcgcgagaacgccgaggacaugggcaacgggugcuucaagaucuaccacaagugcgacaacgccugcaucggcagcauccgcaacgggaccuacgaccacgacguguaccgggacgaggcgcucaacaaccgcuuccagaucaagggcguggagcugaaguccggcuacaaggacuggauccuguggaucagcuucgccaucuccugcuuccuccugugcgucgcccugcucggguucaucaugugggccugccagaagggcaacauccggugcaacaucugcaucuga

SEQ ID NO: 64637 - RNA, 1701 nt, Artificial Sequence; identical to SEQ ID NO: 64636
  derived and/or modified CDS sequence (opt1) from hemagglutinin__InfluenzaA__ABC50420

SEQ ID NO: 64638 - RNA, 1701 nt, Artificial Sequence
  derived and/or modified CDS sequence (opt1) from hemagglutinin__InfluenzaA__ABC54668
augaagaccaucaucgcccugagcuacauccucugccugguguucgcccagaagcugcccggcaacgacaacuccaccgcgacgcucugccuggggcaccacgccgucccgaacggcacccuggugaagaccaucaccaacgaccagaucgaggugacgaacgccaccgagcucguccagagcuccagcaccgggcgcaucugcgacagcccccaccagauccuggacggcgagaacugcacccugaucgacgcccuccugggggacccccacugcgacggcuuccagaacaaggagugggaccuguucguggagcgguccaaggccuacuccaacugcuaccccuacgacgugccggacuacgcgagccuccgcucccuggucgccagcuccggcacgcuggaguucaacaacgagagcuucaacuggaccgggguggcccagaacggcaccuccagcgccugcaagcggcgcuccaacaagagcuucuucucccggcucaacuggcugcaccagcugaaguacaaguaccccgcgcucaacgugaccaugcccaacaacgagaaguucgacaagcuguacaucuggggcguccaccaccccagcacggacuccgaccagaucagccuguacgcccaggccagcgggcgcgugaccguguccaccaagcggagccagcagaccgucaucccgaacaucggguccggccccugggugcgcggcgugagcucccggaucagcaucuacuggacgaucgucaagcccggggacauccuccugaucaacuccaccggcaaccugaucgcgccccgcggguacuucaagauccggagcggcaaguccagcaucaugcgcuccgacgccccgaucggcaagugcaacagcgagugcaucacccccaacgggucccuccccaacgacaagcccuuccagaacgugaaccggaucaccuacggcgccugcccgcgcuacgugaagcagaacacgcugaagcuggccaccgggaugcggaacguccccgagaagcagacccgcggcaucuucggggccaucgccggcuucaucgagaacggcugggaggggaugguggacggcugguacggguuccggcaccagaacagcgagggcaccgggcaggccgcggaccucaaguccacgcaggccgccaucaaccagaucaacggcaagcugaaccgccugaucgagaagaccaacgagaaguuccaccagaucgagaaggaguucagcgagguggagggccggauccaggaccucgagaaguacgucgaggacaccaagaucgaccugugguccuacaacgccgagcugcucguggcccuggagaaccagcacaccaucgaccugacggacagcgagaugaacaagcuguucgagcgcaccaagaagcagcuccgggagaacgcggaggacauggggaacggcugcuucaagaucuaccacaagugcgacaacgccugcaucggguccauccgcaacggcaccuacgaccacgacguguaccgcgacgaggcccugaacaaccgguuccagaucaagggggucgagcucaagagcggcuacaaggacuggauccuguggaucagcuucgccaucuccugcuuccugcucugcgugguccugcugggcuucaucaugugggccugccagaaggggaacauccgcugcaacaucugcaucuga

SEQ ID NO: 64639 - RNA, 1701 nt, Artificial Sequence
  derived and/or modified CDS sequence (opt1) from hemagglutinin__InfluenzaA__ABC54679
augaagaccaucaucgcccugagcuacauccucugccugguguucgcccagaagcugcccggcaacgacaacuccaccgcgacgcucugccuggggcaccacgccgucccgaacggcaccaucgugaagaccaucaccaacgaccagaucgaggugacgaacgccaccgagcugguccagagcucccccaccgggggcaucugcgacagcccccaccagauccucgacggggagaacugcacccugaucgacgcccugcucggcgacccccagugcgacggcuuccagaacaagaagugggaccuguucaucgagcgcuccaaggccuacagcaacugcuacccguacgacgugcccgacuacgcgucccugcggagccucguggccuccagcgggacgcuggaguucaacaacgaguccuucaacuggaccggcgucacccagaacgggaccagcuccgccugcaagcgccggagcaacaacuccuucuucagccgccugaacuggcucacgcaccugaaguucaaguaccccgcccugaacgugaccaugcccaacaacgagaaguucgacaagcucuacaucuggggcgugcaccacccggggaccgacaacgaccagaucucccuguacgcgcaggccagcggccggaucaccgucuccacgaagcgcagccagcagaccgugauccccaacgugggcagccggccccgcguccgggacauccccucccgcaucagcaucuacuggaccaucgugaagccgggggacauccugcucaucaacuccaccggcaaccugaucgcgccccggggguacuucaagauccgcagcggcaaguccagcaucaugcgguccgacgcccccaucggcaagugcaacagcgagugcaucacgcccaacggguccaucccgaacgacaagcccuuccagaacgugaaccgcaucaccuacggcgccugcccccgguacgucaagcagaacacccugaagcucgccaccgggaugcgcaacgugcccgagaagcagacgcggggcaucuucggggccaucgccggcuucaucgagaacggcugggaggggaugguggacggcugguacggguuccgccaccagaacagcgagggcaucgggcaggccgccgaccugaaguccacccaggcggccaucaaccagaucaacggcaagcugaaccggcucaucggcaagaccaacgagaaguuccaccagaucgagaaggaguucagcgaggucgaggggcgcauccaggaccuggagaaguacguggaggacaccaagaucgaccugugguccuacaacgccgagcuccugguggcccuggagaaccagcacacgaucgaccucaccgacagcgagaugaacaagcuguucgagcggaccaagaagcagcugcgcgagaacgccgaggacaugggcaacgggugcuucaagaucuaccacaagugcgacaacgcgugcaucggcuccauccgcaacgggaccuacgaccacgacgucuaccgggacgaggcccucaacaaccgcuuccagaucaagggcguggagcucaagagcggcuacaaggacuggauccuguggaucuccuucgccaucagcugcuuccugcugugcguggcccugcucggguucaucaugugggccugccagaagggcaacauccggugcaacaucugcaucuga

SEQ ID NO: 64640 - RNA, 1701 nt, Artificial Sequence; identical to SEQ ID NO: 64540
  derived and/or modified CDS sequence (opt1) from hemagglutinin__InfluenzaA__ABC67319

SEQ ID NO: 64641 - RNA, 1701 nt, Artificial Sequence
  derived and/or modified CDS sequence (opt1) from hemagglutinin__InfluenzaA__ABC67454
augaagaccaucaucgcccugagcuacauccucugccugguguucgcccaggagcugcccggcaacgacaacuccaccgcgacgcucugccuggggcaccacgccgucccgaacggcacccuggugaagaccaucaccaacgaccagaucgaggugacgaacgccaccgagcucguccagagcuccagcaccgggcgcaucugcgacagcccccaccagauccuggacggcgagaacugcacccugaucgacgcccuccugggggacccccacugcgacggcuuccagaacaaggagugggaccuguucguggagcggagcaaggccuacuccaacugcuaccccuacgacgugccggacuacgucagccuccgcucccugguggcgagcuccggcacgcuggaguucaacaacgagagcuucaacuggaccgggguggcccagaacggcaccuccagcgccugcaagcggcgcuccgacaagagcuucuucucccggcucaacuggcugcaccagcugaaguacaaguaccccgcccucaacgucaccaugcccaacaacgagaaguucgacaagcuguacaucuggggcgugcaccaccccgggacggacagcgaccagaucucccuguacgcgcaggccagcgggcgcgugaccgucagcaccaagcggucccagcagaccgugaucccgaacaucggcagccgccccugggugcggggcgucuccagccgcaucuccaucuacuggacgaucgugaagcccggggacauccuccugaucaacagcaccggcaaccugaucgcgccccggggguacuucaagauccgcuccggcaagagcuccaucaugcggagcgacgccccgaucggcaagugcaacuccgagugcaucacccccaacgggagcauccccaacgacaagcccuuccagaacgugaaccgcaucaccuacggcgccugcccgcgguacgucaagcagaacacgcucaagcuggccaccgggaugcgcaacgugcccgagaagcagacccggggcaucuucggggccaucgccggcuucaucgagaacggcugggaggggaugauggacggcugguacggguuccgccaccagaacuccgagggcaccgggcaggccgccgaccugaaguccacgcaggcggccaucaaccagaucaacggcaagcucaaccggcugaucgagaagaccaacgagaaguuccaccagaucgagaaggaguucuccgagguggagggccgcauccaggaccuggagaaguacgucgaggacaccaagaucgaccucuggagcuacaacgccgagcugcugguggcccucgagaaccagcacaccaucgaccugacggacuccgagaugaacaagcuguucgagcggaccaagaagcagcuccgcgagaacgccgaggacauggggaacggcugcuucaagaucuaccacaagugcgacaacgcgugcaucgggagcauccgcaacggcaccuacgaccacgacguguaccgggacgaggcccugaacaaccgcuuccagaucaagggggucgagcugaaguccggcuacaaggacugggugcucuggaucagcuucgccaucagcugcuuccugcugugcaucguccuccugggcuucaucaugugggccugccagaaggggaacauccggugcaacaucugcaucuga

SEQ ID NO: 64642 - RNA, 1701 nt, Artificial Sequence; identical to SEQ ID NO: 64586
  derived and/or modified CDS sequence (opt1) from hemagglutinin__InfluenzaA__ABC67471

SEQ ID NO: 64643 - RNA, 1701 nt, Artificial Sequence
  derived and/or modified CDS sequence (opt1) from hemagglutinin__InfluenzaA__ABC67554
augaagaccaucaucgcccugagcuacauccucugccugguguucgcccagaagcugcccggcaacgacaacuccaccgcgacgcucugccuggggcaccacgccgucccgaacggcaccaucgugaagaccaucaccaacgaccagaucgaggugacgaacgccaccgagcugguccagagcuccagcaccgggggcaucugcgacagcccccaccagauccucgacggggagaacugcacccugaucgacgcccugcucggcgacccccagugcgacggcuuccagaacaagaagugggaccuguucguggagcgcagcaaggccuacuccaacugcuaccccuacgacgugccggacuacgcgagccugcggucccucaucgccagcuccgggacgcuggaguucaacaacgagagcuucaacuggaccggcgucacccagaacgggaccuccagcgccugcaagcgccgguccaacagcuccuucuucagccgccugaacuggcucacgcaccugaaguucaaguaccccgcccugaacgugaccaugcccaacaacgaggaguucgacaagcucuacaucuggggcgugcaccaccccgggaccgacaacgaccagaucucccuguacgcgcaggccagcggccggaucaccgucagcacgaagcgcucccagcagaccgugaucccgaacaucggcagccggccccgcgugcgggacauccccucccgcaucagcaucuacuggaccaucgucaagcccggggacauccugcucaucaacuccaccggcaaccugaucgccccgcggggguacuucaagauccgcagcggcaaguccagcaucaugcgguccgacgcccccaucgugaagugcaacagcgagugcaucacgcccaacggcuccauccccaacgacaagccguuccagaacgugaaccgcaucaccuacggggccugcccccgguacgucaagcagaacacccugaagcucgcgaccggcaugcgcaacgugcccgagaagcagacgcgggggaucuucggcgccaucgccggguucaucgagaacggcugggagggcaugguggacgggugguacggcuuccgccaccagaacagcgaggggaucggccaggccgccgaccugaaguccacccaggcggccaucgaccagaucaacgggaagcugaaccggcucaucggcaagaccaacgagaaguuccaccagaucgagaaggaguucagcgaggucgagggccgcauccaggaccuggagaaguacguggaggacaccaagaucgaccugugguccuacaacgccgagcuccugguggcccuggagaaccagcacacgaucgaccucaccgacagcgagaugaacaagcuguucgagcggaccaagaagcagcugcgcgagaacgccgaggacauggggaacggcugcuucaagaucuaccacaagugcgacaacgcgugcaucggguccauccgcaacggcaccuacgaccacgacgucuaccgggacgaggcccucaacaaccgcuuccagaucaaggggguggagcugaaguccggcuacaaggacuggauccuguggaucuccuucgccaucagcugcuuccuccugugcguggcccugcucggcuucaucaugugggccugccagaaggggaacauccggugcaacaucugcaucuga

SEQ ID NO: 64644 - RNA, 1701 nt, Artificial Sequence
  derived and/or modified CDS sequence (opt1) from hemagglutinin__InfluenzaA__ABC67565
augaagaccaucaucgcccugagcuacaucuucugccucgugcugggccaggacuuccccgggaacgacaacuccaccgccacgcugugccucggccaccacgcggucccgaacgggacccuggugaagaccaucaccaacgaccagaucgaggugacgaacgccaccgagcugguccagagcuccagcaccggcaagaucugcaacaacccccaccgcauccucgacgggaucgacugcacccugaucgacgcccugcucggcgacccccacugcgacggcuuccagaacgagacgugggaccuguucguggagcgguccaaggccuucagcaacugcuaccccuacgacgugccggacuacgccucccugcgcagccucgucgcguccagcgggacccuggaguucaucaacgagggcuucaccuggaccggggugacgcagaacggcggguccaacgccugcaagcggggccccgacaucggcuucuucagccgccugaacuggcucuacaaguccgggagcaccuaccccgugcugaacgucaccaugcccaacaacgacaacuucgacaagcuguacaucuggggcgugcaccacccguccaccgaccaggagcagacgagccucuacgugcaggccuccgggcgggucaccgugagcaccaagcgcucccagcagaccaucauccccaacaucggcagccggcccugggugcgcggccugagcucccggaucagcaucuacuggacgaucgucaagcccggggacauccuggugaucaacuccaacggcaaccucaucgccccgcgcggguacuucaagaugcggaccggcaagagcuccaucaugcgcagcgacgcgcccaucgggaccugcaucuccgagugcaucacccccaacggcagcauccccaacgacaagccguuccagaacgugaacaagaucacguacggcgccugccccaaguacgucaagcagaacacccugaagcuggccaccgggaugcggaacgugcccgagaagcagacccgcggccucuucggggccaucgccggcuucaucgagaacgggugggagggcaugaucgacggcugguacggguuccggcaccagaacuccgagggcacggggcaggcggccgaccucaagagcacccaggccgccaucgaccagaucaacggcaagcugaaccgcgugaucgagaagaccaacgagaaguuccaccagaucgagaaggaguucuccgaggucgaggggcggauccaggaccucgagaaguacguggaggacaccaagaucgaccuguggagcuacaacgccgagcugcucguggcgcuggagaaccagcacacgaucgaccugaccgacuccgagaugaacaagcuguucgagaagacccgccggcagcugcgcgagaacgccgaggacaugggcaacggcugcuucaagaucuaccacaagugcgacaacgccugcaucgggagcauccggaacggcaccuacgaccacgacgucuaccgcgacgaggcccugaacaaccgcuuccagaucaaggggguggagcucaaguccggcuacaaggacuggauccuguggaucagcuucgccaucuccugcuuccugcucugcgucgugcugcugggcuucaucaugugggcgugccagaaggggaacauccggugcaacaucugcaucuga

SEQ ID NO: 64645 - RNA, 1701 nt, Artificial Sequence
  derived and/or modified CDS sequence (opt1) from hemagglutinin__InfluenzaA__ABC67576
augaagaccaucaucgcccugagcuacauccucugccugguguucgcccagaagcugcccggcaacgacaacuccauggcgacccucugccuggggcaccacgccgucccgaacggcacgcuggugaagaccaucaccaacgaccagaucgaggugaccaacgccacggagcucguccagagcuccagcaccgggcgcaucugcgacagcccccaccggauccuggacggcgagaacugcacccugaucgacgcccuccugggggacccccacugcgacggcuuccagaacaaggagugggaccuguucguggagcgcagcaaggccuacuccaacugcuaccccuacgacgugccggacuacgcgagccuccggucccuggucgccagcuccggcacccuggaguucaacaacgagagcuucaacuggacggggguggcccagaacggcaccuccuacgccugcaagcgccggagcaucaaguccuucuucagccgccucaacuggcugcaccagcugaaguacaaguaccccgcgcucaacgugaccaugcccaacaacgacgaguucgacaagcuguacaucuggggcguccaccaccccuccaccgacagcgaccagacgucccuguacgcccaggccagcgggcgggugaccgugagcaccaagcgcucccagcagaccgucaucccgaacaucgggagccggcccugggugcgcggcguguccagccggaucuccaucuacuggacgaucgucaagcccggcgacauccuccugaucaacagcaccgggaaccugaucgcgccccgcggcuacuucaagauccgguccgggaaguccuccaucaugcgcagcgacgccccgaucggcaagugcaacuccgagugcaucacccccaacggcagcauccccaacgacaagcccuuccagaacgugaaccggaucaccuacggggccugcccgcgcuacgugaagcagaacacgcucaagcuggccaccggcaugcggaacguccccgagaagcagacccgcgggaucuucggcgccaucgccggguucaucgagaacggcugggagggcaugguggacgggugguacggcuuccggcaccagaacuccgaggggaccggccaggccgcggaccucaagagcacgcaggccgccaucaaccagaucaacgggaagcugaaccgccugaucgagaagaccaacgagaaguuccaccagaucgagaaggaguucuccgagguggagggccggauccaggaccuggagaaguacgucgaggacaccaagaucgaccucuggagcuacaacgccgagcugcugguggcccucgagaaccagcacaccaucgaccugacggacuccgagaugaacaagcuguucgagcgcacccgcaagcagcuccgggagaacgcggaggacaugggcaacgggugcuucaagaucuaccacaagugcgacaacgccugcaucggcagcauccgcaacgggaccuacgaccacgacguguaccgggacgaggcccugaacaaccgcuuccagaucaagggcgucgagcugaaguccggguacaaggacuggauccucuggaucagcuucgccaucagcugcuuccugcugugcgugguccuccugggcuucaucaugugggccugccagaagggcaacauccggugcaacaucugcaucuga

SEQ ID NO: 64646 - RNA, 1701 nt, Artificial Sequence
  derived and/or modified CDS sequence (opt1) from hemagglutinin__InfluenzaA__ABC67587
augaagaccaucaucgcccugagcuacauccucugccugguguucgcccagaagcugcccggcaacgacaacuccaccgcgacgcucugccuggggcaccacgccgucccgaacggcaccaucgugaagaccaucaccaacgaccagaucgaggugacgaacgccaccgagcugguccagagcuccagcaccgggggcaucugcgacagcccccaccagauccucgacggggagaacugcacccugaucgacgcccugcucggcgacccccagugcgacggcuuccagaacaagaagugggaccuguucguggagcgcagcaaggccuacuccaacugcuaccccuacgacgugccggacuacgcgagccugcggucccucgucgccagcuccgggacgcuggaguucaacaacgagagcuucaacuggaccggcgugacccagaacgggaccuccagcgccugcaagcgccgguccaacaacagcuucuucucccgccugaacuggcucacgcaccugaaguucaaguaccccgcccugaacgugaccaugcccaacaacgagaaguucgacaagcucuacaucuggggcguccaccaccccgggaccgacaacgaccagaucagccuguacgcgcaggccuccggccggaucaccgugagcacgaagcgcagccagcagaccgugaucccgaacaucggcucccggccccgcguccgggacauccccagccgcaucuccaucuacuggaccaucgugaagcccggggacauccugcucaucaacagcaccggcaaccugaucgccccgcggggguacuucaagauccgcuccggcaagagcuccaucaugcggagcgacgcccccaucggcaagugcaacuccgagugcaucacgcccaacgggagcauccccaacgacaagccguuccagaacgugaaccgcaucaccuacggccccugcccccgguacgucaagcagaacacccugaagcucgccaccgggaugcgcaacgugcccgagaagcagacgcggggcaucuucggggcgaucgccggcuucaucgagaacggcugggaggggaugguggacggcugguacggguuccgccaccagaacuccgagggcaucgggcaggccgccgaccugaaguccacccaggccgcgaucaaccagaucaacggcaagcugaaccggcucaucggcaagaccaacgagaaguuccaccagaucgagaaggaguucuccgaggucgaggggcgcauccaggaccuggagaaguacguggaggacaccaagaucgaccuguggagcuacaacgccgagcuccugguggcccuggagaaccagcacacgaucgaccucaccgacuccgagaugaacaagcuguucgagcggaccaagaagcagcugcgcgagaacgccgaggacaugggcaacgggugcuucaagaucuaccacaagugcgacaacgccugcaucggcagcauccgcaacgggaccuacgaccacgacgucuaccgggacgaggcgcucaacaaccgcuuccagaucaagggcguggagcugaaguccggcuacaaggacuggauccuguggaucagcuucgccaucuccugcuuccuccugugcguggcccugcucggguucaucaugugggccugccagaagggcaacauccggugcaacaucugcaucuga

SEQ ID NO: 64647 - RNA, 1701 nt, Artificial Sequence; identical to SEQ ID NO: 64267
  derived and/or modified CDS sequence (opt1) from hemagglutinin__InfluenzaA__ABC67598

SEQ ID NO: 64648 - RNA, 1701 nt, Artificial Sequence; identical to SEQ ID NO: 64586
  derived and/or modified CDS sequence (opt1) from hemagglutinin__InfluenzaA__ABC67609

SEQ ID NO: 64649 - RNA, 1701 nt, Artificial Sequence; identical to SEQ ID NO: 64586
  derived and/or modified CDS sequence (opt1) from hemagglutinin__InfluenzaA__ABC67620

SEQ ID NO: 64650 - RNA, 1701 nt, Artificial Sequence; identical to SEQ ID NO: 64586
  derived and/or modified CDS sequence (opt1) from hemagglutinin__InfluenzaA__ABC67631

SEQ ID NO: 64651 - RNA, 1701 nt, Artificial Sequence; identical to SEQ ID NO: 64586
  derived and/or modified CDS sequence (opt1) from hemagglutinin__InfluenzaA__ABC67642

SEQ ID NO: 64652 - RNA, 1701 nt, Artificial Sequence
  derived and/or modified CDS sequence (opt1) from hemagglutinin__InfluenzaA__ABC67653
augaagaccaucaucgcccugagcuacauccucugccugguguucgcccagaagcugcccggcaacgacaacuccaccgcgacgcucugccuggggcaccacgccgucccgaacggcacccuggugaagaccaucaccaacgaccagaucgaggugacgaacgccaccgagcucguccagagcuccagcaccgggcgcaucugcgacagcccccaccagauccuggacggcgagaacugcacccugaucgacgcccuccugggggacccccacugcgacggcuuccagaacaaggagugggaccuguucguggagcggagcaaggccuacuccaacugcuaccccuacgacgugccggacuacgucagccuccgcucccugguggcgagcuccggcacgcuggaguucaacaacgagagcuucaacuggaccgggguggcccagaacggcaccuccagcgccugcaagcggcgcuccgacaagagcuucuucucccggcucaacuggcugcaccagcugaaguacaaguaccccgcccucaacgucaccaugcccaacaacgagaaguucgacaagcuguacaucuggggcgugcaccaccccgggacggacagcgaccagaucucccuguacgcgcaggccagcgggcgcgugaccgucagcaccaagcggucccagcagaccgugaucccgaacaucggcagccgccccugggugcggggcgucuccagccgcaucuccaucuacuggacgaucgugaagcccggggacauccuccugaucaacagcaccggcaaccugaucgcgccccggggguacuucaagauccgcuccggcaagagcuccaucaugcggagcgacgccccgaucggcaagugcaacuccgagugcaucacccccaacgggagcauccccaacgacaagcccuuccagaacgugaaccgcaucaccuacggcgccugcccgcgguacgucaagcagaacacgcucaagcuggccaccgggaugcgcaacgugcccgagaagcagacccggggcaucuucggggccaucgccggcuucaucgagaacggcugggaggggaugauggacggcugguacggguuccgccaccagaacuccgagggcaccgggcaggccgccgaccugaaguccacgcaggcggccaucaaccagaucaacggcaagcucaaccggcugaucgagaagaccaacgagaaguuccaccagaucgagaaggaguucuccgagguggagggccgcauccaggaccuggagaaguacgucgaggacaccaagaucgaccucuggagcuacaacgccgagcugcugguggcccucgagaaccagcacaccaucgaccugacggacuccgagaugaacaagcuguucgagcggaccaagaagcagcuccgcgagaacgccgaggacauggggaacggcugcuucaagaucuaccacaagugcgacaacgcgugcaucgggagcauccgcaacggcaccuacgaccacgacguguaccgggacgaggcccugaacaaccgcuuccagaucaagggggucgagcugaaguccggcuacaaggacugggugcucuggaucagcuucgccaucagcugcuuccugcugugcgucgugcuccugggcuucaucaugugggccugccagaaggggaacauccggugcaacaucugcaucuga

SEQ ID NO: 64653 - RNA, 1701 nt, Artificial Sequence
  derived and/or modified CDS sequence (opt1) from hemagglutinin__InfluenzaA__ABC67697
augaagaccaucaucgcccugagcuacauccucugccugguguucgcccagaagcugcccggcaacgacaacuccaccgcgacgcucugccuggggcaccacgccgucccgaacggcaccaucgugaagaccaucaccaacgaccagaucgaggugacgaacgccaccgagcugguccagagcuccagcaccggggagaucugcgacagcccccaccagauccucgacggcgagaacugcacccugaucgacgcccugcucggggacccccagugcgacggcuuccagaacaaggagugggaccuguucguggagcgcagcaaggccuacuccaacugcuaccccuacgacgugccggacuacgcgagccugcggucccucgucgccagcuccggcacgcuggaguucaacaacgagagcuucaacuggaccggggugacccagaacggcaccuccagcgccugcaagcgccgguccaacaacagcuucuucucccgccugaacuggcucacgcaccugaaguucaaguaccccgcccugaacgugaccaugcccaacaacgagaaguucgacaagcucuacaucuggggcguccaccaccccgggaccgacaacgaccagaucuuccuguacgcgcaggccagcgggcggaucaccguguccacgaagcgcagccagcagaccgugaucccgaacaucggcagccggccccgcguccggaacauccccucccgcaucagcaucuacuggaccaucgugaagcccggcgacauccugcucaucaacuccaccgggaaccugaucgccccgcggggcuacuucaagauccgcagcgggaaguccagcaucaugcgguccgacgcccccaucggcaagugcaacagcgagugcaucacgcccaacggcuccauccccaacgacaagccguuccagaacgugaaccgcaucaccuacggggccugcccccgguacgucaagcagaacacccugaagcucgcgaccggcaugcgcaacgugcccgagaagcagacgcgggggaucuucggcgccaucgccggguucaucgagaacggcugggagggcaugguggacgggugguacggcuuccgccaccagaacagcgaggggaucggccaggccgccgaccugaaguccacccaggcggccaucaaccagaucaacgggaagcugaaccggcucaucggcaagaccaacgagaaguuccaccagaucgagaaggaguucagcgaggucgagggccgcauccaggaccuggagaaguacguggaggacaccaagaucgaccugugguccuacaacgccgagcuccugguggcccuggagaaccagcacacgaucgaccucaccgacagcgagaugaacaagcuguucgagcggaccaagaagcagcugcgcgagaacgccgaggacauggggaacggcugcuucaagaucuaccacaagugcgacaacgcgugcaucggguccauccgcaacggcaccuacgaccacgacgucuaccgggacgaggcccucaacaaccgcuuccagaucaaggggguggagcugaaguccggcuacaaggacuggauccuguggaucuccuucgccaucagcugcuuccuccugugcguggcccugcucggcuucaucaugugggccugccagaaggggaacauccggugcaacaucugcaucuga

SEQ ID NO: 64654 - RNA, 1701 nt, Artificial Sequence
  derived and/or modified CDS sequence (opt1) from hemagglutinin__InfluenzaA__ABC67708
augaagaccaucaucgcccugagcuacauccucugccugguguucgcccagaagcugcccggcaacgacaacuccaccgcgacgcucugccuggggcaccacgccgucccgaacggcaccaucgugaagaccaucaccaacgaccagaucgaggugacgaacgccaccgagcugguccagagcuccagcaccgggggcaucugcgacagcccccaccagauccucgacggggagaacugcacccugaucgacgcccugcucggcgacccccagugcgacggcuuccagaacaagaagugggaccuguucguggagcgcagcaaggccuacuccaacugcuaccccuacgacgugccggacuacgcgagccugcggucccucgucgccagcuccgggacgcuggaguucaacaacgagagcuucaacuggaccggcgugacccagaacgggaccuccagcgccugcaagcgccgguccaacaacagcuucuucucccgccugaacuggcucacgcaccugaaguucaaguaccccgcccugaacgugaccaugcccaacaacgagaaguucgacaagcucuacaucuggggcguccaccaccccgggaccgacaacgaccagaucuuccuguacgcgcaggccagcggccggaucaccguguccacgaagcgcagccagcagaccgugaucccgaacaucggcagccggccccgcguccggaacauccccucccgcaucagcaucuacuggaccaucgugaagcccggggacauccugcucaucaacuccaccggcaaccugaucgccccgcggggguacuucaagauccgcagcggcaaguccagcaucaugcgguccgacgcccccaucggcaagugcaacagcgagugcaucacgcccaacggguccauccccaacgacaagccguuccagaacgugaaccgcaucaccuacggcgccugcccccgguacgucaagcagaacacccugaagcucgcgaccgggaugcgcaacgugcccgagaagcagacgcggggcaucuucggggccaucgccggcuucaucgagaacggcugggaggggaugguggacggcugguacggguuccgccaccagaacagcgagggcaucgggcaggccgccgaccugaaguccacccaggcggccaucaaccagaucaacggcaagcugaaccggcucaucggcaagaccaacgagaaguuccaccagaucgagaaggaguucagcgaggucgaggggcgcauccaggaccuggagaaguacguggaggacaccaagaucgaccugugguccuacaacgccgagcuccugguggcccuggagaaccagcacacgaucgaccucaccgacagcgagaugaacaagcuguucgagcggaccaagaagcagcugcgcgagaacgccgaggacaugggcaacgggugcuucaagaucuaccacaagugcgacaacgcgugcaucggcuccauccgcaacgggaccuacgaccacgacgucuaccgggacgaggcccucaacaaccgcuuccagaucaagggcguggagcugaaguccggcuacaaggacuggauccuguggaucuccuucgccaucagcugcuuccuccugugcguggcccugcucggguucaucaugugggccugccagaagggcaacauccggugcaacaucugcaucuga

SEQ ID NO: 64655 - RNA, 1701 nt, Artificial Sequence; identical to SEQ ID NO: 64654
  derived and/or modified CDS sequence (opt1) from hemagglutinin__InfluenzaA__ABC67719

SEQ ID NO: 64656 - RNA, 1701 nt, Artificial Sequence; identical to SEQ ID NO: 64654
  derived and/or modified CDS sequence (opt1) from hemagglutinin__InfluenzaA__ABC67733

SEQ ID NO: 64657 - RNA, 1701 nt, Artificial Sequence
  derived and/or modified CDS sequence (opt1) from hemagglutinin__InfluenzaA__ABC67806
augaagaccaucaucgcccugagcuacauccucugccugguguucgcccagaagcugcccggcaacgacaacuccaccgcgacgcucugccuggggcaccacgccgucccgaacggcaccaucgugaagaccaucaccaacgaccagaucgaggugacgaacgccaccgagcugguccagagcuccagcaccgggggcaucugcgacagcccccaccagauccucgacggggagaacugcacccugaucgacgcccugcucggcgacccccagugcgacggcuuccagaacaagaagugggaccuguucguggagcgcagcaaggccuacuccaacugcuaccccuacgacgugccggacuacgcgagccugcggucccucaucgccagcuccgggacgcuggaguucaacaacgagagcuucaacuggaccggcgucacccagaacgggaccuccagcgccugcaagcgccgguccaacagcuccuucuucagccgccugaacuggcucacgcaccugaaguucaaguaccccgcccugaacgugaccaugcccaacaacgaggaguucgacaagcucuacaucuggggcgugcaccaccccgggaccuacaacgaccagaucucccuguacgcgcaggccagcggccggaucaccgucagcacgaagcgcucccagcagaccgugaucccgaacaucggcagccggccccgcgugcgggacauccccucccgcaucagcaucuacuggaccaucgucaagcccggggacauccugcucaucaacuccaccggcaaccugaucgccccgcggggguacuucaagauccgcagcggcaaguccagcaucaugcgguccgacgcccccaucggcaagugcaacagcgagugcaucacgcccaacggguccauccccaacgacaagccguuccagaacgugaaccgcaucaccuacggcgccugcccccgguacgugaagcagaacacccugaagcucgcgaccgggaugcgcaacguccccgagaagcagacgcggggcaucuucggggccaucgccggcuucaucgagaacggcugggaggggaugguggacggcugguacggguuccgccaccagaacagcgagggcaucgggcaggccgccgaccugaaguccacccaggcggccaucgaccagaucaacggcaagcugaaccggcucaucggcaagaccaacgagaaguuccaccagaucgagaaggaguucagcgagguggaggggcgcauccaggaccuggagaaguacgucgaggacaccaagaucgaccugugguccuacaacgccgagcuccugguggcccuggagaaccagcacacgaucgaccucaccgacagcgagaugaacaagcuguucgagcggaccaagaagcagcugcgcgagaacgccgaggacaugggcaacgggugcuucaagaucuaccacaagugcgacaacgcgugcaucggcuccauccgcaacgggaccuacgaccacgacguguaccgggacgaggcccucaacaaccgcuuccagaucaagggcgucgagcugaaguccggcuacaaggacuggauccuguggaucuccuucgccaucagcugcuuccuccugugcguggcccugcucggguucaucaugugggccugccagaagggcaacauccggugcaacaucugcaucuga

SEQ ID NO: 64658 - RNA, 1701 nt, Artificial Sequence; identical to SEQ ID NO: 64540
  derived and/or modified CDS sequence (opt1) from hemagglutinin__InfluenzaA__ABC67817

SEQ ID NO: 64659 - RNA, 1701 nt, Artificial Sequence; identical to SEQ ID NO: 64654
  derived and/or modified CDS sequence (opt1) from hemagglutinin__InfluenzaA__ABC67828

SEQ ID NO: 64660 - RNA, 1701 nt, Artificial Sequence; identical to SEQ ID NO: 64518
  derived and/or modified CDS sequence (opt1) from hemagglutinin__InfluenzaA__ABC67839

SEQ ID NO: 64661 - RNA, 1701 nt, Artificial Sequence
  derived and/or modified CDS sequence (opt1) from hemagglutinin__InfluenzaA__ABC67850
augaagaccaucaucgcccugagcuacauccucugccugguguucgcccagaagcugcccggcaacgacaacuccaccgcgacgcucugccuggggcaccacgccgucccgaacggcacccuggugaagaccaucaccaacgaccagaucgaggugacgaacgccaccgagcucguccagagcuccagcaccgggcgcaucugcgacagcccccaccagauccuggacggcgagaacugcacccugaucgacgcccuccugggggacccccacugcgacggcuuccagaacaaggagugggaccuguucguggagcggagcaaggccuacuccaacugcuaccccuacgacgugccggacuacgucagccuccgcucccugguggcgagcuccggcacgcuggaguucaacaacgagagcuucaacuggaccgggguggcccagaacggcaccuccagcgccugcaagcggcgcuccgacaagagcuucuucucccggcucaacuggcugcaccagcugaaguacaaguaccccgcccucaacgucaccaugcccaacaacgagaaguucgacaagcuguacaucuggggcgugcaccaccccgggacggacagcgaccagaucucccuguacgcgcaggccagcgggcgcgugaccgucagcaccaagcggucccagcagaccgugaucccgaacaucggcagccgccccugggcccggggcguguccagccgcaucuccauccacuggacgaucgucaagcccggggacauccuccugaucaacagcaccggcaaccugaucgcgccccggggguacuucaagauccgcuccggcaagagcuccaucaugcggagcgacgccccgaucggcaagugcaacuccgagugcaucacccccaacgggagcauccccaacgacaagcccuuccagaacgugaaccgcaucaccuacggcgccugcccgcgguacgugaagcagaacacgcucaagcuggccaccgggaugcgcaacguccccgagaagcagacccggggcaucuucggggccaucgccggcuucaucgagaacggcugggaggggaugauggacggcugguacggguuccgccaccagaacuccgagggcaccgggcaggccgcggaccugaaguccacgcaggccgccaucaaccagaucaacggcaagcucaaccggcugaucgagaagaccaacgagaaguuccaccagaucgagaaggaguucuccgagguggagggccgcauccaggaccuggagaaguacguggaggacaccaagaucgaccucuggagcuacaacgccgagcugcuggucgcccucgagaaccagcacaccaucgaccugacggacuccgagaugaacaagcuguucgagcggaccaagaagcagcuccgcgagaacgcggaggacauggggaacggcugcuucaagaucuaccacaagugcgacaacgccugcaucgggagcauccgcaacggcaccuacgaccacgacguguaccgggacgaggcccugaacaaccgcuuccagaucaaggggguggagcugaaguccggcuacaaggacuggguccucuggaucagcuucgccaucagcugcuuccugcugugcaucgugcuccugggcuucaucaugugggccugccagaaggggaacauccggugcaacaucugcaucuga

SEQ ID NO: 64662 - RNA, 1701 nt, Artificial Sequence; identical to SEQ ID NO: 64518
  derived and/or modified CDS sequence (opt1) from hemagglutinin__InfluenzaA__ABC67861

SEQ ID NO: 64663 - RNA, 1701 nt, Artificial Sequence; identical to SEQ ID NO: 64586
  derived and/or modified CDS sequence (opt1) from hemagglutinin__InfluenzaA__ABC67883

SEQ ID NO: 64664 - RNA, 1701 nt, Artificial Sequence
  derived and/or modified CDS sequence (opt1) from hemagglutinin__InfluenzaA__ABC67894
augaagaccaucaucgcccugagcuacauccucugccugguguucgcccagaagcugcccggcaacgacaacuccaccgcgacgcucugccuggggcaccacgccgucccgaacggcacccuggugaagaccaucaccaacgaccagaucgaggugacgaacgccaccgagcucguccagagcuccagcaccgggcgcaucugcgacagcccccaccagauccuggacggcgagaacugcacccugaucgacgcccuccugggggacccccacugcgacggcuuccagaacaaggagugggaccuguucguggagcggagcaaggccuacuccaacugcuaccccuacgacgugccggacuacgucagccuccgcucccugguggcgagcuccggcacgcuggaguucaacaacgagagcuucaacuggaccgggguggcccagaacggcaccuccagcgccugcaagcggcgcuccgacaagagcuucuucuccaagcucaacuggcugcaccagcugaaguacaaguaccccgcccucaacgucaccaugcccaacaacgagaaguucgacaagcuguacaucuggggcgugcaccaccccgggacggacagcgaccagaucucccuguacgcgcaggccagcgggcgggugaccgucagcaccaagcgcucccagcagaccgugaucccgaacaucggcagccggcccugggugcgcggcgucuccagccggaucuccaucuacuggacgaucgugaagcccggggacauccuccugaucaacagcaccggcaaccugaucgcgccccgcggguacuucaagauccgguccggcaagagcuccaucaugcgcagcgacgccccgaucggcaagugcaacuccgagugcaucacccccaacgggagcauccccaacgacaagcccuuccagaacgugaaccggaucaccuacggcgccugcccgcgcuacgucaagcagaacacgcucaagcuggccaccgggaugcggaacgugcccgagaagcagacccgcggcaucuucggggccaucgccggcuucaucgagaacggcugggaggggaugauggacggcugguacggguuccggcaccagaacuccgagggcaccgggcaggccgccgaccugaaguccacgcaggcggccaucaaccagaucaacggcaagcucaaccgccugaucgagaagaccaacgagaaguuccaccagaucgagaaggaguucuccgagguggagggccggauccaggaccuggagaaguacgucgaggacaccaagaucgaccucuggagcuacaacgccgagcugcugguggcccucgagaaccagcacaccaucgaccugacggacuccgagaugaacaagcuguucgagcgcaccaagaagcagcuccgggagaacgccgaggacauggggaacggcugcuucaagaucuaccacaagugcgacaacgcgugcaucgggagcauccgcaacggcaccuacgaccacgacguguaccgcgacgaggcccugaacaaccgguuccagaucaagggggucgagcugaaguccggcuacaaggacugggugcucuggaucagcuucgccaucagcugcuuccugcugugcaucguccuccugggcuucaucaugugggccugccagaaggggaacauccgcugcaacaucugcaucuga

SEQ ID NO: 64665 - RNA, 1701 nt, Artificial Sequence; identical to SEQ ID NO: 64586
  derived and/or modified CDS sequence (opt1) from hemagglutinin__InfluenzaA__ABC67967

SEQ ID NO: 64666 - RNA, 1701 nt, Artificial Sequence; identical to SEQ ID NO: 64586
  derived and/or modified CDS sequence (opt1) from hemagglutinin__InfluenzaA__ABC67978

SEQ ID NO: 64667 - RNA, 1701 nt, Artificial Sequence
  derived and/or modified CDS sequence (opt1) from hemagglutinin__InfluenzaA__ABC67989
augaagaccaucaucgcccugagcuacauccucugccugguguucgcccagaagcugcccggcaacgacaacuccaccgcgacgcucugccuggggcaccacgccgucccgaacggcacccuggugaagaccaucaccaacgaccagaucgaggugacgaacgccaccgagcucguccagagcuccagcaccgggcgcaucugcgacagcccccaccagauccuggacggcgagaacugcacccugaucgacgcccuccugggggacccccacugcgacggcuuccagaacaaggagugggaccuguucguggagcggagcaaggccuacuccaacugcuaccccuacgacgugccggacuacgucagccuccgcucccugguggcgagcuccggcacgcuggaguucaacaacgagagcuucaacuggaccgggguggcccagaacggcaccuccagcgccugcaagcggcgcuccgacaagagcuucuucucccggcucaacuggcugcaccagcugaaguacaaguaccccgcccucaaggucaccaugcccaacaacgagaaguucgacaagcuguacaucuggggcgugcaccaccccgggacggacagcgaccagaucucccuguacgcgcaggccagcgggcgcgugaccgucagcaccaagcggucccagcagaccgugaucccgaacaucggcagccgccccugggugcggggcgucuccagccgcaucuccaucuacuggacgaucgugaagcccggggacauccuccugaucaacagcaccggcaaccugaucgcgccccggggguacuucaagauccgcuccggcaagagcuccaucaugcggagcgacgccccgaucggcaagugcaacuccgagugcaucacccccaacgggagcauccccaacgacaagcccuuccagaacgugaaccgcaucaccuacggcgccugcccgcgguacgucaagcagaacacgcucaagcuggccaccgggaugcgcaacgugcccgagaagcagacccggggcaucuucggggccaucgccggcuucaucgagaacggcugggaggggaugauggacggcugguacggguuccgccaccagaacuccgagggcaccgggcaggccgccgaccugaaguccacgcaggcggccaucaaccagaucaacggcaagcucaaccggcugaucgagaagaccaacgagaaguuccaccagaucgagaaggaguucuccgagguggagggccgcauccaggaccuggagaaguacgucgaggacaccaagaucgaccucuggagcuacaacgccgagcugcugguggcccucgagaaccagcacaccaucgaccugacggacuccgagaugaacaagcuguucgagcggaccaagaagcagcuccgcgagaacgccgaggacauggggaacggcugcuucaagaucuaccacaagugcgacaacgugugcaucgggagcauccgcaacggcaccuacgaccacgacgucuaccgggacgaggcgcugaacaaccgcuuccagaucaaggggguggagcugaaguccggcuacaaggacuggguccucuggaucagcuucgccaucagcugcuuccugcugugcaucgugcuccugggcuucaucaugugggccugccagaaggggaacauccggugcaacaucugcaucuga

SEQ ID NO: 64668 - RNA, 1701 nt, Artificial Sequence; identical to SEQ ID NO: 64641
  derived and/or modified CDS sequence (opt1) from hemagglutinin__InfluenzaA__ABC68000

SEQ ID NO: 64669 - RNA, 1701 nt, Artificial Sequence
  derived and/or modified CDS sequence (opt1) from hemagglutinin__InfluenzaA__ABC68049
augaagaccaucaucgcccugagcuacauccucugccugguguucgcccagaagcugcccggcaacgacaacuccaccgcgacgcucugccuggggcaccacgccgucccgaacggcacccuggugaagaccaucaccgacgaccagaucgaggugacgaacgccaccgagcucguccagagcuccagcaccgggcgcaucugcgacagcccccaccagauccuggacggcgagaacugcacccugaucgacgcccuccugggggacccccacugcgacggcuuccagaacaaggagugggaccuguucguggagcggagcaaggccuacuccaacugcuaccccuacgacgugccggacuacgucagccuccgcucccugguggcgagcuccggcacgcuggaguucaacaacgagagcuucaacuggaccgggguggcccagaacggcaccuccagcgccugcaagcggcgcuccgacaagagcuucuucucccggcucaacuggcugcaccagcugaaguacaaguaccccgcccucaacgucaccaugcccaacaacgagaaguucgacaagcuguacguguggggcgugcaccaccccgggacggacagcgaccagaucucccuguacgcgcaggccagcgggcgcgucaccgugagcaccaagcggucccagcagaccgugaucccgaacaucggcagccgccccuggguccggggcguguccagcaagaucuccaucuacuggacgaucgugaagcccggggacauccuccugaucaacagcaccggcaaccugaucgcgccccgcggguacuucaagauccgguccggcaagagcuccaucaugcgcagcgacgccccgaucggcaagugcaacuccgagugcaucacccccaacgggagcauccccaacgacaagcccuuccagaacgucaaccggaucaccuacggcgccugcccgcgcuacgugaagcagaacacgcucaagcuggccaccgggaugcggaacgugcccgagaagcagacccgcggcaucuucggggccaucgccggcuucaucgagaacggcugggaggggaugauggacggcugguacggguuccggcaccagaacuccgagggcaccgggcaggccgccgaccugaaguccacgcaggcggccaucaaccagaucaacggcaagcucaaccgccugaucgagaagaccaacgagaaguuccaccagaucgagaaggaguucuccgaggucgagggccggauccaggaccuggagaaguacguggaggacaccaagaucgaccucuggagcuacaacgccgagcugcugguggcccucgagaaccagcacaccaucgaccugacggacuccgagaugaacaagcuguucgagcgcaccaagaagcagcuccgggagaacgccgaggacauggggaacggcugcuucaagaucuaccacaagugcgacaacgcgugcaucgggagcauccgcaacggcaccuacgaccacgacgucuaccgcgacgaggcccugaacaaccgguuccagaucaaggggguggagcugaaguccggcuacaaggacuggguccucuggaucagcuucgccaucagcugcuuccugcugugcaucgugcuccugggcuucaucaugugggccugccagaaggggaacauccgcugcaacaucugcaucuga

SEQ ID NO: 64670 - RNA, 1701 nt, Artificial Sequence; identical to SEQ ID NO: 64586
  derived and/or modified CDS sequence (opt1) from hemagglutinin__InfluenzaA__ABC68060

SEQ ID NO: 64671 - RNA, 1701 nt, Artificial Sequence
  derived and/or modified CDS sequence (opt1) from hemagglutinin__InfluenzaA__ABC68071
augaagaccaucaucgcccugagcuacauccucugccugguguucgcccagaagcugcccggcaacgacaacuccaccgcgacgcucugccuggggcaccacgccgucccgaacggcacccuggugaagaccaucaccaacgaccagaucgaggugacgaacgccaccgagcucguccagagcuccagcaccgggcgcaucugcgacagcccccaccagauccuggacggcgagaacugcacccugaucgacgcccuccugggggacccccacugcgacggcuuccagaacaaggagugggaccuguucguggagcggagcaaggccuacuccaacugcuaccccuacgacgugccggacuacgucagccuccgcucccugguggcgagcuccggcacgcuggaguucaacaacgagagcuucaacuggaccgggguggcccagaacggcaccuccagcgccugcaagcggcgcuccgacaagagcuucuucucccggcucaacuggcugcaccagcugaaguacaaguaccccgcccucaacgucaccaugcccaacaacgagaaguucgacaagcuguacaucuggggcgugcaccaccccgggacggacagcgaccagaucucccuguacgcgcaggccagcgggcgcgugaccgucagcaccaagcggucccagcagaccgugaucccgaacaucggcagccgccccugggugcggggcgucuccagccgcaucuccaucuacuggacgaucgugaagcccggggacauccuccugaucaacagcaccggcaaccugaucgcgccccggggguacuucaagauccgcuccggcaagagcuccaucaugcggagcgacgccccgaucggcaagugcaacuccgagugcaucacccccaacgggagcauccccaacgacaagcccuuccagaacgugaaccgcaucaccuacggcgccugcccgcgguacgucaagcagaacacgcucaagcuggccaccgggaugcgcaacgugcccgagaagcagacccggggcaucuucggggccaucgccggcuucaucgagaacggcugggaggggaugauggacggcugguacggguuccgccaccagaacuccgagggcaccgggcaggccgccgaccugaaguccacgcaggcggccaucaaccagaucaacggcaagcucaaccggcugaucgagaagaccaacgagaaguuccaccagaucgagaaggaguucuccgagguggagggccgcauccaggaccuggagaaguacgucgaggacaccaagaucgaccucuggagcuacaacgccgagcugcugguggcccucgagaaccagcacaccaucgaccugacggacuccgagaugaacaagcuguucgagcggaccaagaagcagcuccgcgagaacgccgaggacauggggaacggcugcuucaagaucuaccacaagugcgacaacgcgugcaucgggagcauccgcaacggcaccuacgaccacaacguguaccgggacgaggcccugaacaaccgcuuccagaucaagggggucgagcugaaguccggcuacaaggacugggugcucuggaucagcuucgccaucagcugcuuccugcugugcaucguccuccugggcuucaucaugugggccugccagaaggggaacauccggugcaacaucugcaucuga

SEQ ID NO: 64672 - RNA, 1701 nt, Artificial Sequence; identical to SEQ ID NO: 64654
  derived and/or modified CDS sequence (opt1) from hemagglutinin__InfluenzaA__ABC68082

SEQ ID NO: 64673 - RNA, 1701 nt, Artificial Sequence
  derived and/or modified CDS sequence (opt1) from hemagglutinin__InfluenzaA__ABC68093
augaagaccaucaucgcccugagcuacauccucugccugguguucgcccagaagcugcccggcaacgacaacuccaccgcgacgcucugccuggggcaccacgccgucccgaacggcacccuggugaagaccaucaccaacgaccagaucgaggugacgaacgccaccgagcucguccagagcuccagcaccucccgcaucugcgacagcccccaccagauccuggacggggagaacugcacccugaucgacgcccuccugggcgacccccacugcgacggguuccagaacaaggagugggaccuguucguggagcgguccaaggccuacagcaacugcuaccccuacgacgugccggacuacgucucccuccgcagccugguggcguccagcggcacgcuggaguucaacaacgaguccuucaacuggaccggcguggcccagaacgggaccagcuccgccugcaagcggcgcagcgacaaguccuucuucagccggcucaacuggcugcaccagcugaaguacaaguaccccgcccucaacgucaccaugcccaacaacgagaaguucgacaagcuguacaucuggggcgugcaccaccccgggacggacuccgaccagaucagccuguacgcgcaggccagcggccgcgugaccgucuccaccaagcggagccagcagaccgugaucccgaacaucgggucccgccccugggugcggggcgucagcuccaucaucagcaucuacuggacgaucgugaagcccggcgacauccuccugaucaacuccaccgggaaccugaucgcgccccgcggcuacuucaagauccggagcgggaaguccagcaucaugcgcuccgacgccccgaucggcaagugcaacagcgagugcaucacccccaacggcuccauccccaacgggaagcccuuccagaacgugaaccggaucaccuacggcgccugcccgcgcuacgucaagcagaacacgcucaagcuggccaccgggaugcggaacgugcccgagaagcagacccgcggcaucuucggggccaucgccggcuucaucgagaacggcugggaggggaugauggacggcugguacggguuccggcaccagaacagcgagggcaccgggcaggccgccgaccugaaguccacgcaggcggccaucaaccagaucaacggcaagcucaaccgccugaucgagaagaccaacgagaaguuccaccagaucgagaaggaguucagcgagguggagggccggauccaggaccuggagaaguacgucgaggacaccaagaucgaccucugguccuacaacgccgagcugcugguggcccucgagaaccagcacaccaucgaccugacggacagcgagaugaacaagcuguucgagcgcaccaagaagcagcuccgggagaacgccgaggacauggggaacggcugcuucaagaucuaccacaagugcgacaacgcgugcaucggguccauccgcaacggcaccuacgaccacgacguguaccgcgacgaggcccugaacaaccgguuccagaucaagggggucgagcucaagagcggcuacaaggacuggauccuguggaucagcuucgccaccuccugcuuccugcugugcaucgugcuccugggcuucaucaugugggccugccagaaggggaacauccgcugcaacaucugcaucuga

SEQ ID NO: 64674 - RNA, 1701 nt, Artificial Sequence
  derived and/or modified CDS sequence (opt1) from hemagglutinin__InfluenzaA__ABC68222
augaagaccaucaucgcccugagcuacauccucugccugguguucgcccagaagcugcccggcaacgacaacuccaccgcgacgcucugccuggggcaccacgccgucccgaacggcacccuggugaagaccaucaccaacgaccagaucgaggugacgaacgccaccgagcucguccagagcuccagcaccgggggcaucugcgacagcccccaccagauccuggacggggagaacugcacccugaucgacgcccuccugggcgacccccacugcgacggcuuccagaacaaggagugggaccuguucguggagcgcagcaaggccuacuccaacugcuaccccuacgacgugccggacuacgcgagccuccggucccuggucgccagcuccgggacgcuggaguucaacaacgagagcuucaacuggaccggcguggcccagaacgggaccuccagcgccugcaagcgccgguccaacaagagcuucuucucccgccucaacuggcugcaccagcugaaguacaaguaccccgcgcucaacgugaccaugcccaacaacgagaaguucgacaagcuguacaucuggggcguccaccaccccagcacggacuccgaccagaucagccuguacgcccaggccccggggcgggugaccgugagcaccaagcgcucccagcagaccgucauccccaacaucggcagccggcccugggugcgcggcguguccagccggaucuccaucuacuggacgaucgucaagcccggggacauccuccugaucaacugcaccggcaaccugaucgccccgcgcggguacuucaagauccggagcggcaaguccagcaucaugcgcuccgacgccagcaucggcaagugcaacuccgagugcaucacccccaacgggagcauccccaacgacaagcccuuccagaacgugaaccggaucaccuacggcgcgugcccgcgcuacgugaagcagaacacgcucaagcuggccaccgggaugcggaacguccccgagaagcagacccgcggcaucuucggggccaucgccggcuucaucgagaacggcugggaggggaugguggacggcugguacggguuccggcaccagaacuccgagggcaccgggcaggccgcggaccugaaguccacgcaggccgccaucaaccagaucaacggcaagcucaaccgccugaucgagaagaccaacgagaaguuccaccagaucgagaaggaguucuccgagguggagggccggauccaggaccuggagaaguacgucgaggacaccaagaucgaccucuggagcuacaacgccgagcugcugguggcccucgagaaccagcacaccaucgaccugacggacuccgagaugaacaagcuguucgagcgcaccaagaagcagcuccgggagaacgcggaggacauggggaacggcugcuucaagaucuaccacaagugcgacaacgccugcaucgggagcauccgcaacggcaccuacgaccacgacguguaccgcgacgaggcccugaacaaccgguuccagaucaagggggucgagcugaaguccggcuacaaggacuggauccucuggaucagcuucgccaucagcugcuuccugcugugcgugguccuccugggcuucaucaugugggccugccagaaggggaacauccgcugcaacaucugcaucuga

SEQ ID NO: 64675 - RNA, 1701 nt, Artificial Sequence; identical to SEQ ID NO: 64466
  derived and/or modified CDS sequence (opt1) from hemagglutinin__InfluenzaA__ABC68233

SEQ ID NO: 64676 - RNA, 1707 nt, Artificial Sequence
  derived and/or modified CDS sequence (opt1) from hemagglutinin__InfluenzaA__ABC72655
auggagaagaucgugcugcuguucgccaucgucagccuggugaaguccgaccagaucugcaucggcuaccacgccaacaacagcaccgagcaggucgacaccaucauggagaagaacgugacggugacccacgcgcaggacauccuggagaagacccacaacgggaagcucugcgaccuggacggcgugaagccccugauccuccgcgacugcuccgucgccggguggcugcugggcaacccgaugugcgacgaguucaucaacgugcccgaguggagcuacaucguggagaagcccaaccccgccaacgaccucugcuacccgggggacuucaacgacuacgaggagcugaagcaccuccucucccggaucaaccacuucgagaagauccagaucauccccaagagcuccuggagcucccacgaggccagcgucggcguguccagcgugugccccuaccagggcaaguccagcuucuuccgcaacgucguguggcugaucaagaagaacuccaccuaccccacgaucaagcggagcuacaacaacaccaaccaggaggaccugcucgugcugugggggauccaccacccgaacgacgccgcggagcagaccaagcuguaccagaaccccaccacguacaucuccgucggcaccagcacccucaaccagcgccuggugccccggaucgccacccgcuccaaggugaacgggcagagcggccggauggaguucuucuggacgauccugaagcccaacgacgccaucaacuucgagagcaacgggaacuucaucgccccggaguacgcguacaagaucgucaagaagggcgacuccaccaucaugaaguccgagcucgaguacggcaacugcaacaccaagugccagacccccaugggggccaucaacagcagcaugcccuuccacaacauccacccccugacgaucggcgagugcccgaaguacgugaaguccaaccgccuggugcucgccaccgggcugcggaacagcccccagcgcgagaagcggcgcaagaagcggggccuguucggcgccaucgccggguucaucgagggcggguggcagggcauggucgacgggugguacggcuaccaccacuccaacgagcagggcagcggguacgcggccgacaaggaguccacccagaaggccaucgacggcgugaccaacaaggugaacagcaucaucgacaagaugaacacgcaguucgaggccgucgggcgcgaguucaacaaccucgagcggcgcaucgagaaccugaacaagaagauggaggacggcuuccuggacguguggaccuacaacgccgagcuccugguccugauggagaacgagcggacccucgacuuccacgacuccaacgugaagaaccuguacgacaaggugcgccugcagcuccgggacaacgcgaaggagcuggggaacggcugcuucgaguucuaccacaagugcgacaacgagugcauggagagcguccgcaacggcaccuacgacuacccccaguacuccgaggaggcccggcugaagcgcgaggagaucagcggggugaagcucgaguccaucggcaucuaccagauccugagcaucuacuccacgguggccagcucccuggcccucgccaucauggucgcggggcugagccuguggaugugcagcaacggcucccuccagugccgcaucugcaucuga

SEQ ID NO: 64677 - RNA, 1701 nt, Artificial Sequence; identical to SEQ ID NO: 64267
  derived and/or modified CDS sequence (opt1) from hemagglutinin__InfluenzaA__ABC84400

SEQ ID NO: 64678 - RNA, 1701 nt, Artificial Sequence; identical to SEQ ID NO: 64476
  derived and/or modified CDS sequence (opt1) from hemagglutinin__InfluenzaA__ABC84411

SEQ ID NO: 64679 - RNA, 1701 nt, Artificial Sequence
  derived and/or modified CDS sequence (opt1) from hemagglutinin__InfluenzaA__ABC84433
augaagaccaucaucgcccugagcuacauccucugccugguguucgcccagaagcugcccggcaacgacaaccgcaccgcgacgcucugccuggggcaccacgccgucccgaacggcaccaucgugaagaccaucaccaacgaccagaucgaggugacgaacgccaccgagcugguccaguccagcuccaccgggggcaucugcgacagcccccaccagauccucgacggggagaacugcacccugaucgacgcccugcucggcgacccccagugcgacggcuuccagaacaagaagugggaccuguucguggagcgguccaaggccuacagcaacugcuaccccuacgacgugccggacuacgcgucccugcgcagccucgucgccuccagcgggacgcuggaguucaacaacgaguccuucaacuggaccggcgugacccagaacgggaccagcuccgccugcaagcggcgcagcaacaacuccuucuucagccggcugaacuggcucacgcaccugaaguucaaguaccccgcccugaacgugaccaugcccaacaacgagaaguucgacaagcucuacaucuggggcguccaccaccccgggaccaacaacgaccagaucucccuguacgcgcaggccagcggccgcaucaccguguccacgaagcggagccagcagaccgugaucccgaacaucggcagccgcccccggguccgcgacauccccucccggaucagcaucuacuggaccaucgugaagcccggggacauccugcucaucaacuccaccggcaaccugaucgccccgcgcggguacuucaagauccggagcggcaaguccagcaucaugcgcuccgacgcccccaucggcaagugcaacagcgagugcaucacgcccaacggguccauccccaacgacaagccguuccagaacgugaaccggaucaccuacggcgccugcccccgcuacgucaagcagaacacccugaagcucgcgaccgggaugcggaacgugcccgagaagcagacgcgcggcaucuucggggccaucgccggcuucaucgagaacggcugggaggggaugguggacggcugguacggguuccggcaccagaacagcgagggcaucgggcaggccgccgaccugaaguccacccaggcggccaucaaccagaucaacggcaagcugaaccgccucaucggcaagaccaacgagaaguuccaccagaucgagaaggaguucagcgaggucgaggggcggauccaggaccuggagaaguacguggaggacaccaagaucgaccugugguccuacaacgccgagcuccugguggcccuggagaaccagcacacgaucgaccucaccgacagcgagaugaacaagcuguucgagcgcaccaagaagcagcugcgcgagaacgccgaggacaugggcaacgggugcuucaagaucuaccacaagugcgacaacgcgugcaucggcuccauccggaacgggaccuacgaccacgacgucuaccgcgacgaggcccucaacaaccgguuccagaucaagggcguggagcucaagagcggcuacaaggacuggauccuguggaucuccuucgccaucagcugcuuccugcugugcguggcccugcucggguucaucaugugggccugccagaagggcaacauccgcugcaacaucugcaucuga

SEQ ID NO: 64680 - RNA, 1701 nt, Artificial Sequence; identical to SEQ ID NO: 64586
  derived and/or modified CDS sequence (opt1) from hemagglutinin__InfluenzaA__ABC84444

SEQ ID NO: 64681 - RNA, 1701 nt, Artificial Sequence; identical to SEQ ID NO: 64657
  derived and/or modified CDS sequence (opt1) from hemagglutinin__InfluenzaA__ABC84498

SEQ ID NO: 64682 - RNA, 1701 nt, Artificial Sequence; identical to SEQ ID NO: 64657
  derived and/or modified CDS sequence (opt1) from hemagglutinin__InfluenzaA__ABC84509

SEQ ID NO: 64683 - RNA, 1701 nt, Artificial Sequence
  derived and/or modified CDS sequence (opt1) from hemagglutinin__InfluenzaA__ABC84520
augaagaccaucaucgcccugagcuacauccucugccugguguucgcccagaagcugcccggcaacgacaacuccaccgcgacgcucugccuggggcaccacgccgucccgaacggcaccaucgugaagaccaucaccaacgaccagaucgaggugacgaacgccaccgagcugguccagagcuccagcaccgggggcaucugcgacagcccccaccagauccucgacggggagaacugcacccugaucgacgcccugcucggcgacccccagugcgacggcuuccagaacaagaagugggaccuguucguggagcgcagcaaggccuacuccaacugcuaccccuacgacgugccggacuacgcgagccugcggucccucgucgccagcuccgggacgcuggaguucaacaacgagagcuucaacuggaccggcgugacccagaacgggaccuccagcgccugcaagcgccgguccaacaacagcuucuucucccgccugaacuggcucacgcaccugaaguucaaguaccccgcccugaacgugaccaugcccaacaacgagaaguucgacaagcucuacaucuggggcguccaccaccccgggaccgacaacgaccagaucuuccuguacgcgcaggccagcggccggaucaccguguccacgaagcgcagccagcagaccgugaucccgaacaucggcagccggccccgcguccgggacauccccucccgcaucagcaucuacuggaccaucgugaagcccggggacauccugcucaucaacuccaccggcaaccugaucgccccgcggggguacuucaagauccgcagcggcaaguccagcaucaugcgguccgacgcccccaucggcaagugcaacagcgagugcaucacgcccaacggguccauccccaacgacaagccguuccagaacgugaaccgcaucaccuacggcgccugcccccgguacgucaagcagaacacccugaagcucgcgaccgggaugcgcaacgugcccgagaagcagacgcggggcaucuucggggccaucgccggcuucaucgagaacggcugggaggggaugguggacggcugguacggguuccgccaccagaacagcgagggcaucgggcaggccgccgaccugaaguccacccaggcggccaucaaccagaucaacggcaagcugaaccggcucaucggcaagaccaacgagaaguuccaccagaucgagaaggaguucagcgaggucgaggggcgcauccaggaccuggagaaguacguggaggacaccaagaucgaccugugguccuacaacgccgagcuccugguggcccuggagaaccagcacacgaucgaccucaccgacagcgagaugaacaagcuguucgagcggaccaagaagcagcugcgcgagaacgccgaggacaugggcaacgggugcuucaagaucuaccacaagugcgacaacgcgugcaucggcuccauccgcaacgggaccuacgaccacgacgucuaccgggacgaggcccucaacaaccgcuuccagaucaagggcguggagcugaaguccggcuacaaggacuggauccuguggaucuccuucgccaucagcugcuuccuccugugcguggcccugcucggguucaucaugugggccugccagaagggcaacauccggugcaacaucugcaucuga

SEQ ID NO: 64684 - RNA, 1701 nt, Artificial Sequence
  derived and/or modified CDS sequence (opt1) from hemagglutinin__InfluenzaA__ABC84531
augaagaccaucaucgcccugagcuacaucuucugccucguguucgcccagaagcugcccggcaacgacaacuccaccgcgacgcugugccucgggcaccacgccgucccgaacggcacccuggugaagaccaucaccaacgaccagaucgaggugacgaacgccaccgagcugguccagagcuccagcaccgggcgcaucugcgacagcccccaccggauccucgacggcaagaacugcacccugaucgacgcccugcucggggacccccacugcgacggcuuccagaacgagaagugggaccuguucguggagcgcagcaaggccuucuccaacugcuaccccuacgacgugccggacuacgcgagccugcggucccucgucgccagcuccggcacgcuggaguucaucaacgagggguucaacuggaccggcgugacccagagcgggggcuccuacgccugcaagcgcgggagcgugaacuccuucuucagccggcugaacuggcucuacgaguccgagagcaaguaccccgcccugaacgucaccaugcccaacaacggccgcuucgacaagcuguacaucuggggcgugcaccaccccuccacggacaaggagcagaccaaccucuacgugcgggcggccgggcgcgucaccgugagcaccaagcggagccagcagacggugaucccgaacaucggcucccgccccuggguccgggggcugagcucccgcaucagcaucuacuggaccaucgugaagcccggcgacauccugcucaucaacuccaccggcaaccugaucgcgccccggggguacuucaagauccgcaccggcaagagcuccaucaugcggagcgacgccccgaucgggacgugcuccagcgagugcaucacccccaacggcuccauccccaacgacaagcccuuccagaacgugaacaagaucaccuacggggccugcccgcgcuacgucaagcagaacacccugaagcucgccacgggcaugcggaacgugcccgagaagcagacccgcggcaucuucggggccaucgccggcuucaucgagaacgggugggagggcaugguggacgggugguacggcuuccggcaccagaacagcgagggcaccgggcaggccgccgaccugaaguccacccaggcggccaucgaccagaucaacggcaagcugaaccgccucaucgagaagacgaacgagaaguuccaccagaucgagaaggaguucagcgaggucgaggggcggauccaggaccuggagaaguacguggaggacaccaagaucgaccugugguccuacaacgccgagcuccugguggcccuggagaaccagcacaccaucgaccucaccgacagcgagaugaacaagcuguucgagaagacgcgcaagcagcugcgcgagaacgccgaggacaugggcaacgggugcuucaagaucuaccacaagugcgacaacgcgugcaucggcuccauccggaacggcaccuacgaccacgacgucuaccgcgacgaggcccucaacaaccgguuccagaucaaggggguggagcugaaguccggcuacaaggacuggauccuguggaucuccuucgccaucagcugcuuccuccugugcgucgugcugcucggguucaucaugugggccugccagaagggcaacauccgcugcaacaucugcaucuga

SEQ ID NO: 64685 - RNA, 1701 nt, Artificial Sequence; identical to SEQ ID NO: 64674
  derived and/or modified CDS sequence (opt1) from hemagglutinin__InfluenzaA__ABC84560

SEQ ID NO: 64686 - RNA, 1701 nt, Artificial Sequence
  derived and/or modified CDS sequence (opt1) from hemagglutinin__InfluenzaA__ABC84571
augaagaccaucaucgcccugagcuacauccucugccugguguucgcccagaagcugcccggcaacgacaacuccaccgcgacgcucugccuggggcaccacgccgucccgaacggcacccuggugaagaccaucaccaacgaccagaucgaggugacgaacgccaccgagcucguccagagcuccagcaccgggggcaucugcgacagcccccaccagaucaucgacggggagaacugcacccugaucgacgcccugcucggcgacccccacugcgacggcuuccagaacaaggagugggaccuguucguggagcgcagcaaggccuacuccaacugcuaccccuacgacgugccggacuacgcgagccugcggucccucgucgccagcuccgggacgcuggaguucaacaacgagagcuucaacuggaccggcguggcccagaacgggaccuccagcgccugcaagcgccgguccaacaagagcuucuucucccgccugaacuggcuccaccagcugaaguacaaguaccccgcgcugaacgugaccaugcccaacaacgagaaguucgacaagcucuacaucuggggcguccaccaccccagcacggacuccgaccagaucagccuguacgcccaggccccggggcgggugaccgugagcaccaagcgcucccagcagaccgucauccccaacaucggcagccggcccugggugcgcggcguguccagccggaucuccaucuacuggacgaucgucaagcccggggacauccugcucaucaacugcaccggcaaccugaucgccccgcgcggguacuucaagauccggagcggcaaguccagcaucaugcgcuccgacgccagcaucggcaagugcaacuccgagugcaucacccccaacgggagcauccccaacgacaagcccuuccagaacgugaaccggaucaccuacggcgcgugcccgcgcuacgugaagcagaacacgcugaagcucgccaccgggaugcggaacguccccgagaagcagacccgcggcaucuucggggccaucgccggcuucaucgagaacggcugggaggggaugguggacggcugguacggguuccggcaccagaacuccgagggcaccgggcaggccgcggaccugaaguccacgcaggccgccaucaaccagaucaacggcaagcugaaccgccucaucgagaagaccaacgagaaguuccaccagaucgagaaggaguucuccgagguggagggccggauccaggaccuggagaaguacgucgaggacaccaagaucgaccuguggagcuacaacgccgagcuccugguggcccuggagaaccagcacaccaucgaccucacggacuccgagaugaacaagcuguucgagcgcaccaagaagcagcugcgggagaacgcggaggacauggggaacggcugcuucaagaucuaccacaagugcgacaacgccugcaucgggagcauccgcaacggcaccuacgaccacgacguguaccgcgacgaggcccucaacaaccgguuccagaucaagggggucgagcugaaguccggcuacaaggacuggauccuguggaucagcuucgccaucagcugcuuccuccugugcgugguccugcucggcuucaucaugugggccugccagaaggggaacauccgcugcaacaucugcaucuga

SEQ ID NO: 64687 - RNA, 1701 nt, Artificial Sequence; identical to SEQ ID NO: 64674
  derived and/or modified CDS sequence (opt1) from hemagglutinin__InfluenzaA__ABC85754

SEQ ID NO: 64688 - RNA, 1701 nt, Artificial Sequence; identical to SEQ ID NO: 64654
  derived and/or modified CDS sequence (opt1) from hemagglutinin__InfluenzaA__ABC85765

SEQ ID NO: 64689 - RNA, 1701 nt, Artificial Sequence
  derived and/or modified CDS sequence (opt1) from hemagglutinin__InfluenzaA__ABC85776
augaagaccaucaucgcccugagcuacauccucugccugguguucgcccagaagcugcccggcaacgacaacuccaccgcgacgcucugccuggggcaccacgccgucccgaacggcacccuggugaagaccaucaccaacgaccagaucgaggugacgaacgccaccgagcucguccagagcuccagcaccgggggcaucugcgacagcccccaccagauccuggacggggagaacugcacccugaucgacgcccuccugggcgacccccacugcgacggcuuccagaacaaggagugggaccuguucguggagcgcagcaaggccuacuccaacugcuaccccuacgacgugccggacuacgcgagccuccggucccuggucgccagcuccgggacgcuggaguucaacaacgagagcuucaacuggaccggcguggcccagaacgggaccuccagcgccugcaagcgccgguccaacaagagcuucuucucccgccucaacuggcugcaccagcugaaguacaaguaccccgcgcucaacgugaccaugcccaacaacgagaaguucgacaagcuguacaucuggggcguccaccaccccagcacggacuccgaccagaucagccuguacgcccaggccccggggcgggugaccgugagcaccaagcgcucccagcagaccgucauccccaacaucggcagccggcccugggugcgcggcguguccagccggaucuccaucuacuggacgaucgucaagcccggggacauccuccugaucaacuucaccggcaaccugaucgccccgcgcggguacuucaagauccggagcggcaaguccagcaucaugcgcuccgacgccagcaucggcaagugcaacuccgagugcaucacccccaacgggagcauccccaacgacaagcccuuccagaacgugaaccggaucaccuacggcgcgugcccgcgcuacgugaagcagaacacgcucaagcuggccaccgggaugcggaacguccccgagaagcagacccgcggcaucuucggggccaucgccggcuucaucgagaacggcugggaggggaugguggacggcugguacggguuccggcaccagaacuccgagggcaccgggcaggccgcggaccugaaguccacgcaggccgccaucaaccagaucaacggcaagcucaaccgccugaucgagaagaccaacgagaaguuccaccagaucgagaaggaguucuccgagguggagggccggauccaggaccuggagaaguacgucgaggacaccaagaucgaccucuggagcuacaacgccgagcugcugguggcccucgagaaccagcacaccaucgaccugacggacuccgagaugaacaagcuguucgagcgcaccaagaagcagcuccgggagaacgcggaggacauggggaacggcugcuucaagaucuaccacaagugcgacaacgccugcaucgggagcauccgcaacggcaccuacgaccacgacguguaccgcgacgaggcccugaacaaccgguuccagaucaagggggucgagcugaaguccggcuacaaggacuggauccucuggaucagcuucgccaucagcugcuuccugcugugcgugguccuccugggcuucaucaugugggccugccagaaggggaacauccgcugcaacaucugcaucuga

SEQ ID NO: 64690 - RNA, 1701 nt, Artificial Sequence; identical to SEQ ID NO: 64674
  derived and/or modified CDS sequence (opt1) from hemagglutinin__InfluenzaA__ABC85787

SEQ ID NO: 64691 - RNA, 1701 nt, Artificial Sequence; identical to SEQ ID NO: 64657
  derived and/or modified CDS sequence (opt1) from hemagglutinin__InfluenzaA__ABC85798

SEQ ID NO: 64692 - RNA, 1701 nt, Artificial Sequence; identical to SEQ ID NO: 64654
  derived and/or modified CDS sequence (opt1) from hemagglutinin__InfluenzaA__ABC85820

SEQ ID NO: 64693 - RNA, 1701 nt, Artificial Sequence; identical to SEQ ID NO: 64654
  derived and/or modified CDS sequence (opt1) from hemagglutinin__InfluenzaA__ABC85831

SEQ ID NO: 64694 - RNA, 1701 nt, Artificial Sequence; identical to SEQ ID NO: 64657
  derived and/or modified CDS sequence (opt1) from hemagglutinin__InfluenzaA__ABC85842

SEQ ID NO: 64695 - RNA, 1701 nt, Artificial Sequence; identical to SEQ ID NO: 64654
  derived and/or modified CDS sequence (opt1) from hemagglutinin__InfluenzaA__ABC85853

SEQ ID NO: 64696 - RNA, 1701 nt, Artificial Sequence; identical to SEQ ID NO: 64654
  derived and/or modified CDS sequence (opt1) from hemagglutinin__InfluenzaA__ABC85864

SEQ ID NO: 64697 - RNA, 1701 nt, Artificial Sequence; identical to SEQ ID NO: 64657
  derived and/or modified CDS sequence (opt1) from hemagglutinin__InfluenzaA__ABC85886

SEQ ID NO: 64698 - RNA, 1701 nt, Artificial Sequence; identical to SEQ ID NO: 64586
  derived and/or modified CDS sequence (opt1) from hemagglutinin__InfluenzaA__ABC85908

SEQ ID NO: 64699 - RNA, 1701 nt, Artificial Sequence
  derived and/or modified CDS sequence (opt1) from hemagglutinin__InfluenzaA__ABC85919
augaagaccaucaucgcccugagcuacauccucugccugguguucgcccagaagcugcccggcaacgacaacuccaccgcgacgcucugccuggggcaccacgccgucccgaacggcacccuggugaagaccaucaccaacgaccagaucgaggugacgaacgccaccgagcucguccagagcuccagcaccgggcgcaucugcgacagcccccaccagauccuggacggcgagaacugcacccugaucgacgcccuccugggggacccccacugcgacggcuuccagaacaaggagugggaccuguucguggagcggagcaaggccuacuccaacugcuaccccuacgacgugccggacuacgucagccuccgcucccugguggcgagcuccggcacgcuggaguucaacaacgagagcuucaacuggaccgggguggcccagaacggcaccuccagcgccugcaagcggcgcuccgacaagagcuucuucucccggcucaacuggcugcaccagcugaaguacaaguaccccgcccucaacgucaccaugcccaacaacgagaaguucgacaagcuguacaucuggggcgugcaccaccccgggacggacagcgaccagaucucccuguacgcgcaggccagcgggcgcgugaccgucagcaccaagcggucccagcagaccgugaucccgaacaucggcagccgccccugggugcggggcgucuccagccgcaucuccaucuacuggacgaucgugaagcccggggacauccuccugaucaacagcaccggcaaccugaucgcgccccggggguacuucaagauccgcuccggcaagagcuccaucaugcggagcgacgccccgaucggcaagugcaacuccgagugcaucacccccaacgggagcauccccaacgacaagcccuuccagaacgugaaccgcaucaccuacggcgccugcccgcgguacgucaagcagaacacgcucaagcuggccaccgggaugcgcaacgugcccgagaagcagacccggggcaucuucggggccaucgccggcuucaucgagaacggcugggaggggaugauggacggcugguacggguuccgccaccagaacuccgagggcaccgggcaggccgccgaccugaaguccacgcaggcggccaucaaccagaucaacggcaagcucaaccggcugaucgagaagaccaacgagaaguuccaccagaucgagaaggaguucuccgagguggagggccgcauccaggaccuggagaaguacgucgaggacaccaagaucgaccucuggagcuacaacgccgagcugcugguggcccucgagaaccagcacaccaucgaccugacggacuccgagaugaacaagcuguucgagcggaccaagaagcagcuccgcgagaacgccgaggacauggggaacggcugcuucaagaucuaccacaagugcgacaacgcgugcaucgggagcauccgcaacggcaccuacgaccacgacguguaccgggacgaggcccugaacaaccgcuuccagaucaagggggucgagcugaaguccggcuacaaggacugggugcucuggaucagcuucgccaucagcugcuuccugcugugcaucguccucaugggcuucaucaugugggccugccagaaggggaacauccggugcaacaucugcaucuga

SEQ ID NO: 64700 - RNA, 1701 nt, Artificial Sequence; identical to SEQ ID NO: 64586
  derived and/or modified CDS sequence (opt1) from hemagglutinin__InfluenzaA__ABC85930

SEQ ID NO: 64701 - RNA, 1701 nt, Artificial Sequence; identical to SEQ ID NO: 64635
  derived and/or modified CDS sequence (opt1) from hemagglutinin__InfluenzaA__ABC85941

SEQ ID NO: 64702 - RNA, 1701 nt, Artificial Sequence
  derived and/or modified CDS sequence (opt1) from hemagglutinin__InfluenzaA__ABC85952
augaagaccaucaucgcccugagcuacauccucugccugguguucgcccagaagcugcccggcaacgacaacuccaccgcgacgcucugccuggggcaccacgccgucccgaacggcacccuggugaagaccaucaccaacgaccagaucgaggugacgaacgccaccgagcucguccagagcuccagcaccgggcgcaucugcgacagcccccaccagauccuggacggcgagaacugcacccugaucgacgcccuccugggggacccccacugcgacggcuuccagaacaagaagugggaccuguucguggagcggagcaaggccuacuccaacugcuaccccuacgacgugccggacuacgucagccuccgcucccugguggcgagcuccggcacgcuggaguucaacaacgagagcuucaacuggaccgggguggcccagaacggcaccuccagcgccugcaagcggcgcuccgacaagagcuucuucucccggcucaacuggcugcaccagcugaaguacaaguaccccgcccucaacgucaccaugcccaacaacgagaaguucgacaagcuguacaucuggggcgugcaccaccccgggacggacagcgaccagaucucccuguacgcgcaggccagcgggcgcgugaccgucagcaccaagcggucccagcagaccgugaucccgaacaucggcagccgccccugggugcggggcgucuccagccgcaucuccaucuacuggacgaucgugaagcccggggacauccuccugaucaacagcaccggcaaccugaucgcgccccggggguacuucaagauccgcuccggcaagagcuccaucaugcggagcgacgccccgaucggcaagugcaacuccgagugcaucacccccaacgggagcauccccaacgacaagcccuuccagaacgugaaccgcaucaccuacggcgccugcccgcgguacgucaagcagaacacgcucaagcuggccaccgggaugcgcaacgugcccgagaagcagacccggggcaucuucggggccaucgccggcuucaucgagaacggcugggaggggaugauggacggcugguacggguuccgccaccacaacuccgagggcaccgggcaggccgccgaccugaaguccacgcaggcggccaucaaccagaucaacggcaagcucaaccggcugaucgagaagaccaacgagaaguuccaccagaucgagaaggaguucuccgagguggagggccgcauccaggaccuggagaaguacgucgaggacaccaagaucgaccucuggagcuacaacgccgagcugcugguggcccucgagaaccagcacaccaucgaccugacggacuccgagaugaacaagcuguucgagcggaccaagaagcagcuccgcgagaacgccgaggacauggggaacggcugcuucaagaucuaccacaagugcgacaacgcgugcaucgggagcauccgcaacggcaccuacgaccacgacguguaccgggacgaggcccugaacaaccgcuuccagaucaagggggucgagcugaaguccggcuacaaggacugggugcucuggaucagcuucgccaucagcugcuuccugcugugcaucguccuccugggcuucaucaugugggccugccagaaggggaacauccggugcaacaucugcaucuga

SEQ ID NO: 64703 - RNA, 1701 nt, Artificial Sequence; identical to SEQ ID NO: 64586
  derived and/or modified CDS sequence (opt1) from hemagglutinin__InfluenzaA__ABC85974

SEQ ID NO: 64704 - RNA, 1701 nt, Artificial Sequence; identical to SEQ ID NO: 64586
  derived and/or modified CDS sequence (opt1) from hemagglutinin__InfluenzaA__ABC85985

SEQ ID NO: 64705 - RNA, 1701 nt, Artificial Sequence
  derived and/or modified CDS sequence (opt1) from hemagglutinin__InfluenzaA__ABC85996
augaagaccaucaucgcccugagcuacauccucugccugguguucgcccagaagcugcccggcaacgacaacuccaccgcgacgcucugccuggggcaccacgccgucccgaacggcaccaucgugaagaccaucaccaacgaccagaucgaggugacgaacgccaccgagcugguccagagcuccagcaccgggggcaucugcgacagcccccaccagauccucgacggggagaacugcacccugaucgacgcccugcucggcgacccccagugcgacggcuuccagaacaagaagugggaccuguucguggagcgcagcaaggccuacuccaacugcuaccccuacgacgugccggacuacgcgagccugcggucccucgucgccagcuccgggacgcuggaguucaacaacgagagcuucaacuggaccggcgugacccagaacgggaccuccagcgccugcaagcgccgguccaacaacagcuucuucucccgccugaacuggcucacgcaccugaaguucaaguaccccgcccugaacgugaccaugcccaacaacgagaaguucgacaagcucuacaucuggggcguccaccaccccgggaccgacaacgaccagaucagccuguacgcgcaggccuccggccggaucaccgugagcacgaagcgcagccagcagaccgugaucccgaacaucggcucccggccccgcguccgggacauccccagccgcaucuccaucuacuggaccaucgugaagcccggggacauccugcucaucaacagcaccggcaaccugaucgccccgcggggguacuucaagauccgcuccggcaagagcuccaucaugcggagcgacgcccccaucggcaagugcaacuccgagugcaucacgcccaacgggagcauccccaacgacaagccguuccagaacgugaaccgcaucaccuacggcgccugcccccgguacgucaagcagaacacccugaagcucgcgaccgggaugcgcaacgugcccgagaagcagacgcggggcaucuucggggccaucgccggcuucaucgagaacggcugggaggggaugauggacggcugguacggguuccgccaccagaacuccgagggcaucgggcaggccgccgaccugaaguccacccaggcggccaucaaccagaucaacggcaagcugaaccggcucaucggcaagaccaacgagaaguuccaccagaucgagaaggaguucuccgagguggaggggcgcauccaggaccuggagaaguacgucgaggacaccaagaucgaccuguggagcuacaacgccgagcuccugguggcccuggagaaccagcacacgaucgaccucaccgacuccgagaugaacaagcuguucgagcggaccaagaagcagcugcgcgagaacgccgaggacaugggcaacgggugcuucaagaucuaccacaagugcgacaacgcgugcaucggcagcauccgcaacgggaccuacgaccacgacguguaccgggacgaggcccucaacaaccgcuuccagaucaagggcgucgagcugaaguccggcuacaaggacuggauccuguggaucagcuucgccaucuccugcuuccuccugugcguggcccugcucggguucaucaugugggccugccagaagggcaacauccggugcaacaucugcaucuga

SEQ ID NO: 64706 - RNA, 1701 nt, Artificial Sequence; identical to SEQ ID NO: 64267
  derived and/or modified CDS sequence (opt1) from hemagglutinin__InfluenzaA__ABC86007

SEQ ID NO: 64707 - RNA, 1701 nt, Artificial Sequence
  derived and/or modified CDS sequence (opt1) from hemagglutinin__InfluenzaA__ABC86018
augaagaccaucaucgcccugagcuacauccucugccugguguucgcccagaagcugcccggcaacgacaacuccaccgcgacgcucugccuggggcaccacgccgucccgaacggcaccaucgugaagaccaucaccaacgaccagaucgaggugacgaacgccaccgagcugguccagagcuccagcaccgggggcaucugcgacagcccccaccagauccucgacggggagaacugcaccaucaucgacgcccugcugggcgacccccagugcgacggcuuccagaacaagaagugggaccucuucguggagcgcuccaaggccuacuccaacugcuaccccuacgacgugccggacuacgcgagccugcggucccuggucgccagcuccgggacgcucgaguucaacaacgagagcuucaacuggaccggcgugacccagaacgggaccuccagcgccugcaagcgccgguccaacaacagcuucuucucccgccugaacuggcugacgcaccucaaguucaaguaccccgcccugaacgugaccaugcccaacaacgagaaguucgacaagcuguacaucuggggcguccaccaccccgggaccgacaacgaccagaucagccucuacgcgcaggccuccggccggaucaccgugagcacgaagcgcagccagcagaccgugaucccgaacaucggcucccggccccgcguccgggacauccccagccgcaucuccaucuacuggaccaucgugaagcccggggacauccugcugaucaacagcaccggcaaccucaucgccccgcggggguacuucaagauccgcuccggcaagagcuccaucaugcggagcgacgcccccaucggcaagugcaacuccgagugcaucacgcccaacgggagcauccccaacgacaagccguuccagaacgugaaccgcaucaccuacggcgccugcccccgguacgucaagcagaacacccugaagcuggcgaccgggaugcgcaacgugcccgagaagcagacgcggggcaucuucggggccaucgccggcuucaucgagaacggcugggaggggaugguggacggcugguacggguuccgccaccagaacuccgagggcaucgggcaggccgccgaccucaagagcacccaggcggccaucaaccagaucaacggcaagcugaaccggcugaucggcaagaccaacgagaaguuccaccagaucgagaaggaguucuccgaggucgaggggcgcauccaggaccucgagaaguacguggaggacaccaagaucgaccuguggagcuacaacgccgagcugcucguggcccuggagaaccagcacacgaucgaccugaccgacuccgagaugaacaagcuguucgagcggaccaagaagcagcuccgcgagaacgccgaggacaugggcaacgggugcuucaagaucuaccacaagugcgacaacgcgugcaucggcagcauccgcaacgggaccuacgaccacgacgucuaccgggacgaggcccugaacaaccgcuuccagaucaagggcguggagcucaaguccggcuacaaggacuggauccuguggaucagcuucgccaucuccugcuuccugcucugcguggcccugcugggguucaucaugugggccugccagaagggcaacauccggugcaacaucugcaucuga

SEQ ID NO: 64708 - RNA, 1701 nt, Artificial Sequence; identical to SEQ ID NO: 64267
  derived and/or modified CDS sequence (opt1) from hemagglutinin__InfluenzaA__ABC86029

SEQ ID NO: 64709 - RNA, 1701 nt, Artificial Sequence; identical to SEQ ID NO: 64306
  derived and/or modified CDS sequence (opt1) from hemagglutinin__InfluenzaA__ABC86040

SEQ ID NO: 64710 - RNA, 1701 nt, Artificial Sequence; identical to SEQ ID NO: 64540
  derived and/or modified CDS sequence (opt1) from hemagglutinin__InfluenzaA__ABC86124

SEQ ID NO: 64711 - RNA, 1701 nt, Artificial Sequence; identical to SEQ ID NO: 64617
  derived and/or modified CDS sequence (opt1) from hemagglutinin__InfluenzaA__ABC86137

SEQ ID NO: 64712 - RNA, 1701 nt, Artificial Sequence
  derived and/or modified CDS sequence (opt1) from hemagglutinin__InfluenzaA__ABC97374
augaagaccaucaucgcccugagcuacaucuucugccucgugcugggccaggacuuccccgggaacgacaacuccaccgccacgcugugccucggccaccacgcggucccgaacgggacccuggugaagaccaucaccaacgaccagaucgaggugacgaacgccaccgagcugguccagagcuccagcaccggcaagaucugcaacaacccccaccgcauccucgacgggaucgacugcacccugaucgacgcccugcucggcgacccccacugcgacggcuuccagaacgagacgugggaccuguucguggagcgguccaaggccuucagcaacugcuaccccuacgacgugccggacuacgccucccugcgcagccucgucgcguccagcgggacccuggaguucaucaacgagggcuucaccuggaccggggugacgcagaacggcggguccaacgccugcaagcggggccccgacagcggcuucuucucccgccugaacuggcucuacaagagcggguccaccuaccccgugcugaacgucaccaugcccaacaacgacaacuucgacaagcuguacaucuggggcgugcaccacccgagcaccgaccaggagcagacgucccucuacgugcaggccagcgggcgggucaccguguccaccaagcgcagccagcagaccaucauccccaacaucggcagccggcccugggugcgcggccuguccagccggaucuccaucuacuggacgaucgucaagcccggggacauccuggugaucaacagcaacggcaaccucaucgccccgcgcggguacuucaagaugcggaccggcaaguccagcaucaugcgcuccgacgcgcccaucgggaccugcaucagcgagugcaucacccccaacggcuccauccccaacgacaagccguuccagaacgugaacaagaucacguacggcgccugccccaaguacgucaagcagaacacccugaagcuggccaccgggaugcggaacgugcccgagaagcagacccgcggccucuucggggccaucgccggcuucaucgagaacgggugggagggcaugguggacggcugguacggguuccggcaccagaacagcgagggcacggggcaggcggccgaccugaaguccacccaggccgccaucgaccagaucaacggcaagcugaaccgcgucaucgagaagaccaacgagaaguuccaccagaucgagaaggaguucagcgagguggaggggcggauccaggaccucgagaaguacguggaggacaccaagaucgaccugugguccuacaacgccgagcugcucgucgcgcuggagaaccagcacacgaucgaccugaccgacagcgagaugaacaagcuguucgagaagacccgccggcagcuccgcgagaacgccgaggacaugggcaacggcugcuuccggaucuaccacaagugcgacaacgccugcaucggguccauccgcaacggcaccuacgaccacgacguguaccgcgacgaggcccugaacaaccgguuccagaucaagggggucgagcucaagagcggcuacaaggacuggauccuguggaucuccuucgccaucagcugcuuccugcucugcguggugcugcugggcuucaucaugugggcgugccagaaggggaacauccgcugcaacaucugcaucuga

SEQ ID NO: 64713 - RNA, 1701 nt, Artificial Sequence; identical to SEQ ID NO: 64056
  derived and/or modified CDS sequence (opt1) from hemagglutinin__InfluenzaA__ABD15449

SEQ ID NO: 64714 - RNA, 1701 nt, Artificial Sequence
  derived and/or modified CDS sequence (opt1) from hemagglutinin__InfluenzaA__ABD15460
augaagaccaucaucgcccugagcuacauccucugccugguguucgcccagaagcugcccggcaacgacaacuccaccgcgacgcucugccuggggcaccacgccgucccgaacggcaccaucgugaagaccaucaccaacgaccagaucgaggugacgaacgccaccgagcugguccagaucagcuccaccgggggcaucugcgacagccccuaccagauccucgacggggagaacugcacccugaucgacgcccugcucggcgacccccagugcgacggcuuccagaacaagaagugggaccuguucguggagcgcuccaaggccuacagcaacugcuaccccuacgacgugccggacuacgcgucccugcggagccucgucgccuccagcgggacgcuggaguucaacaacgaguccuucgacuggaccggcgugacccagaacgggaccagcuccgccugcaagcgccggagcaacaaguccuucuucagccgccugaacuggcucacgcaccugaaguacaaguaccccgcccugaacgugaccaugcccaacaacgagaaguucgacaagcucuacaucuggggcguccaccaccccgggaccgacuccgaccagaucagccuguacgcgcaggccuccggccggaucaccgugagcacgaagcgcagccagcagaccgugaucccgaacaucggcucccggccccgcguccgggacgugagcucccgcaucagcaucuacuggaccaucgugaagcccggggacauccugcucaucaacuccaccggcaaccugaucgcgccccggggguacuucaagauccgcagcggcaaguccagcaucaugcgguccgacgccccgaucggcaagugcaacagcgagugcaucacgcccaacggguccauccccaacgacaagcccuuccagaacgucaaccgcaucaccuacggcgccugcccgcgguacgugaagcagaacacccugaagcucgccaccgggaugcgcaacgugcccgagaagcagacgcggggcaucuucggggccaucgccggcuucaucgagaacggcugggaggggauggucgacggcugguacggguuccgccaccagaacagcgagggcaccgggcaggccgccgaccugaaguccacccaggcggccaucaaccagaucaacggcaagcugaaccggcucaucggcaagaccaacgagaaguuccaccagaucgagaaggaguucagcgagguggaggggcgcauccaggaccuggagaaguacguggaggacacgaagaucgaccugugguccuacaacgccgagcuccuggucgcccuggagaaccagcacaccaucgaccucaccgacagcgagaugaacaagcuguucgagcggaccaagaagcagcugcgcgagaacgccgaggacaugggcaacgggugcuucaagaucuaccacaagugcgacaacgcgugcaucggcuccauccgcaacgggacguacgaccacgacguguaccgggacgaggcccucaacaaccgcuuccagaucaagggcguggagcucaagagcggcuacaaggacuggauccuguggaucuccuucgccaucagcugcuuccugcugugcgucgcccugcucggguucaucaugugggccugccagaagggcaacauccggugcaacaucugcaucuga

SEQ ID NO: 64715 - RNA, 1701 nt, Artificial Sequence; identical to SEQ ID NO: 64056
  derived and/or modified CDS sequence (opt1) from hemagglutinin__InfluenzaA__ABD15471

SEQ ID NO: 64716 - RNA, 1701 nt, Artificial Sequence; identical to SEQ ID NO: 64056
  derived and/or modified CDS sequence (opt1) from hemagglutinin__InfluenzaA__ABD15482

SEQ ID NO: 64717 - RNA, 1701 nt, Artificial Sequence; identical to SEQ ID NO: 64714
  derived and/or modified CDS sequence (opt1) from hemagglutinin__InfluenzaA__ABD15493

SEQ ID NO: 64718 - RNA, 1701 nt, Artificial Sequence; identical to SEQ ID NO: 64267
  derived and/or modified CDS sequence (opt1) from hemagglutinin__InfluenzaA__ABD15526

SEQ ID NO: 64719 - RNA, 1701 nt, Artificial Sequence; identical to SEQ ID NO: 64476
  derived and/or modified CDS sequence (opt1) from hemagglutinin__InfluenzaA__ABD15537

SEQ ID NO: 64720 - RNA, 1701 nt, Artificial Sequence; identical to SEQ ID NO: 64476
  derived and/or modified CDS sequence (opt1) from hemagglutinin__InfluenzaA__ABD15548

SEQ ID NO: 64721 - RNA, 1701 nt, Artificial Sequence; identical to SEQ ID NO: 64494
  derived and/or modified CDS sequence (opt1) from hemagglutinin__InfluenzaA__ABD15559

SEQ ID NO: 64722 - RNA, 1701 nt, Artificial Sequence; identical to SEQ ID NO: 64476
  derived and/or modified CDS sequence (opt1) from hemagglutinin__InfluenzaA__ABD15570

SEQ ID NO: 64723 - RNA, 1701 nt, Artificial Sequence; identical to SEQ ID NO: 64494
  derived and/or modified CDS sequence (opt1) from hemagglutinin__InfluenzaA__ABD15581

SEQ ID NO: 64724 - RNA, 1701 nt, Artificial Sequence; identical to SEQ ID NO: 64476
  derived and/or modified CDS sequence (opt1) from hemagglutinin__InfluenzaA__ABD15592

SEQ ID NO: 64725 - RNA, 1701 nt, Artificial Sequence; identical to SEQ ID NO: 64476
  derived and/or modified CDS sequence (opt1) from hemagglutinin__InfluenzaA__ABD15603

SEQ ID NO: 64726 - RNA, 1701 nt, Artificial Sequence; identical to SEQ ID NO: 64476
  derived and/or modified CDS sequence (opt1) from hemagglutinin__InfluenzaA__ABD15614

SEQ ID NO: 64727 - RNA, 1701 nt, Artificial Sequence
  derived and/or modified CDS sequence (opt1) from hemagglutinin__InfluenzaA__ABD15625
augaagaccaucaucgcccugagcuacauccucugccugguguucgcccagaagcugcccggcaacgacaacuccaccgcgacgcucugccuggggcaccacgccgucccgaacggcaccaucgugaagaccaucaccaacgaccagaucgaggugacgaacgccaccgagcugguccagagcuccagcaccgggggcaucugcgacagcccccaccagauccucgacggggagaacugcacccugaucgacgcccugcucggcgacccccagugcgacggcuuccagaacaagaagugggaccuguucguggagcgcagcaaggccuacuccaacugcuaccccuacgacgugccggacuacgcgagccugcggucccucgucgccagcuccgggacgcuggaguucaacaacgagagcuucgacuggaccggcgugacccagaacgggaccuccagcgccugcaagcgccgguccaacaagagcuucuucucccgccugaacuggcucacgcaccugaaguacaaguaccccgcccugaacgugaccaugcccaacaacgagaaguucgacaagcucuacaucuggggcguccaccaccccgggaccgacagcgaccagaucucccuguacgcgcaggccagcggccggaucaccgugagcacgaagcgcucccagcagaccgugaucccgaacaucggcagccggccccgcguccgggacguguccagccagaucuccaucuacuggaccaucgugaagcccggggacauccugcucaucaacagcaccggcaaccugaucgcgccccgcggguacuucaagauccgguccggcaagagcuccaucaugcgcagcgacgccccgaucggcaagugcaacuccgagugcaucacgcccaacgggagcauccccaacgacaagcccuuccagaacgucaaccggaucaccuacggcgccugcccgcgcuacgugaagcagaacacccugaagcucgccaccgggaugcggaacgugcccgagaagcagacgcgcggcaucuucggggccaucgccggcuucaucgagaacggcugggaggggauggucgacggcugguacggguuccggcaccagaacuccgagggcaccgggcaggccgccgaccugaaguccacccaggcggccaucaaccagaucaacggcaagcugaaccgccucaucggcaagaccaacgagaaguuccaccagaucgagaaggaguucuccgagguggaggggcggauccaggaccuggugaaguacgucgaggacacgaagaucgaccuguggagcuacaacgccgagcuccugguggcccuggagaaccagcacaccaucgaccucaccgacuccgagaugaacaagcuguucgagcgcaccaagaagcagcugcgggagaacgccgaggacaugggcaacgggugcuucaagaucuaccacaagugcgacaacgcgugcaucggcagcauccgcaacgggacguacgaccacgacguguaccgcgacgaggcccucaacaaccgguuccagaucaagggcgucgagcugaaguccggcuacaaggacuggauccuguggaucagcuucgccaucagcugcuuccuccugugcguggcccugcucggguucaucaugugggccugccagaagggcaacauccgcugcaacaucugcaucuga

SEQ ID NO: 64728 - RNA, 1701 nt, Artificial Sequence; identical to SEQ ID NO: 64494
  derived and/or modified CDS sequence (opt1) from hemagglutinin__InfluenzaA__ABD15636

SEQ ID NO: 64729 - RNA, 1701 nt, Artificial Sequence; identical to SEQ ID NO: 64674
  derived and/or modified CDS sequence (opt1) from hemagglutinin__InfluenzaA__ABD15680

SEQ ID NO: 64730 - RNA, 1701 nt, Artificial Sequence
  derived and/or modified CDS sequence (opt1) from hemagglutinin__InfluenzaA__ABD15691
augaagaccaucaucgcccugagcuacauccucugccugguguucgcccagaagcugcccgucaacgacaaguccaccgcgacgcucugccugggccaccacgccgugccgaacgggacccuggugaagaccaucaccaacgaccacaucgaggucacgaacgccaccgagcucgugcagagcucccccaccggccgcaucugcgacagcccccaccagauccuggacggggagaacugcacccugaucgacgcccuccugggcgacccccacugcgacggguuccagaacaaggagugggaccuguucguggagcgguccacggccuacagcaacugcuacccguacgacguccccgacuacgcgucccuccgcagccugguggccuccagcggcacccuggaguucaacaacgaguccuucaacuggaccggcguggcccagaacgggaccagcuccgccugcaagcggcgcagcaucaaguccuucuucagccggcucaacuggcugcaccagcugaaguacaaguaccccgcgcucaacgucacgaugcccaacaacgagaaguucgacaagcuguacaucuggggcgugcaccacccguccaccgacagcgaccagaucucccuguacgcccaggccagcgggcgcgugaccgucagcaccaagcggucccagcagacggugauccccaacaucggcagccgccccugggugcgcggggucuccagccggaucuccaucuacuggaccaucgugaagcccggcgacauccuccugaucaacagcaccggcaaccugaucgccccgcggggguacuucaagauccgcuccggcaagagcuccaucaugcggagcaacgcccccaucgggaagugcaacuccgagugcaucacccccaacggcagcauccccaacgacaagccguuccagaacgugaaccgcaucacguacggcgcgugcccccgguacgucaagcagaacacccucaagcuggccaccgggaugcgcaacgugcccgagaagcagacccggggcaucuucggggccaucgccggcuucaucgagaacgggugggagggcaugguggacggcugguacggguuccgccaccagaacuccgagggcacggggcaggccgcggaccucaagagcacccaggccgccaucaaccagaucaacggcaagcugaaccggcugaucgagaagaccaacgagaaguuccaccagaucgagaaggaguucuccgaggucgaggggcgcauccaggaccuggagaaguacguggaggacaccaagaucgaccucuggagcuacaacgccgagcugcugguggcccucgagaaccagcacacgaucgaccugaccgacuccgagaugaacaagcuguucgagcggacccgcaagcagcuccgcgagaacgcggaggacaugggcaacggcugcuucaagaucuaccacaagugcgacaacgccugcaucgggagcauccggaacggcaccuacgaccacgacgucuaccgcgacgaggcccugaacaaccgguuccagaucaaggggguggagcugaaguccggcuacaaggacuggauccucuggaucagcuucgccaucagcugcuuccugcugugcgucgugcuccugggguucaucaugugggccugccagaagggcaacauccgcugcaacaucugcaucuga

SEQ ID NO: 64731 - RNA, 1701 nt, Artificial Sequence
  derived and/or modified CDS sequence (opt1) from hemagglutinin__InfluenzaA__ABD15702
augaagaccaucaucgcccugagcuacauccucugccugguguucgcccagaagcugcccggcaacgacaacuccaccgcgacgcucugccuggggcaccacgccgucccgaacggcacccuggugaagaccaucaccaacgaccagaucgaggugacgaacgccaccgagcucguccagagcuccagcaccgggggcaucugcgacagcccccaccagauccuggacggggagaacugcacccugaucgacgcccuccugggcgacccccacugcgacggcuuccagaacaaggagugggaccuguucguggagcgcagcaaggccuacuccaacugcuaccccuacgacgugccggacuacgcgagccuccggucccuggucgccagcuccgggacgcuggaguucaacaacgagagcuucaacuggaccggcguggcccagaacgggaccuccagcgccugcaagcgccgguccaacaagagcuucuucucccgccucaacuggcugcaccagcugaaguacaaguaccccgcgcucaacgugaccaugcccaacaacgagaaguucgacaagcuguacaucuggggcguccaccaccccagcacggacuccgaccagaccagccuguacgcccaggccccggggcgggugaccgugagcaccaagcgcucccagcagacggucauccccaacaucggcagccggcccugggugcgcggcguguccagccggaucuccaucuacuggaccaucgucaagcccggggacauccuccugaucaacugcaccggcaaccugaucgccccgcgcggguacuucaagauccggagcggcaaguccagcaucaugcgcuccgacgccagcaucggcaagugcaacuccgagugcaucacccccaacgggagcauccccaacgacaagcccuuccagaacgugaaccggaucacguacggcgcgugcccgcgcuacgugaagcagaacacccucaagcuggccaccgggaugcggaacguccccgagaagcagacccgcggcaucuucggggccaucgccggcuucaucgagaacggcugggaggggaugguggacggcugguacggguuccggcaccagaacuccgagggcacggggcaggccgcggaccugaaguccacccaggccgccaucaaccagaucaacggcaagcucaaccgccugaucgagaagaccaacgagaaguuccaccagaucgagaaggaguucuccgagguggagggccggauccaggaccuggagaaguacgucgaggacaccaagaucgaccucuggagcuacaacgccgagcugcugguggcccucgagaaccagcacacgaucgaccugaccgacuccgagaugaacaagcuguucgagcgcaccaagaagcagcuccgggagaacgcggaggacauggggaacggcugcuucaagaucuaccacaagugcgacaacgccugcaucgggagcauccgcaacggcaccuacgaccacgacguguaccgcgacgaggcccugaacaaccgguuccagaucaagggggucgagcugaaguccggcuacaaggacuggauccucuggaucagcuucgccaucagcugcuuccugcugugcgugguccuccugggcuucaucaugugggccugccagaaggggaacauccgcugcaacaucugcaucuga

SEQ ID NO: 64732 - RNA, 1701 nt, Artificial Sequence
  derived and/or modified CDS sequence (opt1) from hemagglutinin__InfluenzaA__ABD15724
augaagaccaucaucgcccugagcuacauccucugccugguguucgcccagaagcugcccggcaacgacaacuccaccgcgacgcucugccuggggcaccacgccgucccgaacggcacccuggugaagaccaucaccaacgaccagaucgaggugacgaacgccaccgagcucguccagagcuccagcaccgggggcaucugcgacagcccccaccagauccuggacggggagaacugcacccugaucgacgcccuccugggcgacccccacugcgacggcuuccagaacaaggagugggaccuguucguggagcgcagcaaggccuacuccaacugcuaccccuacgacgugccggacuacgcgagccuccggucccuggucgccagcuccgggacgcuggaguucaacaacgagagcuucaacuggaccggcguggcccagaacgggaccuccagcgccugcaagcgccgguccaacaagagcuucuucucccgccucaacuggcugcaccagcugaaguacaaguaccccgcgcucaacguggccaugcccaacaacgagaaguucgacaagcuguacaucuggggcguccaccaccccagcaccgacuccgaccagaucagccuguacgcccaggccccggggcgggugacggugagcaccaagcgcucccagcagaccgucauccccaacaucggcagccggcccugggugcgcggcguguccagccggaucuccaucuacuggaccaucgucaagcccggggacauccuccugaucaacugcacgggcaaccugaucgccccgcgcggguacuucaagauccggagcggcaaguccagcaucaugcgcuccgacgcgagcaucggcaagugcaacuccgagugcaucacccccaacgggagcauccccaacgacaagcccuuccagaacgugaaccggaucaccuacggcgccugcccgcgcuacgugaagcagaacacccucaagcuggccacggggaugcggaacguccccgagaagcagacccgcggcaucuucggggccaucgccggcuucaucgagaacggcugggaggggaugguggacggcugguacggguuccggcaccagaacuccgagggcaccgggcaggcggccgaccugaaguccacccaggccgccaucaaccagaucaacggcaagcucaaccgccugaucgagaagacgaacgagaaguuccaccagaucgagaaggaguucuccgagguggagggccggauccaggaccuggagaaguacgucgaggacaccaagaucgaccucuggagcuacaacgccgagcugcugguggcgcucgagaaccagcacaccaucgaccugaccgacuccgagaugaacaagcuguucgagcgcacgaagaagcagcuccgggagaacgccgaggacauggggaacggcugcuucaagaucuaccacaagugcgacaacgccugcaucgggagcauccgcaacggcaccuacgaccacgacguguaccgcgacgaggcccugaacaaccgguuccagaucaagggggucgagcugaaguccggcuacaaggacuggauccucuggaucagcuucgccaucagcugcuuccugcugugcgugguccuccugggcuucaucaugugggcgugccagaaggggaacauccgcugcaacaucugcaucuga

SEQ ID NO: 64733 - RNA, 1701 nt, Artificial Sequence
  derived and/or modified CDS sequence (opt1) from hemagglutinin__InfluenzaA__ABD15746
augaagaccaucaucgcccugagcuacauccucugccugguguucgcccagaagcugcccgucaacgacaacuccaccgcgacgcucugccugggccaccacgccgugccgaacgggacccuggugaagaccaucaccaacgaccacaucgaggucacgaacgccaccgagcucgugcagagcuccagcaccggccgcaucugcgacagcccccaccagauccuggacggggagaacugcacccugaucgacgcccuccugggcgacccccacugcgacggguuccagaacaaggagugggaccuguucguggagcggagcacggccuacuccaacugcuaccccuacgacgucccggacuacgcgagccuccgcucccugguggccagcuccggcacccuggaguucaacaacgagagcuucaacuggaccggcguggcccagaacgggaccuccagcgccugcaagcggcgcuccaucaagagcuucuucucccggcucaacuggcugcaccagcugaaguacaaguaccccgcgcucaacgucacgaugcccaacaacgagaaguucgacaagcuguacaucuggggcgugcaccaccccagcaccgacuccgaccagaucagccuguacgcccaggccagcgggcgcgugaccgucuccaccaagcggagccagcagacggugaucccgaacaucggcucccgccccugggugcgggggaucagcucccgcaucagcaucuacuggaccaucgucaagcccggcgacauccuccugaucaacuccaccggcaaccugaucgcgccccggggguacuucaagauccgcagcggcaaguccagcaucaugcgguccaacgccccgaucgggaagugcaacagcgagugcaucacccccaacggcuccauccccaacgacaagcccuuccagaacgugaaccgcaucacguacggcgccugcccgcgguacgugaagcagaacacccucaagcuggccaccgggaugcgcaacguccccgagaagcagacccggggcaucuucggggccaucgccggcuucaucgagaacgggugggagggcaugguggacggcugguacggguuccgccaccagaacagcgagggcacggggcaggccgcggaccugaaguccacccaggccgccaucaaccagaucaacggcaagcucaaccggcugaucgagaagaccaacgagaaguuccaccagaucgagaaggaguucagcgagguggaggggcgcauccaggaccuggagaaguacgucgaggacaccaagaucgaccucugguccuacaacgccgagcugcugguggcccucgagaaccagcacacgaucgaccugaccgacagcgagaugaacaagcuguucgagcggacccgcaagcagcuccgcgagaacgcggaggagaugggcaacggcugcuucaagaucuaccacaagugcgacaacgccugcaucggguccauccggaacggcaccuacgaccacgacguguaccgcgacgaggcccugaacaaccgguuccagaucaagggggucgagcugaaguccggcuacaaggacuggauccucuggaucagcuucgccaucuccugcuuccugcugugcgugguccuccugggguucaucaugugggccugccagaagggcaacauccgcugcaacaucugcaucuga

SEQ ID NO: 64734 - RNA, 1701 nt, Artificial Sequence
  derived and/or modified CDS sequence (opt1) from hemagglutinin__InfluenzaA__ABD15757
augaagaccaucaucgcccugagcuacauccucugccugguguucgcccagaagcugcccgucaacgacaacuccaccgcgacgcucugccugggccaccacgccgugccgaacgggacccuggugaagaccaucaccaacgaccacaucgaggucacgaacgccaccgagcucgugcagagcuccagcaccggccgcaucugcgacagcccccaccagauccuggacggggagaacugcacccugaucgacgcccuccugggcgacccccacugcgacggguuccagaacaaggagugggaccuguucguggagcggagcacggccuacuccaacugcuaccccuacgacgucccggacuacgcgagccuccgcucccugguggccagcuccggcacccuggaguucaacaacgagagcuucaacuggaccggcguggcccagaacgggaccuccagcgccugcaagcggcgcuccaucaagagcuucuucucccggcucaacuggcugcaccagcugaaguacaaguaccccgcgcucaacgucacgaugcccaacaacgagaaguucgacaagcuguacaucuggggcgugcaccaccccagcaccgacuccgaccagaucagccuguacgcccaggccagcgggcgcgugaccgucuccaccaagcggagccagcagacggugaucccgaacaucggcucccgccccugggugcgcggggucagcucccggaucagcaucuacuggaccaucgugaagcccggcgacauccuccugaucaacuccaccggcaaccugaucgcgccccggggguacuucaagauccgcagcggcaaguccagcaucaugcgguccaacgccccgaucgggaagugcaacagcgagugcaucacccccaacggcuccauccccaacgacaagcccuuccagaacgugaaccgcaucacguacggcgccugcccgcgguacgucaagcagaacacccucaagcuggccaccgggaugcgcaacgugcccgagaagcagacccggggcaucuucggggccaucgccggcuucaucgagaacgggugggagggcaugguggacggcugguacggguuccgccaccagaacagcgagggcacggggcaggccgcggaccugaaguccacccaggccgccaucaaccagaucaacggcaagcucaaccggcugaucgagaagaccaacgagaaguuccaccagaucgagaaggaguucagcgaggucgaggggcgcauccaggaccuggagaaguacguggaggacaccaagaucgaccucugguccuacaacgccgagcugcugguggcccucgagaaccagcacacgaucgaccugaccgacagcgagaugaacaagcuguucgagcggacccgcaagcagcuccgcgagaacgcggaggagaugggcaacggcugcuucaagaucuaccacaagugcgacaacgccugcaucggguccauccggaacggcaccuacgaccacgacgucuaccgcgacgaggcccugaacaaccgguuccagaucaaggggguggagcugaaguccggcuacaaggacuggauccucuggaucagcuucgccaucuccugcuuccugcugugcgucgugcuccugggguucaucaugugggccugccagaagggcaacauccgcugcaacaucugcaucuga

SEQ ID NO: 64735 - RNA, 1701 nt, Artificial Sequence; identical to SEQ ID NO: 64674
  derived and/or modified CDS sequence (opt1) from hemagglutinin__InfluenzaA__ABD15779

SEQ ID NO: 64736 - RNA, 1701 nt, Artificial Sequence; identical to SEQ ID NO: 64674
  derived and/or modified CDS sequence (opt1) from hemagglutinin__InfluenzaA__ABD15790

SEQ ID NO: 64737 - RNA, 1701 nt, Artificial Sequence; identical to SEQ ID NO: 64674
  derived and/or modified CDS sequence (opt1) from hemagglutinin__InfluenzaA__ABD16292

SEQ ID NO: 64738 - RNA, 1701 nt, Artificial Sequence; identical to SEQ ID NO: 64657
  derived and/or modified CDS sequence (opt1) from hemagglutinin__InfluenzaA__ABD16303

SEQ ID NO: 64739 - RNA, 1701 nt, Artificial Sequence; identical to SEQ ID NO: 64657
  derived and/or modified CDS sequence (opt1) from hemagglutinin__InfluenzaA__ABD16325

SEQ ID NO: 64740 - RNA, 1701 nt, Artificial Sequence
  derived and/or modified CDS sequence (opt1) from hemagglutinin__InfluenzaA__ABD16336
augaagaccaucaucgcccugagcuacacccucugccugguguucgcccagaagcugcccggcaacgacaacuccacggcgacccucugccuggggcaccacgccgucccgaacggcaccaucgugaagaccaucacgaacgaccagaucgaggugaccaacgccaccgagcugguccagagcuccagcaccgggggcaucugcgacagcccccaccagauccucgacggggagaacugcacgcugaucgacgcccugcucggcgacccccagugcgacggcuuccagaacaagaagugggaccuguucguggagcgcagcaaggccuacuccaacugcuaccccuacgacgugccggacuacgcgagccugcggucccucaucgccagcuccgggacccuggaguucaacaacgagagcuucaacuggaccggcgucacccagaacgggacguccagcgccugcaagcgccgguccaacagcuccuucuucagccgccugaacuggcucacccaccugaaguucaaguaccccgcccugaacgugaccaugcccaacaacgaggaguucgacaagcucuacaucuggggcgugcaccaccccgggaccuacaacgaccagaucucccuguacgcgcaggccagcggccggaucacggucagcaccaagcgcucccagcagaccgugaucccgaacaucggcagccggccccgcgugcgggacauccccucccgcaucagcaucuacuggaccaucgucaagcccggggacauccugcucaucaacuccacgggcaaccugaucgccccgcggggguacuucaagauccgcagcggcaaguccagcaucaugcgguccgacgcccccaucggcaagugcaacagcgagugcaucacccccaacggguccauccccaacgacaagccguuccagaacgugaaccgcaucaccuacggcgccugcccccgguacgugaagcagaacacccugaagcucgcgacggggaugcgcaacguccccgagaagcagacccggggcaucuucggggccaucgccggcuucaucgagaacggcugggaggggaugguggacggcugguacggguuccgccaccagaacagcgagggcaucgggcaggccgccgaccugaaguccacccaggcggccaucgaccagaucaacggcaagcugaaccggcucaucggcaagaccaacgagaaguuccaccagaucgagaaggaguucagcgagguggaggggcgcauccaggaccuggagaaguacgucgaggacacgaagaucgaccugugguccuacaacgccgagcuccugguggcccuggagaaccagcacaccaucgaccucaccgacagcgagaugaacaagcuguucgagcggaccaagaagcagcugcgcgagaacgccgaggacaugggcaacgggugcuucaagaucuaccacaagugcgacaacgcgugcaucggcuccauccgcaacgggacguacgaccacgacguguaccgggacgaggcccucaacaaccgcuuccagaucaagggcgucgagcugaaguccggcuacaaggacuggauccuguggaucuccuucgccaucagcugcuuccuccugugcguggcccugcucggguucaucaugugggccugccagaagggcaacauccggugcaacaucugcaucuga

SEQ ID NO: 64741 - RNA, 1701 nt, Artificial Sequence; identical to SEQ ID NO: 64657
  derived and/or modified CDS sequence (opt1) from hemagglutinin__InfluenzaA__ABD16347

SEQ ID NO: 64742 - RNA, 1701 nt, Artificial Sequence
  derived and/or modified CDS sequence (opt1) from hemagglutinin__InfluenzaA__ABD16358
augaagaccaucaucgcccugagcuacauccucugccugguguucgcccagaagcugcccggcaacgacaacuccaccgcgacgcucugccuggggcaccacgccgucccgaacggcaccaucgugaagaccaucaccaacgaccagaucgaggugacgaacgccaccgagcugguccagagcuccagcaccgggggcaucugcgacagcccccaccagauccucgacggggagaacugcacccugaucgacgcccugcucggcgacccccagugcgacggcuuccagaacaagaagugggaccuguucguggagcgcuccaaggccuacuccaacugcuaccccuacgacgugccggacuacgcgagccugcggucccucaucgccagcuccgggacgcuggaguucaacaacgagagcuucaacuggaccggcgucacccagaacgggaccuccagcgccugcaagcgccgguccaacagcuccuucuucagccgccugaacuggcucacgcaccugaaguucaaguaccccgcccugaacgugaccaugcccaacaacgaggaguucgacaagcucuacaucuggggcgugcaccaccccgggaccuacaacgaccagaucucccuguacgcgcaggccagcggccggaucaccgucagcacgaagcgcucccagcagaccgugaucccgaacaucggcagccggccccgcgugcgggacauccccucccgcaucagcaucuacuggaccaucgucaagcccggggacauccugcucaucaacuccaccggcaaccugaucgccccgcggggguacuucaagauccgcagcggcaaguccagcaucaugcgguccgacgcccccaucggcaagugcaacagcgagugcaucacgcccaacggguccauccccaacgacaagccguuccagaacgugaaccgcaucaccuacggcgccugcccccgguacgugaagcagaacacccugaagcucgcgaccgggaugcgcaacguccccgagaagcagacgcggggcaucuucggggccaucgccggcuucaucgagaacggcugggaggggaugguggacggcugguacggguuccgccaccagaacagcgagggcaucgggcaggccgccgaccugaaguccacccaggcggccaucgaccagaucaacggcaagcugaaccggcucaucggcaagaccaacgagaaguuccaccagaucgagaaggaguucagcgagguggaggggcgcauccaggaccuggagaaguacgucgaggacaccaagaucgaccugugguccuacaacgccgagcuccugguggcccuggagaaccagcacacgaucgaccucaccgaccuggagaugaacaagcuguucgagcggaccaagaagcagcuccgcgagaacgccgaggacaugggcaacgggugcuucaagaucuaccacaagugcgacaacgcgugcaucggcagcauccgcaacgggaccuacgaccacgacguguaccgggacgaggcccugaacaaccgcuuccagaucaagggcgucgagcugaaguccggcuacaaggacuggauccucuggaucagcuucgccaucuccugcuuccugcugugcguggcccuccugggguucaucaugugggccugccagaagggcaacauccggugcaacaucugcaucuga

SEQ ID NO: 64743 - RNA, 1701 nt, Artificial Sequence; identical to SEQ ID NO: 64657
  derived and/or modified CDS sequence (opt1) from hemagglutinin__InfluenzaA__ABD16472

SEQ ID NO: 64744 - RNA, 1701 nt, Artificial Sequence; identical to SEQ ID NO: 64657
  derived and/or modified CDS sequence (opt1) from hemagglutinin__InfluenzaA__ABD16483

SEQ ID NO: 64745 - RNA, 1701 nt, Artificial Sequence; identical to SEQ ID NO: 64654
  derived and/or modified CDS sequence (opt1) from hemagglutinin__InfluenzaA__ABD16494

SEQ ID NO: 64746 - RNA, 1701 nt, Artificial Sequence; identical to SEQ ID NO: 64657
  derived and/or modified CDS sequence (opt1) from hemagglutinin__InfluenzaA__ABD16505

SEQ ID NO: 64747 - RNA, 1701 nt, Artificial Sequence
  derived and/or modified CDS sequence (opt1) from hemagglutinin__InfluenzaA__ABD16516
augaagaccaucaucgcccugagcuacauccucugcaugguguucgcccagaagcugcccggcaacgacaacuccaccgcgacgcugugccucgggcaccacgccgucccgaacggcaccaucgugaagaccaucaccaacgaccagaucgaggugacgaacgccaccgagcugguccagagcuccagcaccgggggcaucugcgacagcccccaccagauccuggacggggagaacugcacccucaucgacgcccugcugggcgacccccagugcgacggcuuccagaacaagaagugggaccucuucaucgagcgcuccaaggccuacuccaacugcuaccccuacgacgugccggacuacgcgagccugcggucccugguggccagcuccgggacgcucgaguucaacaacgagagcuucaacuggaccggcgucacccagaacgggaccuccagcgccugcaagcgccgguccaacaacagcuucuucucccgccugaacuggcugacgcaccucaaguucaaguaccccgcccugaacgugaccaugcccaacaacgagaaguucgacaagcuguacaucuggggcgugcaccaccccgggaccgacaacgaccagaucagccucuacgcgcaggccuccggccggaucaccgucagcacgaagcgcagccagcagaccgugaucccgaacaucggcucccggccccgcgugcgggacauccccagccgcaucuccaucuacuggaccaucgucaagcccggggacauccugcugaucaacagcaccggcaaccucaucgccccgcggggguacuucaagauccgcuccggcaagagcuccaucaugcggagcgacgcccccaucgacaagugcaacuccgagugcaucacgcccaacggcagcauccccaacgacaagccguuccagaacgugaaccgcaucaccuacggggccugcccccgguacgugaagcagaacacccugaagcuggcgaccggcaugcgcaacguccccgagaagcagacgcgggggaucuucggcgccaucgccggguucaucgagaacggcugggagggcaugguggacgggugguacggcuuccgccaccagaacuccgaggggaucggccaggccgccgaccucaagagcacccaggcggccaucaaccagaucaacgggaagcugaaccggcugaucggcaagaccaacgagaaguuccaccagaucgagaaggaguucuccgagguggagggccgcauccaggaccucgagaaguacgucgaggacaccaagguggaccuguggagcuacaacgccgagcugcucguggcccuggagaaccagcacacgaucgaccugaccgacuccgagaugaacaagcuguucgagcggaccaagaagcagcuccgcgagaacgccgaggacauggggaacggcugcuucaagaucuaccacaagugcgacaacgcgugcaucgggagcauccgcaacggcaccuacgaccacgacgucuaccgggacgaggcccugaacaaccgcuuccagaucaaggggguggagcucaaguccggcuacaaggacuggauccuguggaucagcuucgccaucuccugcuuccugcucugcguggcccugcugggcuucaucaugugggccugccagaaggggaacauccggugcaacaucugcaucuga

SEQ ID NO: 64748 - RNA, 1701 nt, Artificial Sequence
  derived and/or modified CDS sequence (opt1) from hemagglutinin__InfluenzaA__ABD16527
augaagaccaucaucgcccugagcuacauccucugccugguguucgcccagaagcugcccgagaacgacaacuccaccgcgacgcucugccugggccaccacgccgucccgaacgggaccaucgugaagaccaucaccaacgaccagaucgaggugacgaacgccaccgagcugguccagagcuccagcaccggcgggaucugcgacagcccccaccagauccucgacggcgagaacugcacccugaucgacgcccugcucggggacccccagugcgacggcuuccagaacaagaagugggaccuguucguggagcgcagcaaggccuacuccaacugcuaccccuacgacgugccggaccacgcgagccugcggucccucgucgccagcuccggcacgcuggaguucaacaacgagagcuucgacuggaccggggugacccagaacggcaccuccagcgccugcaagcgccgguccaacaagagcuucuucucccgccugaacuggcucacgcaccugaaguacaaguaccccgcccugaacgugaccaugcccaacaacgagaaguucgacaagcucuacaucuggggcguccaccaccccgggaccgacagcgaccagaucucccuguacgcgcaggccagcgggcggaucaccgugagcacgaagcgcucccagcagaccgugaucccgaacaucggcagccggccccgcguccgggacguguccagccgcaucuccaucuacuggaccaucgugaagcccggcgacauccugcucaucaacagcaccgggaaccugaucgcgccccggggcuacuucaagauccgcuccgggaaguccuccaucaugcggagcgacgccccgaucggcaagugcaacuccgagugcaucacgcccaacggcagcauccccaacgacaagcccuuccagaacgucaaccgcaucaccuacggggccugcccgcgguacgugaagcagaacacccugaagcucgccaccggcaugcgcaacgugcccgagaagcagacgcgggggaucuucggcgccaucgccggguucaucgagaacggcugggagggcauggucgacgggugguacggcuuccgccaccagaacuccgaggggaccggccaggccgccgaccucaagagcacccaggcggccaucaaccagaucaacgggaagcugaaccggcugaucggcaagaccaacgagaaguuccaccagaucgagaaggaguucuccgagguggagggccgcauccaggaccuggagaaguacguggaggacacgaagaucgaccuguggagcuacaacgccgagcuccuggucgcccuggagaaccagcacaccaucgaccucaccgacuccgagaugaacaagcuguucgagcggaccaagaagcagcugcgcgagaacgccgaggacauggggaacggcugcuucaagaucuaccacaagugcgacaacgcgugcaucgggagcauccgcaacggcacguacgaccacgacguguaccgggacgaggcccucaacaaccgcuuccagaucaaggggguggagcugaaguccggcuacaaggacuggauccuguggaucagcuucgccaucagcugcuuccuccugugcgucgcccugcucggcuucaucaugugggccugccagaaggggaacauccggugcgacaucugcaucuga

SEQ ID NO: 64749 - RNA, 1701 nt, Artificial Sequence; identical to SEQ ID NO: 64540
  derived and/or modified CDS sequence (opt1) from hemagglutinin__InfluenzaA__ABD16538

SEQ ID NO: 64750 - RNA, 1701 nt, Artificial Sequence
  derived and/or modified CDS sequence (opt1) from hemagglutinin__InfluenzaA__ABD16549
augaagaccaucaucgcccugagcuacauccucugccugguguucgcccagaagcugcccggcaacgacaacuccaccgcgacgcucugccuggggcaccacgccgucccgaacggcaccaucgugaagaccaucaccaacgaccagaucgaggugacgaacgccaccgagcugguccagagcuccagcaccgggggcaucugcgacagcccccaccagauccucgacggggagaacugcacccugaucgacgcccugcucggcgacccccagugcgacggcuuccagaacaagaagugggaccuguucguggagcgcagcaaggccuacuccaacugcuaccccuacgacgugccggacuacgcgagccugcggucccucaucgccagcuccgggacgcuggaguucaacaacgagagcuucaacuggaccggcgucacccagaacgggaccuccagcgccugcaagcgccgguccaacagcuccuucuucagccgccugaacuggcucacgcaccugaaguucaaguaccccgcccugaacgugaccaugcccaacaacgaggaguucgacaagcucuacaucuggggcgugcaccaccccgggaccuacaacgaccagaucucccuguacgcgcaggccagcggccggaucaccgucagcacgaagcgcucccagcagaccgugaucccgaacaucggcagccggccccgcgugcgggacauccccucccgcaucagcaucuacuggaccaucgucaagcccggggacauccugcucaucaacuccaccggcaaccugaucgccccgcggggguacuucaagauccgcagcggcaaguccagcaucaugcgguccgacgcccccaucggcaagugcaacagcgagugcaucacgcccaacggguccauccccaacgacaagccguuccagaacgugaaccgcaucaccuacggcgccugcccccgguacgugaagcagaacacccugaagcucgcgaccgggaugcgcaacguccccgagaagcagacgcggggcaucuucggggccaucgccggcuucaucgagaacggcugggaggggaugguggacggcugguacggguuccgccaccagaacagcgagggcaucgggcaggccgccgaccugaaguccacccaggcggccaucgaccagaucaacggcaagcugaaccggcucaucggcaagaccaacgagaaguuccaccagaucgagaaggaguucagcgagguggaggggcgcauccaggaccuggagaaguacgucgaggacaccaagaucgaccugugguccuacaacgccgagcuccugguggcccuggagaaccagcacacgaucgaccucaccgacagcgagaugaacaagcuguucgagcggaccaagaagcagcugcgcgagaacgccgaggacaugggcaacgggugcuucaagaucuaccacaagugcgacaacgcgugcaucggcuccauccgcaacgggaccuacgaccacgacguguaccgggacgaggcccucaacaaccgcuuccagaucaagggcgucgagcugaaguccggcuacaaggacuggauccuguggaucuccuucgccaucagcugcuuccuccugugcguggcccugcucggguucaucgugugggccugccagaagggcaacauccggugcaacaucugcaucuga

SEQ ID NO: 64751 - RNA, 1701 nt, Artificial Sequence; identical to SEQ ID NO: 64654
  derived and/or modified CDS sequence (opt1) from hemagglutinin__InfluenzaA__ABD16560

SEQ ID NO: 64752 - RNA, 1701 nt, Artificial Sequence
  derived and/or modified CDS sequence (opt1) from hemagglutinin__InfluenzaA__ABD16571
augaagaccaucaucgcccugagcuacaucuucugccucguggucgcccagaagcugcccggcaacgacaacuccaccgcgacgcugugccucgggcaccacgccgugccgaacggcaccaucgugaagaccaucaccaacgaccagaucgaggucacgaacgccaccgagcuggugcagagcuccagcaccgggcgcaucugcaacagcccccaccggauccuggacggcaagaacugcacccucaucgacgcccugcugggggacccccacugcgacuccuuccagaacaaggagugggaccucuucguggagcgcuccaaggccuacagcaacugcuaccccuacgacgucccggacuacgcgucccugcggagccugguggccuccagcggcacgcucgaguucaucaacgaggacuucaacuggaccggcguggcccaguccgggggcagcuacgccugcaagcgcggguccgucaacagcuucuucucccggcugaacuggcugcacgagagcgaguacaaguaccccgcgcucaacgugaccaugcccaacaacggcaaguucgacaagcuguacaucuggggcgugcaccaccccuccaccgaccgcgagcagacgaaccuguacguccgggccagcgggcgcgugaccgugagcaccaagcggucccagcagaccgucaucccgaacaucggcagccgccccugggugcgggggcucuccagccgcaucuccaucuacuggacgaucgugaagcccggcgacauccugcugaucaacagcaccgggaaccucaucgcgccccggggcuacuucaagauccgcaccggcaaguccagcaucaugcgguccgacgccccgaucgggaccugcagcuccgagugcaucacgcccaacggcagcauccccaacgacaagcccuuccagaacgucaaccgcaucaccuacggggccugcccgcgguacgugaagcagaacacccugaagcuggccaccggcaugcgcaacgugcccgagaagcagacgcgggggaucuucggcgccaucgccggcuucaucgagaacgggugggagggcauggucgacgggugguacggcuuccgccaccagaacuccgaggggaccggccaggccgccgaccucaagagcacccaggcggccaucgaccagaucaacggcaagcugaaccggcugaucgagaagaccaacgagaaguuccaccagaucgagaaggaguucuccgagguggaggggcgcauccaggaccucgagaaguacguggaggacacgaagaucgaccuguggagcuacaacgccgagcugcucgucgcccuggagaaccagcacaccaucgaccugaccgacuccgagaugaacaagcuguucgagaagacccgcaagcagcuccgggagaacgccgaggacaugggcaacgggugcuucaagaucuaccacaagugcgacaacgcgugcaucggcagcauccgcaacgggacguacgaccacgacguguaccgggacgaggcccugaacaaccgcuuccagaucaagggcgucgagcucaaguccggcuacaaggacuggauccuguggaucagcuucgccaucagcugcuuccugcucugcguggugcugcugggguucaucaugugggccugccagaagggcaacauccggugcaacaucugcaucuga

SEQ ID NO: 64753 - RNA, 1701 nt, Artificial Sequence
  derived and/or modified CDS sequence (opt1) from hemagglutinin__InfluenzaA__ABD16718
augaagaccaucaucgcccugagcuacaucuucugccucguguucgcccagaagcugcccggcaacgacaacuccaccgcgacgcugugccucgggcaccacgccgucccgaacggcacccuggugaagaccaucaccaacgaccagaucgaggugacgaacgccaccgagcugguccagagcuccagcaccgggcgcaucugcgacagcccccaccggauccucgacggcaagaacugcacccugaucgacgcccugcucggggacccccacugcgacggcuuccagaacgagaagugggaccuguucaucgagcgcagcaaggccuucuccaacugcuaccccuacgacgugccggacuacgcgagccugcggucccucguggccagcuccggcacgcuggaguucaucaacgagggguucaacuggaccggcgucacccagagcgggggcuccuacgccugcaagcgcgggagcgugaacuccuucuucagccggcugaacuggcucuacgaguccgaguacaaguaccccgcccugaacgugaccaugcccaacaacggcaaguucgacaagcuguacaucuggggcguccaccaccccaucacggagaaggagcagaccaaccucuacgugcgcgcgagcgggcgggugaccgucuccaccaagcgcagccagcagacggugaucccgaacaucggcagccggcccugggugcgcgggcuguccagccggaucuccaucuacuggaccaucgucaagcccggcgacauccugcucaucaacagcaccggcaaccugaucgcgccccgcggguacuucaagauccggaccggcaaguccagcaucaugcgcuccgacgccccgaucgggacgugcagcuccgagugcaucacccccaacggcagcauccccaacgacaagcccuuccagaacgugaacaagaucaccuacggggccugcccgcgguacgugaagcagaacacccugaagcucgccacgggcaugcgcaacguccccgagaagcagacccggggcaucuucggggccaucgccggcuucaucgagaacgggugggagggcaugguggacgggugguacggcuuccgccaccagaacuccgagggcaccgggcaggccgccgaccugaaguccacccaggccgcgaucgaccagaucaacggcaagcugaaccggcucaucgagaagacgaacgagaaguuccaccagaucgagaaggaguucuccgagguggaggggcgcauccaggaccuggagaaguacgucgaggacaccaagaucgaccuguggagcuacaacgccgagcuccugguggcccuggagaaccagcacaccaucgaccucaccgacuccgagaugaacaagcuguucgagaagacgcggaagcagcugcgcgagaacgccgaggacaugggcaacgggugcuucaagaucuaccacaagugcgacaacgccugcaucggcagcauccgcaacggcaccuacgaccacgacguguaccgggacgaggcgcucaacaaccgcuuccagaucaagggggucgagcugaaguccggcuacaaggacuggauccuguggaucagcuucgccaucuccugcuuccuccugugcgugguccugcucggguucaucaugugggccugccagaagggcaacauccggugcaacaucugcaucuga

SEQ ID NO: 64754 - RNA, 1701 nt, Artificial Sequence
  derived and/or modified CDS sequence (opt1) from hemagglutinin__InfluenzaA__ABD16729
augaagaccaucaucgcccugagcuacaucuucugccucguguucgcccagaagcugcccggcaacgacaacuccaccgcgacgcugugccucgggcaccacgccgucccgaacggcacccuggugaagaccaucaccaacgaccagaucgaggugacgaacgccaccgagcugguccagagcuccagcaccgggcgcaucugcgacagcccccaccggauccucgacggcaagaacugcacccugaucgacgcccugcucggggacccccacugcgacggcuuccagaacgagaagugggaccuguucguggagcgcagcaaggccuucuccaacugcuaccccuacgacgugccggacuacgcgagccugcggucccucgucgccagcuccggcacgcuggaguucaucaacgagggguucaacuggaccggcgugacccagaacgggggcagcuacacgugcaagcgcggguccgugaacagcuucuucucccggcugaacuggcucuacgagagcgaguccaaguaccccguccugaacgugaccaugcccaacaacggcaaguucgacaagcuguacaucuggggcgugcaccaccccagcaccgacaaggagcagaccaaccucuacguccgcgccuccgggaaggugaccgugagcacgaagcggagccagcagaccgucaucccgaacaucggcucccgccccugggugcgggggcugagcucccgcaucagcaucuacuggaccaucgugaagcccggcgacauccugcucaucaacuccaccggcaaccugaucgcgccccggggguacuucaagauccgcacgggcaagagcuccaucaugcggagcgacgccccgaucgggaccugcuccagcgagugcaucacccccaacggcuccauccccaacgacaagcccuuccagaacgucaacaagaucaccuacggggccugcccgcgcuacgugaagcagaacacgcugaagcucgccaccggcaugcggaacgugcccgagaagcagacccgcggcaucuucggggccaucgccggcuucaucgagaacgggugggagggcauggucgacgggugguacggcuuccggcaccagaacagcgagggcaccgggcaggcggccgaccugaaguccacgcaggccgccaucgaccagaucaacggcaagcugaaccgccucaucgagaagaccaacgagaaguuccaccagaucgagaaggaguucagcgagguggaggggcggauccaggaccuggagaaguacguggaggacaccaagaucgaccugugguccuacaacgccgagcuccuggucgcgcuggagaaccagcacaccaucgaccucacggacagcgagaugaacaagcuguucgagaagacccgcaagcagcugcgggagaacgccgaggacaugggcaacgggugcuucaagaucuaccacaagugcgacaacgccugcaucggcuccauccgcaacggcaccuacgaccacgacguguaccgcgacgaggcccucaacaaccgguuccagaucaagggggucgagcugaaguccggcuacaaggacuggauccuguggaucuccuucgccaucagcugcuuccuccugugcguggugcugcucggguucaucaugugggcgugccagaagggcaacauccgcugcaacaucugcaucuga

SEQ ID NO: 64755 - RNA, 1701 nt, Artificial Sequence
  derived and/or modified CDS sequence (opt1) from hemagglutinin__InfluenzaA__ABD16751
augaagaccaucaucgcccugagcuacaucuucugccucguguucgcccaggaccugcccggcaacgacaacuccaccgcgacgcugugccucgggcaccacgccgucccgaacggcacccuggugaagaccaucaccaacgaccagaucgaggugacgaacgccaccgagcugguccacagcuccagcaccgggaagaucugcgacaacccccaccgcauccucgacggcaucaacugcacccugaucgacgcccugcucggggacccccacugcgacggcuuccagaacgagaagugggaccuguucguggagcgguccaaggccuucagcaacugcuaccccuacgacgugccggacuacgcgucccugcgcagccucgucgccuccagcggcacgcuggaguucaucaacgagggguucaacuggaccggcgugacccagaacgggggcuccagcgccugcaagcgggggcccgacaacggcuucuucucccgccugaacuggcucuacaagagcggcuccaccuaccccgugcagaacgucacgaugcccaacaacgacaacagcgacaagcuguacaucuggggcgugcaccacccguccaccgacaaggagcagaccgaccuguacgugcaggccagcgggaaggucaccguguccacgaagcggagccagcagaccgugauccccaacgucgggagccgccccugggugcggggccucuccagccgcguguccaucuacuggaccaucgucaagcccggcgacauccuggugaucaacagcaacgggaaccugaucgcgccgcggggcuacuucaagaugcgcaccgggaaguccagcaucaugcgguccgacgcccccaucggcacgugcagcuccgagugcaucacccccaacgggagcauccccaacgacaagccguuccagaacgugaacaagaucaccuacggcgccugccccaaguacgucaagcagaacacccucaagcuggccacgggcaugcgcaacgugcccgagaagcagacccgggggaucuucggcgccaucgcgggguucaucgagaacggcugggaggggaugaucgacggcugguacggcuuccgccaccagaacuccgaggggaccggccaggccgccgaccucaagagcacccaggccgccaucgaccagaucaacgggaagcugaaccgggugaucgagaagacgaacgagaaguuccaccagaucgagaaggaguucuccgaggucgagggccgcauccaggaccuggagaaguacguggaggacaccaagaucgaccuguggagcuacaacgcggagcuccuggucgcccuggagaaccagcacaccaucgaccucaccgacuccgagaugaacaagcuguucgagaagacgcggcgccagcugcgggagaacgccgaggacauggggaacggcugcuucaagaucuaccacaagugcgacaacgccugcaucggcagcauccgcaacgggaccuacgaccacgacguguaccgggacgaggcccucaacaaccgcuuccagaucaagggcguggagcugaaguccggguacaaggacuggauccuguggaucagcuucgcgaucuccugcuuccuccugugcgucgugcugcucggcuucaucaugugggccugccagaagggcaacauccgcugcaacaucugcaucuga

SEQ ID NO: 64756 - RNA, 1701 nt, Artificial Sequence; identical to SEQ ID NO: 64617
  derived and/or modified CDS sequence (opt1) from hemagglutinin__InfluenzaA__ABD16762

SEQ ID NO: 64757 - RNA, 1701 nt, Artificial Sequence; identical to SEQ ID NO: 64329
  derived and/or modified CDS sequence (opt1) from hemagglutinin__InfluenzaA__ABD17323

SEQ ID NO: 64758 - RNA, 1701 nt, Artificial Sequence; identical to SEQ ID NO: 64586
  derived and/or modified CDS sequence (opt1) from hemagglutinin__InfluenzaA__ABD38134

SEQ ID NO: 64759 - RNA, 1698 nt, Artificial Sequence; identical to SEQ ID NO: 64325
  derived and/or modified CDS sequence (opt1) from hemagglutinin__InfluenzaA__ABD60779

SEQ ID NO: 64760 - RNA, 1701 nt, Artificial Sequence
  derived and/or modified CDS sequence (opt1) from hemagglutinin__InfluenzaA__ABD60790
augaagaccaucaucgcccugagcuacaucuucugccucgugcugggccaggacuuccccgggaacgacaacuccaccgccacgcugugccucggccaccacgcggucccgaacgggacccuggugaagaccaucaccaacgaccagaucgaggugacgaacgccaccgagcugguccagagcuccagcaccggcaagaucugcaacaacccccaccgcauccucgacgggaucgacugcacccugaucgacgcccugcucggcgacccccacugcgacggcuuccagaacgagacgugggaccuguucguggagcgguccaaggccuucagcaacugcuaccccuacgacgugccggacuacgccucccugcgcagccucgucgcguccagcgggacccuggaguucaucaacgagggcuucaccuggaccggggugacgcagaacggcggguccaacgccugcaagcggggccccgacagcggcuucuucucccgccugaacuggcucuacaagagcggguccaccuaccccgugcugaacgucaccaugcccaacaacgacaacuucgacaagcuguacaucuggggcgugcaccacccgagcaccgaccaggagcagacgucccucuacgugcaggccagcgggcgggucaccguguccaccaagcgcagccagcagaccaucauccccaacaucggcagccggcccugggugcgcggccuguccagccggaucuccaucuacuggacgaucgucaagcccggggacauccugaucaucaacagcaacggcaaccucaucgccccgcgcggguacuucaagaugcggaccggcaaguccagcaucaugcgcuccgacgcgcccaucgggaccugcaucagcgagugcaucacccccaacggcuccauccccaacgacaagccguuccagaacgugaacaagaucacguacggcgccugccccaaguacgugaagcagaacacccugaagcuggccaccgggaugcggaacguccccgagaagcagacccgcggcaucuucggggccaucgccggcuucaucgagaacgggugggagggcaugaucgacggcugguacggguuccggcaccagaacagcgagggcacggggcaggcggccgaccucaaguccacccaggccgccaucgaccagaucaacggcaagcugaaccgcaucaucgagaagaccaacgagaaguuccaccagaucgagaaggaguucagcgagguggaggggcggauccaggaccuggagaaguacguggaggacaccaagaucgaccucugguccuacaacgccgagcugcuggucgcgcucgagaaccagcacacgaucgaccugaccgacagcgagaugaacaagcuguucgagaagacccgccggcagcuccgcgagaacgccgaggacaugggcaacggcugcuucaagaucuaccacaagugcgacaacgccugcaucggguccauccggaacggcaccuacgaccacgacguguaccgcgacgaggcccugaacaaccgcuuccagaucaaggggguggagcucaagagcggcuacaaggacuggauccuguggaucuccuucgccaucagcugcuuccugcugugcgucgugcuccugggcuucaucaugugggcgugccagaaggggaacauccggugcaacaucugcaucuga

SEQ ID NO: 64761 - RNA, 1701 nt, Artificial Sequence
  derived and/or modified CDS sequence (opt1) from hemagglutinin__InfluenzaA__ABD60801
augaagaccaucaucgcccugagcuacauccucugccugguguucgcccagaagcugcccggcaacgacaacuccaccgcgacgcucugccuggggcaccacgccgucccgaacggcacccuggugaagaccaucaccaacgaccagaucgaggugacgaacgccaccgagcucguccagagcuccagcaccgggcgccugugcgacagcccccaccggauccuggacggcaagaacugcacccucaucgacgcccugcugggggacccccacugcgacggcuuccagaacaaggagugggaccucuucguggagcgcagcaaggccuacuccaacugcuaccccuacgacgugccggacuacgcgagccugcggucccuggucgccagcuccggcacgcucgaguucaucaacgaggacuucaacuggaccgggguggcccaggacggcgggagcuacgccugccgccggggcuccgugaacagcuucuucucccgccugaacuggcugcacaagcucgaguacaaguaccccgcgcugaacgucaccaugcccaacaacgggaaguucgacaagcuguacaucuggggcgugcaccaccccagcaccgacuccgaccagacgagccucuacgugcgggccuccggccgcgucaccgugagcaccaagcggagccagcagaccgugaucccgaacaucgggucccgccccuggguccggggccagagcucccgcaugagcaucuacuggacgaucgugaagcccggggacauccugcugaucaacuccaccggcaaccucaucgcgccccggggcuacuucaagauccgcaacgggaaguccuccaucaugcggagcgacgccccgaucggcaacugcuccagcgagugcaucacccccaacggguccauccccaacgacaagcccuuccagaacgugaaccgcaucaccuacggcgccugcccgcgguacgucaagcagcacacgcugaagcuggccaccgggaugcgcaacgugcccgagaagcagacccggggcaucuucggcgccaucgccggguucaucgagaacggcugggaggggaugguggacggcugguacggguuccgccaccagaacagcgagggcaccggccaggccgccgaccucaaguccacgcaggcggccaucgaccagaucaacgggaagcugaaccggcugaucgagaagaccaacgagaaguuccaccagaucgagaaggaguucagcgaggucgagggccgcauccaggaccucgagaaguacguggaggacaccaagaucgaccugugguccuacaacgccgagcugcucguggcccuggagaaccagcacaccaucgaccugacggacagcgagaugaacaagcuguucgagcgcacccggaagcagcuccgcgagaacgccgaggacauggggaacggcugcuucaagaucuaccacaagugcgacaacgcgugcaucggguccauccggaacggcaccuacgaccacgacgucuaccgcgacgaggcccugaacaaccgguuccagaucaagggcguggagcucaagagcggguacaaggacuggauccuguggaucuccuucgccaucagcugcuuccugcucugcgucgugcugcugggcuucaucaugugggccugccagaaggggaacauccgcugcaacaucugcaucuga

SEQ ID NO: 64762 - RNA, 1701 nt, Artificial Sequence
  derived and/or modified CDS sequence (opt1) from hemagglutinin__InfluenzaA__ABD60812
augaagaccaucaucgcccugagcuacauccucugccugaucuucgcccagaagcugcccggcaacgacaacuccaccgcgacgcucugccuggggcaccacgccgugccgaacggcaccaucgucaagaccaucaccaacgaccagaucgaggugacgaacgccaccgagcuggugcagagcuccagcaccgggggcaucugcgacagcccccaccagauccucgacggggagaacugcacccugaucgacgcccugcucggcgacccccagugcgacggcuuccagaacaagaagugggaccuguucgucgagcgcagcaaggccuacuccaacugcuaccccuacgacgugccggacuacgcgagccugcggucccucguggccagcuccgggacgcuggaguucaacaacgagagcuucaacuggaccggcgucacccagaacgggaccuccagcgccugcaagcgccgguccaacaacagcuucuucucccgccugaacuggcucacgcaccugaaguucaaguaccccgcccugaacgugaccaugcccaacaacgagaaguucgacaagcucuacaucuggggcgugcaccaccccgggaccgacaacgaccagaucuuccuguacgcgcaggccagcggccggaucaccgucuccacgaagcgcagccagcagaccgugaucccgagcaucggcucccggccccgcgugcggaacauccccagccgcaucuccaucuacuggaccaucgucaagcccggggacauccugcucaucaacagcaccggcaaccugaucgccccgcggggguacuucaagauccgcuccggcaagagcuccaucaugcggagcgacgcccccaucggcaagugcaacuccgagugcaucacgcccaacgggagcauccccaacgacaagccguuccagaacgugaaccgcaucaccuacggcgccugcccccgguacgugaagcagaacacccugaagcucgcgaccgggaugcgcaacguccccgagaagcagacgcggggcaucuucggggccaucgccggcuucaucgagaacggcugggaggggaugguggacggcugguacggguuccgccaccagaacuccgagggcaucgggcaggccgccgaccugaaguccacccaggcggccaucaaccagaucaacggcaagcugaaccggcucaucggcaagaccaacgagaaguuccaccagaucgagaaggaguucuccgagguggaggggcgcauccaggaccuggagaaguacgucgaggacaccaagaucgaccuguggagcuacaacgccgagcuccugguggcccuggagaaccagcacacgaucgaccucaccgacuccgagaugaacaagcuguucgagcggaccaagaagcagcugcgcgagaacgccgaggacaugggcaacgggugcuucaagaucuaccacaagugcgacaacgcgugcaucggcagcauccgcaacgggaccuacgaccacgacguguaccgggacgaggcccucaacaaccgcuuccagaucaagggcgucgagcugaaguccggcuacaaggacuggauccuguggaucagcuucgccaucuccugcuuccuccugugcguggcccugcucggguucaucaugugggccugccagaagggcaacauccggugcaacaucugcaucuga

SEQ ID NO: 64763 - RNA, 1701 nt, Artificial Sequence; identical to SEQ ID NO: 64657
  derived and/or modified CDS sequence (opt1) from hemagglutinin__InfluenzaA__ABD60823

SEQ ID NO: 64764 - RNA, 1701 nt, Artificial Sequence
  derived and/or modified CDS sequence (opt1) from hemagglutinin__InfluenzaA__ABD60845
augaagaccaucaucgcccugagcuacauccucugccugguguucgcccagaagcugcccgucaacgacaacuccaccgcgacgcucugccugggccaccacgccgugccgaacgggacccuggugaagaccaucaccaacgaccacaucgaggucacgaacgccaccgagcucgugcagagcuccagcaccggccgcaucugcgacagcccccaccagauccuggacggggagaacugcacccugaucgacgcccuccugggcgacccccacugcgacggguuccagaacaaggagugggaccuguucguggagcggagcacggccuacuccaacugcuaccccuacgacgucccggacuacgcgagccuccgcucccugguggccagcuccggcacccuggaguucaacaacgagagcuucaacuggaccggcguggaccagaacgggaccuccagcgccugcaagcggcgcuccacgaaguccuucuucucccggcucaacuggcugcaccagcugaaguacaaguaccccgcccucaacgucaccaugcccaacaacgagaaguucgacaagcuguacaucuggggcgugcaccaccccagcaccgacuccgaccagaucagccuguacgcgcaggccagcgggcgcgugaccgucuccacgaagcggagccagcagaccgugaccccgaacaucggcucccgccccugggugcgcggggucagcucccggaucagcaucuacuggaccaucgugaagcccggcgacauccuccugaucaacuccacgggcaaccugaucgcgccccggggguacuucaagauccgcagcggcaaguccagcaucaugcgguccaacgcccucaucgggaagugcaacagcgagugcaucaccccgaacggcuccauccccaacgacaagcccuuccagaacgugaaccgcaucaccuacggcgccugcccccgguacgucaagcagaacacccugaagcuggccacggggaugcgcaacgugccggagaagcagacccggggcaucuucggggccaucgccggcuucaucgagaacgggugggagggcaugguggacggcugguacggguuccgccaccagaacagcgagggcaccgggcaggccgccgaccucaaguccacccaggcggccaucaaccagaucaacggcaagcugaaccggcugaucgagaagacgaacgagaaguuccaccagaucgagaaggaguucagcgaggucgaggggcgcauccaggaccucgagaaguacguggaggacaccaagaucgaccugugguccuacaacgccgagcugcucguggcccuggagaaccagcacaccaucgaccugaccgacagcgagaugaacaagcuguucgagcggacgcgcaagcagcuccgcgagaacgccgaggacaugggcaacggcugcuucaagaucuaccacaagugcgacaacgcgugcaucggguccauccggaacggcaccuacgaccacgacgucuaccgcgacgaggcccugaacaaccgguuccagaucaaggggguggagcucaagagcggcuacaaggacuggauccuguggaucagcuucgccaucuccugcuuccugcucugcgucgugcugcugggguucaucaugugggccugccagaagggcaacauccgcugcaacaucugcaucuga

SEQ ID NO: 64765 - RNA, 1698 nt, Artificial Sequence
  derived and/or modified CDS sequence (opt1) from hemagglutinin__InfluenzaA__ABD60878
augaaggugaagcugcucguccugcugugcaccuucaccgccacguacgccgacaccaucugcaucggcuaccacgcgaacaacagcaccgacaccguggacacggugcucgagaagaacgucaccgugacccacuccgugaaccugcuggaggacagccacaacgggaagcucugccugcugaagggcaucgcgccccuccagcuggggaacugcuccgucgccggcuggauccuggggaacccggagugcgagcuccugaucagcaaggaguccuggagcuacaucguggagacccccaaccccgagaacggcacgugcuaccccggcuacuucgccgacuacgaggagcugcgcgagcagcucuccagcguguccagcuucgagcgguucgagaucuucccgaaggaguccagcuggcccaaccacaccgucaccgggguguccgccagcugcucccacaacggcaagagcuccuucuaccgcaaccugcuguggcucaccgggaagaacggccuguaccccaaccugagcaaguccuacgccaacaacaaggagaaggaggugcucguccuguggggcgugcaccacccgcccaacaucggggaccagaaggcccuguaccacacggagaacgccuacgugagcgucgugagcucccacuacagccggcgcuucacccccgagaucgccaagcggcccaaggugcgcgaccaggagggccggaucaacuacuacuggacccuccuggagcccggggacaccaucaucuucgaggcgaacggcaaccugaucgccccgcgcuacgccuucgcccucucccggggguucggcagcggcaucaucacguccaacgcccccauggacgagugcgacgcgaagugccagacgccccagggggccaucaacagcucccugcccuuccagaacguccacccggugaccaucggcgagugccccaaguacgugcgcagcgccaagcugcggauggucaccgggcuccgcaacauccccuccauccagagccggggccuguucggggccaucgccggcuucaucgagggcggguggaccggcaugguggacgggugguacggcuaccaccaccagaacgagcagggguccggcuacgcggccgaccagaaguccacccagaacgccaucaacggcaucaccaacaaggugaacagcgucaucgagaagaugaacacccaguucacggccguggggaaggaguucaacaagcuggagcgccggauggagaaccucaacaagaaggucgacgacggcuuccuggacaucuggaccuacaacgccgagcugcucgugcugcuggagaacgagcgcacccucgacuuccacgacagcaacgugaagaaccuguacgagaaggucaagucccagcugaagaacaacgcgaaggagaucgggaacggcugcuucgaguucuaccacaagugcaacaacgagugcauggagagcgugaagaacgggaccuacgacuaccccaaguacuccgaggagagcaagcucaaccgggagaagaucgacggcgugaagcuggaguccaugggcgucuaccagauccuggccaucuacagcacgguggccagcucccucgugcugcuggucagccucggggccaucuccuucuggaugugcagcaacggcucccugcagugccgcaucugcaucuga

SEQ ID NO: 64766 - RNA, 1698 nt, Artificial Sequence
  derived and/or modified CDS sequence (opt1) from hemagglutinin__InfluenzaA__ABD60889
augaaggugaagcugcucguccugcugugcaccuucaccgccacguacgccgacaccaucugcaucggcuaccacgcgaacaacagcaccgacaccguggacacggugcucgagaagaacgucaccgugacccacuccgugaaccugcuggaggacagccacaacgggaagcucugccugcugaagggcaucgcgccccuccagcuggggaacugcuccgucgccggcuggauccuggggaacccggagugcgagcuccugaucagcaaggaguccuggagcuacaucguggagacccccaaccccgagaacggcacgugcuaccccggcuacuucgccgacuacgaggagcugcgcgagcagcucuccagcguguccagcuucgagcgguucgagaucuucccgaaggaguccagcuggcccaaccacaccgucaccgggguguccgccagcugcucccacaacggcaagagcuccuucuaccgcaaccugcuguggcucaccgggaagaacggccuguaccccaaccugagcaaguccuacgccaacaacaaggagaaggaggugcucguccuguggggcgugcaccacccgcccaacaucggggaccagcgggcccuguaccacacggagaacgccuacgugagcgucgugagcucccacuacagccgccgguucacccccgagaucgccaagcgccccaaggugcgggaccaggagggccgcaucaacuacuacuggacccuccuggagcccggggacaccaucaucuucgaggcgaacggcaaccugaucgccccgcgguacgccuucgcccucucccgcggguucggcagcggcaucaucacguccaacgcccccauggacgagugcgacgcgaagugccagacgccccagggggccaucaacagcucccugcccuuccagaacguccacccggugaccaucggcgagugccccaaguacgugcggagcgccaagcugcgcauggucaccgggcuccggaacauccccuccauccagagccgcggccuguucggggccaucgccggcuucaucgagggcggguggaccggcaugguggacgggugguacggcuaccaccaccagaacgagcagggguccggcuacgcggccgaccagaaguccacccagaacgccaucaacggcaucaccaacaaggugaacagcgucaucgagaagaugaacacccaguucacggccguggggaaggaguucaacaagcuggagcggcgcauggagaaccucaacaagaaggucgacgacggcuuccuggacaucuggaccuacaacgccgagcugcucgugcugcuggagaacgagcggacccucgacuuccacgacagcaacgugaagaaccuguacgagaaggucaagucccagcugaagaacaacgcgaaggagaucgggaacggcugcuucgaguucuaccacaagugcaacaacgagugcauggagagcgugaagaacgggaccuacgacuaccccaaguacuccgaggagagcaagcucaaccgcgagaagaucgacggcgugaagcuggaguccaugggcgucuaccagauccuggccaucuacagcacgguggccagcucccucgugcugcuggucagccucggggccaucuccuucuggaugugcagcaacggcucccugcagugccggaucugcaucuga

SEQ ID NO: 64767 - RNA, 1698 nt, Artificial Sequence
  derived and/or modified CDS sequence (opt1) from hemagglutinin__InfluenzaA__ABD60900
augaaggugaagcgccugguccuccugugcaccuucaccgccacguacgccgacaccaucugcaucggcuaccacgcgaacaacagcaccgacaccguggacacggugcuggagaagaacgucaccgugacccacuccgugaaccuccuggaggacagccacaacgggaagcugugccuccugaagggcaucgcgccccugcagcucgggaacugcuccgucgccggcuggauccuggggaacccggagugcgagcugcucaucagcaaggaguccuggagcuacaucguggagacccccaaccccgagaacggcacgugcuaccccggcuacuucgccgacuacgaggagcugcgggagcagcuguccagcguguccagcuucgagcgcuucgagaucuucccgaaggaguccagcuggcccaaccacaccgucaccgggguguccgccagcugcucccacaacggcaagagcuccuucuaccggaaccuccuguggcugaccgggaagaacggccucuaccccaaccugagcaaguccuacgccaacaacaaggagaaggaggugcugguccucuggggcgugcaccacccgcccaacaucggggaccagaaggcccuguaccacacggagaacgccuacgugagcgucgugagcucccacuacagccgccgguucacccccgagaucgccaagcgccccaaggugcgggaccaggagggccgcaucaacuacuacuggacccugcucgagcccggggacaccaucaucuucgaggcgaacggcaaccugaucgccccgcgguacgccuucgcccugucccgcggguucggcagcggcaucaucacguccaacgcccccauggacgagugcgacgcgaagugccagacgccccagggggccaucaacagcucccuccccuuccagaacguccacccggugaccaucggcgagugccccaaguacgugcggagcgccaagcugcgcauggucaccgggcugcggaacauccccuccauccagagccgcggccucuucggggccaucgccggcuucaucgagggcggguggaccggcaugguggacgggugguacggcuaccaccaccagaacgagcagggguccggcuacgcggccgaccagaaguccacccagaacgccaucaacggcaucaccaacaaggugaacagcgucaucgagaagaugaacacccaguucacggccguggggaaggaguucaacaagcuggagcggcgcauggagaaccugaacaagaaggucgacgacggcuuccucgacaucuggaccuacaacgccgagcugcuggugcuccuggagaacgagcggacccuggacuuccacgacagcaacgugaagaaccucuacgagaaggucaagucccagcugaagaacaacgcgaaggagaucgggaacggcugcuucgaguucuaccacaagugcaacaacgagugcauggagagcgugaagaacgggaccuacgacuaccccaaguacuccgaggagagcaagcugaaccgcgagaagaucgacggcgugaagcucgaguccaugggcgucuaccagauccuggccaucuacagcacgguggccagcucccuggugcuccuggucagccugggggccaucuccuucuggaugugcagcaacggcucccuccagugccggaucugcaucuga

SEQ ID NO: 64768 - RNA, 1698 nt, Artificial Sequence
  derived and/or modified CDS sequence (opt1) from hemagglutinin__InfluenzaA__ABD60911
augaaggccaagcugauggugcuccugugcaccuucaccgccacguacgcggacaccaucugcaucggcuaccacgccaacaacagcaccgacaccgucgacacggugcuggagaagaacgugaccgucacccacuccgugaaccuccuggaggacagccacaacgggaagcugugccuccugaagggcaucgcgccccugcagcucgggaacugcuccguggccggcuggauccuggggaacccggagugcgagcugcucaucagcaaggaguccuggagcuacaucgucgagacccccaaccccgagaacggcacgugcuaccccggcuacuucgccgacuacgaggagcugcgcgagcagcuguccagcguguccagcuucgagcgguucgagaucuucccgaaggaguccagcuggcccaaccacaccgugaccggggucuccgccagcugcucccacaacggcaagagcuccuucuaccgcaaccuccuguggcugaccgggaagaacggccucuaccccaaccugagcaaguccuacgccaacaacaaggagaaggaggugcuggugcucuggggcguccaccacccgcccaacaucggggaccagcgggcccuguaccacacggagaacgccuacgugagcguggucagcucccacuacagccgccgguucacccccgagaucgcgaagcgccccaaggugcgggaccaggagggccgcaucaacuacuacuggacccugcucgagcccggggacaccaucaucuucgaggccaacggcaaccugaucgccccgugguacgccuucgcccugucccggggguucggcagcggcaucaucacguccaacgcgcccaugggggagugcgacgccaagugccagacgccccagggcgccaucaacagcucccuccccuuccagaacgugcacccggucaccaucggggagugccccaaguacgugcgcagcgccaagcugcggauggugaccggccugcgcaacauccccuccauccagagccggggccucuucggggccaucgcgggcuucaucgagggcggguggaccgggauggucgacggcugguacggguaccaccaccagaacgagcagggcuccggcuacgccgccgaccagaaguccacccagaacgccaucgacgggaucaccaacaaggugaacagcaucaucgagaagaugaacacccaguucacggccgugggcaaggaguucaacaagcuggagcgccggauggagaaccugaacaagaaggucgacgacggguuccucgacaucuggaccuacaacgcggagcugcuggugcuccuggagaacgagcgcacccuggacuuccacgacagcaacgucaagaaccucuacgagaaggugaagucccagcugaagaacaacgccaaggagaucggcaacgggugcuucgaguucuaccacaagugcaacaacgagugcauggagagcgugaagaacggcaccuacgacuaccccaaguacuccgaggagagcaagcugaaccgggagaagaucgacggcgucaagcucgaguccauggggguguaccagauccuggccaucuacagcacgguggccagcucccugguccuccuggugagccugggcgccaucuccuucuggaugugcagcaacgggucccuccagugccgcaucugcaucuga

SEQ ID NO: 64769 - RNA, 1701 nt, Artificial Sequence; identical to SEQ ID NO: 64056
  derived and/or modified CDS sequence (opt1) from hemagglutinin__InfluenzaA__ABD60922

SEQ ID NO: 64770 - RNA, 1701 nt, Artificial Sequence
  derived and/or modified CDS sequence (opt1) from hemagglutinin__InfluenzaA__ABD60933
augaaggccaagcugcucgugcugcugugcgcccucagcgcgaccgacgccgacaccaucugcaucggcuaccacgccaacaacuccacggacaccgucgacaccgugcuggagaagaacgugaccgucacgcacagcgugaaccugcucgaggacucccacaacgggaagcugugccgccugaagggcaucgcgccccuccagcuggggaagugcagcaucgccggcuggauccuggggaacccggagugcgagucccucgugagcaagaaguccuggagcuacaucgccgagacccccaacuccgagaacgggaccugcuaccccggcuacuucgccgacuacgaggagcugcgggagcagcugagcuccgucagcuccuucgagcgcuucgagaucuuccccaaggagcggagcuggccgaagcacaacgugacccgcggcgugacggccuccugcagccacaagggcaaguccagcuucuaccggaaccuccuguggcugaccgagaagaacggguccuaccccaaccucagcaagagcuacgucaacaacaaggagaaggaggugcuggugcuguggggcguccaccaccccuccaacaucgaggaccagaagaccaucuaccgcaaggagaacgccuacgugagcguggucuccagcaacuacaaccggcgcuucacccccgagaucgcggagcggccgaaggugcgcgggcaggccggccggaucaacuacuacuggacgcuccuggagcccggcgacaccaucaucuucgaggccaacgggaaccugaucgcccccuggcacgccuucgcgcucaaccgcggcuucggguccggcaucaucaccagcaacgccuccauggacgagugcgacaccaagugccagacgccccagggcgccaucaacagcucccugccguuccagaacauccaccccgugaccaucggggagugccccaaguacguccggagcaccaagcugcgcauggugaccggccuccggaacauccccuccauccagagccgcgggcuguucggcgccaucgccggguucaucgagggcggcuggacggggaugaucgacggcugguacggguaccaccaccagaacgagcagggcuccggguacgcggccgaccagaaguccacccagaacgccaucaacggcaucaccaacaaggugaacagcgucaucgagaagaugaacacccaguucacggccgugggcaaggaguucaacaagcuggagaagcggauggagaaccucaacaagaagguggacgacggguuccuggacaucuggaccuacaacgccgagcugcucguccugcuggagaacgagcgcacccucgacuuccacgacagcaacgugaagaaccuguacgagaaggucaagucccagcugaagaacaacgcgaaggagaucggcaacgggugcuucgaguucuaccacaagugcaacaacgagugcauggagagcgugaagaacggcaccuacgacuacccgaaguacuccgaggagagcaagcucaaccgggagaagaucgacggggugaagcuggagagcaugggcgucuaccagauccuggccaucuacuccacgguggccagcucccucgugcugcuggucagccucggcgccaucuccuucuggaugugcagcaacgggucccugcagugccgcaucugcaucuga

SEQ ID NO: 64771 - RNA, 1701 nt, Artificial Sequence
  derived and/or modified CDS sequence (opt1) from hemagglutinin__InfluenzaA__ABD60944
augaaggccaagcugcucgugcugcugugcgcccucagcgcgaccgacgccgacaccaucugcaucggcuaccacgccaacaacuccacggacaccgucgacaccgugcuggagaagaacgugaccgucacgcacagcgugaaccugcucgaggacucccacaacgggaagcugugccgccugaagggcaucgcgccccuccagcuggggaagugcagcaucgccggcuggauccuggggaacccggagugcgagucccucuucagcaagaaguccuggagcuacaucgccgagacccccaacuccgagaacgggaccugcuaccccggcuacuucgccgacuacgaggagcugcgggagcagcugagcuccgugagcuccuucgagcgcuucgagaucuuccccaaggagcggagcuggccgaagcacaacgucacccgcggcgugacggccuccugcagccacaagggcaaguccagcuucuaccggaaccuccuguggcugaccgagaagaacggguccuaccccaaccucagcaagagcuacgugaacaacaaggagaaggagguccuggugcuguggggcgugcaccaccccuccaacaucgaggaccagaagaccaucuaccgcaaggagaacgccuacgucagcgugguguccagcaacuacaaccggcgcuucacccccgagaucgcggagcggccgaagguccgcgggcaggccggccggaucaacuacuacuggacgcuccuggagcccggcgacaccaucaucuucgaggccaacgggaaccugaucgcccccugguacgccuucgcgcucucccgcggcuucgggagcggcaucaucaccuccaacgccagcauggacgagugcgacaccaagugccagacgccccagggcgccaucaacuccagccugccguuccagaacgugcaccccgugaccaucggggagugccccaaguacguccgguccaccaagcugcgcauggugaccggccuccggaacauccccagcauccagucccgcgggcuguucggcgccaucgccggguucaucgagggcggcuggacggggaugaucgacggcugguacggguaccaccaccagaacgagcagggcagcggguacgcggccgaccagaaguccacccagaacgccaucaacggcaucaccaacaaggugaacagcgucaucgagaagaugaacacccaguucacggccgugggcaaggaguucaacaagcuggagaagcggauggagaaccucaacaagaagguggacgacggguuccuggacaucuggaccuacaacgccgagcugcucguccugcuggagaacgagcgcacccucgacuuccacgacuccaacgugaagaaccuguacgagaaggucaagagccagcugaagaacaacgcgaaggagaucggcaacgggugcuucgaguucuaccacaagugcaacaacgagugcauggaguccgugaagaacggcaccuacgacuacccgaaguacagcgaggagagcaagcucaaccgggagaagaucgacggggugaagcuggaguccaugggcgucuaccagauccuggccaucuacagcacgguggccuccagccucgugcugcuggucucccucggcgccaucagcuucuggaugugcuccaacgggagccugcagugccgcaucugcaucuga

SEQ ID NO: 64772 - RNA, 1701 nt, Artificial Sequence
  derived and/or modified CDS sequence (opt1) from hemagglutinin__InfluenzaA__ABD60955
augaaggccaagcugcucgugcugcugugcgccuucaccgcgaccuacgccgacacgaucugcaucggcuaccacgccaacaacagcaccgacaccgucgacaccgugcucgagaagaacgugacggucacccacuccgugaaccugcuggaggacagccacaacgggaagcucugccgccugaagggcaucgcgccccugcagcucgggaacugcuccguggccggcuggauccuggggaacccgaagugcgagagccuguucuccaaggagagcugguccuacaucgccgagacccccaaccccgagaacgggaccugcuaccccggcuacuucgccgacuacgaggagcuccgggagcagcugagcuccgucagcuccuucgagcgcuucgagaucuucccgaaggagagcuccuggcccaaccacacggugaccaagggggugaccaccagcugcucccacaacggcaagagcuccuucuaccggaaccugcucuggcugacggagaagaacgggcuguaccccaaccucagcaaguccuacgucaacaacaaggagaaggaggugcuggugcuguggggcguccaccaccccagcaacauccgcgaccagcgggccaucuaccacaccgagaacgccuacgugagcguggucuccagccacuacucccgccgguucaccccggagaucgcgaagcgccccaaggugcgggaccaggaggggcgcaucaacuacuacuggacccuccuggagcccggcgacacgaucaucuucgaggccaacggcaaccugaucgcccccugguacgccuucgcccucagccggggguucggcuccgggaucaucaccagcaacgcguccauggacgagugcgacgccaagugccagaccccgcagggcgccaucaacagcucccugcccuuccagaacgugcaccccgucaccaucggcgagugccccaaguacgugcgcagcacgaagcugcggauggugaccgggcuccgcaacaucccguccauccagagccggggccuguucggggccaucgccggcuucaucgagggcggcuggaccggcaugaucgacgggugguacggcuaccaccaccagaacgagcagggguccggcuacgcggccgaccagaaguccacccagaacgccaucaacgggaucacgaacaaggucaacagcgugaucgagaagaugaacacccaguucaccgccgugggcaaggaguucaacaagcuggagcgccggauggagaaccucaacaagaaggucgacgacggcuuccuggacaucuggaccuacaacgccgagcugcucgugcugcuggagaacgggcgcacgcucgacuuccacgacagcaacgucaagaaccuguacgagaaggugaagucccagcugaagaacaacgcgaaggagaucggcaacgggugcuucgaguucuaccacaagugcaacaacgagugcauggagagcgugaagaacggcaccuacgacuaccccaaguacuccgaggagagcaagcucaaccgggggaagaucgacggcgucaagcuggagagcaugggcguguaccagauccuggccaucuacuccaccguggccagcucccucguccugcuggugagccucggggccaucuccuucuggaugugcagcaacggcucccugcagugccgcaucugcaucuga

SEQ ID NO: 64773 - RNA, 1701 nt, Artificial Sequence; identical to SEQ ID NO: 64056
  derived and/or modified CDS sequence (opt1) from hemagglutinin__InfluenzaA__ABD61260

SEQ ID NO: 64774 - RNA, 1701 nt, Artificial Sequence; identical to SEQ ID NO: 64056
  derived and/or modified CDS sequence (opt1) from hemagglutinin__InfluenzaA__ABD61271

SEQ ID NO: 64775 - RNA, 1701 nt, Artificial Sequence; identical to SEQ ID NO: 64310
  derived and/or modified CDS sequence (opt1) from hemagglutinin__InfluenzaA__ABD61282

SEQ ID NO: 64776 - RNA, 1701 nt, Artificial Sequence; identical to SEQ ID NO: 64540
  derived and/or modified CDS sequence (opt1) from hemagglutinin__InfluenzaA__ABD61293

SEQ ID NO: 64777 - RNA, 1701 nt, Artificial Sequence; identical to SEQ ID NO: 64762
  derived and/or modified CDS sequence (opt1) from hemagglutinin__InfluenzaA__ABD61304

SEQ ID NO: 64778 - RNA, 1701 nt, Artificial Sequence; identical to SEQ ID NO: 64674
  derived and/or modified CDS sequence (opt1) from hemagglutinin__InfluenzaA__ABD61315

SEQ ID NO: 64779 - RNA, 1701 nt, Artificial Sequence; identical to SEQ ID NO: 64096
  derived and/or modified CDS sequence (opt1) from hemagglutinin__InfluenzaA__ABD61337

SEQ ID NO: 64780 - RNA, 1701 nt, Artificial Sequence
  derived and/or modified CDS sequence (opt1) from hemagglutinin__InfluenzaA__ABD61348
augaagaccaucaucgcccugagcuacauccucugccugguguucgcccagaagcugcccgucaacgacaacuccaccgcgacgcucugccugggccaccacgccgugccgaacgggacccuggugaagaccaucaccaacgaccacaucgaggucacgaacgccaccgagcucgugcagagcuccagcaccggccgcaucugcgacagcccccaccagauccuggacggggagaacugcacccugaucgacgcccuccugggcgacccccacugcgacggguuccagaacaaggagugggaccuguucguggagcggagcacggccuacuccaacugcuaccccuacgacgucccggacuacgcgagccuccgcucccugguggccagcuccggcacccuggaguucaacaacgagagcuucaacuggaccggcguggcccagaacgggaccuccagcgccugcaagcggcgcuccaucaagagcuucuucucccggcucaacuggcugcaccagcugaaguacaaguaccccgcgcucaacgucacgaugcccaacaacgagaaguucgacaagcuguacaucuggggcgugcaccaccccagcaccgacuccgaccagaucagccuguacgcccaggccagcgggcgcgugaccgucuccaccaagcggagccagcagacggugaucccgaacaucggcucccgccccugggugcgcggggucagcucccggaucagcaucuacuggaccaucgugaagcccggcgacauccuccugaucaacuccaccggcaaccugaucgcgccccggggguacuucaagauccgcagcggcaaguccagcaucaugcgguccaacgccccgaucgggaagugcaacagcgagugcaucacccccaacggcuccauccccaacaacaagcccuuccagaacgugaaccgcaucacguacggcgccugcccgcgguacgucaagcagaacacccucaagcuggccaccgggaugcgcaacgugcccgagaagcagacccggggcaucuucggggccaucgccggcuucaucgagaacgggugggagggcaugguggacggcugguacggguuccgccaccagaacagcgagggcacggggcaggccgcggaccugaaguccacccaggccgccaucaaccagaucaacggcaagcucaaccggcugaucgagaagaccaacgagaaguuccaccagaucgagaaggaguucagcgaggucgaggggcgcauccaggaccuggagaaguacguggaggacaccaagaucgaccucugguccuacaacgccgagcugcugguggcccucgagaaccagcacacgaucgaccugaccgacagcgagaugaacaagcuguucgagcggacccgcaagcagcuccgcgagaacgcggaggacaugggcaacggcugcuucaagaucuaccacaagugcgacaacgccugcaucggguccauccggaacggcaccuacgaccacgacgucuaccgcgacgaggcccugaacaaccgguuccagaucaaggggguggagcugaaguccggcuacaaggacuggauccucuggaucagcuucgccaucuccugcuuccugcugugcgucgugcuccugggguucaucaugugggccugccagaagggcaacauccgcugcaacaucugcaucuga

SEQ ID NO: 64781 - RNA, 1701 nt, Artificial Sequence; identical to SEQ ID NO: 64096
  derived and/or modified CDS sequence (opt1) from hemagglutinin__InfluenzaA__ABD61359

SEQ ID NO: 64782 - RNA, 1701 nt, Artificial Sequence; identical to SEQ ID NO: 64734
  derived and/or modified CDS sequence (opt1) from hemagglutinin__InfluenzaA__ABD61370

SEQ ID NO: 64783 - RNA, 1701 nt, Artificial Sequence; identical to SEQ ID NO: 64674
  derived and/or modified CDS sequence (opt1) from hemagglutinin__InfluenzaA__ABD61381

SEQ ID NO: 64784 - RNA, 1701 nt, Artificial Sequence
  derived and/or modified CDS sequence (opt1) from hemagglutinin__InfluenzaA__ABD61392
augaagaccaucaucgcccugagcuacauccucugccugguguucgcccagaagcugcccggcaacgacaacuccaccgcgacgcucugccuggggcaccacgccgucccgaacggcacccuggugaagaccaucaccaacgaccagaucgaggugacgaacgccaccgagcucguccagagcuccagcaccgggggcaucugcgacagcccccaccagauccuggacggggagaacugcacccugaucgacgcccuccugggcgacccccacugcgacggcuuccagaacaaggagugggaccuguucguggagcgcagcaaggccuacuccaacugcuaccccuacgacgugccggacuacgcgagccuccggucccuggucgccagcuccgggacgcuggaguucaacaacgagagcuucaacuggaccggcguggcccagaacgggaccuccagcgccugcaagcgcggcuccaacaagagcuucuucucccggcucaacuggcugcaccagcugaaguacaaguaccccgcgcucaacgugaccaugcccaacaacgagaaguucgacaagcuguacaucuggggcguccaccaccccagcacggacuccgaccagaucagccuguacgcccaggccccggggcgcgugaccgugagcaccaagcggucccagcagaccgucauccccaacaucggcagccgccccugggugcgcgggguguccagccggaucuccaucuacuggacgaucgucaagcccggcgacauccuccugaucaacugcaccgggaaccugaucgccccgcggggcuacuucaagauccgcagcggcaaguccagcaucaugcgguccgacgccagcaucgggaagugcaacuccgagugcaucacccccaacggcagcauccccaacgacaagcccuuccagaacgugaaccgcaucaccuacggggcgugcccgcgguacgugaagcagaacacgcucaagcuggccaccggcaugcgcaacguccccgagaagcagacccgggggaucuucggcgccaucgccggcuucaucgagaacgggugggagggcaugguggacgggugguacggcuuccgccaccagaacuccgaggggaccggccaggccgcggaccugaaguccacgcaggccgccaucaaccagaucaacggcaagcucaaccggcugaucgagaagaccaacgagaaguuccaccagaucgagaaggaguucuccgagguggaggggcgcauccaggaccuggagaaguacgucgaggacaccaagaucgaccucuggagcuacaacgccgagcugcugguggcccucgagaaccagcacaccaucgaccugacggacuccgagaugaacaagcuguucgagcggaccaagaagcagcuccgcgagaacgcggaggacaugggcaacgggugcuucaagaucuaccacaagugcgacaacgccugcaucggcagcauccggaacgggaccuacgaccacgacguguaccgcgacgaggcccugaacaaccgcuuccagaucaagggcgucgagcugaaguccggcuacaaggacuggauccucuggaucagcuucgccaucagcugcuuccugcugugcgugguccuccugggguucaucaugugggccugccagaagggcaacauccggugcaacaucugcaucuga

SEQ ID NO: 64785 - RNA, 1701 nt, Artificial Sequence; identical to SEQ ID NO: 64764
  derived and/or modified CDS sequence (opt1) from hemagglutinin__InfluenzaA__ABD61403

SEQ ID NO: 64786 - RNA, 1701 nt, Artificial Sequence
  derived and/or modified CDS sequence (opt1) from hemagglutinin__InfluenzaA__ABD61529
augaagaccaucaucgcccugagcuacaucuucugccucguguucgcccagaagcugcccggcaacgacaacuccaccgcgacgcugugccucgggcaccacgccgucccgaacggcacccuggugaagaccaucaccaacgaccagaucgaggugacgaacgccaccgagcugguccagagcuccagcaccgggcgcaucugcgacagcccccaccggauccucgacggcaagaacugcacccugaucgacgcccugcucggggacccccacugcgacggcuuccagaacgagaagugggaccuguucguggagcgcagcaaggccuucuccaacugcuaccccuacgacgugccggacuacgcgagccugcggucccucgucgccagcuccggcacgcuggaguucaucaacgagggguucaacuggaccggcgugacccagagcgggggcuccuacgccugcaagcgcgggagcgugaacuccuucuucagccggcugaacuggcucuacgaguccgagagcaaguaccccguccugaacgugaccaugcccaacaacggcaaguucgacaagcuguacaucuggggcgugcaccaccccuccacggacaaggagcagaccaaccucuacguccgcgccagcgggcgggugaccgugagcaccaagcgcucccagcagacggucaucccgaacaucggcagccggcccugggugcgcgggcuguccagccggaucuccaucuacuggaccaucgugaagcccggcgacauccugcucaucaacagcaccggcaaccugaucgcgccccgcggguacuucaagauccggaccggcaaguccagcaucaugcgcuccgacgccccgaucgggacgugcagcuccgagugcaucacccccaacggcagcauccccaacgacaagcccuuccagaacgucaacaagaucaccuacggggccugcccgcgguacgugaagcagaacacccugaagcucgccacgggcaugcgcaacgugcccgagaagcagacccggggcaucuucggggccaucgcgggcuucaucgagaacgggugggagggcauggucgacgggugguacggcuuccgccaccagaacuccgagggcaccgggcaggccgccgaccugaaguccacccaggccgccaucgaccagaucaacggccggcugaaccgccucaucgagaagacgaacgagaaguuccaccagaucgagaaggaguucuccgagguggaggggcggauccaggaccuggagaaguacguggaggacaccaagaucgaccuguggagcuacaacgcggagcuccuggucgcccuggagaaccagcacaccaucgaccucaccgacuccgagaugaacaagcuguucgagaagacgcgcaagcagcugcgcgagaacgccgaggacaugggcaacgggugcuucaagaucuaccacaagugcgacaacgccugcaucggcagcauccggaacggcaccuacgaccacgacguguaccgcgacgaggcccucaacaaccgguuccagaucaagggggucgagcugaaguccggcuacaaggacuggauccuguggaucagcuucgcgaucagcugcuuccuccugugcguggugcugcucggguucaucaugugggccugccagaagggcaacauccgcugcaacaucugcaucuga

SEQ ID NO: 64787 - RNA, 1698 nt, Artificial Sequence; identical to SEQ ID NO: 64765
  derived and/or modified CDS sequence (opt1) from hemagglutinin__InfluenzaA__ABD61540

SEQ ID NO: 64788 - RNA, 1701 nt, Artificial Sequence
  derived and/or modified CDS sequence (opt1) from hemagglutinin__InfluenzaA__ABD61757
augaagaccaucaucgcccugagcuacaucuucugccucguguucgcccaggaccugcccggcaacgacaacuccaccgcgacgcugugccucgggcaccacgccgucccgaacggcacccuggugaagaccaucaccaacgaccagaucgaggugacgaacgccaccgagcugguccagagcuccagcaccgggaagaucugcgacaacccccaccgcauccucgacggcaucaacugcacccugaucgacgcccugcucggggacccccacugcgacggcuuccagaacgagaagugggaccuguucguggagcgguccaaggccuucagcaacugcuaccccuacgacgugccggacuacgcgucccugcgcagccucgucgccuccagcggcacgcuggaguucaucaacgagggguucaacuggaccggcgugacccagaacgggggcuccagcgccugcaagcgggggcccgacaacggcuucuucucccgccugaacuggcucuacaagagcggcuccaccuaccccgugcagaacgucacgaugcccaacaacgacaacagcgacaagcuguacaucuggggcgugcaccacccguccaccgacaaggagcagaccgaccuguacgugcaggccagcgggaaggucaccguguccacgaagcggagccagcagaccgugauccccaacgucgggagccgccccugggugcggggccucuccagccgcguguccaucuacuggaccaucgucaagcccggcgacauccuggugaucaacagcaacgggaaccugaucgcgccgcggggcuacuucaagaugcgcaccgggaaguccagcaucaugcgguccgacgcccccaucggcacgugcagcuccgagugcaucacccccaacgggagcauccccaacgacaagccguuccagaacgugaacaagaucaccuacggcgccugccccaaguacgucaagcagaacacccucaagcuggccacgggcaugcgcaacgugcccgagaagcagacccgggggaucuucggcgccaucgcgggguucaucgagaacggcugggaggggaugaucgacggcugguacggcuuccgccaccagaacuccgaggggaccggccaggccgccgaccucaagagcacccaggccgccaucgaccagaucaacgggaagcugaaccgggugaucgagaagacgaacgagaaguuccaccagaucgagaaggaguucuccgaggucgagggccgcauccaggaccuggagaaguacguggaggacaccaagaucgaccuguggagcuacaacgcggagcuccuggucgcccuggagaaccagcacaccaucgaccucaccgacuccgagaugaacaagcuguucgagaagacgcggcgccagcugcgggagaacgccgaggacauggggaacggcugcuucaagaucuaccacaagugcgacaacgccugcaucggcagcauccgcaacgggaccuacgaccacgacguguaccgggacgaggcccucaacaaccgcuuccagaucaagggcguggagcugaaguccggguacaaggacuggauccuguggaucagcuucgcgaucuccugcuuccuccugugcgucgugcugcucggcuucaucaugugggccugccagaagggcaacauccgcugcaacaucugcaucuga

SEQ ID NO: 64789 - RNA, 1701 nt, Artificial Sequence
  derived and/or modified CDS sequence (opt1) from hemagglutinin__InfluenzaA__ABD61777
augaagaccaucaucgcccugagcuacaucuucugccucggcuucgcccagaagcugcccgggaacgacaacuccaccgcgacgcugugccucggccaccacgccgugccgaacgggacccuggucaagaccaucaccaacgaccagaucgaggugacgaacgccaccgagcuggugcagagcuccagcaccggccgcaucugcgacagcccccaccggauccucgacgggaagaacugcacccugaucgacgcccugcucggcgacccccacugcgacggcuuccagaacgagaagugggaccuguucgucgagcgcagcaaggccuucuccaacugcuaccccuacgacgugccggacuacgcgagccugcggucccucguggccagcuccgggacgcuggaguucaucaacgagggcuucaacuggaccggggucacccagagcggcggguccuacgccugcaagcgcggcagcgugaacuccuucuucagccggcugaacuggcucuacgaguccgagagcaaguaccccgcccugaacgugaccaugcccaacaacggcaaguucgacaagcuguacaucuggggcguccaccaccccuccacggacaaggagcagaccaaccucuacgugcgcgcgagcgggcgggugaccgucagcaccaagcgcucccagcagacggugaucccgaacaucgggagccggcccugggugcgcggccuguccagccggaucuccaucuacuggaccaucgucaagcccggcgacauccugcucaucaacagcaccgggaaccugaucgcgccccgcggcuacuucaagauccggaccgggaaguccagcaucaugcgcuccgacgccccgaucggcacgugcagcuccgagugcaucacccccaacgggagcauccccaacgacaagcccuuccagaacgugaacaagaucaccuacggcgccugcccgcgguacgugaagcagaacacccugaagcucgccacgggcaugcgcaacguccccgagaagcagacccgggggaucuucggcgccaucgccggguucaucgagaacggcugggaggggaugguggacggcugguacggcuuccgccaccagaacuccgaggggaccggccaggccgccgaccugaaguccacccaggccgcgaucgaccagaucaacgggaagcugaaccggcucaucgagaagacgaacgagaaguuccaccagaucgagaaggaguucuccgagguggagggccgcauccaggaccuggagaaguacgucgaggacaccaagaucgaccuguggagcuacaacgccgagcuccugguggcccuggagaaccagcacaccaucgaccucaccgacuccgagaugaacaagcuguucgagaagacgcggaagcagcugcgcgagaacgccgaggacauggggaacggcugcuucaagaucuaccacaagugcgacaacgccugcaucggcagcauccgcaacgggaccuacgaccacgacguguaccgggacgaggcgcucaacaaccgcuuccagaucaagggcgucgagcugaaguccggguacaaggacuggauccuguggaucagcuucgccaucagcugcuuccuccugugcgugguccugcucggcuucaucaugugggccugccagaagggcaacauccggugcaacaucugcaucuga

SEQ ID NO: 64790 - RNA, 1701 nt, Artificial Sequence
  derived and/or modified CDS sequence (opt1) from hemagglutinin__InfluenzaA__ABD77598
augaagaccaucaucgcccugagcuacauccucugccugguguucgcccagaagcugcccgucaacgacaacuccaccgcgacgcucugccugggccaccacgccgugccgaacgggacccuggugaagaccaucaccaacgaccacaucgaggucacgaacgccaccgagcucgugcagagcucccccaccggccgcaucugcgacagcccccaccagauccuggacggggagaacugcacccugaucgacgcccuccugggcgacccccacugcgacggguuccagaacaaggagugggaccuguucguggagcgguccacggccuacagcaacugcuacccguacgacguccccgacuacgcgucccuccgcagccugguggccuccagcggcacccuggaguucaacaacgaguccuucaacuggaccggcguggcccagaacgggaccagcuccgccugcaagcggcgcagcaucaaguccuucuucagccggcucaacuggcugcaccagcugaaguacaaguaccccgcgcucaacgucacgaugcccaacaacgagaaguucgacaagcuguacaucuggggcgugcaccacccguccaccgacagcgaccagaucucccuguacgcccaggccagcgggcgcgugaccgucagcaccaagcggucccagcagacggugauccccaacaucggcagccgccccugggugcgcggggucuccagccggaucuccaucuacuggaccaucgugaagcccggcgacauccuccugaucaacagcaccggcaaccugaucgccccgcggggguacuucaagauccgcuccggcaagagcuccaucaugcggagcaacgcccccaucgggaagugcaacuccgagugcaucacccccaacggcagcauccccaacgacaagccguuccagaacgugaaccgcaucacguacggcgcgugcccccgguacgucaagcagaacacccucaagcuggccaccgggaugcgcaacgugcccgagaagcagacccggggcaucuucggggccaucgccggcuucaucgagaacgggugggagggcaugguggacggcugguacggguuccgccaccagaacuccgagggcacggggcaggccgcggaccucaagagcacccaggccgccaucaaccagaucaacggcaagcugaaccggcugaucgagaagaccaacgagaaguuccaccagaucgagaaggaguucuccgaggucgaggggcgcauccaggaccuggagaaguacguggaggacaccaagaucgaccucuggagcuacaacgccgagcugcugguggcccucgagaaccagcacacgaucgaccugaccgacuccgagaugaacaagcuguucgagcggacccgcaagcagcuccgcgagaacgcggaggacaugggcaacggcugcuucaagaucuaccacaagugcgacaacgccugcaucgggagcauccggaacggcaccuacgaccacgacgucuaccgcgacgaggcccugaacaaccgguuccagaucaaggggguggagcugaaguccggcuacaaggacuggauccucuggaucagcuucgccaucagcugcuuccugcugugcgucgugcuccugggguucaucaugugggccugccagaagggcaacauccgcugcaacaucugcaucuga

SEQ ID NO: 64791 - RNA, 1701 nt, Artificial Sequence; identical to SEQ ID NO: 64674
  derived and/or modified CDS sequence (opt1) from hemagglutinin__InfluenzaA__ABD77609

SEQ ID NO: 64792 - RNA, 1701 nt, Artificial Sequence; identical to SEQ ID NO: 64674
  derived and/or modified CDS sequence (opt1) from hemagglutinin__InfluenzaA__ABD77620

SEQ ID NO: 64793 - RNA, 1701 nt, Artificial Sequence; identical to SEQ ID NO: 64674
  derived and/or modified CDS sequence (opt1) from hemagglutinin__InfluenzaA__ABD77631

SEQ ID NO: 64794 - RNA, 1701 nt, Artificial Sequence; identical to SEQ ID NO: 64674
  derived and/or modified CDS sequence (opt1) from hemagglutinin__InfluenzaA__ABD77642

SEQ ID NO: 64795 - RNA, 1701 nt, Artificial Sequence; identical to SEQ ID NO: 64674
  derived and/or modified CDS sequence (opt1) from hemagglutinin__InfluenzaA__ABD77653

SEQ ID NO: 64796 - RNA, 1698 nt, Artificial Sequence; identical to SEQ ID NO: 64765
  derived and/or modified CDS sequence (opt1) from hemagglutinin__InfluenzaA__ABD77708

SEQ ID NO: 64797 - RNA, 1698 nt, Artificial Sequence
  derived and/or modified CDS sequence (opt1) from hemagglutinin__InfluenzaA__ABD77719
augaaggugaagcugcucguccugcugugcaccuucaccgccacguacgccgacaccaucugcaucggcuaccacgcgaacaacagcaccgacaccguggacacggugcucgagaagaacgucaccgugacccacuccgugaaccugcuggaggacagccacaacgggaagcucugccugcugaagggcaucgcgccccuccagcuggggaacugcuccgucgccggcuggauccuggggaacccggagugcgagcuccugaucagcaaggaguccuggagcuacaucguggagacccccaaccccgagaacggcacgugcuaccccggcuacuucgccgacuacgaggagcugcgcgagcagcucuccagcguguccagcuucgagcgguucgagaucuucccgaaggaguccagcuggcccaaccacaccgucaccgggguguccgccagcugcucccacaacggcaagagcuccuucuaccgcaaccugcuguggcucaccgggaagaacggccuguaccccaaccugagcaaguccuacgccaacaacaaggagaaggaggugcucguccuguggggcgugcaccacccgcccaacaucggggaccagcgggcccuguaccacacggagaacgccuacgugagcgucgugagcucccacuacagccgccgguucacccccgagaucgccaagcgccccaaggugcggaaccaggagggccgcaucaacuacuacuggacccuccuggagcccggggacaccaucaucuucgaggcgaacggcaaccugaucgccccgcgguacgccuucgcccucucccgcggguucggcagcggcaucaucacguccaacgcccccauggacgagugcgacgcgaagugccagacgccccagggggccaucaacagcucccugcccuuccagaacguccacccggugaccaucggcgagugccccaaguacgugcggagcgccaagcugcgcauggucaccgggcuccggaacauccccuccauccagagccgcggccuguucggggccaucgccggcuucaucgagggcggguggaccggcaugguggacgggugguacggcuaccaccaccagaacgagcagggguccggcuacgcggccgaccagaaguccacccagaacgccaucaacggcaucaccaacaaggugaacagcgucaucgagaagaugaacacccaguucacggccguggggaaggaguucaacaagcuggagcggcgcauggagaaccucaacaagaaggucgacgacggcuuccuggacaucuggaccuacaacgccgagcugcucgugcugcuggagaacgagcggacccucgacuuccacgacagcaacgugaagaaccuguacgagaaggucaagucccagcugaagaacaacgcgaaggagaucgggaacggcugcuucgaguucuaccacaagugcaacaacgagugcauggagagcgugaagaacgggaccuacgacuaccccaaguacuccgaggagagcaagcucaaccgcgagaagaucgacggcgugaagcuggaguccaugggcgucuaccagauccuggccaucuacagcacgguggccagcucccucgugcugcuggucagccucggggccaucuccuucuggaugugcagcaacggcucccugcagugccggaucugcaucuga

SEQ ID NO: 64798 - RNA, 1698 nt, Artificial Sequence; identical to SEQ ID NO: 64765
  derived and/or modified CDS sequence (opt1) from hemagglutinin__InfluenzaA__ABD77730

SEQ ID NO: 64799 - RNA, 1701 nt, Artificial Sequence; identical to SEQ ID NO: 64674
  derived and/or modified CDS sequence (opt1) from hemagglutinin__InfluenzaA__ABD77752

SEQ ID NO: 64800 - RNA, 1701 nt, Artificial Sequence; identical to SEQ ID NO: 64674
  derived and/or modified CDS sequence (opt1) from hemagglutinin__InfluenzaA__ABD77763

SEQ ID NO: 64801 - RNA, 1701 nt, Artificial Sequence
  derived and/or modified CDS sequence (opt1) from hemagglutinin__InfluenzaA__ABD77774
augaagaccaucaucgcccugagcuacauccucugccugguguucgcccagaagcugcccgucaacgacaacuccaccgcgacgcucugccugggccaccacgccgugccgaacgggacccuggugaagaccaucaccaacgacaacaucgaggucacgaacgccaccgagcucgugcagagcuccagcaccggccgcaucugcgacagcccccaccagauccuggacggggagaacugcacccugaucgacgcccuccugggcgacccccacugcgacggguuccagaacaaggagugggaccuguucguggagcggagcacggccuacuccaacugcuaccccuacgacgucccggacuacgcgagccuccgcucccugguggccagcuccggcacccuggaguucaacaacgagagcuucaacuggaccggcguggaccagaacgggaccuccagcgccugcaagcggcgcuccaacaagagcuucuucucccggcucaacuggcugcaccagcugaaguacaaguaccccgcccucaacgucacgaugcccaacaacgagaaguucgacaagcuguacaucuggggcgugcaccaccccagcaccgacuccgaccagaucagccuguacgcgcaggccagcgggcgcgugaccgucuccaccaagcggagccagcagacggugaucccgaacaucggcucccgccccugggugcgcggggucagcucccggaucagcaucuacuggaccaucgugaagcccggcgacauccuccugaucaacuccaccggcaaccugaucgcgccccggggguacuucaagauccgcagcggcaaguccagcaucaugcgguccaacgccccgaucgggaagugcaacagcgagugcaucacccagaacggcuccauccccaacgacaagcccuuccagaacgugaaccgcaucacguacggcgccugcccccgguacgucaagcagaacacccucaagcuggccaccgggaugcgcaacgugccggagaagcagacccggggcaucuucggggccaucgccggcuucaucgagaacgggugggagggcaugguggacggcugguacggguuccgccaccagaacagcgagggcacggggcaggccgccgaccugaaguccacccaggcggccaucaaccagaucaacggcaagcucaaccggcugaucgagaagaccaacgagaaguuccaccagaucgagaaggaguucagcgaggucgaggggcgcauccaggaccuggagaaguacguggaggacaccaagaucgaccucugguccuacaacgccgagcugcugguggcccucgagaaccagcacacgaucgaccugaccgacagcgagaugaacaagcuguucgagcggacccgcaagcagcuccgcgagaacgccgaggacaugggcaacggcugcuucaagaucuaccacaagugcgacaacgcgugcaucggguccauccggaacggcaccuacgaccacgacgucuaccgcgacgaggcccugaacaaccgguuccagaucaaggggguggagcugaaguccggcuacaaggacuggauccucuggaucagcuucgccaucuccugcuuccugcugugcgucgugcuccugggguucaucaugugggccugccagaagggcaacauccgcugcaacaucugcaucuga

SEQ ID NO: 64802 - RNA, 1701 nt, Artificial Sequence; identical to SEQ ID NO: 64801
  derived and/or modified CDS sequence (opt1) from hemagglutinin__InfluenzaA__ABD77785

SEQ ID NO: 64803 - RNA, 1701 nt, Artificial Sequence
  derived and/or modified CDS sequence (opt1) from hemagglutinin__InfluenzaA__ABD77807
augaaggccaagcugcucauccugcugugcgcccucagcgcgaccgacgccgacaccaucugcaucggcuaccacgccaacaacuccacggacaccguggacaccguccuggagaagaacgugaccgugacgcacagcgucaaccugcucgaggacucccacaacgggaagcugugccgccugaagggcaucgcgccccuccagcuggggaagugcaacaucgccggcuggauccuggggaacccggagugcgagagccuccuguccaagcggagcugguccuacaucgccgagacccccaacagcgagaacgggaccugcuaccccggcgacuucgccgacuacgaggagcugcgcgagcagcucuccagcguguccagcuucgagcgguucgagaucuuccccaaggagcgcuccuggccgaagcacaacaucacccgcggggugacggccgccugcagccacgcgggcaaguccagcuucuacaagaaccugcuguggcucaccgagaccaacggguccuaccccaagcugagcaaguccuacgucaacaacaaggagaaggaggugcuggugcucuggggcguccaccaccccagcaacaucgaggaccagaagacccuguaccggaaggagaacgccuacgugagcguggucuccagcaacuacaaccggcgcuucacgcccgagaucgccgagcggccgaaggugcgcgggcaggccggccggaugaacuacuacuggacccugcucgagcccggcgacaccaucaucuucgaggccaacgggaaccugaucgcgcccugguacgccuucgcccugucccgcggcuucgggagcggcaucaucaccuccaacgccagcauggacgagugcgacacgaagugccagacgccccagggcgccaucaacuccagccucccguuccagaacauccaccccgugaccaucggggagugccccaaguacgucaaguccaccaagcugcggauggugaccggccugcgcaacauccccagcauccagucccggggccucuucggcgcgaucgccggguucaucgagggcggcuggaccgggaugaucgacggcugguacggguaccaccaccagaacgagcagggcagcggguacgccgccgaccagaaguccacccagaacgccaucaacggcaucaccaacaaggugaacagcgucaucgagaagaugaacacgcaguucaccgcggugggcaaggaguucaacaagcuggagaagcgcauggagaaccugaacaagaagguggacgacggguuccucgacaucuggaccuacaacgccgagcugcugguccuccuggagaacgagcggacccuggacuuccacgacuccaacgugaagaaccucuacgagaaggugaagaaccagcugcgcaacaacgccaaggagaucggcaacgggugcuucgaguucuaccacaagugcaacaacgagugcauggagagcgucaagaacggcacguacgacuacccgaaguacuccgaggagagcaagcugaaccgggagaagaucgacggggugaagcucgaguccaugggcgucuaccagauccuggccaucuacagcaccguggccagcucccuggugcuccuggucagccugggcgcgaucuccuucuggaugugcagcaacgggucccuccagugccgcaucugcaucuga

SEQ ID NO: 64804 - RNA, 1701 nt, Artificial Sequence
  derived and/or modified CDS sequence (opt1) from hemagglutinin__InfluenzaA__ABD77818
augaaggccaagcugcucgugcugcugugcgcccucagcgcgaccgacgccgacaccaucugcaucggcuaccacgccaacaacuccacggacaccgucgacaccgugcuggagaagaacgugaccgucacgcacagcgugaaccugcucgaggacucccacaacgggaagcugugccgccugaagggcaucgcgccccuccagcuggggaagugcagcaucgccggcuggauccuggggaacccggagugcgagucccucuucagcaagaaguccuggagcuacaucgccgagacccccaacuccgagaacgggaccugcuaccccggcuacuucgccgacuacgaggagcugcgggagcagcugagcuccgugagcuccuucgagcgcuucgagaucuuccccaaggagagcuccuggccgaagcacaccgucacgcgcggggugaccgccagcugcucccacaagggcaagagcuccuucuaccggaaccuccuguggcugaccgagaagaacgggagcuaccccaaccucagcaaguccuacgugaacaacaaggagaaggagguccuggugcuguggggcgugcaccaccccagcaacaucgaggaccagaagaccaucuaccggaaggagaacgccuacgucuccguggugagcucccacuacaaccgccgguucacgcccgagaucgcgaagcgcccgaagguccgggaccaggaggggcgcaucaacuacuacuggacccuccuggagcccggcgacaccaucaucuucgaggccaacggcaaccugaucgcccccugguacgccuucgcccucagccggggguucggcuccgggaucaucaccagcaacgcguccauggacgagugcgacgccaagugccagacgccccagggcgccaucaacagcucccugccguuccagaacgugcaccccgugaccaucggcgagugccccaaguacguccgcagcaccaagcugcggauggugaccgggcuccgcaacauccccuccauccagagccggggccuguucggggccaucgccggcuucaucgagggcggcuggacgggcaugaucgacgggugguacggcuaccaccaccagaacgagcagggguccggcuacgcggccgaccagaaguccacccagaacgccaucaacgggaucaccaacaaggugaacagcgucaucgagaagaugaacacccaguucacggccgugggcaaggaguucaacaagcuggagaagcgcauggagaaccucaacaagaagguggacgacggcuuccuggacaucuggaccuacaacgccgagcugcucguccugcuggagaacgagcggacccucgacuuccacgacagcaacgugaagaaccuguacgagaaggucaagucccagcucaagagcaacgcgaaggagaucgggaacggcugcuucgaguucuaccacaagugcaacaacgagugcauggagagcgugaagaacgggaccuacgacuacccgaaguacuccgaggagagcaagcugaaccgcgagaagaucgacggcgugaagcuggaguccaugggggucuaccagauccuggccaucuacagcacgguggccuccagccucgugcugcuggucucccucggcgccaucagcuucuggaugugcuccaacggcagccugcagugccggaucugcaucuga

SEQ ID NO: 64805 - RNA, 1701 nt, Artificial Sequence
  derived and/or modified CDS sequence (opt1) from hemagglutinin__InfluenzaA__ABD77829
augaagaccaucaucgcccugagcuacauccucuaccugguguucgcccagaagcugcccggcaacgacaacuccaccgcgacgcucugccuggggcaccacgccgucccgaacggcacccuggugaagaccaucaccaacgaccagaucgaggugacgaacgccaccgagcucguccagagcuccagcaccgggcgccugugcgacagcccccaccggauccuggacggcaagaacugcacccucaucgacgcccugcugggggacccccacugcgacggcuuccagaacaaggagugggaccucuucguggagcgcagcaaggccuacuccgacugcuaccccuacgacgugccggacuacgcgagccugcggucccuggucgccagcuccggcacgcucgaguucaccaacgagggguucaacuggaccggcguggcccagaacgggaccagcuacgccugcaagcgcggcuccgugaaguccuucuucucccggcugaacuggcugcacaagcucgaguacaaguaccccgcgcugaacgucacgaugcccaacaacgacaaguucgacaagcuguacaucuggggcgugcaccaccccagcaccgacuccgaccagaccagccucuacgugcaggccuccgggcgcgucaccgugagcacgaagcggagccagcagaccgugaucccgaacaucggcucccgccccuggguccgcggggugagcucccggaucagcaucuacuggaccaucgugaagcccggcgacauccugcugaucaacuccaccgggaaccucaucgcgccccggggcuacuucaagauccgcagcggcaaguccagcaucaugcgguccgacgccccgaucgggaacugcaacagcgagugcaucacgcccaacggcuccauccccaacgacaagcccuuccagaacgucaaccgcaucaccuacggggccugcccgcgguacgugaagcagaacacccugaagcuggccaccggcaugcgcaacgugcccgagaagcagacgcgggggaucuucggcgccaucgccggcuucaucgagaacgggugggagggcauggucgacgggugguacggcuuccgccaccagaacagcgaggggaccggccaggccgccgaccucaaguccacccaggcggccaucaaccagaucaacggcaagcugaaccggcugaucgagaagaccaacgagaaguuccaccagaucgagaaggaguucagcgagguggaggggcgcauccaggaccucgagaaguacguggaggacacgaagaucgaccugugguccuacaacgccgagcugcucgucgcccuggagaaccagcacaccaucgaccugaccgacagcgagaugaacaagcuguucgagcggacccgcaagcagcuccgcgagaacgccgaggacaugggcaacgggugcuucaagaucuaccacaagugcgacaacgcgugcaucggcuccauccggaacgggacguacgaccacgacguguaccgcgacgaggcccugaacaaccgguuccagaucaagggcgucgagcucaagagcggcuacaaggacuggauccuguggaucuccuucgccaucagcugcuuccugcucugcguggugcugcugggguucaucaugugggccugccagaagggcaacauccgcugcaacaucugcaucuga

SEQ ID NO: 64806 - RNA, 1701 nt, Artificial Sequence
  derived and/or modified CDS sequence (opt1) from hemagglutinin__InfluenzaA__ABD77862
augaagaccaucaucgcccugagcuacauccucugccugguguucgcccagaagcugcccggcaacgacaacuccaccgcgacgcucugccuggggcaccacgccgucccgaacggcacccuggugaagaccaucaccaacgaccagaucgaggugacgaacgccaccgagcucguccagagcuccagcaccgggcgcaucugcgacagcccccaccggauccuggacggcaagaacugcacccugaucgacgcccuccugggggacccccacugcgacggcuuccagaacaaggagugggaccuguucguggagcgcagcaaggccuacuccgacugcuaccccuacgacgugccggacuacgcgagccuccggucccuggucgccagcuccggcacgcuggaguucaccaacgagggguucaacuggaccggcguggcccaggacgggaccagcuacgccugcaagcgcggcuccgugaaguccuucuucucccggcucaacuggcugcacaagcuggaguacaaguaccccgcgcucaacgucacgaugcccaacaacgacaaguucgacaagcuguacaucuggggcgugcaccaccccagcaccgacuccgaccagaccagcaucuacgugcaggccuccgggcgcgucaccgugagcacgaagcggagccagcagaccgugaucccgaacaucggcucccgccccuggguccgcggggugagcucccggaucagcaucuacuggaccaucgugaagcccggcgacauccugcucaucaacuccaccgggaaccugaucgcgccccggggcuacuucaagauccgcagcggcaaguccagcaucaugcgguccgacgccccgaucgggaacugcaacagcgagugcaucacgcccaacggcuccauccccaacgacaagcccuuccagaacgucaaccgcaucaccuacggggccugcccgcgguacgugaagcagaacacccugaagcucgccaccggcaugcgcaacgugcccgagaagcagacgcgggggaucuucggcgccaucgccggcuucaucgagaacgggugggagggcauggucgacgggugguacggcuuccgccaccagaacagcgaggggaccggccaggccgccgaccugaaguccacccaggcggccaucaaccagaucaacggcaagcugaaccggcucaucgagaagaccaacgagaaguuccaccagaucgagaaggaguucagcgagguggaggggcgcauccaggaccuggagaaguacguggaggacacgaagaucgaccugugguccuacaacgccgagcuccuggucgcccuggagaaccagcacaccaucgaccucaccgacagcgagaugaacaagcuguucgagcggacccgcaagcagcugcgcgagaacgccgaggacaugggcaacgggugcuucaagaucuaccacaagugcgacaacgcgugcaucggcuccauccggaacgggacguacgaccacgacguguaccgcgacgaggcccucaacaaccgguuccagaucaagggcgucgagcucaagagcggcuacaaggacuggauccuguggaucuccuucgccaucagcugcuuccugcugugcguggugcugcucggguucaucaugugggccugccagaagggcaacauccgcugcaacaucugcaucuga

SEQ ID NO: 64807 - RNA, 1701 nt, Artificial Sequence
  derived and/or modified CDS sequence (opt1) from hemagglutinin__InfluenzaA__ABD77884
augaagaccaucaucgcccugagcuacauccucugccugguguucgcccagaagcugcccggcaacgacaacuccaccgcgacgcucugccuggggcaccacgccgucccgaacggcacccuggugaagaccaucaccaacgaccagaucgaggugacgaacgccaccgagcucguccaggggagcuccaccggccgcaucugcgacagcccccaccggauccuggacgggaagaacugcacccugaucgacgcccuccugggcgacccccacugcgacggcuuccagaacaaggagugggaccuguucguggagcgcuccaaggccuacagcaacugcuaccccuacgacgugccggacuacgcgucccuccggagccuggucgccuccagcgggacgcuggaguucaacaacgaguccuucaacuggaccggcguggcccagaacgggaccagcuacgccugcaagcgccgguccgucaagagcuucuucucccgccucaacuggcugcacaagcuggaguacaaguaccccgcgcucaacgugaccaugcccaacaacgacaaguucgacaagcuguacaucuggggcgugcaccaccccagcacggacuccgaccagaccagccuguacgugcaggccuccgggcgggucaccgugagcaccaagcgcagccagcagacggugaucccgaacaucggcucccggcccuggguccgcggcgugagcucccggaucagcaucuacuggaccaucgugaagcccggggacauccuccugaucaacuccaccggcaaccugaucgcgccccgcggguacuucaagauccggagcggcaaguccagcaucaugcgcuccgacgccccgaucgacaacugcaacagcgagugcaucacccccaacggcuccauccccaacgacaagcccuuccagaacgucaaccggaucacguacggggccugcccgcgcuacgugaagcagaacacccucaagcuggccaccggcaugcggaacgugcccgagaagcagacccgcgggaucuucggcgccaucgccggguucaucgagaacggcugggagggcauggucgacgggugguacggcuuccggcaccagaacagcgaggggacgggccaggccgccgaccugaaguccacccaggcggccaucaaccagaucaacgggaagcucaaccgccugaucgagaagaccaacgagaaguuccaccagaucgagaaggaguucagcgagguggagggccggauccaggaccuggagaaguacguggaggacaccaagaucgaccucugguccuacaacgccgagcugcuggucgcccucgagaaccagcacacgaucgaccugaccgacagcgagaugaacaagcuguucgagcgcacccgcaagcagcuccgggagaacgccgaggacaugggcaacgggugcuucaagaucuaccacaagugcgacaacgcgugcaucggcuccauccgcaacgggaccuacgaccacgacguguaccgggacgaggcccugaacaaccgcuuccagaucaagggcgucgagcucaagagcggguacaaggacuggauccuguggaucuccuucgccaucagcugcuuccugcugugcguggugcuccugggcuucaucaugugggccugccagaagggcaacauccggugcaacaucugcaucuga

SEQ ID NO: 64808 - RNA, 1701 nt, Artificial Sequence
  derived and/or modified CDS sequence (opt1) from hemagglutinin__InfluenzaA__ABD77895
augaagaccaucaucgcccugagcuacauccucugccugguguucgcccagaagcugcccggcaacgacaacuccaccgcgacgcucugccuggggcaccacgccgucccgaacggcacccuggugaagaccaucaccaacgaccagaucgaggugacgaacgccaccgagcucguccagagcuccagcaccgggcgcaucugcgacagcccccaccggauccuggacggcaagaacugcacccugaucgacgcccuccugggggacccccacugcgacggcuuccagaacaaggagugggaccuguucguggagcgcagcaaggccuacuccaacugcuaccccuacgacgugccggacuacgcgagccuccggucccuggucgccagcuccggcacgcuggaguucaacaacgagagcuucaacuggaccgggguggcccagaacggcaccuccuacgccugcaagcgccggagcgugaaguccuucuucagccgccucaacuggcugcacaagcuggaguacaaguaccccgcgcucaacgucaccaugcccaacaacgacaaguucgacaagcuguacaucuggggcgugcaccaccccuccacggacagcgaccagaccucccuguacgugcaggccagcgggcgggucaccgugagcaccaagcgcucccagcagacggugaucccgaacaucgggagccggcccuggguccgcggcaucuccagccggaucuccaucuacuggaccaucgugaagcccggcgacauccuccugaucaacagcaccgggaaccugaucgcgccccgcggcuacuucaagauccgguccgggaaguccuccaucaugcgcagcgacgccccgaucgacaacugcaacuccgagugcaucacccccaacggcagcauccccaacgacaagcccuuccagaacgugaaccggaucacguacggcgccugcccgcgcuacgucaagcagaacacccucaagcuggccaccgggaugcggaacgugcccgagaagcagacccgcggcaucuucggggccaucgccggcuucaucgagaacgggugggagggcaugguggacggcugguacggguuccggcaccagaacuccgagggcacggggcaggccgccgaccucaagagcacccaggcggccaucaaccagaucuccggcaagcugaaccgccugaucgagaagaccaacgagaaguuccaccagaucgagaaggaguucagcgaggucgaggggcggauccaggaccuggagaaguacguggaggacaccaagaucgaccucugguccuacaacgccgagcugcugguggcccucgagaaccagcacacgaucgaccugaccgacagcgagaugaacaagcuguucgagcgcacccgcaagcagcuccgggagaacgccgaggacaugggcaacggcugcuucaagaucuaccacaagugcgacaacgcgugcaucggguccauccgcaacggcaccuacgaccacgacgucuaccgggacgaggcccugaacaaccgcuuccagaucaaggggguggagcucaagagcggcuacaaggacuggauccuguggaucagcuucgccaucuccugcuuccugcugugcgucgugcuccugggguucaucaugugggccugccagaagggcaacauccggugcaacaucugcaucuga

SEQ ID NO: 64809 - RNA, 1701 nt, Artificial Sequence; identical to SEQ ID NO: 64807
  derived and/or modified CDS sequence (opt1) from hemagglutinin__InfluenzaA__ABD77906

SEQ ID NO: 64810 - RNA, 1698 nt, Artificial Sequence
  derived and/or modified CDS sequence (opt1) from hemagglutinin__InfluenzaA__ABD77917
augaaggugaagcugcucguccugcugugcaccuucaccgccacguacgccgacaccaucugcaucggcuaccacgcgaacaacagcaccgacaccguggacacggugcucgagaagaacgucaccgugacccacuccgugaaccugcuggaggacagccacaacgggaagcucugccugcugaagggcaucgcgccccuccagcuggggaacugcuccgucgccggcuggauccuggggaacccggagugcgagcuccugaucagcaaggaguccuggagcuacaucguggagacccccaaccccgagaacggcacgugcuaccccggcuacuucgccgacuacgaggagcugcgcgagcagcucuccagcguguccagcuucgagcgguucgagaucuucccgaaggaguccagcuggcccaaccacaccgucaccgggguguccgccagcugcucccacaacggcaagagcuccuucuaccgcaaccugcuguggcucaccgggaagaacggccuguaccccaaccugagcaaguccuacgccaacaacaaggagaaggaggugcucguccuguggggcgugcaccacccgcccaacaucgggaaccagaaggcccuguaccacacggagaacgccuacgugagcgucgugagcucccacuacagccggcgcuucacccccgagaucgccaagcggcccaaggugcgcgaccaggagggccggaucaacuacuacuggacccuccuggagcccggggacaccaucaucuucgaggcgaacggcaaccugaucgccccgcgcuacgccuucgcccucucccggggguucggcagcggcaucaucacguccaacgcccccauggacgagugcgacgcgaagugccagacgccccagggggccaucaacagcucccugcccuuccagaacguccacccggugaccaucggcgagugccccaaguacgugcgcagcgccaagcugcggauggucaccgggcuccgcaacauccccuccauccagagccggggccuguucggggccaucgccggcuucaucgagggcggguggaccggcaugguggacgggugguacggcuaccaccaccagaacgagcagggguccggcuacgcggccgaccagaaguccacccagaacgccaucaacggcaucaccaacaaggugaacagcgucaucgagaagaugaacacccaguucacggccguggggaaggaguucaacaagcuggagcgccggauggagaaccucaacaagaaggucgacgacggcuuccuggacaucuggaccuacaacgccgagcugcucgugcugcuggagaacgagcgcacccucgacuuccacgacagcaacgugaagaaccuguacgagaaggucaagucccagcugaagaacaacgcgaaggagaucgggaacggcugcuucgaguucuaccacaagugcaacaacgagugcauggagagcgugaagaacgggaccuacgacuaccccaaguacuccgaggagagcaagcucaaccgggagaagaucgacggcgugaagcuggaguccaugggcgucuaccagauccuggccaucuacagcacgguggccagcucccucgugcugcuggucagccucggggccaucuccuucuggaugugcagcaacggcucccugcagugccgcaucugcaucuga

SEQ ID NO: 64811 - RNA, 1698 nt, Artificial Sequence
  derived and/or modified CDS sequence (opt1) from hemagglutinin__InfluenzaA__ABD77928
augaaggugaagcugcucguccugcugugcaccuucaccgccacguacgccgacaccaucugcaucggcuaccacgcgaacaacagcaccgacaccguggacacggugcucgagaagaacgucaccgugacccacuccgugaaccugcuggaggacagccacaacgggaagcucugccugcugaagggcaucgcgccccuccagcuggggaacugcuccgucgccggcuggauccuggggaacccggagugcgagcuccugaucagcaaggaguccuggagcuacaucguggagacccccaaccccgagaacggcacgugcuaccccggcuacuucgccgacuacgaggagcugcgcgagcagcucuccagcguguccagcuucgagcgguucgagaucuucccgaaggaguccagcuggcccaaccacaccgucaccgggguguccgccagcugcucccacaacggcaagagcuccuucuaccgcaaccugcuguggcucaccgggaagaacggccuguaccccaaccugagcaaguccuacgccaacaacaaggagaagaaggugcucguccuguggggcgugcaccacccgcccaacaucggggaccagaaggcccuguaccacacggagaacgccuacgugagcgucgugagcucccacuacagccggcgcuucacccccgagaucgccaagcggcccaaggugcgcgaccaggagggccggaucaacuacuacuggacccuccuggagcccggggacaccaucaucuucgaggcgaacggcaaccugaucgccccgcgcuacgccuucgcccucucccggggguucggcagcggcaucaucacguccaacgcccccauggacgagugcgacgcgaagugccagacgccccagggggccaucaacagcucccugcccuuccagaacguccacccggugaccaucggcgagugccccaaguacgugcgcagcgccaagcugcggauggucaccgggcuccgcaacauccccuccauccagagccggggccuguucggggccaucgccggcuucaucgagggcggguggaccggcaugguggacgggugguacggcuaccaccaccagaacgagcagggguccggcuacgcggccgaccagaaguccacccagaacgccaucaacggcaucaccaacaaggugaacagcgucaucgagaagaugaacacccaguucacggccguggggaaggaguucaacaagcuggagcgccggauggagaaccucaacaagaaggucgacgacggcuuccuggacaucuggaccuacaacgccgagcugcucgugcugcuggagaacgagcgcacccucgacuuccacgacagcaacgugaagaaccuguacgagaaggucaagucccagcugaagaacaacgcgaaggagaucgggaacggcugcuucgaguucuaccacaagugcaacaacgagugcauggagagcgugaagaacgggaccuacgacuaccccaaguacuccgaggagagcaagcucaaccgggagaagaucgacggcgugaagcuggaguccaugggcgucuaccagauccuggccaucuacagcacgguggccagcucccucgugcugcuggucagccucggggccaucuccuucuggaugugcagcaacggcucccugcagugccgcaucugcaucuga

SEQ ID NO: 64812 - RNA, 1698 nt, Artificial Sequence; identical to SEQ ID NO: 64766
  derived and/or modified CDS sequence (opt1) from hemagglutinin__InfluenzaA__ABD77939

SEQ ID NO: 64813 - RNA, 1698 nt, Artificial Sequence; identical to SEQ ID NO: 64766
  derived and/or modified CDS sequence (opt1) from hemagglutinin__InfluenzaA__ABD77950

SEQ ID NO: 64814 - RNA, 1698 nt, Artificial Sequence; identical to SEQ ID NO: 64765
  derived and/or modified CDS sequence (opt1) from hemagglutinin__InfluenzaA__ABD77961

SEQ ID NO: 64815 - RNA, 1698 nt, Artificial Sequence; identical to SEQ ID NO: 64766
  derived and/or modified CDS sequence (opt1) from hemagglutinin__InfluenzaA__ABD77983

SEQ ID NO: 64816 - RNA, 1698 nt, Artificial Sequence; identical to SEQ ID NO: 64766
  derived and/or modified CDS sequence (opt1) from hemagglutinin__InfluenzaA__ABD77994

SEQ ID NO: 64817 - RNA, 1698 nt, Artificial Sequence; identical to SEQ ID NO: 64765
  derived and/or modified CDS sequence (opt1) from hemagglutinin__InfluenzaA__ABD78005

SEQ ID NO: 64818 - RNA, 1698 nt, Artificial Sequence; identical to SEQ ID NO: 64765
  derived and/or modified CDS sequence (opt1) from hemagglutinin__InfluenzaA__ABD78016

SEQ ID NO: 64819 - RNA, 1698 nt, Artificial Sequence; identical to SEQ ID NO: 64766
  derived and/or modified CDS sequence (opt1) from hemagglutinin__InfluenzaA__ABD78027

SEQ ID NO: 64820 - RNA, 1698 nt, Artificial Sequence; identical to SEQ ID NO: 64766
  derived and/or modified CDS sequence (opt1) from hemagglutinin__InfluenzaA__ABD78038

SEQ ID NO: 64821 - RNA, 1701 nt, Artificial Sequence; identical to SEQ ID NO: 64801
  derived and/or modified CDS sequence (opt1) from hemagglutinin__InfluenzaA__ABD78049

SEQ ID NO: 64822 - RNA, 1698 nt, Artificial Sequence; identical to SEQ ID NO: 64320
  derived and/or modified CDS sequence (opt1) from hemagglutinin__InfluenzaA__ABD78060

SEQ ID NO: 64823 - RNA, 1698 nt, Artificial Sequence
  derived and/or modified CDS sequence (opt1) from hemagglutinin__InfluenzaA__ABD78071
augaaggccaagcugcucgugcugcugugcaccuucaccgccacguacgcggacaccaucugcaucggcuaccacgccaacaacagcaccgacaccgucgacacggugcucgagaagaacgugaccgucacccacuccgugaaccugcuggaggacagccacaacgggaagcucugccugcugaagggcaucgcgccccuccagcuggggaacugcuccguggccggcuggauccuggggaacccggagugcgagcuccugaucagcaaggaguccuggagcuacaucgucgagacccccaaccccgagaacggcacgugcuaccccggcuacuucgccgacuacgaggagcugcgcgagcagcucuccagcguguccagcuucgagcgguucgagaucuucccgaagggguccagcuggcccaaccacaccgugaccggcgucuccgccagcugcucccacaacggcaagagcuccuucuaccgcaaccugcuguggcucaccgggaagaacgggcuguaccccaaccugagcauguccuacgugaacaacaaggagaaggaggugcucguccuguggggcgugcaccacccgcccaacaucggcgaccagcgggcccuguaccacacggagaacgccuacgugagcgucgugagcucccacuacagccgccgguucacccccgagaucgccaagcgccccaaggugcgggaccaggaggggcgcaucaacuacuacuggacccuccuggagcccggcgacaccaucaucuucgaggcgaacgggaaccugaucgccccgugguacgccuucgcccucuccggcggcuucgggagcggcaucaucacguccaacgcccccaugggggagugcgacgcgaagugccagacgccccagggcgccaucaacagcucccugcccuuccagaacguccacccggugaccaucggggagugccccaaguacgugcggagcgccaagcugcgcauggucaccggccuccggaacauccccuccauccagagccgcggccuguucggggccaucgccggcuucaucgagggcggguggaccgggaugguggacggcugguacggcuaccaccaccagaacgagcagggguccggcuacgcggccgaccagaaguccacccagaacgccaucaacgggaucaccaacaaggugaacagcgucaucgagaagaugaacacccaguucacggccgugggcaaggaguucaacaagcuggagcggcgcauggagaaccucaacaagaaggucgacgacggguuccuggacaucuggaccuacaacgccgagcugcucgugcugcuggagaacgagcggacccucgacuuccacgacagcaacgugaagaaccuguacgagaaggucaagucccagcugaagaacaacgcgaaggagaucggcaacggcugcuucgaguucuaccacaagugcaacaacgagugcauggagagcgugaagaacgggaccuacgacuaccccaaguacuccgaggagagcaagcucaaccgcgagaagaucgacggcgugaagcuggaguccaugggggucuaccagauccuggccaucuacagcacgguggccagcucccucgugcugcuggucagccucggcgccaucuccuucuggaugugcagcaacggcucccugcagugccggaucugcaucuga

SEQ ID NO: 64824 - RNA, 1698 nt, Artificial Sequence
  derived and/or modified CDS sequence (opt1) from hemagglutinin__InfluenzaA__ABD78093
augaaggccaagcugcucgugcugcugugcaccuucaccgccacguacgcggacaccaucugcaucggcuaccacgccaacaacagcaccgacaccgucgacacggugcucgagaagaacgugaccgucacccacuccgugaaccugcuggaggacagccacaacgggaagcucugccugcugaagggcaucgcgccccuccagcuggggaacugcuccguggccggcuggauccuggggaacccggagugcgagcuccugaucagcaaggaguccuggagcuacaucgucgagacccccaaccccgagaacggcacgugcuaccccggcuacuucgccgacuacgaggagcugcgcgagcagcucuccagcguguccagcuucgagcgguucgagaucuucccgaagggguccagcuggcccaaccacaccgugaccggcgucuccgccagcugcucccacaacggcaagagcuccuucuaccgcaaccugcuguggcucaccgggaagaacgggcuguaccccaaccugagcauguccuacgugaacaacaaggagaaggaggugcucguccuguggggcgugcaccacccgcccaacaucggcgaccagcgggcccuguaccacacggagaacgccuacgugagcgucgugagcucccacuacagccgccgguucacccccgagaucgccaagcgccccaaggugcgggaccaggaggggcgcaucaacuacuacuggacccuccuggagcccggcgacaccaucaucuucgaggcgaacgggaaccugaucgccccgugguacgccuucgcccucucccggggcuucggcagcgggaucaucacguccaacgcccccaugggcgagugcgacgcgaagugccagacgccccagggggccaucaacagcucccugcccuuccagaacguccacccggugaccaucggcgagugccccaaguacgugcgcagcgccaagcugcggauggucaccgggcuccgcaacauccccuccauccagagccggggccuguucggcgccaucgccggguucaucgagggcggguggaccggcaugguggacgggugguacggcuaccaccaccagaacgagcagggcuccggguacgcggccgaccagaaguccacccagaacgccaucaacggcaucaccaacaaggugaacagcgucaucgagaagaugaacacccaguucacggccguggggaaggaguucaacaagcuggagcgccggauggagaaccucaacaagaaggucgacgacggcuuccuggacaucuggaccuacaacgccgagcugcucgugcugcuggagaacgagcgcacccucgacuuccacgacagcaacgugaagaaccuguacgagaaggucaagucccagcugaagaacaacgcgaaggagaucgggaacggcugcuucgaguucuaccacaagugcaacaacgagugcauggagagcgugaagaacggcaccuacgacuaccccaaguacuccgaggagagcaagcucaaccgggagaagaucgacggggugaagcuggaguccaugggcgucuaccagauccuggccaucuacagcacgguggccagcucccucgugcugcuggucagccucggggccaucuccuucuggaugugcagcaacggcucccugcagugccgcaucugcaucuga

SEQ ID NO: 64825 - RNA, 1701 nt, Artificial Sequence
  derived and/or modified CDS sequence (opt1) from hemagglutinin__InfluenzaA__ABD78115
augaagaccaucaucgcccugagcuacauccucugccugguguucgcccagaagcugcccggcaacgacaacuccaccgcgacgcucugccuggggcaccacgccgucccgaacggcacccuggugaagaccaucaccaacgaccagaucgaggugacgaacgccaccgagcucguccagagcuccagcaccgggcgcaucugcgacagcccccaccggauccuggacggcaagaacugcacccugaucgacgcccuccugggggacccccacugcgacggcuuccagaacaaggagugggaccuguucguggagcgcagcaaggccuacuccgacugcuaccccuacgacgugccggacuacgcgagccuccggucccuggucgccagcuccggcacgcuggaguucaccaacgagggguucaacuggaccggcguggcccaggacgggaccagcuacgccugcaagcgcggcuccgugaaguccuucuucucccggcucaacuggcugcacaagcuggaguacaaguaccccgcgcucaacgucacgaugcccaacaacgacaaguucgacaagcuguacaucuggggcgugcaccaccccagcaccgacuccgaccagaccagccuguacgugcaggccuccgggcgcgucaccgugagcacgaagcggagccagcagaccgugaucccgaacaucggcucccgccccuggguccgcggggugagcucccggaucagcaucuacuggaccaucgugaagcccggcgacauccuccugaucaacuccaccgggaaccugaucgcgccccggggcuacuucaagauccgcagcggcaaguccagcaucaugcgguccgacgccccgaucgggaacugcaacagcgagugcaucacgcccaacggcuccauccccaacgacaagcccuuccagaacgucaaccgcaucaccuacggggccugcccgcgguacgugaagcagaacacccucaagcuggccaccggcaugcgcaacgugcccgagaagcagacgcgggggaucuucggcgccaucgccggcuucaucgagaacgggugggagggcauggucgacgggugguacggcuuccgccaccagaacagcgaggggaccggccaggccgccgaccugaaguccacccaggcggccaucaaccagaucaacggcaagcucaaccggcugaucgagaagaccaacgagaaguuccaccagaucgagaaggaguucagcgagguggaggggcgcauccaggaccuggagaaguacguggaggacacgaagaucgaccucugguccuacaacgccgagcugcuggucgcccucgagaaccagcacaccaucgaccugaccgacagcgagaugaacaagcuguucgagcggacccgcaagcagcuccgcgagaacgccgaggacaugggcaacgggugcuucaagaucuaccacaagugcgacaacgcgugcaucggcuccauccggaacgggacguacgaccacgacguguaccgcaacgaggcccugaacaaccgguuccagaucaagggcgucgagcucaagagcggcuacaaggacuggauccuguggaucuccuucgccaucagcugcuuccugcugugcguggugcuccugggguucaucaugugggccugccagaagggcaacauccgcugcaacaucugcaucuga

SEQ ID NO: 64826 - RNA, 1701 nt, Artificial Sequence
  derived and/or modified CDS sequence (opt1) from hemagglutinin__InfluenzaA__ABD78126
augaagaccaucaucgcccugagcuacauccucugccugguguucgcccagaagcugcccggcaacgacaacuccaccgcgacgcucugccuggggcaccacgccgucccgaacggcacccuggugaagaccaucaccaacgaccagaucgaggugacgaacgccaccgagcucguccagagcuccagcaccgggcgcaucugcgacagcccccaccggauccuggacggcaagaacugcacccugaucgacgcccuccugggggacccccacugcgacggcuuccagaacaaggagugggaccuguucguggagcgcagcaaggccuacuccgacugcuaccccuacgacgugccggacuacgcgagccuccggucccuggucgccagcuccggcacgcuggaguucaccaacgagggguucaacuggaccggcguggcccaggacgggaccagcuacgccugcaagcgcggcuccgugaaguccuucuucucccggcucaacuggcugcacaagcuggaguacaaguaccccgcgcucaacgucacgaugcccaacaacgacaaguucgacaagcuguacaucuggggcgugcaccaccccagcaccgacuccgaccagaccagccuguacgugcaggccuccgggcgcgucaccgugagcacgaagcggagccagcagaccgugaucccgaacaucggcucccgccccuggguccgcggggugagcuccaucaucagcaucuacuggaccaucgugaagcccggcgacauccuccugaucaacuccaccgggaaccugaucgcgccccggggcuacuucaagauccggagcggcaaguccagcaucaugcgcuccgacgccccgaucgggaacugcaacagcgagugcaucacgcccaacggcuccauccccaacgacaagcccuuccagaacgucaaccggaucaccuacggggccugcccgcgcuacgugaagcagaacacccucaagcuggccaccggcaugcggaacgugcccgagaagcagacgcgcgggaucuucggcgccaucgccggcuucaucgagaacgggugggagggcauggucgacgggugguacggcuuccggcaccagaacagcgaggggaccggccaggccgccgaccugaaguccacccaggcggccaucaaccagaucaacggcaagcucaaccgccugaucgagaagaccaacgagaaguuccaccagaucgagaaggaguucagcgagguggaggggcggauccaggaccuggagaaguacguggaggacacgaagaucgaccucugguccuacaacgccgagcugcuggucgcccucgagaaccagcacaccaucgaccugaccgacagcgagaugaacaagcuguucgagcgcacccggaagcagcuccgcgagaacgccgaggacaugggcaacgggugcuucaagaucuaccacaagugcgacaacgcgugcaucggcuccauccgcaacgggacguacgaccacgacguguaccgggacgaggcccugaacaaccgcuuccagaucaagggcgucgagcucaagagcggcuacaaggacuggauccuguggaucuccuucgccaucagcugcuuccugcugugcguggugcuccugggguucaucaugugggccugccagaagggcaacauccggugcaacaucugcaucuga

SEQ ID NO: 64827 - RNA, 1701 nt, Artificial Sequence
  derived and/or modified CDS sequence (opt1) from hemagglutinin__InfluenzaA__ABD79032
augaagaccaucaucgcccugagcuacaucuucugccucgugcugggccaggacuuccccgggaacgacaacuccaccgccacgcugugccucggccaccacgcggucccgaacgggacccuggugaagaccaucaccaacgaccagaucgaggugacgaacgccaccgagcugguccagagcuccagcaccggcaagaucugcaacaacccccaccgcauccucgacgggaucgacugcacccugaucgacgcccugcucggcgacccccacugcgacggcuuccagaacgagacgugggaccuguucguggagcgguccaaggccuucagcaacugcuaccccuacgacgugccggacuacgccucccugcgcagccucgucgcguccagcgggacccuggaguucaucuccgagggcuucaccuggaccggggugacgcagaacggcgggagcaacgccugcaagcggggccccgacaucggcuucuucucccgccugaacuggcucuacaagagcggguccaccuaccccgugcugaacgucaccaugcccaacaacgacaacuucgacaagcuguacaucuggggcgugcaccacccgagcaccgaccaggagcagacgucccucuacgugcaggccagcgggcgggucaccguguccaccaagcgcagccagcagaccaucauccccaacaucggcagccggcccugggugcgcggccuguccagccggaucuccaucuacuggacgaucgucaagcccggggacauccuggugaucaacagcaacggcaaccucaucgccccgcgcggguacuucaagaugcggaccggcaaguccagcaucaugcgcuccgacgcgcccaucgggaccugcaucagcgagugcaucacccccaacggcuccauccccaacgacaagccguuccagaacgugaacaagaucacguacggcgccugccccaaguacgucaagcagaacacccugaagcuggccaccgggaugcggaacgugcccgagaagcagacccgcggccucuucagcgccaucgccggguucaucgagaacggcugggaggggaugaucgacggcugguacggcuuccggcaccagaacuccgaggggacgggccaggcggccgaccucaagagcacccaggccgccaucgaccagaucaacgggaagcugaaccgcgugaucgagaagaccaacgagaaguuccaccagaucgagaaggaguucuccgaggucgagggccggauccaggaccucgagaaguacguggaggacaccaagaucgaccuguggagcuacaacgccgagcugcucguggcgcuggagaaccagcacacgaucgaccugaccgacuccgagaugaacaagcuguucgagaagacccgccggcagcugcgcgagaacgccgaggacauggggaacggcugcuucaagaucuaccacaagugcgacaacgccugcaucggcagcauccggaacgggaccuacgaccacgacgucuaccgcgacgaggcccugaacaaccgcuuccagaucaagggcguggagcucaaguccggguacaaggacuggauccuguggaucagcuucgccaucuccugcuuccugcucugcgucgugcugcugggcuucaucaugugggcgugccagaagggcaacauccggugcaacaucugcaucuga

SEQ ID NO: 64828 - RNA, 1701 nt, Artificial Sequence
  derived and/or modified CDS sequence (opt1) from hemagglutinin__InfluenzaA__ABD79112
augaaggccaagcugcucauccugcugugcgcccucagcgcgaccgacgccgacaccaucugcaucggcuaccacgccaacaacuccacggacaccguggacaccguccuggagaagaacgugaccgugacgcacagcgucaaccugcucgaggacucccacaacgggaagcugugccgccugaagggcaucgcgccccuccagcuggggaagugcaacaucgccggcuggauccuggggaacccggagugcgagagccuccuguccaagcggagcugguccuacaucgccgagacccccaacagcgagaacggcgccugcuaccccggcgacuucgccgacuacgaggagcugcgcgagcagcucuccagcguguccagcuucgagcgguucgagaucuuccccaaggggcgcuccuggccggagcacaacaucgacaucggcgugaccgccgcgugcagccacgccgggaaguccagcuucuacaagaaccugcuguggcucaccgagaaggacggcuccuaccccaaccugaacaagagcuacgucaacaagaaggagaaggaggugcugauccucuggggcgugcaccacccgcccaacaucgagaaccagaagacgcuguaccggaaggagaacgccuacgucuccguggugagcagcaacuacaaccgccgguucacccccgagaucgccgagcgccccaagguccgggggcaggccggccgcaucaacuacuacuggacccugcucgagcccggggacaccaucaucuucgaggcgaacggcaaccugaucgcccccugguacgccuucgcccugaaccgggggaucggcuccggcaucaucacgagcaacgccuccauggacgagugcgacaccaagugccagaccccgcagggggcgaucaacagcucccuccccuuccagaacauccaccccuucaccaucggcgagugccccaaguacgugcgcagcacgaagcugcggauggugaccgggcugcgcaacaucccguccauccagagccggggccucuucggggccaucgccggcuucaucgagggcgggugggacggcaugaucgacgggugguacggcuaccaccaccagaacgagcagggguccggcuacgccgccgaccagaaguccacccagaacgcgaucaacggcaucaccaacaaggucaacagcgugaucgagaagaugaacacgcaguucaccgccguggggaaggaguucaacaagcuggagaagcgcauggagaaccugaacaagaaggucgacgacggcuuccucgacaucuggaccuacaacgccgagcugcuggugcuccuggagaacgagcggacccuggacuuccacgacagcaacgugaagaaccucuacgagaaggucaagaaccagcugcgcaacaacgccaaggagaucgggaacggcugcuucgaguucuaccacaagugcaacaacgagugcauggaguccgugaagaacgggacguacgacuaccccaaguucagcgaggaguccaagcugaaccgggagaagaucgacggcgugaagcucgagagcaugggcgucuaccagauccuggccaucuacuccaccguggcgagcucccugguccuccuggugagccugggggccaucagcuucuggaugugcuccaacggcagccuccagugccgcaucugcaucuga

SEQ ID NO: 64829 - RNA, 1701 nt, Artificial Sequence
  derived and/or modified CDS sequence (opt1) from hemagglutinin__InfluenzaA__ABD79123
augaagaccaucaucgcccugagcuacauccucugccugguguucgcccagaagcugcccggcaacgacaacuccaccgcgacgcucugccuggggcaccacgccgucccgaacggcacccuggugaagaccaucaccaacgaccagaucgaggugacgaacgccaccgagcucguccagagcuccagcaccgggcgcaucugcgacagcccccaccagauccuggacggcaagaacugcacccugaucgacgcccuccugggggacccccacugcgacggcuuccagaacaaggagugggaccuguucguggagcggagcacggccuacuccaacugcuaccccuacgacgugccggacuacgcgagccuccgcucccuggucgccagcuccggcacccuggaguucaccaaggagggguucaacuggaccggcguggcccaggacgggacgagcuacgccugcaagcggggcuccgugaaguccuucuucucccgccucaacuggcugcacaagcuggaguacaaguaccccgcgcucaacgucaccaugcccaacaacgacaaguucgacaagcuguacaucuggggcgugcaccaccccagcaccgacuccgaccagaccagccuguacgugcaggccuccgggcgggucacggugagcaccaagcgcagccagcagaccgugaucccgaacaucggcucccggcccuggguccgcggggugagcucccggaucagcaucuacuggaccaucgugaagcccggcgacauccuccugaucaacuccacggggaaccugaucgcgccccgcggcuacuucaagauccggagcggcaaguccagcaucaugcgcuccgacgccccgaucgacaacugcaacagcgagugcaucacccccaacggguccaucagcaacgacaagcccuuccagaacgucaaccggaucaccuacggcgccugcccccgcuacgugaagcagaacacccucaagcuggccacggggaugcggaacgugccggagaagcagacccgcggcaucuucggggccaucgccggcuucaucgagaacggcugggaggggauggucgacggcugguacggguuccggcaccagaacuccgagggcaccgggcaggccgccgaccucaagagcacccaggcggccaucaaccagaucaacggcaagcugaaccgccugaucgagaagacgaacgagaaguuccaccagaucgagaaggaguucuccgagguggagggccggauccaggaccuggagaaguacguggaggacaccaagaucgaccucuggagcuacaacgccgagcugcuggucgcccucgagaaccagcacaccaucgaccugaccgacuccgagaugaacaagcuguucgagcgcacgcggaagcagcuccgcgagaacgccgaggacauggggaacggcugcuuccgcaucuaccacaagugcgacaacgcgugcaucgggagcauccggaacggcaccuacgaccacgacguguaccgcgacgaggcccugaacaaccgguuccagaucaagggggucgagcugaaguccggcuacaaggacuggauccucuggaucagcuucgccaucagcugcuuccugcugugcguggugcuccugggcuucaucaugugggccugccagaaggggaacauccgcugcaacaucugcaucuga

SEQ ID NO: 64830 - RNA, 1701 nt, Artificial Sequence
  derived and/or modified CDS sequence (opt1) from hemagglutinin__InfluenzaA__ABD79134
augaagaccaucaucgcccugagcuacauccucugccugguguucgcccagaagcugcccggcaacgacaacuccaccgcgacgcucugccuggggcaccacgccgucccgaacggcacccuggugaagaccaucaccaacgaccagaucgaggugacgaacgccaccgagcucguccagagcuccagcaccgggcgcaucugcgacagcccccaccagauccuggacggcaagaacugcacccugaucgacgcccuccugggggacccccacugcgacggcuuccagaacaagaagugggaccuguucguggagcggagcacggccuacuccaacugcuaccccuacgacgugccggacuacgcgagccuccgcucccuggucgccagcuccggcacccuggaguucaccaaggagggguucaacuggaccggcguggcccaggacgggacgagcuacgccugcaagcggggcuccgugaaguccuucuucucccgccucaacuggcugcacaagcuggaguacaaguaccccgcgcucaacgucaccaugcccaacaacgacaaguucgacaagcuguacaucuggggcgugcaccaccccagcaccgacuccgaccagaccagccuguacgugcaggccuccgggcgggucacggugagcaccaagcgcagccagcagaccgugaucccgaacaucggcucccggcccuggguccgcggggugagcucccggaucagcaucuacuggaccaucgugaagcccggcgacauccuccugaucaacuccacggggaaccugaucgcgccccgcggcuacuucaagauccggagcggcaaguccagcaucaugcgcuccgacgccccgaucgacaacugcaacagcgagugcaucacccccaacggguccaucagcaacgacaagcccuuccagaacgucaaccggaucaccuacggcgccugcccccgcuacgugaagcagaacacccucaagcuggccacggggaugcggaacgugccggagaagcagacccgcggcaucuucggggccaucgccggcuucaucgagaacggcugggaggggauggucgacggcugguacggguuccggcaccagaacuccgagggcaccgggcaggccgccgaccucaagagcacccaggcggccaucaaccagaucaacggcaagcugaaccgccugaucgagaagacgaacgagaaguuccaccagaucgagaaggaguucuccgagguggagggccggauccaggaccuggagaaguacguggaggacaccaagaucgaccucuggagcuacaacgccgagcugcuggucgcccucgagaaccagcacaccaucgaccugaccgacuccgagaugaacaagcuguucgagcgcacgcggaagcagcuccgcgagaacgccgaggacauggggaacggcugcuucaagaucuaccacaagugcgacaacgcgugcaucgggagcauccgcaacggcaccuacgaccacgacguguaccgggacgaggcccugaacaaccgcuuccagaucaagggggucgagcugaaguccggcuacaaggacuggauccucuggaucagcuucgccaucagcugcuuccugcugugcguggugcuccugggcuucaucaugugggccugccagaaggggaacauccggugcaacaucugcaucuga

SEQ ID NO: 64831 - RNA, 1701 nt, Artificial Sequence
  derived and/or modified CDS sequence (opt1) from hemagglutinin__InfluenzaA__ABD79145
augaagaccaucaucgcccugagcuacauccucugccugguguucgcccagaagcugcccggcaacgacaacuccaccgcgacgcucugccuggggcaccacgccgucccgaacggcacccuggugaagaccaucaccaacgaccagaucgaggugacgaacgccaccgagcucguccagagcuccagcaccgggcgcaucugcgacagcccccaccagauccuggacggcaagaacugcacccugaucgacgcccuccugggggacccccacugcgacggcuuccagaacaaggagugggaccuguucguggagcggagcacggccuacuccaacugcuaccccuacgacgugccggacuacgcgagccuccgcucccuggucgccagcuccggcacccuggaguucaccaaggagggguucaacuggaccggcguggcccaggacgggacgagcuacgccugcaagcggggcuccgugaaguccuucuucucccgccucaacuggcugcacaagcuggaguacaaguaccccgcgcucaacgucaccaugcccaacaacgacaaguucgacaagcuguacaucuggggcgugcaccaccccagcaccgacuccgaccagaccagccuguacgugcaggccuccgggcgggucacggugagcaccaagcgcagccagcagaccgugaucccgaacaucggcucccggcccuggguccgcggggugagcucccggaucagcaucuacuggaccaucgugaagcccggcgacauccuccugaucaacuccacggggaaccugaucgcgccccgcggcuacuucaagauccggagcggcaaguccagcaucaugcgcuccgacgccccgaucgacaacugcaacagcgagugcaucacccccaacggguccaucagcaacgacaagcccuuccagaacgucaaccggaucaccuacggcgccugcccccgcuacgugaagcagaacacccucaagcuggccacggggaugcggaacgugccggagaagcagacccgcggcaucuucggggccaucgccggcuucaucgagaacggcugggaggggauggucgacggcugguacggguuccggcaccagaacuccgagggcaccgggcaggccgccgaccucaagagcacccaggcggccaucaaccagaucaacggcaagcugaaccgccugaucgagaagacgaacgagaaguuccaccagaucgagaaggaguucuccgagguggagggccggauccaggaccuggagaaguacguggaggacaccaagaucgaccucuggagcuacaacgccgagcugcuggucgcccucgagaaccagcacaccaucgaccugaccgacuccgagaugaacaagcuguucgagcgcacgcggaagcagcuccgcgagaacgccgaggacauggggaacggcugcuucaagaucuaccacaagugcgacaacgcgugcaucgggagcauccgcaacggcaccuacgaccacgacguguaccgggacgaggcccugaacaaccgcuuccagaucaagggggucgagcugaaguccggcuacaaggacuggauccucuggaucagcuucgccaucagcugcuuccugcugugcguggugcuccugggcuucaucaugugggccugccagaaggggaacauccggugcaacaucugcaucuga

SEQ ID NO: 64832 - RNA, 1701 nt, Artificial Sequence; identical to SEQ ID NO: 64831
  derived and/or modified CDS sequence (opt1) from hemagglutinin__InfluenzaA__ABD79156

SEQ ID NO: 64833 - RNA, 1701 nt, Artificial Sequence; identical to SEQ ID NO: 64047
  derived and/or modified CDS sequence (opt1) from hemagglutinin__InfluenzaA__ABD79167

SEQ ID NO: 64834 - RNA, 1701 nt, Artificial Sequence; identical to SEQ ID NO: 64831
  derived and/or modified CDS sequence (opt1) from hemagglutinin__InfluenzaA__ABD79178

SEQ ID NO: 64835 - RNA, 1701 nt, Artificial Sequence
  derived and/or modified CDS sequence (opt1) from hemagglutinin__InfluenzaA__ABD79189
augaagaccaucaucgcccugagcuacauccucugccugguguucgcccagaagcugcccggcaacgacaacuccaccgcgacgcucugccuggggcaccacgccgucccgaacggcacccuggugaagaccaucaccaacgaccagaucgaggugacgaacgccaccgagcucguccagagcuccagcaccgggcgcaucugcgacagcccccaccagauccuggacggcaagaacugcacccugaucgacgcccuccugggggacccccacugcgacggcuuccagaacaaggagugggaccuguucguggagcggagcacggccuacuccaacugcuaccccuacgacgugccggacuacgcgagccuccgcucccuggucgccagcuccggcacccuggaguucaccaaggagggguucaacuggaccggcguggcccaggacgggacgagcuacgccugcaagcggggcuccgugaaguccuucuucucccgccucaacuggcugcacaagcuggaguacaaguaccccgcgcucaacgucaccaugcccaacaacgacaaguucgacaagcuguacaucuggggcgugcaccaccccagcaccgacuccgaccagaccagccuguacgugcaggccuccgggcgggucacggugagcaccaagcgcagccagcagaccgugaucccgaacaucggcucccggcccuggguccgcggggugagcucccggaucagcaucuacuggaccguggucaagcccggcgacauccuccugaucaacuccacggggaaccugaucgcgccccgcggcuacuucaagauccggagcggcaaguccagcaucaugcgcuccgacgccccgaucgacagcugcaacuccgagugcaucacccccaacgggagcaucuccaacgacaagcccuuccagaacgugaaccggaucaccuacggcgccugcccccgcuacgugaagcagaacacccucaagcuggccacggggaugcggaacgucccggagaagcagacccgcggcaucuucggggccaucgccggcuucaucgagaacggcugggaggggaugguggacggcugguacggguuccggcaccagaacagcgagggcaccgggcaggccgccgaccugaaguccacccaggcggccaucaaccagaucaacggcaagcucaaccgccugaucgagaagacgaacgagaaguuccaccagaucgagaaggaguucagcgagguggagggccggauccaggaccuggagaaguacgucgaggacaccaagaucgaccucugguccuacaacgccgagcugcugguggcccucgagaaccagcacaccaucgaccugaccgacagcgagaugaacaagcuguucgagcgcacgcggaagcagcuccgcgagaacgccgaggacauggggaacggcugcuucaagaucuaccacaagugcgacaacgcgugcaucggguccauccgcaacggcaccuacgaccacgacgucuaccgggacgaggcccugaacaaccgcuuccagaucaaggggguggagcucaagagcggcuacaaggacuggauccuguggaucagcuucgccaucuccugcuuccugcugugcgugguccuccugggcuucaucaugugggccugccagaaggggaacauccggugcaacaucugcaucuga

SEQ ID NO: 64836 - RNA, 1701 nt, Artificial Sequence; identical to SEQ ID NO: 64831
  derived and/or modified CDS sequence (opt1) from hemagglutinin__InfluenzaA__ABD79200

SEQ ID NO: 64837 - RNA, 1701 nt, Artificial Sequence
  derived and/or modified CDS sequence (opt1) from hemagglutinin__InfluenzaA__ABD79211
augaagaccaucaucgcccugagcuacauccucugccugguguucgcccagaagcugcccggcaacgacaacuccaccgcgacgcucugccuggggcaccacgccgucccgaacggcacccuggugaagaccaucaccaacgaccagaucgaggugacgaacgccaccgagcucguccagagcuccagcaccgggcgcaucugcgacagcccccaccagauccuggacggcaagaacugcacccugaucgacgcccuccugggggacccccacugcgacggcuuccagaacaaggagugggaccuguucguggagcggagcacggccuacuccaacugcuaccccuacgacgugccggacuacgcgagccuccgcucccuggucgccagcuccggcacccuggaguucaccaaggagggguucaacuggaccggcguggcccaggacgggacgagcuacgccugcaagcggggcuccgugaaguccuucuucucccgccucaacuggcugcacaagcuggaguacaaguaccccgcgcucaacgucaccaugcccaacaacgacaaguucgacaagcuguacaucuggggcgugcaccaccccagcaccgacuccgaccagaccagccuguacgugcaggccuccgggcgggucacggugagcaccaagcgcagccagcagaccgugaucccgaacaucggcucccggcccuggauccgcggggucagcucccggaucagcaucuacuggaccaucgugaagcccggcgacauccuccugaucaacuccacggggaaccugaucgcgccccgcggcuacuucaagauccggagcggcaaguccagcaucaugcgcuccgacgccccgaucgacaacugcaacagcgagugcaucacccccaacggguccaucagcaacgacaagcccuuccagaacgugaaccggaucaccuacggcgccugcccccgcuacgucaagcagaacacccucaagcuggccacggggaugcggaacgugccggagaagcagacccgcggcaucuucggggccaucgccggcuucaucgagaacggcugggaggggaugguggacggcugguacggguuccggcaccagaacuccgagggcaccgggcaggccgccgaccucaagagcacccaggcggccaucaaccagaucaacggcaagcugaaccgccugaucgagaagacgaacgagaaguuccaccagaucgagaaggaguucuccgaggucgagggccggauccaggaccuggagaaguacguggaggacaccaagaucgaccucuggagcuacaacgccgagcugcugguggcccucgagaaccagcacaccaucgaccugaccgacuccgagaugaacaagcuguucgagcgcacgcggaagcagcuccgcgagaacgccgaggacauggggaacggcugcuucaagaucuaccacaagugcgacaacgcgugcaucgggagcauccgcaacggcaccuacgaccacgacgucuaccgggacgaggcccugaacaaccgcuuccagaucaaggggguggagcugaaguccggcuacaaggacuggauccucuggaucagcuucgccaucagcugcuuccugcugugcgucgugcuccugggcuucaucaugugggccugccagaaggggaacauccggugcaacaucugcaucuga

SEQ ID NO: 64838 - RNA, 1701 nt, Artificial Sequence; identical to SEQ ID NO: 64047
  derived and/or modified CDS sequence (opt1) from hemagglutinin__InfluenzaA__ABD79222

SEQ ID NO: 64839 - RNA, 1701 nt, Artificial Sequence; identical to SEQ ID NO: 64047
  derived and/or modified CDS sequence (opt1) from hemagglutinin__InfluenzaA__ABD79233

SEQ ID NO: 64840 - RNA, 1701 nt, Artificial Sequence
  derived and/or modified CDS sequence (opt1) from hemagglutinin__InfluenzaA__ABD79244
augaagaccaucaucgcccugagcuacauccucugccugguguucgcccagaagcugcccggcaacgacaacuccaccgcgacgcucugccuggggcaccacgccgucccgaacggcacccuggugaagaccaucaccaacgaccagaucgaggugacgaacgccaccgagcucguccagagcuccagcaccgggcgcaucugcgacagcccccaccagauccuggacggcaagaacugcacccugaucgacgcccuccugggggacccccacugcgacggcuucaagaacaaggagugggaccuguucguggagcggagcacggccuacuccaacugcuaccccuacgacgugccggacuacgcgagccuccgcucccuggucgccagcuccggcacccuggaguucaccaacgagggguucaacuggaccggcguggcccaggacgggacgagcuacgccugcaagcggggcuccgugaaguccuucuucucccgccucaacuggcugcacaagcuggaguacaaguaccccgcgcucaacgucaccaugcccaacaacgacaaguucgacaagcuguacaucuggggcgugcaccaccccagcaccgacuccgaccagaccagccuguacgugcaggccuccgggcgggucacggugagcaccaagcgcagccagcagaccgugaucccgaacaucggcucccggcccuggguccgcggggugagcucccggaucagcaucuacuggaccaucgugaagcccggcgacauccuccugaucaacuccacggggaaccugaucgcgccccgcggcuacuucaagauccggagcggcaaguccagcaucaugcgcuccgacgccccgaucgacaacugcaacagcgagugcaucacccccaacggguccauccccaacgacaagcccuuccagaacgucaaccggaucaccuacggcgccugcccgcgcuacgugaagcagaacacccucaagcuggccacggggaugcggaacgugcccgagaagcagacccgcggcaucuucggggccaucgccggcuucaucgagaacggcugggaggggauggucgacggcugguacggguuccggcaccagaacagcgagggcaccgggcaggccgccgaccugaaguccacccaggcggccaucaaccagaucaacggcaagcucaaccgccugaucgagaagacgaacgagaaguuccaccagaucgagaaggaguucagcgagguggagggccggauccaggaccuggagaaguacguggaggacaccaagaucgaccucugguccuacaacgccgagcugcuggucgcccucgagaaccagcacaccaucgaccugaccgacagcgagaugaacaagcuguucgagcgcacgcggaagcagcuccgcgagaacgccgaggacauggggaacggcugcuucaagaucuaccacaagugcgacaacgcgugcaucggguccauccgcaacggcaccuacgaccacgacguguaccgggacgaggcccugaacaaccgcuuccagaucaagggggucgagcucaagagcggcuacaaggacuggauccuguggaucuccuucgccaucagcugcuuccugcugugcguggugcuccugggcuucaucaugugggccugccagaaggggaacauccggugcaacaucugcaucuga

SEQ ID NO: 64841 - RNA, 1701 nt, Artificial Sequence; identical to SEQ ID NO: 64267
  derived and/or modified CDS sequence (opt1) from hemagglutinin__InfluenzaA__ABD94734

SEQ ID NO: 64842 - RNA, 1701 nt, Artificial Sequence; identical to SEQ ID NO: 64654
  derived and/or modified CDS sequence (opt1) from hemagglutinin__InfluenzaA__ABD94745

SEQ ID NO: 64843 - RNA, 1701 nt, Artificial Sequence
  derived and/or modified CDS sequence (opt1) from hemagglutinin__InfluenzaA__ABD94767
augaagaccaucaucgcccugagcuacauccucugccugguguucgcccagaagcugcccgucaacgacaacuccaccgcgacgcucugccugggccaccacgccgugccgaacgggacccuggugaagaccaucaccaacgacaacaucgaggucacgaacgccaccgagcucgugcagagcuccagcaccggccgcaucugcgacagcccccaccagauccuggacggggagaacugcacccugaucgacgcccuccugggcgacccccacugcgacggguuccagaacaaggagugggaccuguucguggagcggagcacggccuacuccaacugcuaccccuacgacgucccggacuacgcgagccuccgcucccugguggccagcuccggcacccuggaguucaacaacgagagcuucaacuggaccggcguggaccagaacgggaccuccagcgccugcaagcggcgcuccaacaagagcuucuucucccggcucaacuggcugcaccagcugaaguacaaguaccccgcccucaacgucacgaugcccaacaacgagaaguucgacaagcuguacaucuggggcgugcaccaccccagcaccgacuccgaccagaucagccuguacgcgcaggccagcgggcgcgugaccgucuccaccaagcggagccagcagaacgugaucccgaacaucggcucccgccccugggugcgcggggucagcucccggaucagcaucuacuggacgaucgugaagcccggcgacauccuccugaucaacuccaccggcaaccugaucgcgccccggggguacuucaagauccgcagcggcaaguccagcaucaugcgguccaacgccccgaucgggaagugcaacagcgagugcaucacccccaacggcuccauccccaacgacaagcccuuccagaacgugaaccgcaucaccuacggcgccugcccgcgguacgucaagcagaacacgcucaagcuggccaccgggaugcgcaacgugcccgagaagcagacccggggcaucuucggggccaucgccggcuucaucgagaacgggugggagggcaugguggacggcugguacggguuccgccaccagaacagcgagggcaccgggcaggccgccgaccugaaguccacgcaggcggccaucaaccagaucaacggcaagcucaaccggcugaucgagaagaccaacgagaaguuccaccagaucgagaaggaguucagcgaggucgaggggcgcauccaggaccuggagaaguacguggaggacaccaagaucgaccucugguccuacaacgccgagcugcugguggcccucgagaaccagcacaccaucgaccugacggacagcgagaugaacaagcuguucgagcggacccgcaagcagcuccgcgagaacgccgaggacaugggcaacggcugcuucaagaucuaccacaagugcgacaacgcgugcaucggguccauccggaacggcaccuacgaccacgacgucuaccgcgacgaggcccugaacaaccgguuccagaucaaggggguggagcugaaguccggcuacaaggacuggauccucuggaucagcuucgccaucuccugcuuccugcugugcgucgugcuccugggguucaucaugugggccugccagaagggcaacauccgcugcaacaucugcaucuga

SEQ ID NO: 64844 - RNA, 1698 nt, Artificial Sequence; identical to SEQ ID NO: 64824
  derived and/or modified CDS sequence (opt1) from hemagglutinin__InfluenzaA__ABD94778

SEQ ID NO: 64845 - RNA, 1698 nt, Artificial Sequence; identical to SEQ ID NO: 64824
  derived and/or modified CDS sequence (opt1) from hemagglutinin__InfluenzaA__ABD94789

SEQ ID NO: 64846 - RNA, 1701 nt, Artificial Sequence
  derived and/or modified CDS sequence (opt1) from hemagglutinin__InfluenzaA__ABD94822
augaagaccaucaucgcccugagcuacauccucugccugguguucgcccagaagauccccggcaacgacaacuccaccgcgacgcugugccucgggcaccacgccgucccgaacggcacccuggugaagaccaucaccaacgaccagaucgaggugacgaacgccaccgagcugguccagagcuccagcaccgggcgcaucugcgacagcccccaccggauccucgacggcgagaacugcacccugaucgacgcccugcucggggacccccacugcgacggcuuccagaacaaggagugggaccuguucguggagcgcagcaaggccuacuccaacugcuaccccuacgacgugccggacuacgcgagccugcggucccucgucgccagcuccggcacgcuggaguucaacaacgagagcuucaacuggaccgggguggcccagaacggcaccuccuacgccugcaagcgcagcuccaucaagagcuucuucucccggcugaacuggcuccaccagcugaaguacaaguaccccgcgcugaacgugaccaugcccaacaacgacaaguucgacaagcucuacaucuggggcguccaccaccccagcacggacuccgaccagaccagccuguacgcccaggccagcgggcgcgugaccguguccaccaagcggagccagcagacggucaucccgaacaucgggucccgccccugggugcggggcgugagcucccgcaucagcaucuacuggaccaucgucaagcccggcgacauccugcucaucaacuccaccgggaaccugaucgcgccccggggcuacuucaagauccgcagcgggaaguccagcaucaugcgguccgacgccccgaucggcaagugcaacagcgagugcaucacccccaacggcuccauccccaacgacaagcccuuccagaacgugaaccgcaucacguacggggccugcccgcgguacgugaagcagaacacccugaagcucgccaccggcaugcgcaacguccccgagaagcagacccgggggaucuucggcgccaucgccggguucaucgagaacggcugggagggcaugguggacgggugguacggcuuccgccaccagaacagcgaggggacgggccaggccgcggaccugaaguccacccaggccgccaucaaccagaucaacgggaagcugaaccggcucaucgagaagaccaacgagaaguuccaccagaucgagaaggaguucagcgagguggagggccgcauccaggaccuggagaaguacgucgaggacaccaagaucgaccugugguccuacaacgccgagcuccugguggcccuggagaaccagcacacgaucgaccucaccgacagcgagaugaacaagcuguucgagcggacccgcaagcagcugcgcgagaacgcggaggacaugggcaacgggugcuucaagaucuaccacaagugcgacaacgccugcaucggcuccauccggaacgggaccuacgaccacgacguguaccgcgacgaggcccucaacaaccgguuccagaucaagggcgucgagcugaaguccggguacaaggacuggauccuguggaucagcuucgccaucuccugcuuccuccugugcgugguccugcucggcuucaucaugugggccugccagaagggcaacauccgcugcaacaucugcaucuga

SEQ ID NO: 64847 - RNA, 1701 nt, Artificial Sequence
  derived and/or modified CDS sequence (opt1) from hemagglutinin__InfluenzaA__ABD94833
augaagaccaucaucgcccugagcuacauccucugccugguguucgcccagaagcugcccggcaacgacaacuccaccgcgacgcucugccuggggcaccacgccgucccgaacggcacccuggugaagaccaucaccaacgaccagaucgaggugacgaacgccaccgagcucguccagagcuccagcaccgggcgcaucugcgacagcccccaccggauccuggacggcaagaacugcacccugaucgacgcccuccugggggacccccacugcgacggcuuccagaacaaggagugggaccuguucguggagcgcagcaaggccuacuccgacugcuaccccuacgacgugccggacuacgcgagccuccggucccuggucgccagcuccggcacgcuggaguucaccaacgagggguucaacuggaccggcguggcccaggacgggaccagcuacgccugcaagcgcggcuccgugaaguccuucuucucccggcucaacuggcugcacaagcuggaguacaaguaccccgcgcucaacgucacgaugcccaacaacgacaaguucgacaagcuguacaucuggggcgugcaccaccccagcaccgacuccgaccagaccagccuguacgugcaggccuccgggcgcgucaccgugagcacgaagcggagccagcagaccgugaucccgaacaucggcucccgccccuggguccgcggggugagcucccggaucagcaucuacuggaccaucgugaagcccggcgacauccuccugaucaacuccaccgggaaccugaucgcgccccggggcuacuucaagauccgcagcggcaaguccagcaucaugcgguccgacgccccgaucgggaacugcaacagcgagugcaucacgcccaacggcuccauccccaacgacaagcccuuccagaacgucaaccgcaucaccuacggggccugcccgcgguacgugaagcagaacacccucaagcuggccaccggcaugcgcaacgugcccgagaagcagacgcgggggaucuucggcgccaucgccggcuucaucgagaacgggugggagggcauggucgacgggugguacggcuuccgccaccagaacagcgaggggaccggccaggccgccgaccugaaguccacccaggcggccaucaaccagaucaacggcaagcucaaccggcugaucgagaagaccaacgagaaguuccaccagaucgagaaggaguucagcgagguggaggggcgcauccaggaccuggagaaguacguggaggacacgaagaucgaccucugguccuacaacgccgagcugcuggucgcccucgagaaccagcacaccaucgaccugaccgacagcgagaugaacaagcuguucgagcggacccgcaagcagcuccgcgagaacgccgaggacaugggcaacgggugcuucaagaucuaccacaagugcgacaacgcgugcaucggcuccauccggaacgggacguacgaccacgacguguaccgcgacgaggcccugaacaaccgguuccagaucaagggcgucgagcucaagagcggcuacaaggacuggauccuguggaucuccuucgccaucagcugcuuccugcugugcguggugcuccugggguucaucaugugggccugccagaagggcaacauccgcugcaacaucugcaucuga

SEQ ID NO: 64848 - RNA, 1701 nt, Artificial Sequence
  derived and/or modified CDS sequence (opt1) from hemagglutinin__InfluenzaA__ABD94844
augaagaccaucaucgcccugagcuacauccucugcaugguguucgcccagaagcugcccggcaacgacaacuccaccgcgacgcugugccucgggcaccacgccgucccgaacggcacccuggugaagaccaucaccaacgaccagaucgaggugacgaacgccaccgagcugguccagagcuccagcaccgggcgcaucugcgacagcccccaccggauccucgacggcaagaacugcacccugaucgacgcccugcucggggacccccacugcgacggcuuccagaacaaggagugggaccuguucguggagcgcagcaaggccuacuccaacugcuaccccuacgacgugccggacuacgcgagccugcggucccucgucgccagcuccggcacgcuggaguucaacaacgagagcuucaacuggaccgggguggcccagaacggcaccuccuacgccugcaagcgccggagcgugaaguccuucuucagccgccugaacuggcuccacaagcuggaguacaaguaccccgcgcugaacgucaccaugcccaacaacgacaaguucgacaagcucuacaucuggggcgugcaccaccccuccacggacagcgaccagaccucccuguacgugcaggccagcgggcgggucaccgugagcaccaagcgcucccagcagacggugaucccgaacaucgggagccggcccuggguccgcggcguguccagcaucaucuccaucuacuggaccaucgugaagcccggcgacauccugcucaucaacagcaccgggaaccugaucgcgccccggggcuacuucaagauccgcuccgggaaguccuccaucaugcggagcgacgccccgaucggcaacugcaacuccgagugcaucacccccaacggcagcauccccaacgacaagcccuuccagaacgucaaccgcaucacguacggggccugcccgcgguacgugaagcagaacacccugaagcucgccaccggcaugcgcaacgugcccgagaagcagacccgggggaucuucggcgccaucgccggguucaucgagaacggcugggagggcauggucgacgggugguacggcuuccgccaccagaacuccgaggggacgggccaggccgccgaccucaagagcacccaggcggccaucaaccagaucaacgggaagcugaaccggcugaucgagaagaccaacgagaaguuccaccagaucgagaaggaguucuccgagguggagggccgcauccaggaccuggagaaguacguggaggacaccaagaucgaccuguggagcuacaacgccgagcuccuggucgcccuggagaaccagcacacgaucgaccucaccgacuccgagaugaacaagcuguucgagcggacccgcaagcagcugcgcgagaacgccgaggacaugggcaacgggugcuucaagaucuaccacaagugcgacaacgcgugcaucggcagcauccggaacgggaccuacgaccacgacguguaccgcgacgaggcccucaacaaccgguuccagaucaagggcgucgagcugaaguccggguacaaggacuggauccuguggaucagcuucgccaucagcugcuuccuccugugcguggugcugcucggcuucaucaugugggccugccagaagggcaacauccgcugcaacaucugcaucuga

SEQ ID NO: 64849 - RNA, 1701 nt, Artificial Sequence
  derived and/or modified CDS sequence (opt1) from hemagglutinin__InfluenzaA__ABD94855
augaagaccaucaucgcccugagcuacauccucugccugguguucgcccagaagcugcccggcaacgacaacuccaccgcgacgcucugccuggggcaccacgccgucccgaacggcacccuggugaagaccaucaccaacgaccagaucgaggugacgaacgccaccgagcucguccaggggagcuccaccggccgcaucugcgacagcccccaccggauccuggacgggaagaacugcacccugaucgacgcccuccugggcgacccccacugcgacggcuuccagaacaaggagugggaccuguucguggagcgcuccaaggccuacagcaacugcuaccccuacgacgugccggacuacgcgucccuccggagccuggucgccuccagcgggacgcuggaguucaacaacgaguccuucaacuggaccggcguggcccagaacgggaccagcuacgccugcaagcgcggcuccgucaagagcuucuucucccggcucaacuggcugcacaagcuggaguacaaguaccccgcgcucaacgugaccaugcccaacaacgacaaguucgacaagcuguacaucuggggcgugcaccaccccagcacggacuccgaccagaccagccuguacgugcaggccuccgggcgcgucaccgugagcaccaagcggagccagcagacggugaucccgaacaucggcucccgccccuggguccgcggggugagcucccggaucagcaucuacuggaccaucgugaagcccggcgacauccuccugaucaacuccaccgggaaccugaucgcgccccggggcuacuucaagauccgcagcggcaaguccagcaucaugcgguccgacgccccgaucgacaacugcaacagcgagugcaucacccccaacggguccauccccaacgacaagcccuuccagaacgucaaccgcaucacguacggcgccugcccgcgguacgugaagcagaacacccucaagcuggccaccgggaugcgcaacgugcccgagaagcagacccggggcaucuucggggccaucgccggcuucaucgagaacggcugggaggggauggucgacggcugguacggguuccgccaccagaacagcgagggcacggggcaggccgccgaccugaaguccacccaggcggccaucaaccagaucaacggcaagcucaaccggcugaucgagaagaccaacgagaaguuccaccagaucgagaaggaguucagcgagguggagggccgcauccaggaccuggagaaguacguggaggacaccaagaucgaccucugguccuacaacgccgagcugcuggucgcccucgagaaccagcacacgaucgaccugaccgacagcgagaugaacaagcuguucgagcggacccgcaagcagcuccgcgagaacgccgaggacauggggaacggcugcuucaagaucuaccacaagugcgacaacgcgugcaucggguccauccggaacggcaccuacgaccacgacguguaccgcgacgaggcccugaacaaccgguuccagaucaagggggucgagcucaagagcggcuacaaggacuggauccuguggaucuccuucgccaucagcugcuuccugcugugcguggugcuccugggcuucaucaugugggccugccagaaggggaacauccgcugcaacaucugcaucuga

SEQ ID NO: 64850 - RNA, 1701 nt, Artificial Sequence
  derived and/or modified CDS sequence (opt1) from hemagglutinin__InfluenzaA__ABD94866
augaagaccaucaucgcccugagcuacaucuccugccucguguucgcccagaagcugcccggcaacgacaacagcaccgcgacgcugugccucgggcaccacgccgucccgaacggcacccuggugaagaccaucaccaacgaccagaucgaggugacgaacgccaccgagcugguccaguccagcuccaccgggcgcaucugcgacggcccccaccagauccucgacgggaagaacugcacccugaucgacgcccugcucggcgacccccacugcgacggcuuccagaacaaggagugggaccuguucguggagcggagcaaggccuacuccaacugcuaccccuacgacgugccggacuacgcgagccugcgcucccucgucgccagcuccgggacgcuggaguucaccaacgagagcuucaacuggaccggcguggcccagaacgggaccuccuacgccugcaagcggggcagcgugaaguccuucuucagccgccugaacuggcuccacaagcuggaguacaaguaccccgcgcugaacgucacgaugcccaacaacgacaaguucgacaagcucuacaucuggggcgugcaccaccccuccaccgacagcgaccagaccucccuguacgugcagagcagcgggcggaucaccgucuccacgaagcgcagccagcagaccgugaccccgaacaucggcucccggcccugggugcgcggggucagcucccggaucagcaucuacuggaccaucgugaagcccggcgacauccugcucaucacguccaccgggaaccugaucgcgccccgcggcuacuucaagauccggcgcggcaagagcuccaucaugcggagcgacgccccgaucgacaacugcaacuccgagugcaucacccccaacgggagcauccccaacgacaagcccuuccagaacgugaaccgcaucaccuacggcgccugcccgcgguacgucaagcagaacacgcugaagcucgccaccgggaugcgcaacgugcccgagaagcagacccggggcaucuucggggccaucgccggcuucaucgagaacggcugggaggggaugguggacggcugguacggguuccgccaccagaacuccgagggcaccgggcaggccgccgaccucaagagcacgcaggccgcgaucaaccagaucaacggcaagcugaaccggcugaucgagaagaccaacgagaaguuccaccagaucgagaaggaguucuccgaggucgagggccgcauccaggaccuggagaaguacguggaggacaccaagaucgaccuguggagcuacaacgccgagcuccugguggcccuggagaaccagcacaccaucgaccucacggacuccgagaugaacaagcuguucgagcggacccgcaagcagcugcgcgagaacgccgaggacauggggaacggcugcuucaagaucuaccacaagugcgacaacgccugcaucgggagcauccggaacggcaccuacgaccacgacgucuaccgcgacgaggcgcucaacaaccgguuccagaucaaggggguggagcugaaguccggcuacaaggacuggauccuguggaucagcuucgccaucagcugcuuccuccugugcgucgugcugcucggcuucaucaugugggccugccagaaggggaacauccgcugcaacaucugcaucuga

SEQ ID NO: 64851 - RNA, 1701 nt, Artificial Sequence
  derived and/or modified CDS sequence (opt1) from hemagglutinin__InfluenzaA__ABD94877
augaagaccaucaucgcccugagcuacauccucugccugguguucgcccagaagcugcccggcaacgacaacuccaccgcgacgcucugccuggggcaccacgccgucccgaacggcacccuggugaagaccaucaccaacgaccagaucgaggugacgaacgccaccgagcucguccagagcuccagcaccgggcgcaucugcgacagcccccaccggauccuggacggcaagaacugcacccugaucgacgcccuccugggggacccccacugcgacggcuuccagaacaaggagugggaccuguucguggagcgcagcaaggccuacuccaacugcuaccccuacgacgugccggacuacgcgagccuccggucccuggucgccagcuccggcacgcuggaguucaacaacgagagcuucaacuggaccgggguggcccagaacggcaccuccuacgccugcaagcgccggagcgugaaguccuucuucagccgccucaacuggcugcacaagcuggaguacaaguaccccgcgcucaacgucaccaugcccaacaacgacaaguucgacaagcuguacaucuggggcgugcaccaccccuccacggacagcgaccagaccucccuguacgugcaggccagcgggcgggucaccgugagcaccaagcgcucccagcagacggugaucccgaacaucgggagccggcccuggguccgcggcguguccagccggaucuccaucuacuggaccaucgugaagcccggcgacauccuccugaucaacagcaccgggaaccugaucgcgccccgcggcuacuucaagauccgguccgggaaguccuccaucaugcgcagcgacgccccgaucgacaacugcaacuccgagugcaucacccccaacggcagcauccccaacgacaagcccuuccagaacgucaaccggaucacguacggcgccugcccgcgcuacgugaagcagaacacccucaagcuggccaccgggaugcggaacgugcccgagaagcagacccgcggcaucuucggggccaucgccggcuucaucgagaacgggugggagggcauggucgacggcugguacggguuccggcaccagaacuccgagggcacggggcaggccgccgaccucaagagcacccaggcggccaucaaccagaucaacggcaagcugaaccgccugaucgagaagaccaacgagaaguuccaccagaucgagaaggaguucuccgagguggaggggcggauccaggaccuggagaaguacguggaggacaccaagaucgaccucuggagcuacaacgccgagcugcuggucgcccucgagaaccagcacacgaucgaccugaccgacuccgagaugaacaagcuguucgagcgcacccgcaagcagcuccgggagaacgccgaggacaugggcaacggcugcuucaagaucuaccacaagugcgacaacgcgugcaucgggagcauccgcaacggcaccuacgaccacgacguguaccgggacgaggcccugaacaaccgcuuccagaucaagggggucgagcugaaguccggcuacaaggacuggauccucuggaucagcuucgccaucagcugcuuccugcugugcguggugcuccugggguucaucaugugggccugccagaagggcaacauccggugcaacaucugcaucuga

SEQ ID NO: 64852 - RNA, 1701 nt, Artificial Sequence
  derived and/or modified CDS sequence (opt1) from hemagglutinin__InfluenzaA__ABD94888
augaagaccaucaucgcccugagcuacauccucugccugguguucgcccagaagcugcccggcaacgacaacuccaccgcgacgcucugccuggggcaccacgccgucccgaacggcacccuggugaagaccaucaccaacgaccagaucgaggugacgaacgccaccgagcucguccagagcuccagcaccgggcgcaucugcgacagcccccaccggauccuggacggcaagaacugcacccugaucgacgcccuccugggggacccccacugcgacggcuucaagaacaaggagugggaccuguucguggagcgcagcacggccuacuccaacugcuaccccuacgacgugccggacuacgcgagccuccggucccuggucgccagcuccggcacccuggaguucaccaacgagggguucaacuggaccggcguggcccaggacgggacgagcuacgccugcaagcgcggcuccgugaaguccuucuucucccggcucaacuggcugcacaagcuggaguacaaguaccccgcgcucaacgucaccaugcccaacaacgacaaguucgacaagcuguacaucuggggcgugcaccaccccagcaccgacuccgaccagaccagccuguacgugcaggccuccgggcgcgucacggugagcaccaagcggagccagcagaccgugaucccgaacaucggcucccgccccuggguccgcggggugagcucccggaucagcaucuacuggaccaucgugaagcccggcgacauccuccugaucaacuccacggggaaccugaucgcgccccggggcuacuucaagauccgcagcggcaaguccagcaucaugcgguccgacgccccgaucgacaacugcaacagcgagugcaucacccccaacggguccauccccaacgacaagcccuuccagaacgucaaccgcaucaccuacggcgccugcccgcgguacgugaagcagaacacccucaagcuggccacggggaugcgcaacgugcccgagaagcagacccggggcaucuucggggccaucgccggcuucaucgagaacggcugggaggggauggucgacggcugguacggguuccgccaccagaacagcgagggcaccgggcaggccgccgaccugaaguccacccaggcggccaucaaccagaucaacggcaagcucaaccggcugaucgagaagacgaacgagaaguuccaccagaucgagaaggaguucagcgagguggagggccgcauccaggaccuggagaaguacguggaggacaccaagaucgaccucugguccuacaacgccgagcugcuggucgcccucgagaaccagcacaccaucgaccugaccgacagcgagaugaacaagcuguucgagcggacgcgcaagcagcuccgcgagaacgccgaggacauggggaacggcugcuucaagaucuaccacaagugcgacaacgcgugcaucggguccauccggaacggcaccuacgaccacgacguguaccgcgacgaggcccugaacaaccgguuccagaucaagggggucgagcucaagagcggcuacaaggacuggauccuguggaucuccuucgccaucagcugcuuccugcugugcguggugcuccugggcuucaucaugugggccugccagaaggggaacauccgcugcaacaucugcaucuga

SEQ ID NO: 64853 - RNA, 1701 nt, Artificial Sequence; identical to SEQ ID NO: 64831
  derived and/or modified CDS sequence (opt1) from hemagglutinin__InfluenzaA__ABD94899

SEQ ID NO: 64854 - RNA, 1701 nt, Artificial Sequence
  derived and/or modified CDS sequence (opt1) from hemagglutinin__InfluenzaA__ABD94910
augaagaccaucaucgcccugagcuacauccucugccugguguucgcccagaagcugcccggcaacgacaacuccaccgcgacgcucugccuggggcaccacgccgucccgaacggcacccuggugaagaccaucaccaacgaccagaucgaggugacgaacgccaccgagcucguccagaacagcuccaccgggcgcaucugcgacagcccccaccggauccuggacggcaagaacugcacccugaucgacgcccuccugggggacccccacugcgacggcuuccagaacaaggagugggaccuguucguggagcgcuccaaggccuacagcaacugcuaccccuacgacgugccggacuacgcgucccuccggagccuggucgccuccagcggcacgcuggaguucaacaacgaguccuucaacuggaccgggguggcccagaacggcaccagcuacgccugcaagcgccgguccgucaagagcuucuucucccgccucaacuggcugcacaagcuggaguacaaguaccccgcgcucaacgugaccaugcccaacaacgacaaguucgacaagcuguacaucuggggcgugcaccaccccagcacggacuccgaccagaccagccuguacgugcaggccuccgggcgggucaccgugagcaccaagcgcagccagcagacggugaucccgaacaucgggucccggcccuggguccgcggcgugagcucccggaucagcaucuacuggaccaucgugaagcccggcgacauccuccugaucaacuccaccgggaaccugaucgcgccccgcggcuacuucaagauccggagcgggaaguccagcaucaugcgcuccgacgccccgaucggcaacugcaacagcgagugcaucacccccaacggcuccauccccaacgacaagcccuuccagaacgucaaccggaucacguacggggccugcccgcgcuacgugaagcagaacacccucaagcuggccaccggcaugcggaacgugcccgagaagcagacccgcgggaucuucggcgccaucgccggguucaucgagaacggcugggagggcauggucgacgggugguacggcuuccggcaccagaacagcgaggggacgggccaggccgccgaccugaaguccacccaggcggccaucaaccagaucaacgggaagcucaaccgccugaucgagaagaccaacgagaaguuccaccagaucgagaaggaguucagcgagguggagggccggauccaggaccuggagaaguacguggaggacaccaagaucgaccucugguccuacaacgccgagcugcuggucgcccucgagaaccagcacacgaucgaccugaccgacagcgagaugaacaagcuguucgagcgcacccgcaagcagcuccgggagaacgccgaggacaugggcaacgggugcuuccgcaucuaccacaagugcgacaacgcgugcaucggcuccauccggaacgggaccuacgaccacgacguguaccgcgacgaggcccugaacaaccgguuccagaucaagggcgucgagcucaagagcggguacaaggacuggauccuguggaucuccuucgccaucagcugcuuccugcugugcguggugcuccugggcuucaucaugugggccugccagaagggcaacauccgcugcaacaucugcaucuga

SEQ ID NO: 64855 - RNA, 1701 nt, Artificial Sequence
  derived and/or modified CDS sequence (opt1) from hemagglutinin__InfluenzaA__ABD94921
augaagaccaucaucgcccugagcuacauccucugccugguguucgcccagaagcugcccggcaacgacaacuccaccgcgacgcucugccuggggcaccacgccgucccgaacggcacccuggugaagaccaucaccaacgaccagaucgaggugacgaacgccaccgagcucguccagagcuccagcaccgggcgcaucugcgacggcccccaccagauccuggacgggaagaacugcacccugaucgacgcccuccugggcgacccccacugcgacggcuuccagaacaaggagugggaccuguucguggagcgguccaaggccuacagcaacugcuaccccuacgacgugccggacuacgcgucccuccgcagccuggucgccuccagcgggacgcuggaguucaccaacgaguccuucaacuggaccggcguggcccagaacgggaccagcuacgccugcaagcggggcuccgucaagagcuucuucucccgccucaacuggcugcacaagcuggaguacaaguaccccgcgcucaacgugacgaugcccaacaacgacaaguucgacaagcuguacaucuggggcgugcaccaccccagcaccgacuccgaccagaccagccuguacgugcaguccagcgggcgggucaccgugagcacgaagcgcucccagcagaccgugaccccgaacaucggcagccggcccuggguccgcgggguguccagccggaucuccaucuacuggaccaucgugaagcccggcgacauccuccugaucaacagcacggggaaccugaucgcgccccgcggcuacuucaagauccggcgcggcaaguccagcaucaugcgguccgacgccccgaucgacaacugcaacagcgagugcaucacccccaacggguccauccccaacgacaagcccuuccagaacgucaaccgcaucaccuacggcgccugcccgcgguacgugaagcagaacacccucaagcuggccacggggaugcgcaacgugcccgagaagcagacccggggcaucuucggggccaucgccggcuucaucgagaacggcugggaggggauggucgacggcugguacggguuccgccaccagaacagcgagggcaccgggcaggccgccgaccugaaguccacccaggccgcgaucaaccagaucaacggcaagcucaaccggcugaucgagaagacgaacgagaaguuccaccagaucgagaaggaguucagcgagguggagggccgcauccaggaccuggagaaguacguggaggacaccaagaucgaccucugguccuacaacgccgagcugcuggucgcccucgagaaccagcacaccaucgaccugaccgacagcgagaugaacaagcuguucgagcggacgcgcaagcagcuccgcgagaacgccgaggacauggggaacggcugcuucaagaucuaccacaagugcgacaacgccugcaucggguccauccggaacggcaccuacgaccacgacguguaccgcgacgaggcgcugaacaaccgguuccagaucaagggggucgagcucaagagcggcuacaaggacuggauccuguggaucuccuucgccaucagcugcuuccugcugugcguggugcuccugggcuucaucaugugggccugccagaaggggaacauccgcugcaacaucugcaucuga

SEQ ID NO: 64856 - RNA, 1701 nt, Artificial Sequence; identical to SEQ ID NO: 64831
  derived and/or modified CDS sequence (opt1) from hemagglutinin__InfluenzaA__ABD94932

SEQ ID NO: 64857 - RNA, 1698 nt, Artificial Sequence
  derived and/or modified CDS sequence (opt1) from hemagglutinin__InfluenzaA__ABD94943
augaaggugaagcugcucauccugcugugcaccuucaccgccacguacgccgacaccaucugcaucggcuaccacgcgaacaacagcaccgacaccgucgacacggugcucgagaagaacgugaccgucacccacuccgugaaccugcuggaggacagccacaacgggaagcucugccugcugaagggcaucgcgccccuccagcuggggaacugcuccguggccggcuggauccuggggaacccggagugcgagcuccugaucagcaaggaguccuggagcuacaucgucgagacccccaaccccgagaacggcgccugcuaccccggcuacuucgccgacuacgaggagcugcgcgagcagcucuccagcguguccagcuucgagcgguucgagaucuucccgaaggaguccagcuggcccaaccacacggugaccggggucuccgccagcugcucccacaacggcaagagcuccuucuaccgcaaccugcuguggcucaccgggaagaacggccuguaccccaaccugagcaaguccuacgccaacaacaagaagaaggaggugcucauccuguggggcgugcaccacccgcccaacaucggggaccagcggacccuguaccacacggagaacgccuacgucagcguggugagcucccacuacagccgccgguucacccccgagaucaccaagcgccccaagguccgggaccaggagggccgcaucaacuacuacuggacccuccuggagcccggggacacgaucaucuucgaggccaacggcaaccugaucgcgccgugguacgccuucgcccucucccggggguucggcagcggcaucaucaccuccaacgcccccauggacgagugcgacgccaagugccagacgccccagggggcgaucaacagcucccugcccuuccagaacgugcacccggugaccaucggcgagugccccaaguacguccgcagcgccaagcugcggauggugaccgggcuccgcaacauccccuccauccagagccggggccuguucggggccaucgccggcuucaucgagggcggguggaccggcaugguggacgggugguacggcuaccaccaccagaacgagcagggguccggcuacgccgcggaccagaaguccacccagaacgccaucaacggcaucaccaacaaggucaacagcgugaucgagaagaugaacacgcaguucaccgccguggggaaggaguucaacaagcuggagcgccggauggagaaccucaacaagaaggucgacgacggcuuccuggacaucuggaccuacaacgccgagcugcucgugcugcuggagaacgagcgcacccucgacuuccacgacagcaacgucaagaaccuguacgagaaggugaagucccagcugaagaacaacgccaaggagaucgggaacggcugcuucgaguucuaccacaagugcaacaacgagugcauggagagcgugaagaacgggacguacgacuaccccaaguacuccgaggagagcaagcucaaccgggagaagaucgacggcgucaagcuggacuccaugggcguguaccagauccuggcgaucuacagcaccguggccagcucccucguccugcuggugagccucggggccaucuccuucuggaugugcagcaacggcucccugcagugccgcaucugcaucuga

SEQ ID NO: 64858 - RNA, 1701 nt, Artificial Sequence; identical to SEQ ID NO: 64657
  derived and/or modified CDS sequence (opt1) from hemagglutinin__InfluenzaA__ABD94954

SEQ ID NO: 64859 - RNA, 1698 nt, Artificial Sequence; identical to SEQ ID NO: 64766
  derived and/or modified CDS sequence (opt1) from hemagglutinin__InfluenzaA__ABD94965

SEQ ID NO: 64860 - RNA, 1698 nt, Artificial Sequence; identical to SEQ ID NO: 64765
  derived and/or modified CDS sequence (opt1) from hemagglutinin__InfluenzaA__ABD94987

SEQ ID NO: 64861 - RNA, 1698 nt, Artificial Sequence; identical to SEQ ID NO: 64765
  derived and/or modified CDS sequence (opt1) from hemagglutinin__InfluenzaA__ABD94998

SEQ ID NO: 64862 - RNA, 1698 nt, Artificial Sequence; identical to SEQ ID NO: 64765
  derived and/or modified CDS sequence (opt1) from hemagglutinin__InfluenzaA__ABD95009

SEQ ID NO: 64863 - RNA, 1698 nt, Artificial Sequence; identical to SEQ ID NO: 64766
  derived and/or modified CDS sequence (opt1) from hemagglutinin__InfluenzaA__ABD95020

SEQ ID NO: 64864 - RNA, 1698 nt, Artificial Sequence
  derived and/or modified CDS sequence (opt1) from hemagglutinin__InfluenzaA__ABD95031
augaaggugaagcugcucguccugcugugcaccuucaccgccacguacgccgacaccaucugcaucggcuaccacgcgaacaacagcaccgacaccguggacacggugcucgagaagaacgucaccgugacccacuccgugaaccugcuggaggacagccacaacgggaagcucugccugcugaagggcaucgcgccccuccagcuggggaacugcuccgucgccggcuggauccuggggaacccggagugcgagcuccugaucagcaaggaguccuggagcuacaucguggagacccccaaccccgagaacggcacgugcuaccccggcuacuucaccgacuacgaggagcugcgcgagcagcucuccagcguguccagcuucgagcgguucgagaucuucccgaaggaguccagcuggcccaaccacaccgucaccgggguguccgccagcugcucccacaacggcaagagcuccuucuaccgcaaccugcuguggcucacggggaagaacggccuguaccccaaccugcggcgcagcuacgccaacaacaaggagaaggaggugcucguccuguggggcgugcaccacccgcccaacaucggggaccagaaggcccuguaccacaccgagaacgccuacguguccgucgugagcagccacuacucccggcgcuucacccccgagaucgccaagcggcccaaggugcgcggccaggaggggcggaucaacuacuacuggacccuccuggagcccggcgacacgaucaucuucgaggccaacgggaaccugaucgcgccgcgcuacgccuucgcccucagccggggcuucggcuccgggaucaucaccagcaacgcccccauggacgagugcgacgccaagugccagacgccccagggcgcgaucaacuccagccugcccuuccagaacguccacccggugaccaucggggagugccccaaguacgugcgcuccgccaagcugcggauggucaccggccuccgcaacauccccagcauccagucccgggggcuguucggcgccaucgccggcuucaucgagggcggguggaccgggaugguggacggcugguacggguaccaccaccagaacgagcagggcagcggcuacgccgcggaccagaaguccacccagaacgccaucaacgggaucaccaacaaggugaacagcaucaucgagaagaugaacacgcaguucaccgccgucggcaaggaguucaacaagcuggagcgccggauggagaaccucaacaagaagguggacgacggguuccuggacaucuggaccuacaacgccgagcugcucguccugcuggagaacgagcgcacccucgacuuccacgacuccaacgugaagaaccuguacgagaaggucaagagccagcugaagaacaacgccaaggagaucggcaacgggugcuucgaguucuaccacaagugcaacaacgagugcauggaguccgugaagaacggcacguacgacuaccccaaguacagcgaggaguccaagcucaaccgggagaagaucgacggcgugaagcuggagagcauggggguguaccagauccuggcgaucuacuccaccgucgccagcagccucgugcugcuggugucccucggcgccaucagcuucuggaugugcuccaacgggagccugcagugccgcaucugcaucuga

SEQ ID NO: 64865 - RNA, 1698 nt, Artificial Sequence
  derived and/or modified CDS sequence (opt1) from hemagglutinin__InfluenzaA__ABD95042
augaaggccaagcugcucgugcugcugugcaccuucaccgccacguacgcggacaccaucugcaucggcuaccacgccaacaacagcaccgacaccgucgacacggugcucgagaagaacgugaccgucacccacuccgugaaccugcuggaggacagccacaacgggaagcucugccugcugaagggcaucgcgccccuccagcuggggaacugcuccguggccggcuggauccuggggaacccggagugcgagcuccugaucagcaaggaguccuggagcuacaucgucgagacccccaaccccgagaacggcacgugcuaccccggcuacuucgccgacuacgaggagcugcgcgagcagcucuccagcguguccagcuucgagcgguucgagaucuucccgaagggguccagcuggcccaaccacaccgugaccggcgucuccgccagcugcucccacaacggcaagagcuccuucuaccgcaaccugcuguggcucaccgggaagaacgggcuguaccccaaccugagcauguccuacgugaacaacaagggcaaggaggugcucguccuguggggcgugcaccacccgcccaacaucggggaccagcgggcccuguaccacacggagaacgccuacgugagcgucgugagcucccacuacagccgccgguucacccccgagaucgccaagcgccccaaggugcgggaccaggagggccgcaucaacuacuacuggacccuccuggagcccggggacaccaucaucuucgaggcgaacggcaaccugaucgccccgugguacgccuucgcccucucccggggcuucgggagcggcaucaucacguccaacgcccccaugggggagugcgacgcgaagugccagacgccccagggcgccaucaacagcucccugcccuuccagaacguccacccggugaccaucggggagugccccaaguacgugcgcagcgccaagcugcggauggucaccggccuccgcaacauccccuccauccagagccggggccuguucggggccaucgccggcuucaucgagggcggguggaccgggaugguggacggcugguacggcuaccaccaccagaacgagcagggguccggcuacgcggccgaccagaaguccacccagaacgccaucaacgggaucaccaacaaggugaacagcgucaucgagaagaugaacacccaguucacggccgugggcaaggaguucaacaagcuggagcgccggauggagaaccucaacaagaaggucgacgacggguuccuggacaucuggaccuacaacgccgagcugcucgugcugcuggagaacgagcgcacccucgacuuccacgacagcaacgugaagaaccuguacgagaaggucaagucccagcugaagaacaacgcgaaggagaucggcaacggcugcuucgaguucuaccacaagugcaacaacgagugcauggagagcgugaagaacgggaccuacgacuaccccaaguacuccgaggagagcaagcucaaccgggagaagaucgacggcgugaagcuggaguccaugggggucuaccagauccuggccaucuacagcacgguggccagcucccucgugcugcuggucagccucggcgccaucuccuucuggaugugcagcaacggcucccugcagugccgcaucugcaucuga

SEQ ID NO: 64866 - RNA, 1698 nt, Artificial Sequence; identical to SEQ ID NO: 64865
  derived and/or modified CDS sequence (opt1) from hemagglutinin__InfluenzaA__ABD95053

SEQ ID NO: 64867 - RNA, 1698 nt, Artificial Sequence; identical to SEQ ID NO: 64824
  derived and/or modified CDS sequence (opt1) from hemagglutinin__InfluenzaA__ABD95064

SEQ ID NO: 64868 - RNA, 1698 nt, Artificial Sequence
  derived and/or modified CDS sequence (opt1) from hemagglutinin__InfluenzaA__ABD95075
augaaggccaagcugcucgugcugcugugcaccuucaccgccacguacgcggacaccaucugcaucggcuaccacgccaacaacagcaccgacaccgucgacacggugcucgagaagaacgugaccgucacccacuccgugaaccugcuggaggacagccacaacgggaagcucugccugcugaagggcaucgcgccccuccagcuggggaacugcuccguggccggcuggauccuggggaacccggagugcgagcuccugaucagcaaggaguccuggagcuacaucgucgagacccccaaccccgagaacggcacgugcuaccccggcuacuucgccgacuacgaggagcugcgcgagcagcucuccagcguguccagcuucgagcgguucgagaucuucccgaagggguccagcuggcccaaccacaccgugaccggcgucuccgccagcugcucccacaacggcaagagcuccuucuaccgcaaccugcuguggcucaccgggaagaacgggcuguaccccaaccugagcauguccuacgugaacaacaaggagaaggaggugcucguccuguggggcgugcaccacccgcccaacaucggcgaccagcgggcccuguaccacacggagaacgccuacgugagcgucgugagcucccacuacagccgccgguucacccccgagaucgccaagcgccccaaggugcgggaccaggaggggcgcaucaacuacuacuggacccuccuggagcccggcgacaccaucaucuucgaggcgaacgggaaccugaucgccccgugguacgccuucgcccucuccaagggcuucggcagcgggaucaucacguccaacgcccccaugggcgagugcgacgcgaagugccagacgccccagggggccaucaacagcucccugcccuuccagaacguccacccggugaccaucggcgagugccccaaguacgugcggagcgccaagcugcgcauggucaccgggcuccggaacauccccuccauccagagccgcggccuguucggcgccaucgccggguucaucgagggcggguggaccggcaugguggacgggugguacggcuaccaccaccagaacgagcagggcuccggguacgcggccgaccagaaguccacccagaacgccaucaacggcaucaccaacaaggugaacagcgucaucgagaagaugaacacccaguucacggccguggggaaggaguucaacaagcuggagcggcgcauggagaaccucaacaagaaggucgacgacggcuuccuggacaucuggaccuacaacgccgagcugcucgugcugcuggagaacgagcggacccucgacuuccacgacagcaacgugaagaaccuguacgagaaggucaagucccagcugaagaacaacgcgaaggagaucgggaacggcugcuucgaguucuaccacaagugcaacaacgagugcauggagagcgugaagaacggcaccuacgacuaccccaaguacuccgaggagagcaagcucaaccgcgagaagaucgacggggugaagcuggaguccaugggcgucuaccagauccuggccaucuacagcacgguggccagcucccucgugcugcuggucagccucggggccaucuccuucuggaugugcagcaacggcucccugcagugccggaucugcaucuga

SEQ ID NO: 64869 - RNA, 1698 nt, Artificial Sequence; identical to SEQ ID NO: 64865
  derived and/or modified CDS sequence (opt1) from hemagglutinin__InfluenzaA__ABD95086

SEQ ID NO: 64870 - RNA, 1698 nt, Artificial Sequence; identical to SEQ ID NO: 64824
  derived and/or modified CDS sequence (opt1) from hemagglutinin__InfluenzaA__ABD95097

SEQ ID NO: 64871 - RNA, 1698 nt, Artificial Sequence
  derived and/or modified CDS sequence (opt1) from hemagglutinin__InfluenzaA__ABD95119
augaaggccaagcugcucauccugcugugcaccuucaccgccacguacgcggacaccaucugcaucggcuaccacgccaacaacagcaccgacaccguggacacgguccucgagaagaacgugaccgugacccacuccgucaaccugcuggaggacagccacaacgggaagcucugccugcugaagggcaucgcgccccuccagcuggggaacugcuccguggccggcuggauccuggggaacccggagugcgagcuccugaucagcaaggaguccuggagcuacaucguggagacccccaaccccgagaacggcacgugcuaccccggcuacuucgccgacuacgaggagcugcgcgagcagcucuccagcgucuccagcuucgagcgguucgagaucuucccgaagggguccagcuggcccaaccacaccgugaccggcguguccgccagcugcucccacaacggcaagagcuccuucuaccgcaaccugcuguggcucaccgggaagaacgggcuguaccccaaccugagcauguccuacgucaacaacaaggagaaggaggugcucgugcuguggggcguccaccacccgcccaacaucggcgaccagcgggcccuguaccacacggagaacgccuacgugagcguggucagcucccacuacagccgccgguucacccccgagaucgccaagcgccccaaggugcgggaccaggaggggcgcaucaacuacuacuggacccuccuggagcccggcgacaccaucaucuucgaggcgaacgggaaccugaucgccccgugguacgccuucgcccucucccggggcuucggcagcgggaucaucacguccaacgcccccaugggcgagugcgacgcgaagugccagacgccccagggggccaucaacagcucccugcccuuccagaacgugcacccggucaccaucggcgagugccccaaguacgugcgcagcgccaagcugcggauggugaccgggcuccgcaacauccccuccauccagagccggggccuguucggcgccaucgccggguucaucgagggcggguggaccggcauggucgacgggugguacggcuaccaccaccagaacgagcagggcuccggguacgcggccgaccagaaguccacccagaacgccaucaacggcaucaccaacaaggugaacagcgugaucgagaagaugaacacccaguucacggccgucgggaaggaguucaacaagcuggagcgccggauggagaaccucaacaagaagguggacgacggcuuccuggacaucuggaccuacaacgccgagcugcucguccugcuggagaacgagcgcacccucgacuuccacgacagcaacgugaagaaccuguacgagaaggugaagucccagcugaagaacaacgcgaaggagaucgggaacggcugcuucgaguucuaccacaagugcaacaacgagugcauggagagcgucaagaacggcaccuacgacuaccccaaguacuccgaggagagcaagcucaaccgggagaagaucgacggggugaagcuggaguccaugggcguguaccagauccuggccaucuacagcacggucgccagcucccucgugcugcuggugagccucggggccaucuccuucuggaugugcagcaacggcucccugcagugccgcaucugcaucuga

SEQ ID NO: 64872 - RNA, 1698 nt, Artificial Sequence
  derived and/or modified CDS sequence (opt1) from hemagglutinin__InfluenzaA__ABD95130
augaaggccaagcugcucgugcugcugugcaccuucaccgccacguacgcggacaccaucugcaucggcuaccacgccaacaacagcaccgacaccgucgacacggugcucgagaagaacgugaccgucacccacuccgugaaccugcuggaggacagccacaacgggaagcucugccugcugaagggcaucgcgccccuccagcuggggaacugcuccguggccggcuggauccuggggaacccggagugcgagcuccugaucagcaaggaguccuggagcuacaucgucgagacccccaaccccgagaacggcacgugcuaccccggcuacuucgccgacuacgaggagcugcgcgagcagcucuccagcguguccagcuucgagcgguucgagaucuucccgaagggguccagcuggcccaaccacaccgugaccggcgucuccgccagcugcucccacaacggcaagagcuccuucuaccgcaaccugcuguggcucaccgggaagaacgggagcuaccccaaccuguccaugagcuacgugaacaacaaggagaaggaggugcugguccucuggggcgugcaccacccgcccaacaucggcgaccagcgggcccuguaccacacggagaacgccuacgugagcgucguguccagccacuacucccgccgguucacccccgagaucgccaagcgccccaaggugcgggaccaggaggggcgcaucaacuacuacuggacccugcucgagcccggcgacaccaucaucuucgaggcgaacgggaaccugaucgccccgugguacgccuucgcccugagccggggcuucggcuccgggaucaucacgagcaacgcccccaugggcgagugcgacgcgaagugccagacgccccagggggccaucaacuccagccuccccuuccagaacguccacccggugaccaucggcgagugccccaaguacgugcgcuccgccaagcugcggauggucaccgggcugcgcaacauccccagcauccagucccggggccucuucggcgccaucgccggguucaucgagggcggguggaccggcaugguggacgggugguacggcuaccaccaccagaacgagcagggcagcggguacgcggccgaccagaaguccacccagaacgccaucaacggcaucaccaacaaggugaacagcgucaucgagaagaugaacacccaguucacggccguggggaaggaguucaacaagcuggagcgccggauggagaaccugaacaagaaggucgacgacggcuuccucgacaucuggaccuacaacgccgagcugcuggugcuccuggagaacgagcgcacccuggacuuccacgacuccaacgugaagaaccucuacgagaaggucaagagccagcugaagaacaacgcgaaggagaucgggaacggcugcuucgaguucuaccacaagugcaacaacgagugcauggaguccgugaagaacggcaccuacgacuaccccaaguacagcgaggaguccaagcugaaccgggagaagaucgacggggugaagcucgagagcaugggcgucuaccagauccuggccaucuacagcacgguggccuccagccuggugcuccuggucucccugggggccaucagcuucuggaugugcuccaacggcagccuccagugccgcaucugcaucuga

SEQ ID NO: 64873 - RNA, 1698 nt, Artificial Sequence; identical to SEQ ID NO: 64824
  derived and/or modified CDS sequence (opt1) from hemagglutinin__InfluenzaA__ABD95141

SEQ ID NO: 64874 - RNA, 1698 nt, Artificial Sequence; identical to SEQ ID NO: 64824
  derived and/or modified CDS sequence (opt1) from hemagglutinin__InfluenzaA__ABD95152

SEQ ID NO: 64875 - RNA, 1698 nt, Artificial Sequence; identical to SEQ ID NO: 64871
  derived and/or modified CDS sequence (opt1) from hemagglutinin__InfluenzaA__ABD95163

SEQ ID NO: 64876 - RNA, 1698 nt, Artificial Sequence; identical to SEQ ID NO: 64865
  derived and/or modified CDS sequence (opt1) from hemagglutinin__InfluenzaA__ABD95174

SEQ ID NO: 64877 - RNA, 1698 nt, Artificial Sequence
  derived and/or modified CDS sequence (opt1) from hemagglutinin__InfluenzaA__ABD95185
augaaggccaagcugcucgugcugcugugcaccuucaccgccacguacgcggacaccaucugcaucggcuaccacgccaacaacagcaccgacaccgucgacacggugcucgagaagaacgugaccgucacccacuccgugaaccugcuggaggacagccacaacgggaagcucugccugcugaagggcaucgcgccccuccagcuggggaacugcuccguggccggcuggauccuggggaacccggagugcgagcuccugaucagcaaggaguccuggagcuacaucgucgagacccccaaccccgagaacggcacgugcuaccccggcuacuucgccgacuacgaggagcugcgcgagcagcucuccagcguguccagcuucgagcgguucgagaucuucccgaagggguccagcuggcccaaccacaccgugaccggcgucuccgccagcugcucccacaacggggagagcuccuucuaccgcaaccugcuguggcucaccggcaagaacgggcuguaccccaaccugagcauguccuacgugaacaacaaggagaaggaggugcucguccuguggggcgugcaccacccgcccaacaucggcgaccagcgggcccuguaccacacggagaacgccuacgugagcgucgugagcucccacuacagccgccgguucacccccgagaucgccaagcgccccaaggugcgggaccaggaggggcgcaucaacuacuacuggacccuccuggagcccggcgacaccaucaucuucgaggcgaacgggaaccugaucgccccgugguacgccuucgcccucucccggggcuucggcagcgggaucaucacguccaacgcccccaugggcgagugcgacgcgaagugccagacgccccagggggccaucaacagcucccugcccuuccagaacguccacccggugaccaucggcgagugccccaaguacgugcgcagcgccaagcugcggauggucaccgggcuccgcaacauccccuccauccagagccggggccuguucggcgccaucgccggguucaucgagggcggguggaccggcaugguggacgggugguacggcuaccaccaccagaacgagcagggcuccggguacgcggccgaccagaaguccacccagaacgccaucaacggcaucaccaacaaggugaacagcgucaucgagaagaugaacacccaguucacggccguggggaaggaguucaacaagcuggagcgccggauggagaaccucaacaagaaggucgacgacggcuuccuggacaucuggaccuacaacgccgagcugcucgugcugcuggagaacgagcgcacccucgacuuccacgacagcaacgugaagaaccuguacgagaaggucaagucccagcugaagaacaacgcgaaggagaucgggaacggcugcuucgaguucuaccacaagugcaacaacgagugcauggagagcgugaagaacggcaccuacgacuaccccaaguacuccgaggagagcaagcucaaccgggagaagaucgacggggugaagcuggaguccaugggcgucuaccagauccuggccaucuacagcacgguggccagcucccucgugcugcuggucagccucggggccaucuccuucuggaugugcagcaacggcucccugcagugccgcaucugcaucuga

SEQ ID NO: 64878 - RNA, 1698 nt, Artificial Sequence; identical to SEQ ID NO: 64865
  derived and/or modified CDS sequence (opt1) from hemagglutinin__InfluenzaA__ABD95196

SEQ ID NO: 64879 - RNA, 1698 nt, Artificial Sequence; identical to SEQ ID NO: 64323
  derived and/or modified CDS sequence (opt1) from hemagglutinin__InfluenzaA__ABD95207

SEQ ID NO: 64880 - RNA, 1698 nt, Artificial Sequence; identical to SEQ ID NO: 64824
  derived and/or modified CDS sequence (opt1) from hemagglutinin__InfluenzaA__ABD95218

SEQ ID NO: 64881 - RNA, 1698 nt, Artificial Sequence; identical to SEQ ID NO: 64871
  derived and/or modified CDS sequence (opt1) from hemagglutinin__InfluenzaA__ABD95229

SEQ ID NO: 64882 - RNA, 1698 nt, Artificial Sequence; identical to SEQ ID NO: 64824
  derived and/or modified CDS sequence (opt1) from hemagglutinin__InfluenzaA__ABD95240

SEQ ID NO: 64883 - RNA, 1698 nt, Artificial Sequence; identical to SEQ ID NO: 64865
  derived and/or modified CDS sequence (opt1) from hemagglutinin__InfluenzaA__ABD95251

SEQ ID NO: 64884 - RNA, 1698 nt, Artificial Sequence; identical to SEQ ID NO: 64323
  derived and/or modified CDS sequence (opt1) from hemagglutinin__InfluenzaA__ABD95262

SEQ ID NO: 64885 - RNA, 1698 nt, Artificial Sequence; identical to SEQ ID NO: 64824
  derived and/or modified CDS sequence (opt1) from hemagglutinin__InfluenzaA__ABD95273

SEQ ID NO: 64886 - RNA, 1698 nt, Artificial Sequence; identical to SEQ ID NO: 64320
  derived and/or modified CDS sequence (opt1) from hemagglutinin__InfluenzaA__ABD95284

SEQ ID NO: 64887 - RNA, 1698 nt, Artificial Sequence; identical to SEQ ID NO: 64824
  derived and/or modified CDS sequence (opt1) from hemagglutinin__InfluenzaA__ABD95295

SEQ ID NO: 64888 - RNA, 1698 nt, Artificial Sequence
  derived and/or modified CDS sequence (opt1) from hemagglutinin__InfluenzaA__ABD95306
augaaggccaagcugcucgugcugcugugcaccuucaccgccacguacgcggacaccaucugcaucggcuaccacgccaacaacagcaccgacaccgucgacacggugcucgagaagaacgugaccgucacccacuccgugaaccugcuggaggacagccacaacgggaagcucugccugcugaagggcaucgcgccccuccagcuggggaacugcuccguggccggcuggauccuggggaacccggagugcgagcuccugaucagcaaggaguccuggagcuacaucgucgagacccccaaccccgagaacggcacgugcuaccccggcuacuucgccgacuacgaggagcugcgcgagcagcucuccagcguguccagcuucgagcgguucgagaucuucccgaagggguccagcuggcccaaccacaccgugaccggcgucuccgccagcugcucccacaacggcaagagcuccuucuaccgcaaccugcuguggcucaccgggaagaacgggcuguaccccaaccugagcauguccuacgugaacaacaaggagaaggagauccucgugcuguggggcguccaccacccgcccaacaucggcgaccagcgggcccuguaccacacggagaacgccuacgugagcguggucagcucccacuacagccgccgguucacccccgagaucgccaagcgccccaaggugcgggaccaggaggggcgcaucaacuacuacuggacccuccuggagcccggcgacaccaucaucuucgaggcgaacgggaaccugaucgccccgugguacgccuucgcccucucccggggcuucggcagcgggaucaucacguccaacgcccccaugggcgagugcgacgcgaagugccagacgccccagggggccaucaacagcucccugcccuuccagaacgugcacccggucaccaucggcgagugccccaaguacgugcgcagcgccaagcugcggauggugaccgggcuccgcaacauccccuccauccagagccggggccuguucggcgccaucgccggguucaucgagggcggguggaccggcauggucgacgggugguacggcuaccaccaccagaacgagcagggcuccggguacgcggccgaccagaaguccacccagaacgccaucaacggcaucaccaacaaggugaacagcgugaucgagaagaugaacacccaguucacggccgucgggaaggaguucaacaagcuggagcgccggauggagaaccucaacaagaagguggacgacggcuuccuggacaucuggaccuacaacgccgagcugcucguccugcuggagaacgagcgcacccucgacuuccacgacagcaacgugaagaaccuguacgagaaggugaagucccagcugaagaacaacgcgaaggagaucgggaacggcugcuucgaguucuaccacaagugcaacaacgagugcauggagagcgucaagaacggcaccuacgacuaccccaaguacuccgaggagagcaagcucaaccgggagaagaucgacggggugaagcuggaguccaugggcguguaccagauccuggccaucuacagcacggucgccagcucccucgugcugcuggugagccucggggccaucuccuucuggaugugcagcaacggcucccugcagugccgcaucugcaucuga

SEQ ID NO: 64889 - RNA, 1698 nt, Artificial Sequence; identical to SEQ ID NO: 64865
  derived and/or modified CDS sequence (opt1) from hemagglutinin__InfluenzaA__ABD95328

SEQ ID NO: 64890 - RNA, 1701 nt, Artificial Sequence
  derived and/or modified CDS sequence (opt1) from hemagglutinin__InfluenzaA__ABD95339
augaaggccaagcugcucgugcugcugugcgcccucagcgcgaccgacgccgacaccaucugcaucggcuaccacgccaacaacuccacggacaccgucgacaccgugcuggagaagaacgugaccgucacgcacagcgugaaccugcucgaggacucccacaacgggaagcugugccgccugaagggcaucgcgccccuccagcuggggaagugcagcaucgccggcuggauccuggggaacccggagugcgagucccucuucagcaagaaguccuggagcuacaucgccgagacccccaacuccgagaacgggaccugcuaccccggcuacuucgccgacuacgaggagcugcgggagcagcugagcuccgugagcuccuucgagcgcuucgagaucuuccccaaggagagcuccuggccgaagcacagcgucacccgcggggugacggccuccugcagccacaagggcaaguccagcuucuaccggaaccuccuguggcugaccgagaagaacgggagcuaccccaaccucuccaagagcuacgugaacgacaaggagaaggagguccuggugcuguggggcgugcaccaccccuccaacaucgaggaccagaagaccaucuaccggaaggagaacgccuacgucagcgugguguccagccacuacaaccgccgguucacccccgagaucgcgaagcgcccgaagguccgggaccaggaggggcgcaucaacuacuacuggacgcuccuggagcccggcgacaccaucaucuucgaggccaacggcaaccugaucgcccccugguacgccuucgcccucucccggggguucggcagcgggaucaucaccuccaacgugagcauggacgagugcgacgcgaagugccagacgccccagggcgccaucaacuccagccugccguuccagaacgugcaccccgucaccaucggcgagugccccaaguacgugcgcuccaccaagcugcggauggugaccgggcuccgcaacauccccagcauccagucccggggccuguucggggccaucgccggcuucaucgagggcggcuggaccggcaugaucgacgggugguacggcuaccaccaccagaacgagcaggggagcggcuacgccgcggaccagaaguccacgcagaacgccaucaacgggaucaccaacaaggucaacagcgugaucgagaagaugaacacccaguucaccgccgugggcaaggaguucaacaagcuggagaagcgcauggagaaccucaacaagaaggucgacgacggcuuccuggacaucuggacguacaacgccgagcugcucgugcugcuggagaacgagcggacccucgacuuccacgacuccaacgucaagaaccuguacgagaaggucaagagccagcugaagaacaacgccaaggagaucgggaacggcugcuucgaguucuaccacaagugcaacaacgagugcauggagagcgugaagaacgggaccuacgacuacccgaaguacuccgaggagagcaagcucaaccgcgagaagaucgacggcgugaagcuggaguccauggggguguaccagauccuggcgaucuacagcaccguggccuccagccucguccugcuggugucccucggcgccaucagcuucuggaugugcuccaacggcagccugcagugccggaucugcaucuga

SEQ ID NO: 64891 - RNA, 1698 nt, Artificial Sequence; identical to SEQ ID NO: 64766
  derived and/or modified CDS sequence (opt1) from hemagglutinin__InfluenzaA__ABE11657

SEQ ID NO: 64892 - RNA, 1698 nt, Artificial Sequence
  derived and/or modified CDS sequence (opt1) from hemagglutinin__InfluenzaA__ABE11668
augaaggccaagcugcucgugcugcugugcaccuucaccgccacguacgcggacaccaucugcaucggcuaccacgccaacaacagcaccgacaccgucgacacggugcucgagaagaacgugaccgucacccacuccgugaaccugcuggaggacagccacaacgggaagcucugccugcugaagggcaucgcgccccuccagcuggggaacugcuccguggccggcuggauccuggggaacccggagugcgagcuccugaucagcaaggaguccuggagcuacaucgucgagacccccaaccccgagaacggcacgugcuaccccggcuacuucgccgacuacgaggagcugcgcgagcagcucuccagcguguccagcuucgagcgguucgagaucuucccgaaggaguccagcuggcccaaccacaccgugaccggggucuccgccagcugcucccacaacggcaagagcuccuucuaccgcaaccugcuguggcucaccgggaagaacggccuguaccccaaccugagcauguccuacgugaacaacaaggagaaggaggugcucguccuguggggcgugcaccacccgcccaacaucggggaccagcgggcccuguaccacacggagaacgccuacgugagcgucgugagcucccacuacagccgccgguucacccccgagaucgccaagcgccccaaggugcgggaccaggagggccgcaucaacuacuacuggacccuccuggagcccggggacaccaucaucuucgaggcgaacggcaaccugaucgccccgugguacgccuucgcccucucccggggguucggcagcggcaucaucacguccaacgcccccauggacgagugcgacgcgaagugccagacgccccagggggccaucaacagcucccugcccuuccagaacguccacccggugaccaucggcgagugccccaaguacgugcgcagcgccaagcugcggauggucaccgggcuccgcaacauccccuccauccagagccggggccuguucggggccaucgccggcuucaucgagggcggguggaccggcaugguggacgggugguacggcuaccaccaccagaacgagcagggguccggcuacgcggccgaccagaaguccacccagaacgccaucaacggcaucaccaacaaggugaacagcgucaucgagaagaugaacacccaguucacggccguggggaaggaguucaacaagcuggagcgccggauggagaaccucaacaagaaggucgacgacggcuuccuggacaucuggaccuacaacgccgagcugcucgugcugcuggagaacgagcgcacccucgacuuccacgacagcaacgugaagaaccuguacgagaaggucaagucccagcugaagaacaacgcgaaggagaucgggaacggcugcuucgaguucuaccacaagugcaacaacgagugcauggagagcgugaagaacgggaccuacgacuaccccaaguacuccgaggagagcaagcucaaccgggagaagaucgacggcgugaagcuggaguccaugggcgucuaccagauccuggccaucuacagcacgguggccagcucccucgugcugcuggucagccucggggccaucuccuucuggaugugcagcaacggcucccugcagugccgcaucugcaucuga

SEQ ID NO: 64893 - RNA, 1698 nt, Artificial Sequence
  derived and/or modified CDS sequence (opt1) from hemagglutinin__InfluenzaA__ABE11679
augaaggugaagcugcucguccugcugugcaccuucaccgccacguacgccgacaccaucugcaucggcuaccacgcgaacaacagcaccgacaccguggacacggugcucgagaagaacgucaccgugacccacuccgugaaccugcuggaggacagccacaacgggaagcucugccugcugaagggcaucgcgccccuccagcuggggaacugcuccgucgccggcuggauccuggggaacccggagugcgagcuccugaucagcaaggaguccuggagcuacaucguggagacccccaaccccgagaacggcacgugcuaccccggcuacuucgccgacuacgaggagcugcgcgagcagcucuccagcguguccagcuucgagcgguucgagaucuucccgaaggaguccagcuggcccaaccacaccgucaccgggguguccgccagcugcucccacaacggcaagagcuccuucuaccgcaaccugcuguggcucaccgggcggaacggccuguaccccaaccugagcaaguccuacgccaacaacaaggagaaggaggugcucguccuguggggcgugcaccacccgcccaacaucggggaccagcgcgcccuguaccacacggagaacgccuacgugagcgucgugagcucccacuacagccggcgcuucacccccgagaucgccaagcggcccaaggugcgcgaccaggagggccggaucaacuacuacuggacccuccuggagcccggggacaccaucaucuucgaggcgaacggcaaccugaucgccccgcgcuacgccuucgcccucucccggggguucggcagcggcaucaucacguccaacgcccccauggacgagugcgacgcgaagugccagacgccccagggggccaucaacagcucccugcccuuccagaacguccacccggugaccaucggcgagugccccaaguacgugcgcagcgccaagcugcggauggucaccgggcuccgcaacauccccuccauccagagccggggccuguucggggccaucgccggcuucaucgagggcggguggaccggcaugguggacgggugguacggcuaccaccaccagaacgagcagggguccggcuacgcggccgaccagaaguccacccagaacgccaucaacggcaucaccaacaaggugaacagcgucaucgagaagaugaacacccaguucacggccguggggaaggaguucaacaagcuggagcgccggauggagaaccucaacaagaaggucgacgacggcuuccuggacaucuggaccuacaacgccgagcugcucgugcugcuggagaacgagcgcacccucgacuuccacgacagcaacgugaagaaccuguacgagaaggucaagucccagcugaagaacaacgcgaaggagaucgggaacggcugcuucgaguucuaccacaagugcaacgacgagugcauggagagcgugaagaacgggaccuacgacuaccccaaguacuccgaggagagcaagcucaaccgggagaagaucgacggcgugaagcuggaguccaugggcgucuaccagauccuggccaucuacagcacgguggccagcucccucgugcugcuggucagccucggggccaucuccuucuggaugugcagcaacggcucccugcagugccgcaucugcaucuga

SEQ ID NO: 64894 - RNA, 1698 nt, Artificial Sequence
  derived and/or modified CDS sequence (opt1) from hemagglutinin__InfluenzaA__ABE11690
augaaggccaagcugcucgugcugcugugcaccuucaccgccacguacgcggacaccaucugcaucggcuaccacgccaacaacagcaccgacaccgucgacacggugcucgagaagaacgugaccgucacccacuccgugaaccugcuggaggacagccacaacgggaagcucugccugcugaagggcaucgcgccccuccagcuggggaacugcuccguggccggcuggauccuggggaacccggagugcgagcuccugaucagcaaggaguccuggagcuacaucgucgagacccccaaccccgagaacggcacgugcuaccccggcuacuucgccgacuacgaggagcugcgcgagcagcucuccagcguguccagcuucgagcgguucgagaucuucccgaagggguccagcuggcccaaccacaccgugaccggcgucuccgccagcugcucccacaacggcaagagcuccuucuaccgcaaccugcuguggcucaccgggaagaacgggcuguaccccaaccugagcauguccuacgugaacaacaaggagaaggaggugcucguccuguggggcgugcaccacccgcccaacaucggcaaccagcgggcccuguaccacacggagaacgccuacgugagcgucgugagcucccacuacagccgccgguucacccccgagaucgccaagcgccccaaggugcgggaccaggaggggcgcaucaacuacuacuggacccuccuggagcccggcgacaccaucaucuucgaggcgaacgggaaccugaucgccccgugguacgccuucgcccucucccggggcuucggcagcgggaucaucacguccaacgcccccaugggcgagugcgacgcgaagugccagacgccccagggggccaucaacagcucccugcccuuccagaacguccacccggugaccaucggcgagugccccaaguacgugcgcagcgccaagcugcggauggucaccgggcuccgcaacauccccuccauccagagccggggccuguucggcgccaucgccggguucaucgagggcggguggaccggcaugguggacgggugguacggcuaccaccaccagaacgagcagggcuccggguacgcggccgaccagaaguccacccagaacgccaucaacggcaucaccaacaaggugaacagcgucaucgagaagaugaacacccaguucacggccguggggaaggaguucaacaagcuggagcgccggauggagaaccucaacaagaaggucgacgacggcuuccuggacaucuggaccuacaacgccgagcugcucgugcugcuggagaacgagcgcacccucgacuuccacgacagcaacgugaagaaccuguacgagaaggucaagucccagcugaagaacaacgcgaaggagaucgggaacggcugcuucgaguucuaccacaagugcaacaacgagugcauggagagcgugaagaacggcaccuacgacuaccccaaguacuccgaggagagcaagcucaaccgggagaagaucgacggggugaagcuggaguccaugggcgucuaccagauccuggccaucuacagcacgguggccagcucccucgugcugcuggucagccucggggccaucuccuucuggaugugcagcaacggcucccugcagugccgcaucugcaucuga

SEQ ID NO: 64895 - RNA, 1698 nt, Artificial Sequence
  derived and/or modified CDS sequence (opt1) from hemagglutinin__InfluenzaA__ABE11701
augaaggccaagcugcucgugcugcugugcaccuucaccgccacguacgcggacaccaucugcaucggcuaccacgccaacaacagcaccgacaccgucgacacggugcucgagaagaacgugaccgucacccacuccgugaaccugcuggaggacagccacaacgggaagcucugccugcugaagggcaucgcgccccuccagcuggggaacugcuccguggccggcuggauccuggggaacccggagugcgagcuccugaucagcaaggaguccuggagcuacaucgucgagacccccaaccccgagaacggcacgugcuaccccggcuacuucgccgacuacgaggagcugcgcgagcagcucuccagcguguccagcuucgagcgguucgagaucuucccgaagggguccagcuggcccaaccacaccgugaccggcgucuccgccagcugcucccacaacggcaagagcuccuucuaccgcaaccugcuguggcucaccgggaagaacgggcuguaccccaaccugagcauguccuacgugaacaacaaggagaaggaggugcucguccuguggggcgugcaccacccgcccaacaucggcgaccagaaggcccuguaccacacggagaacgccuacgugagcgucgugagcucccacuacagccggcgcuucacccccgagaucgccaagcggcccaaggugcgcgaccaggaggggcggaucaacuacuacuggacccuccuggagcccggcgacaccaucaucuucgaggcgaacgggaaccugaucgccccgugguacgccuucgcccucucccgcggcuucggcagcgggaucaucacguccaacgcccccaugggcgagugcgacgcgaagugccagacgccccagggggccaucaacagcucccugcccuuccagaacguccacccggugaccaucggcgagugccccaaguacgugcggagcgccaagcugcgcauggucaccgggcuccggaacauccccuccauccagagccgcggccuguucggcgccaucgccggguucaucgagggcggguggaccggcaugguggacgggugguacggcuaccaccaccagaacgagcagggcuccggguacgcggccgaccagaaguccacccagaacgccaucaacggcaucaccaacaaggugaacagcaucaucgagaagaugaacacccaguucacggccgucgggaaggaguucaacaagcuggagcggcgcauggagaaccucaacaagaagguggacgacggcuuccuggacaucuggaccuacaacgccgagcugcucguccugcuggagaacgagcggacccucgacuuccacgacagcaacgugaagaaccuguacgagaaggugaagucccagcugaagaacaacgcgaaggagaucgggaacggcugcuucgaguucuaccacaagugcaacaacgagugcauggagagcgucaagaacggcaccuacgacuaccccaaguacuccgaggagagcaagcucaaccgcgagaagaucgacggggugaagcuggaguccaugggcguguaccagauccuggccaucuacagcacggucgccagcucccucgugcugcuggugagccucggggccaucuccuucuggaugugcagcaacggcucccugcagugccggaucugcaucuga

SEQ ID NO: 64896 - RNA, 1698 nt, Artificial Sequence; identical to SEQ ID NO: 64824
  derived and/or modified CDS sequence (opt1) from hemagglutinin__InfluenzaA__ABE11712

SEQ ID NO: 64897 - RNA, 1698 nt, Artificial Sequence; identical to SEQ ID NO: 64865
  derived and/or modified CDS sequence (opt1) from hemagglutinin__InfluenzaA__ABE11723

SEQ ID NO: 64898 - RNA, 1698 nt, Artificial Sequence; identical to SEQ ID NO: 64871
  derived and/or modified CDS sequence (opt1) from hemagglutinin__InfluenzaA__ABE11734

SEQ ID NO: 64899 - RNA, 1698 nt, Artificial Sequence; identical to SEQ ID NO: 64824
  derived and/or modified CDS sequence (opt1) from hemagglutinin__InfluenzaA__ABE11812

SEQ ID NO: 64900 - RNA, 1698 nt, Artificial Sequence; identical to SEQ ID NO: 64865
  derived and/or modified CDS sequence (opt1) from hemagglutinin__InfluenzaA__ABE11823

SEQ ID NO: 64901 - RNA, 1698 nt, Artificial Sequence; identical to SEQ ID NO: 64865
  derived and/or modified CDS sequence (opt1) from hemagglutinin__InfluenzaA__ABE11834

SEQ ID NO: 64902 - RNA, 1698 nt, Artificial Sequence; identical to SEQ ID NO: 64865
  derived and/or modified CDS sequence (opt1) from hemagglutinin__InfluenzaA__ABE11845

SEQ ID NO: 64903 - RNA, 1698 nt, Artificial Sequence; identical to SEQ ID NO: 64871
  derived and/or modified CDS sequence (opt1) from hemagglutinin__InfluenzaA__ABE11856

SEQ ID NO: 64904 - RNA, 1701 nt, Artificial Sequence
  derived and/or modified CDS sequence (opt1) from hemagglutinin__InfluenzaA__ABE11900
augaaggccaagcugcucgugcugcugugcgccuucaccgcgaccuacgccgacacgaucugcaucggcuaccacgccaacaacagcaccgacaccgucgacaccgugcucgagaagaacgugacggucacccacuccgugaaccugcuggaggacagccacaacgggaagcucugccgccugaagggcaccgcgccccugcagcucgggaacugcuccguggccggcuggauccuggggaacccggagugcgagagccuguucuccaaggagagcugguccuacaucgccgagacccccaaccccgagaacggcacgugcuaccccggcuacuucgccgacuacgaggagcuccgggagcagcugagcuccgucagcuccuucgagcgcuucgagaucuucccgaaggagagcuccuggcccaaccacaccgugaccaagggggugaccgccagcugcucccacaacggcaagagcuccuucuacaagaaccugcucuggcugacggagaagaacgggcuguaccccaaccucagcaaguccuacgucaacaacaaggagaaggaggugcuggugcuguggggcguccaccaccccagcaacaucggggaccagcgggccaucuaccacaccgagaacgcguacgugagcguggucuccagccacuacucccgccgguucaccccggagaucgccaagcgccccaaggugcgggaccaggagggccgcaucaacuacuacuggacccuccuggagcccggcgacacgaucaucuucgaggccaacgggaaccugaucgcccccugguacgccuucgcgcucagccggggcuucggguccggcaucaucaccagcaacgccuccaugggcgagugcgacgccaagugccagaccccgcagggggccaucaacagcucccugcccuuccagaacgugcaccccgucaccaucggcgagugccccaaguacgugcgcagcacgaagcugcggauggugaccgggcuccgcaacaucccguccauccagagccggggccuguucggggccaucgcgggcuucaucgagggcggguggaccggcaugaucgacgggugguacggcuaccaccaccagaacgagcagggguccggcuacgccgccgaccagaaguccacccagaacgccaucaacggcaucacgaacaaggucaacagcgugaucgagaagaugaacacccaguucaccgccguggggaaggaguucaacaagcuggagcgccggauggagaaccucaacaagaaggucgacgacggcuuccuggacaucuggaccuacaacgcggagcugcucgugcugcuggagaacgagcgcacgcucgacuuccacgacagcaacgucaagaaccuguacgagaaggugaagacccagcugaagaacaacgccaaggagaucgggaacggcugcuucgaguucuaccacaagugcaacaacgagugcauggaguccgugaagaacgggaccuacgacuaccccaaguacagcgaggaguccaagcucaaccgggagaagaucgacggcgucaagcuggagagcaugggcguguaccagauccuggccaucuacagcaccguggccuccagccucguccugcugaucucccucggggccaucagcuucuggaugugcuccaacggcagccugcagugccgcaucugcaucuga

SEQ ID NO: 64905 - RNA, 1701 nt, Artificial Sequence
  derived and/or modified CDS sequence (opt1) from hemagglutinin__InfluenzaA__ABE11942
augaaggccaagcugcucgugcugcugugcgccuucaccgcgaccuacgccgacacgaucugcaucggcuaccacgccaacaacagcaccgacaccgucgacaccgugcucgagaagaacgugacggucacccacuccgugaaccugcuggaggacagccacaacgggaagcucugccgccugaagggcaccgcgccccugcagcucgggaacugcuccguggccggcuggauccuggggaacccggagugcgagagccuguucuccaaggagagcugguccuacaucgccgagacccccaaccccgagaacggcacgugcuaccccggcuacuucgccgacuacgaggagcuccgggagcagcugagcuccgucagcuccuucgagcgcuucgagaucuucccgaaggagagcuccuggcccaaccacaccgugaccaagggggugaccgccagcugcucccacaacggcaagagcuccuucuacaagaaccugcucuggcugacggagaagaacgggcuguaccccagccucuccaagagcuacgucaacaacaaggagaaggaggugcuggugcuguggggcguccaccaccccagcaacaucggggaccagcgggccaucuaccacaccgagaacgcguacguguccguggucagcucccacuacagccgccgguucaccccggagaucgccaagcgccccaaggugcgggaccaggagggccgcaucaacuacuacuggacccuccuggagcccggcgacacgaucaucuucgaggccaacgggaaccugaucgcccccugguacgccuucgcgcucucccggggcuucgggagcggcaucaucaccuccaacgccagcaugggcgagugcgacgccaagugccagaccccgcagggggccaucaacuccagccugcccuuccagaacgugcaccccgucaccaucggcgagugccccaaguacgugcgcuccacgaagcugcggauggugaccgggcuccgcaacaucccgagcauccagucccggggccuguucggggccaucgcgggcuucaucgagggcggguggaccggcaugaucgacgggugguacggcuaccaccaccagaacgagcaggggagcggcuacgccgccgaccagaaguccacccagaacgccaucaacggcaucacgaacaaggucaacagcgugaucgagaagaugaacacccaguucaccgccguggggaaggaguucaacaagcuggagcgccggauggagaaccucaacaagaaggucgacgacggcuuccuggacaucuggaccuacaacgcggagcugcucgugcugcuggagaacgagcgcacgcucgacuuccacgacuccaacgucaagaaccuguacgagaaggugaagacccagcugaagaacaacgccaaggagaucgggaacggcugcuucgaguucuaccacaagugcaacaacgagugcauggagagcgugaagaacgggaccuacgacuaccccaaguacuccgaggagagcaagcucaaccgggagaagaucgacggcgucaagcuggagagcaugggcguguaccagauccuggccaucuacuccaccguggccagcucccucguccugcuggugagccucggggccaucuccuucuggaugugcagcaacggcucccugcagugccgcaucugcaucuga

SEQ ID NO: 64906 - RNA, 1701 nt, Artificial Sequence
  derived and/or modified CDS sequence (opt1) from hemagglutinin__InfluenzaA__ABE12078
augaagaccaucaucgcccugagcuacauccucugccugguguucgcccagaagcugcccggcaacgacaacuccaccgcgacgcucugccuggggcaccacgccgucccgaacggcacccuggugaagaccaucaccaacgaccagaucgaggugacgaacgccaccgagcucguccagagcuccagcaccgggggcaucugcgacagcccccaccagauccuggacggggagaacugcacccugaucgacgcccuccugggcgacccccacugcgacggcuuccagaacaaggagugggaccuguucguggagcgcagcaaggccuacuccaacugcuaccccuacgacgugccggacuacgcgagccuccggucccuggucgccagcuccgggacgcuggaguucaacaacgagagcuucaacuggaccggcguggcccagaacgggaccuccagcgccugcaagcgccgguccaacaagagcuucuucucccgccucaacuggcugcaccagcugaaguacaaguaccccgcgcucaacgugaccaugcccaacaacgagaaguucgacaagcuguacaucuggggcguccaccaccccagcacggacuccgaccagaucagccuguacgcccaggccccggggcgggugaccgugagcaccaagcgcucccagcagaccgucauccccaacaucggcagccggcccugggugcgcggcguguccagccggaucuccaucuacuggacgaucgucaagcccggggacauccuccugaucaacugcaccggcaaccugaucgccccgcgcggguacuucaagauccggagcggcaaguccagcaucaugcgcuccgacgccagcaucggcaagugcaacuccgagugcaucacccccaacgggagcauccccaacgacaagcccuuccagaacgugaaccggaucaccuacggcgcgugcccgcgcuacgugaagcagaacacgcucaagcuggccaccgggaugcggaacguccccgagaagcagacccgcggcaucuucggggccaucgccggcuucaucgagaacggcugggaggggaugguggacggcugguacggguuccggcaccagaacuccgagggcaccgggcaggccgcggaccugaaguccacgcaggccgccaucaaccagaucaacggcaagcucaaccgccugaucgagaagaccaacgagaaguuccaccagaucgagaaggaguucuccgagguggagggccggauccaggaccuggagaaguacgucgaggacaccaagaucgaccucuggagcuacaacgccgagcugcugguggcccucgagaaccagcacaccaucgaccugacggacuccgagaugaacaagcuguucgagaagaccaagaagcagcuccgcgagaacgcggaggacauggggaacggcugcuucaagaucuaccacaagugcgacaacgccugcaucgggagcauccggaacggcaccuacgaccacgacguguaccgcgacgaggcccugaacaaccgcuuccagaucaagggggucgagcugaaguccggcuacaaggacuggauccucuggaucagcuucgccaucagcugcuuccugcugugcgugguccuccugggcuucaucaugugggccugccagaaggggaacauccggugcuccaucugcaucuga

SEQ ID NO: 64907 - RNA, 1701 nt, Artificial Sequence; identical to SEQ ID NO: 64801
  derived and/or modified CDS sequence (opt1) from hemagglutinin__InfluenzaA__ABE12123

SEQ ID NO: 64908 - RNA, 1698 nt, Artificial Sequence; identical to SEQ ID NO: 64824
  derived and/or modified CDS sequence (opt1) from hemagglutinin__InfluenzaA__ABE12248

SEQ ID NO: 64909 - RNA, 1701 nt, Artificial Sequence
  derived and/or modified CDS sequence (opt1) from hemagglutinin__InfluenzaA__ABE12623
augaagaccaucaucgcccugagcuacaucuucugccucgugcugggccaggaccugcccgggaacgacaacuccaccgccacgcucugccugggccaccacgcggucccgaacgggacccuggugaagaccaucaccaacgaccagaucgaggugacgaacgccaccgagcucguccagagcuccagcaccggcaagaucugcaacaacccccaccgcauccuggacgggaucgacugcacccugaucgacgcccuccugggcgacccccacugcgacggcuuccagaacgagacgugggaccuguucguggagcgguccaaggccuucagcaacugcuaccccuacgacgugccggacuacgccucccuccgcagccuggucgcguccagcgggacccuggaguucaucaacgagggcuucaccuggaccggggugacgcagaacggcggguccaacgccugcaagcggggccccgacagcggcuucuucucccgccucaacuggcuguacaagagcggguccaccuaccccgugcugaacgucaccaugcccaacaacgacaacuucgacaagcucuacaucuggggcgugcaccacccgagcaccaaccaggagcagacgucccuguacgugcaggccagcgggcgggucaccguguccaccaagcgcagccagcagaccaucauccccaacaucggcagccggcccugggugcgcggccuguccagccggaucuccaucuacuggacgaucgucaagcccggggacauccucgugaucaacagcaacggcaaccugaucgccccgcgcggguacuucaagaugcggaccggcaaguccagcaucaugcgcuccgacgcgcccaucgggaccugcaucagcgagugcaucacccccaacggcuccauccccaacgacaagccguuccagaacgugaacaagaucacguacggcgccugccccaaguacgucaagcagaacacccugaagcucgccaccgggaugcggaacgugcccgagaagcagacccgcggccuguucggggccaucgccggcuucaucgagaacgggugggagggcaugaucgacggcugguacggguuccggcaccagaacagcgagggcacggggcaggcggccgaccugaaguccacccaggccgccaucgaccagaucaacggcaagcucaaccgcgugaucgagaagaccaacgagaaguuccaccagaucgagaaggaguucagcgaggucgaggggcggauccaggaccuggagaaguacguggaggacaccaagaucgaccugugguccuacaacgccgagcuccugguggcgcuggagaaccagcacacgaucgaccucaccgacagcgagaugaacaagcuguucgagaagacccgccggcagcugcgcgagaacgccgaggacaugggcaacggcugcuuccggaucuaccacaagugcgacaacgccugcaucggguccauccgcaacggcaccuacgaccacgacgucuaccgcgacgaggcccucaacaaccgguuccagaucaaggggguggagcucaagagcggcuacaaggacuggauccuguggaucuccuucgccaucagcugcuuccugcugugcgucgugcugcucggcuucaucaugugggcgugccagaaggggaacauccgcugcaacaucugcaucuga

SEQ ID NO: 64910 - RNA, 1701 nt, Artificial Sequence; identical to SEQ ID NO: 64854
  derived and/or modified CDS sequence (opt1) from hemagglutinin__InfluenzaA__ABE12645

SEQ ID NO: 64911 - RNA, 1701 nt, Artificial Sequence; identical to SEQ ID NO: 64831
  derived and/or modified CDS sequence (opt1) from hemagglutinin__InfluenzaA__ABE13076

SEQ ID NO: 64912 - RNA, 1701 nt, Artificial Sequence; identical to SEQ ID NO: 64807
  derived and/or modified CDS sequence (opt1) from hemagglutinin__InfluenzaA__ABE13323

SEQ ID NO: 64913 - RNA, 1701 nt, Artificial Sequence
  derived and/or modified CDS sequence (opt1) from hemagglutinin__InfluenzaA__ABE13471
augaagaccaucaucgcccugagcuacauccucugccugguguucgcccagaagcugcccggcaacgacaacuccaccgcgacgcucugccuggggcaccacgccgucccgaacggcacccuggugaagaccaucaccaacgaccagaucgaggugacgaacgccaccgagcucguccagaacagcuccaccgggcgcaucugcgacagcccccaccggauccuggacggcaagaacugcacccugaucgacgcccuccugggggacccccacugcgacggcuuccagaacaaggagugggaccuguucguggagcgcuccaaggccuacagcaacugcuaccccuacgacgugccggacuacgcgucccuccggagccuggucgccuccagcggcacgcuggaguucuacaacgaguccuucaacuggaccgggguggcccagaacggcaccagcuacgccugcaagcgccgguccgucaagagcuucuucucccgccucaacuggcugcacaagcuggaguacaaguaccccgcgcucaacgugaccaugcccaacaacgacaaguucgacaagcuguacaucuggggcgugcaccaccccagcacggacuccgaccagaccagccuguacgugcaggccuccgggcgggucaccgugagcaccaagcgcagccagcagacggugaucccgaacaucgggucccggcccuggguccgcggcgugagcucccggaucagcaucuacuggaccaucgugaagcccggcgacauccuccugaucaacuccaccgggaaccugaucgcgccccgcggcuacuucaagauccggagcgggaaguccagcaucaugcgcuccgacgccccgaucggcaacugcaacagcgagugcaucacccccaacggcuccauccccaacgacaagcccuuccagaacgucaaccggaucacguacggggccugcccgcgcuacgugaagcagaacacccucaagcuggccaccggcaugcggaacgugcccgagaagcagacccgcgggaucuucggcgccaucgccggguucaucgagaacggcugggagggcauggucgacgggugguacggcuuccggcaccagaacagcgaggggacgggccaggccgccgaccugaaguccacccaggcggccaucaaccagaucaacgggaagcucaaccgccugaucgagaagaccaacgagaaguuccaccagaucgagaaggaguucagcgagguggagggccggauccaggaccuggagaaguacguggaggacaccaagaucgaccucugguccuacaacgccgagcugcuggucgcccucgagaaccagcacacgaucgaccugaccgacagcgagaugaacaagcuguucgagcgcacccgcaagcagcuccgggagaacgccgaggacaugggcaacgggugcuuccgcaucuaccacaagugcgacaacgcgugcaucggcuccauccggaacgggaccuacgaccacgacguguaccgcgacgaggcccugaacaaccgguuccagaucaagggcgucgagcucaagagcggguacaaggacuggauccuguggaucuccuucgccaucagcugcuuccugcugugcguggugcuccugggcuucaucaugugggccugccagaagggcaacauccgcugcaacaucugcaucuga

SEQ ID NO: 64914 - RNA, 1701 nt, Artificial Sequence
  derived and/or modified CDS sequence (opt1) from hemagglutinin__InfluenzaA__ABE13555
augaagaccaucaucgcccugagcuacauccucugccugguguucgcccagaagcugcccggcaacgacaacuccaccgcgacgcucugccuggggcaccacgccgucccgaacggcacccuggugaagaccaucaccaacgaccagaucgaggugacgaacgccaccgagcucguccaggggagcuccaccggccgcaucugcgacagcccccaccggauccuggacgggaagaacugcacccugaucgacgcccuccugggcgacccccacugcgacggcuuccagaacaaggagugggaccuguucguggagcgcuccaaggccuacagcaacugcuaccccuacgacgugccggacuacgcgucccuccggagccuggucgccuccagcgggacgcuggaguucaacaacgaguccuucaacuggaccggcguggcccagaacgggaccagcuacgccugcaagcgccgguccgucaagagcuucuucucccgccucaacuggcugcacaagcuggaguacaaguaccccgcgcucaacgugaccaugcccaacaacgacaaguucgacaagcuguacaucuggggcgugcaccaccccagcacggacuccgaccagaccagccuguacgugcaggccuccgggcgggucaccgugagcaccaagcgcagccagcagacggugaucccgaacaucggcucccggcccuggguccgcggcgugagcucccggaucagcaucuacuggaccaucgugaagcccggggacauccuccugaucuccagcaccggcaaccugaucgcgccccgcggguacuucaagauccgguccggcaagagcuccaucaugcgcagcgacgccccgaucgacaacugcaacuccgagugcaucacccccaacggcagcauccccaacgacaagcccuuccagaacgucaaccggaucacguacggggccugcccgcgcuacgugaagcagaacacccucaagcuggccaccggcaugcggaacgugcccgagaagcagaccaaggggaucuucggcgccaucgccggguucaucgagaacggcugggagggcauggucgacgggugguacggcuuccgccaccagaacuccgaggggacgggccaggccgccgaccucaagagcacccaggcggccaucaaccagaucaacgggaagcugaaccggcugaucgagaagaccaacgagaaguuccaccagaucgagaaggaguucuccgagguggagggccgcauccaggaccuggagaaguacguggaggacaccaagaucgaccucuggagcuacaacgccgagcugcuggucgcccucgagaaccagcacacgaucgaccugaccgacuccgagaugaacaagcuguucgagcggacccgcaagcagcuccgcgagaacgccgaggacaugggcaacgggugcuucaagaucuaccacaagugcgacaacgcgugcaucggcagcauccggaacgggaccuacgaccacgacguguaccgcgacgaggcccugaacaaccgguuccagaucaagggcgucgagcugaaguccggguacaaggacuggauccucuggaucagcuucgccaugagcugcuuccugcugugcguggugcuccugggcuucaucaugugggccugccagaagggcaacauccgcugcaacaucugcaucuga

SEQ ID NO: 64915 - RNA, 1701 nt, Artificial Sequence
  derived and/or modified CDS sequence (opt1) from hemagglutinin__InfluenzaA__ABE13606
augaagaccaucaucgcccugagcuacauccucugccugguguucgcccagaagcugcccggcaacgacaacuccaccgcgacgcucugccuggggcaccacgccgucccgaacggcacccuggugaagaccaucaccaacgaccagaucgaggugacgaacgccaccgagaugguccagagcuccagcaccgggcgcaucugcgacagcccccaccggauccucgacggcaagaacugcacccugaucgacgcccugcucggggacccccacugcgacggcuuccagaacaaggagugggaccuguucguggagcgcagcaaggccuacuccaacugcuaccccuacgacgugccggacuacgcgagccugcggucccucgucgccagcuccggcacgcuggaguucaccaacgagggguucaacuggaccggcguggcccaggacgggaccagcuacgccugcaagcgcggcuccgugaaguccuucuucucccggcugaacuggcuccacaagcuggaguacaaguaccccgcgcugaacgucacgaugcccaacaacgacaaguucgacaagcucuacaucuggggcgugcaccaccccagcaccgacuccgaccagaccagccuguacgugcaggccuccgggcgcgucaccgugagcacgaagcggagccagcagaccgugaucccgaacaucggcucccgccccuggguccgcggggugagcucccggaucagcaucuacuggaccaucgugaagcccggcgacauccugcucaucaacuccaccgggaaccugaucgcgccccggggcuacuucaagauccgcagcggcaaguccagcaucaugcgguccgacgccccgaucgggaacugcaacagcgagugcaucacgcccaacggcuccauccccaacgacaagcccuuccagaacgucaaccgcaucaccuacggggccugcccgcgguacgugaagcagaacacccugaagcucgccaccggcaugcgcaacgugcccgagaagcagacgcgggggaucuucggcgccaucgccggcuucaucgagaacgggugggagggcauggucgacgggugguacggcuuccgccaccagaacagcgaggggaccggccaggccgccgaccugaaguccacccaggcggccaucaaccagaucaacggcaagcugaaccggcucaucgagaagaccaacgagaaguuccaccagaucgagaaggaguucagcgagguggaggggcgcauccaggaccuggagaaguacguggaggacacgaagaucgaccugugguccuacaacgccgagcuccugaucgcccuggagaaccagcacaccaucgaccucaccgacagcgagaugaacaagcuguucgagcggacccgcaagcagcugcgcgagaacgccgaggacaugggcaacgggugcuucaagaucuaccacaagugcgacaacgcgugcaucggcuccauccggaacgggacguacgaccacgacgucuaccgcgacgaggcccucaacaaccgguuccagaucaagggcguggagcucaagagcggcuacaaggacuggauccuguggaucuccuucgccaucagcugcuuccugcugugcgucgugcugcucggguucaucaugugggccugccagaagggcaacauccgcugcaacaucugcaucuga

SEQ ID NO: 64916 - RNA, 1701 nt, Artificial Sequence
  derived and/or modified CDS sequence (opt1) from hemagglutinin__InfluenzaA__ABE13628
augaagaccaucaucgcccugagcuacauccucugccugguguucgcccagaagcugcccggcaacgacaacuccaccgcgacgcucugccuggggcaccacgccgucccgaacggcacccuggugaagaccaucaccaacgaccagaucgaggugacgaacgccaccgagcucguccagagcuccagcaccgggcgcaucugcgacagcccccaccggauccuggacggcaagaacugcacccugaucgacgcccuccugggggacccccacugcgacggcuuccagaacaaggagugggaccuguucguggagcgcagcaaggccuacuccaacugcuaccccuacgacgugccggacuacgcgagccuccggucccuggucgccagcuccggcacgcuggaguucaccaacgagggguucaacuggaccggcguggcccaggacgggaaguccuacgccugcaagcgcggcuccgugaacagcuucuucucccggcucaacuggcugcacaagcuggaguacaaguaccccgcgcucaacgucaccaugcccaacaacgacaaguucgacaagcuguacaucuggggcgugcaccaccccagcacggacuccgaccagaccagccuguacgugcaggccuccgggcgcgucaccgugagcaccaagcggagccagcagacggugaucccgaacaucggcucccgccccuggguccgggggaucagcucccgcaucagcaucuacuggaccaucgugaagcccggcgacauccuccugaucaacuccaccgggaaccugaucgcgccccggggcuacuucaagauccgcaacggcaagagcuccaucaugcggagcgacgccccgaucgacaacugcaacuccgagugcaucacccccaacgggagcauccccaacgacaagcccuuccagaacgugaaccgcaucacguacggcgccugcccgcgguacgucaagcagaacacccucaagcuggccaccgggaugcgcaacgugcccgagaagcagacccggggcaucuucggggccaucgccggcuucaucgagaacggcugggaggggaugguggacggcugguacggguuccgccaccagaacuccgagggcacggggcaggccgccgaccucaagagcacccaggcggccaucgaccagaucaacggcaagcugaaccggcugaucgagaagaccaacgagaaguuccaccagaucgagaaggaguucuccgaggucgagggccgcauccaggaccuggagaaguacguggaggacaccaagaucgaccucuggagcuacaacgccgagcugcugguggcccucgagaaccagcacacgaucgaccugaccgacuccgagaugaacaagcuguucgagcggacccgcaagcagcuccgcgagaacgccgaggacauggggaacggcugcuucaagaucuaccacaagugcgacaacgcgugcaucgggagcauccggaacggcaccuacgaccacgacgucuaccgcgacgaggcccugaacaaccgguuccagaucaaggggguggagcugaaguccggcuacaaggacuggauccucuggaucagcuucgccaucuccugcuuccugcugugcgucgugcuccugggcuucaucaugugggccugccagaaggggaacauccgcugcaacaucugcaucuga

SEQ ID NO: 64917 - RNA, 1701 nt, Artificial Sequence
  derived and/or modified CDS sequence (opt1) from hemagglutinin__InfluenzaA__ABE13824
augaagaccaucaucgcccugagcuacauccucugccagguguucgcccagaagcugcccggcaacgacaacuccaccgcgacgcugugccucgggcaccacgccgucccgaacggcacccuggugaagaccaucaccaacgaccagaucgaggugacgaacgccaccgagcugguccagagcuccagcaccgggcgcaucugcgacagcccccaccggauccucgacggcaagaacugcacccugaucgacgcccugcucggggacccccacugcgacggcuuccagaacaaggagugggaccuguucguggagcgcagcaaggccuacuccaacugcuaccccuacgacgugccggacuacgcgagccugcggucccucgucgccagcuccggcacgcuggaguucaccaacgagggguucaacuggaccggcguggcccaggacgggaaguccuacgccugcaagcgcggcuccgugaacagcuucuucucccggcugaacuggcuccacaagcuggaguacaaguaccccgcgcugaacgucaccaugcccaacaacgacaaguucgacaagcucuacaucuggggcgugcaccaccccagcacggacuccgaccagaccagccuguacgugcaggccuccgggcgcgucaccgugagcaccaagcggagccagcagacggugaucccgaacaucggcucccgccccuggguccgggggaucagcucccgcaucagcaucuacuggaccaucgugaagcccggcgacauccugcucaucaacuccaccgggaaccugaucgcgccccggggcuacuucaagauccgcaacggcaagagcuccaucaugcggagcgacgccccgaucgacaacugcaacuccgagugcaucacccccaacgggagcauccccaacgacaagcccuuccagaacgugaaccgcaucacguacggcgccugcccgcgguacgucaagcagaacacccugaagcucgccaccgggaugcgcaacgugcccgagaagcagacccggggcaucuucggggccaucgccggcuucaucgagaacggcugggaggggaugguggacggcugguacggguuccgccaccagaacuccgagggcacggggcaggccgccgaccucaagagcacccaggcggccaucgaccagaucaacggcaagcugaaccggcugaucgagaagaccaacgagaaguuccaccagaucgagaaggaguucuccgaggucgagggccgcauccaggaccuggagaaguacguggaggacaccaagaucgaccuguggagcuacaacgccgagcuccugguggcccuggagaaccagcacacgaucgaccucaccgacuccgagaugaacaagcuguucgagcggacccgcaagcagcugcgcgagaacgccgaggacauggggaacggcugcuucaagaucuaccacaagugcgacaacgcgugcaucgggagcauccggaacggcaccuacgaccacgacgucuaccgcgacgaggcccucaacaaccgguuccagaucaaggggguggagcugaaguccggcuacaaggacuggauccuguggaucagcuucgccaucuccugcuuccuccugugcgucgugcugcucggcuucaucaugugggccugccagaaggggaacauccgcugcaacaucugcaucuga

SEQ ID NO: 64918 - RNA, 1701 nt, Artificial Sequence; identical to SEQ ID NO: 64917
  derived and/or modified CDS sequence (opt1) from hemagglutinin__InfluenzaA__ABE14019

SEQ ID NO: 64919 - RNA, 1701 nt, Artificial Sequence
  derived and/or modified CDS sequence (opt1) from hemagglutinin__InfluenzaA__ABE14030
augaagaccaucaucgcccugagcuacauccucugccugguguucgcccagaagcugcccggcaacgacaacuccaccgcgacgcucugccuggggcaccacgccgucccgaacggcacccuggugaagaccaucaccaacgaccagaucgaggugacgaacgccaccgagcucguccagagcuccagcaucgggcgcaucugcgacagcccccaccggauccuggacggcaagaacugcacccugaucgacgcccuccugggggacccccacugcgacggcuuccagaacaaggagugggaccuguucguggagcgcagcaaggccuacuccaacugcuaccccuacgacgugccggacuacgcgagccuccggucccuggucgccagcuccggcacccuggaguucacgaacgagggguucaacuggaccggcguggcccaggacgggaaguccuacgccugcaagcgcggcuccgugaacagcuucuucucccggcucaacuggcugcacaagcuggaguacaaguaccccgcgcucaacgucaccaugcccaacaacgacaaguucgacaagcuguacaucuggggcgugcaccaccccagcaccgacuccgaccagacgagccuguacgugcaggccuccgggcgcgucaccgugagcaccaagcggagccagcagaccgugaucccgaacaucggcucccgccccuggguccgggggaucagcucccgcaucagcaucuacuggacgaucgugaagcccggcgacauccuccugaucaacuccaccgggaaccugaucgcgccccggggcuacuucaagauccgcaacggcaagagcuccaucaugcggagcgacgccccgaucgacaacugcaacuccgagugcaucacccccaacgggagcauccccaacgacaagcccuuccagaacgugaaccgcaucaccuacggcgccugcccgcgguacgucaagcagaacacgcucaagcuggccaccgggaugcgcaacgugcccgagaagcagacccggggcaucuucggggccaucgccggcuucaucgagaacggcugggaggggaugguggacggcugguacggguuccgccaccagaacuccgagggcaccgggcaggccgccgaccucaagagcacgcaggcggccaucgaccagaucaacggcaagcugaaccggcugaucgagaagaccaacgagaaguuccaccagaucgagaaggaguucuccgaggucgagggccgcauccaggaccuggagaaguacguggaggacaccaagaucgaccucuggagcuacaacgccgagcugcugguggcccucgagaaccagcacaccaucgaccugacggacuccgagaugaacaagcuguucgagcggacccgcaagcagcuccgcgagaacgccgaggacauggggaacggcugcuucaagaucuaccacaagugcgacaacgcgugcaucgggagcauccggaacggcaccuacgaccacgacgucuaccgcgacgaggcccugaacaaccgguuccagaucaaggggguggagcugaaguccggcuacaaggacuggauccucuggaucagcuucgccaucuccugcuuccugcugugcgucgugcuccugggcuucaucaugugggccugccagaaggggaacauccgcugcaacaucugcaucuga

SEQ ID NO: 64920 - RNA, 1701 nt, Artificial Sequence; identical to SEQ ID NO: 64916
  derived and/or modified CDS sequence (opt1) from hemagglutinin__InfluenzaA__ABE14041

SEQ ID NO: 64921 - RNA, 1701 nt, Artificial Sequence; identical to SEQ ID NO: 64917
  derived and/or modified CDS sequence (opt1) from hemagglutinin__InfluenzaA__ABE14063

SEQ ID NO: 64922 - RNA, 1701 nt, Artificial Sequence
  derived and/or modified CDS sequence (opt1) from hemagglutinin__InfluenzaA__ABE14124
augaagaccaucaucgcccugagcuacauccucugccugguguucgcccagaagcugcccggcaacgacaacuccaccgcgacgcucugccuggggcaccacgccgucccgaacggcacccuggugaagaccaucaccaacgaccagaucgaggugacgaacgccaccgagcucguccagagcuccagcaccgggcgcaucugcgacagcccccaccggauccuggacggcaagaacugcacccugaucgacgcccuccugggggacccccacugcgacggcuuccagaacaaggagugggaccuguucguggagcgcagcaaggccuacuccaacugcuaccccuacgacgugccggacuacgcgagccuccggucccuggucgccagcuccggcacgcuggaguucaccaacgagggguucaacuggaccggcguggcccaggacgggaccagcuacgccugcaagcgcggcuccgugaaguccuucuucucccggcucaacuggcugcacaagcuggaguacaaguaccccgcgcucaacgucacgaugcccaacaacgacaaguucgacaagcuguacaucuggggcgugcaccaccccagcaccgacuccgaccagaccagccuguacgugcaggccuccgggcgcgucaccgugagcacgaagcggagccagcagaccgugaucccgaacaucggcucccgccccuggguccgcggggugagcucccggaucagcaucuacuggaccaucgugaagcccggcgacauccuccugaucaacuccaccgggaaccugaucgcgccccggggcuacuucaagauccgcagcggcaaguccagcaucaugcgguccgacgccccgaucgggaacugcaacagcgagugcaucacgcccaacggcuccauccccaacgacaagcccuuccagaacgucaaccgcaucaccuacggggccugcccgcgguacgugaagcagaacacccucaagcuggccaccggcaugcgcaacgugcccgagaagcagacgcgggggaucuucggcgccaucgccggcuucaucgagaacgggugggagggcauggucgacgggugguacggcuuccgccaccagaacagcgaggggaccggccaggccgccgaccugaaguccacccaggcggccaucaaccagaucaacggcaagcucaaccggcugaucgagaagaccaacgagaaguuccaccagaucgagaaggaguucagcgagguggaggggcgcauccaggaccuggagaaguacguggaggacacgaagaucgaccucugguccuacaacgccgagcugcugaucgcccucgagaaccagcacaccaucgaccugaccgacagcgagaugaacaagcuguucgagcggacccgcaagcagcuccgcgagaacgccgaggacaugggcaacgggugcuucaagaucuaccacaagugcgacaacgcgugcaucggcuccauccggaacgggacguacgaccacgacgucuaccgcgacgaggcccugaacaaccgguuccagaucaagggcguggagcucaagagcggcuacaaggacuggauccuguggaucuccuucgccaucagcugcuuccugcugugcgucgugcuccugggguucaucaugugggccugccagaagggcaacauccgcugcaacaucugcaucuga

SEQ ID NO: 64923 - RNA, 1701 nt, Artificial Sequence
  derived and/or modified CDS sequence (opt1) from hemagglutinin__InfluenzaA__ABE14464
augaagaccaucaucgcccugagcuacauccucugccagguguucgcccagaagcugcccggcaacgacaacuccaccgcgacgcugugccucgggcaccacgccgucccgaacggcacccuggugaagaccaucaccaacgaccagaucgaggugacgaacgccaccgagcugguccagagcuccagcaccgggcgcaucugcgacagcccccaccggauccucgacggcaagaacugcacccugaucgacgcccugcucggggacccccacugcgacggcuuccagaacaaggagugggaccuguucguggagcgcagcaaggccuacuccaacugcuaccccuacgacgugccggacuacgcgagccugcggucccucgucgccagcuccggcacgcuggaguucaccaacgagggguucaacuggaccggcguggcccaggacgggaaguccuacgccugcaagcgcggcuccgugaacagcuucuucucccggcugaacuggcuccacaagcuggaguacaaguaccccgcgcugaacgucaccaugcccaacaacgacaaguucgacaagcucuacaucuggggcgugcaccaccccagcacggacuccgaccagaccagccuguacgugcaggccuccgggcgcgucaccgugagcaccaagcggagccagcagacggugaucccgaacaucggcucccgccccuggguccgggggaucagcucccgcaucagcaucuacuggaccaucgugaagcccggcgacauccugcucaucaacuccaccgggaaccugaucgcgccccggggcuacuucaagauccgcaacggcaagagcuccaucaugcggagcgacgccccgaucgacaacugcaacuccgagugcaucacccccaacgggagcauccccaacgacaagcccuuccagaacgugaaccgcaucacguacggcgccugcccgcgguacgucaagcagaacacccugaagcucgccaccgggaugcgcaacgugcccgagaagcagacccggggcaucuucggggccaucgccggcuucaucgagaacggcugggaggggaugaucgacggcugguacggguuccgccaccagaacuccgagggcacggggcaggccgccgaccucaagagcacccaggcggccaucgaccagaucaacggcaagcugaaccggcugaucgagaagaccaacgagaaguuccaccagaucgagaaggaguucuccgagguggagggccgcauccaggaccuggagaaguacgucgaggacaccaagaucgaccuguggagcuacaacgccgagcuccugguggcccuggagaaccagcacacgaucgaccucaccgacuccgagaugaacaagcuguucgagcggacccgcaagcagcugcgcgagaacgccgaggacauggggaacggcugcuucaagaucuaccacaagugcgacaacgcgugcaucgggagcauccggaacggcaccuacgaccacgacguguaccgcgacgaggcccucaacaaccgguuccagaucaagggggucgagcugaaguccggcuacaaggacuggauccuguggaucagcuucgccaucuccugcuuccuccugugcgugguccugcucggcuucaucaugugggccugccagaaggggaacauccgcugcaacaucugcaucuga

SEQ ID NO: 64924 - RNA, 1701 nt, Artificial Sequence
  derived and/or modified CDS sequence (opt1) from hemagglutinin__InfluenzaA__ABE14840
augaagaccaucaucgcccugagcuacauccucugccugguguucgcccagaagcugccccgcaacgacaacuccaccgcgacgcucugccugggccaccacgccgucccgaacgggacccuggugaagaccaucaccaacgaccagaucgaggugacgaacgccaccgagcucguccagagcuccagcaccggccggaucugcgacagcccccaccgcauccuggacgggaagaacugcacccugaucgacgcccuccugggcgacccccacugcgacggguuccagaacaaggagugggaccuguucguggagcggagcaaggccuacuccaacugcuaccccuacgacgugccggacuacgcgagccuccgcucccuggucgccagcuccggcacgcuggaguucaccaacgagggcuucaacuggaccgggguggcccaggacggcaagagcuacgccugcaagcggggguccgugaacagcuucuucucccgccucaacuggcugcacaagcuggaguacaaguaccccgcgcucaacgucaccaugcccaacaacgacaaguucgacaagcuguacaucuggggcgugcaccaccccagcacggacuccgaccagaccagccuguacgugcaggccuccgggcgggucaccgugagcaccaagcgcagccagcagacggugaucccgaacaucggcucccggcccuggguccgcggcaucagcucccggaucagcaucuacuggaccaucgugaagcccggggacauccuccugaucuccagcaccggcaaccugaucgcgccccgcggguacuucaagauccggaacggcaaguccagcaucaugcgcuccgacgccccgaucgacaacugcaacagcgagugcaucacccccaacggcuccauccccaacgacaagcccuuccagaacgugaaccggaucacguacggggccugcccgcgcuacgucaagcagaacacccucaagcuggccaccggcaugcggaacgugcccgagaagcagacccgcgggaucuucggcgccaucgccggguucaucgagaacggcugggagggcaugguggacgggugguacggcuuccggcaccagaacagcgaggggacgggccaggccgccgaccugaaguccacccaggcggccaucgaccagaucaacgggaagcucaaccgccugaucgagaagaccaacgagaaguuccaccagaucgagaaggaguucagcgaggucgagggccggauccaggaccuggagaaguacguggaggacaccaagaucgaccucugguccuacaacgccgagcugcugguggcccucgagaaccagcacacgaucgaccugaccgacagcgagaugaacaagcuguucgagcgcacccgcaagcagcuccgggagaacgccgaggacaugggcaacgggugcuucaagaucuaccacaagugcgacaacgcgugcaucggcuccauccgcaacgggaccuacgaccacgacgucuaccgggacgaggcccugaacaaccgcuuccagaucaagggcguggagcugaaguccggguacaaggacuggauccucuggaucuccuucgccaucagcugcuuccugcugugcgucgugcuccugggcuucaucaugugggccugccagaagggcaacauccggugcagcaucugcaucuga

SEQ ID NO: 64925 - RNA, 1701 nt, Artificial Sequence
  derived and/or modified CDS sequence (opt1) from hemagglutinin__InfluenzaA__ABE15578
augaagaccaucaucgcccugagcuacauccucugccugguguucgcccagaagcugcccggcaacgacaacuccaccgcgacgcucugccuggggcaccacgccgucccgaacggcacccuggugaagaccaucaccaacgaccagaucgaggugacgaacgccaccgagcucguccagagcuccagcaccgggcgcaucugcgacagcccccaccggauccuggacggcaagaacugcacccugaucgacgcccuccugggggacccccacugcgacggcuuccagaacaaggagugggaccuguucguggagcgcagcaaggccuacuccaacugcuaccccuacgacgugccggacuacgcgagccuccggucccuggucgccagcuccggcacgcuggaguucaccaacgagggguucaacuggaccggcguggcccaggacgggaaguccuacgccugcaagcgcggcuccgugaacagcuucuucucccggcucaacuggcugcacaagcuggaguacaaguaccccgcgcucaacgucaccaugcccaacaacgacaaguucgacaagcuguacaucuggggcgugcaccaccccagcacggacuccgaccagaccagccuguacgugcaggccuccgggcgcgucaccgugagcaccaagcggagccagcagacggugaucccgaacaucggcucccgccccuggguccgggggaucagcucccgcaucagcaucuacuggaccaucgugaagcccggcgacauccuccugaucaacuccaccgggaaccugaucgcgccccggggcuacuucaagauccgcaacggcaagagcuccaucaugcggagcgacgccccgaucgacaacugcaacuccgagugcaucacccccaacgggagcauccccaacgacaagcccuuccagaacgugaaccgcaucacguacggcgccugcccgcgguacgucaagcagaacacccucaagcuggccaccgggaugcgcaacgugcccgagaagcagacccggggcaucuucggggccaucgccggcuucaucgagaacggcugggaggggaugguggacggcugguacggguuccgccaccagaacuccgagggcacggggcaggccgccgaccucaagagcacccaggcggccaucgaccagaucaacggcaagcugaaccggcugaucgagaagaccaacgagaaguuccaccagaucgagaaggaguucuccgaggucgagggccgcauccaggaccuggagaaguacguggaggacaccaagaucgaccucuggagcuacaacgccgagcugcugguggcccucgagaaccagcacacgaucgaccugaccgacuccgagaugaacaagcuguucgagcggacccgcaagcagcuccgcgagaacgccgaggacauggggaacggcugcuucaagaucuaccacaagugcgacaacgcgugcaucgggagcauccggaacggcaccuacgaccacgacgucuaccgcgacgaggcccugaacaaccgguuccagaucaaggggguggagcugaaguccggcuacaaggacuggauccucuggaucagcuucgccaucuccugcuuccugcugugcgucgugcuccugggcuucaucaugugggccugccagaaggggaacauccgcugcagcaucugcaucuga

SEQ ID NO: 64926 - RNA, 1701 nt, Artificial Sequence
  derived and/or modified CDS sequence (opt1) from hemagglutinin__InfluenzaA__ABE26991
augaaggccaagcugcucgugcugcugugcgccuucaccgcgaccuacgccgacacgaucugcaucggcuaccacgccaacaacagcaccgacaccgucgacaccgugcucgagaagaacgugacggucacccacuccgugaaccugcuggaggacagccacaacgggaagcucugccgccugaagggcaccgcgccccugcagcucgggaacugcuccguggccggcuggauccuggggaacccggagugcgagagccuguucuccaaggagagcugguccuacaucgccgagacccccaaccccgagaacggcacgugcuaccccggcuacuucgccgacuacgaggagcuccgggagcagcugagcuccgucagcuccuucgagcgcuucgagaucuucccgaaggagagcuccuggcccaaccacaccgugaccaagggggugaccgccagcugcucccacaacggcaagagcuccuucuacaagaaccugcucuggcugacggagaagaacgggcuguaccccaaccucagcaaguccuacgucaacaacaaggagaaggaggugcuggugcuguggggcguccaccaccccagcaacaucggggaccagcgggccaucuaccacaccgagaacgcguacgugagcguggucuccagccacuacucccgccgguucaccccggagaucgccaagcgccccaaggugcgggaccaggagggccgcaucaacuacuacuggacccuccuggagcccggcgacacgaucaucuucgaggccaacgggaaccugaucgcccccugguacgccuucgcgcucagccggggcuucggguccggcaucaucaccagcaacgccuccaugggcgacugcgacgccaagugccagaccccgcagggggccaucaacagcucccugcccuuccagaacgugcaccccgucaccaucggcgagugccccaaguacgugcgcagcacgaagcugcggauggugaccgggcuccgcaacaucccguccauccagagccggggccuguucggggccaucgcgggcuucaucgagggcggguggaccggcaugaucgacgggugguacggcuaccaccaccagaacgagcagggguccggcuacgccgccgacaagaaguccacccagaacgccaucgacggcaucacgaacaaggucaacagcgugaucgagaagaugaacacccaguucaccgccguggggaaggaguucaacaagcuggagcgccggauggagaaccucaacaagaaggucgacgacggcuuccuggacaucuggaccuacaacgcggagcugcucgugcugcuggagaacgagcgcacgcucgacuuccacgacagcaacgucaagaaccuguacgagaaggugaagaaccagcugaagaacaacgccaaggagaucgggaacggcugcuucgaguucuaccacaagugcaacaacgagugcauggaguccgugaagaacgggaccuacgacuaccccaaguacagcgaggaguccacccucaagcgggagaagaucgacggcgucaagcuggagagcaugggcguguaccagauccuggccaucuacagcaccguggccuccagccucguccugcuggugucccucggggccaucagcuucuggaugugcuccaacggcagccugcagugccgcaucugcaucuga

SEQ ID NO: 64927 - RNA, 1701 nt, Artificial Sequence
  derived and/or modified CDS sequence (opt1) from hemagglutinin__InfluenzaA__ABF47550
augaagaccaucaucgcccugagcuacaucuucugccucguguucgcccagaagcugcccggcaacgacaacuccaccgcgacgcugugccucgggcaccacgccgucccgaacggcacccuggugaagaccaucaccaacgaccagaucgaggugacgaacgccaccgagcugguccagagcuccagcaccgggcgcaucugcgacagcccccaccggauccucgacggcaagaacugcacccugaucgacgcccugcucggggacccccacugcgacggcuuccagaacgagaagugggaccuguucguggagcgcagcaaggccuacuccaacugcuaccccuacgacgugccggacuacgcgagccugcggucccucgucgccagcuccggcacgcuggaguucaucaacgaggacuucaacuggaccggggugacccagagcggcggguccuacgccugcaagcgcggcagcgugaacuccuucuucagccggcugaacuggcuccacgaguccgaguacaaguaccccgcccugaacgucaccaugcccaacaacgggaaguucgacaagcuguacaucuggggcgugcaccaccccagcacggaccgcgagcagaccaaccucuacgugcgggcguccggccgcgucaccgugagcaccaagcggagccagcagacggugaucccgaacaucgggucccgccccuggguccggggccugagcucccgcaucagcaucuacuggaccaucgugaagcccggggacauccugcucaucaacuccaccggcaaccugaucgcgccccggggcuacuucaagauccgcaccgggaaguccuccaucaugcggagcgacgccccgaucggcacgugcuccagcgagugcaucacccccaacggguccauccccaacgacaagcccuuccagaacgugaacaagaucaccuacggcgccugcccgcgcuacgucaagcagaacacccugaagcucgccacggggaugcggaacgugcccgagaagcagacccgcggcaucuucggcgccaucgccggguucaucgagaacggcugggaggggaugguggacggcugguacggguuccggcaccagaacagcgagggcaccggccaggccgccgaccugaaguccacccaggccgcgaucgaccagaucaacgggaagcugaaccgccucaucgagaagacgaacgagaaguuccaccagaucgagaaggaguucagcgaggucgagggccggauccaggaccuggagaaguacguggaggacaccaagaucgaccugugguccuacaacgccgagcuccugguggcccuggagaaccagcacaccaucgaccucaccgacagcgagaugaacaagcuguucgagaagacgcgcaagcagcugcgcgagaacgccgaggacauggggaacggcugcuucaagaucuaccacaagugcgacaacgccugcaucggguccauccggaacggcaccuacgaccacgacgucuaccgcgacgaggcgcucaacaaccgguuccagaucaagggcguggagcucaagagcggguacaaggacuggauccuguggaucuccuucgccaucagcugcuuccugcugugcgucgugcugcucggcuucaucaugugggccugccagaaggggaacauccgcugcaacaucugcaucuga

SEQ ID NO: 64928 - RNA, 1698 nt, Artificial Sequence
  derived and/or modified CDS sequence (opt1) from hemagglutinin__InfluenzaA__ABF47561
augaaggccaagcugcucgugcugcugugcaccuucaccgccacguacgcggacaccaucugcaucggcuaccacgccaacaacagcaccgacaccgucgacacggugcucgagaagaacgugaccgucacccacuccgugaaccugcuggaggacagccacaacgggaagcucugccugcugaagggcaucgcgccccuccagcuggggaacugcuccguggccggcuggauccuggggaacccggagugcgagcuccugaucagcaaggaguccuggagcuacaucgucgagacccccaaccccgagaacggcacgugcuaccccggcuacuucgccgacuacgaggagcugcgcgagcagcucuccagcguguccagcuucgagcgguucgagaucuucccgaagggguccagcuggcccaaccacaccgugaccggcgucuccgccagcugcucccacaacggcaagagcuccuucuaccgcaaccugcuguggcucaccgggaagaacgggcuguaccccaagcugagcauguccuacgugaacaacaaggagaaggaggugcucguccuguggggcgugcaccacccgcccaacaucggcgaccagcgggcccuguaccacacggagaacgccuacgugagcgucgugagcucccacuacagccgccgguucacccccgagaucgccaagcgccccaaggugcgggaccaggaggggcgcaucaacuacuacuggacccuccuggagcccggcgacaccaucaucuucgaggcgaacgggaaccugaucgccccgugguacgccuucgcccucucccggggcuucggcagcgggaucaucacguccaacgcccccaugggcgagugcgacgcgaagugccagacgccccagggggccaucaacagcucccugcccuuccagaacguccacccggugaccaucggcgagugccccaaguacgugcgcagcgccaagcugcggauggucaccgggcuccgcaacauccccuccauccagagccggggccuguucggcgccaucgccggguucaucgagggcggguggaccggcaugguggacgggugguacggcuaccaccaccagaacgagcagggcuccggguacgcggccgaccagaaguccacccagaacgccaucaacggcaucaccaacaaggugaacagcgucaucgagaagaugaacacccaguucacggccguggggaaggaguucaacaagcuggagcgccggauggagaaccucaacaagaaggucgacgacggcuuccuggacaucuggaccuacaacgccgagcugcucgugcugcuggagaacgagcgcacccucgacuuccacgacagcaacgugaagaaccuguacgagaaggucaagucccagcugaagaacaacgcgaaggagaucgggaacggcugcuucgaguucuaccacaagugcaacaacgagugcauggagagcgugaagaacggcaccuacgacuaccccaaguacuccgaggagagcaagcucaaccgggagaagaucgacggggugaagcuggaguccaugggcgucuaccagauccuggccaucuacagcacgguggccagcucccucgugcugcuggucagccucggggccaucuccuucuggaugugcagcaacggcucccugcagugccgcaucugcaucuga

SEQ ID NO: 64929 - RNA, 1698 nt, Artificial Sequence
  derived and/or modified CDS sequence (opt1) from hemagglutinin__InfluenzaA__ABF47572
augaaggccaagcugcucgugcugcugugcaccuucaccgccacguacgcggacaccaucugcaucggcuaccacgccaacaacagcaccgacaccgucgacacggugcucgagaagaacgugaccgucacccacuccgugaaccugcuggaggacagccacaacgggaagcucugccugcugaagggcaucgcgccccuccagcuggggaacugcuccguggccggcuggauccuggggaacccggagugcgagcuccugaucagcaaggaguccuggagcuacaucgucgagacccccaaccccgagaacggcacgugcuaccccggcuacuucgccgacuacgaggagcugcgcgagcagcucuccagcguguccagcuucgagcgguucgagaucuucccgaagggguccagcuggcccaaccacaccgugaccggcgucuccgccagcugcucccacaacggcaagagcuccuucuaccgcaaccugcuguggcucaccgggaagaacgggcuguaccccaaccugagcauguccuacgugaacaacaaggacaaggaggugcucguccuguggggcgugcaccacccgcccaacaucggcgaccagcgggcccuguaccacacggagaacgccuacgugagcgucgugagcucccacuacagccgccgguucacccccgagaucgccaagcgccccaaggugcgggaccaggaggggcgcaucaacuacuacuggacccuccuggagcccggcgacaccaucaucuucgaggcgaacgggaaccugaucgccccgugguacgccuucgcccucucccggggcuucggcagcgggaucaucacguccaacgcccccaugggcgagugcgacgcgaagugccagacgccccagggggccaucaacagcucccugcccuuccagaacguccacccggugaccaucggcgagugccccaaguacgugcgcagcgccaagcugcggauggucaccgggcuccgcaacauccccuccauccagagccggggccuguucggcgccaucgccggguucaucgagggcggguggaccggcaugguggacgggugguacggcuaccaccaccagaacgagcagggcuccggguacgcggccgaccagaaguccacccagaacgccaucaacggcaucaccaacaaggugaacagcgucaucgagaagaugaacacccaguucacggccguggggaaggaguucaacaagcuggagcgccggauggagaaccucaacaagaaggucgacgacggcuuccuggacaucuggaccuacaacgccgagcugcucgugcugcuggagaacgagcgcacccucgacuuccacgacagcaacgugaagaaccuguacgagaaggucaagucccagcugaagaacaacgcgaaggagaucgggaacggcugcuucgaguucuaccacaagugcaacaacgagugcauggagagcgugaagaacggcaccuacgacuaccccaaguacuccgaggagagcaagcucaaccgggagaagaucgacggggugaagcuggaguccaugggcgucuaccagauccuggccaucuacagcacgguggccagcucccucgugcugcuggucagccucggggccaucuccuucuggaugugcagcaacggcucccugcagugccgcaucugcaucuga

SEQ ID NO: 64930 - RNA, 1698 nt, Artificial Sequence; identical to SEQ ID NO: 64824
  derived and/or modified CDS sequence (opt1) from hemagglutinin__InfluenzaA__ABF47583

SEQ ID NO: 64931 - RNA, 1701 nt, Artificial Sequence
  derived and/or modified CDS sequence (opt1) from hemagglutinin__InfluenzaA__ABF47594
augaagaccaucaucgcccugagcuacauccucugccugguguucgcccagaagcugcccggcaacgacaacuccaccgcgacgcucugccuggggcaccacgccgucccgaacggcacccuggugaagaccaucaccaacgaccagaucgaggugacgaacgccaccgagcucguccagagcuccagcaccgggcgcaucugcgacagcccccaccggauccuggacggcaagaacugcacccugaucgacgcccuccugggggacccccacugcgacggcuuccagaacaaggagugggaccuguucguggagcgcagcaaggccuacuccaacugcuaccccuacgacgugccggacuacgcgagccuccggucccuggucgccagcuccggcacgcuggaguucaacaacgagagcuucaacuggaccgggguggcccagaacggcaccuccuacgccugcaagcgccggagcgugaaguccuucuucagccgccucaacuggcugcacaagcuggaguacaaguaccccgcgcagaacgucaccaugcccaacaacgacaaguucgacaagcucuacaucuggggcgugcaccaccccuccacggacagcgaccagaccucccuguacgugcaggccagcgggcgggucaccgugagcaccaagcgcucccagcagacggugaucccgaacaucgggagccggcccuggguccgcggcguguccagccggaucuccaucuacuggaccaucgugaagcccggcgacauccugcucaucaacagcaccgggaaccugaucgcgccccgcggcuacuucaagauccgguccgggaaguccuccaucaugcgcagcgacgccccgaucggcaacugcaacuccgagugcaucacccccaacggcagcauccccaacgacaagcccuuccagaacgucaaccggaucacguacggggccugcccgcgcuacgugaagcagaacacccugaagcucgccaccggcaugcggaacgugcccgagaagcagacccgcgggaucuucggcgccaucgccggguucaucgagaacggcugggagggcauggucgacgggugguacggcuuccggcaccagaacuccgaggggacgggccaggccgccgaccucaagagcacccaggcggccaucaaccagaucaacgggaagcugaaccgccugaucgagaagaccaacgagaaguuccaccagaucgagaaggaguucuccgagguggagggccggauccaggaccuggagaaguacguggaggacaccaagaucgaccuguggagcuacaacgccgagcuccuggucgcccuggagaaccagcacacgaucgaccucaccgacuccgagaugaacaagcuguucgagcgcacccgcaagcagcugcgggagaacgccgaggacaugggcaacgggugcuucaagaucuaccacaagugcgacaacgcgugcaucggcagcauccgcaacgggaccuacgaccacgacguguaccgggacgaggcccucaacaaccgcuuccagaucaagggcgucgagcugaaguccggguacaaggacuggauccuguggaucagcuucgccaucagcugcuuccuccugugcguggugcugcucggcuucaucaugugggccugccagaagggcaacauccggugcaacaucugcaucuga

SEQ ID NO: 64932 - RNA, 1701 nt, Artificial Sequence
  derived and/or modified CDS sequence (opt1) from hemagglutinin__InfluenzaA__ABF47605
augaaggccaagcugcucgugcugcugugcgccuucaccgcgaccuacgccgacacgaucugcaucggcuaccacgccaacaacagcaccgacaccgucgacaccgugcucgagaagaacgugacggucacccacuccgugaaccugcuggaggacagccacaacgggaagcucugccgccugaagggcaccgcgccccugcagcucgggaacugcuccguggccggcuggauccuggggaacccggagugcgagagccuguucuccaaggagagcugguccuacaucgccgagacccccaaccccgagaacggcacgugcuaccccggcuacuucgccgacuacgaggagcuccgggagcagcugagcuccgucagcuccuucgagcgcuucgagaucuucccgaaggagagcuccuggcccaaccacaccgugaccaagggggugaccgccagcugcucccacaacggcaagagcuccuucuacaagaaccugcucuggcugacggagaagaacgggcuguaccccaaccucagcaaguccuacgucaacaacaaggagaaggaggugcuggugcuguggggcguccaccaccccagcaacaucggggaccagcgggccaucuaccacaccgagaacgcguacgugagcguggucuccagccacuacucccgccgguucaccccggagaucgccaagcgccccaaggugcgggaccaggagggccgcaucaacuacuacuggacccuccuggagcccggcgacacgaucaucuucgaggccagcgggaaccugaucgcccccugguacgccuucgcgcucucccggggcuucgggagcggcaucaucaccuccaacgccagcaugggcgagugcgacgccaagugccagaccccgcagggggccaucaacuccagccugcccuuccagaacgugcaccccgucaccaucggcgagugccccaaguacgugcgcuccacgaagcugcggauggugaccgggcuccgcaacaucccgagcauccagucccggggccuguucggggccaucgcgggcuucaucgagggcggguggaccggcaugaucgacgggugguacggcuaccaccaccagaacgagcaggggagcggcuacgccgccgacaagaaguccacccagaacgccaucgacggcaucacgaacaaggucaacagcgugaucgagaagaugaacacccaguucaccgccguggggaaggaguucaacaagcuggagcgccggaucgagaaccucaacaagaaggucgacgacggcuuccuggacaucuggaccuacaacgcggagcugcucgugcugcuggagaacgagcgcacgcucgacuuccacgacuccaacgucaagaaccuguacgagaaggugaagaaccagcugaagaacaacgccaaggagaucgggaacggcugcuucgaguucuaccacaagugcaacaacgagugcauggagagcgugaagaacgggaccuacgacuaccccaaguacuccgaggagagcaagcucaagcgggagaagaucgacggcgucaagcuggagagcaugggcguguaccagauccuggccaucuacuccaccguggccagcucccucguccugcuggugagccucggggccaucuccuucuggaugugcagcaacggcucccugcagugccgcaucugcaucuga

SEQ ID NO: 64933 - RNA, 1701 nt, Artificial Sequence; identical to SEQ ID NO: 64917
  derived and/or modified CDS sequence (opt1) from hemagglutinin__InfluenzaA__ABF47616

SEQ ID NO: 64934 - RNA, 1701 nt, Artificial Sequence
  derived and/or modified CDS sequence (opt1) from hemagglutinin__InfluenzaA__ABF47627
augaaggccaagcugcucgugcugcugugcgccuucaccgcgaccuacgccgacacgaucugcaucggcuaccacgccaacaacagcaccgacaccgucgacaccgugcucgagaagaacgugacggucacccacuccgugaaccugcuggaggacagccacaacgggaagcucugccgccugaagggcaccgcgccccugcagcucgggaacugcuccguggccggcuggauccuggggaacccggagugcgagagccuguucuccaaggagagcugguccuacaucgccgagacccccaaccccgagaacggcacgugcuaccccggcuacuucgccgacuacgaggagcuccgggagcagcugagcuccgucagcuccuucgagcgcuucgagaucuucccgaaggagagcuccuggcccaaccacaccgugaccaagggggugaccgccagcugcucccacaacggcaagagcuccuucuacaagaaccugcucuggcugacggagaagaacgggcuguaccccaaccucagcaaguccuacgucaacaacaaggagaaggaggugcuggugcuguggggcguccaccaccccagcaacaucggggaccagcgggccaucuaccacaccgagaacgcguacgugagcguggucuccagccacuacucccgccgguucaccccggagaucgccaagcgccccaaggugcgggaccaggagggccgcaucaacuacuacuggacccuccuggagcccggcgacacgaucaucuucgaggccaacgggaaccugaucgcccccugguacgccuucgcgcucagccggggcuucggguccggcaucaucaccagcaacgccuccaugggcgacugcgacgccaagugccagaccccgcagggggccaucaacagcucccugcccuuccagaacgugcaccccgucaccaucggcgagugccccaaguacgugcgcagcacgaagcugcggauggugaccgggcuccgcaacaucccguccauccagagccggggccuguucggggccaucgcgggcuucaucgagggcggguggaccggcaugaucgacgggugguacggcuaccaccaccagaacgagcagggguccggcuacgccgccgacaagaaguccacccagaacgccaucgacggcaucacgaacaaggucaacagcgugaucgagaagaugaacacccaguucaccgccguggggaaggaguucaacaagcuggagcgccggauggagaaccucaacaagaaggucgacgacggcuuccuggacaucuggaccuacaacgcggagcugcucgugcugcuggagaacgagcgcacgcucgacuuccacgacagcaacgucaagaaccuguacgagaaggugaagaaccagcugaagaacaacgccaaggagaucgggaacggcugcuucgaguucuaccacaagugcaacaacgagugcauggaguccgugaagaacgggaccuacgacuaccccaaguacagcgaggaguccaagcucaagcgggagaagaucgacggcgucaagcuggagagcaugggcguguaccagauccuggccaucuacagcaccguggccuccagccucguccugcuggugucccucggggccaucagcuucuggaugugcuccaacggcagccugcagugccgcaucugcaucuga

SEQ ID NO: 64935 - RNA, 1701 nt, Artificial Sequence
  derived and/or modified CDS sequence (opt1) from hemagglutinin__InfluenzaA__ABF47638
augaaggccaagcugcucgugcugcugugcgccuucaccgcgaccuacgccgacacgaucugcaucggcuaccacgccaacaacagcaccgacaccgucgacaccgugcucgagaagaacgugacggucacccacuccgugaaccugcuggaggacagccacaacgggaagcucugccgccugaagggcaccgcgccccugcagcucgggaacugcuccguggccggcuggauccuggggaacccggagugcgagagccuguucuccaaggagagcugguccuacaucgccgagacccccaaccccgagaacggcacgugcuaccccggcuacuucgccgacuacgaggagcuccgggagcagcugagcuccgucagcuccuucgagcgcuucgagaucuucccgaaggagagcuccuggcccaaccacaccgugaccaagggggugaccgccagcugcucccacaacggcaagagcuccuucuacaagaaccugcucuggcugacggagaagaacgggcuguaccccaaccucagcaaguccuacgucaacaacaaggagaaggaggugcuggugcuguggggcguccaccaccccagcaacaucggggaccagcgggccaucuaccacaccgagaacgcguacgugagcguggucuccagccacuacucccgccgguucaccccggagaucaccaagcgccccaaggugcgggaccaggagggccgcaucaacuacuacuggacgcuccuggagcccggcgacaccaucaucuucgaggccaacgggaaccugaucgcccccugguacgccuucgcccucagccggggcuucggguccggcaucaucaccagcaacgcguccaugggcgagugcgacgccaagugccagaccccgcagggggccaucaacagcucccugcccuuccagaacgugcaccccgucacgaucggcgagugccccaaguacgugcgcagcaccaagcugcggauggugaccgggcuccgcaacaucccguccauccagagccggggccuguucggggccaucgccggcuucaucgagggcggguggaccggcaugaucgacgggugguacggcuaccaccaccagaacgagcagggguccggcuacgcggccgaccagaaguccacgcagaacgccaucgacggcaucaccaacaaggucaacagcgugaucgagaagaugaacacccaguucaccgccguggggaaggaguucaacaagcuggagcgccggauggagaaccucaacaagaaggucgacgacggcuuccuggacaucuggacguacaacgccgagcugcucgugcugcuggagaacgagcgcacccucgacuuccacgacagcaacgucaagaaccuguacgagaaggugaagacccagcugaagaacaacgcgaaggagaucgggaacggcugcuucgaguucuaccacaagugcaacaacgagugcauggaguccgugaagaacgggaccuacgacuaccccaaguacagcgaggaguccaagcucaaccgggagaagaucgacggcgucaagcuggagagcaugggcguguaccagauccuggccaucuacagcacgguggccuccagccucguccugcuggugucccucggggccaucagcuucuggaugugcuccaacggcagccugcagugccgcaucugcaucuga

SEQ ID NO: 64936 - RNA, 1701 nt, Artificial Sequence; identical to SEQ ID NO: 64935
  derived and/or modified CDS sequence (opt1) from hemagglutinin__InfluenzaA__ABF47649

SEQ ID NO: 64937 - RNA, 1701 nt, Artificial Sequence
  derived and/or modified CDS sequence (opt1) from hemagglutinin__InfluenzaA__ABF47660
augaaggccaagcugcucgugcugcugugcgccuucaccgcgaccuacgccgacacgaucugcaucggcuaccacgccaacaacagcaccgacaccgucgacaccgugcucgagaagaacgugacggucacccacuccgugaaccugcuggaggacagccacaacgggaagcucugccgccugaagggcaccgcgccccugcagcucgggaacugcuccguggccggcuggauccuggggaacccggagugcgagagccuguucuccaaggagagcugguccuacaucgccgagacccccaaccccgagaacggcacgugcuaccccggcuacuucgccgacuacgaggagcuccgggagcagcugagcuccgucagcuccuucgagcgcuucgagaucuucccgaaggagagcuccuggcccaaccacaccgugaccaagggggugaccgccagcugcucccacaacggcaagagcuccuucuacaagaaccugcucuggcugacggagaagaacgggcuguaccccaaccucagcaaguccuacgucaacaacaaggagaaggaggugcuggugcuguggggcauccaccaccccagcaacaucggggaccagcgggccaucuaccacaccgagaacgcguacgucagcgugguguccagccacuacucccgccgguucaccccggagaucgccaagcgccccaagguccgggaccaggagggccgcaucaacuacuacuggacccuccuggagcccggcgacacgaucaucuucgaggccaacgggaaccugaucgcccccugguacgccuucgcgcucagccggggcuucggguccggcaucaucaccagcaacgccuccaugggcgacugcgacgccaagugccagaccccgcagggggccaucaacagcucccugcccuuccagaacgugcaccccgugaccaucggcgagugccccaaguacguccgcagcacgaagcugcggauggugaccgggcuccgcaacaucccguccauccagagccggggccuguucggggccaucgcgggcuucaucgagggcggguggaccggcaugaucgacgggugguacggcuaccaccaccagaacgagcagggguccggcuacgccgccgacaagaaguccacccagaacgccaucgacggcaucacgaacaaggugaacagcgucaucgagaagaugaacacccaguucaccgccguggggaaggaguucaacaagcuggagcgccggauggagaaccucaacaagaagguggacgacggcuuccuggacaucuggaccuacaacgcggagcugcucguccugcuggagaacgagcgcacgcucgacuuccacgacagcaacgugaagaaccuguacgagaaggucaagacccagcugaagaacaacgccaaggagaucgggaacggcugcuucgaguucuaccacaagugcaacaacgagugcauggaguccgugaagaacgggaccuacgacuaccccaaguacagcgaggaguccaagcucaagcgggagaagaucgacggcgugaagcuggagagcaugggcgucuaccagauccuggccaucuacagcaccguggccuccagccucgugcugcuggucucccucggggccaucagcuucuggaugugcuccaacggcagccugcagugccgcaucugcaucuga

SEQ ID NO: 64938 - RNA, 1698 nt, Artificial Sequence
  derived and/or modified CDS sequence (opt1) from hemagglutinin__InfluenzaA__ABF47671
augaaggccaagcugcucgugcugcugugcaccuucaccgccacguacgcggacaccaucugcaucggcuaccacgccaacaacagcaccgacaccgucgacacggugcucgagaagaacgugaccgucacccacuccgugaaccugcuggaggacagccacaacgggaagcucugccugcugaagggcaucgcgccccuccagcuggggaacugcuccguggccggcuggauccuggggaacccggagugcgagcuccugaucagcaaggaguccuggagcuacaucgucgagacccccaaccccgagaacggcacgugcuaccccggcuacuucgccgacuacgaggagcugcgcgagcagcucuccagcguguccagcuucgagcgguucgagaucuucccgaagggguccagcuggcccaaccacaccgugaccggcgucuccgccagcugcucccacaacggcaagagcuccuucuaccgcaaccugcuguggcucaccgggaagaacgggcuguaccccaaccugagcauguccuacgugaacaacaaggagaaggaggugcucguccuguggggcgugcaccacccgcccaacaucggcgaccagcgggcccuguaccacacggagaacgccuucgugagcgucgugagcucccacuacagccgccgguucacccccgagaucgccaagcgccccaaggugcgggaccaggaggggcgcaucaacuacuacuggacccuccuggagcccggcgacaccaucaucuucgaggcgaacgggaaccugaucgccccgugguacgccuucgcccucucccggggcuucggcagcgggaucaucacguccaacgcccccauggacgagugcgacgcgaagugccagacgccccagggcgccaucaacagcucccugcccuuccagaacguccacccggugaccaucggggagugccccaaguacgugcgcagcgccaagcugcggauggucaccggccuccgcaacauccccuccauccagagccgggggcuguucggcgccaucgccggcuucaucgagggcggguggaccgggaugguggacggcugguacggguaccaccaccagaacgagcagggcuccggcuacgcggccgaccagaaguccacccagaacgccaucaacgggaucaccaacaaggugaacagcgucaucgagaagaugaacacccaguucacggccgugggcaaggaguucaacaagcuggagcgccggauggagaaccucaacaagaaggucgacgacggguuccuggacaucuggaccuacaacgccgagcugcucgugcugcuggagaacgagcgcacccucgacuuccacgacagcaacgugaagaaccuguacgagaaggucaagucccagcugaagaacaacgcgaaggagaucggcaacgggugcuucgaguucuaccacaagugcaacaacgagugcauggagagcgugaagaacggcaccuacgacuaccccaaguacuccgaggagagcaagcucaaccgggagaagaucgacggcgugaagcuggaguccaugggggucuaccagauccuggccaucuacagcacgguggccagcucccucgugcugcuggucagccucggcgccaucuccuucuggaugugcagcaacgggucccugcagugccgcaucugcaucuga

SEQ ID NO: 64939 - RNA, 1701 nt, Artificial Sequence
  derived and/or modified CDS sequence (opt1) from hemagglutinin__InfluenzaA__ABF47693
augaaggccaagcugcucgugcugcugugcgcccucagcgcgaccgacgccgacaccaucugcaucggcuaccacgccaacaacuccacggacaccgucgacaccgugcuggagaagaacgugaccgucacgcacagcgugaaccugcucgaggacucccacaacgggaagcugugccgccugaagggcaucgcgccccuccagcuggggaagugcaacaucgccggcuggauccuggggaacccggagugcgagagccucuucuccaagaaguccuggagcuacaucgccgagacccccaacagcgagaacgggaccugcuaccccggcuacuucgccgacuacgaggagcugcgggagcagcuguccagcguguccagcuucgagcgcuucgagaucuuccccaaggagcgguccuggccgaagcacaacgucacccgcggcgugacggccagcugcucccacaagggcaagagcuccuucuaccggaaccuccuguggcugaccgagaagaacgggagcuaccccaaccucuccaagagcuacgugaacaacaaggagaaggagguccuggugcuguggggcgugcaccaccccagcaacaucgaggaccagaagaccaucuaccgcaaggagaacgccuacgucuccguggugagcuccaacuacaaccggcgcuucacccccgagaucgcggagcggccgaagguccgcgggcaggccggccggaucaacuacuacuggacgcuccuggagcccggcgacaccaucaucuucgaggccaacgggaaccugaucgcccccuggcacgccuucgcgcucaaccgcggcuucgggagcggcaucaucaccuccaacgccagcauggacgagugcgacaccaagugccagacgccccagggcgccaucaacuccagccugccguuccagaacauccaccccgugaccaucggggagugccccaaguacgugcgguccaccaagcugcgcauggucaccggccuccggaacauccccagcauccagucccgcgggcuguucggcgccaucgccggguucaucgagggcggcuggacggggaugaucgacggcugguacggguaccaccaccagaacgagcagggcagcggguacgcggccgaccagaaguccacccagaacgccaucaacggcaucaccaacaaggugaacagcgugaucgagaagaugaacacccaguucacggccgucggcaaggaguucaacaagcuggagaagcggauggagaaccucaacaagaagguggacgacggguuccuggacaucuggaccuacaacgccgagcugcucgugcugcuggagaacgagcgcacccucgacuuccacgacuccaacgucaagaaccuguacgagaaggucaagagccagcugaagaacaacgcgaaggagaucggcaacgggugcuucgaguucuaccacaagugcaacaacgagugcauggaguccgugaagaacggcaccuacgacuacccgaaguacagcgaggaguccaagcucaaccgggagaagaucgacggggugaagcuggagagcaugggcguguaccagauccuggccaucuacagcacggucgccuccagccucgugcugcuggugucccucggcgccaucagcuucuggaugugcuccaacgggagccugcagugccgcaucugcaucuga

SEQ ID NO: 64940 - RNA, 1701 nt, Artificial Sequence; identical to SEQ ID NO: 64939
  derived and/or modified CDS sequence (opt1) from hemagglutinin__InfluenzaA__ABF47704

SEQ ID NO: 64941 - RNA, 1701 nt, Artificial Sequence
  derived and/or modified CDS sequence (opt1) from hemagglutinin__InfluenzaA__ABF47715
augaaggccaagcugcucgugcugcugugcgcccucagcgcgaccgacgccgacaccaucugcaucggcuaccacgccaacaacuccacggacaccgucgacaccgugcuggagaagaacgugaccgucacgcacagcgugaaccugcucgaggacucccacaacgggaagcugugccgccugaagggcaucgcgccccuccagcuggggaagugcagcaucgccggcuggauccuggggaacccggagugcgagucccucuucagcaagaaguccuggagcuacaucgccgagacccccaacuccgagaacgggaccugcuaccccggcuacuucgccgacuacgaggagcugcgggagcagcugagcuccgugagcuccuucgagcgcuucgagaucuuccccaaggagcggagcuggccgaagcacaacgucacccgcggcgugacggccuccugcagccacaagggcaaguccagcuucuaccggaaccuccuguggcugaccgagaagaacggguccuaccccaaccucagcaagagcuacgugaacaacaaggagaaggagguccuggugcuguggggcgugcaccaccccuccaacaucgaggaccagaagaccaucuaccgcaaggagaacgccuacgucagcgugguguccagcaacuacaaccggcgcuucacccccgagaucgcggagcggccgaagguccgcgggcaggccggccggaucaacuacuacuggacgcuccuggagcccggcgacaccaucaucuucgaggccaacgggaaccugaucgcccccuggcacgccuucgcgcucaaccgcggcuucggguccggcaucaucaccagcaacgccuccauggacgagugcgacaccaagugccagacgccccagggcgccaucaacagcucccugccguuccagaacauccaccccgugaccaucggggagugccccaaguacgugcggagcaccaagcugcgcauggucaccggccuccggaacauccccuccauccagagccgcgggcuguucggcgccaucgccggguucaucgagggcggcuggacggggaugaucgacggcugguacggguaccaccaccagaacgagcagggcuccggguacgcggccgaccagaaguccacccagaacgccaucaacggcaucaccaacaaggugaacagcgugaucgagaagaugaacacccaguucacggccgucggcaaggaguucaacaagcuggagaagcggauggagaaccucaacaagaagguggacgacggguuccuggacaucuggaccuacaacgccgagcugcucgugcugcuggagaacgagcgcacccucgacuuccacgacagcaacgucaagaaccuguacgagaaggugaagucccagcugaagaacaacgcgaaggagaucggcaacgggugcuucgaguucuaccacaagugcaacaacgagugcauggagagcgucaagaacggcaccuacgacuacccgaaguacuccgaggagagcaagcucaaccgggagaagaucgacggggugaagcuggagagcaugggcguguaccagauccuggccaucuacuccacggucgccagcucccucgugcugcuggugagccucggcgccaucuccuucuggaugugcagcaacgggucccugcagugccgcaucugcaucuga

SEQ ID NO: 64942 - RNA, 1701 nt, Artificial Sequence; identical to SEQ ID NO: 64939
  derived and/or modified CDS sequence (opt1) from hemagglutinin__InfluenzaA__ABF47726

SEQ ID NO: 64943 - RNA, 1701 nt, Artificial Sequence; identical to SEQ ID NO: 64939
  derived and/or modified CDS sequence (opt1) from hemagglutinin__InfluenzaA__ABF47737

SEQ ID NO: 64944 - RNA, 1701 nt, Artificial Sequence
  derived and/or modified CDS sequence (opt1) from hemagglutinin__InfluenzaA__ABF47748
augaaggccaagcugcucgugcugcugugcgcccucagcgcgaccgacgccgacaccaucugcaucggcuaccacgccaacaacuccacggacaccgucgacaccgugcuggagaagaacgugaccgucacgcacagcgugaaccugcucgaggacucccacaacgggaagcugugccgccugaagggcaucgcgccccuccagcuggggaagugcagcaucgccggcuggauccuggggaacccggagugcgagucccucuucagcaagaaguccuggagcuacaucgccgagacccccaacuccgagaacgggaccugcuaccccggcuacuucgccgacuacgaggagcugcgggagcagcugagcuccgugagcuccuucgagcgcuucgagaucuuccccaaggagagcuccuggccgaagcacaacgucacccgcggggugacggccagcugcucccacaagggcaagagcuccuucuaccggaaccuccuguggcugaccgagaagaacgggagcuaccccaaccucagcaaguccuacgugaacaacaaggagaaggagguccuggugcuguggggcgugcaccaccccagcaacaucgaggaccagaagaccaucuaccggaaggagaacgccuacgucuccguggugagcucccacuacaaccgccgguucacccccgagaucgcgaagcgcccgaagguccgggaccaggaggggcgcaucaacuacuacuggacgcuccuggagcccggcgacaccaucaucuucgaggccaacggcaaccugaucgcccccugguacgccuucgcccucagccggggguucggcuccgggaucaucaccagcaacgcguccauggacgagugcgacgccaagugccagacgccccagggcgccaucaacagcucccugccguuccagaacgugcaccccgugaccaucggcgagugccccaaguacguccgcagcaccaagcugcggauggugaccgggcuccgcaacauccccuccauccagagccggggccuguucggggccaucgccggcuucaucgagggcggcuggaccggcaugaucgacgggugguacggcuaccaccaccagaacgagcagggguccggcuacgcggccgaccagaaguccacgcagaacgccaucaacgggaucaccaacaaggugaacagcgucaucgagaagaugaacacccaguucaccgccgugggcaaggaguucaacaagcuggagaagcgcauggagaaccucaacaagaagguggacgacggcuuccuggacaucuggacguacaacgccgagcugcucguccugcuggagaacgagcggacccucgacuuccacgacagcaacgugaagaaccuguacgagaaggucaagucccagcugaagaacaacgcgaaggagaucgggaacggcugcuucgaguucuaccacaagugcaacaacgagugcauggagagcgugaagaacgggaccuacgacuacccgaaguacagcgaggaguccaagcucaaccgcgagaagaucgacggcgugaagcuggagagcaugggggucuaccagauccuggccaucuacuccaccguggccagcucccucgugcugcuggucagccucggcgccaucuccuucuggaugugcagcaacggcucccugcagugccggaucugcaucuga

SEQ ID NO: 64945 - RNA, 1701 nt, Artificial Sequence
  derived and/or modified CDS sequence (opt1) from hemagglutinin__InfluenzaA__ABF47770
augaaggccaagcugcucgugcugcugugcgcccucagcgcgaccgacgccgacaccaucugcaucggcuaccacgccaacaacuccacggacaccgucgacaccgugcuggagaagaacgugaccgucacgcacagcgugaaccugcucgaggacaaccacaacgggaagcugugcaagcugaagggcaucgcgccccuccagcuggggaagugcuccaucgccggcuggauccuggggaacccggagugcgagagccucuucuccaagaaguccuggagcuacaucgccgagacccccaacagcgagaacgggaccugcuaccccggcuacuucgccgacuacgaggagcugcgcgagcagcuguccagcguguccagcuucgagcgguucgagaucuuccccaaggaguccagcuggccgaagcacaacgucaccaagggggugacggccuccugcagccacaagggcaaguccagcuucuaccgcaaccuccuguggcugaccgagaagaacggguccuaccccaaccucagcaagagcuacgugaacaacaaggagaaggagguccuggugcuguggggcgugcaccaccccuccaacaucgaggaccagaagaccaucuaccggaaggagaacgccuacgucagcgugguguccagccacuacaaccgccgguucacccccgagaucgcgaagcgcccgaagguccggaaccaggaggggcgcaucaacuacuacuggacgcuccuggagcccggcgacaccaucaucuucgaggccaacggcaaccugaucgcccccugguacgccuucgcccucucccggggguucggcagcgggaucaucaccuccaacgcgagcauggacgagugcgacgccaagugccagacgccccagggcgccaucaacuccagccugccguuccagaacgugcaccccgugaccaucggcgagugccccaaguacguccgcuccaccaagcugcggauggugaccgggcuccgcaacauccccagcauccagucccggggccuguucggggccaucgccggcuucaucgagggcggcuggaccggcaugaucgacgggugguacggcuaccaccaccagaacgagcaggggagcggcuacgcggccgaccagaaguccacgcagaacgccaucaacgggaucaccaacaaggugaacagcaucaucgagaagaugaacacccaguucaccgccgucggcaaggaguucaacaagcuggagaagcgcauggagaaccucaacaagaagguggacgacggcuuccuggacaucuggacguacaacgccgagcugcucgugcugcuggagaacgagcggacccucgacuuccacgacuccaacgucaagaaccuguacgagaaggucaagagccagcugaagaacaacgcgaaggagaucgggaacggcugcuucgaguucuaccacaagugcaacaacgagugcauggaguccgugaagaacgggaccuacgacuacccgaaguacagcgaggagagcaagcucaaccgcgagaagaucgacggcgugaagcuggaguccauggggguguaccagauccuggccaucuacagcaccgucgccuccagccucgugcugcuggugucccucggcgccaucagcuucuggaugugcuccaacggcagccugcagugccggaucugcaucuga

SEQ ID NO: 64946 - RNA, 1701 nt, Artificial Sequence; identical to SEQ ID NO: 64945
  derived and/or modified CDS sequence (opt1) from hemagglutinin__InfluenzaA__ABF47781

SEQ ID NO: 64947 - RNA, 1701 nt, Artificial Sequence; identical to SEQ ID NO: 64945
  derived and/or modified CDS sequence (opt1) from hemagglutinin__InfluenzaA__ABF47792

SEQ ID NO: 64948 - RNA, 1701 nt, Artificial Sequence; identical to SEQ ID NO: 64945
  derived and/or modified CDS sequence (opt1) from hemagglutinin__InfluenzaA__ABF47803

SEQ ID NO: 64949 - RNA, 1701 nt, Artificial Sequence; identical to SEQ ID NO: 64945
  derived and/or modified CDS sequence (opt1) from hemagglutinin__InfluenzaA__ABF47814

SEQ ID NO: 64950 - RNA, 1701 nt, Artificial Sequence; identical to SEQ ID NO: 64945
  derived and/or modified CDS sequence (opt1) from hemagglutinin__InfluenzaA__ABF47825

SEQ ID NO: 64951 - RNA, 1701 nt, Artificial Sequence; identical to SEQ ID NO: 64945
  derived and/or modified CDS sequence (opt1) from hemagglutinin__InfluenzaA__ABF47836

SEQ ID NO: 64952 - RNA, 1701 nt, Artificial Sequence; identical to SEQ ID NO: 64945
  derived and/or modified CDS sequence (opt1) from hemagglutinin__InfluenzaA__ABF47847

SEQ ID NO: 64953 - RNA, 1701 nt, Artificial Sequence
  derived and/or modified CDS sequence (opt1) from hemagglutinin__InfluenzaA__ABF47858
augaagaccaucaucgcccugagcuacauccucugccugguguucgcccagaagcugcccggcaacgacaacgggaccgcgacgcucugccugggccaccacgccgucccgaacgggacccuggugaagaccaucaccaacgaccagaucgaggugacgaacgccaccgagcucguccaguccagcuccaccggccgcaucugcgacagcccccaccggauccuggacgggaagaacugcacccugaucgacgcccuccugggcgacccccacugcgacggcuuccagaacaaggagugggaccuguucguggagcgcuccaaggccuacagcaacugcuaccccuacgacgugccggacuacgcgucccuccggagccuggucgccuccagcgggacgcuggaguucaucaacgaggacuucaacuggaccggcguggcccaggacgggaaguccuacgccugcaagcgcggcagcgugaacuccuucuucagccggcucaacuggcugcacaagcuggaguacaaguaccccgcgcucaacgucaccaugcccaacaacgggaaguucgacaagcuguacaucuggggcgugcaccaccccuccaccgacagcgaccagacgucccuguacgugcgcgccagcggccgggucaccguguccaccaagcgcagccagcagaccgugaucccgaacaucggguuccggcccuggguccgcggccucagcucccggaucagcaucuacuggacgaucgugaagcccggggacauccugcugaucaacuccaccggcaaccucaucgcgccccgcggcuacuucaagauccggaacggcaagagcuccaucaugcgcagcgacgccccgaucgggaacugcuccagcgagugcaucacccccaacggguccauccccaacgacaagcccuuccagaacgugaaccggaucaccuacggcgccugcccgcgcuacgucaagcagaacacgcugaagcuggccaccgggaugcggaacgugcccgagaagcagacccgcggcaucuucggcgccaucgccggguucaucgagaacggcugggaggggaugguggacggcugguacggguuccggcaccagaacagcgagggcaccggccaggccgccgaccucaaguccacgcaggcggccaucgaccagaucaacgggaagcugaaccgccugaucgagaagaccaacgagaaguuccaccagaucgagaaggaguucagcgaggucgagggccggauccaggaccucgagaaguacguggaggacaccaagaucgaccugugguccuacaacgccgggcugcucguggcccuggagaaccagcacaccaucgaccugacggacagcgagaugaacaagcuguucgagcgcacccgcaagcagcuccgggagaacgccgaggacaugggcaacgggugcuucaagaucuaccacaagugcgacaacgcgugcaucggcuccauccgcaacggcaccuacgaccacgacgucuaccgggacgaggcccugaacaaccgcuuccagaucaaggggguggagcucaagagcggcuacaaggacuggauccuguggaucuccuucgccaucagcugcuuccugcucugcgucgugcugcugggguucaucaugugggccugccagaagggcaacauccggugcaacaucugcaucuga

SEQ ID NO: 64954 - RNA, 1698 nt, Artificial Sequence; identical to SEQ ID NO: 64766
  derived and/or modified CDS sequence (opt1) from hemagglutinin__InfluenzaA__ABF47869

SEQ ID NO: 64955 - RNA, 1698 nt, Artificial Sequence; identical to SEQ ID NO: 64766
  derived and/or modified CDS sequence (opt1) from hemagglutinin__InfluenzaA__ABF47880

SEQ ID NO: 64956 - RNA, 1698 nt, Artificial Sequence
  derived and/or modified CDS sequence (opt1) from hemagglutinin__InfluenzaA__ABF47891
augaaggugaagcugcucguccugcugugcaccuucaccgccacguacgccgacaccaucugcaucggcuaccacgcgaacaacagcaccgacaccguggacacggugcucgagaagaacgucaccgugacccacuccgugaaccugcuggaggacagccacaacgggaagcucugccugcugaagggcaucgcgccccuccagcuggggaacugcuccgucgccggcuggauccuggggaacccggagugcgagcuccugaucagcaaggaguccuggagcuacaucguggagacccccaaccccgagaacggcacgugcuaccccggcuacuucgccgacuacgaggagcugcgcgagcagcucuccagcguguccagcuucgagcgguucgagaucuucccgaaggaguccagcuggcccaaccacaccgucaccgggguguccgccagcugcucccacaacggcaagagcuccuucuaccgcaaccugcuguggcucacccggaagaacgggcuguaccccaaccugagcaaguccuacgccaacaacaaggagaaggaggugcucguccuguggggcgugcaccacccgcccaacaucggggaccagcgcgcccuguaccacacggagaacgccuacgugagcgucgugagcucccacuacagccggcgcuucacccccgagaucgccaagcggcccaaggugcgcgaccaggagggccggaucaacuacuacuggacccuccuggagcccggcgacaccaucaucuucgaggcgaacgggaaccugaucgccccgcgcuacgccuucgcccucucccggggcuucgggagcggcaucaucacguccaacgcccccauggacgagugcgacgcgaagugccagacgccccagggcgccaucaacagcucccugcccuuccagaacguccacccggugaccaucggggagugccccaaguacgugcgcagcgccaagcugcggauggucaccggccuccgcaacauccccuccauccagagccgggggcuguucggcgccaucgccggguucaucgagggcggcuggaccgggaugguggacggcugguacggguaccaccaccagaacgagcagggcuccggguacgcggccgaccagaaguccacccagaacgccaucaacggcaucaccaacaaggugaacagcgucaucgagaagaugaacacccaguucacggccgugggcaaggaguucaacaagcuggagcgccggauggagaaccucaacaagaaggucgacgacggguuccuggacaucuggaccuacaacgccgagcugcucgugcugcuggagaacgagcgcacccucgacuuccacgacagcaacgugaagaaccuguacgagaaggucaagucccagcugaagaacaacgcgaaggagaucggcaacgggugcuucgaguucuaccacaagugcaacaacgagugcauggagagcgugaagaacggcaccuacgacuaccccaaguacuccgaggagagcaagcucaaccgggagaagaucgacggggugaagcuggaguccaugggcgucuaccagauccuggccaucuacagcacgguggccagcucccucgugcugcuggucagccucggcgccaucuccuucuggaugugcagcaacgggucccugcagugccgcaucugcaucuga

SEQ ID NO: 64957 - RNA, 1701 nt, Artificial Sequence
  derived and/or modified CDS sequence (opt1) from hemagglutinin__InfluenzaA__ABF47902
augaagaccaucaucgcccugagcuacauccucugccugguguucgcccagaagcugcccggcaacgacaacuccaccgcgacgcucugccuggggcaccacgccgucccgaacggcacccuggugaagaccaucaccaacgaccagaucgaggugacgaacgccaccgagcucguccagagcuccagcaccgggggcaucugcgacagcccccaccagauccuggacggggagaacugcacccugaucgacgcccuccugggcgacccccacugcgacggcuuccagaacaaggagugggaccuguucguggagcgcagcaaggccuacuccaacugcuaccccuacgacgugccggacuacgcgagccuccggucccuggucgccagcuccgggacgcuggaguucaacaacgagagcuucaacuggaccggcguggcccagaacgggaccuccagcgccugcaagcgccgguccaacaagagcuucuucucccgccucaacuggcugcaccagcugaaguacaaguaccccgcgcucaacgugaccaugcccaacaacgagaaguucgacaagcuguacaucuggggcguccaccaccccagcacggacuccgaccagaucagccuguacgcccaggccccggggcgggugaccgugagcaccaagcgcucccagcagaccgucauccccaacaucggcagccggcccugggugcgcggcguguccagccggaucuccaucuacuggacgaucgucaagagcggggacauccuccugaucaacugcaccggcaaccugaucgcgccccgcggguacuucaagauccgguccggcaagagcuccaucaugcgcagcgacgccuccaucggcaagugcaacagcgagugcaucaccccgaacggguccauccccaacgacaagcccuuccagaacgugaaccggaucaccuacggcgccugcccccgcuacgugaagcagaacacgcucaagcuggccaccgggaugcggaacgucccggagaagcagacccgcggcaucuucggggccaucgccggcuucaucgagaacggcugggaggggaugguggacggcugguacggguuccggcaccagaacagcgagggcaccgggcaggccgcggaccugaaguccacgcaggccgccaucaaccagaucaacggcaagcucaaccgccugaucgagaagaccaacgagaaguuccaccagaucgagaaggaguucagcgagguggagggccggauccaggaccuggagaaguacgucgaggacaccaagaucgaccucugguccuacaacgccgagcugcugguggcccucgagaaccagcacaccaucgaccugacggacagcgagaugaacaagcuguucgagcgcaccaagaagcagcuccgggagaacgcggaggacauggggaacggcugcuucaagaucuaccacaagugcgacaacgccugcaucggguccauccgcaacggcaccuacgaccacgacguguaccgcgacgaggcccugaacaaccgguuccagaucaagggggucgagcugaaguccggcuacaaggacuggauccucuggaucagcuucgccaucuccugcuuccugcugugcgugguccuccugggcuucaucaugugggccugccagaaggggaacauccgcugcaacaucugcaucuga

SEQ ID NO: 64958 - RNA, 1698 nt, Artificial Sequence
  derived and/or modified CDS sequence (opt1) from hemagglutinin__InfluenzaA__ABF47955
augaaggccaagcugcucgugcugcuguacgccuucgucgcgaccgacgccgacaccaucugcaucggcuaccacgccaacaacagcacggacaccguggacaccaucuucgagaagaacguggccgucacccacuccgugaaccuccuggaggaccgccacaacgggaagcugugcaagcucaagggcaucgcgccccugcagcuggggaagugcaacaucacgggcuggcuccuggggaacccggagugcgacagccugcuccccgcccgguccuggagcuacaucguggagacccccaacuccgagaacggcgccugcuaccccggcgacuucaucgacuacgaggagcugcgcgagcagcugagcuccgucagcucccucgagcgguucgagaucuucccgaaggagagcuccuggcccaaccacaccuucaacggggugaccgugagcugcucccaccgcggcaagagcuccuucuaccggaaccugcuguggcucacgaagaagggggacagcuaccccaagcugaccaacuccuacgucaacaacaagggcaaggaggugcuggugcucuggggcguccaccaccccagcuccagcgacgagcagcagagccuguacuccaacgggaacgccuacgugagcguggccuccagcaacuacaaccgccgguucaccccggagaucgcggcccgccccaaggucaaggaccagcacggccggaugaacuacuacuggacccugcucgagcccggggacacgaucaucuucgaggccaccggcaaccugaucgcccccugguacgccuucgcgcugucccgcggguucgagagcggcaucaucaccuccaacgccagcaugcacgagugcaacaccaagugccagacgccgcagggcuccaucaacagcaaccuccccuuccagaacauccaccccgugaccaucggggagugccccaaguacgugcgguccaccaagcugcgcauggucaccggccugcggaacaucccgagcauccaguaccgcggccucuucggggccaucgccggguucaucgagggcggcuggacggggaugaucgacggcugguacggguaccaccaccagaacgagcagggcuccggguacgccgcggaccagaaguccacccagaacgccaucaaccggaucaccaacaaggugaacagcgugaucgagaagaugaacacccaguucacggccgucggcaaggaguucaacaaccuggagaagcgcauggagaaccugaacaagaagguggacgacggcuuccucgacaucuggaccuacaacgccgagcugcuggugcuccuggagaacgagcggacccuggacuuccacgaccucaacgucaagaaccuguacgagaaggucaagagccagcugaagaacaacgccaaggagaucgggaacggcugcuucgaguucuaccacaagugcgacaacgagugcauggaguccgugcgcaacgggaccuacgacuaccccaaguacagcgaggaguccaagcucaaccgggagaagaucgacggcgugaagcuggagagcauggggguguaccagauccuggcgaucuacagcacggucgccuccagccucgugcugcuggugucccucggcgccaucagcuucuggaugugcuccaacggcagccugcagugccgcaucugcaucuga

SEQ ID NO: 64959 - RNA, 1698 nt, Artificial Sequence
  derived and/or modified CDS sequence (opt1) from hemagglutinin__InfluenzaA__ABF60576
augaagaccaccaucauccugauccuccugacgcacgccguggacagccagaaccccaucuccggcaacaacaccgccacccugugccucgggcaccacgcggucgccaacggcacccuggugaagacgaucaccgacgaccagaucgaggugaccaacgccaccgagcugguccagagcacguccaucgggaagaucugcaacaacccguaccgcgugcucgacggccggaacugcacccugaucgacgccaugcugggggacccccacugcgacguguuccaguacgagaacugggaccucuucaucgagcgcagcuccgccuucagcaacugcuaccccuacgacauccccgacuacgcgucccugcggagcaucgucgccuccagcggcacccuggaguucaccgccgagggcuucacguggaccggggugacccagaacggcggguccggcgccugccgccgggggagcgcggacuccuucuucagccgccucaacuggcugaccaaguccggcaacagcuacccgacgcugaacgugaccaugcccaacaacgacaacuucgacaagcucuacaucuggggcauccaccaccccuccaccaacaacgagcagaccaagcuguacguccaggagcuggggcgggugacggugagcaccaagcgcucccagcagaccaucauccccaacaucggcagccggccggggguccgcggccaggccggccggaucagcaucuacuggaccaucgugaagcccggggacauccucaugaucaacuccaacggcaaccugguggcgccccgcggguacuucaagaugcggacgggcaagagcuccaucaugcgcagcgacgcccccaucgacacgugcugguccgagugcaucaccccgaacgggagcauccccaacgacaagcccuuccagaacgucaacaaggugaccuacggcaagugccccaaguacaucaagcagaacacccugaagcucgccaccggcaugcggaacgugccggagaagcagauccgcgggaucuucggcgccaucgccggguucaucgagaacggcugggaggggauggucgacggcugguacggcuuccgguaccagaacuccgaggggaccggccaggccgccgaccucaagagcacccaggccgcgaucgaccagaucaacgggaagcugaaccgcgugaucgagcggacgaacgagaaguuccaccagaucgagaaggaguucuccgagguggagggccgcauccaggaccucgagaaguacgucgaggacaccaagaucgaccuguggagcuacaacgccgagcugcucguggcccuggagaaccagcacaccaucgaccugaccgacgccgagaugaacaagcuguucgagaagacgcggcgccagcugcgcgagaacgccgaggacaugggcgggggcugcuucaagaucuaccacaagugcgacaacgcgugcaucggguccauccggaacggcaccuacgaccacuacaucuaccgcgacgaggcccugaacaaccgguuccagaucaaggggguggagcucaagagcggcuacaaggacuggauccuguggaucuccuucgccaucagcugcuuccugaucugcgucgugcuccugggcuucaucaugugggccugcgagaaggggaacauccgcugcaacaucugcaucuga

SEQ ID NO: 64960 - RNA, 1701 nt, Artificial Sequence
  derived and/or modified CDS sequence (opt1) from hemagglutinin__InfluenzaA__ABF60577
augaagaccaucaucgugcugagcuacuucuucugccucgcccugucccaggacuacagcgaguccaacaacagcaccgccacgcugugccucggccaccacgcgguccccaacgggaccaucgugaagaccaucaccgacgaccagaucgaggugacgaacgccaccgagcugguccaguccagcuccaccggcaagaucugcaacaacccgcaccgcauccuggacgggcgggacugcacccucaucgacgcccugcugggcgacccccacugcgacguguuccaggacgagacgugggaccucuacguggagcgcagcuccgccuucagcaacugcuaccccuacgacguccccgacuacgccucccugcggagccugguggcguccagcgggacccucgaguucaucaccgagggcuucaccuggacgggcgugacccagaacgggggcuccaacgccugcaagcgcgggccggccagcggcuucuucucccggcugaacuggcugaccaagagcggguccaccuaccccguccucaacgugacgaugcccaacgacgacaacuucgacaagcuguacguguggggcguccaccaccccagcaccaaccaggagcagaccgaccuguacgugcaggccagcggccgcgugaccgucuccacgcggcgcagccagcagaccaucaucccgaacaucgggucccggcccugggugcgcggccagagcgggcggaucuccaucuacuggaccaucgugaagcccggcgacguccucgugaucaacagcaacggcaaccugaucgcgccccgcggguacuucaagauccggaccggcaaguccagcaucaugcgcuccgacgccccgaucgacacgugcaucagcgagugcaucacccccaacggguccauccccaacgacaagcccuuccagaacgugaacaagaucaccuacggcgccugcccgaaguacgucaagcagagcacccugaagcucgccacggggaugcggaacgugcccgagaagaagacccgcggccuguucguggccaucgcgggcuucaucgagaacgggugggagggcaugaucgacugcugguacggguuccggcaccagaacuccgagggcaccgggcaggccgccgaccucaagagcacccaggccgccaucgaccagaucaacggcaagcugaaccgcgucaucgagaagacgaacgagaaguuccaccagaucgagaaggaguucuccgagguggagggccggauccaggaccuggagaacuacgucgaggacaccaagaucgaccuguggagcuacaacgcggagcuccugguggcccuggagaaccagcacaccaucgaccucaccgacuccgagaugaacaagcuguucgagcgcacgcggcgccagcugcgcgagaacgccgaggacauggggagcggcugcuucaagaucuaccacaagugcgacaacgccugcaucgaguccauccggaacgggaccuacgaccacgacaucuaccgcgacgaggcccucaacaaccgguuccagaucaagggcguggagcucaagagcggguacaaggacuggauccuguggaucagcuucgcgaccuccugcuuccugcugugcgucgugcugggcggcuucaucaugugggccugccagcgcgggaacauccggugcaacaucugcaucuga

SEQ ID NO: 64961 - RNA, 1701 nt, Artificial Sequence
  derived and/or modified CDS sequence (opt1) from hemagglutinin__InfluenzaA__ABF60578
augaagaccaucaucgugcugagcugcuucuucugccucgccuucucccaggaccugagcgagaacaacaacaacaccgccacgcugugccucggccaccacgcgguccccaacgggaccaucgugaagaccaucaccgacgaccagaucgaggugacgaacgccaccgagcugguccaguccagcuccaccggcaagaucugcaacaacccgcaccgcauccuggacgggcgggacugcacccucaucgacgcccugcugggcgacccccacugcgacguguuccaggacgagacgugggaccucuacguggagcgcagcaaguccuucagcaacugcuaccccuacgacguccccgacuacgccucccugcggagccugguggccuccagcgggacccucgaguucaucaccgaggcguucaccuggacgggcgugacccagaacggcggguccggcgccugcaagcgcgggccgggcaacggguucuucagccggcugaacuggcugaccaaguccggcagcgccuaccccguccucaacgugaccaugcccaacaacgacaacuucgacaagcuguacguguggggcguccaccaccccuccacgaaccaggagcagaccaaccuguacgugcaggccagcgggcgcgugaccgucuccacccggcgcagccagcagacgaucaucccgaacaucggcagccggcccugggugcgcgggcagucccggcgcaucagcaucuacuggaccaucgugaagcccggcgacauccucgucaucaacuccaacggcaaccugaucgcgccccggggguacuucaagaugcgcaccggcaagagcuccaucaugcggagcgacgccccgaucgacacgugcaucuccgagugcaucacccccaacgggagcauccccaacgacaagcccuuccagaacgugaacaagaucaccuacggcgccugcccgaaguacaucaagcaguccacccugaagcucgccaccgggaugcgcaacgugcccgagaagcagacgcggggccuguucggcgccaucgcgggguucaucgagaacggcugggaggggaugaucgacggcugguacggguuccgccaccagaacagcgagggcaccggccaggccgccgaccugaaguccacccaggccgccaucgaccagaucaacgggaagcucaaccgggucaucgagaagaccaacgagaaguuccaccagaucgagaaggaguucagcgagguggagggccgcauccaggaccuggagaaguacguggaggacacgaagaucgaccugugguccuacaacgcggacguccucguggcccuggagaaccagcacaccaucgaccugaccgacagcgagaugaacaagcuguucgagaagacccggcgccagcuccgcgagaacgccgaggacauggggaacggcugcuucaagaucuaccacaagugcgacaacgccugcaucgaguccauccggaacgggacguacgaccacgacaucuaccgcgacgaggcccugaacaaccgguuccagaucaagggcugcggcgucaagagcggguacaaggacuggauccucuggaucuccuucgcgaucagcugcuuccugcugugcguggugcuccugggcuucaucaugugggccugccagcgcgggaacauccggugcaacaucugcaucuga

SEQ ID NO: 64962 - RNA, 1701 nt, Artificial Sequence
  derived and/or modified CDS sequence (opt1) from hemagglutinin__InfluenzaA__ABF60579
augaagacccugaucgcccucagcuacaucuucugccuggugcugggccaggaccuccccgggaacggcaacuccaccgccacgcugugccuggggcaccacgcggucccgaacggcacccucgugaagaccaucaccgacgaccagaucgaggugacgaacgccaccgagcugguccagaacuucagcauggacaagaucugcaacaacccccaccgcauccuggacggggccaacugcacccucaucgacgcccugcugggcgacccccacugcgacgacuuccagaacgagaagugggaccucuucguggagcgguccaaggccuucagcaacugcuaccccuacgacgugccggacuacaccucccugcgcagccugaucgcguccagcggcacgcucgaguucaucaacgaggacuucaacuggaccggggucacccagaacggcggguccaacgccugcaagcggggccccgacagcuccuucuucagccgccugaacuggcuguacaaguccgggaacaccuaccccaugcucaacgugacgaugcccaacagcgacaacuucgacaagcuguacaucuggggcgugcaccacccguccaccgcccgggagcagaccaaccuguacguccaggccagcggcaaggugaccguguccacgaagcgcagccagcagaccaucauccccaacaucgggucccggcccuggguccgcggccucagcagccggaucuccaucuacuggaccaucgugaagcccggggacauccuggugaucaacagcaacggcaaccugaucgcgccgcgcggcuacuucaagaugcacaccgggcgguccagcaucaugcgcuccgacgcccccaucgacacgugcagcuccgagugcaucacccccaacggcagcauccccaacgacaagccguuccagaacgucaacaagaucaccuacggggccugccccaaguacgugaagcagaacacccucaagcuggccacgggcaugcggaacauccccgagaagcagacccgcgggaucuucggcgccaucgcgggcuucaucgagaacgggugggagggcaugguggacgggugguacggcuuccggcaccagaacuccgaggggaccggccaggccgccgaccucaagagcacccaggccgccaucgaccagaucaacggcaagcugaaccgcgucaucgagaagacgaacgagaaguuccaccagaucgagaaggaguucuccgggguggagggccggauccaggaccuggagaaguacguggaggacaccaagaucgaccuguggagcuacaacgcggagcuccuggucgcccuggagaaccagcacaccaucgaccucaccgacuccgagaugaacaagcuguucgagaagacgcgccggcagcugcgcgagaacgccgaggacauggggaacggcugcuucaagaucuaccacaagugcgacaacgccugcaucgagagcauccggaacgggaccuacgaccacaacgaguaccgcgacgaggcccucaacaaccgcuuccagaucaagggcguggagcugaaguccggcuacaaggacuggauccuguggaucagcuucgcgaucuccugcuuccuccugugcgugguccugcucggguucaucaugugggccugccagaagggcaacauccggugcaacaucugcaucuga

SEQ ID NO: 64963 - RNA, 1701 nt, Artificial Sequence
  derived and/or modified CDS sequence (opt1) from hemagglutinin__InfluenzaA__ABF60580
augaagaccaucaucgcccugagcuacaucuucugccucgccuucgcgcaggaccugcccggcaacgacaacuccaccgccacgcugugccucgggcaccacgccgugccgaacggcacccuggucaagaccaucaccaacgaccagaucgaggugacgaacgccaccgagcuggugcagagcuccagcaccgggaagaucugcgacaacccccaccgcauccucgacggcaucaacugcacccugaucgacgcccugcucggggacccccacugcgacggcuuccagaacgagaagugggaccuguucgucgagcgguccaaggcguucagcaacugcuaccccuacgacgugccggacuacgccucccugcgcagccucguggccuccagcggcacgcuggaguucaucaacgagggguucaacuggaccggcgucacccagaacgggggcuccagcgccugcaagcgggggcccgacaacggcuucuucucccgccugaacuggcucuacaagagcggcuccaccuaccccgugcagaacgugacgaugcccaacaacgacaacagcgacaagcuguacaucuggggcguccaccacccguccaccgacaaggagcagaccgaccuguacgugcaggcgagcgggaaggugaccgucuccacgaagcggauccagcagaccgugauccccaacguggggagccgccccuggguccggggccucagcucccgcgugagcaucuacuggaccaucgugaagcccggcgacguccuggugaucaacuccaacgggaaccugaucgccccgcggggcuacuacaagaugcgcaccggcaagagcuccaucaugcggagcgacgcccccaucgggacgugcuccagcgagugcaucacccccaacggguccauccccaacgacaagccguuccagaacgugaacaagaucaccuacggcgccugccccaaguacgucaagcagaacacccucaagcuggccacgggcaugcgcaacgugcccgagaagcagacccgggggaucuucggcgcgaucgccggguucaucgagaacggcugggaggggaugaucgacggcugguacggcuuccgccaccagaacagcgaggggaccggccaggccgccgaccugaaguccacccaggccgcgaucgaccagaucaacgggaagcucaaccgggugaucgagaagacgaacgagaaguuccaccagaucgagaaggaguucagcgaggucgagggccgcauccaggaccuggagaaguacguggaggacaccaagaucgaccugugguccuacaacgccgagguccucguggcccuggagaaccagcacaccaucgaccugaccgacagcgagaugaacaagcuguucgagaagacgcggcgccagcuccgggagaacgccgaggacauggggaacggcugcuucaagaucuaccacaagugcgacaacgccugcaucggcuccauccgcaacgggaccuacgaccacgacguguaccgggacgaggcgcugaacaaccgcuuccagaucaagggcgucgagcucaagagcggguacaaggacuggauccuguggaucuccuucgccaucagcugcuuccugcucugcguggugcugcugggcuucaucaugugggccugccagaagggcaacauccgcugcaacaucugcaucuga

SEQ ID NO: 64964 - RNA, 1701 nt, Artificial Sequence
  derived and/or modified CDS sequence (opt1) from hemagglutinin__InfluenzaA__ABF60581
augaagaccaucaucgugcugagcuacuucuucugccucgcccugucccaggacuacagcgaguccaacaacagcaccgccacgcugugccucggccaccacgcgguccccaacgggaccaucgugaagaccaucaccgacgaccagaucgaggugacgaacgccaccgagcugguccaguccagcuccaccggcaagaucugcaacaacccgcaccgcauccuggacgggcgggacugcacccucaucgacgcccugcugggcgacccccacugcgacguguuccaggacgagacgugggaccucuacguggagcgcagcuccgccuucagcaacugcuaccccuacgacguccccgacuacgacucccugcggagccugguggccuccagcgggacccucgaguucaucaccgagggcuucaccuggacgggcgugacccagaacgggggcuccaacgcgugcaagcgcgggccggccagcggcuucuucucccggcugaacuggcugaccaagagcggguccaccuaccccguccucaacgugacgaugcccaacaacgacaacuucgacaagcuguacguguggggcguccaccaccccagcaccaaccaggagcagaccaaccuguacgugcaggccagcggccgcgugaccgucuccacgcggcgcagccagcagaccaucaucccgaacaucgggucccggcccugggugcgcggccagagcgggcggaucuccaucuacuggaccaucgugaagcccggcgacguccucgugaucaacagcaacggcaaccugaucgcgccccgcggguacuucaagaugcggaccggcaaguccagcaucaugcgcuccgacgccccgaucgacacgugcaucagcgagugcaucacccccaacggguccauccccaacgacaugcccuuccagaacgugaacaagaucaccuacggcgccugcccgaaguacgucaagcaggggacccugaagcucgccacgggcaugcggaacgugcccgagaagcagacccgcggccuguucggggccaucgccggcuucaucgagaacgggugggagggcaugaucgacgggugguacggcuuccggcaccagaacagcgagggcaccgggcaggcggccgaccugaaguccacccaggccgccaucgaccagaucaacggcaagcucaaccgcgugaucgagaagacgaacgagaaguuccaccagaucgagaaggaguucagcgaggucgaggggcggauccaggaccuggagaaguacguggaggacaccaagaucgaccugugguccgacaacgccgagcuccuggucgcgcuggagaaccagcacaccaucgaccucaccgacagcgagaugaacaagcuguucgagaagacgcgccggcagcugcgcgagaacgccgaggugaugggcaacgggugcuucaagaucuaccacaagugcgacaacgccugcaucgaguccauccgcaacggcaccuacgaccacgacaucuaccgggacgaggcccucaacaaccgcuuccagaucaagggcguggagcucaagagcggguacaaggacuggauccuguggaucuccuucgccaucagcugcuuccugcugugcgucgugcugcucggcuucaucaugugggcgugccagcgggggaacauccgcugcaacaucugcaucuga

SEQ ID NO: 64965 - RNA, 1701 nt, Artificial Sequence; identical to SEQ ID NO: 64764
  derived and/or modified CDS sequence (opt1) from hemagglutinin__InfluenzaA__ABF82651

SEQ ID NO: 64966 - RNA, 1698 nt, Artificial Sequence; identical to SEQ ID NO: 64824
  derived and/or modified CDS sequence (opt1) from hemagglutinin__InfluenzaA__ABF82662

SEQ ID NO: 64967 - RNA, 1698 nt, Artificial Sequence
  derived and/or modified CDS sequence (opt1) from hemagglutinin__InfluenzaA__ABF82673
augaaggccaagcugcucgugcugcugugcaccuucaccgccacguacgcggacaccaucugcaucggcuaccacgccaacaacagcaccgacaccgucgacacggugcucgagaagaacgugaccgucacccacuccgugaaccugcuggaggacagccacaacgggaagcucugccugcugaagggcaucgcgccccuccagcuggggaacugcuccguggccggcuggauccuggggaacccggagugcgagcuccugaucagcaagggcuccuggagcuacaucgucgagacccccaaccccgagaacggcacgugcuaccccggguacuucgccgacuacgaggagcugcgcgagcagcucuccagcguguccagcuucgagcgguucgagaucuucccgaagggcuccagcuggcccaaccacaccgugaccggggucuccgccagcugcucccacaacggcaagagcuccuucuaccgcaaccugcuguggcucaccgggaagaacggccuguaccccaaccugagcauguccuacgugaacaacaaggagaaggaggugcucguccuguggggcgugcaccacccgcccaacaucggggaccagcgggcccuguaccacacggagaacgccuacgugagcgucgugagcucccacuacagccgccgguucacccccgagaucgccaagcgccccaaggugcgggaccaggagggccgcaucaacuacuacuggacccuccuggagcccggggacaccaucaucuucgaggcgaacggcaaccugaucgccccgugguacgccuucgcccucucccggggcuucgggagcggcaucaucacguccaacgcccccaugggggagugcgacgcgaagugccagacgccccagggcgccaucaacagcucccugcccuuccagaacguccacccggugaccaucggggagugccccaaguacgugcgcagcgccaagcugcggauggucaccggccuccgcaacauccccuccauccagagccggggccuguucggggccaucgccggcuucaucgagggcggguggaccgggaugguggacggcugguacggcuaccaccaccagaacgagcagggguccggcuacgcggccgaccagaaguccacccagaacgccaucaacgggaucaccaacaaggugaacagcgucaucgagaagaugaacacccaguucacggccgugggcaaggaguucaacaagcuggagcgccggauggagaaccucaacaagaaggucgacgacggguuccuggacaucuggaccuacaacgccgagcugcucgugcugcuggagaacgagcgcacccucgacuuccacgacagcaacgugaagaaccuguacgagaaggucaagucccagcugaagaacaacgcgaaggagaucggcaacggcugcuucgaguucuaccacaagugcaacaacgagugcauggagagcgugaagaacgggaccuacgacuaccccaaguacuccgaggagagcaagcucaaccgggagaagaucgacggcgugaagcuggaguccaugggggucuaccagauccuggccaucuacagcacgguggccagcucccucgugcugcuggucagccucggcgccaucuccuucuggaugugcagcaacggcucccugcagugccgcaucugcaucuga

SEQ ID NO: 64968 - RNA, 1698 nt, Artificial Sequence; identical to SEQ ID NO: 64865
  derived and/or modified CDS sequence (opt1) from hemagglutinin__InfluenzaA__ABF82684

SEQ ID NO: 64969 - RNA, 1701 nt, Artificial Sequence; identical to SEQ ID NO: 64831
  derived and/or modified CDS sequence (opt1) from hemagglutinin__InfluenzaA__ABF82695

SEQ ID NO: 64970 - RNA, 1701 nt, Artificial Sequence; identical to SEQ ID NO: 64807
  derived and/or modified CDS sequence (opt1) from hemagglutinin__InfluenzaA__ABF82706

SEQ ID NO: 64971 - RNA, 1698 nt, Artificial Sequence; identical to SEQ ID NO: 64323
  derived and/or modified CDS sequence (opt1) from hemagglutinin__InfluenzaA__ABF82819

SEQ ID NO: 64972 - RNA, 1698 nt, Artificial Sequence; identical to SEQ ID NO: 64824
  derived and/or modified CDS sequence (opt1) from hemagglutinin__InfluenzaA__ABF82830

SEQ ID NO: 64973 - RNA, 1698 nt, Artificial Sequence; identical to SEQ ID NO: 64824
  derived and/or modified CDS sequence (opt1) from hemagglutinin__InfluenzaA__ABF82841

SEQ ID NO: 64974 - RNA, 1698 nt, Artificial Sequence; identical to SEQ ID NO: 64824
  derived and/or modified CDS sequence (opt1) from hemagglutinin__InfluenzaA__ABF82852

SEQ ID NO: 64975 - RNA, 1698 nt, Artificial Sequence
  derived and/or modified CDS sequence (opt1) from hemagglutinin__InfluenzaA__ABF82863
augaaggccaagcugcucgugcugcugugcaccuucaccgccacguacgcggacaccaucugcaucggcuaccacgccaacaacagcaccgacaccgucgacacggugcucgagaagaacgugaccgucacccacuccgugaaccugcuggaggacagccacaacgggaagcucugccugcugaagggcaucgcgccccuccagcuggggaacugcuccguggccggcuggauccuggggaacccggagugcgagcuccugaucagcaaggaguccuggagcuacaucgucgagacccccaaccccgagaacggcacgugcuaccccggcuacuucgccgacuacgaggagcugcgcgagcagcucuccagcguguccagcuucgagcgguucgagaucuucccgaagggguccagcuggcccaaccacaccgugaccggcgucuccgccagcugcucccacaacggcaagagcuccuucuaccgcaaccugcuguggcucaccgggaagaacgggcuguaccccaaccugagcauguucuacgugaacaacaaggagaaggaggugcucguccuguggggcgugcaccacccgcccaacaucggcgaccagcgggcccuguaccacacggagaacgccuacguguccgucgugagcagccacuacucccgccgguucacccccgagaucgccaagcgccccaaggugcgggaccaggaggggcgcaucaacuacuacuggacccuccuggagcccggcgacaccaucaucuucgaggcgaacgggaaccugaucgccccgugguacgccuucgcccucagccggggcuucggcuccgggaucaucacgagcaacgcccccaugggcgagugcgacgcgaagugccagacgccccagggggccaucaacuccagccugcccuuccagaacguccacccggugaccaucggcgagugccccaaguacgugcgcuccgccaagcugcggauggucaccgggcuccgcaacauccccagcauccagucccggggccuguucggcgccaucgccggguucaucgagggcggguggaccggcaugguggacgggugguacggcuaccaccaccagaacgagcagggcagcggguacgcggccgaccagaaguccacccagaacgccaucaacggcaucaccaacaaggugaacagcgucaucgagaagaugaacacccaguucacggccguggggaaggaguucaacaagcuggagcgccggauggagaaccucaacaagaaggucgacgacggcuuccuggacaucuggaccuacaacgccgagcugcucgugcugcuggagaacgagcgcacccucgacuuccacgacuccaacgugaagaaccuguacgagaaggucaagagccagcugaagaacaacgcgaaggagaucgggaacggcugcuucgaguucuaccacaagugcaacaacgagugcauggaguccgugaagaacggcaccuacgacuaccccaaguacagcgaggaguccaagcucaaccgggagaagaucgacggggugaagcuggagagcaugggcgucuaccagauccuggccaucuacuccacgguggccagcagccucgugcugcuggucucccucggggccaucagcuucuggaugugcuccaacggcagccugcagugccgcaucugcaucuga

SEQ ID NO: 64976 - RNA, 1698 nt, Artificial Sequence
  derived and/or modified CDS sequence (opt1) from hemagglutinin__InfluenzaA__ABF82874
augaaggccaagcugcucgugcugcugugcaccuucaccgccacguacgcggacaccaucugcaucggcuaccacgccaacaacagcaccgacaccgucgacacggugcucgagaagaacgugaccgucacccacuccgugaaccugcuggaggacagccacaacgggaagcucugccugcugaagggcaucgcgccccuccagcuggggaacugcuccguggccggcuggauccuggggaacccggagugcgagcuccugaucagcaaggaguccuggagcuacaucgucgagacccccaaccccgagaacggcacgugcuaccccggcuacuucgccgacuacgaggagcugcgcgagcagcucuccagcguguccagcuucgagcgguucgagaucuucccgaagggguccagcuggcccaaccacaccgugaccggcgucuccgccagcugcucccacaacggcaagagcuccuucuaccgcaaccugcuguggcucaccgggaagaacgggcuguaccccaaccugagcauguccuacgugaacaacaaggagaaggaggugcucguccuguggggcgugcaccacccgcccaacaucggcgaccagcgggcccuguaccacacggagaacgccuacgugagcgucgugagcucccacuacagccgccgguucacccccgagaucgccaagcgccccaaggugcgggaccaggaggggcgcaucaacuacuacuggacccuccuggagcccggcgacaccaucaucuucgaggcgaacgggaaccugaucgccccgugguacgccuucgcccucucccggggcuucggcagcgggaucaucacguccaacgcccccaugggcgagugcgacgcgaagugccagacgccccagggggccaucaacagcucccugcccuuccagaacguccacccggugaccaucggcgagugccccaaguacgugcgcagcgccaagcugcggauggucaccgggcuccgcaacauccccuccauccagagccggggccuguucggcgccaucgccggguucaucgagggcggguggaccggcaugguggacgggugguacggcuaccaccaccagaacgagcagggcuccggguacgcggccgaccagaaguccacccagaacgccaucaacggcaucaccaacaaggugaacagcgucaucgagaagaugaacacccaguucacggccguggggaaggaguucaacaagcuggagcgccggauggagaaccucaucaagaaggucgacgacggcuuccuggacaucuggaccuacaacgccgagcugcucgugcugcuggagaacgagcgcacccucgacuuccacgacagcaacgugaagaaccuguacgagaaggucaagucccagcugaagaacaacgcgaaggagaucgggaacggcugcuucgaguucuaccacaagugcaacaacgagugcauggagagcgugaagaacggcaccuacgacuaccccaaguacuccgaggagagcaagcucaaccgggagaagaucgacggggugaagcuggaguccaugggcgucuaccagauccuggccaucuacagcacgguggccagcucccucgugcugcuggucagccucggggccaucuccuucuggaugugcagcaacggcucccugcagugccgcaucugcaucuga

SEQ ID NO: 64977 - RNA, 1698 nt, Artificial Sequence; identical to SEQ ID NO: 64824
  derived and/or modified CDS sequence (opt1) from hemagglutinin__InfluenzaA__ABF82885

SEQ ID NO: 64978 - RNA, 1698 nt, Artificial Sequence; identical to SEQ ID NO: 64824
  derived and/or modified CDS sequence (opt1) from hemagglutinin__InfluenzaA__ABF82896

SEQ ID NO: 64979 - RNA, 1698 nt, Artificial Sequence; identical to SEQ ID NO: 64824
  derived and/or modified CDS sequence (opt1) from hemagglutinin__InfluenzaA__ABF82907

SEQ ID NO: 64980 - RNA, 1698 nt, Artificial Sequence; identical to SEQ ID NO: 64868
  derived and/or modified CDS sequence (opt1) from hemagglutinin__InfluenzaA__ABF82929

SEQ ID NO: 64981 - RNA, 1698 nt, Artificial Sequence; identical to SEQ ID NO: 64824
  derived and/or modified CDS sequence (opt1) from hemagglutinin__InfluenzaA__ABF82940

SEQ ID NO: 64982 - RNA, 1701 nt, Artificial Sequence
  derived and/or modified CDS sequence (opt1) from hemagglutinin__InfluenzaA__ABF83447
augaagaccaucaucgcccugagcuacaucuucugccucgcccugggccaggaccugcccgggaacgacaacaacaccgcgacgcucugccugggccaccacgccgugccgaacgggacccuggucaagaccaucaccgacgaccagaucgaggugacgaacgccaccgagcucgugcaguccagcuccaccggcaagaucugcaacaacccccaccgcauccuggacgggaucgacugcacccugaucgacgcccuccugggcgacccccacugcgacgucuuccagaacgagacgugggaccuguucguggagcggagcaaggccuucuccaacugcuaccccuacgacgugccggacuacgcgagccuccgcucccuggucgccagcuccggcacccuggaguucaucaccgagggguucaccuggacgggcgugacccagaacgggggcagcaacgccugcaagcgggggcccggcuccggcuucuucagccgccucaacuggcugaccaaguccgggagcaccuaccccgugcugaacgucacgaugcccaacaacgacaacuucgacaagcucuacaucuggggcgugcaccacccguccaccaaccaggagcagaccagccuguacgugcaggccuccgggggcgucaccgugagcacgcggcgcucccagcagaccaucauccccaacaucggcagccggcccugggugcgcgggcugagcucccggaucagcaucuacuggaccaucgucaagcccggcgacgugcucgugaucaacuccaacgggaaccugaucgcgccgcgcggcuacuucaagaugcggaccggcaagagcuccaucaugcgcagcgacgcccccaucgacacgugcaucuccgagugcaucacccccaacgggagcauccccaacgacaagccguuccagaacgucaacaagaucaccuacggcgccugccccaaguacgugaagcagaacacccugaagcucgccacggggaugcggaacgugcccgagaagcagacccgcggccuguucggggccaucgcgggcuucaucgagaacgggugggagggcaugaucgacggcugguacggguuccggcaccagaacuccgagggcaccgggcaggccgccgaccucaagagcacccaggccgccaucgaccagaucaacggcaagcugaaccgcgucaucgagaagacgaacgagaaguuccaccagaucgagaaggaguucuccgagguggaggggcggauccaggaccuggagaaguacguggaggacaccaagaucgaccuguggagcuacaacgcggagcuccuggucgcccuggagaaccagcacaccaucgaccucaccgacuccgagaugaacaagcuguucgagaagacgcgccggcagcugcgcgagaacgccgaggacaugggcaacggcugcuucaagaucuaccacaagugcgacaacgccugcaucgagagcauccggaacgggaccuacgaccacgacguguaccgcgacgaggcccucaacaaccgcuuccagaucaagggcgucgagcugaaguccggguacaaggacuggauccuguggaucagcuucgcgaucuccugcuuccuccugugcguggugcugcucggcuucaucaugugggccugccagcggggcaacauccgcugcaacaucugcaucuga

SEQ ID NO: 64983 - RNA, 1644 nt, Artificial Sequence
  derived and/or modified CDS sequence (opt1) from hemagglutinin__InfluenzaA__ABG20468
auggagaagaucgugcugcuccuggccaucgucagccuggugaaguccgaccagaucugcaucggcuaccacgccaacaacagcaccgagcaggucgacaccaucauggagaagaacgugacggugacccacgcgcaggacauccucgagaagacccacaacgggaagcugugcgaccuggacggcgugaagccccucauccugcgcgacugcuccgucgccggggagaagaucaacccggccaacgaccugugcuaccccggcaacuucaacgacuacgaggagcucaagcaccuccugagccggaucaaccacuucgagaagauccagaucauccccaaguccagcugguccgaccacgaggccagcuccggggugagcuccgccugccccuaccagggccgcagcuccuucuuccggaacguggucuggcugaucaagaagaacaacgcguacccgaccaucaagcgcagcuacaacaacacgaaccaggaggaccugcuggugcucuggggcauccaccaccccaacgacgccgccgagcagacccggcuguaccagaaccccaccaccuacaucuccguggggacgagcacccugaaccagcgccucguccccaagaucgccacccgguccaaggugaacggccagagcgggcgcauggaguucuucuggaccauccugaagccgaacgacgcgaucaacuucgaguccaacggcaacuucaucgcccccgagaacgccuacaagaucgugaagaagggggacagcacgaucaugaaguccgagcuggaguacggcaacugcaacaccaagugcgagacccccaucggcgccaucaacagcagcaugcccuuccacaacauccacccgcucaccaucggggagugccccaaguacgucaaguccaaccggcuggugcuggccacgggccuccgcaacagcccccagggggagcggcgccggaagaagcgcggccuguucggcgcgaucgccggguucaucgagggcggguggcagggcaugguggacgggugguacggcuaccaccacuccaacgagcagggcagcggguacgccgccgacaaggaguccacccagaaggccaucgacggcgucaccaacaaggugaacagcaucaucgacaagaugaacacccaguucgaggcgguggggcgggaguucaacaaccuggagcgccggaucgagaaccucaacaagaagauggaggacggcuuccuggacgucuggacguacaacgccgagcugcucgugcugauggagaacgagcgcacccuggacuuccacgacuccaacgugaagaaccucuacgacaagguccggcugcagcugcgcgacaacgccaaggagcucgggaacggcugcuucgaguucuaccaccggugcgacaacgagugcauggagagcgugcgcaacggcaccuacgacuacccccaguacuccgaggaggcccgccugaagcgggaggagaucagcggggucaagcuggaguccaucggcaccuaccagauccucagcaucuacuccacgguggccagcucccuggcgcuggccaucaugguggccgggcucagccuguggaugugcuccaacggcagccugcagugccgcaucugcaucuga

SEQ ID NO: 64984 - RNA, 1707 nt, Artificial Sequence
  derived and/or modified CDS sequence (opt1) from hemagglutinin__InfluenzaA__ABG20472
auggagaagaucgugcugcuccuggccaucgucagccuggugaaguccgaccagaucugcaucggcuaccacgccaacaacagcaccgagcaggucgacaccaucauggagaagaacgugacggugacccacgcgcaggacauccucgagaaggcccacaacgggaagcugugcgaccuggacggcgugaagccccucauccugcgcgacugcuccgucgccggguggcugcucggcaacccgaugugcgacgaguuccugaacgugcccgaguggagcuacaucguggagaagaucaaccccgccaacgaccugugcuaccccgggaacuucaacgacuacgaggagcucaagcaccuccugucccggaucaaccacuucgagaagauccagaucauccccaagagcuccuggagcgaccacgaggccuccagcggcgucuccagcgcgugcccguaccagggccgcuccagcuucuuccggaacgugguguggcugaucaagaaggacaacgccuaccccaccaucaagcgcuccuacaacaacaccaaccaggaggaccugcugguccucugggggauccaccaccccaacgacgccgccgagcagacgcggcuguaccagaacccgaccaccuacaucagcgugggcaccuccacgcugaaccagcgccucgugcccaagaucgcgacccggagcaaggucaacgggcaguccggccgcauggaguucuucuggaccauccugaagcccaacgacgccaucaacuucgagagcaacgggaacuucaucgcccccgagaacgccuacaagaucgugaagaagggcgacagcaccaucaugaaguccgagcuggaguacggcaacugcaacacgaagugccagaccccgaucggggccaucaacagcuccaugcccuuccacaacauccacccccucaccaucggcgagugccccaaguacgucaagagcaaccggcuggugcuggcgaccgggcuccgcaacuccccgcagggcgagcggcgccggaagaagcgcggccuguucggggccaucgccggcuucaucgagggcggguggcaggggaugguggacggcugguacggcuaccaccacagcaacgagcagggguccggcuacgccgccgacaaggagagcacgcagaaggcgaucgacggggugaccaacaaggucaacuccaucaucgacaagaugaacacccaguucgaggccgugggccgggaguucaacaaccuggagcgccggaucgagaaccucaacaagaagauggaggacggguuccuggacguguggaccuacaacgccgagcugcucguccugauggagaacgagcgcacgcuggacuuccacgacagcaacgugaagaaccucuacgacaagguccggcugcagcugcgcgacaacgccaaggagcucggcaacggcugcuucgaguucuaccaccggugcgacaacgagugcauggaguccgugcgcaacgggaccuacgacuacccccaguacagcgaggaggcccgccugaagcgggaggagaucuccggcgugaagcuggagagcaucgggaccuaccagauccucuccaucuacagcaccgucgcguccagccuggcccuggccaucaugguggccggccucucccuguggaugugcagcaacgggagccugcagugccgcaucugcaucuga

SEQ ID NO: 64985 - RNA, 1707 nt, Artificial Sequence
  derived and/or modified CDS sequence (opt1) from hemagglutinin__InfluenzaA__ABG20478
auggagaagaucgugcuccuguucgccaucgucagccuggugaaguccgaccagaucugcaucggcuaccacgccaacaacagcaccgagcaggucgacaccaucauggagaagaacgugacggugacccacgcgcaggacauccuggagaagacccacaacgggaagcucugcgaccuggacggcgugaagccccugauccuccgcgacugcuccgucgccggguggcugcugggcaacccgaugugcgacgaguuccucaacgugcccgaguggagcuacaucguggagaagaucaaccccgccaacgaccugugcuaccccgggaacuucaacgacuacgaggagcugaagcaccuccugucccggaucaaccacuucgagaagauccagaucauccccaagagcuccuggagcgaccacgaggccuccagcggcgucuccagcgccugcccguaccagggccgcuccagcuucuuccggaacgugguguggcugaucaagaaggacaacgcguaccccaccaucaagcgcuccuacaacaacacgaaccaggaggaccuccugguccugugggggauccaccaccccaacgacgccgccgagcagacccggcucuaccagaacccgaccaccuacaucagcgugggcacguccacccugaaccagcgccuggugcccaagaucgccacccggagcaaggucaacgggcaguccggccgcauggaguucuucuggaccauccucaagcccaacgacgcgaucaacuucgagagcaacgggaacuucaucgcccccgagaacgccuacaagaucgugaagaagggcgacagcacgaucaugaaguccgagcuggaguacggcaacugcaacaccaagugccagaccccgaucggggccaucaacagcuccaugcccuuccacaacauccacccccugaccaucggcgagugccccaaguacgucaagagcaaccggcucgugcuggccacggggcugcgcaacuccccgcagggcgagcggcgccggaagaagcgcggccucuucggggcgaucgccggcuucaucgagggcggguggcaggggaugguggacggcugguacggcuaccaccacagcaacgagcagggguccggcuacgccgccgacaaggagagcacccagaaggccaucgacggggugaccaacaaggucaacuccaucaucgacaagaugaacacccaguucgaggcggugggccgggaguucaacaaccuggagcgccggaucgagaaccugaacaagaagauggaggacggguuccucgacguguggacguacaacgccgagcugcugguccucauggagaacgagcgcacccuggacuuccacgacagcaacgugaagaaccuguacgacaagguccggcuccagcugcgcgacaacgccaaggagcugggcaacggcugcuucgaguucuaccaccggugcgacaacgagugcauggaguccgugcgcaacgggaccuacgacuacccccaguacagcgaggaggcccgccucaagcgggaggagaucuccggcgugaagcuggagagcaucgggaccuaccagauccuguccaucuacagcacggucgccuccagccucgcgcuggccaucaugguggccggccugucccucuggaugugcagcaacgggagccugcagugccgcaucugcaucuga

SEQ ID NO: 64986 - RNA, 1701 nt, Artificial Sequence; identical to SEQ ID NO: 64807
  derived and/or modified CDS sequence (opt1) from hemagglutinin__InfluenzaA__ABG26758

SEQ ID NO: 64987 - RNA, 1701 nt, Artificial Sequence
  derived and/or modified CDS sequence (opt1) from hemagglutinin__InfluenzaA__ABG26769
augaagaccaucaucgcccugagcuacauccucugccugguguucgcccagaagcugcccggcaacgacaacuccaccgcgacgcucugccuggggcaccacgccgucccgaacggcacccuggugaagaccaucaccaacgaccagaucgaggugacgaacgccaccgagcucguccagaacagcuccaccgggcgcaucugcgacagcccccaccggauccuggacggcaagaacugcacccugaucgacgcccuccugggggacccccacugcgacggcuuccagaacaaggagugggaccuguucguggagcgcuccaaggccuacagcaacugcuaccccuacgacgugccggacuacgcgucccuccggagccuggucgccuccagcggcacgcuggaguucaacaacgaguccuucaacuggaccgggguggcccagaacggcaccagcuacgccugcaagcgccgguccgucaagagcuucuucucccgccucaacuggcugcacaagcuggaguacaaguaccccgcgcucaacgugaccaugcccaacaacgacaaguucgacaagcuguacaucuggggcgugcaccaccccagcacggacuccgaccagaccagccuguacgugcaggccuccgggcgggucaccgugagcaccaagcgcagccagcagacggugaucccgaacaucggguccggccccuggguccggggcgugagcucccgcaucagcaucuacuggaccaucgugaagcccggggacauccuccugaucaacuccaccggcaaccugaucgcgccccggggguacuucaagauccgcagcggcaaguccagcaucaugcgguccgacgccccgaucggcaacugcaacagcgagugcaucacccccaacggguccauccccaacgacaagcccuuccagaacgucaaccgcaucacguacggcgccugcccgcgguacgugaagcagaacacccucaagcuggccaccgggaugcgcaacgugcccgagaagcagacccggggcaucuucggggccaucgccggcuucaucgagaacggcugggaggggauggucgacggcugguacggguuccgccaccagaacagcgagggcacggggcaggccgccgaccugaaguccacccaggcggccaucaaccagaucaacggcaagcucaaccggcugaucgagaagaccaacgagaaguuccaccagaucgagaaggaguucagcgagguggagggccgcauccaggaccuggagaaguacguggaggacaccaagaucgaccucugguccuacaacgccgagcugcuggucgcccucgagaaccagcacacgaucgaccugaccgacagcgagaugaacaagcuguucgagcggacccgcaagcagcuccgcgagaacgccgaggacauggggaacggcugcuuccggaucuaccacaagugcgacaacgcgugcaucggguccauccgcaacggcaccuacgaccacgacguguaccgggacgaggcccugaacaaccgcuuccagaucaagggggucgagcucaagagcggcuacaaggacuggauccuguggaucuccuucgccaucagcugcuuccugcugugcguggugcuccugggcuucaucaugugggccugccagaaggggaacauccggugcaacaucugcaucuga

SEQ ID NO: 64988 - RNA, 1701 nt, Artificial Sequence; identical to SEQ ID NO: 64935
  derived and/or modified CDS sequence (opt1) from hemagglutinin__InfluenzaA__ABG26780

SEQ ID NO: 64989 - RNA, 1701 nt, Artificial Sequence
  derived and/or modified CDS sequence (opt1) from hemagglutinin__InfluenzaA__ABG26791
augaaggccaagcugcucgugcugcugugcgccuucaccgcgaccuacgccgacacgaucugcaucggcuaccacgccaacaacagcaccgacaccgucgacaccgugcucgagaagaacgugacggucacccacuccgugaaccugcuggaggacagccacaacgggaagcucugccgccugaagggcaccgcgccccugcagcucgggaacugcuccguggccggcuggauccuggggaacccggagugcgagagccuguucuccaaggagagcugguccuacaucgccgagacccccaaccccgagaacggcacgugcuaccccggcuacuucgccgacuacgaggagcucaaggagcagcugagcuccgucagcuccuucgagcgguucgagaucuucccgaaggagagcuccuggcccaaccacaccgugaccaagggggugaccgccagcugcucccacaacggcaagagcuccuucuacaagaaccugcucuggcugacggagaagaacgggcuguaccccaaccucagcaaguccuacgucaacaacaaggagaaggaggugcuggugcuguggggcguccaccaccccagcaacaucggggaccagcgcgccaucuaccacaccgagaacgcguacgugagcguggucuccagccacuacucccggcgcuucaccccggagaucgccaagcggcccaaggugcgcgaccaggagggccggaucaacuacuacuggacccuccuggagcccggcgacacgaucaucuucgaggccaacgggaaccugaucgcccccugguacgccuucgcgcucagccgcggcuucggguccggcaucaucaccagcaacgccuccaugggcgagugcgacgccaagugccagaccccgcagggggccaucaacagcucccugcccuuccagaacgugcaccccgucaccaucggcgagugccccaaguacgugcggagcacgaagcugcgcauggugaccgggcuccggaacaucccguccauccagagccgcggccuguucggggccaucgcgggcuucaucgagggcggguggaccggcaugaucgacgggugguacggcuaccaccaccagaacgagcagggguccggcuacgccgccgacaagaaguccacccagaacgccaucgacggcaucacgaacaaggucaacagcgugaucgagaagaugaacacccaguucaccgccguggggaaggaguucaacaagcuggagcggcgcauggagaaccucaacaagaaggucgacgacggcuuccuggacaucuggaccuacaacgcggagcugcucgugcugcuggagaacgagcggacgcucgacuuccacgacagcaacgucaagaaccuguacgagaaggugaagaaccagcugaagaacaacgccaaggagaucgggaacggcugcuucgaguucuaccacaagugcaacaacgagugcauggaguccgugaagaacgggaccuacgacuaccccaaguacagcgaggaguccaagcucaagcgcgagaagaucgacggcgucaagcuggagagcaugggcguguaccagauccuggccaucuacagcaccguggccuccagccucguccugcuggugucccucggggccaucagcuucuggaugugcuccaacggcagccugcagugccggaucugcaucuga

SEQ ID NO: 64990 - RNA, 1701 nt, Artificial Sequence
  derived and/or modified CDS sequence (opt1) from hemagglutinin__InfluenzaA__ABG26802
augaagaccaucaucgcccugagcuacaucuccugccucguguucgcccagaagcugcccggcaacgacaacagcaccgcgacgcugugccucgggcaccacgccgucccgaacggcacccuggugaagaccaucaccaacgaccagaucgaggugacgaacgccaccgagcugguccaguccagcuccaccgggcgcaucugcgacagcccccaccggauccucgacggcaagaacugcacccugaucgacgcccugcucggggacccccacugcgacggcuuccagaacgagaagugggaccuguucguggagcgcuccaaggccuucagcaacugcuaccccuacgacgugccggacuacgcgucccugcggagccucgucgccuccagcggcacgcuggaguucaucaacgagggguucaacuggaccggcgugacccaguccgggggcagcuacgccugcaagcgcggguccgugaacagcuucuucucccggcugaacuggcucuacgagagcgaguccaaguaccccgcccugaacgucaccaugcccaacaacggcaaguucgacaagcuguacaucuggggcgugcaccaccccagcacggacaaggagcagaccaaccucuacgugcgcgcgagcgggcgggucaccguguccaccaagcgcagccagcagacggugaucccgaacaucggcccccggcccuggguccgcgggcuguccagccggaucuccaucuacuggaccaucgugaagcccggcgacauccugcucaucaacagcaccggcaaccugaucgccccgcgcggguacuucaagauccggaccggcaaguccagcaucaugcgcuccgacgcccccaucgggacgugcagcuccggcugcaucacccccaacgggagcauccccaacgacaagccguuccagaacgugaacaagaucaccuacggcgccugcccccgguacgucaagcagaacacccugaagcucgccacgggcaugcgcaacgugcccgagaagcagacccgggggaucuucggcgcgaucgccggguucaucgagaacggcugggaggggaugguggacggcugguacggcuuccgccaccagaacuccgaggggaccggccaggccgccgaccucaagagcacccaggccgcgaucgaccagaucaacgggaagcugaaccggcucaucgagaagacgaacgagaaguuccaccagaucgagaaggaguucuccgaggucgagggccgcauccaggaccuggagaaguacguggaggacaccaagaucgaccuguggagcuacaacgccgagcuccugguggcccuggagaaccagcacaccaucgacaugaccgacuccgagaugaacaagcuguucgagaagacgcggaagcagcugcgcgagaacgccgaggacauggggaacggcugcuucaagaucuaccacaagugcgacaacgccugcaucggcagcauccgcaacgggaccuacgaccacgacgucuaccgggacgaggcgcugaacaaccgcuuccagaucaagggcguggagcucaaguccggguacaaggacuggauccuguggaucagcuucgccaucagcugcuuccugcucugcgucgugcugcugggcuucaucaugugggccugccagaagggcaacauccggugcaacaucugcaucuga

SEQ ID NO: 64991 - RNA, 1701 nt, Artificial Sequence; identical to SEQ ID NO: 64939
  derived and/or modified CDS sequence (opt1) from hemagglutinin__InfluenzaA__ABG26813

SEQ ID NO: 64992 - RNA, 1701 nt, Artificial Sequence
  derived and/or modified CDS sequence (opt1) from hemagglutinin__InfluenzaA__ABG26824
augaaggccaagcugcucgugcugcugugcgcccucagcgcgaccgacgccgacaccaucugcaucggcuaccacgccaacaacuccacggacaccgucgacaccgugcuggagaagaacgugaccgucacgcacagcgugaaccugcucgaggacaaccacaacgggaagcugugcaagcugaagggcaucgcgccccuccagcuggggaagugcuccaucgccggcuggauccuggggaacccggagugcgagagccucuucuccaagaaguccuggagcuacaucgccgagacccccaacagcgagaacgggaccugcuaccccggcuacuucgccgacuacgaggagcugcgcgagcagcuguccagcguguccagcuucgagcgguucgagaucuuccccaaggaguccagcuggccgaagcacaacgucaccaagggggugacggccuccugcagccacaagggcaaguccagcuucuaccgcaaccuccuguggcugaccgagaagaacggguccuaccccaaccucagcaagagcuacgugaacaacaaggagaaggagguccuggugcuguggggcgugcaccaccccuccaacaucgaggaccagaagaccaucuaccggaaggagaacgccuacgucagcgugguguccagccacuacaaccgccgguucacccccgagaucgcgaagcgcccgaagguccggaaccaggaggggcgcaucaacuacuacuggacgcuccuggagcccggcgacaccaucaucuucgaggccaacggcaaccugaucgcccccugguacgccuucgcccucucccggggguucggcagcgggaucaucaccuccaacgcgagcauggacgagugcgacgccaagugccagacgccccagggcgccaucaacuccagccugccguuccagaacgugcaccccgugaccaucggcgagugccccaaguacguccgcuccaccaagcugcggauggugaccgggcuccgcaacauccccagcauccagucccggggccuguucggggccaucgccggcuucaucgagggcggcuggaccggcaugaucgacgggugguacggcuaccaccaccagaacgagcaggggagcggcuacgcggccgaccagaaguccacgcagaacgccaucaacgggaucaccaacaaggugaacagcaucaucgagaagaugaacacccaguucaccgccgucggcaaggaguucaacaagcuggagaagcgcauggagaaccucaacaagaagguggacgacggcuuccuggacaucuggacguacaacgccgagcugcucgugcugcuggagaacgagcggacccucgacuuccacgacuccaacgucaagaaccuguacgagaaggucaagagccagcugaagaacaacgcgaaggagaucgggaacggcugcuucgaguucuaccacaagugcaacaacgagugcauggaguccgugaagaacgggaccuacgacuacccgaaguacagcgaggagagcaagcucaaccgcgagaagaucgacggcgugaagcuggaguccauggggguguaccagauccuggccaucuacagcaccgucgccuccagccucgugcugcuggugucccucggcgccaucagcuucuggaugugcuccaacggcagccugcagugcaagaucugcaucuga

SEQ ID NO: 64993 - RNA, 1701 nt, Artificial Sequence; identical to SEQ ID NO: 64945
  derived and/or modified CDS sequence (opt1) from hemagglutinin__InfluenzaA__ABG26835

SEQ ID NO: 64994 - RNA, 1701 nt, Artificial Sequence
  derived and/or modified CDS sequence (opt1) from hemagglutinin__InfluenzaA__ABG26890
augaagaccaucaucgcccugagcuacauccucugccugguguucgcccagaagcugcccggcaacgacaacuccaccgcgacgcucugccuggggcaccacgccgucccgaacggcacccuggugaagaccaucaccaacgaccagaucgaggugacgaacgccaccgagcucguccagaacagccccaccgggcgcaucugcgacagcccccaccggauccuggacggcaagaacugcacccugaucgacgcccuccugggggacccccacugcgacggcuuccagaacaaggagugggaccuguucguggagcgcuccaaggccuacuccaacugcuacccguacgacgugcccgacuacgcgagccuccggucccuggucgccagcuccggcacgcuggaguucaccaacgagaacuucaacuggaccgggguggcccaggacggcaagagcuacgccugcaagcgcggguccgugaacagcuucuucucccggcucaacuggcugcacaagcuggaguacaaguaccccgcgcucaacgucaccaugcccaacaacggcaaguucgacaagcuguacaucuggggcgugcaccacccgagcacggacuccgaccagaccagccuguacgugcgcgccuccgggaaggucaccgugagcaccaagcggucccagcagacggugauccccgacaucggcuaccgccccuggguccgggggcucagcagccgcaucuccaucuacuggaccaucgugaagcccggcgacauccugcugaucaacagcaccgggaaccucaucgccccgcggggcuacuucaagauccgcaacggcaaguccagcaucaugcgguccgacgcccccaucgggaacugcagcuccgagugcaucacccccaacggcagcauccccaacgacaagccguuccagaacgugaaccgcaucacguacggggccugcccccgguacgucaagcagaacacccugaagcuggcgaccggcaugcgcaacgugcccgagaagcagacccgggggaucuucggcgccaucgccggcuucaucgagaacgggugggagggcaugguggacgggugguacggcuuccgccaccagaacuccgaggggacgggccaggccgccgaccucaagagcacccaggcggccaucgaccagaucaacggcaagcugaaccggcuggucgagaagaccaacgagaaguuccaccagaucgagaaggaguucuccgagguggaggggcgcauccaggaccucgagaaguacguggaggacaccaagaucgaccuguggagcuacaacgccgagcugcucgucgcccuggagaaccagcacacgaucgaccugaccgacuccgagaugaacaagcuguucgagcggacccgcaagcagcuccgcgagaacgccgaggacaugggcaacgggugcuucaagaucuaccacaagugcgacaacgcgugcaucggcagcauccggaacgggaccuacgaccacgacguguaccgcgacgaggcccugaacaaccgguuccagaucaagggcgucgagcucaaguccggcuacaaggacuggauccuguggaucagcuucgccaucuccugcuuccugcucugcguggugcugcugggguucaucaugugggccugccagaagggcaacauccgcugcaacaucugcaucuga

SEQ ID NO: 64995 - RNA, 1701 nt, Artificial Sequence
  derived and/or modified CDS sequence (opt1) from hemagglutinin__InfluenzaA__ABG26901
augaagaccaucaucgcccugagcuacauccucugccugguguucgcccagaagcugcccggcaacgacaacuccaccgcgacgcucugccuggggcaccacgccgucccgaacggcacccuggugaagaccaucaccaacgaccagaucgaggugacgaacgccaccgagcucguccagaacagccccaccgggcgcaucugcgacagcccccaccggauccuggacggcaagaacugcacccugaucgacgcccuccugggggacccccacugcgacggcuuccagaacaaggagugggaccuguucguggagcgcagcaaggccuacuccaacugcuacccguacgacgugcccgacuacgcgagccuccggucccuggucgccagcuccggcacgcuggaguucaccaacgagaacuucaacuggaccgggguggcccaggacggcaagagcuacuccugcaagcgcgggagcgugaacuccuucuucagccggcucaacuggcugcacaaguccgaguacaaguaccccgcccugaacgucaccaugcccaacaacggcaaguucgacaagcucuacaucuggggcgugcaccacccgagcacggacuccgaccagaccagccuguacgugcgcgcguccgggaaggucaccgugagcaccaagcggagccagcagacggugauccccgacaucggcuaccgccccuggguccgggggcuguccagccgcaucuccaucuacuggaccaucgugaagcccggcgacauccuccugaucaacagcaccgggaaccugaucgccccgcggggcuacuucaagauccgcaacggcaaguccagcaucaugcgguccgacgcccccaucgggaacugcagcuccgagugcaucacccccaacggcagcauccccaacgacaagccguuccagaacgugaaccgcaucacguacggggccugcccccgguacgucaagcagaacacccucaagcuggccaccggcaugcgcaacgugcccgagaagcagacccgggggaucuucggcgcgaucgccggcuucaucgagaacgggugggagggcaugguggacgggugguacggcuuccgccaccagaacuccgaggggacgggccaggccgccgaccugaaguccacccaggccgcgaucgaccagaucaacggcaagcucaaccggcuggucgagaagaccaacgagaaguuccaccagaucgagaaggaguucuccgagguggaggggcgcauccaggaccuggagaaguacguggaggacaccaagaucgaccucuggagcuacaacgccgagcugcuggucgcccucgagaaccagcacacgaucgaccugaccgacuccgagaugaacaagcuguucgagcggacccgcaagcagcuccgcgagaacgccgaggacaugggcaacgggugcuucaagaucuaccacaagugcgacaacgccugcaucggcagcauccggaacgggaccuacgaccacgacguguaccgcgacgaggcgcugaacaaccgguuccagaucaagggcgucgagcugaaguccggcuacaaggacuggauccucuggaucagcuucgccaucuccugcuuccugcugugcguggugcuccugggguucaucaugugggccugccagaagggcaacauccgcugcaacaucugcaucuga

SEQ ID NO: 64996 - RNA, 1701 nt, Artificial Sequence
  derived and/or modified CDS sequence (opt1) from hemagglutinin__InfluenzaA__ABG26912
augaagaccaucaucgcccugagcuacauccucugccugguguucgcccagaagcugcccggcaacgacaacuccaccgcgacgcucugccuggggcaccacgccgucccgaacggcacccuggugaagaccaucaccaacgaccagaucgaggugacgaacgccaccgagcucguccagagcuccagcaccgggcgcaucugcgacagcccccaccggauccuggacggcaagaacugcacccugaucgacgcccuccugggggacccccacugcgacggcuuccagaacaaggagugggaccuguucguggagcgcagcaaggccuacuccaacugcuaccccuacgacgugccggacuacgcgagccuccggucccuggucgccagcuccggcacgcuggaguucaccaaggagggguucaacuggaccggcguggcccaggacgggaaguccuacgccugcaagcgcggcuccgugaacagcuucuucucccggcucaacuggcugcacaagcuggaguacaaguaccccgcgcucaacgucaccaugcccaacaacgacaaguucgacaagcuguacaucuggggcgugcaccaccccagcacggacuccgaccagaccagccuguacgugcaggccuccgggcgcgucaccgugagcaccaagcggagccagcagacggugaucccgaacaucggcucccgccccuggguccgggggaucagcucccgcaucagcaucuacuggaccaucgugaagcccggcgacauccuccugaucaacuccaccgggaaccugaucgcgccccggggcuacuucaagauccgcaacggcaagagcuccaucaugcggagcgacgccccgaucuccaacugcaacagcgagugcaucacccccaacggguccauccccaacgacaagcccuuccagaacgugaaccgcaucacguacggcgccugcccgcgguacgucaagcagaacacccucaagcuggccaccgggaugcgcaacgugcccgagaagcagacccggggcaucuucggggccaucgccggcuucaucgagaacggcugggaggggaugguggacggcugguacggguuccgccaccagaacagcgagggcacggggcaggccgccgaccugaaguccacccaggcggccaucgaccagaucaacggcaagcucaaccggcugaucgagaagaccaacgagaaguuccaccagaucgagaaggaguucagcgaggucgagggccgcauccaggaccuggagaaguacguggaggacaccaagaucgaccucugguccuacaacgccgagcugcugguggcccucgagaaccagcacacgaucgaccugaccgacagcgagaugaacaagcuguucgagcggacccgcaagcagcuccgcgagaacgccgaggacauggggaacggcugcuucaagaucuaccacaagugcgacaacgcgugcaucggguccauccggaacggcaccuacgaccacgacgucuaccgcgacgaggcccugaacaaccgguuccagaucaaggggguggagcucaagagcggcuacaaggacuggauccuguggaucuccuucgccaucagcugcuuccugcugugcgucgugcuccugggcuucaucaugugggccugccagaaggggaacauccgcugcaacaucugcaucuga

SEQ ID NO: 64997 - RNA, 1698 nt, Artificial Sequence
  derived and/or modified CDS sequence (opt1) from hemagglutinin__InfluenzaA__ABG26945
augaaggccaagcugcucgugcugcugugcaccuucaccgccacguacgcggacaccaucugcaucggcuaccacgccaacaacagcaccgacaccgucgacacggugcucgagaagaacgugaccgucacccacuccgugaaccugcuggaggacagccacaacgggaagcucugccugcugaagggcaucgcgccccuccagcuggggaacugcuccguggccggcuggauccuggggaacccggagugcgagcuccugaucagcaaggaguccuggagcuacaucgucgagacccccaaccccgagaacggcacgugcuaccccggcuacuucgccgacuacgaggagcugcgcgagcagcucuccagcguguccagcuucgagcgguucgagaucuucccgaagggguccagcuggcccaaccacaccgugaccggcgucuccgccagcugcucccacaacggcaagagcuccuucuaccgcaaccugcuguggcucaccgggaagaacgggcuguaccccaaccugagcauguccuacgugaacaacaaggagaaggaggugcucguccuguggggcgugcaccacccgcccaacaucggcaaccagcgggcccuguaccacacggagaacgccuacgugagcgucgugagcucccacuacagccgccgguucacccccgagaucgccaagcgccccaaggugcgggaccaggaggggcgcaucaacuacuacuggacccuccuggagcccggcgacaccaucaucuucgaggcguccgggaaccugaucgccccgugguacgccuucgcccucagccggggcuucggcuccgggaucaucacgagcaacgcccccaugggcgagugcgacgcgaagugccagacgccccagggggccaucaacuccagccugcccuuccagaacguccacccggugaccaucggcgagugccccaaguacgugcgcuccgccaagcugcggauggucaccgggcuccgcaacauccccagcauccagucccggggccuguucggcgccaucgccggguucaucgagggcggguggaccggcaugguggacgggugguacggcuaccaccaccagaacgagcagggcagcggguacgcggccgaccagaaguccacccagaacgccaucaacggcaucaccaacaaggugaacagcgucaucgagaagaugaacacccaguucacggccguggggaaggaguucaacaagcuggagcgccggauggagaaccucaacaagaaggucgacgacggcuuccuggacaucuggaccuacaacgccgagcugcucgugcugcuggagaacgagcgcacccucgacuuccacgacuccaacgugaagaaccuguacgagaaggucaagagccagcugaagaacaacgcgaaggagaucgggaacggcugcuucgaguucuaccacaagugcaacaacgagugcauggaguccgugaagaacggcaccuacgacuaccccaaguacagcgaggaguccaagcucaaccgggagaagaucgacggggugaagcuggagagcaugggcgucuaccagauccuggccaucuacagcacgguggccuccagccucgugcugcuggucucccucggggccaucagcuucuggaugugcuccaacggcagccugcagugccgcaucugcaucuga

SEQ ID NO: 64998 - RNA, 1701 nt, Artificial Sequence
  derived and/or modified CDS sequence (opt1) from hemagglutinin__InfluenzaA__ABG26956
augaagaccaucaucgcccugagcuacauccucugccugguguucgcccagaagcugcccggcaacgacaaccgcaccgcgacgcucugccuggggcaccacgccgucccgaacggcacccuggugaagaccaucaccaacgaccagaucgaggugacgaacgccaccgagcucguccaguccagcuccaccgggcggaucugcgacagcccccaccagauccuggacggcgagaacugcacccugaucgacgcccuccugggggacccccacugcgacggcuuccagaacaaggagugggaccuguucguggagcgcuccaaggccuacagcaacugcuaccccuacgacgugccggacuacgucucccuccggagccugguggcguccagcggcacgcuggaguucaacaacgaguccuucaacuggaccgggguggcccagaacggcaccagcuccgccugcaagcgccggagcgacaaguccuucuucagcaagcucaacuggcugcaccagcugaaguacaaguaccccgcccucaacgucaccaugcccaacaacgagaaguucgacaagcuguacaucuggggcgugcaccaccccgggacggacuccgaccagaucagccuguacgcgcaggccuccgggcgcgugaccgucagcaccaagcggagccagcagaccgugaucccgaacaucggcucccgccccugggugcggggcgucagcucccgcaucagcaucuacuggacgaucgugaagcccggggacauccuccugaucaacuccaccggcaaccugaucgcgccccggggguacuucaagauccgcagcggcaaguccagcaucaugcgguccgacgccccgaucggcaagugcaacagcgagugcaucacccccaacggguccauccccaacgacaagcccuuccagaacgugaaccgcaucaccuacggcgccugcccgcgguacgucaagcagaacacgcucaagcuggccaccgggaugcgcaacgugcccgagaagcagacccggggcaucuucggggccaucgccggcuucaucgagaacggcugggaggggaugauggacggcugguacggguuccgccaccagaacagcgagggcaccgggcaggccgccgaccugaaguccacgcaggcggccaucaaccagaucaacggcaagcucaaccggcugaucgagaagaccaacgagaaguuccaccagaucgagaaggaguucagcgagguggagggccgcauccaggaccuggagaaguacgucgaggacaccaagaucgaccucugguccuacaacgccgagcugcugguggcccucgagaaccagcacaccaucgaccugacggacagcgagaugaacaagcuguucgagcggaccaagaagcagcuccgcgagaacgccgaggacauggggaacggcugcuucaagaucuaccacaagugcgacaacgcgugcaucggguccauccgcaacggcaccuacgaccacgacguguaccgggacgaggcccugaacaaccgcuuccagaucaagggggucgagcucaagagcggcuacaaggacugggugcuguggaucuccuucgccaucagcugcuuccugcugugcaucguccuccugggcuucaucaugugggccugccagaaggggaacauccggugcaacaucugcaucuga

SEQ ID NO: 64999 - RNA, 1698 nt, Artificial Sequence
  derived and/or modified CDS sequence (opt1) from hemagglutinin__InfluenzaA__ABG37120
augaaggccaagcugcucgugcugcugugcaccuucaccgccacguacgcggacaccaucugcaucggcuaccacgccaacaacagcaccgacaccgucgacacggugcucgagaagaacgugaccgucacccacuccgugaaccugcuggaggacagccacaacgggaagcucugccugcugaagggcaucgcgccccuccagcuggggaacugcuccguggccggcuggauccuggggaacccggagugcgagcuccugaucagcaaggaguccuggagcuacaucgucgagacccccaaccccgagaacggcacgugcuaccccggcuacuucgccgacuacgaggagcugcgcgagcagcucuccagcguguccagcuucgagcgguucgagaucuucccgaagggguccagcuggcccaaccacaccgugaccggcgucuccgccagcugcucccacaacggggagagcuccuucuaccgcaaccugcuguggcucaccggcaagaacgggcuguaccccaaccugagcauguccuacgugaacaacaaggagaaggaggugcucguccuguggggcgugcaccacccgcccaacaucggcaaccagcgggcccuguaccacacggagaacgccuacgugagcgucgugagcucccacuacagccgccgguucacccccgagaucgccaagcgccccaaggugcgggaccaggaggggcgcaucaacuacuacuggacccuccuggagcccggcgacaccaucaucuucgaggcgaacgggaaccugaucgccccgugguacgccuucgcccucucccggggcuucggcagcgggaucaucacguccaacgcccccaugggcgagugcgacgcgaagugccagacgccccagggggccaucaacagcucccugcccuuccagaacguccacccggugaccaucggcgagugccccaaguacgugcgcagcgccaagcugcggauggucaccgggcuccgcaacauccccuccauccagagccggggccuguucggcgccaucgccggguucaucgagggcggguggaccggcaugguggacgggugguacggcuaccaccaccagaacgagcagggcuccggguacgcggccgaccagaaguccacccagaacgccaucaacggcaucaccaacaaggugaacagcgucaucgagaagaugaacacccaguucacggccguggggaaggaguucaacaagcuggagcgccggauggagaaccucaacaagaaggucgacgacggcuuccuggacaucuggaccuacaacgccgagcugcucgugcugcuggagaacgagcgcacccucgacuuccacgacagcaacgugaagaaccuguacgagaaggucaagucccagcugaagaacaacgcgaaggagaucgggaacggcugcuucgaguucuaccacaagugcaacaacgagugcauggagagcgugaagaacggcaccuacgacuaccccaaguacuccgaggagagcaagcucaaccgggagaagaucgacggggugaagcuggaguccaugggcgucuaccagauccuggccaucuacagcacgguggccagcucccucgugcugcuggucagccucggggccaucuccuucuggaugugcagcaacggcucccugcagugccgcaucugcaucuga

SEQ ID NO: 65000 - RNA, 1701 nt, Artificial Sequence
  derived and/or modified CDS sequence (opt1) from hemagglutinin__InfluenzaA__ABG37131
augaagaccaucaucgcccugagcuacaucuccugccucguguucgcccagaagcugcccggcaacgacaacagcaccgcgacgcugugccucgggcaccacgccgucccgaacggcacccuggugaagaccaucaccaacgaccagaucgaggugacgaacgccaccgagcugguccaguccagcuccaccgggcgcaucugcgacggcccccaccagauccucgacgggaagaacugcacccugaucgacgcccugcucggcgacccccacugcgacggcuuccagaacaaggagugggaccuguucguggagcggagcaaggccuacuccaacugcuaccccuacgacgugccggacuacgcgagccugcgcucccucgucgccagcuccgggacgcuggaguucaccaacgagagcuucaacuggaccggcguggcccagaacgggaccuccuacgccugcaagcggggcagcgugaaguccuucuucagccgccugaacuggcuccacaagcuggaguacaaguaccccgcgcugaacgucacgaugcccaacaacgacaaguucgacaagcucuacaucuggggcgugcaccaccccuccaccgacagcgaccagaccucccuguacgugcagagcagcgggcgggucaccguguccacgaagcgcagccagcagaccgugaccccgaacaucggcucccggcccuggguccgcgggaucagcucccggaucagcaucuacuggaccaucgugaagcccggcgacauccugcucaucaacuccacggggaaccugaucgcgccccgcggcuacuucaagauccggcgcggcaagagcuccaucaugcggagcgacgccccgaucgacaacugcaacuccgagugcaucacccccaacgggagcauccccaacgacaagcccuuccagaacgugaaccgcaucaccuacggcgccugcccgcgguacgucaagcagaacacccugaagcucgccacggggaugcgcaacgugcccgagaagcagacccggggcaucuucggggccaucgccggcuucaucgagaacggcugggaggggaugguggacggcugguacggguuccgccaccagaacuccgagggcaccgggcaggccgccgaccucaagagcacccaggccgcgaucaaccagaucaacggcaagcugaaccggcugaucgagaagacgaacgagaaguuccaccagaucgagaaggaguucuccgaggucgagggccgcauccaggaccuggagaaguacguggaggacaccaagaucgaccuguggagcuacaacgccgagcuccugguggcccuggagaaccagcacaccaucgaccucaccgacuccgagaugaacaagcuguucgagcggacgcgcaagcagcugcgcgagaacgccgaggacauggggaacggcugcuucaagaucuaccacaagugcgacaacgccugcaucgggagcauccggaacggcaccuacgaccacgacgucuaccgcgacgaggcgcucaacaaccgguuccagaucaaggggguggagcugaaguccggcuacaaggacuggauccuguggaucagcuucgccaucagcugcuuccuccugugcgucgugcugcucggcuucaucaugugggccugccagaaggggaacauccgcugcaacaucugcaucuga

SEQ ID NO: 65001 - RNA, 1701 nt, Artificial Sequence; identical to SEQ ID NO: 64807
  derived and/or modified CDS sequence (opt1) from hemagglutinin__InfluenzaA__ABG37142

SEQ ID NO: 65002 - RNA, 1701 nt, Artificial Sequence
  derived and/or modified CDS sequence (opt1) from hemagglutinin__InfluenzaA__ABG37164
augaagaccaucaucgcccugagcuacauccucugccugguguucgcccagaagcugcccggcaacgacaacuccaccgcgacgcucugccuggggcaccacgccgucccgaacggcacccuggugaagaccaucaccaacgaccagaucgaggugacgaacgccaccgagcucguccagagcuccagcaccgggcgcaucugcgacagcccccaccggauccuggacggcaagaacugcacccugaucgacgcccuccugggggacccccacugcgacgacuuccagaacaaggagugggaccuguucguggagcgcagcaaggccuacuccaacugcuaccccuacgacgugccggacuacgcgagccuccggucccuggucgccagcuccggcacgcuggaguucaccaaggagggcuucaacuggaccgggguggcccaggacggcaagagcuacgccugcaagcgcggguccgugaacagcuucuucucccggcucaacuggcugcacaagcuggaguacaaguaccccgcgcucaacgucaccaugcccaacaacgacaaguucgacaagcuguacaucuggggcgugcaccaccccagcacggacuccgaccagaccagccuguacgugcaggccuccgggcgcgucaccgugagcaccaagcggagccagcagacggugaucccgaacaucggcucccgccccuggguccggggcaucagcucccgcaucagcaucuacuggaccaucgugaagcccggggacauccuccugaucaacuccaccggcaaccugaucgcgccccggggguacuucaagauccgcaacggcaagagcuccaucaugcggagcgacgccccgaucggcaacugcaacuccgagugcaucacccccaacgggagcauccccaacgacaagcccuuccagaacgugaaccgcaucacguacggcgccugcccgcgguacgucaagcagaacacccucaagcuggccaccgggaugcgcaacgugcccgagaagcagacccggggcaucuucggggccaucgccggcuucaucgagaacggcugggaggggaugguggacggcugguacggguuccgccaccagaacuccgagggcacggggcaggccgccgaccugaaguccacccaggcggccaucgaccagaucaacggcaagcucaaccggcugaucgagaagaccaacgagaaguuccaccagaucgagaaggaguucuccgaggucgagggccgcauccaggaccuggagaaguacguggaggacaccaagaucgaccucuggagcuacaacgccgagcugcugguggcccucgagaaccagcacacgaucgaccugaccgacuccgagaugaacaagcuguucgagcggacccgcaagcagcuccgcgagaacgccgaggacauggggaacggcugcuucaagaucuaccacaagugcgacaacgcgugcaucgggagcauccggaacggcaccuacgaccacgacgucuaccgcgacgaggcccugaacaaccgguuccagaucaaggggguggagcugaaguccggcuacaaggacuggauccucuggaucagcuucgccaucuccugcuuccugcugugcgucgugcuccugggcuucaucaugugggccugccagaaggggaacauccgcugcaacaucugcaucuga

SEQ ID NO: 65003 - RNA, 1701 nt, Artificial Sequence
  derived and/or modified CDS sequence (opt1) from hemagglutinin__InfluenzaA__ABG37175
augaagaccaucaucgcccugagcuacauccucugccagguguucgccaagaagcugcccggcaacgacaacuccaccgcgacgcugugccucgggcaccacgccgucccgaacggcacccuggugaagaccaucaccaacgaccagaucgaggugacgaacgccaccgagcugguccagagcuccagcaccgggcgcaucugcgacagcccccaccggauccucgacggcaagaacugcacccugaucgacgcccugcucggggacccccacugcgacggcuuccagaacaaggagugggaccuguucguggagcgcagcaaggccuacuccaacugcuaccccuacgacgugccggacuacgcgagccugcggucccucgucgccagcuccggcacgcuggaguucaccaacgagggguucaacuggaccggcguggcccaggacgggaaguccuacuccugcaagcgcggcagcgugaacuccuucuucagccggcugaacuggcuccacaagcuggaguacaaguaccccgcccugaacgucaccaugcccaacaacgacaaguucgacaagcucuacaucuggggcgugcaccaccccuccacggacagcgaccagaccucccuguacgugcaggcgagcgggcgcgucaccgugagcaccaagcggucccagcagacggugaucccgaacaucggcagccgccccuggguccgggggaucuccagccgcaucuccaucuacuggaccaucgugaagcccggcgacauccugcucaucaacagcaccgggaaccugaucgcgccccggggcuacuucaagauccgcaacggcaaguccagcaucaugcgguccgacgccccgaucgacaacugcaacagcgagugcaucacccccaacggguccauccccaacgacaagcccuuccagaacgugaaccgcaucacguacggcgccugcccgcgguacgucaagcagaacacccugaagcucgccaccgggaugcgcaacgugcccgagaagcagacccggggcaucuucggggccaucgccggcuucaucgagaacggcugggaggggaugguggacggcugguacggguuccgccaccagaacagcgagggcacggggcaggccgccgaccugaaguccacccaggccgcgaucgaccagaucaacggcaagcugaaccggcucaucgagaagaccaacgagaaguuccaccagaucgagaaggaguucagcgaggucgagggccgcauccaggaccuggagaaguacguggaggacaccaagaucgaccugugguccuacaacgccgagcuccugguggcccuggagaaccagcacacgaucgaccucaccgacagcgagaugaacaagcuguucgagcggacccgcaagcagcugcgcgagaacgccgaggacauggggaacggcugcuucaagaucuaccacaagugcgacaacgccugcaucggguccauccggaacggcaccuacgaccacgacgucuaccgcgacgaggcgcucaacaaccgguuccagaucaaggggguggagcucaagagcggcuacaaggacuggauccuguggaucuccuucgccaucagcugcuuccugcugugcgucgugcugcucggcuucaucaugugggccugccagaaggggaacauccgcugcaacaucugcaucuga

SEQ ID NO: 65004 - RNA, 1701 nt, Artificial Sequence
  derived and/or modified CDS sequence (opt1) from hemagglutinin__InfluenzaA__ABG37186
augaagaccaucaucgcccugagcuacauccucugccagguguucgcccagaagcugcccggcaacgacaacuccaccgcgacgcugugccucgggcaccacgccgucccgaacggcacccuggugaagaccaucaccaacgaccagaucgaggugacgaacgccaccgagcugguccagagcuccagcaccgggcgcaucugcgacagcccccaccggauccucgacggcaagaacugcacccugaucgacgcccugcucggggacccccacugcgacggcuuccagaacaaggagugggaccuguucguggagcgcagcaaggccuacuccaacugcuaccccuacgacgugccggacuacgcgagccugcggucccucgucgccagcuccggcacgcuggaguucaccaacgagggguucaacuggaccggcguggcccaggacgggaaguccuacgccugcaagcgcggcuccgugaacagcuucuucucccggcugaacuggcuccacaagcuggaguacaaguaccccgcgcugaacgucaccaugcccaacaacgacaaguucgacaagcucuacaucuggggcgugcaccaccccagcacggacuccgaccagaccagccuguacgugcaggccuccgggcgcgucaccgugagcaccaagcggagccagcagacggugaucccgaacaucggcucccgccccuggguccgggggaucagcucccgcaucagcaucuacuggaccaucgugaagcccggcgacauccugcucaucuccagcaccgggaaccugaucgcgccccggggcuacuucaagauccgcaacggcaaguccagcaucaugcgguccgacgccccgaucgacaacugcaacagcgagugcaucacccccaacggguccauccccaacgacaagcccuuccagaacgugaaccgcgucacguacggcgccugcccgcgguacgugaagcagaacacccugaagcucgccaccgggaugcgcaacgugcccgagaagcagacccggggcaucuucggggccaucgccggcuucaucgagaacggcugggaggggauggucgacggcugguacggguuccgccaccagaacagcgagggcacggggcaggccgccgaccugaaguccacccaggcggccaucgaccagaucaacggcaagcugaaccggcucaucgagaagaccaacgagaaguuccaccagaucgagaaggaguucagcgagguggagggccgcauccaggaccuggagaaguacguggaggacaccaagaucgaccugugguccuacaacgccgagcuccuggucgcccuggagaaccagcacacgaucgaccucaccgacagcgagaugaacaagcuguucgagcggacccgcaagcagcugcgcgagaacgccgaggacauggggaacggcugcuucaagaucuaccacaagugcgacaacgcgugcaucggguccauccggaacggcaccuacgaccacgacguguacaaggacgaggcccucaacaaccgcuuccagaucaagggggucgugcucaagagcggcuacaaggacuggauccuguggaucuccuucgccaucagcugcuuccugcugugcgugguccugcucggcuucaucaugugggccugccagaaggggaacauccggugcaacaucugcaucuga

SEQ ID NO: 65005 - RNA, 1701 nt, Artificial Sequence
  derived and/or modified CDS sequence (opt1) from hemagglutinin__InfluenzaA__ABG37197
augaagaccaucaucgcccugagcuacauccucugccagguguucgcccagaagcugcccggcaacgacaacuccaccgcgacgcugugccucgggcaccacgccgucccgaacggcacccuggugaagaccaucaccaacgaccagaucgaggugacgaacgccaccgagcugguccagagcuccagcaccgggcgcaucugcgacagcccccaccggauccucgacggcaagaacugcacccugaucgacgcccugcucggggacccccacugcgacggcuuccagaacaaggagugggaccuguucguggagcgcagcaaggccuacuccaacugcuaccccuacgacgugccggacuacgcgagccugcggucccucgucgccagcuccggcacgcuggaguucaccaacgagggguucaacuggaacggcguggcccaggacgggaaguccuacgccugcaagcgcggcuccgucaagagcuucuucucccggcugaacuggcuccacaagcuggaguacaaguaccccgcgcugaacgugaccaugcccaacaacgacaaguucgacaagcucuacaucuggggcgugcaccaccccagcaccgacuccgaccagacgagccuguacgugcaggccuccgggcgcgucaccgugagcaccaagcggagccagcagaccgugaucccgaacaucggcucccgccccuggguccgggggaucagcucccgcaucagcaucuacuggacgaucgugaagcccggcgacauccugcucaucaacuccaccgggaaccugaucgcgccccggggcuacuucaagauccgcaacggcaagagcuccaucaugcggagcgacgccccgaucgacaacugcaacuccgagugcaucacccccaacgggagcauccccaacgacaagcccuuccagaacgugaaccgcaucaccuacggcgccugcccgcgguacgucaagcagaacacgcugaagcucgccaccgggaugcgcaacgugcccgagaagcagacccggggcaucuucggggccaucgccggcuucaucgagaacggcugggaggggaugguggacggcugguacggguuccgccaccagaacuccgagggcaccgggcaggccgccgaccucaagagcacgcaggcggccaucgaccagaucaacggcaagcugaaccggcugaucgagaagaccaacgagaaguuccaccagaucgagaaggaguucuccgaggucgagggccgcauccaggaccuggagaaguacguggaggacaccaagaucgaccuguggagcuacaacgccgagcuccugguggcccuggagaaccagcacaccaucgaccucacggacuccgagaugaacaagcuguucgagcggacccgcaagcagcugcgcgagaacgccgaggacauggggaacggcugcuucaagaucuaccacaagugcgacaacgcgugcaucgggagcauccggaacggcaccuacgaccacgacgucuaccgcgacgaggcccucaacaaccgguuccagaucaaggggguggagcugaaguccggcuacaaggacuggauccuguggaucagcuucgccaucuccugcuuccuccugugcgucgugcugcucggcuucaucaugugggccugccagaaggggaacauccgcugcaacaucugcaucuga

SEQ ID NO: 65006 - RNA, 1701 nt, Artificial Sequence
  derived and/or modified CDS sequence (opt1) from hemagglutinin__InfluenzaA__ABG37208
augaagaccaucaucgcccugagcuacaucuccugccucguguucgcccagaagcugcccggcaacgacaacagcaccgcgacgcugugccucgggcaccacgccgucccgaacggcacccuggugaagaccaucaccaacgaccagaucgaggugacgaacgccaccgagcugguccaguccagcuccaccgggcgcaucugcgacagcccccaccggauccucgacggcaagaacugcacccugaucgacgcccugcucggggacccccacugcgacggcuuccagaacgagaagugggaccuguucguggagcgcuccaaggccuucagcaacugcuaccccuacgacgugccggacuacgcgucccugcggagccucgucgccuccagcggcacgcuggaguucaucaacgagggguucaacuggaccggcgugacccaguccgggggcagcuacgccugcaagcgcggguccgugaacagcuucuucucccggcugaacuggcucuacaagagcgaguccaaguaccccgcccugaacgucaccaugcccaacaacggcaaguucgacaagcuguacaucuggggcgugcaccaccccagcacggacaaggagcagaccaaccucuacgugcgcgcgagcgggcgggucaccguguccaccaagcgcagccagcagacggugaucccgaacaucggcccccggcccuggguccgcgggcuguccagccggaucuccaucuacuggaccaucgugaagcccggcgacauccugcucaucaacagcaccggcaaccugaucgccccgcgcggguacuucaagauccggaccggcaaguccagcaucaugcgcuccgacgcccccaucgggacgugcagcuccggcugcaucacccccaacgggagcauccccaacgacaagccguuccagaacgugaacaagaucaccuacggcgccugcccccgguacgucaagcagaacacccugaagcucgccacgggcaugcgcaacgugcccgagaagcagacccgggggaucuucggcgcgaucgccggguucaucgagaacggcugggaggggaugguggacggcugguacggcuuccgccaccagaacuccgaggggaccggccaggccgccgaccucaagagcacccaggccgcgaucgaccagaucaacgggaagcugaaccggcucaucgagaagacgaacgagaaguuccaccagaucgagaaggaguucuccgaggucgagggccgcauccaggaccuggagaaguacguggaggacaccaagaucgaccuguggagcuacaacgccgagcuccugguggcccuggagaaccagcacaccaucgacaugaccgacuccgagaugaacaagcuguucgagaagacgcggaagcagcugcgcgagaacgccgaggacauggggaacggcugcuucaagaucuaccacaagugcgacaacgccugcaucggcagcauccgcaacgggaccuacgaccacgacgucuaccgggacgaggcgcugaacaaccgcuuccagaucaagggcguggagcucaaguccggguacaaggacuggauccuguggaucagcuucgccaucagcugcuuccugcucugcgucgugcugcugggcuucaucaugugggccugccagaagggcaacauccggugcaacaucugcaucuga

SEQ ID NO: 65007 - RNA, 1701 nt, Artificial Sequence
  derived and/or modified CDS sequence (opt1) from hemagglutinin__InfluenzaA__ABG37230
augaagaccaucaucgcccugagcuacauccucugccugguguucgcccagaagcugcccggcaacgacaacuccaccgcgacgcucugccuggggcaccacgccgucccgaacggcacccuggugaagaccaucaccaacgaccagaucgaggugacgaacgccaccgagcucguccagagcuccagcaccgggcgcaucugcgacagcccccaccggauccuggacggcaagaacugcacccugaucgacgcccuccugggggacccccacugcgacggcuuccagaacaaggagugggaccuguucguggagcgcagcaaggccuacuccaacugcuaccccuacgacgugccggacuacgcgagccuccggucccuggucgccagcuccggcacgcuggaguucaucaacgaggacuucaacuggaccgggguggcccaggacggcaagagcuacgccugcaagcgcggguccgugaacagcuucuucucccggcucaacuggcugcaccagagcaaguacaaguaccccgagcugaacgucaccaugcccaacaacggcaaguucgacaagcucuacaucuggggcgugcaccaccccuccaccgacagcgaccagacgucccuguacgcgcgcgccagcgggcgggugaccgucagcaccaagcgcucccagcagaccgugaucccgaacaucggcuuccggcccugggugcgcgggcugagcucccggaucagcaucuacuggacgaucgucaagcccggcgacauccuccugaucaacuccaccgggaaccugaucgcgccccgcggcuacuucaagauccggaacggcaagagcuccaucaugcgcagcgacgccccgaucgggaacugcuccagcgagugcaucacccccaacggcuccauccccaacgacaagcccuuccagaacgugaaccggaucaccuacggggccugcccgcgcuacgugaagcagaacacgcucaagcuggccaccggcaugcggaacguccccgagaagcagacccgcgggaucuucggcgccaucgccggcuucaucgagaacgggugggagggcaugguggacgggugguacggcuuccggcaccagaacagcgaggggaccggccaggccgccgaccugaaguccacgcaggcggccaucgaccagaucaacggcaagcucaaccgccugaucgagaagaccaacgagaaguuccaccagaucgagaaggaguucagcgagguggaggggcggauccaggaccuggagaaguacgucgaggacaccaagaucgaccucugguccuacaacgccggccugcugguggcccucgagaaccagcacaccaucgaccugacggacagcgagaugaacaagcuguucgagcgcacccgcaagcagcuccgggagaacgccgaggacauggggaacggcugcuucaagaucuaccacaagugcgacaacgcgugcaucggguccauccgcaacggcaccuacgaccacgacguguaccgggacgaggcccugaacaaccgcuuccagaucaagggcgucgagcugaaguccggguacaaggacuggauccucuggaucuccuucgccaucagcugcuuccugcugugcgugguccuccugggcuucaucaugugggccugccagaaggggaacauccggugcaacaucugcaucuga

SEQ ID NO: 65008 - RNA, 1701 nt, Artificial Sequence
  derived and/or modified CDS sequence (opt1) from hemagglutinin__InfluenzaA__ABG37241
augaagaccaucaucgcccugagcuacauccucugccugguguucgcccagaagcugcccggcaacgacaacuccaccgcgacgcucugccuggggcaccacgccgucccgaacggcacccuggugaagaccaucaccaacgaccagaucgaggugacgaacgccaccgagcucguccagagcucccccaccgggcgcaucugcgacagcccccaccggauccuggacggcaagaacugcacccugaucgacgcccuccugggggacccccacugcgacggcuuccagaacaaggagugggaccuguucguggagcgcuccaaggccuacagcaacugcuacccguacgacgugcccgacuacgcgucccuccggagccuggucgccuccagcggcacgcuggaguucaccaacgagaacuucaacuggaccgggguggcccaggacggcaaguccuacgccugcaagcgcgggagcgugaacuccuucuucagccggcucaacuggcugcacaagcuggaguacaaguaccccgcgcucaacgucaccaugcccaacaacggcaaguucgacaagcuguacaucuggggcgugcaccacccguccacggacagcgaccagaccucccuguacgugcgcgccagcgggaaggucaccguguccaccaagcggagccagcagacggugauccccgacaucggcuaccgccccuggguccgggggcucagcucccgcaucagcaucuacuggaccaucgugaagcccggcgacauccugcugaucaacuccaccgggaaccucaucgccccgcggggcuacuucaagauccgcaacggcaagagcuccaucaugcggagcgacgcccccaucgggaacugcuccagcgagugcaucacccccaacggcuccauccccaacgacaagccguuccagaacgugaaccgcaucacguacggggccugcccccgguacgucaagcagaacacccugaagcuggcgaccggcaugcgcaacgugcccgagaagcagacccgggggaucuucggcgccaucgccggcuucaucgagaacgggugggagggcaugguggacgggugguacggcuuccgccaccagaacagcgaggggacgggccaggccgccgaccucaaguccacccaggcggccaucgaccagaucaacggcaagcugaaccggcuggucgagaagaccaacgagaaguuccaccagaucgagaaggaguucagcgagguggaggggcgcauccaggaccucgagaaguacguggaggacaccaagaucgaccugugguccuacaacgccgagcugcucgucgcccuggagaaccagcacacgaucgaccugaccgacagcgagaugaacaagcuguucgagcggacccgcaagcagcuccgcgagaacgccgaggacaugggcaacgggugcuucaagaucuaccacaagugcgacaacgcgugcaucggcuccauccggaacgggaccuacgaccacgacguguaccgcgacgaggcccugaacaaccgguuccagaucaagggcgucgagcucaagagcggcuacaaggacuggauccuguggaucuccuucgccaucagcugcuuccugcucugcguggugcugcugggguucaucaugugggccugccagaagggcaacauccgcugcaacaucugcaucuga

SEQ ID NO: 65009 - RNA, 1701 nt, Artificial Sequence
  derived and/or modified CDS sequence (opt1) from hemagglutinin__InfluenzaA__ABG37252
augaagaccaucaucgcccugagcuacauccucugccugguguucgcccagaagcugaccggcaacgacaacuccacggcgacccucugccuggggcaccacgccguccccaacggcacccuggugaagaccaucacgaacgaccagaucgaggugaccaacgccaccgagcucguccagagcuccccgaccgggcgcaucugcgacagcccccaccggauccuggacggcaagaacugcacgcugaucgacgcccuccugggggacccccacugcgacggcuuccagaacaaggagugggaccuguucguggagcgcuccaaggccuacagcaacugcuaccccuacgacgugccggacuacgcgucccuccggagccuggucgccuccagcggcacccuggaguucaccaacgagaacuucaacuggaccgggguggcccaggacggcaaguccuacgccugcaagcgcgggagcgugaacuccuucuucagccggcucaacuggcugcacaagcuggaguacaaguaccccgcgcucaacgucacgaugcccaacaacggcaaguucgacaagcuguacaucuggggcgugcaccaccccuccaccgacagcgaccagaccucccuguacgugcgcgccagcgggaaggucaccguguccacgaagcggagccagcagaccgugaucccggacaucggcuaccgccccuggguccgggggcucagcucccgcaucagcaucuacuggaccaucgugaagcccggcgacauccugcugaucaacuccaccgggaaccucaucgcgccccggggcuacuucaagauccgcaacggcaagagcuccaucaugcggagcgacgccccgaucgggaacugcuccagcgagugcaucacgcccaacggcuccauccccaacgacaagcccuuccagaacgugaaccgcaucaccuacggggccugcccgcgguacgucaagcagaacacccugaagcuggccaccggcaugcgcaacgugcccgagaagcagacgcgggggaucuucggcgccaucgccggcuucaucgagaacgggugggagggcaugguggacgggugguacggcuuccgccaccagaacagcgaggggaccggccaggccgccgaccucaaguccacccaggcggccaucgaccagaucaacggcaagcugaaccggcuggucgagaagaccaacgagaaguuccaccagaucgagaaggaguucagcgagguggaggggcgcauccaggaccucgagaaguacguggaggacacgaagaucgaccugugguccuacaacgccgagcugcucgucgcccuggagaaccagcacaccaucgaccugaccgacagcgagaugaacaagcuguucgagcggacccgcaagcagcuccgcgagaacgccgaggacaugggcaacgggugcuucaagaucuaccacaagugcgacaacgcgugcaucggcuccauccggaacgggacguacgaccacgacguguaccgcgacgaggcccugaacaaccgguuccagaucaagggcgucgagcucaagagcggcuacaaggacuggauccuguggaucuccuucgccaucagcugcuuccugcucugcguggugcugcugggguucaucaugugggccugccagaagggcaacauccgcugcaacaucugcaucuga

SEQ ID NO: 65010 - RNA, 1701 nt, Artificial Sequence
  derived and/or modified CDS sequence (opt1) from hemagglutinin__InfluenzaA__ABG37263
augaagaccaucaucgcccugagcuacauccucugccugguguucgcccagaagcugcccggcaacgacaacuccaccgcgacgcucugccuggggcaccacgccgucccgaacggcacccuggugaagaccaucaccaacgaccagaucgaggugacgaacgccaccgagcucguccagagcuccagcaccgggcgcaucugcgacagcccccaccggauccuggacggcaagaacugcacccugaucgacgcccuccugggggacccccacugcgacggcuuccagaacaaggagugggaccuguucguggagcgcagcaaggccuacuccaacugcuaccccuacgacgugccggacuacgcgagccuccggucccuggucgccagcuccggcacgcuggaguucaccaaggagggguucaacuggaccggcguggcccaggacgggaaguccuacgccugcaagcgcggcuccgugaacagcuucuucucccggcucaacuggcugcacaagcuggaguacaaguaccccgcgcucaacgucaccaugcccaacaacgacaaguucgacaagcuguacaucuggggcgugcaccaccccagcacggacuccgaccagaccagccuguacgugcaggccuccgggcgcgucaccgugagcaccaagcggagccagcagacggugaucccgaacaucggcucccgccccuggguccgggggaucagcucccgcaucagcaucuacuggaccaucgugaagcccggcgacauccuccugaucaacuccaccgggaaccugaucgcgccccggggcuacuucaagauccgcaacggcaagagcuccaucaugcggagcgacgccccgaucgggaacugcaacuccgagugcaucacccccaacggcagcauccccaacgacaagcccuuccagaacgugaaccgcaucacguacggggccugcccgcgguacgucaagcagaacacccucaagcuggccaccggcaugcgcaacgugcccgagaagcagacccgggggaucuucggcgccaucgccggcuucaucgagaacgggugggagggcaugguggacgggugguacggcuuccgccaccagaacuccgaggggacgggccaggccgccgaccucaagagcacccaggcggccaucgaccagaucaacggcaagcugaaccggcugaucgagaagaccaacgagaaguuccaccagaucgagaaggaguucuccgaggucgaggggcgcauccaggaccuggagaaguacguggaggacaccaagaucgaccucuggagcuacaacgccgagcugcugguggcccucgagaaccagcacacgaucgaccugaccgacuccgagaugaacaagcuguucgagcggacccgcaagcagcuccgcgagaacgccgaggacaugggcaacgggugcuucaagaucuaccacaagugcgacaacacgugcaucggcagcauccggaacgggaccuacgaccacgacgucuaccgcgacgaggcgcugaacaaccgguuccagaucaagggcguggagcugaaguccggcuacaaggacuggauccucuggaucagcuucgccaucuccugcuuccugcugugcgucgugcuccugggguucaucaugugggccugccagaagggcaacauccgcugcaacaucugcaucuga

SEQ ID NO: 65011 - RNA, 1701 nt, Artificial Sequence
  derived and/or modified CDS sequence (opt1) from hemagglutinin__InfluenzaA__ABG37274
augaagaccaucaucgcccugagcuacauccucugccugguguucgcccagaagcugcccggcaacgacaacuccaccgcgacgcucugccuggggcaccacgccgucccgaacggcacccuggugaagaccaucaccaacgaccagaucgaggugacgaacgccaccgagcucguccagagcucccccaccgggcgcaucugcgacagcccccaccggauccuggacggcaagaacugcacccugaucgacgcccuccugggggacccccacugcgacggcuuccagaacaaggagugggaccuguucguggagcgcuccaaggccuacagcaacugcuacccguacgacgugcccgacuacgcgucccuccggagccuggucgccuccagcggcacgcuggaguucaccaacgagaacuucaacuggaccgggguggcccaggacggcaaguccuacgccugcaagcgcgggagcgugaacuccuucuucagccggcucaacuggcugcacaagcuggaguacaaguaccccgcgcucaacgucaccaugcccaacaacggcaaguucgacaagcuguacaucuggggcgugcaccacccguccacggacagcgaccagaucucccuguacgugcgcgccagcgggaaggucaccguguccaccaagcggagccagcagaccgugauccccgacaucggcuaccgccccuggguccgggggcucagcucccgcaucagcaucuacuggacgaucgugaagcccggcgacauccugcugaucuccagcaccgggaaccucaucgccccgcggggcuacuucaagauccgcaacggcaaguccagcaucaugcgguccgacgcccccaucgggaacugcagcuccgagugcaucacccccaacggcagcauccccaacgacaagccguuccagaacgugaaccgcaucaccuacggggccugcccccgguacgucaagcagaacacgcugaagcuggcgaccggcaugcgcaacgugcccgagaagcagacccgggggaucuucggcgccaucgccggcuucaucgagaacgggugggagggcaugguggacgggugguacggcuuccgccaccagaacuccgaggggaccggccaggccgccgaccucaagagcacgcaggcggccaucgaccagaucaacggcaagcugaaccggcuggucgagaagaccaacgagaaguuccaccagaucgagaaggaguucuccgagguggaggggcgcauccaggaccucgagaaguacguggaggacaccaagaucgaccuguggagcuacaacgccgagcugcucgucgcccuggagaaccagcacaccaucgaccugacggacuccgagaugaacaagcuguucgagcggacccgcaagcagcuccgcgagaacgccgaggacaugggcaacgggugcuucaagaucuaccacaagugcgacaacgcgugcaucggcagcauccggaacgggaccuacgaccacgacguguaccgcgacgaggcccugaacaaccgguuccagaucaagggcgucgagcucaaguccggcuacaaggacuggauccuguggaucagcuucgccaucuccugcuuccugcucugcguggugcugcugggguucaucaugugggccugccagaagggcaacauccgcugcaacaucugcaucuga

SEQ ID NO: 65012 - RNA, 1701 nt, Artificial Sequence
  derived and/or modified CDS sequence (opt1) from hemagglutinin__InfluenzaA__ABG37285
augaagaccaucaucgcccugagcuacauccucugccugguguucgcccagaagcugcccggcaacgacaacuccaccgcgacgcucugccuggggcaccacgccgucccgaacggcacccuggugaagaccaucaccaacgaccagaucgaggugacgaacgccaccgagcucguccagagcucccccaccgggcgcaucugcgacagcccccaccggauccuggacggcaagaacugcacccugaucgacgcccuccugggggacccccacugcgacggcuuccagaacaaggagugggaccuguucguggagcgcuccaaggccuacagcaacugcuacccguacgacgugcccgacuacgcgucccuccggagccuggucgccuccagcggcacgcuggaguucaccaacgagaacuucaacuggaccgggguggcccaggacggcaaguccuacgccugcaagcgcgggagcgugaacuccuucuucagccggcucaacuggcugcacaagcuggacuacaaguaccccgcgcucaacgucaccaugcccaacaacggcaaguucgacaagcuguacaucuggggcgugcaccacccguccacggacagcgaccagaccucccuguacgugcgcgccagcgggaaggucaccguguccaccaagcggagccagcagacggugauccccgacaucggcuaccgccccuggguccgggggcucagcucccgcaucagcaucuacuggaccaucgugaagcccggcgacauccugcugaucaacuccaccgggaaccucaucgccccgcggggcuacuucaagauccgcaacggcaagagcuccaucaugcggagcgacgcccccaucgggaacugcuccagcgagugcaucacccccaacggcuccauccccaacgacaagccguuccagaacgugaaccgcaucacguacggggccugcccccgguacgucaagcagaacacccugaagcuggcgaccggcaugcgcaacgugcccgagaagcagacccgggggaucuucggcgccaucgccggcuucaucgagaacgggugggagggcaugguggacgggugguacggcuuccgccaccagaacagcgaggggacgggccaggccgccgaccucaaguccacccaggcggccaucgaccagaucaacggcaagcugaaccggcuggucgagaagaccaacgagaaguuccaccagaucgagaaggaguucagcgagguggaggggcgcauccaggaccucgagaaguacguggaggacaccaagaucgaccugugguccuacaacgccgagcugcucgucgcccuggagaaccagcacacgaucgaccugaccgacagcgagaugaacaagcuguucgagcggacccgcaagcagcuccgcgagaacgccgaggacaugggcaacgggugcuucaagaucuaccacaagugcgacaacgcgugcaucggcuccauccggaacgggaccuacgaccacgacguguaccgcgacgaggcccugaacaaccgguuccagaucaagggcgucgagcucaagagcggcuacaaggacuggauccuguggaucuccuucgccaucagcugcuuccugcucugcuucgugcugcugggguucaucaugugggccugccagaagggcaacauccgcugcaacaucugcaucuga

SEQ ID NO: 65013 - RNA, 1701 nt, Artificial Sequence
  derived and/or modified CDS sequence (opt1) from hemagglutinin__InfluenzaA__ABG37296
augaagaccaucaucgcccugagcuacauccucugccugguguucgcccagaagcugcccggcaacgacaacuccaccgcgacgcucugccuggggcaccacgccgucccgaacggcacccuggugaagaccaucaccaacgaccagaucgaggugacgaacgccaccgagcucguccagagcuccagcaccgggcgcaucugcgacagcccccaccggauccuggacggcaagaacugcacccugaucgacgcccuccugggggacccccacugcgacggcuuccagaacaaggagugggaccuguucguggagcgcagcaaggccuacuccaacugcuaccccuacgacgugccggacuacgcgagccuccggucccuggucgccagcuccggcacgcuggaguucaccaaggagggguucaacuggaccggcguggcccaggacgggaaguccuacgccugcaagcgcggcuccgugaacagcuucuucucccggcucaacuggcugcacaagcuggaguacaaguaccccgcgcucaacgucaccaugcccaacaacgacaaguucgacaagcuguacaucuggggcgugcaccaccccagcacggacuccgaccagaccagccuguacgugcaggccuccgggcgcgucaccgugagcaccaagcggagccagcagacggugaucccgaacaucggcucccgccccuggguccgggggaucagcucccgcaucagcaucuacuggaccaucgugaagcccggcgacauccuccugaucaacuccaccgggaaccugaucgcgccccggggcuacuucaagauccgcaacggcaagagcuccaucaugcggagcgacgccccgaucgggaacugcaacuccgagugcaucacccccaacggcagcauccccaacgacaagcccuuccagaacgugaaccgcaucacguacggggccugcccgcgguacgucaagcagaacacccucaagcuggccaccggcaugcgcaacgugcccgagaagcagacccgggggaucuucggcgccaucgccggcuucaucgagaacgggugggagggcaugguggacgggugguacggcuuccgccaccagaacuccgaggggacgggccaggccgccgaccucaagagcacccaggcggccaucgaccagaucaacggcaagcugaaccggcugaucgagaagaccaacgagaaguuccaccagaucgagaaggaguucuccgaggucgaggggcgcauccaggaccuggagaaguacguggaggacaccaagaucgaccucuggagcuacaacgccgagcugcugguggcccucgagaaccagcacacgaucgaccugaccgacuccgagaugaacaagcuguucgagcggacccgcaagcagcuccgcgagaacgccgaggacaugggcaacgggugcuucaagaucuaccacaagugcgacaacgcgugcaucggcagcauccggaacgggaccuacgaccacgacgucuaccgcgacgaggcccugaacaaccgguuccagaucaagggcguggagcugaaguccggcuacaaggacuggauccucuggaucagcuucgccaucuccugcuuccugcugugcgucgugcuccugggguucaucaugugggccugccagaagggcaacauccgcugcaacaucugcaucuga

SEQ ID NO: 65014 - RNA, 1701 nt, Artificial Sequence; identical to SEQ ID NO: 65008
  derived and/or modified CDS sequence (opt1) from hemagglutinin__InfluenzaA__ABG37307

SEQ ID NO: 65015 - RNA, 1701 nt, Artificial Sequence; identical to SEQ ID NO: 65013
  derived and/or modified CDS sequence (opt1) from hemagglutinin__InfluenzaA__ABG37318

SEQ ID NO: 65016 - RNA, 1701 nt, Artificial Sequence
  derived and/or modified CDS sequence (opt1) from hemagglutinin__InfluenzaA__ABG37329
augaagaccaucaucgcccugagcuacauccucugccugguguucgcccagaagcugcccgagaacgacaacuccaccgcgacgcucugccugggccaccacgccgucccgaacgggacccuggugaagaccaucaccaacgaccagaucgaggugacgaacgccaccgagcucguccagagcucccccaccggccgcaucugcgacagcccccaccggauccuggacgggaagaacugcacccugaucgacgcccuccugggcgacccccacugcgacggguuccagaacaaggagugggaccuguucguggagcgcuccaaggccuacagcaacugcuacccguacgacgugcccgacuacgcgucccuccggagccuggucgccuccagcggcacgcuggaguucaccaacgagaacuucaacuggaccggcguggcccaggacgggaaguccuacgccugcaagcgcggcagcgugaacuccuucuucagccggcucaacuggcugcacaagcuggaguacaaguaccccgcgcucaacgucaccaugcccaacaacgggaaguucgacaagcuguacaucuggggcgugcaccacccguccacggacagcgaccagaccucccuguacgugcgcgccagcgggaaggucaccguguccaccaagcggagccagcagacggugauccccgacaucggcuaccgccccuggguccggggccucagcucccgcaucagcaucuacuggaccaucgugaagcccggggacauccugcugaucaacuccaccggcaaccucaucgccccgcggggguacuucaagauccgcaacggcaagagcuccaucaugcggagcgacgcccccaucggcaacugcuccagcgagugcaucacccccaacggguccauccccaacgacaagccguuccagaacgugaaccgcaucacguacggcgccugcccccgguacgucaagcagaacacccugaagcuggcgaccgggaugcgcaacgugcccgagaagcagacccggggcaucuucggggccaucgccggcuucaucgagaacggcugggaggggaugguggacggcugguacggguuccgccaccagaacagcgagggcacggggcaggccgccgaccucaaguccacccaggcggccaucgaccagaucaacggcaagcugaaccggcuggucgagaagaccaacgagaaguuccaccagaucgagaaggaguucagcgagguggagggccgcauccaggaccucgagaaguacguggaggacaccaagaucgaccugugguccuacaacgccgagcugcucgucgcccuggagaaccagcacacgaucgaccugaccgacagcgagaugaacaagcuguucgagcggacccgcaagcagcuccgcgagaacgccgaggacauggggaacggcugcuucaagaucuaccacaagugcgacaacgcgugcaucggguccauccggaacggcaccuacgaccacgacguguaccgcgacgaggcccugaacaaccgguuccagaucaagggggucgagcucaagagcggcuacaaggacuggauccuguggaucuccuucgccaucagcugcuuccugcucugcguggugcugcugggcuucaucaugugggccugccagaaggggaacauccgcugcaacaucugcaucuga

SEQ ID NO: 65017 - RNA, 1701 nt, Artificial Sequence
  derived and/or modified CDS sequence (opt1) from hemagglutinin__InfluenzaA__ABG37340
augaagaccaucaucgcccugagcuacauccucugccugguguucgcccagaagcugcccggcaacgacaacuccaccgcgacgcucugccuggggcaccacgccgucccgaacggcacccuggugaagaccaucaccaacgaccagaucgaggugacgaacgccaccgagcucguccagagcuuccccaccgggcgcaucugcgacagcccccaccggauccuggacggcaagaacugcacccugaucgacgcccuccugggggacccccacugcgacggcuuccagaacaaggagugggaccuguucguggagcgcuccaaggccuacuccaacugcuacccguacgacgugcccgacuacgcgagccuccggucccuggucgccagcuccggcacgcuggaguucaccaacgagaacuucaacuggaccgggguggcccaggacggcaagagcuacuccugcaagcgcgggagcgugaacuccuucuucagccggcucaacuggcugcacaagcuggaguacaaguaccccgcccucaacgucaccaugcccaacaacggcaaguucgacaagcuguacaucuggggcgugcaccacccguccacggacagcgaccagaccucccuguacgugcgcgcgagcgggaaggucaccguguccaccaagcggagccagcagacggugauccccgacaucggcuaccgccccuggguccgggggcucagcucccgcaucagcaucuacuggaccaucgugaagcccggcgacauccugcugaucaacuccaccgggaaccucaucgccccgcggggcuacuucaagauccgcaacggcaagagcuccaucaugcggagcgacgcccccaucgggaacugcuccagcgagugcaucacccccaacggcuccauccccaacgacaagccguuccagaacgugaaccgcaucacguacggggccugcccccgguacgucaagcagaacacccugaagcuggccaccggcaugcgcaacgugcccgagaagcagacccgggggaucuucggcgcgaucgccggcuucaucgagaacgggugggagggcaugguggacgggugguacggcuuccgccaccagaacagcgaggggacgggccaggccgccgaccucaaguccacccaggccgcgaucgaccagaucaacggcaagcugaaccggcuggucgagaagaccaacgagaaguuccaccagaucgagaaggaguucagcgagguggaggggcgcauccaggaccucgagaaguacguggaggacaccaagaucgaccugugguccuacaacgccgagcugcucgucgcccuggagaaccagcacacgaucgaccugaccgacagcgagaugaacaagcuguucgagcggacccgcaagcagcuccgcgagaacgccgaggacaugggcaacgggugcuucaagaucuaccacaagugcgacaacgccugcaucggcuccauccggaacgggaccuacgaccacgacguguaccgcgacgaggcgcugaacaaccgguuccagaucaagggcgucgagcucaagagcggcuacaaggacuggauccuguggaucuccuucgccaucagcugcuuccugcucugcguggugcugcugggguucaucaugugggccugccagaagggcaacauccgcugcaacaucugcaucuga

SEQ ID NO: 65018 - RNA, 1701 nt, Artificial Sequence
  derived and/or modified CDS sequence (opt1) from hemagglutinin__InfluenzaA__ABG37351
augaagaccaucaucgcccugagcuacauccucugccugguguucgcccagaagcugcccggcaacgacaacuccaccgcgacgcucugccuggggcaccacgccgucccgaacggcacccuggugaagaccaucaccaacgaccagaucgaggugacgaacgccaccgagcucguccagagcuccagcaccgggcgcaucugcgacagcccccaccggauccuggacggcaagaacugcacccugaucgacgcccuccugggggacccccacugcgacggcuuccagaacaaggagugggaccuguucguggagcgcuccaaggccuacuccaacugcuaccccuacgacgugccggacuacgcgagccuccggucccuggucgccagcuccggcacgcuggaguucaucaacgaggacuucaacuggaccgggguggcccaggacggcaagagcuacgccugcaagcgcggguccgugaacagcuucuucucccggcucaacuggcugcacaagcuggaguacaaguaccccgcgcucaacgucaccaugcccaacaacggcaaguucgacaagcuguacaucuggggcgugcaccaccccagcaccgacuccgaccagacgagccuguacgugcgcgccuccgggcgggucaccgugagcaccaagcgcagccagcagaccgugaucccgaacaucggcuuccggcccuggguccgcgggcucuccagccggaucuccaucuacuggacgaucgugaagcccggcgacauccugcugaucgacagcaccgggaaccucaucgcgccccgcggcuacuucaagauccggaacggcaaguccagcaucaugcgcuccgacgccccgaucgggaacugcagcuccgagugcaucacccccaacggcagcauccccaacgacaagcccuuccagaacgugaaccggaucaccuacggggccugcccgcgcuacgucaagcagaacacgcugaagcuggccaccggcaugcggaacgugcccgagaagcagacccgcgggaucuucggcgccaucgccggcuucaucgagaacgggugggagggcaugguggacgggugguacggcuuccggcaccagaacuccgaggggaccggccaggccgccgaccucaagagcacgcaggcggccaucgaccagaucaacggcaagcugaaccgccugaucgagaagaccaacgagaaguuccaccagaucgagaaggaguucuccgaggucgaggggcggauccaggaccucgagaaguacguggaggacaccaagaucgaccuguggagcuacaacgccggccugcucguggcccuggagaaccagcacaccaucgaccugacggacuccgagaugaacaagcuguucgagcgcacccgcaagcagcuccgggagaacgccgaggacauggggaacggcugcuucaagaucuaccacaagugcgacaacgcgugcaucgggagcauccgcaacggcaccuacgaccacgacgucuaccgggacgaggcccugaacaaccgcuuccagaucaagggcguggagcucaaguccggguacaaggacuggauccuguggaucagcuucgccaucuccugcuuccugcucugcgucgugcugcugggcuucaucaugugggccugccagaaggggaacauccggugcaacaucugcaucuga

SEQ ID NO: 65019 - RNA, 1698 nt, Artificial Sequence
  derived and/or modified CDS sequence (opt1) from hemagglutinin__InfluenzaA__ABG37362
augaaggugaagcugcucguccugcugugcaccuucaccgccacguacgccgacaccaucugcaucggcuaccacgcgaacaacagcaccgacaccguggacacggugcucgagaagaacgucaccgugacccacuccgugaaccugcuggaggacagccacaacgggaagcucugccugcugaagggcaucgcgccccuccagcuggggaacugcuccgucgccggcuggauccuggggaacccggagugcgagcuccugaucagcaaggaguccuggagcuacaucguggagacccccaaccccgagaacggcacgugcuaccccggcuacuucgccgacuacgaggagcugcgcgagcagcucuccagcguguccagcuucgagcgguucgagaucuucccgaaggaguccagcuggcccaaccacaccgucaccgggguguccgccagcugcucccacaacggcaagagcuccuucuaccgcaaccugcuguggcucaccgggaagaacggccuguaccccaaccugagcaaguccuacgccaacaacaaggagaaggaggugcucguccuguggggcgugcaccacccgcccaacaucgggaaccagcgggcccuguaccacacggagaacgccuacgugagcgucgugagcucccacuacagccgccgguucacccccgagaucgccaagcgccccaaggugcgggaccaggagggccgcaucaacuacuacuggacccuccuggagcccggggacaccaucaucuucgaggcgaacggcaaccugaucgccccgugguacgccuucgcccucucccggggguucggcagcggcaucaucacguccaacgcccccauggacgagugcgacgcgaagugccagacgccccagggggccaucaacagcucccugcccuuccagaacguccacccggugaccaucggcgagugccccaaguacgugcgcagcgccaagcugcggauggucaccgggcuccgcaacauccccuccauccagagccggggccuguucggggccaucgccggcuucaucgagggcggguggaccggcaugguggacgggugguacggcuaccaccaccagaacgagcagggguccggcuacgcggccgaccagaaguccacccagaacgccaucaacggcaucaccaacaaggugaacagcgucaucgagaagaugaacacccaguucacggccguggggaaggaguucaacaagcuggagcgccggauggagaaccucaacaagaaggucgacgacggcuuccuggacaucuggaccuacaacgccgagcugcucgugcugcuggagaacgagcgcacccucgacuuccacgacagcaacgugaagaaccuguacgagaaggucaagucccagcugaagaacaacgcgaaggagaucgggaacggcugcuucgaguucuaccacaagugcaacaacgagugcauggagagcgugaagaacgggaccuacgacuaccccaaguacuccgaggagagcaagcucaaccgggagaagaucgacggcgugaagcuggaguccaugggcgucuaccagauccuggccaucuacagcacgguggccagcucccucgugcugcuggucagccucggggccaucuccuucuggaugugcagcaacggcucccugcagugccgcaucugcaucuga

SEQ ID NO: 65020 - RNA, 1698 nt, Artificial Sequence; identical to SEQ ID NO: 64824
  derived and/or modified CDS sequence (opt1) from hemagglutinin__InfluenzaA__ABG37384

SEQ ID NO: 65021 - RNA, 1698 nt, Artificial Sequence; identical to SEQ ID NO: 64894
  derived and/or modified CDS sequence (opt1) from hemagglutinin__InfluenzaA__ABG37395

SEQ ID NO: 65022 - RNA, 1701 nt, Artificial Sequence; identical to SEQ ID NO: 64801
  derived and/or modified CDS sequence (opt1) from hemagglutinin__InfluenzaA__ABG37406

SEQ ID NO: 65023 - RNA, 1701 nt, Artificial Sequence
  derived and/or modified CDS sequence (opt1) from hemagglutinin__InfluenzaA__ABG37428
augaagaccaucaucgcccugagcuacauccucugccugguguucgcccagaagcugcccggcaacgacaacuccaccgcgacgcucugccuggggcaccacgccgucccgaacggcacccuggugaagaccaucaccaacgaccagaucgaggugacgaacgccaccgagcucguccagagcuccagcaccgggcgcaucugcgacagcccccaccagauccuggacggcgagaacugcacccugaucgacgcccuccugggggacccccacugcgacggcuuccagaacaaggagugggaccuguucguggagcggagcaaggccuacuccaacugcuaccccuacgacgugccggacuacgucagccuccgcucccugguggcgagcuccggcacgcuggaguucaacaacgagagcuucaacuggaccgggguggcccagaacggcaccuccagcgccugcaagcggcgcuccgacaagagcuucuucucccggcucaacuggcugcaccagcugaaguacaaguaccccgcccucaacgucaccaugcccaacaacgagaaguucgacaagcuguacaucuggggcgugcaccaccccgggacggacagcgaccagaucucccuguacgcgcaggccagcgggcgcgugaccgucagcaccaagcggucccagcagaccgugaucccgaacaucggcagccgccccugggugcggggcgucuccagccgcaucuccaucuacuggacgaucgugaagcccggggacauccuccugaucaacagcaccggcaaccugaucgcgccccggggguacuucaagauccgcuccggcaagagcuccaucaugcggagcgacgccccgaucggcaagugcaacuccgagugcaucacccccaacgggagcauccccaacgacaagcccuuccagaacgugaaccgcaucaccuacggcgccugcccgcgguacgucaagcagaacacgcucaagcuggccaccgggaugcgcaacgugcccgagaagcagacccggggcaucuucggggccaucgccggcuucaucgagaacggcugggaggggaugauggacggcugguacggguuccgccaccagaacuccgagggcaccgggcaggccgccgaccugaaguccacgcaggcggccaucaaccagaucaacggcaagcucaaccggcugaucgagaagaccaacgagaagucccaccagaucgagaaggaguucagcgagguggagggccgcauccaggaccuggagaaguacgucgaggacaccaagaucgaccucugguccuacaacgccgagcugcugguggcccucgagaaccagcacaccaucgaccugacggacagcgagaugaacaagcuguucgagcggaccaagaagcagcuccgcgagaacgccgaggacauggggaacggcugcuucaagaucuaccacaagugcgacaacgcgugcaucggguccauccgcaacggcaccuacgaccacgacguguaccgggacgaggcccugaacaaccgcuuccagaucaagggggucgagcucaagagcggcuacaaggacugggugcuguggaucagcuucgccaucuccugcuuccugcugugcaucguccuccugggcuucaucaugugggccugccagaaggggaacauccggugcaacaucugcaucuga

SEQ ID NO: 65024 - RNA, 1701 nt, Artificial Sequence; identical to SEQ ID NO: 64586
  derived and/or modified CDS sequence (opt1) from hemagglutinin__InfluenzaA__ABG37439

SEQ ID NO: 65025 - RNA, 1701 nt, Artificial Sequence; identical to SEQ ID NO: 64664
  derived and/or modified CDS sequence (opt1) from hemagglutinin__InfluenzaA__ABG37461

SEQ ID NO: 65026 - RNA, 1701 nt, Artificial Sequence
  derived and/or modified CDS sequence (opt1) from hemagglutinin__InfluenzaA__ABG37472
augaagaccaucaucgcccugagcuacauccucugccugguguucgcccagaagcugcccggcaacgacaacuccaccgcgacgcucugccuggggcaccacgccgucccgaacggcacccuggugaagaccaucaccaacgaccagaucgaggugacgaacgccaccgagcucguccagagcuccagcaccgggcgcaucugcgacagcccccaccaggugcuggacggcgagaacugcacccugaucgacgcccuccugggggacccccacugcgacggcuuccagaacaaggagugggaccuguucguggagcggagcaaggccuacuccaacugcuaccccuacgacgucccggacuacgugagccuccgcucccugguggcgagcuccggcacgcuggaguucaacaacgagagcuucaacuggaccggggucgcccagaacggcaccuccagcgccugcaagcggcgcuccgacaagagcuucuucucccggcucaacuggcugcaccagcugaaguacaaguaccccgcccucaacgugaccaugcccaacaacgagaaguucgacaagcuguacaucuggggcgugcaccaccccgggacggacagcgaccagaucucccuguacgcgcaggccagcgggcgcgucaccgugagcaccaagcggucccagcagaccgugaucccgaacaucggcagccgccccuggguccggggcguguccagccgcaucuccaucuacuggacgaucgugaagcccggggacauccuccugaucaacagcaccggcaaccugaucgcgccccggggguacuucaagauccgcuccggcaagagcuccaucaugcggagcgacgccccgaucggcaagugcaacuccgagugcaucacccccaacgggagcauccccaacgacaagcccuuccagaacgucaaccgcaucaccuacggcccgugcccccgguacgugaagcagaacacgcucaagcuggccaccgggaugcgcaacgugcccgagaagcagacccggggcaucuucggggccaucgccggcuucaucgagaacggcugggaggggaugauggacggcugguacggguuccgccaccagaacuccgagggcaccgggcaggccgccgaccugaaguccacgcaggccgcgaucaaccagaucaacggcaagcucaaccggcugaucgagaagaccaacgagaaguuccaccagaucgagaaggaguucuccgaggucgagggccgcauccaggaccuggagaaguacguggaggacaccaagaucgaccucuggagcuacaacgccgagcugcugguggcccucgagaaccagcacaccaucgaccugacggacuccgagaugaacaagcuguucgagcggaccaagaagcagcuccgcgagaacgccgaggacauggggaacggcugcuucaagaucuaccacaagugcgacaacgccugcaucgggagcauccgcaacggcaccuacgaccacgacgucuaccgggacgaggcgcugaacaaccgcuuccagaucaaggggguggagcugaaguccggcuacaaggacuggauccucuggaucagcuucgccaucagcugcuuccugcugugcaucguccuccugggcuucaucaugugggccugccagaaggggaacauccggugcaacaucugcaucuga

SEQ ID NO: 65027 - RNA, 1701 nt, Artificial Sequence; identical to SEQ ID NO: 64586
  derived and/or modified CDS sequence (opt1) from hemagglutinin__InfluenzaA__ABG37483

SEQ ID NO: 65028 - RNA, 1701 nt, Artificial Sequence; identical to SEQ ID NO: 64664
  derived and/or modified CDS sequence (opt1) from hemagglutinin__InfluenzaA__ABG37494

SEQ ID NO: 65029 - RNA, 1701 nt, Artificial Sequence
  derived and/or modified CDS sequence (opt1) from hemagglutinin__InfluenzaA__ABG37505
augaagaccaucaucgcccugagcuacauccucugccugguguucgcccagaagcugcccggcaacgacaacuccauggcgacccucugccuggggcaccacgccgucccgaacggcacgcuggugaagaccaucaccaacgaccagaucgaggugaccaacgccacggagcucguccagagcuccagcaccgggcgcaucugcgacagcccccaccagauccuggacggcgagaacugcacccugaucgacgcccuccugggggacccccacugcgacggcuuccagaacaaggagugggaccuguucguggagcgguccaaggccuacuccaacugcuaccccuacgacgugccggacuacgucagccuccgcucccugguggcgagcuccggcacccuggaguucaacaacgagagcuucaacuggacggggguggcccagaacggcaccuccagcgccugcaagcggcgcuccgacaagagcuucuucucccggcucaacuggcugcaccagcugaaguacaaguaccccgcccucaacgucaccaugcccaacaacgagaaguucgacaagcuguacaucuggggcgugcaccaccccgggaccgacagcgaccagaucucccuguacgcgcaggccagcgggcgcgugacggucagcaccaagcggucccagcagaccgugaucccgaacaucggcagccgccccugggugcggggcgucuccagccgcaucuccaucuacuggaccaucgugaagcccggggacauccuccugaucaacagcacgggcaaccugaucgcgccccggggguacuucaagauccgcuccggcaagagcuccaucaugcggagcgacgccccgaucgacaagugcaacuccgagugcaucacccccaacggcagcauccccaacgacaagcccuuccagaacgugaaccgcaucaccuacgggcucugcccgcgguacgucaagcagaacacccugaagcuggccacgggcaugcgcaacgugcccgagaagcagacccgggggaucuucggcgccaucgccggguucaucgagaacggcugggagggcaugauggacgggugguacggcuuccgccaccagaacuccgaggggaccggccaggccgccgaccucaagagcacccaggccgcgaucaaccagaucaacgggaagcugaaccggcugaucgagaagacgaacgagaaguuccaccagaucgagaaggaguucuccgagguggagggccgcauccaggaccucgagaaguacgucgaggacaccaagaucgaccuguggagcuacaacgccgagcugcucguggcccuggagaaccagcacaccaucgaccugaccgacuccgagaugaacaagcuguucgagcggacgaagaagcagcuccgcgagaacgccgaggacaugggcaacgggugcuucaagaucuaccacaagugcgacaacgccugcaucggcagcauccgcaacgggaccuacgaccacgacguguaccgggacgaggcgcugaacaaccgcuuccagaucaagggcgucgagcucaaguccggguacaaggacuggauccuguggaucagcuucgccaucagcugcuuccugcucugcaucgugcugcugggcuucaucaugugggccugccagaagggcaacauccggugcaacaucugcaucuga

SEQ ID NO: 65030 - RNA, 1701 nt, Artificial Sequence; identical to SEQ ID NO: 64540
  derived and/or modified CDS sequence (opt1) from hemagglutinin__InfluenzaA__ABG37516

SEQ ID NO: 65031 - RNA, 1701 nt, Artificial Sequence; identical to SEQ ID NO: 64540
  derived and/or modified CDS sequence (opt1) from hemagglutinin__InfluenzaA__ABG37527

SEQ ID NO: 65032 - RNA, 1701 nt, Artificial Sequence; identical to SEQ ID NO: 64540
  derived and/or modified CDS sequence (opt1) from hemagglutinin__InfluenzaA__ABG37538

SEQ ID NO: 65033 - RNA, 1701 nt, Artificial Sequence; identical to SEQ ID NO: 64540
  derived and/or modified CDS sequence (opt1) from hemagglutinin__InfluenzaA__ABG37549

SEQ ID NO: 65034 - RNA, 1701 nt, Artificial Sequence; identical to SEQ ID NO: 64540
  derived and/or modified CDS sequence (opt1) from hemagglutinin__InfluenzaA__ABG37560

SEQ ID NO: 65035 - RNA, 1701 nt, Artificial Sequence; identical to SEQ ID NO: 64540
  derived and/or modified CDS sequence (opt1) from hemagglutinin__InfluenzaA__ABG37571

SEQ ID NO: 65036 - RNA, 1701 nt, Artificial Sequence
  derived and/or modified CDS sequence (opt1) from hemagglutinin__InfluenzaA__ABG37582
augaagaccaucaucgcccugagcuacauccucugccugguguucgcccagaagcugcccggcaacgacaacuccaccgcgacgcucugccuggggcaccacgccgucccgaacggcaccaucgugaagaccaucaccaacgaccagaucgaggugacgaacgccaccgagcugguccagaucagcuccaccgggggcaucugcgacagcccccaccagauccucgacggggagaacugcacccugaucgacgcccugcucggcgacccccagugcgacggcuuccagaacaagaagugggaccuguucguggagcgcuccaaggccuacagcaacugcuaccccuacgacgugccggaccacgcgucccugcggagccucgucgccuccagcgggacgcuggaguucaacaacgaguccuucgacuggaccggcgugacccagaacgggaccagcuccgccugcaagcgccggagcaacaaguccuucuucagccgccugaacuggcucacgcaccugaaguacaaguaccccgcccugaacgugaccaugcccaacaacgagaaguucgacaagcucuacaucuggggcguccaccaccccgggaccgacuccgaccagaucagccuguacgcgcaggccuccggccggaucaccgugagcacgaagcgcagccagcagaccgugaucccgaacaucggcucccggccccgcguccgggacgugagcucccgcaucagcaucuacuggaccaucgugaagcccggggacauccugcucaucaacuccaccggcaaccugaucgcgccccggggguacuucaagauccgcagcggcaaguccagcaucaugcgguccgacgccccgaucggcaagugcaacagcgagugcaucacgcccaacggguccauccccaacgacaagcccuuccagaacgucaaccgcaucaccuacggcgccugcccgcgguacgugaagcagaacacccugaagcucgccaccgggaugcgcaacgugcccgagaagcagacgcggggcaucuucggggccaucgccggcuucaucgagaacggcugggaggggauggucgacggcugguacggguuccgccaccagaacagcgagggcaccgggcaggccgccgaccugaaguccacccaggcggccaucaaccagaucaacggcaagcugaaccggcucaucggcaagaccaacgagaaguuccaccagaucgagaaggaguucagcgagguggaggggcgcauccaggaccuggagaaguacguggaggacacgaagaucgaccugugguccuacaacgccgagcuccuggucgcccuggagaaccagcacaccaucgaccucaccgacagcgagaugaacaagcuguucgagcggaccaagaagcagcugcgcgagaacgccgaggacaugggcaacgggugcuucaagaucuaccacaagugcgacaacgcgugcaucggcuccauccgcaacgggacguacgaccacgacguguaccgggacgaggcccucaacaaccgcuuccagaucaagggcguggagcucaagagcggcuacaaggacuggauccuguggaucuccuucgccaucagcugcuuccugcugugcgucgcccugcucggguucaucaugugggccugccagaagggcaacauccggugcaacaucugcaucuga

SEQ ID NO: 65037 - RNA, 1701 nt, Artificial Sequence; identical to SEQ ID NO: 64540
  derived and/or modified CDS sequence (opt1) from hemagglutinin__InfluenzaA__ABG37604

SEQ ID NO: 65038 - RNA, 1701 nt, Artificial Sequence; identical to SEQ ID NO: 64540
  derived and/or modified CDS sequence (opt1) from hemagglutinin__InfluenzaA__ABG37615

SEQ ID NO: 65039 - RNA, 1698 nt, Artificial Sequence; identical to SEQ ID NO: 64766
  derived and/or modified CDS sequence (opt1) from hemagglutinin__InfluenzaA__ABG47807

SEQ ID NO: 65040 - RNA, 1698 nt, Artificial Sequence; identical to SEQ ID NO: 64765
  derived and/or modified CDS sequence (opt1) from hemagglutinin__InfluenzaA__ABG47818

SEQ ID NO: 65041 - RNA, 1701 nt, Artificial Sequence
  derived and/or modified CDS sequence (opt1) from hemagglutinin__InfluenzaA__ABG47829
augaaggccaagcugcucgugcugcugugcgccuucaccgcgaccuacgccgacacgaucugcaucggcuaccacgccaacaacagcaccgacaccgucgacaccgugcucgagaagaacgugacggucacccacuccgugaaccugcuggaggacagccacaacgggaagcucugccgccugaagggcaccgcgccccugcagcucgggaacugcuccguggccggcuggauccuggggaacccggagugcgagagccuguucuccaaggagagcugguccuacaucgccgagacccccaaccccgagaacggcacgugcuaccccggcuacuucgccgacuacgaggagcuccgggagcagcugagcuccgucagcuccuucgagcgcuucgagaucuucccgaaggagagcuccuggcccaaccacaccgugaccaagggggugaccgccagcugcucccacaacggcaagagcuccuucuacaagaaccugcucuggcugacggagaagaacgggcuguaccccaaccucagcaaguccuacgucaacaacaaggagaaggaggugcuggugcuguggggcguccaccaccccagcaacaucggggaccagcgggccaucuaccacaccgagaacgcguacgugagcguggucuccagccacuacucccgccgguucaccccggagaucaccaagcgccccaaggugcggaaccaggagggccgcaucaacuacuacuggacgcuccuggagcccggcgacaccaucaucuucgaggccaacgggaaccugaucgcccccugguacgccuucgcccucagccggggcuucggguccggcaucaucaccagcaacgcguccaugggcgagugcgacgccaagugccagaccccgcagggggccaucaacagcucccugcccuuccagaacgugcaccccgucacgaucggcgagugccccaaguacgugcgcagcaccaagcugcggauggugaccgggcuccgcaacaucccguccauccagagccggggccuguucggggccaucgccggcuucaucgagggcggguggaccggcaugaucgacgggugguacggcuaccaccaccagaacgagcagggguccggcuacgcggccgaccagaaguccacgcagaacgccaucgacggcaucaccaacaaggucaacagcgugaucgagaagaugaacacccaguucaccgccguggggaaggaguucaacaagcuggagcgccggauggagaaccucaacaagaaggucgacgacggcuuccuggacaucuggacguacaacgccgagcugcucgugcugcuggagaacgagcgcacccucgacuuccacgacagcaacgucaagaaccuguacgagaaggugaagacccagcugaagaacaacgcgaaggagaucgggaacggcugcuucgaguucuaccacaagugcaacaacgagugcauggaguccgugaagaacgggaccuacgacuaccccaaguacagcgaggaguccaagcucaaccgggagaagaucgacggcgucaagcuggagagcaugggcguguaccagauccuggccaucuacagcacgguggccuccagccucguccugcuggugucccucggggccaucagcuucuggaugugcuccaacggcagccugcagugccgcaucugcaucuga

SEQ ID NO: 65042 - RNA, 1701 nt, Artificial Sequence
  derived and/or modified CDS sequence (opt1) from hemagglutinin__InfluenzaA__ABG47840
augaaggugaagcugcucguccugcugugcgccuucaccgccaccuacgcggacacgaucugcaucggcuaccacgccaacaacagcaccgacaccguggacaccgugcucgagaagaacgucacggugacccacuccgugaaccugcuggaggacagccacaacgggaagcucugccgccugaagggcaccgcgccccugcagcucgggaacugcuccgucgccggcuggauccuggggaacccggagugcgagagccuguucuccaaggagagcugguccuacaucgccgagacccccaaccccgagaacggcacgugcuaccccggcuacuucgccgacuacgaggagcuccgggagcagcugagcuccgugagcuccuucgagcgcuucgagaucuucccgaaggagagcuccuggcccaaccacaccgugaccaagggggucaccgccagcugcucccacaacggcaagagcuccuucuacaagaaccugcucuggcugacggagaagaacgggcuguaccccaaccucagcaaguccuacgugaacaacaaggagaaggaggugcugguccuguggggcgugcaccaccccagcaacaucggggaccagcgggccaucuaccacaccgagaacgccuacgugagcgucguguccagccacuacucccgccgguucaccccggagaucgcgaagcgccccaaggugcgggaccaggagggccgcaucaacuacuacuggacccuccuggagcccggcgacacgaucaucuucgaggccaacgggaaccugaucgcccccugguacgccuucgcccucagccggggcuucggguccggcaucaucaccagcaacgcguccaugagcgagugcgacgccaagugccagaccccgcagggcgccaucaacuccagccugcccuuccagaacguccaccccgugaccaucggggagugccccaaguacgugcgcuccacgaagcugcggauggucaccggccuccgcaacaucccgagcauccagucccgggggcuguucggcgccaucgccggguucaucgagggcggcuggaccgggaugaucgacggcugguacggguaccaccaccagaacgagcagggcagcggguacgcggccgaccagaaguccacccagaacgccaucgacggcaucacgaacaaggugaacagcgugaucgagaagaugaacacccaguucaccgccgucggcaaggaguucaacaagcuggagcgccggauggagaaccucaacaagaagguggacgacggguuccuggacaucuggaccuacaacgccgagcugcucguccugcuggagaacgagcgcacgcucgacuuccacgacuccaacgugaagaaccuguacgagaaggugaagaaccagcugaagaacaacgcgaaggagaucggcaacgggugcuucgaguucuaccacaagugcaacaacgagugcauggagagcgucaagaacggcaccuacgacuaccccaaguacuccgaggagagcaagcucaaccgggagaagaucgacggggugaagcuggagagcaugggcguguaccagauccuggccaucuacuccaccgucgccagcucccucgugcugcuggugagccucggcgccaucuccuucuggaugugcagcaacgggucccugcagugccgcaucugcaucuga

SEQ ID NO: 65043 - RNA, 1701 nt, Artificial Sequence
  derived and/or modified CDS sequence (opt1) from hemagglutinin__InfluenzaA__ABG47851
augaagaccaucaucgcccugagcuacauccucugccugguguucgcccagaagcugcccggcaacgacaacuccaccgcgacgcucugccuggggcaccacgccgucccgaacggcacccuggugaagaccaucaccaacgaccagaucgaggugacgaacgccaccgagcucguccagagcuccagcaccgggcgcaucugcgacagcccccaccggauccuggacggcaagaacugcacccugaucgacgcccuccugggggacccccacugcgacggcuuccagaacaaggagugggaccuguucguggagcgcagcaaggccuacuccaacugcuaccccuacgacgugccggacuacgcgagccuccggucccuggucgccagcuccggcacgcuggaguucaccaacgagggguucaacuggaccggcguggcccaggacgggaaguccuacgccugcaagcgcggcuccgugaacagcuucuucucccggcucaacuggcugcacaagcuggaguacaaguaccccgcgcucaacgucaccaugcccaacaacgacaaguucgacaagcuguacaucuggggcgugcaccaccccagcacggacuccgaccagaccagccuguacgugcaggccuccgggcgcgucaccgugagcaccaagcggagccagcagacggugaucccgaacaucggcucccgccccuggguccgggggaucagcucccgcaucagcaucuacuggaccaucgugaagcccggcgacauccuccugaucaacuccaccgggaaccugaucgcgccccggggcuacuucaagauccgcaacggcaagagcuccaucaugcggagcgacgccccgaucgacaacugcaacuccgagugcaucacccccaacgggagcauccccaacgacaagcccuuccagaacgugaaccgcaucacguacggcgccugcccgcgguacgucaagcagaacacccucaagcuggccaccgggaugcgcaacgugcccgagaagcagacccggggcaucuucggggccaucgccggcuucaucgagaacggcugggaggggaugguggacggcugguacggguuccgccaccagaacuccgagggcacggggcaggccgccgaccucaagagcacccaggcggccaucgaccagaucaacggcaagcugaaccggcugaucgagaagaccaacgagaaguuccaccagaucgagaaggaguucuccgaggucgagggccgcauccaggaccuggagaaguacguggaggacaccaagaucgaccucuggagcuacaacgccgagcugcugguggcccucgagaaccagcacacgaucgaccugaccgacuccgagaugaacaagcuguucgagcggacccgcaagcagcuccgcgagaacgccgaggacauggggaacggcugcuucaagaucuaccacaagugcgacaacgcgugcaucgggagcauccggaacggcaccuacaaccacgacgucuaccgcgacgaggcccugaacaaccgguuccagaucaaggggguggagcugaaguccggcuacaaggacuggauccucuggaucagcuucgccaucuccugcuuccugcugugcgucgugcuccugggcuucaucaugugggccugccagaaggggaacauccgcugcagcaucugcaucuga

SEQ ID NO: 65044 - RNA, 1701 nt, Artificial Sequence
  derived and/or modified CDS sequence (opt1) from hemagglutinin__InfluenzaA__ABG47862
augcgcaccaucaucgcccugagcuacauccucugccugguguucgcccagaagcugcccggcaacgacaacuccaccgcgacgcucugccuggggcaccacgccgucccgaacggcacccuggugaagaccaucaccaacgaccagaucgaggugacgaacgccaccgagcucguccagagcuccagcaccgggcggaucugcaacagcccccaccgcauccuggacggcaagaacugcacccugaucgacgcccuccugggggacccccacugcgacggcuuccagaacaaggagugggaccuguucguggagcggagcaaggccuacuccaacugcuaccccuacgacgugccggacuacgcgagccuccgcucccugaucgccagcuccggcacgcuggaguucaccaacgagggguucaacuggaccggcgucgcccaggacgggaccagcuacgccugcaagcggggcuccgugaaguccuucuucucccgccucaacuggcugcacaagcuggaguacaaguaccccgcgcucaacgugacgaugcccaacaacgacaaguucgacaagcuguacaucuggggcguccaccaccccagcaccgacuccgaccagaccagccuguacgugcaggccuccgggcgggugaccgucagcacgaagcgcagccagcagaccgugaucccgaacaucggcucccggcccugggugcgcggggucagcucccggaucagcaucuacuggaccaucgugaagcccggcgacauccuccugaucaacuccaccgggaaccugaucgcgccccgcggcuacuucaagauccggagcggcaaguccagcaucaugcgcuccgacgccccgaucgggaacugcaacagcgagugcaucacgcccaacggcuccauccccaacgacaagcccuuccagaacgugaaccggaucaccuacggggccugcccgcgcuacgucaagcagaacacccucaagcuggccaccggcaugcggaacgugcccgagaagcagacgcgcgggaucuucggcgccaucgccggcuucaucgagaacgggugggagggcaugguggacgggugguacggcuuccggcaccagaacagcgaggggaccggccaggccgccgaccugaaguccacccaggcggccaucaaccagaucaacggcaagcucaaccgccugaucgagaagaccaacgagaaguuccaccagaucgagaaggaguucagcgaggucgaggggcggauccaggaccuggagaaguacguggaggacacgaagaucgaccucugguccuacaacgccgagcugcugguggcccucgagaaccagcacaccaucgaccugaccgacagcgagaugaacaagcuguucgagcgcacccgcaagcagcuccgggagaacgccgaggacaugggcaacgggugcuucaagaucuaccacaagugcgacaacgcgugcaucggcuccauccgcaacgggacguacgaccacgacgucuaccgggacgaggcccugaacaaccgcuuccagaucaagggcguggagcucaagagcggcuacaaggacuggauccuguggaucuccuucgccaucagcugcuuccugcugugcgucgugcuccugggguucaucaugugggccugccagaagggcaacauccggugcaacaucugcaucuga

SEQ ID NO: 65045 - RNA, 1701 nt, Artificial Sequence; identical to SEQ ID NO: 65008
  derived and/or modified CDS sequence (opt1) from hemagglutinin__InfluenzaA__ABG47873

SEQ ID NO: 65046 - RNA, 1701 nt, Artificial Sequence; identical to SEQ ID NO: 65013
  derived and/or modified CDS sequence (opt1) from hemagglutinin__InfluenzaA__ABG47895

SEQ ID NO: 65047 - RNA, 1701 nt, Artificial Sequence; identical to SEQ ID NO: 65008
  derived and/or modified CDS sequence (opt1) from hemagglutinin__InfluenzaA__ABG47906

SEQ ID NO: 65048 - RNA, 1701 nt, Artificial Sequence
  derived and/or modified CDS sequence (opt1) from hemagglutinin__InfluenzaA__ABG47917
augaagaccaucaucgcccugagcuacauccucugccugguguucgcccagaagcugcccggcaacgacaacuccaccgcgacgcucugccuggggcaccacgccgucccgaacggcacccuggugaagaccaucaccaacgaccagaucgaggugacgaacgccaccgagcucguccagagcuccagcaccgggcgcaucugcgacagcccccaccggauccuggacggcaagaacugcacccugaucgacgcccuccugggggacccccacugcgacggcuuccagaacaaggagugggaccuguucguggagcgcuccaaggccuacuccaacugcuaccccuacgacgugccggacuacgcgagccuccggucccuggucgccagcuccggcacgcuggaguucaucaacgaggacuucaacuggaccgggguggcccaggacggcaagagcuacgccugcaagcgcggguccgugaacagcuucuucucccggcucaacuggcugcacaagcuggaguacaaguaccccgcgcucaacgucaccaugcccaacaacggcaaguucgacaagcuguacaucuggggcgugcaccaccccagcaccgacuccgaccagacgagccuguacgugcgcgccuccgggcgggucaccgugagcaccaagcgcagccagcagaccgugaucccgaacaucggcuuccggcccuggguccgcgggcucuccagccggaucuccaucuacuggacgaucgugaagcccggcgacauccugcugaucaacagcaccgggaaccucaucgcgccccgcggcuacuucaagauccggaacggcaaguccagcaucaugcgcuccgacgccccgaucgggaacugcagcuccgagugcaucacccccaacggcagcauccccaacgacaagcccuuccagaacgugaaccggaucaccuacggggccugcccgcgcuacgucaagcagaacacgcugaagcuggccaccggcaugcggaacgugcccgagaagcagacccgcgggaucuucggcgccaucgccggcuucaucgagaacgggugggagggcaugguggacgggugguacggcuuccggcaccagaacuccgaggggaccggccaggccgccgaccucaagagcacgcaggcggccaucgaccagaucaacggcaagcugaaccgccugaucgagaagaccaacgagaaguuccaccagaucgagaaggaguucuccgaggucgaggggcggauccaggaccucgagaaguacguggaggacaccaagaucgaccuguggagcuacaacgccggccugcucguggcccuggagaaccagcacaccaucgaccugacggacuccgagaugaacaagcuguucgagcgcacccgcaagcagcuccgggagaacgccgaggacauggggaacggcugcuucaagaucuaccacaagugcgacaacgcgugcaucgggagcauccgcaacggcaccuacgaccacgacgucuaccgggacgaggcccugaacaaccgcuuccagaucaagggcguggagcucaaguccggguacaaggacuggauccuguggaucagcuucgccaucuccugcuuccugcucugcgucgugcugcugggcuucaucaugugggccugccagaaggggaacauccggugcaacaucugcaucuga

SEQ ID NO: 65049 - RNA, 1701 nt, Artificial Sequence; identical to SEQ ID NO: 65048
  derived and/or modified CDS sequence (opt1) from hemagglutinin__InfluenzaA__ABG47928

SEQ ID NO: 65050 - RNA, 1701 nt, Artificial Sequence
  derived and/or modified CDS sequence (opt1) from hemagglutinin__InfluenzaA__ABG47939
augaagaccaucaucgcccugagcuacauccucugccugguguucgcccagaagcugcccggcaacgacaacuccaccgcgacgcucugccuggggcaccacgccgucccgaacggcacccuggugaagaccaucaccaacgaccagaucgaggugacgaacgccaccgagcucguccagagcuccagcaccgggcgcaucugcgacucccccuaccggauccuggacggcaagaacugcacccugaucgacgcccuccugggggacccccacugcgacggcuuccagaacaaggagugggaccuguucguggagcgcagcaaggccuacuccaacugcuaccccuacgacgugccggacuacgcgagccuccggucccuggucgccagcuccggcacgcuggaguucaucaacgaggacuucaacuggaccgggguggcccaggacggcaagagcuacgccugcaagcgcggguccgugaacagcuucuucucccggcucaacuggcugcacaagcuggaguacaaguaccccgcgcucaacgucaccaugcccaacaacggcaaguucgacaagcuguacaucuggggcgugcaccaccccagcaccgacuccgaccagacgagccuguacgugcgcgccuccgggcgggucaccgugagcaccaagcgcagccagcagaccgugaucccgaacaucggcuuccggcccuggguccgcgggcucuccagccggaucuccaucuacuggacgaucgugaagcccggcgacauccugcugaucaacagcaccgggaaccucaucgcgccccgcggcuacuucaagauccggaacggcaaguccagcaucaugcgcuccgacgccccgaucgggaacugcagcuccgagugcaucacccccaacggcagcauccccaacgacaagcccuuccagaacgugaaccggaucaccuacggggccugcccgcgcuacgucaagcagaacacgcugaagcuggccaccggcaugcggaacgugcccgagaagcagacccgcgggaucuucggcgccaucgccggcuucaucgagaacgggugggagggcaugguggacgggugguacggcuuccggcaccagaacuccgaggggaccggccaggccgccgaccucaagagcacgcaggcggccaucgaccagaucaacggcaagcugaaccgccugaucgagaagaccaacgagaaguuccaccagaucgagaaggaguucuccgaggucgaggggcggauccaggaccucgagaaguacguggaggacaccaagaucgaccuguggagcuacaacgccggccugcucguggcccuggagaaccagcacaccaucgaccugacggacuccgagaugaacaagcuguucgagcgcacccgcaagcagcuccgggagaacgccgaggacauggggaacggcugcuucaagaucuaccacaagugcgacaacgcgugcaucgggagcauccgcaacggcaccuacgaccacgacgucuaccgggacgaggcccugaacaaccgcuuccagaucaagggcguggagcucaaguccggguacaaggacuggauccuguggaucagcuucgccaucuccugcuuccugcucugcgucgugcugcugggcuucaucaugugggccugccagaaggggaacauccggugcaacaucugcaucuga

SEQ ID NO: 65051 - RNA, 1701 nt, Artificial Sequence
  derived and/or modified CDS sequence (opt1) from hemagglutinin__InfluenzaA__ABG47950
augaagaccaucaucgcccugagcuacauccucugccugguguucgcccagaagcugcccggcaacgacaacuccaccgcgacgcucugccuggggcaccacgccgucccgaacggcacccuggugaagaccaucaccaacgaccagaucgaggugacgaacgccaccgagcucguccagagcuccagcaccgggcgcaucugcgacagcccccaccggauccuggacggcaagaacugcacccugaucgacgcccuccugggggacccccacugcgacggcuuccagaacaaggagugggaccuguucguggagcgcuccaaggccuacuccaacugcuaccccuacgacgugccggacuacgcgagccuccggucccuggucgccagccugggcacgcucgaguucaucaacgaggacuucaacuggaccgggguggcccaggacggcaaguccuacagcugcaagcgcggguccgugaacagcuucuucucccggcugaacuggcugcacaagcucgaguacaaguaccccgcccugaacgucaccaugcccaacaacggcaaguucgacaagcuguacaucuggggcgugcaccaccccagcaccgacuccgaccagacgagccucuacgcgcgcgccuccgggcgggugaccgucagcaccaagcgcagccagcagaccgugaucccgaacaucggcuuccggcccugggugcgcgggcuguccagccggaucuccaucuacuggacgaucgucaagcccggcgacauccugcucaucaacagcaccgggaaccugaucgcgccccgcggcuacuucaagauccggaccggcaaguccagcaucaugcgcuccgacgccccgaucgggaacugcagcuccgagugcaucacccccaacggcaacauccccaacgacaagcccuuccagaacgugaaccggaucacguacggggccugcccgcgcuacgugaagcagaacacccugaagcucgccaccggcaugcggaacguccccgagaagcagacccgcgggaucuucggcgccaucgccggcuucaucgagaacgggugggagggcaugguggacgggugguacggcuuccggcaccagaacagcgaggggacgggccaggccgccgaccugaaguccacccaggcggccaucgaccagaucaacggcaagcugaaccgccucaucgagaagaccaacgagaaguuccaccagaucgagaaggaguucagcgagguggaggggcggauccaggaccuggagaaguacgucgaggacaccaagaucgaccugugguccuacaacgccggcuuccucguggcccuggagaaccagcacacgaucgaccugaccgacagcgagaugaacaagcuguucgagcgcacccgcaagcagcuccgggagaacgccgaggacauggggaacggcugcuucaagaucuaccacaagugcgacaacgcgugcaucggguccauccgcaacggcaccuacgaccacgacguguaccgggacgaggcccugaacaaccgcuuccagaucaagggcgucgagcucaagagcggguacaaggacuggauccuguggaucuccuucgccaucagcugcuuccugcucugcgugguccugcugggcuucaucaugugggccugccagaaggggaacauccggugcaacaucugcaucuga

SEQ ID NO: 65052 - RNA, 1701 nt, Artificial Sequence
  derived and/or modified CDS sequence (opt1) from hemagglutinin__InfluenzaA__ABG47961
augaagaccaucaucgcccugagcuacauccucugccugguguucgcccagaagcugcccggcaacgacaacuccaccgcgacgcucugccuggggcaccacgccgucccgaacggcacccuggugaagaccaucaccaacgaccagaucgaggugacgaacgccaccgagcucguccagagcuccagcaccgggcgcaucugcgacagcccccaccggauccuggacggcaagaacugcacccugaucgacgcccuccugggggacccccacugcgacggcuuccagaacaaggagugggaccuguucguggagcgcuccaaggccuacuccaacugcuaccccuacgacgugccggacuacgcgagccuccggucccuggucgccagcuccggcacgcuggaguucaucaacgaggacuucaacuggaccgggguggcccaggacggcaagagcuacuccugcaagcgcgggagcgugaacuccuucuucagccggcucaacuggcugcacaagcuggaguacaaguaccccgcccucaacgucaccaugcccaacaacggcaaguucgacaagcuguacaucuggggcgugcaccaccccuccaccgacagcgaccagacgucccuguacgugcgcgcgagcgggggcgucaccgugagcaccaagcggucccagcagaccgugaucccgaacaucgggagccgccccuggguccggggccucuccagccgcaucuccaucuacuggacgaucgugaagcccggggacauccugcugaucaacagcaccggcaaccucaucgcgccccggggcuacuucaagaugcgcaacgggaaguccagcaucaugcgguccgacgccccgaucggcaacugcagcuccgagugcaucacccccaacgggagcauccccaacgacaagcccuuccagaacgugaaccgcaucaccuacggcgccugcccgcgguacgucaagcagaacacgcugaagcuggccaccgggaugcgcaacgugcccgagaagcagacccggggcaucuucggcgccaucgccggguucaucgagaacggcugggaggggaugguggacggcugguacggguuccgccaccagaacuccgagggcaccggccaggccgccgaccucaagagcacgcaggccgcgaucgaccagaucaacgggaagcugaaccggcugaucggcaagaccaacgagaaguuccaccagaucgagaaggaguucuccgaggucgaggggcgcauccaggaccucgagaaguacguggaggacaccaagaucgaccuguggagcuacaacgccgagcugcucguggcccuggagaaccagcacaccaucgaccugacggacuccgagaugaacaagcuguucgagcggacccgcaagcagcuccgcgagaacgccgaggacaugggcaacgggugcuucaagaucuaccacaagugcgacaacgccugcaucggcagcauccggaacggcaccuacgaccacgacgucuaccgcgacgaggcgcugaacaaccgguuccagaucaaggggguggagcucaaguccggcuacaaggacuggauccuguggaucagcuucgccaucagcugcuuccugcucugcgucgugcugcugggguucaucaugugggccugccagaagggcaacauccgcugcaacaucugcaucuga

SEQ ID NO: 65053 - RNA, 1701 nt, Artificial Sequence; identical to SEQ ID NO: 65048
  derived and/or modified CDS sequence (opt1) from hemagglutinin__InfluenzaA__ABG47972

SEQ ID NO: 65054 - RNA, 1701 nt, Artificial Sequence; identical to SEQ ID NO: 65048
  derived and/or modified CDS sequence (opt1) from hemagglutinin__InfluenzaA__ABG47983

SEQ ID NO: 65055 - RNA, 1701 nt, Artificial Sequence; identical to SEQ ID NO: 65048
  derived and/or modified CDS sequence (opt1) from hemagglutinin__InfluenzaA__ABG47994

SEQ ID NO: 65056 - RNA, 1701 nt, Artificial Sequence
  derived and/or modified CDS sequence (opt1) from hemagglutinin__InfluenzaA__ABG48005
augaagaccaucaucgcccugagcuacauccucugccugguguucgcccagaagcugcccggcaacgacaacuccaccgcgacgcucugccuggggcaccacgccgucccgaacggcacccuggugaagaccaucaccaacgaccagaucgaggugacgaacgccaccgagcucguccagagcuccagcaccgggcgcaucugcgacagcccccaccggauccuggacggcaagaacugcacccugaucgacgcccuccugggggacccccacugcgacggcuuccagaacaaggagugggaccuguucguggagcgcuccaaggccuacuccaacugcuaccccuacgacgugccggacuacgcgagccuccggucccuggucgccagcuccggcacgcuggaguucaucaacgaggacuucaacuggaccgggguggcccaggacggcaagagcuacgccugcaagcgcggguccgugaacagcuucuucucccggcucaacuggcugcacaagcuggaguacaaguaccccgcgcucaacgucaccaugcccaacaacggcaaguucgacaagcuguacaucuggggcgugcaccaccccagcaccgacuccgaccagacgagccuguacgugcgcgccuccgggcgggucaccgugagcaccaagcgcagccagcagaccgugaucccgaacaucggcuuccggcccuggguccgcgggcucuccagccggaucuccaucuacuggacgaucgugaagcccggcgacauccugcugaucaacagcaccgggaaccucaucgcgccccgcggcuacuucaagauccggaacggcaaguccagcaucaugcgcuccgacgccccgaucgggaacugcagcuccgagugcaucacccccaacggcagcauccccaacgacaagcccuuccagaacgugaaccggaucaccuacggggccugcccgcgcuacgucaagcagaacacgcugaagcuggccaccggcaugcggaacgugcccgagaagcagacccgcgggaucuucggcgccaucgccggcuucaucgagaacgggugggagggcaugguggacgggugguacggcuuccggcaccagaacuccgaggggaccggccaggccgccgaccucaagagcacgcaggcggccaucaaccagaucaacggcaagcugaaccgccugaucgagaagaccaacgagaaguuccaccagaucgagaaggaguucuccgaggucgaggggcggauccaggaccucgagaaguacguggaggacaccaagaucgaccuguggagcuacaacgccggccugcucguggcccuggagaaccagcacaccaucgaccugacggacuccgagaugaacaagcuguucgagcgcacccgcaagcagcuccgggagaacgccgaggacauggggaacggcugcuucaagaucuaccacaagugcgacaacgcgugcaucgggagcauccgcaacggcaccuacgaccacgacgucuaccgggacgaggcccugaacaaccgcuuccagaucaagggcguggagcucaaguccggguacaaggacuggauccuguggaucagcuucgccaucuccugcuuccugcucugcgucgugcugcugggcuucaucaugugggccugccagaaggggaacauccggugcaacaucugcaucuga

SEQ ID NO: 65057 - RNA, 1701 nt, Artificial Sequence; identical to SEQ ID NO: 65048
  derived and/or modified CDS sequence (opt1) from hemagglutinin__InfluenzaA__ABG48016

SEQ ID NO: 65058 - RNA, 1701 nt, Artificial Sequence; identical to SEQ ID NO: 65048
  derived and/or modified CDS sequence (opt1) from hemagglutinin__InfluenzaA__ABG48027

SEQ ID NO: 65059 - RNA, 1698 nt, Artificial Sequence
  derived and/or modified CDS sequence (opt1) from hemagglutinin__InfluenzaA__ABG48049
augaaggugaagcugcucguccugcugugcaccuucaccgccacguacgccgacaccaucugcaucggcuaccacgcgaacaacagcaccgacaccguggacacggugcucgagaagaacgucaccgugacccacuccgugaaccugcuggaggacagccacaacgggaagcucugccugcugaagggcaucgcgccccuccagcuggggaacugcuccgucgccggcuggauccuggggaacccggagugcgagcuccugaucagcaaggaguccuggagcuacaucguggagacccccaaccccgagaacggcacgugcuaccccggcuacuucgccgacuacgaggagcugcgcgagcagcucuccagcguguccagcuucgagcgguucgagaucuucccgaaggaguccagcuggcccaaccacaccgucaccgggguguccgccagcugcucccacaacggcaagagcuccuucuaccgcaaccugcuguggcucaccgggaagaacggccuguaccccaaccugagcaaguccuacgccaacaacaaggagaaggaggugcucguccuguggggcgugcaccacccgcccaacaucggggaccagcgggcccuguaccacacggagaacgccuacgugagcgucgugagcacccacuacucccgccgguucacccccgagaucgccaagcgccccaaggugcgggaccaggagggccgcaucaacuacuacuggacccuccuggagcccggggacacgaucaucuucgaggcgaacggcaaccugaucgccccgcgguacgccuucgcccucagccgcggguucggcuccggcaucaucaccagcaacgcccccauggacgagugcgacgcgaagugccagacgccccagggggccaucaacuccagccugcccuuccagaacguccacccggugaccaucggcgagugccccaaguacgugcgguccgccaagcugcgcauggucaccgggcuccggaacauccccagcauccagucccgcggccuguucggggccaucgccggcuucaucgagggcggguggaccggcaugguggacgggugguacggcuaccaccaccagaacgagcaggggagcggcuacgcggccgaccagaaguccacccagaacgccaucaacggcaucaccaacaaggugaacagcgucaucgagaagaugaacacgcaguucaccgccguggggaaggaguucaacaagcuggagcggcgcauggagaaccucaacaagaaggucgacgacggcuuccuggacaucuggaccuacaacgccgagcugcucgugcugcuggagaacgagcggacccucgacuuccacgacuccaacgugaagaaccuguacgagaaggucaagagccagcugaagaacaacgcgaaggagaucgggaacggcugcuucgaguucuaccacaagugcaacaacgagugcauggaguccgugaagaacgggacguacgacuaccccaaguacagcgaggaguccaagcucaaccgcgagaagaucgacggcgugaagcuggagagcaugggcgucuaccagauccuggccaucuacuccaccguggccagcagccucgugcugcuggucucccucggggccaucagcuucuggaugugcuccaacggcagccugcagugccggaucugcaucuga

SEQ ID NO: 65060 - RNA, 1701 nt, Artificial Sequence; identical to SEQ ID NO: 64674
  derived and/or modified CDS sequence (opt1) from hemagglutinin__InfluenzaA__ABG48060

SEQ ID NO: 65061 - RNA, 1701 nt, Artificial Sequence; identical to SEQ ID NO: 64674
  derived and/or modified CDS sequence (opt1) from hemagglutinin__InfluenzaA__ABG48071

SEQ ID NO: 65062 - RNA, 1701 nt, Artificial Sequence
  derived and/or modified CDS sequence (opt1) from hemagglutinin__InfluenzaA__ABG48082
augaagaccaucaucgcccugagcuacauccucugccugguguucgcccagaagcugcccggcaacgacaacuccaccgcgacgcucugccuggggcaccacgccgucccgaacggcacccuggugaagaccaucaccaacgaccagaucgaggugacgaacgccaccgagcucguccagagcuccagcaccgggcgcaucugcgacagcccccaccagauccuggacggcgagaacugcacccugaucgacgcccuccugggggacccccacugcgacggcuuccagaacaaggagugggaccuguucguggagcgguccaaggccuacuccaacugcuaccccuacgacgugccggacuacgucagccuccgcucccugguggcgagcuccggcacgcuggaguucaacaacgagagcuucaacuggaccgggguggcccagaacggcaccuccagcgccugcaagcggcgcuccgacaagagcuucuucucccggcucaacuggcugcaccagcugaaguacaaguaccccgcccucaacgucaccaugcccaacaacgagaaguucgacaagcuguacaucuggggcgugcugcaccccgggacggacagcgaccagaucucccucuacgcgcaggccagcgggcgcgugaccgucagcaccaagcggucccagcagaccgugaucccgaacaucggcagccgccccugggugcggggcgucuccagccgcaucuccaucuacuggacgaucgugaagcccggggacauccugcugaucaacagcaccggcaaccucaucgcgccccggggguacuucaagauccgcuccggcaagagcuccaucaugcggagcgacgccccgaucggcaagugcaacuccgagugcaucacccccaacgggagcauccccaacggcaagcccuuccagaacgugaaccgcaucaccuacggggccugcccgcgguacgucaagcagaacacgcugaagcuggccaccggcaugcgcaacgugcccgagaagcagacccgggggaucuucggcgccaucgccggcuucaucgagaacgggugggagggcaugauggacgggugguacggcuuccgccaccagaacuccgaggggaccggccaggccgccgaccucaagagcacgcaggcggccaucaaccagaucaacggcaagcugaaccggcugaucgagaagaccaacgagaaguuccaccagaucgagaaggaguucuccgagguggaggggcgcauccaggaccucgagaaguacgucgaggacaccaagaucgaccuguggagcuacaacgccgagcugcucguggcccuggagaaccagcacaccaucgaccugacggacuccgagaugaacaagcuguucgagcggaccaagaagcagcuccgcgagaacgccgaggacaugggcaacgggugcuucaagaucuaccacaagugcgacaacgcgugcaucggcagcauccgcaacgggaccuacgaccacgacguguaccgggacgaggcccugaacaaccgcuuccagaucaagggcgucgagcucaaguccggcuacaaggacuggauccuguggaucagcuucgccaucagcugcuuccugcucugcaucgugcugcugggguucaucaugugggccugccagaagggcaacauccggugcaacaucugcaucuga

SEQ ID NO: 65063 - RNA, 1701 nt, Artificial Sequence
  derived and/or modified CDS sequence (opt1) from hemagglutinin__InfluenzaA__ABG48104
augaagaccaucaucgcccugagcuacauccucugccugguguucgcccagaagcugcccggcaacgacaacuccaccgcgacgcucugccuggggcaccacgccgucccgaacggcacccuggugaagaccaucaccaacgaccagaucgaggugacgaacgccaccgagcucguccagagcuccagcaccgggcgcaucugcgacagcccccaccagauccuggacggcgagaacugcacccugaucgacgcccuccugggggacccccacugcgacggcuuccagaacaaggagugggaccuguucguggagcggagccgcgccuacuccaacugcuaccccuacgacgugccggacuacgucagccuccggucccugguggcgagcuccggcacgcuggaguucaacaacgagagcuucaacuggaccgggguggcccagaacggcaccuccagcgccugcaagcgccgguccgacaagagcuucuucucccgccucaacuggcugcaccagcugaaguacaaguaccccgcccucaacgucaccaugcccaacaacgagaaguucgacaagcuguacaucuggggcgugcaccaccccgggacggacagcgaccagaucucccuguacgcgcaggccagcgggcgggugaccgucagcaccaagcgcucccagcagaccgugaucccgaacaucggcagccggcccugggugcgcggcgucuccagccggaucuccaucuacuggacgaucgugaagcccggggacauccuccugaucaacagcaccggcaaccugaucgcgccccgcggguacuucaagauccgguccggcaagagcuccaucaugcgcagcgacgccccgaucggcaagugcaacuccgagugcaucacccccaacgggagcauccccaacgacaagcccuuccagaacgugaaccggaucaccuacggcccgugcccccgcuacgucaagcagaacacgcucaagcuggccaccgggaugcggaacgugcccgagaagcagacccgcggcaucuucggggccaucgccggcuucaucgagaacggcugggaggggaugauggacggcugguacggguuccggcaccagaacuccgagggcaccgggcaggccgccgaccugaaguccacgcaggccgcgaucaaccagaucaacggcaagcucaaccgccugaucgagaagaccaacgagaaguuccaccagaucgagaaggaguucuccgagguggagggccggauccaggaccuggagaaguacgucgaggacaccaagaucgaccucuggagcuacaacgccgagcugcugguggcccucgagaaccagcacaccaucgaccugacggacuccgagaugaacaagcuguucgagcgcaccaagaagcagcuccgcgagaacgccgaggacauggggaacggcugcuucaagaucuaccacaagugcgacaacgccugcaucgggagcauccggaacggcaccuacgaccacgacguguaccgcgacgaggcgcugaacaaccgguuccagaucaagggggucgagcugaaguccggcuacaaggacuggauccucuggaucagcuucgccaucagcugcuuccugcugugcaucgugcuccugggcuucaucaugugggccugccagaaggggaacauccgcugcaacaucugcaucuga

SEQ ID NO: 65064 - RNA, 1701 nt, Artificial Sequence; identical to SEQ ID NO: 64664
  derived and/or modified CDS sequence (opt1) from hemagglutinin__InfluenzaA__ABG48115

SEQ ID NO: 65065 - RNA, 1701 nt, Artificial Sequence; identical to SEQ ID NO: 64671
  derived and/or modified CDS sequence (opt1) from hemagglutinin__InfluenzaA__ABG48126

SEQ ID NO: 65066 - RNA, 1701 nt, Artificial Sequence; identical to SEQ ID NO: 64586
  derived and/or modified CDS sequence (opt1) from hemagglutinin__InfluenzaA__ABG48148

SEQ ID NO: 65067 - RNA, 1701 nt, Artificial Sequence; identical to SEQ ID NO: 64586
  derived and/or modified CDS sequence (opt1) from hemagglutinin__InfluenzaA__ABG48159

SEQ ID NO: 65068 - RNA, 1701 nt, Artificial Sequence
  derived and/or modified CDS sequence (opt1) from hemagglutinin__InfluenzaA__ABG48170
augaagaccaucaucgcccugagcuacauccucugccugguguucgcccagaagcugcccggcaacgacaacuccaccgcgacgcucugccuggggcaccacgccgucccgaacggcacccuggugaagaccaucaccaacgaccagaucgaggugacgaacgccaccgagcucguccagagcuccagcaccgggcgcaucugcgacagcccccaccagauccuggacggcgagaacugcacccugaucgacgcccuccugggggacccccacugcgacggcuuccagaacaaggagugggaccuguucguggagcggagcaaggccuacuccaacugcuaccccuacgacgugccggacuacgucagccuccgcucccugguggcgagcuccggcacgcuggaguucaacaacgagagcuucaacuggaccgggguggcccagaacggcaccuccagcgccugcaagcggcgcuccgacaagagcuucuucucccggcucaacuggcugcaccagcugaaguacaaguaccccgcccucaacgucaccaugcccaacaacgagaaguucgacaagcuguacaucuggggcgugcaccaccccgggacggacagcgaccagaucucccuguacgcgcaggccagcgggcgcgugaccgucagcaccaagcggucccagcagaccgugaucccgaacaucggcagccgccccugggugcggggcgucuccagccgcaucuccaucuacuggacgaucgugaagcccggggacauccuccugaucaacagcaccggcaaccugaucgcgccccggggguacuucaagauccgcuccggcaagagcuccaucaugaaguccgacgccccgaucggcaagugcaacuucgagugcaucacccccaacggguccauccccaacggcaagcccuuccagaacgugaaccggaucaccuacggggccugcccgcgcuacgucaagcagaacacgcucaagcuggccaccggcaugcggaacgugcccgagaagcagacccgcgggaucuucggcgccaucgccggcuucaucgagaacgggugggagggcaugauggacgggugguacggcuuccggcaccagaacagcgaggggaccggccaggccgccgaccugaaguccacgcaggcggccaucaaccagaucaacggcaagcucaaccgccugaucgagaagaccaacgagaaguuccaccagaucgagaaggaguucagcgagguggaggggcggauccaggaccuggagaaguacgucgaggacaccaagaucgaccucugguccuacaacgccgagcugcugguggcccucgagaaccagcacaccaucgaccugacggacagcgagaugaacaagcuguucgagcgcaccaagaagcagcuccgggagaacgccgaggacaugggcaacgggugcuucaagaucuaccacaagugcgacaacgcgugcaucggcuccauccgcaacgggaccuacgaccacgacguguaccgcgacgaggcccugaacaaccgguuccagaucaagggcgucgagcucaagagcggcuacaaggacuggauccuguggaucuccuucgccaucagcugcuuccugcugugcaucgugcuccugggguucaucaugugggccugccagaagggcaacauccgcugcaacaucugcaucuga

SEQ ID NO: 65069 - RNA, 1701 nt, Artificial Sequence
  derived and/or modified CDS sequence (opt1) from hemagglutinin__InfluenzaA__ABG48181
augaagaccaucaucgcccugagcuacauccucugccugguguucgcccagaagcugcccggcaacgacaacuccaccgcgacgcucugccuggggcaccacgccgucccgaacggcacccuggugaagaccaucaccaacgaccagaucgaggugacgaacgccaccgagcucguccagagcuccagcaccgggcgcaucugcgacagcccccaccagauccuggacggcgagaacugcacccugaucgacgcccuccugggggacccccacugcgacggcuuccagaacaaggagugggaccuguucguggagcggagcaaggccuacuccaacugcuaccccuacgacgugccggacuacgucagccuccgcucccugguggcgagcuccggcacgcuggaguucaacaacgagagcuucaacuggaccgggguggcccagaacggcaccuccuacgccugcaagcggcgcagcgacaaguccuucuucagccggcucaacuggcugcaccagcugaaguacaaguaccccgcccucaacgucaccaugcccaacaacgagaaguucgacaagcuguacaucuggggcgugcaccaccccgggacggacuccgaccagaucagccuguacgcgcaggccuccgggcgcgugaccgucagcaccaagcggagccagcagaccgugaucccgaacaucggcucccgccccugggugcggggcgucagcucccgcaucagcaucuacuggacgaucgugaagcccggggacauccuccugaucaacuccaccggcaaccugaucgcgccccggggguacuucaagauccgcagcggcaaguccagcaucaugcgguccgacgccccgaucggcaagugcaacagcgagugcaucacccccaacggguccauccccaacgacaagcccuuccagaacgugaaccgcaucaccuacggcgccugcccgcgguacgucaagcagaacacgcucaagcuggccaccgggaugcgcaacgugcccgagaagcagacccggggcaucuucggggccaucgccggcuucaucgagaacggcugggaggggaugauggacggcugguacggguuccgccaccagaacagcgagggcaccgggcaggccgccgaccugaaguccacgcaggcggccaucaaccagaucaacggcaagcucaaccggcugaucgagaagaccaacgagaaguuccaccagaucgagaaggaguucagcgagguggagggccgcauccaggaccuggagaaguacgucgaggacaccaagaucgaccucugguccuacaacgccgagcugcugguggcccucgagaaccagcacaccaucgaccugacggacagcgagaugaacaagcuguucgagcggaccaagaagcagcuccgcgagaacgccgaggacauggggaacggcugcuucaagaucuaccacaagugcgacaacgcgugcaucggguccauccgcaacggcaccuacgaccacgacguguaccgggacgaggcccugaacaaccgcuuccagaucaagggggucgagcugaaguccggcuacaaggacugggugcucuggaucuccuucgccaucagcugcuuccugcugugcaucguccuccugggcuucaucaugugggccugccagaaggggaacauccggugcaacaucugcaucuga

SEQ ID NO: 65070 - RNA, 1701 nt, Artificial Sequence; identical to SEQ ID NO: 64586
  derived and/or modified CDS sequence (opt1) from hemagglutinin__InfluenzaA__ABG48192

SEQ ID NO: 65071 - RNA, 1701 nt, Artificial Sequence
  derived and/or modified CDS sequence (opt1) from hemagglutinin__InfluenzaA__ABG48203
augaagaccaucaucgcccugagcuacauccucugccugguguucgcccagaagcugcccggcaacgacaacuccaccgcgacgcucugccuggggcaccacgccgucccgaacggcaccaucgugaagaccaucaccaacgaccagaucgaggugacgaacgccaccgagcugguccagagcuccagcaccgggggcaucugcgacagcccccaccagauccucgacggggagaacugcacccugaucgacgcccugcucggcgacccccagugcgacggcuuccagaacaagaagugggaccuguucguggagcgcagcaaggccuacuccaacugcuaccccuacgacgugccggaccacgcgagccugcggucccucgucgccagcuccgggacgcuggaguucaacaacgagagcuucgacuggaccggcgugacccagaacgggaccuccagcgccugcaagcgccgguccaacaagagcuucuucucccgccugaacuggcucacgcaccugaaguacaaguaccccgcccugaacgugaccaugcccaacaacgagaaguucgacaagcucuacaucuggggcguccaccaccccgggaccgacagcgaccagaucucccuguacgcgcaggccagcggccggaucaccgugagcacgaagcgcucccagcagaccgugaucccgaacaucggcagccggccccgcguccgggacguguccagccgcaucuccaucuacuggaccaucgugaagcccggggacauccugcucaucaacagcaccggcaaccugaucgcgccccggggguacuucaagauccgcuccggcaagagcuccaucaugcggagcgacgccccgaucggcaagugcaacuccgagugcaucacgcccaacgggagcauccccaacgacaagcccuuccagaacgucaaccgcaucaccuacggcgccugcccgcgguacgugaagcagaacacccugaagcucgccaccgggaugcgcaacgugcccgagaagcagacgcggggcaucuucggggccaucgccggcuucaucgagaacggcugggaggggauggucgacggcugguacggguuccgccaccagaacuccgagggcaccgggcaggccgccgaccugaaguccacccaggcggccaucaaccagaucaacggcaagcugaaccggcucaucggcaagaccaacgagaaguuccaccagaucgagaaggaguucuccgagguggaggggcgcauccaggaccuggagaaguacguggaggacacgaagaucgaccuguggagcuacaacgccgagcuccuggucgcccuggagaaccagcacaccaucgaccucaccgacuccgagaugaacaagcuguucgagcggaccaagaagcagcugcgcgagaacgccgaggacaugggcaacgggugcuucaagaucuaccacaagugcgacaacgcgugcaucggcagcauccgcaacgggacguacgaccacgacguguaccgggacgaggcccucaacaaccgcuuccagaucaagggcguggagcugaaguccggcuacaaggacuggauccuguggaucagcuucgccaucagcugcuuccuccugugcgucgcccugcucggguucaucaugugggccugccagaagggcaacauccggugcaacgugugcaucuga

SEQ ID NO: 65072 - RNA, 1701 nt, Artificial Sequence; identical to SEQ ID NO: 64540
  derived and/or modified CDS sequence (opt1) from hemagglutinin__InfluenzaA__ABG48214

SEQ ID NO: 65073 - RNA, 1701 nt, Artificial Sequence; identical to SEQ ID NO: 64540
  derived and/or modified CDS sequence (opt1) from hemagglutinin__InfluenzaA__ABG48236

SEQ ID NO: 65074 - RNA, 1701 nt, Artificial Sequence
  derived and/or modified CDS sequence (opt1) from hemagglutinin__InfluenzaA__ABG48247
augaagaccaucaucgcccugagcuacauccucugccugguguucgcccagaagcugcccggcaacgacaacaacaccgcgacgcucugccuggggcaccacgccgucccgaacggcaccaucgugaagaccaucaccaacgaccagaucgaggugacgaacgccaccgagcugguccaguccagcuccaccgggggcaucugcgacagcccccaccagauccucgacggggagaacugcacccugaucgacgcccugcucggcgacccccagugcgacggcuuccagaacaagaagugggaccuguucguggagcgcuccaaggccuacagcaacugcuaccccuacgacgugccggaccacgcgucccugcggagccucgucgccuccagcgggacgcuggaguucaacaacgaguccuucgacuggaccggcgugacccagaacgggaccagcuccgccugcaagcgccggagcaacaaguccuucuucagccgccugaacuggcucacgcaccugaaguacaaguaccccgcccugaacgugaccaugcccaacaacgagaaguucgacaagcucuacaucuggggcguccaccaccccgggaccgacuccgaccagaucagccuguacgcgcaggccuccggccggaucaccgugagcacgaagcgcagccagcagaccgugaucccgaacaucggcucccggccccgcguccgggacgugagcucccgcaucagcaucuacuggaccaucgugaagcccggggacauccugcucaucaacuccaccggcaaccugaucgcgccccggggguacuucaagauccgcagcggcaaguccagcaucaugcgguccgacgccccgaucggcaagugcaacagcgagugcaucacgcccaacggguccauccccaacgacaagcccuuccagaacgucaaccgcaucaccuacggcgccugcccgcgguacgugaagcagaacacccugaagcucgccaccgggaugcgcaacgugcccgagaagcagacgcggggcaucuucggggccaucgccggcuucaucgagaacggcugggaggggauggucgacggcugguacggguuccgccaccagaacagcgagggcaccgggcaggccgccgaccugaaguccacccaggcggccaucaaccagaucaacggcaagcugaaccggcucaucggcaagaccaacgagaaguuccaccagaucgagaaggaguucagcgagguggaggggcgcauccaggaccuggagaaguacguggaggacacgaagaucgaccugugguccuacaacgccgagcuccuggucgcccuggagaaccagcacaccaucgaccucaccgacagcgagaugaacaagcuguucgagcggaccaagaagcagcugcgcgagaacgccgaggacaugggcaacgggugcuucaagaucuaccacaagugcgacaacgcgugcaucggcuccauccgcaacgggacguacgaccacgacguguaccgggacgaggcccucaacaaccgcuuccagaucaagggcguggagcucaagagcggcuacaaggacuggauccuguggaucuccuucgccaucagcugcuuccugcugugcgucgcccugcucggguucaucaugugggccugccagaagggcaacauccggugcaacaucugcaucuga

SEQ ID NO: 65075 - RNA, 1701 nt, Artificial Sequence
  derived and/or modified CDS sequence (opt1) from hemagglutinin__InfluenzaA__ABG48269
augaagaccaucaucgcccugagcuacauccucugccugguguucgcccagaagcugcccggcaacgacaacuccaccgcgacgcucugccuggggcaccacgccgucccgaacggcaccaucgugaagaccaucaccaacgaccagaucgaggugacgaacgccaccgagcugguccagagcucccccaccgggggcaucugcgacagcccccaccagauccucgacggggagaacugcacccugaucgacgcccugcucggcgacccccagugcgacggcuuccagaacaagaagugggaccuguucguggagcgcuccaaggcccacagcaacugcuacccguacgacgugcccgacuacgcgucccugcggagccucgucgccuccagcgggacgcuggaguucaacaacgaguccuucaacuggaccggcgugacccagaacgggaccagcuccgccugcaagcgccggagcaacaaguccuucuucagccgccugaacuggcucacgcaccugaaguucaaguaccccgcccugaacgugaccaugcccaacaacgagaaguucgacaagcucuacaucuggggcguccaccacccggggaccgacaacgaccagaucucccuguacgcgcaggccagcggccggaucaccguguccacgaagcgcagccagcagaccgugauccccaacaucggcagccggccccgcguccgggacgugcccucccgcaucagcaucuacuggaccaucgugaagccgggggacauccugcucaucaacuccaccggcaaccugaucgcgccccggggguacuucaagauccgcagcggcaaguccagcaucaugcgguccgacgcccccaucggcaagugcaacagcgagugcaucacgcccaacggguccaucccgaacgacaagcccuuccagaacgucaaccgcaucaccuacggcgccugcccccgguacgugaagcagaacacccugaagcucgccaccgggaugcgcaacgugcccgagaagcagacgcggggcaucuucggggccaucgccggcuucaucgagaacggcugggaggggauggucgacggcugguacggguuccgccaccagaacagcgagggcaccgggcaggccgccgaccugaaguccacccaggcggccaucaaccagaucaacggcaagcugaaccggcucaucggcaagaccaacgagaaguuccaccagaucgagaaggaguucagcgagguggaggggcgcauccaggaccuggagaaguacguggaggacacgaagaucgaccugugguccuacaacgccgagcuccuggucgcccuggagaaccagcacaccaucgaccucaccgacagcgagaugaacaagcuguucgagcggaccaagaagcagcugcgcgagaacgccgaggacaugggcaacgggugcuucaagaucuaccacaagugcgacaacgcgugcaucggcuccauccgcaacgggacguacgaccacgacguguaccgggacgaggcccucaacaaccgcuuccagaucaagggcguggagcucaagagcggcuacaaggacuggauccuguggaucuccuucgccaucagcugcuuccugcugugcgucgcccugcucggguucaucaugugggccugccagaagggcaacauccggugcaacaucugcaucuga

SEQ ID NO: 65076 - RNA, 1701 nt, Artificial Sequence
  derived and/or modified CDS sequence (opt1) from hemagglutinin__InfluenzaA__ABG48291
augaagaccaucaucgcccugagcuacauccucugccugguguucgcccagaagcugcccggcaacgacaacuccaccgcgacgcucugccuggggcaccacgccgucccgaacggcacccuggugaagaccaucaccaacgaccagaucgaggugacgaacgccaccgagcucguccagagcuccagcaccgggcgcaucugcgacagcccccaccggauccuggacggcaagaacugcacccugaucgacgcccuccugggggacccccacugcgacggcuuccagaacaaggagugggaccuguucguggagcgcagcaaggccuacuccaacugcuaccccuacgacgugccggacuacgcgagccuccggucccuggucgccagcuccggcacgcuggaguucaucaacgaggacuucaacuggaccgggguggcccaggacggcgggagcuacgccugcaagcgcggcuccgugaacagcuucuucucccggcucaacuggcugcacaagagcgaguacaaguaccccgcgcugaacgucuccaugcccaacaacgggaaguucaacaagcucuacaucuggggcgugcaccaccccagcaccgacuccgaccagaccagccuguacgugcgcgccagcggccgggucacgguguccaccaagcgcagccagcagaccgugaccccgaacaucgggucccggcccuggguccgcggccugagcucccggaucagcaucuacuggacgaucgugaagcccggggacauccuccugaucaacuccaccggcaaccugaucgcgccccgcggcuacuucaagauccggaacggcaagagcuccaucaugcgcagcgacgccccgaucgggaccugcuccuucgagugcaucacccccaacgggagcauccccaacgacaagcccuuccagaacgugaaccggaucacguacggcgccugcccgcgcuacgucaagcagaacacccucaagcuggccaccgggaugcggaacgugcccgagaagcagacccgcggcaucuucggcgccaucgccggguucaucgagaacggcugggaggggaugguggacggcugguacggguuccggcaccagaacuccgagggcacgggccaggccgccgaccugaaguccacccaggcggccaucgaccagaucaacgggaagcucaaccgccugaucgagaagaccaacgagaaguuccaccagaucgagaaggaguucuccgaggucgagggccggauccaggaccuggagaaguacguggaggacaccaagaucgaccucuggagcuacaacgccgagcugcugguggcccucgagaaccagcacacgaucgaccugaccgacuccgagaugaacaagcuguucgagaagacccgcaagcagcuccgcgagaacgccgaggacauggggaacggcugcuucaagaucuaccacaagugcgacaacgcgugcaucgggagcauccggaacggcaccuacgaccacgacgucuaccgcgacgaggcccugaacaaccgguuccagaucaagggcguggagcugaaguccggguacaaggacuggauccucuggaucagcuucgccaucagcugcuuccugcugugcgucgugcuccugggcuucaucaugugggccugccagaaggggaacauccgcugcaacaucugcaucuga

SEQ ID NO: 65077 - RNA, 1701 nt, Artificial Sequence
  derived and/or modified CDS sequence (opt1) from hemagglutinin__InfluenzaA__ABG48335
augaagaccaucaucgcccugagcuacauccucugccugguguucgcccagaagcugcccggcaacgacaacuccaccgcgacgcucugccuggggcaccacgccgucccgaacggcacccuggugaagaccaucaccaacgaccagaucgaggugacgaacgccaccgagcucguccagagcuccagcaccgggcgcaucugcgacagcccccaccggauccuggacggcaagaacugcacccugaucgacgcccuccugggggacccccacugcgacggcuuccagaacaaggagugggaccuguucguggagcgcuccaaggccuacuccaacugcuaccccuacgacgugccggacuacgcgagccuccggucccuggucgccagcuccggcacgcuggaguucaucaacgaggacuucaacuggaccgggguggcccaggacggcaagagcuacgccugcaagcgcggguccgugaacagcuucuucucccggcucaacuggcugcacaagcuggaguacaaguaccccgcgcucaacgucaccaugcccaacaacggcaaguucgacaagcuguacaucuggggcgugcaccaccccagcaccgacuccgaccagacgagccuguacgugcgcgccuccgggcgggucaccgugagcaccaagcgcagccagcagaccgugaucccgaacaucggcucccggcccuggguccgcgggcucagcucccggaucagcaucuacuggacgaucgugaagcccggcgacauccugcugaucaacuccaccgggaaccucaucgcgccccgcggcuacuucaagauccggaacggcaagagcuccaucaugcgcagcgacgccccgaucgggaacugcuccagcgagugcaucacccccaacggcuccauccccaacgacaagcccuuccagaacgugaaccggaucaccuacggggccugcccgcgcuacgucaagcagaacacgcugaagcuggccaccggcaugcggaacgugcccgagaagcagacccgcgggaucuucggcgccaucgccggcuucaucgagaacgggugggagggcaugguggacgggugguacggcuuccggcaccagaacagcgaggggaccggccaggccgccgaccucaaguccacgcaggcggccaucgaccagaucaacggcaagcugaaccgccugaucgagaagaccaacgagaaguuccaccagaucgagaaggaguucagcgaggucgaggggcggauccaggaccucgagaaguacguggaggacaccaagaucgaccugugguccuacaacgccgagcugcucguggcccuggagaaccagcacaccaucgaccugacggacagcgagaugaacaagcuguucgagcgcacccgcaagcagcuccgggagaacgccgaggacaugggcaacgggugcuucaagaucuaccacaagugcgacaacgcgugcaucggcuccauccgcaacgggaccuacgaccacgacgucuaccgggacgaggcccugaacaaccgcuuccagaucaagggcguggagcucaagagcggcuacaaggacuggauccuguggaucuccuucgccaucagcugcuuccugcucugcgucgugcugcugggguucaucaugugggccugccagaagggcaacauccggugcaacaucugcaucuga

SEQ ID NO: 65078 - RNA, 1701 nt, Artificial Sequence
  derived and/or modified CDS sequence (opt1) from hemagglutinin__InfluenzaA__ABG48346
augaagaccaucaucgcccugagcuacauccucugccugguguucgcccagaagcugcccggcaacgacaacuccaccgcgacgcucugccuggggcaccacgccgucccgaacggcacccuggugaagaccaucaccaacgaccagaucgaggugacgaacgccaccgagcucguccagagcuccagcaccgggcgcaucugcgacagcccccaccggauccuggacggcaagaacugcacccugaucgacgcccuccugggggacccccacugcgacggcuuccagaacaaggagugggaccuguucguggagcgcaacaaggccuacuccaacugcuaccccuacgacgugccggacuacgcgucccuccggagccuggucgccuccagcggcacgcuggaguucaucaacgaggacuucaacuggaccgggguggcccaggacggcaaguccuacgccugcaagcgcgggagcgugaacuccuucuucagccggcucaacuggcugcacaagcuggaguacaaguaccccgcgcucaacgucaccaugcccaacaacggcaaguucgacaagcuguacaucuggggcgugcaccaccccuccaccgacagcgaccagacgucccuguacgugcgcgccagcgggcgggucaccguguccaccaagcgcagccagcagaccgugaucccgaacaucggcagccggcccuggguccgcgggcucuccagccggaucuccaucuacuggacgaucgugaagcccggcgacauccugcugaucaacagcaccgggaaccucaucgcgccccgcggcuacuucaagauccggaacggcaaguccagcaucaugcgcuccgacgccccgaucgggaacugcagcuccgagugcaucacccccaacggcagcauccccaacgaccggcccuuccagaacgugaaccgcaucaccuacggggccugcccgcgguacgucaagcagaacacgcugaagcuggccaccggcaugcgcaacgugcccgagaagcagacccgggggaucuucggcgccaucgccggcuucaucgagaacgggugggagggcaugguggacgggugguacggcuuccgccaccagaacuccgaggggaccggccaggccgccgaccucaagagcacgcaggcggccaucgaccagaucaacggcaagcugaaccggcugaucgagaagaccaacgagaaguuccaccagaucgagaaggaguucuccgaggucgaggggcgcauccaggaccucgagaaguacguggaggacaccaagaucgaccuguggagcuacaacgccgagcugcucguggcccuggagaaccagcacaccaucgaccugacggacuccgagaugaacaagcuguucgagcgcacccggaagcagcuccgcgagaacgccgaggacaugggcaacgggugcuucaagaucuaccacaagugcgacaacgcgugcaucggcagcauccggaacgggaccuacgaccacgacgucuaccgcgacgaggcccugaacaaccgguuccagaucaagggcguggagcucaaguccggcuacaaggacuggauccuguggaucagcuucgccaucuccugcuuccugcucugcgucgugcugcugggguucaucaugugggccugccagaagggcaacauccgcugcaacaucugcaucuga

SEQ ID NO: 65079 - RNA, 1701 nt, Artificial Sequence; identical to SEQ ID NO: 65077
  derived and/or modified CDS sequence (opt1) from hemagglutinin__InfluenzaA__ABG48357

SEQ ID NO: 65080 - RNA, 1701 nt, Artificial Sequence
  derived and/or modified CDS sequence (opt1) from hemagglutinin__InfluenzaA__ABG48368
augaagaccaucaucgcccugagcuacauccucugccugguguucgcccagaagcugcccggcaacgacaacuccaccgcgacgcucugccuggggcaccacgccgucccgaacggcacccuggugaagaccaucaccaacgaccagaucgaggugacgaacgccaccgagcucguccagagcuccagcaccgggcgcaucugcgacagcccccaccggauccuggacggcaagaacugcacccugaucgacgcccuccugggggacccccacugcgacggcuuccagaacaaggagugggaccuguucguggagcgcuccaaggccuacuccaacugcuaccccuacgacgugccggacuacgcgagccuccggucccuggucgccagcuccggcacgcuggaguucaucaacgaggacuucaacuggaccgggguggcccaggacggcaagagcuacgccugcaagcgcggguccgugaacagcuucuucucccggcucaacuggcugcacaagcuggaguacaaguaccccgcgcucaacgucaccaugcccaacaacggcaaguucgacaagcuguacaucuggggcgugcaccaccccagcaccgacuccgaccagacgagccuguacgugcgcgccuccgggcgggucaccgugagcaccaagcgcagccagcagaccgugaucccgaacaucggcucccggcccuggguccgcgggcucagcucccggaucagcaucuacuggacgaucgugaagcccggcgacauccugcugaucaacuccaccgggaaccucaucgcgccccgcggcuacuucaagauccggaacggcaagagcuccaucaugcgcagcgacgccccgaucgggaacugcuccagcgagugcaucacccccaacggcuccauccccaacgacaagcccuuccagaacgugaaccggaucaccuacggggccugcccgcgcuacgucaagcagaacacgcugaagcuggccaccggcaugcggaacgugcccgagaagcagacccgcgggaucuucggcgccaucgccggcuucaucgagaacgggugggagggcaugguggacgggugguacggcuuccggcaccagaacagcgaggggaccggccaggccgccgaccucaaguccacgcaggcggccaucgaccagaucaacggcaagcugaaccgccugaucgagaagaccaacgagaaguuccaccagaucgagaaggaguucagcgaggucgaggggcggauccaggaccucgagaaguacguggaggacaccaagaucgaccugugguccuacaacgccgagcugcucguggcccuggagaaccagcacaccaucgaccugacggacagcgagaugaacaagcuguucgagcgcacccgcaagcagcuccgggagaacgccgaggacaugggcaacgggugcuucaaggucuaccacaagugcgacaacgcgugcaucgaguccauccgcaacggcaccuacgaccacgacguguaccgggacgaggcccugaacaaccgcuuccagaucaagggggucgagcucaagagcggcuacaaggacuggauccuguggaucuccuucgccaucagcugcuuccugcucugcguggugcugcugggcuucaucaugugggccugccagaaggggaacauccggugcaacaucugcaucuga

SEQ ID NO: 65081 - RNA, 1701 nt, Artificial Sequence; identical to SEQ ID NO: 64931
  derived and/or modified CDS sequence (opt1) from hemagglutinin__InfluenzaA__ABG67135

SEQ ID NO: 65082 - RNA, 1701 nt, Artificial Sequence; identical to SEQ ID NO: 64807
  derived and/or modified CDS sequence (opt1) from hemagglutinin__InfluenzaA__ABG67146

SEQ ID NO: 65083 - RNA, 1701 nt, Artificial Sequence
  derived and/or modified CDS sequence (opt1) from hemagglutinin__InfluenzaA__ABG67157
augaagaccaucaucgcccugagcuacauccucugccugguguucgcccagaagcugcccggcaacgacaacuccaccgcgacgcucugccuggggcaccacgccgucccgaacggcacccuggugaagaccaucaccaacgaccagaucgaggugacgaacgccaccgagcucguccagagcucccccaccgggcgcaucugcaacagcccccaccggaucaucgacggcaagaacugcacccugaucgacgcccugcucggggacccccacugcgacggcuuccagaacaaggagugggaccuguucguggagcgcuccaaggccuacagcaacugcuacccguacgacgugcccgacuacgcgucccugcggagccucgucgccuccagcggcacgcuggaguucaucaacgagaacuucaacuggaccgggguggcccaggacggcaaguccuacgccugcaagcgcgggagcgugaacuccuucuucagccggcugaacuggcuccacaagcuggaguacaaguaccccgcgcugaacgucaccaugcccaacaacggcaaguucgacaagcucuacaucuggggcgugcaccacccguccaccgacagcgaccagacgucccuguacgugcgcgccagcgggcgggucaccguguccaccaagcgcagccagcagaccgugauccccgacaucggcuaccggcccuggguccgcgggcugagcucccggaucagcaucuacuggacgaucgugaagcccggcgacauccuccugaucaacuccaccgggaaccugaucgccccgcgcggcuacuucaagcuccggaacggcaagagcuccaucaugcgcagcgacgcccccaucgggaacugcuccagcgagugcaucacccccaacggcuccauccccaacgacaagccguuccagaacgugaaccggaucaccuacggggccugcccccgcuacaucaagcagaacacgcugaagcuggcgaccggcaugcggaacguccccgagaagcagacccgcgggaucuucggcgccaucgccggcuucaucgagaacgggugggagggcaugguggacgggugguacggcuuccggcaccagaacagcgaggggaccggccaggccgccgaccucaaguccacgcaggcggccaucgaccagaucaacggcaagcugaaccgccugguggagaagaccaacgagaaguuccaccagaucgagaaggaguucagcgaggucgaggggcggauccaggaccucgagaaguacguggaggacaccaagaucgaccugugguccuacaacgccgagcugcucguggcccuggagaaccagcacaccaucgaccugacggacagcgagaugaacaagcuguucgagcgcaccaagaagcagcuccgcgagaacgccgaggacaugggcaacgggugcuucaagaucuaccacaagugcgacaacgcgugcaucggcuccauccggaacgggaccuacgaccacgacgucuaccgcgacgaggcccugaacaaccgguuccagaucaagggcguggagcucaagagcggcuacaaggacuggauccuguggaucuccuucgccaucagcugcuuccugcucugcgucgugcugcugggguucaucaugugggccugccagaagggcaacauccgcugcaacaucugcaucuga

SEQ ID NO: 65084 - RNA, 1701 nt, Artificial Sequence; identical to SEQ ID NO: 65008
  derived and/or modified CDS sequence (opt1) from hemagglutinin__InfluenzaA__ABG67168

SEQ ID NO: 65085 - RNA, 1701 nt, Artificial Sequence; identical to SEQ ID NO: 65008
  derived and/or modified CDS sequence (opt1) from hemagglutinin__InfluenzaA__ABG67179

SEQ ID NO: 65086 - RNA, 1701 nt, Artificial Sequence
  derived and/or modified CDS sequence (opt1) from hemagglutinin__InfluenzaA__ABG67190
augaagaccaucaucgcccugagcuacauccucugccugguguucgcccagaagcugcccggcaacgacaacuccaccgcgacgcucugccuggggcaccacgccgucccgaacggcacccuggugaagaccaucaccaacgaccagaucgaggugacgaacgccaccgagcucguccagagcuuccccaccgggcgcaucugcgacagcccccaccggauccuggacggcaagaacugcacccugaucgacgcccuccugggggacccccacugcgacggcuuccagaacaaggagugggaccuguucguggagcgcuccaaggccuacuccaacugcuacccguacgacgugcccgacuacgcgagccuccggucccuggucgccagcuccggcacgcuggaguucaccaacgagaacuucaacuggaccgggguggcccaggacggcaagagcuacgccugcaagcgcggguccgugaacagcuucuucucccggcucaacuggcugcacaagcuggaguacaaguaccccgcgcucaacgucaccaugcccaacaacggcaaguucgacaagcuguacaucuggggcgugcaccacccgagcacggacuccgaccagaccagccuguacgugcgcgccuccgggaaggucaccgugagcaccaagcggucccagcagacggugauccccgacaucggcuaccgccccuggguccgggggcucagcagccgcaucuccaucuacuggaccaucgugaagcccggcgacauccugcugaucaacagcaccgggaaccucaucgccccgcggggcuacuucaagauccgcaacggcaaguccagcaucaugcgguccgacgcccccaucgggaacugcagcuccgagugcaucacccccaacggcagcauccccaacgacaagccguuccagaacgugaaccgcaucacguacggggccugcccccgguacgucaagcagaacacccugaagcuggcgaccggcaugcgcaacgugcccgagaagcagacccgggggaucuucggcgccaucgccggcuucaucgagaacgggugggagggcaugguggacgggugguacggcuuccgccaccagaacuccgaggggacgggccaggccgccgaccucaagagcacccaggcggccaucgaccagaucaacggcaagcugaaccggcuggucgagaagaccaacgagaaguuccaccagaucgagaaggaguucuccgagguggaggggcgcauccaggaccucgagaaguacguggaggacaccaagaucgaccuguggagcuacaacgccgagcugcucgucgcccuggagaaccagcacacgaucgaccugaccgacuccgagaugaacaagcuguucgagcggacccgcaagcagcuccgcgagaacgccgaggacaugggcaacgggugcuucaagaucuaccacaagugcgacaacgcgugcaucggcagcauccggaacgggaccuacgaccacgacguguaccgcgacgaggcccugaacaaccgguuccagaucaagggcgucgagcucaaguccggcuacaaggacuggauccuguggaucagcuucgccaucuccugcuuccugcucugcguggugcugcugggguucaucaugugggccugccagaagggcaacauccgcugcaacaucugcaucuga

SEQ ID NO: 65087 - RNA, 1701 nt, Artificial Sequence
  derived and/or modified CDS sequence (opt1) from hemagglutinin__InfluenzaA__ABG67212
augaagaccaucaucgcccugagcuacauccucugccugguguucgcccagaagcugcccggcaacgacaacuccaccgcgacgcucugccuggggcaccacgccgucccgaacggcacccuggugaagaccaucaccaacgaccagaucgaggugacgaacgccaccgagcucguccagagcuccagcaccgggcgcaucugcgacagcccccaccggauccuggacggcaagaacugcacccugaucgacgcccuccugggggacccccacugcgacggcuuccagaacaaggagugggaccuguucguggagcgcuccaaggccuacuccaacugcuaccccuacgacgugccggacuacgcgagccuccggucccuggucgccagcuccggcacgcuggaguucaucaacgaggacuucaacuggaccgggguggcccaggacggcaagagcuacgccugcaagcgcggguccgugaacagcuucuucucccggcucaacuggcugcacaagcuggaguaccgcuaccccgcgcucaacgucaccaugcccaacaacggcaaguucgacaagcuguacaucuggggcgugcaccaccccagcaccgacuccgaccagacgagccuguacgugcgggccuccgggcgcgucaccgugagcaccaagcggagccagcagaccgugaucccgaacaucggcuuccgccccuggguccgggggcucuccagccgcaucuccaucuacuggacgaucgugaagcccggcgacauccugcugaucaacagcaccgggaaccucaucgcgccccggggcuacuucaagauccgcaacggcaaguccagcaucaugcgguccgacgccccgaucgggaacugcagcuccgagugcaucacccccaacggcagcauccccaacgacaagcccuuccagaacgugaaccgcaucaccuacggggccugcccgcgguacgucaagcagaacacgcugaagcuggccaccggcaugcgcaacgugcccgagaagcagacccgggggaucuucggcgccaucgccggcuucaucgagaacgggugggagggcaugguggacgggugguacggcuuccgccaccagaacuccgaggggaccggccaggccgccgaccucaagagcacgcaggcggccaucgaccagaucaacggcaagcugaaccggcugaucgagaagaccaacgagaaguuccaccagaucgagaaggaguucuccgaggucgaggggcgcauccaggaccucgagaaguacguggaggacaccaagaucgaccuguggagcuacaacgccggccugcucguggcccuggagaaccagcacaccaucgaccugacggacuccgagaugaacaagcuguucgagcgcacccggaagcagcuccgcgagaacgccgaggacauggggaacggcugcuucaagaucuaccacaagugcgacaacgcgugcaucgggagcauccggaacggcaccuacgaccacgacgucuaccgcgacgaggcccugaacaaccgguuccagaucaagggcguggagcucaaguccggguacaaggacuggauccuguggaucagcuucgccaucuccugcuuccugcucugcgucgugcugcugggcuucaucaugugggccugccagaaggggaacauccgcugcaacaucugcaucuga

SEQ ID NO: 65088 - RNA, 1701 nt, Artificial Sequence; identical to SEQ ID NO: 65048
  derived and/or modified CDS sequence (opt1) from hemagglutinin__InfluenzaA__ABG67223

SEQ ID NO: 65089 - RNA, 1701 nt, Artificial Sequence
  derived and/or modified CDS sequence (opt1) from hemagglutinin__InfluenzaA__ABG67234
augaagaccaucaucgcccugagcuacauccucugccugguguucgcccagaagcugcccggcgacgacaacuccaccgcgacgcucugccuggggcaccacgccgucccgaacggcacccuggugaagaccaucaccaacgaccagaucgaggugacgaacgccaccgagcucguccagagcuccagcaccgggcgcaucugcgacagcccccaccggauccuggacggcaagaacugcacccugaucgacgcccuccugggggacccccacugcgacggcuuccagaacaaggagugggaccuguucguggagcgcuccaaggccuacuccaacugcuaccccuacgacgugccggacuacgcgagccuccggucccuggucgccagcuccggcacgcuggaguucaucaacgaggacuucaacuggaccgggguggcccaggacggcaagagcuacgccugcaagcgcggguccgugaacagcuucuucucccggcucaacuggcugcacaagcuggaguacaaguaccccgcgcucaacgucaccaugcccaacaacggcaaguucgacaagcuguacaucuggggcgugcaccaccccagcaccgacuccgaccagacgagccuguacgugcgcgccuccgggcgggucaccgugagcaccaagcgcagccagcagaccgugaucccgaacaucggcuuccggcccuggguccgcgggcucuccagccggaucuccaucuacuggacgaucguggagcccggcgacauccugcugaucaacagcaccgggaaccucaucgcgccccgcggcuacuucaagauccggaacggcaaguccagcaucaugcgcuccgacgccccgaucgggaacugcagcuccgagugcaucacccccaacggcagcauccccaacgacaagcccuuccagaacgugaaccggaucaccuacggggccugcccgcgcuacgucaagcagaacacgcugaagcuggccaccggcaugcggaacgugcccgagaagcagacccgcgggaucuucggcgccaucgccggcuucaucgagaacgggugggagggcaugguggacgggugguacggcuuccggcaccagaacuccgaggggaccggccaggccgccgaccucaagagcacgcaggcggccaucgaccagaucaacggcaagcugaaccgccugaucgagaagaccaacgagaaguuccaccagaucgagaaggaguucuccgaggucgaggggcggauccaggaccucgagaaguacguggaggacaccaagaucgaccuguggagcuacaacgccggccugcucguggcccuggagaaccagcacaccaucgaccugacggacuccgagaugaacaagcuguucgagcgcacccgcaagcagcuccgggagaacgccgaggacauggggaacggcugcuucaagaucuaccacaagugcgacaacgcgugcaucgggagcauccgcaacggcaccuacgaccacgacgucuaccgggacgaggcccugaacaaccgcuuccagaucaagggcguggagcucaaguccggguacaaggacuggauccuguggaucagcuucgccaucuccugcuuccugcucugcgucgugcugcugggcuucaucaugugggccugccagaaggggaacauccggugcaacaucugcaucuga

SEQ ID NO: 65090 - RNA, 1701 nt, Artificial Sequence
  derived and/or modified CDS sequence (opt1) from hemagglutinin__InfluenzaA__ABG67245
augaagaccaucaucgcccugagcuacauccucugccugguguucgcccagaagcugcccggcaacgacaacuccaccgcgacgcucugccuggggcaccacgccgucccgaacggcacccuggugaagaccaucaccaacgaccagaucgaggugacgaacgccaccgagcucguccagagcuccagcaccgggcgcaucugcgacagcccccaccggauccuggacggcaagaacugcacccugaucgacgcccuccugggggacccccacugcgacggcuuccagaacaaggagugggaccuguucguggagcgcuccaaggccuacuccaacugcuaccccuacgacgugccggacuacgcgagccuccggucccuggucgccagcuccggcacgcuggaguucaucaacgaggacuucaacuggaccgggguggcccaggacggcaagagcuacgccugcaagcgcggguccgugaacagcuucuucucccggcucaacuggcugcacaagcuggaguacaaguaccccgcgcucaacgucaccaugcccaacaacggcaaguucgacaagcuguacaucuggggcgugcaccaccccagcaccgacuccgaccagacgagccuguacgugcgcgccuccgggcgggucaccgugagcaccaagcgcagccagcagaccgugaucccgaacaucggcuuccggcccuggguccgcgggcucuccagccggaucuccaucuacuggacgaucgugaagcccggcgacauccugcugaucaacagcaccgggaaccucaucgcgccccgcggcuacuucaagauccggaacggcaaguccagcaucaugcgcuccgacgccccgaucgggaacugcagcuccgagugcaucacccccaacggcagcauccccaacgacaagcccuuccagaacgugaaccggaucaccuacggggccugcccgcgcuacgucaagcagaacacgcugaagcuggccaccggcaugcggaacgugcccgagaagcagacccgcgggaucuucggcgccaucgccggcuucaucgagaacgggugggagggcaugguggacgggugguacggcuuccggcaccagaacuccgaggggaccggccaggccgccgaccucaagagcacgcaggcggccaucgaccagaucgacggcaagcugaaccgccugaucgagaagaccaacgagaaguuccaccagaucgagaaggaguucuccgaggucgaggggcggauccaggaccucgagaaguacguggaggacaccaagaucgaccuguggagcuacaacgccggccugcucguggcccuggagaaccagcacaccaucgaccugacggacuccgagaugaacaagcuguucgagcgcacccgcaagcagcuccgggagaacgccgaggacauggggaacggcugcuucaagaucuaccacaagugcgacaacgcgugcaucgggagcauccgcaacggcaccuacgaccacgacgucuaccgggacgaggcccugaacaaccgcuuccagaucaagggcguggagcucaaguccggguacaaggacuggauccuguggaucagcuucgccaucuccugcuuccugcucugcgucgugcugcugggcuucaucaugugggccugccagaaggggaacauccggugcaacaucugcaucuga

SEQ ID NO: 65091 - RNA, 1698 nt, Artificial Sequence; identical to SEQ ID NO: 64766
  derived and/or modified CDS sequence (opt1) from hemagglutinin__InfluenzaA__ABG67477

SEQ ID NO: 65092 - RNA, 1698 nt, Artificial Sequence; identical to SEQ ID NO: 64824
  derived and/or modified CDS sequence (opt1) from hemagglutinin__InfluenzaA__ABG67491

SEQ ID NO: 65093 - RNA, 1701 nt, Artificial Sequence
  derived and/or modified CDS sequence (opt1) from hemagglutinin__InfluenzaA__ABG67502
augaagaccaucaucgcccugagcuacauccucugccugguguucgcccagaagcugcccggcaacgacaacuccaccgcgacgcucugccuggggcaccacgccgucccgaacggcacccuggugaagaccaucaccaacgaccagaucgaggugacgaacgccaccgagcucguccagagcuccagcaccgggcgcaucugcgacagcccccaccagauccuggacggcgagaacugcacccugaucgacgcccuccugggggacccccacugcgacggcuuccagaacaaggagugggaccuguucguggagcggagcaaggccuacuccaacugcuaccccuacgacgugagcgacuacgucucccuccgcagccugguggcguccagcggcacgcuggaguucaacaacgaguccuucaacuggaccgggguggcccagaacggcaccagcuccgccugcaagcggcgcagcgacaaguccuucuucagccggcucaacuggcugcaccagcugaaguacaaguacccggcccucaacgucaccaugcccaacaacgagaaguucgacaagcuguacaucuggggcgugcaccaccccgggacggacuccgaccagaucagccuguacgcgcaggccagcgggcgcgugaccgucuccaccaagcggagccagcagaccgugauccccaacaucggcucccgcccgugggugcggggcaucagcucccgcaucagcaucuacuggacgaucgucaagcccggggacauccuccugaucaacuccaccggcaaccugaucgcgccccggggguacuucaagauccgcagcggcaaguccagcaucaugcgguccgacgcccccaucggcaagugcaacagcgagugcaucaccccgaacggguccauccccaacgacaagcccuuccagaacgugaaccgcaucaccuacggccccugcccgcgguacgugaagcagaacacgcucaagcuggccaccgggaugcgcaacguccccgagaagcagacccggggcaucuucggggccaucgccggcuucaucgagaacggcugggaggggaugauggacggcugguacggguuccgccaccagaacagcgagggcaccgggcaggccgccgaccugaaguccacgcaggccgcgaucaaccagaucaacggcaagcucaaccggcugaucgagaagaccaacgagaaguuccaccagaucgagaaggaguucagcgagguggagggccgcauccaggaccuggagaaguacguggaggacaccaagaucgaccucugguccuacaacgccgagcugcuggucgcccucgagaaccagcacaccaucgaccugacggacagcgagaugaacaagcuguucgagcggaccaagaagcagcuccgcgagaacgccgaggacauggggaacggcugcuucaagaucuaccacaagugcgacaacgccugcaucggguccauccgcaacggcaccuacgaccacgacguguaccgggacgaggcgcugaacaaccgcuuccagaucaaggggguggagcugaaguccggcuacaaggacuggauccucuggaucagcuucgccaucuccugcuuccugcugugcaucguccuccugggcuucaucaugugggccugccagaaggggaacauccggugcaacaucugcaucuga

SEQ ID NO: 65094 - RNA, 1701 nt, Artificial Sequence
  derived and/or modified CDS sequence (opt1) from hemagglutinin__InfluenzaA__ABG67524
augaagaccaucaucgcccugagcuacauccucugccugguguucgcccagaagcugcccggcaacgacaacuccaccgcgacgcucugccuggggcaccacgccgucccgaacggcacccuggugaagaccaucaccaacgaccagaucgaggugacgaacgccaccgagcucguccagagcuccagcaccgggcgcaucugcgacagcccccaccagauccuggacggcgagaacugcacccugaucgacgcccuccugggggacccccacugcgacggcuuccagaacaaggagugggaccuguucguggagcggagccgcgccuacuccaacugcuaccccuacgacgugccggacuacgucagccuccggucccugguggcgagcuccggcacgcuggaguucaacaacgagagcuucaacuggaccgggguggcccagaacggcaccuccagcgccugcaagcgccgguccgacaagagcuucuucucccgccucaacuggcugcaccagcugaaguacaaguaccccgcccucaacgucaccaugcccaacaacgagaaguucgacaagcuguacaucuggggcgugcaccaccccgggacggacagcgaccagaucucccuguacgcgcaggccagcgggcgggugaccgucagcaccaagcgcucccagcagaccgugaucccgaacaucggcagccggcccugggugcgcggcgucuccagccggaucuccaucuacuggacgaucgugaagcccggggacauccuccugaucaacagcaccggcaaccugaucgcgccccgcggguacuucaagauccgguccggcaagagcuccaucaugcgcagcgacgccccgaucggcaagugcaacuccgagugcaucacccccaacgggagcauccccaacgacaagcccuuccagaacgugaaccggaucaccuacggcccgugcccccgcuacgucaagcagaacacgcucaagcuggccaccgggaugcggaacgugcccgagaagcagacccgcggcaucuucggggccaucgccggcuucaucgagaacggcugggaggggaugauggacggcugguacggguuccggcaccagaacuccgagggcaccgggcaggccgccgaccugaaguccacgcaggccgcggugaaccagaucaacggcaagcucaaccgccugaucgagaagaccaacgagaaguuccaccagaucgagaaggaguucuccgaggucgagggccggauccaggaccuggagaaguacguggaggacaccaagaucgaccucuggagcuacaacgccgagcugcugguggcccucgagaaccagcacaccaucgaccugacggacuccgagaugaacaagcuguucgagcgcaccaagaagcagcuccgcgagaacgccgaggacauggggaacggcugcuucaagaucuaccacaagugcgacaacgccugcaucgggagcauccggaacggcaccuacgaccacgacgucuaccgcgacgaggcgcugaacaaccgguuccagaucaaggggguggagcugaaguccggcuacaaggacuggauccucuggaucagcuucgccaucagcugcuuccugcugugcaucguccuccugggcuucaucaugugggccugccagaaggggaacauccgcugcaacaucugcaucuga

SEQ ID NO: 65095 - RNA, 1701 nt, Artificial Sequence; identical to SEQ ID NO: 64586
  derived and/or modified CDS sequence (opt1) from hemagglutinin__InfluenzaA__ABG67535

SEQ ID NO: 65096 - RNA, 1701 nt, Artificial Sequence; identical to SEQ ID NO: 64540
  derived and/or modified CDS sequence (opt1) from hemagglutinin__InfluenzaA__ABG67546

SEQ ID NO: 65097 - RNA, 1701 nt, Artificial Sequence
  derived and/or modified CDS sequence (opt1) from hemagglutinin__InfluenzaA__ABG67557
augaagaccaucaucgcccugagcuacauccucugccugguguucgcccagaagcugcccggcaacgacaacuccaccgcgacgcucugccuggggcaccacgccgucccgaacggcaccaucgugaagaccaucaccaacgaccagaucgaggugacgaacgccaccgagcugguccagagcuccagcaccgggggcaucugcgacagcccccaccagauccucgacggggagaacugcacccugaucgacgcccugcucggcgacccccagugcgacggcuuccagaacaagaagugggaccuguucguggagcgcagcaaggccuacuccaacugcuaccccuacgacgugccggaccacgcgagccugcggucccucgucgccagcuccgggacgcuggaguucaacaacgagagcuucgacuggaccggcgugacccagaacgggaccuccagcgccugcaagcgccgguccaacaagagcuucuucucccgccugaacuggcucacgcaccugaaguacaaguaccccgcccugaacgugaccaugcccaacaacgagaaguucgacaagcucuacaucuggggcguccaccaccccgggaccgacagcgaccagaucucccuguacgcgcaggccagcggccggaucaccgugagcacgaagcgcucccagcagaccgugaucccgaacaucggcagccggccccgcguccgggacguguccagccgcaucuccaucuacuggaccaucgugaagcccggggacauccugcucaucaacagcaccggcaaccugaucgcgccccggggguacuucaagauccgcuccggcaagagcuccaucaugcggagcgacgccccgaucggcaagugcaacuccgagugcaucacgcccaacgggagcauccccaacgacaagcccuuccagaacgucaaccgcaucaccuacggcgccugcccgcgguacgugaagcagaacacccugaagcucgccaccgggaugcgcaacgugcccgagaagcagacgcggggcaucuucggggccaucgccggcuucaucgagaacggcugggaggggauggucgacggcugguacggguuccgccaccagaacuccgagggcaccgggcaggccgccgaccugaaguccacccaggcgaccaucaaccagaucaacggcaagcugaaccggcucaucggcaagacgaacgagaaguuccaccagaucgagaaggaguucuccgagguggaggggcgcauccaggaccuggagaaguacguggaggacaccaagaucgaccuguggagcuacaacgccgagcuccuggucgcccuggagaaccagcacaccaucgaccucaccgacuccgagaugaacaagcuguucgagcggacgaagaagcagcugcgcgagaacgccgaggacaugggcaacgggugcuucaagaucuaccacaagugcgacaacgccugcaucggcagcauccgcaacgggaccuacgaccacgacguguaccgggacgaggcgcucaacaaccgcuuccagaucaagggcguggagcugaaguccggcuacaaggacuggauccuguggaucagcuucgccaucagcugcuuccuccugugcgucgcccugcucggguucaucaugugggccugccagaagggcaacauccggugcaacaucugcaucuga

SEQ ID NO: 65098 - RNA, 1701 nt, Artificial Sequence; identical to SEQ ID NO: 64540
  derived and/or modified CDS sequence (opt1) from hemagglutinin__InfluenzaA__ABG67568

SEQ ID NO: 65099 - RNA, 1701 nt, Artificial Sequence; identical to SEQ ID NO: 64540
  derived and/or modified CDS sequence (opt1) from hemagglutinin__InfluenzaA__ABG67579

SEQ ID NO: 65100 - RNA, 1701 nt, Artificial Sequence; identical to SEQ ID NO: 64540
  derived and/or modified CDS sequence (opt1) from hemagglutinin__InfluenzaA__ABG67590

SEQ ID NO: 65101 - RNA, 1701 nt, Artificial Sequence; identical to SEQ ID NO: 64540
  derived and/or modified CDS sequence (opt1) from hemagglutinin__InfluenzaA__ABG67601

SEQ ID NO: 65102 - RNA, 1701 nt, Artificial Sequence; identical to SEQ ID NO: 64540
  derived and/or modified CDS sequence (opt1) from hemagglutinin__InfluenzaA__ABG67612

SEQ ID NO: 65103 - RNA, 1701 nt, Artificial Sequence; identical to SEQ ID NO: 64540
  derived and/or modified CDS sequence (opt1) from hemagglutinin__InfluenzaA__ABG67623

SEQ ID NO: 65104 - RNA, 1701 nt, Artificial Sequence
  derived and/or modified CDS sequence (opt1) from hemagglutinin__InfluenzaA__ABG67634
augaagaccaucaucgcccugagcuacauccucugccugguguucgcccagaagcugcccggcaacgacaacaacaccgcgacgcucugccuggggcaccacgccgucccgaacggcaccaucgugaagaccaucaccaacgaccagaucgaggugacgaacgccaccgagcugguccaguccagcuccaccgggggcaucugcgacagcccccaccagauccucgacggggagaacugcacccugaucgacgcccugcucggcgacccccagugcgacggcuuccagaacaagaagugggaccuguucguggagcgcuccaaggccuacagcaacugcuaccccuacgacgugccggaccacgcgucccugcggagccucgucgccuccagcgggacgcuggaguucaacaacgaguccuucgacuggaccggcgugacccagaacgggaccagcuccgccugcaagcgccggagcaacaaguccuucuucagccgccugaacuggcucacgcaccugaaguacaaguaccccgcccugaacgugaccaugcccaacaacgagaaguucgacaagcucuacaucuggggcguccaccaccccgggaccgacuccgaccagaucagccuguacgcgcaggccuccggccggaucaccgugagcacgaagcgcagccagcagaccgugaucccgaacaucggcucccggccccgcguccgggacgugagcucccgcaucagcaucuacuggaccaucgugaagcccggggacauccugcucaucaacuccaccggcaaccugaucgcgccccggggguacuucaagauccgcagcggcaaguccagcaucaugcgguccgacgccccgaucggcaagugcaacagcgagugcaucacgcccaacggguccauccccaacgacaagcccuuccagaacgucaaccgcaucaccuacggcgccugcccgcgguacgugaagcagaacacccugaagcucgccaccgggaugcgcaacgugcccgagaagcagacgcggggcaucuucggggccaucgccggcuucaucgagaacggcugggaggggauggucgacggcugguacggguuccgccaccagaacagcgagggcaccgggcaggccgccgaccugaaguccacccaggcggccaucaaccagaucaacggcaagcugaaccggcucaucggcaagaccaacgagaaguuccaccagaucgagaaggaguucagcgagguggaggggcgcauccaggaccuggagaaguacguggaggacacgaagaucgaccugugguccuacaacgccgagcuccuggucgcccuggagaaccagcacaccaucgaccucaccgacagcaagaugaacaagcuguucgagcggaccaagaagcagcugcgcgagaacgccgaggacaugggcaacgggugcuucaagaucuaccacaagugcgacaacgcgugcaucggcuccauccgcaacgggacguacgaccacgacguguaccgggacgaggcccucaacaaccgcuuccagaucaagggcguggagcucaagagcggcuacaaggacuggauccuguggaucuccuucgccaucagcugcuuccugcugugcgucgcccugcucggguucaucaugugggccugccagaagggcaacauccggugcaacaucugcaucuga

SEQ ID NO: 65105 - RNA, 1701 nt, Artificial Sequence; identical to SEQ ID NO: 64540
  derived and/or modified CDS sequence (opt1) from hemagglutinin__InfluenzaA__ABG67645

SEQ ID NO: 65106 - RNA, 1701 nt, Artificial Sequence
  derived and/or modified CDS sequence (opt1) from hemagglutinin__InfluenzaA__ABG67656
augaagaccaucaucgcccugagcuacauccucugccugguguucgcccagaagcugcccggcaacgacaacuccaccgcgacgcucugccuggggcaccacgccgucccgaacggcaccaucgugaagaccaucaccaacgaccagaucgaggugacgaacgccaccgagcugguccagagcuccagcaccgggggcaucugcgacagcccccaccagauccucgacggggagaacugcacccugaucgacgcccugcucggcgacccccagugcgacggcuuccagaacaagaagugggaccuguucguggagcgcagcaaggccuacuccaacugcuaccccuacgacgugccggaccacgcgagccugcggucccucgucgccagcuccgggacgcuggaguucaacaacgagagcuucgacugggccggcgugacccagaacgggaccuccagcgccugcaagcgccgguccaacaagagcuucuucucccgccugaacuggcucacccaccugaaguacaaguaccccgcgcugaacgugacgaugcccaacaacgagaaguucgacaagcucuacaucuggggcguccaccaccccgggaccgacagcgaccagaucucccuguacgcccaggccagcggccggaucaccgugagcaccaagcgcucccagcagacggugaucccgaacaucggcagccggccccgcguccgggacguguccagccgcaucuccaucuacuggaccaucgugaagcccggggacauccugcucaucaacagcaccggcaaccugaucgcgccccggggguacuucaagauccgcuccggcaagagcuccaucaugcggagcgacgccccgaucggcaagugcaacuccgagugcaucacccccaacgggagcauccccaacgacaagcccuuccagaacgucaaccgcaucacguacggcgccugcccgcgguacgugaagcagaacacccugaagcucgccaccgggaugcgcaacgugcccgagaagcagacccggggcaucuucggggccaucgccggcuucaucgagaacggcugggaggggauggucgacggcugguacggguuccgccaccagaacuccgagggcacggggcaggccgcggaccugaaguccacccaggccgccaucaaccagaucaacggcaagcugaaccggcucaucggcaagaccaacgagaaguuccaccagaucgagaaggaguucuccgagaucgaggggcgcauccaggaccuggagaaguacguggaggacaccaagaucgaccuguggagcuacaacgccgagcuccugguggcccuggagaaccagcacacgaucgaccucaccgacuccgagaugaacaagcuguucgagcggaccaagaagcagcugcgcgagaacgcggaggacaugggcaacgggugcuucaagaucuaccacaagugcgacaacgccugcaucggcagcauccgcaacgggaccuacgaccacgacgucuaccgggacgaggcccucaacaaccgcuuccagaucaagggcguggagcugaaguccggcuacaaggacuggauccuguggaucagcuucgccaucagcugcuuccuccugugcguggcccugcucggguucaucaugugggcgugccagaagggcaacauccggugcaacaucugcaucuga

SEQ ID NO: 65107 - RNA, 1701 nt, Artificial Sequence
  derived and/or modified CDS sequence (opt1) from hemagglutinin__InfluenzaA__ABG67667
augaagaccaucaucgcccugagcuacauccucugccagguguucgcccagaagcugcccggcaacgacaacuccaccgcgacgcugugccucgggcaccacgccgucccgaacggcacccuggugaagaccaucaccaacgaccagaucgaggugacgaacgccaccgagcugguccagagcuccagcaccgggcgcaucugcgacagcccccaccggauccucgacggcaagaacugcacccugaucgacgcccugcucggggacccccacugcgacggcuuccagaacaaggagugggaccuguucguggagcgcagcaaggccuacuccaacugcuaccccuacgacgugccggacuacgcgagccugcggucccucgucgccagcuccggcacgcuggaguucaccaacgagggguucaacuggaucggcguggcccaggacgggaaguccuacgccugcaagcgcggcuccgugaacagcuucuucucccggcugaacuggcuccacaagcuggaguacaaguaccccgcgcugaacgucaccaugcccaacaacgacaaguucgacaagcucuacaucuggggcgugcaccaccccagcaccgacuccgaccagacgagccuguacgugcaggccuccgggcgcgucaccgugagcaccaagcggagccagcagaccgugaucccgaacaucggcucccgccccuggguccgggggaucagcucccgcaucagcaucuacuggacgaucgugaagcccggcgacauccugcucaucaacuccaccgggaaccugaucgcgccccggggcuacuucaagauccgcaacggcaagagcuccaucaugcggagcgacgccccgaucgacaacugcaacuccgagugcaucacccccaacgggagcauccccaacgacaagcccuuccagaacgugaaccgcaucaccuacggcgccugcccgcgguacgucaagcagaacacgcugaagcucgccaccgggaugcgcaacgugcccgagaagcagacccggggcaucuucggggccaucgccggcuucaucgagaacggcugggaggggaugaucgacggcugguacggguuccgccaccagaacuccgagggcaccgggcaggccgccgaccucaagagcacgcaggcggccaucgaccagaucaacggcaagcugaaccggcugaucgagaagaccaacgagaaguuccaccagaucgagaaggaguucuccgagguggagggccgcauccaggaccuggagaaguacgucgaggacaccaagaucgaccuguggagcuacaacgccgagcuccugguggcccuggagaaccagcacaccaucgaccucacggacuccgagaugaacaagcuguucgagcggacccgcaagcagcugcgcgagaacgccgaggacauggggaacggcugcuucaagaucuaccacaagugcgacaacgcgugcaucgggagcauccggaacggcaccuacgaccacgacguguaccgcgacgaggcccucaacaaccgguuccagaucaagggggucgagcugaaguccggcuacaaggacuggauccuguggaucagcuucgccaucuccugcuuccuccugugcgugguccugcucggcuucaucaugugggccugccagaaggggaacauccgcugcaacaucugcaucuga

SEQ ID NO: 65108 - RNA, 1701 nt, Artificial Sequence
  derived and/or modified CDS sequence (opt1) from hemagglutinin__InfluenzaA__ABG79941
augaagaccaucaucgcccugagcuacauccucugccugguguucgcccagaagcugcccggcaacgacaacuccaccgcgacgcucugccuggggcaccacgccgucccgaacggcacccuggugaagaccaucaccaacgaccagaucgaggugacgaacgccaccgagcucguccagagcuccagcaccgggggcaucugcgacagcccccaccagauccuggacggggagaacugcacccugaucgacgcccuccugggcgacccccacugcgacggcuuccagaacaaggagugggaccuguucguggagcgcagcaaggccuacuccaacugcuaccccuacgacgugccggacuacgcgagccuccggucccuggucgccagcuccgggacgcuggaguucaacaacgagagcuucaacuggaccggcguggcccagaacgggaccuccagcgccugcaagcgccgguccaacaagagcuucuucucccgccucaacuggcugcaccagcugaaguacaaguaccccgcgcucaacgugaccaugcccaacaacgagaaguucgacaagcuguacaucuggggcguccaccaccccagcacggacuccgaccagaucagccuguacgcccaggccccggggcgggugaccgugagcaccaagcgcucccagcagaccgucauccccaacaucggcagccggcccugggugcgcggcguguccagccggaucuccaucuacuggacgaucgucaagcccggggacauccuccugaucaacugcaccggcaaccugaucgccccgcgcggguacuucaagauccggagcggcaaguccagcaucaugcgcuccgacgccagcaucggcaagugcaacuccgagugcaucacccccaacgggagcauccccaacgacaagcccuuccagaacgugaaccggaucaccuacggcgcgugcccgcgcuacgugaagcagaacacgcucaagcuggccaccgggaugcggaacguccccgagaagcagacccgcggcaucuucggggccaucgccggcuucaucgagaacggcugggaggggaugguggacggcugguacggguuccggcaccagaacuccgagggcaccgggcaggccgcggaccugaaguccacgcaggccgccaucaaccagaucaacggcaagcucaaccgccugaucgagaagaccaacgagaaguuccaccagaucgagaaggaguucuccgagguggagggccggauccaggaccuggagaaguacgucgaggacaccaagaucgaccucuggagcuacaacgccgagcugcugguggcccucgagaaccagcacaccaucgaccugacggacuccgagaugaacaagcuguucgagcgcaccaagaagcagcuccgggagaacgcggaggacauggggaacggcugcuucaagaucuaccacaagugcgacaacgccugcaucgggagcauccgcaacggcaccuacgaccacgacguguaccgcgacgaggcccugaacaaccgguuccagaucaagggggucgagcugaaguccggcuacaaggacuggauccucuggaucagcuucgccaucagcugcuuccugcugugcgugguccuccugggcuucaucaugugggccugccagaaggggaacauccgcugcuccaucugcaucuga

SEQ ID NO: 65109 - RNA, 1701 nt, Artificial Sequence; identical to SEQ ID NO: 64945
  derived and/or modified CDS sequence (opt1) from hemagglutinin__InfluenzaA__ABG79952

SEQ ID NO: 65110 - RNA, 1701 nt, Artificial Sequence; identical to SEQ ID NO: 65008
  derived and/or modified CDS sequence (opt1) from hemagglutinin__InfluenzaA__ABG79974

SEQ ID NO: 65111 - RNA, 1701 nt, Artificial Sequence; identical to SEQ ID NO: 65008
  derived and/or modified CDS sequence (opt1) from hemagglutinin__InfluenzaA__ABG79985

SEQ ID NO: 65112 - RNA, 1701 nt, Artificial Sequence
  derived and/or modified CDS sequence (opt1) from hemagglutinin__InfluenzaA__ABG79996
augaagaccaucaucgcccugagcuacauccucugccugguguucgcccagaagcugcccggcaacgacaacuccaccgcgacgcucugccuggggcaccacgccgucccgaacggcacccuggugaagaccaucaccaacgaccagaucgaggugacgaacgccaccgagcucguccagagcucccccaccgggcgcaucugcgacagcccccaccggauccuggacggcaagaacugcacccugaucgacgcccuccugggggacccccacugcgacggcuuccagaacaaggagugggaccuguucguggagcgcuccaaggccuacagcaacugcuacccguacgacgugcccgacuacgcgucccuccggagccuggucgccuccagcggcacgcuggaguucaccaacgagaacuucaacuggaccgggguggcccaggacggcaaguccuacagcugcaagcgcggguccgugaacagcuucuucucccggcucaacuggcugcacaagcuggaguacaaguaccccgcccucaacgucaccaugcccaacaacggcaaguucgacaagcuguacaucuggggcgugcaccacccgagcacggacuccgaccagaccagccuguacgugcgcgcguccgggaaggucaccgugagcaccaagcggagccagcagacggugauccccgacaucggcuaccgccccuggguccgggggcucuccagccgcaucuccaucuacuggaccaucgugaagcccggcgacauccugcugaucaacagcaccgggaaccucaucgccccgcggggcuacuucaagauccgcaacggcaaguccagcaucaugcgguccgacgcccccaucgggaacugcagcuccgagugcaucacccccaacggcagcauccccaacgacaagccguuccagaacgugaaccgcaucacguacggggccugcccccgguacgucaagcagaacacccugaagcuggccaccggcaugcgcaacgugcccgagaagcagacccgggggaucuucggcgcgaucgccggcuucaucgagaacgggugggagggcaugguggacgggugguacggcuuccgccaccagaacuccgaggggacgggccaggccgccgaccucaagagcacccaggccgcgaucgaccagaucaacggcaagcugaaccggcuggucgagaagaccaacgagaaguuccaccagaucgagaaggaguucuccgagguggaggggcgcauccaggaccucgagaaguacguggaggacaccaagaucgaccuguggagcuacaacgccgagcugcucgucgcccuggagaaccagcacacgaucgaccugaccgacuccgagaugaacaagcuguucgagcggacccgcaagcagcuccgcgagaacgccgaggacaugggcaacgggugcuucaagaucuaccacaagugcgacaacgccugcaucggcagcauccggaacgggaccuacgaccacgacguguaccgcgacgaggcgcugaacaaccgguuccagaucaagggcgucgagcucaaguccggcuacaaggacuggauccuguggaucagcuucgccaucuccugcuuccugcucugcguggugcugcugggguucaucaugugggccugccagaagggcaacauccgcugcaacaucugcaucuga

SEQ ID NO: 65113 - RNA, 1701 nt, Artificial Sequence; identical to SEQ ID NO: 65008
  derived and/or modified CDS sequence (opt1) from hemagglutinin__InfluenzaA__ABG80007

SEQ ID NO: 65114 - RNA, 1701 nt, Artificial Sequence; identical to SEQ ID NO: 65008
  derived and/or modified CDS sequence (opt1) from hemagglutinin__InfluenzaA__ABG80018

SEQ ID NO: 65115 - RNA, 1701 nt, Artificial Sequence; identical to SEQ ID NO: 65013
  derived and/or modified CDS sequence (opt1) from hemagglutinin__InfluenzaA__ABG80029

SEQ ID NO: 65116 - RNA, 1701 nt, Artificial Sequence; identical to SEQ ID NO: 65013
  derived and/or modified CDS sequence (opt1) from hemagglutinin__InfluenzaA__ABG80040

SEQ ID NO: 65117 - RNA, 1701 nt, Artificial Sequence; identical to SEQ ID NO: 65008
  derived and/or modified CDS sequence (opt1) from hemagglutinin__InfluenzaA__ABG80051

SEQ ID NO: 65118 - RNA, 1701 nt, Artificial Sequence
  derived and/or modified CDS sequence (opt1) from hemagglutinin__InfluenzaA__ABG80062
augaagaccaucaucgcccugagcuacauccucugccugguguucgcccagaagcugcccggcaacgacaacuccaccgcgacgcucugccuggggcaccacgccgucccgaacggcacccuggugaagaccaucaccaacgaccagaucgaggugacgaacgccaccgagcucguccagagcuccagcaccgggcgcaucugcgacagcccccaccggauccuggacggcaagaacugcacccugaucgacgcccuccugggggacccccacugcgacggcuuccagaacaaggagugggaccuguucguggagcgcagcaaggccuacuccaacugcuaccccuacgacgugccggacuacgcgagccuccggucccuggucgccagcuccggcacgcuggaguucaccaaggagggguucaacuggaccggcguggcccaggacgggaaguccuacgccugcaagcgcggcuccgugaacagcuucuucucccggcucaacuggcugcacaagcuggaguacaaguaccccgcgcucaacgucaccaugcccaacaacgacaaguucgacaagcuguacaucuggggcgugcaccaccccagcacggacuccgaccagaccagccuguacgugcaggccuccgggcgcgucaccgugagcaccaagcggagccagcagacggugaucccgaacaucggcucccgccccuggguccgggggaucagcucccgcaucagcaucuacuggaccaucgugaagcccggcgacauccuccugaucaacuccaccgggaaccugaucgcgccccggggcuacuucaagauccgcaacggcaagagcuccaucaugcggagcgacgccccgaucgggaacugcaacuccgagugcaucacccccaacggcagcauccccaacgacaagcccuuccagaacgugaaccgcaucacguacggggccugcccgcgguacgucaagcagaacacccucaagcuggccaccggcaugcgcaacgugcccgagaagcagacccgggggaucuucggcgccaucgccggcuucaucgagaacgggugggagggcaugguggacgggugguacggcuuccgccaccagaacuccgaggggacgggccaggccgccgaccucaagagcacccaggcggccaucgaccagaucaacggcaagcugaaccggcugaucgagaagaccaacgagaaguuccaccagaucgagaaggaguucuccgaggucgaggggcgcauccaggaccuggagaaguacguggaggacaccaagaucgaccucuggagcuacaacgccgagcugcugguggcccucgagaaccagcacacgaucgaccugaccgacuccgagaugaacaagcuguucgagcggacccgcaagcagcuccgcgagaacgccgaggacaugggcaacgggugcuucaagaucuaccacaagugcgacaacgcgugcaucggcagcauccggaacgggaccuacgaccacgacgucuaccgcgacgaggcccugaacaaccgguuccagaucaagggcguggagcugaagacgggcuacaaggacuggauccucuggaucuccuucgccaucagcugcuuccugcugugcgucgugcuccugggguucaucaugugggccugccagaagggcaacauccgcugcaacaucugcaucuga

SEQ ID NO: 65119 - RNA, 1701 nt, Artificial Sequence
  derived and/or modified CDS sequence (opt1) from hemagglutinin__InfluenzaA__ABG80073
augaagaccaucaucgcccugagcuacauccucugccugguguucgcccagaagcugcccggcaacgacaacuccaccgcgacgcucugccuggggcaccacgccgucccgaacggcacccuggugaagaccaucaccaacgaccagaucgaggugacgaacgccaccgagcucguccagagcuccagcaccgggcgcaucugcgacagcccccaccggauccuggacggcaagaacugcacccugaucgacgcccuccugggggaccccaacugcgacggcuuccagaacaaggagugggaccuguucguggagcgcagcaaggccuacuccaacugcuaccccuacgacgugccggacuacgcgagccuccggucccuggucgccagcuccggcacgcuggaguucaccaacgaggacuucaacuggaccgggguggcccaggacggcgggagcuacgccugcaagcgcggcuccgugaacagcuucuucucccggcucaacuggcugcacaagcuggaguacaaguaccccgcgcucaacgucaccaugcccaacaacgggaaguucgacaagcuguacaucuggggcgugcaccaccccagcacggacuccgaccagaccagccuguacgugcgcgccuccggccgggucaccgugagcaccaagcgcagccagcagacggugaccccgaacaucgggucccggcccuggguccgcggccucagcucccggaucagcaucuacuggaccaucgugaagcccggggacauccugcugaucaacuccaccggcaaccucaucgcgccccgcggcuacuucaagauccggaacgggaaguccuccaucaugcgcagcgacgccccgaucggcacgugcuccagcgagugcaucacccccaacggguccauccccaacgacaagcccuuccagaacgugaaccggaucaccuacggcgccugcccgcgcuacgucaagcagaacacccugaagcuggccacggggaugcggaacgugcccgagaagcagacccgcggcaucuucggcgccaucgccggguucaucgagaacggcugggaggggaugguggacggcugguacggguuccggcaccagaacagcgagggcaccggccaggccgccgaccucaaguccacccaggcggccaucgaccagaucaacgggaagcugaaccgccugaucgagaagacgaacgagaaguuccaccagaucgagaaggaguucagcgaggucgagggccggauccaggaccucgagaaguacguggaggacaccaagaucgaccugugguccuacaacgccgagcugcucguggcccuggagaaccagcacaccaucgaccugaccgacagcgagaugaacaagcuguucgagaagacgcgcaagcagcuccgcgagaacgccgaggacauggggaacggcugcuucaagaucuaccacaagugcgacaacgcgugcaucggguccauccggaacggcaccuacgaccacgacgucuaccgcgacgaggcccugaacaaccgguuccagaucaagggcguggagcucaagagcggguacaaggacuggauccuguggaucuccuucgccaucagcugcuuccugcucugcgucgugcugcugggcuucaucaugugggccugccagaaggggaacauccgcugcaacaucugcaucuga

SEQ ID NO: 65120 - RNA, 1701 nt, Artificial Sequence
  derived and/or modified CDS sequence (opt1) from hemagglutinin__InfluenzaA__ABG80084
augaagaccaucaucgcccugagcuacauccucugccugguguucgcccagaagcugcccggcaacgacaacuccaccgcgacgcucugccuggggcaccacgccgucccgaacggcacccuggugaagaccaucaccaacgaccagaucgaggugacgaacgccaccgagcucguccagagcuccagcaccgggcgcaucugcgacagcccccaccggauccuggacggcaagaacugcacccugaucgacgcccuccugggggacccccacugcgacggcuuccagaacaaggagugggaccuguucguggagcgcuccaaggccuacuccaacugcuaccccuacgacgugccggacuacgcgagccuccggucccuggucgccagcuccggcacgcuggaguucaucaacgaggacuucaacuggaccgggguggcccaggacggcaagagcuacgccugcaagcgcggguccgugaacagcuucuucucccggcucaacuggcugcacaagcuggaguacaaguaccccgcgcucaacgucaccaugcccaacaacggcaaguucgacaagcuguacaucuggggcgugcaccaccccagcaccgacuccgaccagacgagccuguacgugcgcgccuccgggcgggucaccgugagcaccaagcgcagccagcagaccgugaucccgaacaucggcuuccggcccuggguccgcgggcucuccagcggcaucuccaucuacuggacgaucgugaagcccggggacauccugcugaucaacagcaccggcaaccucaucgcgccccggggcuacuucaagauccgcaacgggaaguccagcaucaugcgguccgacgccccgaucggcaacugcagcuccgagugcaucacccccaacgggagcauccccaacgacaagcccuuccagaacgugaaccgcaucaccuacggcgccugcccgcgguacgucaagcagaacacgcugaagcuggccaccgggaugcgcaacgugcccgagaagcagacccggggcaucuucggcgccaucgccggguucaucgagaacggcugggaggggaugguggacggcugguacggguuccgccaccagaacuccgagggcaccggccaggccgccgaccucaagagcacgcaggcggccaucgaccagaucaacgggaagcugaaccggcugaucgagaagaccaacgagaaguuccaccagaucgagaaggaguucuccgaggucgagggccgcauccaggaccucgagaaguacguggaggacaccaagaucgaccuguggagcuacaacgccgggcugcucguggcccuggagaaccagcacaccaucgaccugacggacuccgagaugaacaagcuguucgagcggacccgcaagcagcuccgcgagaacgccgaggacaugggcaacgggugcuucaagaucuaccacaagugcgacaacgcgugcaucggcagcauccggaacggcaccuacgaccacgacaucuaccgcgacgaggcccugaacaaccgguuccagaucaagggggucgagcucaaguccggcuacaaggacuggauccuguggaucagcuucgccaucuccugcuuccugcucugcgugguccugcugggguucaucaugugggccugccagaagggcaacauccgcugcaacaucugcaucuga

SEQ ID NO: 65121 - RNA, 1701 nt, Artificial Sequence
  derived and/or modified CDS sequence (opt1) from hemagglutinin__InfluenzaA__ABG80095
augaagaccaucaucgcccugagcuacauccucugccugguguucgcccagaagcugcccggcaacgacaacuccaccgcgacgcucugccuggggcaccacgccgucccgaacggcacccuggugaagaccaucaccaacgaccagaucgaggugacgaacgccaccgagcucguccagagcuccagcaccgggcgcaucugcgacagcccccaccggauccuggacggcaagaacugcacccugaucgacgcccuccugggggacccccacugcgacggcuuccagaacaaggagugggaccuguucguggagcgcuccaaggccuacuccaacugcuaccccuacgacgugccggacuacgcgagccuccggucccuggucgccagcuccggcacgcuggaguucaucaacgaggacuucaacuggaccgggguggcccaggacggcaagagcuacgccugcaagcgcggguccgugaacagcuucuucucccggcucaacuggcugcacaagcuggaguacaaguaccccgcgcucaacgucaccaugcccaacaacggcaagguggacaagcuguacaucuggggcgugcaccaccccagcaccgacuccgaccagacgagccuguacguccgcgccuccgggcgggugaccgugagcaccaagcgcagccagcagaccgucaucccgaacaucggcuuccggcccugggugcgcgggcucuccagccggaucuccaucuacuggacgaucgugaagcccggcgacauccugcugaucaacagcaccgggaaccucaucgcgccccgcggcuacuucaagauccggaacggcaaguccagcaucaugcgcuccgacgccccgaucgggaacugcagcuccgagugcaucacccccaacggcagcauccccaacgacaagcccuuccagaacgucaaccggaucaccuacggggccugcccgcgcuacgugaagcagaacacgcugaagcuggccaccggcaugcggaacgugcccgagaagcagacccgcgggaucuucggcgccaucgccggcuucaucgagaacgggugggagggcauggucgacgggugguacggcuuccggcaccagaacuccgaggggaccggccaggccgccgaccucaagagcacgcaggcggccaucgaccagaucaacggcaagcugaaccgccugaucgagaagaccaacgagaaguuccaccagaucgagaaggaguucuccgagguggaggggcggauccaggaccucgagaaguacguggaggacaccaagaucgaccuguggagcuacaacgccggccugcucgucgcccuggagaaccagcacaccaucgaccugacggacuccgagaugaacaagcuguucgagcgcacccgcaagcagcuccgggagaacgccgaggacauggggaacggcugcuucaagaucuaccacaagugcgacaacgcgugcaucgggagcauccgcaacggcaccuacgaccacgacguguaccgggacgaggcccugaacaaccgcuuccagaucaagggcgucgagcucaaguccggguacaaggacuggauccuguggaucagcuucgccaucuccugcuuccugcucugcguggugcugcugggcuucaucaugugggccugccagaaggggaacauccggugcaacaucugcaucuga

SEQ ID NO: 65122 - RNA, 1701 nt, Artificial Sequence; identical to SEQ ID NO: 65048
  derived and/or modified CDS sequence (opt1) from hemagglutinin__InfluenzaA__ABG80106

SEQ ID NO: 65123 - RNA, 1701 nt, Artificial Sequence
  derived and/or modified CDS sequence (opt1) from hemagglutinin__InfluenzaA__ABG80117
augaagaccaucaucgcccugagcuacauccucugccugguguucgcccagaagcugcccggcaacgacaacuccaccgcgacgcucugccuggggcaccacgccgucccgaacggcacccuggugaagaccaucaccaacgaccagaucgaggugacgaacgccaccgagcucguccagagcuccagcaccgggcgcaucugcgacagcccccaccggauccuggacggcaagaacugcacccugaucgacgcccuccugggggacccccacugcgacggcuuccagaacaaggagugggaccuguucguggagcgcuccaaggccuacuccaacugcuaccccuacgacgugccggacuacgcgagccuccggucccuggucgccagcuccggcacgcuggaguucaucaacgaggacuucaacuggaccgggguggcccaggacggcaagagcuacgccugcaagcgcggguccgugaacagcuucuucucccggcucaacuggcugcacaagcuggaguacaaguaccccgcgcucaacgucaccaugcccaacaacggcaaguucgacaagcuguacaucuggggcgugcaccaccccagcaccgacuccgaccagacgagccuguacgugcgcgccuccgggcgggucaccgugagcaccaagcgcagccagcagaccgugaucccgaacaucggcuuccggcccuggguccgcgggcucuccagccggaucuccaucuacuggacgaucgugaagcccggcgacauccugcugaucaacagcaccgggaaccucaucgcgccccgcggcuacuucaagauccggaacggcaaguccagcaucaugcgcuccgacgccccgaucgggaacugcagcuccgagugcaucacccccaacggcagcauccccaacgacaagcccuuccagaacgugaaccggaucaccuacggggccugcccgcgcuacgucaagcagaacacgcugaagcuggccaccggcaugcggaacgugcccgugaagcagacccgcgggaucuucggcgccaucgccggcuucaucgagaacgggugggagggcauggucgacgggugguacggcuuccggcaccagaacuccgaggggaccggccaggccgccgaccucaagagcacgcaggcggccaucgaccagaucaacggcaagcugaaccgccugaucgagaagaccaacgagaaguuccaccagaucgagaaggaguucuccgagguggaggggcggauccaggaccucgagaaguacguggaggacaccaagaucgaccuguggagcuacaacgccggccugcucgucgcccuggagaaccagcacaccaucgaccugacggacuccgagaugaacaagcuguucgagcgcacccgcaagcagcuccgggagaacgccgaggacauggggaacggcugcuucaagaucuaccacaagugcgacaacgcgugcaucgggagcauccgcaacggcaccuacgaccacgacguguaccgggacgaggcccugaacaaccgcuuccagaucaagggcgucgagcucaaguccggguacaaggacuggauccuguggaucagcuucgccaucuccugcuuccugcucugcguggugcugcugggcuucaucaugugggccugccagaaggggaacauccggugcaacaucugcaucuga

SEQ ID NO: 65124 - RNA, 1701 nt, Artificial Sequence
  derived and/or modified CDS sequence (opt1) from hemagglutinin__InfluenzaA__ABG80128
augaagaccaucaucgcccugagcuacauccucugccugguguucgcccagaagcugcccggcaacgacaacuccaccgcgacgcucugccuggggcaccacgccgucccgaacggcacccuggugaagaccaucaccaacgaccgcaucgaggugacgaacgccaccgagcucguccagagcuccagcaccgggcggaucugcgacagcccccaccgcauccuggacggcaagaacugcacccugaucgacgcccuccugggggacccccacugcgacggcuuccagaacaaggagugggaccuguucguggagcgguccaaggccuacuccaacugcuaccccuacgacgugccggacuacgcgagccuccgcucccuggucgccagcuccggcacgcuggaguucaucaacgaggacuucaacuggaccgggguggcccaggacggcaagagcuacgccugcaagcggggguccgugaacagcuucuucucccgccucaacuggcugcacaagcuggaguacaaguaccccgcgcucaacgucaccaugcccaacaacggcaaguucgacaagcuguacaucuggggcgugcaccaccccagcaccgacuccgaccagacgagccuguacgugcgggccuccgggcgcgucaccgugagcaccaagcggagccagcagaccgugaucccgaacaucggcuuccgccccuggguccgggggcucuccagccgcaucuccaucuacuggacgaucgugaagcccggcgacauccugcugaucaacagcaccgggaaccucaucgcgccccggggcuacuucaagauccgcaacggcaaguccagcaucaugcgguccgacgccccgaucgggaacugcagcuccgagugcaucacccccaacggcagcauccccaacgacaagcccuuccagaacgugaaccgcaucaccuacggggccugcccgcgguacgucaagcagaacacgcugaagcuggccaccggcaugcgcaacgugcccgagaagcagacccgggggaucuucggcgccaucgccggcuucaucgagaacgggugggagggcaugguggacgggugguacggcuuccgccaccagaacuccgaggggaccggccaggccgccgaccucaagagcacgcaggcggccaucgaccagaucaacggcaagcugaaccggcugaucgagaagaccaacgagaaguuccaccagaucgagaaggaguucuccgaggucgaggggcgcauccaggaccucgagaaguacguggaggacaccaagaucgaccuguggagcuacaacgccggccugcucguggcccuggagaaccagcacaccaucgaccugacggacuccgagaugaacaagcuguucgagcgcacccggaagcagcuccgcgagaacgccgaggacauggggaacggcugcuucaagaucuaccacaagugcgacaacgcgugcaucgggagcauccggaacggcaccuacgaccacgacgucuaccgcgacgaggcccugaacaaccgguuccagaucaagggcguggagcucaaguccggguacaaggacuggauccuguggaucagcuucgccaucuccugcuuccugcucugcgucgugcugcugggcuucaucaugugggccugccagaaggggaacauccgcugcaacaucugcaucuga

SEQ ID NO: 65125 - RNA, 1701 nt, Artificial Sequence
  derived and/or modified CDS sequence (opt1) from hemagglutinin__InfluenzaA__ABG80139
augaagaccaucaucgcccugagcuacauccucugccugguguucgcccagaagcugcccggcaacgacaacuccaccgcgacccucugccuggggcaccacgccgucccgaacggcacccuggugaagaccaucaccaacgaccagaucgaggugacgaacgccaccgagcucguccagagcuccagcaccgggcgcaucugcgacagcccccaccggauccuggacggcaagaacugcacccugaucgacgcccuccugggggacccccacugcgacggcuuccagaacaaggagugggaccuguucguggagcgcuccaaggccuacuccaacugcuaccccuacgacgugccggacuacgcgagccuccggucccuggucgccagcuccggcacgcuggaguucaucaacgaggacuucaacuggaccgggguggcccaggacggcaagagcuacgccugcaagcgcggguccgugaacagcuucuucucccggcucaacuggcugcacaagcuggaguacaaguaccccgcgcucaacgucaccaugcccaacaacggcaaguucgacaagcuguacaucuggggcgugcaccaccccagcaccgacuccgaccagacgagccuguacgugcgcgccuccgggcgggucaccgugagcaccaagcgcagccagcagaccgugaucccgaacaucggcuuccggcccuggguccgcgggcucuccagccggaucuccaucuacuggacgaucgugaagcccggcgacauccugcugaucaacagcaccgggaaccucaucgcgccccgcggcuacuucaagauccggaacggcaaguccagcaucaugcgcuccgacgccccgaucgggaacugcagcuacgagugcaucacccccaacggcuccauccccaacgacaagcccuuccagaacgugaaccggaucaccuacggggccugcccgcgcuacgucaagcagaacacgcugaagcuggccaccggcaugcggaacgugcccgagaagcagacccgcgggaucuucggcgccaucgccggcuucaucgagaacgggugggagggcaugguggacgggugguacggcuuccggcaccagaacagcgaggggaccggccaggccgccgaccucaaguccacgcaggcggccaucgaccagaucaacggcaagcugaaccgccugaucgagaagaccaacgagaaguuccaccagaucgagaaggaguucagcgaggucgaggggcggauccaggaccucgagaaguacguggaggacaccaagaucgaccugugguccuacaacgccggccugcucguggcccuggagaaccagcacaccaucgaccugacggacagcgagaugaacaagcuguucgagcgcacccgcaagcagcuccgggagaacgccgaggacauggggaacggcugcuucaagaucuaccacaagugcgacaacacgugcaucggguccauccgcaacggcaccuacgaccacgacgucuaccgggacgaggcgcugaacaaccgcuuccagaucaagggcguggagcucaagagcggguacaaggacuggauccuguggaucuccuucgccaucagcugcuuccugcucugcgucgugcugcugggcuucaucaugugggccugccagaaggggaacauccggugcaacaucugcaucuga

SEQ ID NO: 65126 - RNA, 1701 nt, Artificial Sequence
  derived and/or modified CDS sequence (opt1) from hemagglutinin__InfluenzaA__ABG80150
augaagaccaucaucgcccugagcuacauccucugccugguguucgcccagaagcugcccggcaacgacaacuccaccgcgacgcucugccuggggcaccacgccgucccgaacggcacccuggugaagaccaucaccaacgaccagaucgaggugacgaacgccaccgagcucguccagagcuccagcaccgggcgcaucugcgacagcccccaccggauccuggacggcaagaacugcacccugaucgacgcccuccugggggacccccacugcgacggcuuccagaacaaggagugggaccuguucguggagcgcuccaaggccuacuccaacugcuaccccuacgacgugccggacuacgcgagccuccggucccuggucgccagcuccggcacgcuggaguucaucaacgagaacuucaacuggaccgggguggcccaggacggcaagagcuacgccugcaagcgcggguccgugaacagcuucuucucccggcucaacuggcugcacaagcuggaguacaaguaccccgcgcucaacgucaccaugcccaacaacggcaaguucgacaagcuguacaucuggggcgugcaccaccccagcaccgacuccgaccagacgagccuguacgugcgcgccuccgggcgggucaccgugagcaccaagcgcagccagcagaccgugaucccgaacaucggcuuccggcccuggguccgcgggcucuccagcggcaucuccaucuacuggacgaucgugaagcccggggacauccugcugaucaacagcaccggcaaccucaucgcgccccggggcuacuucaagauccgcaacgggaaguccagcaucaugcgguccgacgccccgaucggcaacugcagcuccgagugcaucacccccaacgggagcauccccaacgacaagcccuuccagaacgugaaccgcaucaccuacggcgccugcccgcgguacgucaagcagaacacgcugaagcuggccaccgggaugcgcaacgugcccgagaagcagacccggggcaucuucggcgccaucgccggguucaucgagaacggcugggaggggaugguggacggcugguacggguuccgccaccagaacuccgagggcaccggccaggccgccgaccucaagagcacgcaggcggccaucgaccagaucaacgggaagcugaaccggcugaucgagaagaccaacgagaaguuccaccagaucgagaaggaguucuccgaggucgagggccgcauccaggaccucgagaaguacguggaggacaccaagaucgaccuguggagcuacaacgccgggcugcucguggcccuggagaaccagcacaccaucgaccugacggacuccgagaugaacaagcuguucgagcggacccgcaagcagcuccgcgagaacgccgaggacaugggcaacgggugcuucaagaucuaccacaagugcgacaacgcgugcaucggcagcauccggaacggcaccuacgaccacgacgucuaccgcgacgaggcccugaacaaccgguuccagaucaaggggguggagcucaaguccggcuacaaggacuggauccuguggaucagcuucgccaucuccugcuuccugcucugcgucgugcugcugggguucaucaugugggccugccagaagggcaacauccgcugcaacaucugcaucuga

SEQ ID NO: 65127 - RNA, 1701 nt, Artificial Sequence
  derived and/or modified CDS sequence (opt1) from hemagglutinin__InfluenzaA__ABG80161
augaagaccaucaucgcccugagcuacaucuccugccucguguucgcccagaagcugcccggcaacgacaacagcaccgcgacgcugugccucgggcaccacgccgucccgaacggcacccuggugaagaccaucaccaacgaccagaucgaggugacgaacgccaccgagcugguccaguccagcuccaccgggcgcaucugcgacagcccccaccggauccucgacggcaagaacugcacccugaucgacgcccugcucggggacccccacugcgacggcuuccagaacaaggagugggaccuguucguggagcgcuccaaggccuacagcaacugcuaccccuacgacgugccggacuacgcgucccugcggagccucgucgccuccagcggcacgcuggaguucaucaacgaggacuucaacuggaccgggguggcccaggacggcaaguccuacgccugcaagcgcgggagcgugaacuccuucuucagccggcugaacuggcuccacaagcuggaguacaaguaccccgcgcugaacgucaccaugcccaacaacggcaaguucgacaagcucuacaucuggggcgugcaccaccccuccaccgacagcgaccagacgucccuguacgugcaggccagcgggcgcgucaccgugagcaccaagcggucccagcagaccgugaucccgaacaucggcuuccgccccuggguccgggggcugagcucccgcaucagcaucuacuggacgaucgugaagcccggcgacauccuccugaucaacuccaccgggaaccugaucgcgccccggggcuacuucaagauccgcaacggcaagagcuccaucaugcggagcgacgccccgaucgggaacugcuccagcgagugcaucacccccaacggcuccauccccaacgacaagcccuuccagaacgugaaccgcaucaccuacggggccugcccgcgguacgucaagcagaacacgcucaagcuggccaccggcaugcgcaacgugcccgagaagcagacccgggggaucuucggcgccaucgccggcuucaucgagaacgggugggagggcaugguggacgggugguacggcuuccgccaccagaacagcgaggggaccggccaggccgccgaccugaaguccacgcaggcggccaucgaccagaucaacggcaagcucaaccggcugaucgagaagaccaacgagaaguuccaccagaucgagaaggaguucagcgaggucgaggggcgcauccaggaccuggagaaguacguggaggacaccaagaucgaccucugguccuacaacgccggccugcugguggcccucgagaaccagcacaccaucgaccugacggacagcgagaugaacaagcuguucgagcggacccgcaagcagcuccgcgagaacgccgaggacauggggaacggcugcuucaagaucuaccacaagugcgacaacgcgugcaucggguccauccggaacggcaccuacgaccacgacgucuaccgcgacgaggcccugaacaaccgguuccagaucaagggcguggagcucaagagcggguacaaggacuggauccuguggaucuccuucgccaucagcugcuuccugcugugcgucgugcuccugggcuucaucaugugggccugccagaaggggaacauccgcugcaacaucugcaucuga

SEQ ID NO: 65128 - RNA, 1698 nt, Artificial Sequence
  derived and/or modified CDS sequence (opt1) from hemagglutinin__InfluenzaA__ABG80172
augaaggugaagcugcucguccugcugugcaccuucaccgccacguacgccgacaccaucugcaucggcuaccacgcgaacaacagcaccgacaccguggacacggugcucgagaagaacgucaccgugacccacuccgugaaccugcuggaggacagccacaacgggaagcucugccugcugaagggcaucgcgccccuccagcuggggaacugcuccgucgccggcuggauccuggggaacccggagugcgagcuccugaucagcaaggaguccuggagcuacaucguggagacccccaaccccgagaacggcacgugcuaccccggcuacuucgccgacuacgaggagcugcgcgagcagcucuccagcguguccagcuucgagcgguucgagaucuucccgaaggaguccagcuggcccaaccacaccgucaccgggguguccgccagcugcucccacaacggcaagagcuccuucuaccgcaaccugcuguggcucaccgggaagaacggccuguaccccaaccugagcaaguccuacgccaacaacaaggagaaggaggugcucguccuguggggcgugcaccacccgcccaacaucggggaccagcgggcccuguaccacacggagaacgccuacgugagcgucgugagcucccacuacagccgccgguucacccccgagaucgccaagcgccccaaggugcgggaccaggagggccgcaucaacuacuacuggacccuccuggagcccggggacaccaucaucuucgaggcgaacggcaaccugaucgccccgcgguacgccuucgcccucucccgcggguucggcagcggcaucaucacguccaacgcccccauggacgagugcgacgcgaagugccagacgccccagggggccaucaacagcucccugcccuuccagaacguccacccggugaccaucggcgagugccccaaguacgugcggagcgccaagcugcgcauggucaccgggcuccggaacauccccuccauccagagccgcggccuguucggggccaucgccggcuucaucgagggcggguggaccggcaugguggacgggugguacggcuaccaccaccagaacgagcagggguccggcuacgcggccgaccagaaguccacccagaacgccaucaacggcaucaccaacaaggugaacagcgucaucgagaagaugaacacccaguucacggccguggggaaggaguucaacaagcuggagcggcgcauggagaaccucaacaagaaggucgacgacggcuuccuggacaucuggaccuacaacgccgagcugcucgugcugcuggagaacgagcggacccucgacuuccacaacagcaacgugaagaaccuguacgagaaggucaagucccagcugaagaacaacgcgaaggagaucgggaacggcugcuucgaguucuaccacaagugcaacaacgagugcauggagagcgugaagaacgggaccuacgacuaccccaaguacuccgaggagagcaagcucaaccgcgagaagaucgacggcgugaagcuggaguccaugggcgucuaccagauccuggccaucuacagcacgguggccagcucccucgugcugcuggucagccucggggccaucuccuucuggaugugcagcaacggcucccugcagugccggaucugcaucuga

SEQ ID NO: 65129 - RNA, 1698 nt, Artificial Sequence
  derived and/or modified CDS sequence (opt1) from hemagglutinin__InfluenzaA__ABG80183
augaaggugaagcugcucguccugcugugcaccuucaccgccacguacgccgacaccaucugcaucggcuaccacgcgaacaacagcaccgacaccguggacacggugcucgagaagaacgucaccgugacccacuccgugaaccugcuggaggacagccacaacgggaagcucugccugcugaagggcaucgcgccccuccagcuggggaacugcuccgucgccggcuggauccuggggaacccggagugcgagcuccugaucagcaaggaguccuggagcuacaucguggagacccccaaccccgagaacggcacgugcuaccccggcuacuucgccgacuacgaggagcugcgcgagcagcucuccagcguguccagcuucgagcgguucgagaucuucccgaaggaguccagcuggcccaaccacaccgucaccgggguguccgccagcugcucccacaacggcaagagcuccuucuaccgcaaccugcuguggcucaccgggaagaacggccuguaccccaaccugagcaaguccuacgccaacaacaaggagaaggaggugcucguccuguggggcgugcaccacccgcccaacaucgggggccagcgggcccuguaccacacggagaacgccuacgugagcgucgugagcucccacuacagccgccgguucacccccgagaucgccaagcgccccaaggugcgggaccaggaggggcgcaucaacuacuacuggacccuccuggagcccggcgacaccaucaucuucgaggcgaacgggaaccugaucgccccgcgguacgccuucgcccucucccgcggcuucggcagcgggaucaucacguccaacgcccccauggacgagugcgacgcgaagugccagacgccccagggcgccaucaacagcucccugcccuuccagaacguccacccggugaccaucggggagugccccaaguacgugcggagcgccaagcugcgcauggucaccggccuccggaacauccccuccauccagagccgcgggcuguucggcgccaucgccggcuucaucgagggcggguggaccgggaugguggacggcugguacggguaccaccaccagaacgagcagggcuccggcuacgcggccgaccagaaguccacccagaacgccaucaacgggaucaccaacaaggugaacagcgucaucgagaagaugaacacccaguucacggccgugggcaaggaguucaacaagcuggagcggcgcauggagaaccucaacaagaaggucgacgacggguuccuggacaucuggaccuacaacgccgagcugcucgugcugcuggagaacgagcggacccucgacuuccacgacagcaacgugaagaaccuguacgagaaggucaagucccagcugaagaacaacgcgaaggagaucggcaacgggugcuucgaguucuaccacaagugcaacaacgagugcauggagagcgugaagaacggcaccuacgacuaccccaaguacuccgaggagagcaagcucaaccgcgagaagaucgacggcgugaagcuggaguccaugggggucuaccagauccuggccaucuacagcacgguggccagcucccucgugcugcuggucagccucggcgccaucuccuucuggaugugcagcaacgggucccugcagugccggaucugcaucuga

SEQ ID NO: 65130 - RNA, 1701 nt, Artificial Sequence
  derived and/or modified CDS sequence (opt1) from hemagglutinin__InfluenzaA__ABG80194
augaagaccaucaucgcccugagcuacauccucugccugguguucgcccagaagcugcccgucaacgacaacuccaccgcgacgcucugccugggccaccacgccgugccgaacgggacccuggugaagaccaucaccaacgaccacaucgaggucacgaacgccaccgagcucgugcagagcuccagcaccggccgcaucugcgacagcccccaccagauccuggacggggagaacugcacccugaucgacgcccuccugggcgacccccacugcgacggguuccagaacaaggaguggaaccuguucguggagcggagcacggccuacuccaacugcuaccccuacgacgucccggacuacgcgagccuccgcucccugguggccagcuccggcacccuggaguucaacaacgagagcuucaacuggaccggcguggcccagaacgggaccuccagcgccugcaagcggcgcuccaucaagagcuucuucucccggcucaacuggcugcaccagcugaaguacaaguaccccgcgcucaacgucacgaugcccaacaacgagaaguucgacaagcuguacaucuggggcgugcaccaccccagcaccgacuccgaccagaucagccuguacgcccaggccagcgggcgcgugaccgucuccaccaagcggagccagcagacggugaucccgaacaucggcucccgccccugggugcgcggggucagcuccaucaucagcaucuacuggaccaucgugaagcccggcgacauccuccugaucaacuccaccggcaaccugaucgcgccccggggguacuucaagauccggagcggcaaguccagcaucaugcgcuccaacgccccgaucgggaagugcaacagcgagugcaucacccccaacggcuccauccccaacgacaagcccuuccagaacgugaaccggaucacguacggcgccugcccgcgcuacgucaagcagaacacccucaagcuggccaccgggaugcggaacgugcccgagaagcagacccgcggcaucuucggggccaucgccggcuucaucgagaacgggugggagggcaugguggacggcugguacggguuccggcaccagaacagcgagggcacggggcaggccgcggaccugaaguccacccaggccgccaucaaccagaucaacggcaagcucaaccgccugaucgagaagaccaacgagaaguuccaccagaucgagaaggaguucagcgaggucgaggggcggauccaggaccuggagaaguacguggaggacaccaagaucgaccucugguccuacaacgccgagcugcugguggcccucgagaaccagcacacgaucgaccugaccgacagcgagaugaacaagcuguucgagcgcacccggaagcagcuccgcgagaacgcggaggacaugggcaacggcugcuucaagaucuaccacaagugcgacaacgccugcaucggguccauccgcaacggcaccuacgaccacgacgucuaccgggacgaggcccugaacaaccgcuuccagaucaaggggguggagcugaaguccggcuacaaggacuggauccucuggaucagcuucgccaucuccugcuuccugcugugcgucgugcuccugggguucaucaugugggccugccagaagggcaacauccggugcaacaucugcaucuga

SEQ ID NO: 65131 - RNA, 1701 nt, Artificial Sequence
  derived and/or modified CDS sequence (opt1) from hemagglutinin__InfluenzaA__ABG80205
augaagaccaucaucgcccugagcuacauccucugccugguguucgcccagaagcugcccggcaacgacaacuccaccgcgacgcucugccuggggcaccacgccgucccgaacggcacccuggugaagaccaucaccaacgaccagaucgaggugacgaacgccaccgagcucguccagagcuccagcaccgggggcaucugcgacagcccccaccagauccuggacggggagaacugcacccugaucgacgcccuccugggcgacccccacugcgacggcuuccagaacaaggagugggaccuguucguggagcgcagcaaggccuacuccaacugcuaccccuacgacgugccggacuacgcgagccuccggucccuggucgccagcuccgggacgcuggaguucaacaacgagagcuucaacuggaccggcguggcccagaacgggaccuccagcgccugcaagcgccgguccaacaagagcuucuucucccgccucaacuggcugcaccagcugaaguacaaguaccccgcgcucaacguggccaugcccaacaacgagaaguucgacaagcuguacaucuggggcguccaccaccccagcaccgacuccgaccagaucagccuguacgcccaggccccggggcgggugacggugagcaccaagcgcucccagcagaccgucauccccaacaucggcagccggcccugggugcgcggcguguccagccggaucuccaucuacuggaccaucgucaagcccggggacauccuccugaucaacugcacgggcaaccugaucgccccgcgcggguacuucaagauccggagcggcaaguccagcaucaugcgcuccgacgcgagcaucggcaagugcaacuccgagugcaucacccccaacgggagcauccccaacgacaagcccuuccagaacgugaaccggaucaccuacggcgccugcccgcgcuacgugaagcagaacacccucaagcuggccacggggaugcggaacguccccgagaagcagacccgcggcaucuucggggccaucgccggcuucaucgagaacggcugggaggggaugguggacggcugguacggguuccggcaccagaacuccgagggcaccgggcaggcggccgaccugaaguccacccaggccgccaucaaccagaucaacggcaagcucaaccgccugaucgagaagacgaacgagaaguuccaccagaucgagaaggaguucuccgagguggagggccggauccaggaccuggagaaguacgucgaggacaccaagaucaaccucuggagcuacaacgccgagcugcugguggcgcucgagaaccagcacaccaucgaccugaccgacuccgagaugaacaagcuguucgagcgcacgaagaagcagcuccgggagaacgccgaggacauggggaacggcugcuucaagaucuaccacaagugcgacaacgccugcaucgggagcauccgcaacggcaccuacgaccacgacguguaccgcgacgaggcccugaacaaccgguuccagaucaagggggucgagcugaaguccggcuacaaggacuggauccucuggaucagcuucgccaucagcugcuuccugcugugcgugguccuccugggcuucaucaugugggcgugccagaaggggaacauccgcugcaacaucugcaucuga

SEQ ID NO: 65132 - RNA, 1701 nt, Artificial Sequence
  derived and/or modified CDS sequence (opt1) from hemagglutinin__InfluenzaA__ABG80216
augaagaccaucaucgcccugagcuacauccucugccugguguucgcccagaagcugcccgucaacgacaacuccaccgcgacgcucugccugggccaccacgccgugccgaacgggacccuggugaagaccaucaccaacgaccacaucgaggucacgaacgccaccgagcucgugcagagcucccccaccggccgcaucugcgacagcccccaccagauccuggacggggagaacugcacccugaucgacgcccuccugggcgacccccacugcgacggguuccagaacaaggagugggaccuguucguggagcgguccacggccuacagcaacugcuacccguacgacguccccgacuacgcgucccuccgcagccugguggccuccagcggcacccuggaguucaacaacgaguccuucaacuggaccggcguggcccagaacgggaccagcuccgccugcaagcggcgcagcaucaaguccuucuucagccggcucaacuggcugcaccagcugaaguacaaguaccccgcgcucaacgucacgaugcccaacaacgagaaguucgacaagcuguacaucuggggcgugcaccacccguccaccgacagcgaccagaucucccuguacgcccaggcccccgggcgcgugaccgucagcaccaagcggagccagcagacggugauccccaacaucggcucccgccccugggugcgcggggucagcucccggaucagcaucuacuggaccaucgugaagccgggcgacauccuccugaucaacuccaccggcaaccugaucgcgccccggggguacuucaagauccgcagcggcaaguccagcaucaugcgguccaacacccccaucgggaagugcaacagcgagugcaucacgcccaacggcuccaucccgaacgacaagcccuuccagaacgugaaccgcaucaccuacggcgccugcccccgguacgucaagcagaacacccucaagcuggccaccgggaugcgcaacgugcccgagaagcagacgcggggcaucuucggggccaucgccggcuucaucgagaacgggugggagggcaugguggacggcugguacggguuccgccaccagaacagcgagggcaccgggcaggccgccgaccugaaguccacccaggcggccaucaaccagaucaacggcaagcucaaccggcugaucgagaagaccaacgagaaguuccaccagaucgagaaggaguucagcgaggucgaggggcgcauccaggaccuggagaaguacguggaggacacgaagaucgaccucugguccuacaacgccgagcugcugguggcccucgagaaccagcacaccaucgaccugaccgacagcgagaugaacaagcuguucgagcggacccgcaagcagcuccgcgagaacgccgaggacaugggcaacggcugcuucaagaucuaccacaagugcgacaacgcgugcaucggguccauccggaacggcacguacgaccacgacgucuaccgcgacgaggcccugaacaaccgguuccagaucaaggggguggagcucaagagcggcuacaaggacuggauccuguggaucuccuucgccaucagcugcuuccugcugugcgucgugcuccugggguucaucaugugggccugccagaagggcaacauccgcugcaacaucugcaucuga

SEQ ID NO: 65133 - RNA, 1701 nt, Artificial Sequence; identical to SEQ ID NO: 64664
  derived and/or modified CDS sequence (opt1) from hemagglutinin__InfluenzaA__ABG80227

SEQ ID NO: 65134 - RNA, 1701 nt, Artificial Sequence; identical to SEQ ID NO: 64540
  derived and/or modified CDS sequence (opt1) from hemagglutinin__InfluenzaA__ABG80238

SEQ ID NO: 65135 - RNA, 1701 nt, Artificial Sequence; identical to SEQ ID NO: 64540
  derived and/or modified CDS sequence (opt1) from hemagglutinin__InfluenzaA__ABG80249

SEQ ID NO: 65136 - RNA, 1701 nt, Artificial Sequence; identical to SEQ ID NO: 64540
  derived and/or modified CDS sequence (opt1) from hemagglutinin__InfluenzaA__ABG80260

SEQ ID NO: 65137 - RNA, 1701 nt, Artificial Sequence
  derived and/or modified CDS sequence (opt1) from hemagglutinin__InfluenzaA__ABG80271
augaagaccaucaucgcccugagcuacauccucugccugguguucgcccagaagcugcccggcaacgacaacuccaccgcgacgcucugccuggggcaccacgccgucccgaacggcaccguggugaagaccaucaccaacgaccagaucgaggucacgaacgccaccgagcuggugcagagcuccagcaccgggggcaucugcgacagcccccaccagauccucgacggggagaacugcacccugauggacgcccugcucggcgacccccagugcgacggcuuccagaacaagaagugggaccuguucguggagcgcagcaaggccuacuccaacugcuaccccuacgacgucccggacuacgcgagccugcggucccucguggccagcuccgggacgcuggaguucaacaacgagagcuucaacuggaccggcgugacccagaacgggaccuccagcgccugcaagcgccgguccaacaacagcuucuucucccgccugaacuggcucacgcaccugaaguucaaguaccccgcccugaacgucaccaugcccaacaacgagaaguucgacaagcucuacaucuggggcgugcaccaccccgggaccgacaacgaccagaucagccuguacgcgcaggccuccggccggaucaccgugagcacgaagcgcagccagcagaccgucaucccgaacaucggcucccggccccgcgugcgggacauccccagccgcaucuccaucuacuggaccaucgugaagcccggggacauccugcucaucaacagcaccggcaaccugaucgccccgcggggguacuucaagauccgcuccggcaagagcuccaucaugcggagcgacgcccccaucggcaagugcaacuccgagugcaucacgcccaacgggagcauccccaacgacaagccguuccagaacgucaaccgcaucaccuacggcgccugcccccgguacgugaagcagaacacccugaagcucgcgaccgggaugcgcaacgugcccgagaagcagacgcggggcaucuucggggccaucgccggcuucaucgagaacggcugggaggggauggucgacggcugguacggguuccgccaccagaacuccgagggcaccgggcaggccgccgaccugaaguccacccaggcggccaucaaccagaucaacggcaagcugaaccggcucaucggcaagaccaacgagaaguuccaccagaucgagaaggaguucuccgagguggaggggcgcauccaggaccuggagaaguacguggaggacacgaagaucgaccuguggagcuacaacgccgagcuccuggucgcccuggagaaccagcacaccaucgaccucaccgacuccgagaugaacaagcuguucgagcggaccaagaagcagcugcgcgagaacgccgaggacaugggcaacgggugcuucaagaucuaccacaagugcgacaacgcgugcaucggcagcauccgcaacgggacguacgaccacgacguguaccgggacgaggcccucaacaaccgcuuccagaucaagggcguggagcugaaguccggcuacaaggacuggauccuguggaucagcuucgccaucuccugcuuccuccugugcgucgcccugcucggguucaucaugugggccugccagaagggcaacauccggugcaacaucugcaucuga

SEQ ID NO: 65138 - RNA, 1701 nt, Artificial Sequence; identical to SEQ ID NO: 64615
  derived and/or modified CDS sequence (opt1) from hemagglutinin__InfluenzaA__ABG80282

SEQ ID NO: 65139 - RNA, 1701 nt, Artificial Sequence; identical to SEQ ID NO: 64267
  derived and/or modified CDS sequence (opt1) from hemagglutinin__InfluenzaA__ABG80293

SEQ ID NO: 65140 - RNA, 1701 nt, Artificial Sequence
  derived and/or modified CDS sequence (opt1) from hemagglutinin__InfluenzaA__ABG80304
augaagaccaucaucgcccugagcuacauccucugccugguguucgcccagaagcugcccggcaacgacaacuccaccgcgacgcucugccuggggcaccacgccgucccgaacggcaccaucgugaagaccaucaccaacgaccagaucgaggugacgaacgccaccgagcugguccagagcuccagcaccgggggcaucugcgacagcccccaccagauccucgacggggagaacugcacccugaucgacgcccugcucggcgacccccagugcgacggcuuccagaacaagaagugggaccuguucguggagcgcagcaaggccuacuccaacugcuaccccuacgacgugccggacuacgcgagccugcggucccucgucgccagcuccgggacgcuggaguucaacaacgagagcuucaacuggaccggcgugacccagaacgggaccuccagcgccugcaagcgccgguccaacaacagcuucuucucccgccugaacuggcucacgcaccugaaguucaaguaccccgcccugaacgugaccaugcccaacaacgagaaguucgacaagcucuacaucuggggcguccaccaccccgggaccaacaacgaccagaucaaccuguacgcgcaggccagcggccggaucaccguguccacgaagcgcagccagcagaccgugaucccgaacaucggcagccggccccgcguccgggacauccccucccgcaucagcaucuacuggaccaucgugaagcccggggacauccugcucaucaacuccaccggcaaccugaucgccccgcggggguacuucaagauccgcagcggcaaguccagcaucaugcgguccgacgcccccaucggcaagugcaacagcgagugcaucacgcccaacggguccauccccaacgacaagccguuccagaacgugaaccgcaucaccuacggcgccugcccccgguacgucaagcagaacacccugaagcucgcgaccgggaugcgcaacgugcccgagaagcagacgcggggcaucuucggggccaucgccggcuucaucgagaacggcugggaggggaugguggacggcugguacggguuccgccaccagaacagcgagggcaucgggcaggccgccgaccugaaguccacccaggcggccaucaaccagaucaacggcaagcugaaccggcucaucggcaagaccaacgagaaguuccaccagaucgagaaggaguucagcgaggucgaggggcgcauccaggaccuggagaaguacguggaggacaccaagaucgaccugugguccuacaacgccgagcuccugguggcccuggagaaccagcacacgaucgaccucaccgacagcgagaugaacaagcuguucgagcggaccaagaagcagcugcgcgagaacgccgaggacaugggcaacgggugcuucaagaucuaccacaagugcgacaacgcgugcaucggcuccauccgcaacgggaccuacgaccacgacgucuaccgggacgaggcccucaacaaccgcuuccagaucaagggcguggagcugaaguccggcuacaaggacuggauccuguggaucuccuucgccaucagcugcuuccuccugugcguggcccugcucggguucaucaugugggccugccagaagggcaacauccggugcaacaucugcaucuga

SEQ ID NO: 65141 - RNA, 1701 nt, Artificial Sequence
  derived and/or modified CDS sequence (opt1) from hemagglutinin__InfluenzaA__ABG80315
augaagaccaucaucgcccugagcuacauccucugccugguguucgcccagaagcugcccggcaacgacaacuccaccgcgacgcucugccuggggcaccacgccgucccgaacggcaccaucgugaagaccaucaccaacgaccagaucgaggugacgaacgccaccgagcugauccagagcuccagcaccgggggcaucugcgacagcccccaccagauccucgacggggagaacugcacccugaucgacgcccugcucggcgacccccagugcgacggcuuccagaacaagaagugggaccuguucgucgagcgcagcaaggccuacuccaacugcuaccccuacgacgugccggacuacgcgagccugcggucccucguggccagcuccgggacgcuggaguucaacaacgagagcuucaacuggaccggcgucacccagaacgggaccuccagcgccugcaagcgccgguccaacaacagcuucuucucccgccugaacuggcucacgcaccugaaguucaaguaccccgcccugaacgugaccaugcccaacaacgagaaguucgacaagcucuacaucuggggcgugcaccaccccgggaccgacaacgaccagaucagccuguacgcgcaggccuccggccggaucaccgucagcacgaagcgcagccagcagaccgugaucccgaacaucggcucccggccccgcgugcgggacauccccagccgcaucuccaucuacuggaccaucgucaagcccggggacaugcugcucaucaacagcaccggcaaccugaucgccccgcggggguacuucaagauccgcuccggcaagagcuccaucaugcggagcgacgcccccaucggcaagugcaacuccgagugcaucacgcccaacgggagcauccccaacgacaagccguuccagaacgugaaccgcaucaccuacggcgccugcccccgguacgugaagcagaacacccugaagcucgcgaccgggaugcgcaacguccccgagaagcagacgcggggcaucuucggggccaucgccggcuucaucgagaacggcugggaggggaugguggacggcugguacggguuccgccaccagaacuccgagggcaccgggcaggccgccgaccugaaguccacccaggcggccaucaaccagaucaacggcaagcugaaccggcucaucggcaagaccaacgagaaguuccaccagaucgagaaggaguucuccgagguggaggggcgcauccaggaccuggagaaguacgucgaggacacgaagaucgaccuguggagcuacaacgccgagcuccugguggcccuggagaaccagcacaccaucgaccucaccgacuccgagaugaacaagcuguucgagcggaccaagaagcagcugcgcgagaacgccgaggacaugggcaacgggugcuucaagaucuaccacaagugcgacaacgcgugcaucggcagcauccgcaacgggacguacgaccacgacguguaccgggacgaggcccucaacaaccgcuuccagaucaagggcgucgagcugaaguccggcuacaaggacuggauccuguggaucagcuucgccaucuccugcuuccuccugugcguggcccugcucggguucaucaugugggccugccagaagggcaacauccggugcaacaucugcaucuga

SEQ ID NO: 65142 - RNA, 1701 nt, Artificial Sequence; identical to SEQ ID NO: 64306
  derived and/or modified CDS sequence (opt1) from hemagglutinin__InfluenzaA__ABG80326

SEQ ID NO: 65143 - RNA, 1701 nt, Artificial Sequence; identical to SEQ ID NO: 64306
  derived and/or modified CDS sequence (opt1) from hemagglutinin__InfluenzaA__ABG80337

SEQ ID NO: 65144 - RNA, 1701 nt, Artificial Sequence
  derived and/or modified CDS sequence (opt1) from hemagglutinin__InfluenzaA__ABG80359
augaagaccaucaucgcccugagcuacauccucugccugguguucgcccagaagcugcccggcaacgacaacuccaccgcgacgcucugccuggggcaccacgccgucccgaacggcacccuggugaagaccaucaccaacgaccagaucgaggugacgaacgccaccgagcucguccagagcuccagcaccgggcgcaucugcgacagcccccaccggauccuggacggcaagaacugcacccugaucgacgcccuccugggggacccccacugcgacggcuuccagaacaaggagugggaccuguucguggagcgcagcaaggccuacuccaacugcuaccccuacgacgugccggacuacgcgagccuccggucccuggucgccagcuccggcacgcuggaguucaucaacgaggacuucaacuggaccgggguggcccaggacggcgggagcuacgccugcaagcgcggcuccgugaacagcuucuucucccggcucaacuggcugcacaagcuggaguacaaguaccccgcgcucaacgucaccaugcccaacaacgggaaguucgacaagcuguacaucuggggcgugcaccaccccagcaccgacuccgaccagacgagccuguacgugcgcgccuccggccgggucaccgugagcaccaagcgcagccagcagaccgugacgccgaacaucgggucccggcccuggguccgcggccucagcucccggaucagcaucuacuggaccaucgugaagcccggggacauccugcugaucaacuccaccggcaaccucaucgcgccccgcggcuacuucaagauccggaacgggaaguccuccaucaugcgcagcgacgccccgaucggcaacugcuccagcgagugcaucacccccaacggguccauccccagcgacaagcccuuccagaacgugaaccggaucacguacggcgccugcccgcgcuacgucaagcagaacacccugaagcuggccaccgggaugcggaacgugcccgagaagcagacccgcggcaucuucggcgccaucgccggguucaucgagaacggcugggaggggaugguggacggcugguacggguuccggcaccagaacuccgagggcacgggccaggccgccgaccucaagagcacccaggcggccgucgaccagaucaacgggaagcugaaccgccugaucgagcggaccaacgagaaguuccaccagaucgagaaggaguucuccgagguggagggccgcauccaggaccucgagaaguacguggaggacaccaagaucgaccuguggagcuacaacgccgagcugcucgucgcccuggagaaccagcacacgaucgaccugaccgacuccgagaugaacaagcuguucgagaagacccgcaagcagcuccgggagaacgccgaggacauggggaacggcugcuucaagaucuaccacaagugcgacaacgcgugcaucgggagcauccgcaacggcaccuacgaccacgacguguaccgggacgaggcccugaacaaccgcuuccagaucaagggcgucgagcucaaguccggguacaaggacuggauccuguggaucagcuucgccaucagcugcuuccugcucugcguggugcugcugggcuucaucaugugggccugccagaaggggaacauccggugcaacaucugcaucuga

SEQ ID NO: 65145 - RNA, 1701 nt, Artificial Sequence
  derived and/or modified CDS sequence (opt1) from hemagglutinin__InfluenzaA__ABG80370
augaagaccaucaucgcccugagcuacauccucugccugguguucgcccagaagcugcccggcaacgacaacuccaccgcgacgcucugccuggggcaccacgccgucccgaacggcacccuggugaagaccaucaccaacgaccagaucgaggugacgaacgccaccgagcucguccagagcuccagcaccgggcgcaucugcgacagcccccaccggauccuggacggcaagaacugcacccugaucgacgcccuccugggggacccccacugcgacggcuuccagaacaaggagugggaccuguucguggagcgcagcaaggccuacuccaacugcuaccccuacgacgugccggacuacgcgagccuccggucccuggucgccagcuccggcacgcuggaguucaucaacgaggacuucaacuggaccgggguggcccaggacggcaagagcuacgccugcaagcgcggguccgugaaguccuucuucucccggcucaacuggcugcacaagcuggaguacaaguaccccgcgcucaacgucaccaugcccaacaacggcaaguucgacaagcuguacaucuggggcgugcaccaccccagcaccgacuccgaccagacgagccuguacgugcgcgccuccgggcgggucaccgugagcaccaagcgcagccagcagaccgugaucccgaacaucggcucccggcccuggguccgcgggcucagcucccggaucagcaucuacuggacgaucgugaagcccggcgacauccugcugaucaacuccaccgggaaccucaucgcgccccgcggcuacuucaagauccggaacggcaagagcuccaucaugcgcagcgacgccccgaucgggaacugcuccagcgagugcaucacccccaacggcuccauccccaacgacaagcccuuccagaacgugaaccggaucaccuacggggccugcccgcgcuacgucaagcagaacacgcugaagcuggccaccggcaugcggaacgugcccgagaagcagacccgcgggaucuucggcgccaucgccggcuucaucgagaacgggugggagggcaugguggacgggugguacggcuuccggcaccagaacagcgaggggaccggccaggccgccgaccucaaguccacgcaggcggccaucgaccagaucaacggcaagcugaaccgccugaucgagaagaccaacgagaaguuccaccagaucgagaaggaguucagcgaggucgaggggcggauccaggaccucgagaaguacguggaggacaccaagaucgaccugugguccuacaacgccgagcugcucguggcccuggagaaccagcacaccaucgaccugacggacagcgagaugaacaagcuguucgagcgcacccgcaagcagcuccgggagaacgccgaggacaugggcaacgggugcuucaagaucuaccacaagugcgacaacgcgugcaucggcuccauccgcaacgggaccuacgaccacgacgucuaccgggacgaggcccugaacaaccgcuuccagaucaagggcguggagcucaagagcggcuacaaggacuggauccuguggaucuccuucgccaucagcugcuuccugcucugcgucgugcugcugggguucaucaugugggccugccagaagggcaacauccggugcaacaucugcaucuga

SEQ ID NO: 65146 - RNA, 1701 nt, Artificial Sequence; identical to SEQ ID NO: 65077
  derived and/or modified CDS sequence (opt1) from hemagglutinin__InfluenzaA__ABG80392

SEQ ID NO: 65147 - RNA, 1701 nt, Artificial Sequence; identical to SEQ ID NO: 65077
  derived and/or modified CDS sequence (opt1) from hemagglutinin__InfluenzaA__ABG80403

SEQ ID NO: 65148 - RNA, 1701 nt, Artificial Sequence; identical to SEQ ID NO: 65077
  derived and/or modified CDS sequence (opt1) from hemagglutinin__InfluenzaA__ABG80414

SEQ ID NO: 65149 - RNA, 1701 nt, Artificial Sequence; identical to SEQ ID NO: 65077
  derived and/or modified CDS sequence (opt1) from hemagglutinin__InfluenzaA__ABG80425

SEQ ID NO: 65150 - RNA, 1701 nt, Artificial Sequence; identical to SEQ ID NO: 64807
  derived and/or modified CDS sequence (opt1) from hemagglutinin__InfluenzaA__ABG88289

SEQ ID NO: 65151 - RNA, 1701 nt, Artificial Sequence
  derived and/or modified CDS sequence (opt1) from hemagglutinin__InfluenzaA__ABG88300
augaaggccaagcugcucgugcugcugugcgccuucaccgcgaccuacgccgacacgaucugcaucggcuaccacgccaacaacagcaccgacaccgucgacaccgugcucgagaagaacgugacggucacccacuccgugaaccugcuggaggacagccacaacgggaagcucugccgccugaagggcaccgcgccccugcagcucgggaacugcuccguggccggcuggauccuggggaacccggagugcgagagccuguucuccaaggagagcugguccuacaucgccgagacccccaaccccgagaacggcacgugcuaccccggcuacuucgccgacuacgaggagcuccgggagcagcugagcuccgucagcuccuucgagcgcuucgagaucuucccgaaggagagcuccuggcccaaccacaccgugaccaagggggugaccgccagcugcucccacaacggcaagagcuccuucuacaagaaccugcucuggcugacggagaagaacgggcuguaccccgaccucagcaaguccuacgucaacaacaaggagaaggaggugcuggugcuguggggcguccaccaccccagcaacaucggggaccagcgggccaucuaccacaccgagaacgcguacgugagcguggucuccagccacuacucccgccgguucaccccggagaucaccaagcgccccaaggugcgggaccaggagggccgcaucaacuacuacuggacgcuccuggagcccggcgacaccaucaucuucgaggccaacgggaaccugaucgcccccugguacgccuucgcccucagccggggcuucggguccggcaucaucaccagcaacgcguccaugggcgagugcgacgccaagugccagaccccgcagggggccaucaacagcucccugcccuuccagaacgugcaccccgucacgaucggcgagugccccaaguacgugcgcagcaccaagcugcggauggugaccgggcuccgcaacaucccguccauccagagccggggccuguucggggccaucgccggcuucaucgagggcggguggaccggcaugaucgacgggugguacggcuaccaccaccagaacgagcagggguccggcuacgcggccgaccagaaguccacgcagaacgccaucgacggcaucaccaacaaggucaacagcgugaucgagaagaugaacacccaguucaccgccguggggaaggaguucaacaagcuggagcgccggauggagaaccucaacaagaaggucgacgacggcuuccuggacaucuggacguacaacgccgagcugcucgugcugcuggagaacgagcgcacccucgacuuccacgacagcaacgucaagaaccuguacgagaaggugaagacccagcugaagaacaacgcgaaggagaucgggaacggcugcuucgaguucuaccacaagugcaacaacgagugcauggaguccgugaagaacgggaccuacgacuaccccaaguacagcgaggaguccaagcucaaccgggagaagaucgacggcgucaagcuggagagcaugggcguguaccagauccuggccaucuacagcacgguggccuccagccucguccugcuggugucccucggggccaucagcuucuggaugugcuccaacggcagccugcagugccgcaucugcaucuga

SEQ ID NO: 65152 - RNA, 1701 nt, Artificial Sequence; identical to SEQ ID NO: 64935
  derived and/or modified CDS sequence (opt1) from hemagglutinin__InfluenzaA__ABG88311

SEQ ID NO: 65153 - RNA, 1701 nt, Artificial Sequence
  derived and/or modified CDS sequence (opt1) from hemagglutinin__InfluenzaA__ABG88322
augaaggccaagcugcucgugcugcugugcgccuucaccgcgaccuacgccgacacgaucugcaucggcuaccacgccaacaacagcaccgacaccgucgacaccgugcucgagaagaacgugacggucacccacuccgugaaccugcuggaggacagccacaacgggaagcucugccgccugaagggcaccgcgccccugcagcucgggaacugcuccguggccggcuggauccuggggaacccggagugcgagagccuguucuccaaggagagcugguccuacaucgccgagacccccaaccccgagaacggcacgugcuaccccggcuacuucgccgacuacgaggagcuccgggagcagcugagcuccgucagcuccuucgagcgcuucgagaucuucccgaaggagagcuccuggcccaaccacaccgugaccaagggggugaccgccagcugcucccacaacggcaagagcuccuucuacaagaaccugcucuggcugacggagaagaacgggcuguaccccauccucagcaaguccuacgucaacaacaaggagaaggaggugcuggugcuguggggcguccaccaccccagcaacaucggggaccagcgggccaucuaccacaccgagaacgcguacgugagcguggucuccagccacuacucccgccgguucaccccggagaucgccaagcgccccaaggugcgggaccaggagggccgcaucaacuacuacuggacccuccuggagcccggcgacacgaucaucuucgaggccaacgggaaccugaucgcccccugguacgccuucgcgcucagccggggcuucggguccggcaucaucaccagcaacgccuccaugggcgagugcgacgccaagugccagaccccgcagggggccaucaacagcucccugcccuuccagaacgugcaccccgucaccaucggcgagugccccaaguacgugcgcagcacgaagcugcggauggugaccgggcuccgcaacaucccguccauccagagccggggccuguucggggccaucgcgggcuucaucgagggcggguggaccggcaugaucgacgggugguacggcuaccaccaccagaacgagcagggguccggcuacgccgccgaccagaaguccacccagaacgccaucgacggcaucacgaacaaggucaacagcgugaucgagaagaugaacacccaguucaccgccguggggaaggaguucaacaagcuggagcgccggauggagaaccucaacaagaaggucgacgacggcuuccuggacaucuggaccuacaacgcggagcugcucgugcugcuggagaacgagcgcacgcucgacuuccacgacagcaacgucaagaaccuguacgagaaggugaagaaccagcugaagaacaacgccaaggagaucgggaacggcugcuucgaguucuaccacaagugcaacaacgagugcauggaguccgugaagaacgggaccuacgacuaccccaaguacagcgaggaguccaagcucaaccgggagaagaucgacggcgucaagcuggagagcaugggcguguaccagauccuggccaucuacagcaccguggccuccagccucguccugcuggugucccucggggccaucagcuucuggaugugcuccaacggcagccugcagugccgcaucugcaucuga

SEQ ID NO: 65154 - RNA, 1701 nt, Artificial Sequence
  derived and/or modified CDS sequence (opt1) from hemagglutinin__InfluenzaA__ABG88333
augaaggccaagcugcucgugcugcugugcgcccucagcgcgaccgacgccgacaccaucugcaucggcuaccacgccaacaacuccacggacaccgucgacaccgugcuggagaagaacgugaccgucacgcacagcgugaaccugcucgaggacucccacaacgggaagcugugccgccugaagggcaucgcgccccuccagcuggggaagugcagcaucgccggcuggauccuggggaacccggagugcgagucccucuucagcaagaaguccuggagcuacaucgccgagacccccaacuccgagaacgggaccugcuaccccggcuacuucgccgacuacgaggagcugcgggagcagcugagcuccgugagcuccuucgagcgcuucgagaucuuccccaaggagagcuccuggccgaagcacaacgucacccggggcgugacggccagcugcucccacaagggcaagagcuccuucuaccgcaaccuccuguggcugaccgagaagaacgggagcuaccccaaccucagcaaguccuacgugaacaacaaggagaaggagguccuggugcuguggggcgugcaccaccccagcaacaucgaggaccagaagaccaucuaccggaaggagaacgccuacgucuccguggugagcucccacuacaaccgccgguucacccccgagaucagcaagcgcccgaagguccgggggcaggagggccgcaucaacuacuacuggacgcuccuggagcccggcgacaccaucaucuucgaggcgaacgggaaccugaucgcccccugguacgccuucgcccucucccggggcuucgggagcggcaucaucaccuccaacgccagcauggacgagugcgacgcgaagugccagacgccccagggcgccaucaacuccagccugccguuccagaacgugcaccccgugaccaucggggagugccccaaguacguccgcuccaccaagcugcggauggugaccggccuccgcaacauccccagcauccagucccgggggcuguucggcgccaucgccggguucaucgagggcggcuggaccgggaugaucgacggcugguacggguaccaccaccagaacgagcagggcagcggguacgccgcggaccagaaguccacgcagaacgccaucaacggcaucaccaacaaggugaacagcgucaucgagaagaugaacacccaguucaccgccgugggcaaggaguucaacaagcuggagaagcgcauggagaaccucaacaagaagguggacgacggguuccuggacaucuggacguacaacgccgagcugcucguccugcuggagaacgagcggacccucgacuuccacgacuccaacgugaagaaccuguacgagaaggucaagagccagcugaagaacaacgccaaggagaucggcaacgggugcuucgaguucuaccacaagugcaacaacgagugcauggagagcgugaagaacggcaccuacgacuacccgaaguacuccgaggagagcaagcucaaccgcgagaagaucgacggggugaagcuggaguccaugggcgucuaccagauccuggcgaucuacagcaccguggccuccagccucgugcugcuggucucccucggcgccaucagcuucuggaugugcuccaacgggagccugcagugccggaucugcaucuga

SEQ ID NO: 65155 - RNA, 1701 nt, Artificial Sequence
  derived and/or modified CDS sequence (opt1) from hemagglutinin__InfluenzaA__ABG88344
augaaggccaagcugcucgugcugcugugcgcccucagcgcgaccgacgccgacaccaucugcaucggcuaccacgccaacaacuccacggacaccgucgacaccgugcuggagaagaacgugaccgucacgcacagcgugaaccugcucgaggacucccacaacgggaagcugugccgccugaagggcaucgcgccccuccagcuggggaagugcagcaucgccggcuggauccuggggaacccggagugcgagucccucuucagcaagaaguccuggagcuacaucgccgagacccccaacuccgagaacgggaccugcuaccccggcuacuucgccgacuacgaggagcugcgggagcagcugagcuccgugagcuccuucgagcgcuucgagaucuuccccaaggagagcuccuggccgaagcacaacgucacccgcggggugacggccagcugcucccacaagggcaagagcuccuucuaccggaaccuccuguggcugaccgagaagaacgggagcuaccccaaccucagcaaguccuacgugaacaacaaggagaaggagguccuggugcuguggggcgugcaccaccccagcaacaucgaggaccagaagaccaucuaccggaaggagaacgccuacgucuccguggugagcucccacuacaaccgccgguucacccccgagaucagcaagcgcccgaagguccggaaccaggaggggcgcaucaacuacuacuggacgcuccuggagcccggcgacaccaucaucuucgaggcgaacggcaaccugaucgcccccugguacgccuucgcccucucccggggguucggcagcgggaucaucaccuccaacgccagcauggacgagugcgacgcgaagugccagacgccccagggcgccaucaacuccagccugccguuccagaacgugcaccccgugaccaucggcgagugccccaaguacguccgcuccaccaagcugcggauggugaccgggcuccgcaacauccccagcauccagucccggggccuguucggggccaucgccggcuucaucgagggcggcuggaccggcaugaucgacgggugguacggcuaccaccaccagaacgagcaggggagcggcuacgccgcggaccagaaguccacgcagaacgccaucaacgggaucaccaacaaggugaacagcgucaucgagaagaugaacacccaguucaccgccgugggcaaggaguucaacaagcuggagaagcgcauggagaaccucaacaagaagguggacgacggcuuccuggacaucuggacguacaacgccgagcugcucguccugcuggagaacgagcggacccucgacuuccacgacuccaacgugaagaaccuguacgagaaggucaagagccagcugaagaacaacgccaaggagaucgggaacggcugcuucgaguucuaccacaagugcaacaacgagugcauggagagcgugaagaacgggaccuacgacuacccgaaguacuccgaggagagcaagcucaaccgcgagaagaucgacggcgugaagcuggaguccaugggggucuaccagauccuggcgaucuacagcaccguggccuccagccucgugcugcuggucucccucggcgccaucagcuucuggaugugcuccaacggcagccugcagugccggaucugcaucuga

SEQ ID NO: 65156 - RNA, 1701 nt, Artificial Sequence
  derived and/or modified CDS sequence (opt1) from hemagglutinin__InfluenzaA__ABG88355
augaagaccaucaucgcccugagcuacauccucugccugguguucgcccagaagcugcccggcaacgacaacuccaccgcgacgcucugccuggggcaccacgccgucccgaacggcacccuggugaagaccaucaccaacgaccagaucgaggugacgaacgccaccgagcucguccagagcucccccaccgggcgcaucugcgacagcccccaccggauccuggacggcaagaacugcacccugaucgacgcccuccugggggacccccacugcgacggcuuccagaacaaggagugggaccuguucguggagcgcuccaaggccuacagcaacugcuacccguacgacgugcccgacuacgcgucccuccggagccuggucgccuccagcggcacgcuggaguucaccaacgagaacuucaacuggaccgggguggcccaggacggcaaguccuacgccugcaagcgcgggagcgugaacuccuucuucagccggcucaacuggcugcacaagcuggaguacaaguaccccgcgcucaacgucaccaugcccaacaacggcaaguucgacaagcuguacaucuggggcgugcaccacccguccacggacagcgaccagaccucccuguacgugcgcgccagcgggaaggucaccguguccaccaagcggagccagcagacggugauccccgacaucggcuaccgccccuggguccgggggcucagcucccgcaucagcaucuacuggaccaucgugaagcccggcgacauccugcugaucaacuccaccgggaaccucaucgccccgcggggcuacuucaagauccgcaacggcgagagcuccaucaugcggagcgacgcccccaucgggaacugcuccagcgagugcaucacccccaacggcuccauccccaacgacaagccguuccagaacgugaaccgcaucacguacggggccugcccccgguacgucaagcagaacacccugaagcuggcgaccggcaugcgcaacgugcccgagaagcagacccgggggaucuucggcgccaucgccggcuucaucgagaacgggugggagggcaugguggacgggugguacggcuuccgccaccagaacagcgaggggacgggccaggccgccgaccucaaguccacccaggcggccaucgaccagaucaacggcaagcugaaccggcuggucgagaagaccaacgagaaguuccaccagaucgagaaggaguucagcgagguggaggggcgcauccaggaccucgagaaguacguggaggacaccaagaucgaccugugguccuacaacgccgagcugcucgucgcccuggagaaccagcacacgaucgaccugaccgacagcgagaugaacaagcuguucgagcggacccgcaagcagcuccgcgagaacgccgaggacaugggcaacgggugcuucaagaucuaccacaagugcgacaacgcgugcaucggcuccauccggaacgggaccuacgaccacgacguguaccgcgacgaggcccugaacaaccgguuccagaucaagggcgucgagcucaagagcggcuacaaggacuggauccuguggaucuccuucgccaucagcugcuuccugcucugcguggugcugcugggguucaucaugugggccugccagaagggcaacauccgcugcaacaucugcaucuga

SEQ ID NO: 65157 - RNA, 1701 nt, Artificial Sequence
  derived and/or modified CDS sequence (opt1) from hemagglutinin__InfluenzaA__ABG88366
augaagaccaucaucgcccugagcuacuuccucugccugguguucgcccagaagcugcccggcaacgacaacuccaccgcgacgcucugccuggggcaccacgccgucccgaacggcacccuggugaagaccaucaccaacgaccagaucgaggugacgaacgccaccgagcucguccagaacagccccaccgggcgcaucugcgacagcccccaccggauccuggacggcaagaacugcacccugaucgacgcccuccugggggacccccacugcgacggcuuccagaacaaggagugggaccuguucguggagcgcuccaaggccuacuccaacugcuacccguacgacgugcccgacuacgcgagccuccggucccuggucgccagcuccggcacgcuggaguucaccaacgagaacuucaacuggaccgggguggcccaggacggcaagagcuacgccugcaagcgcggguccgugaacagcuucuucucccggcucaacuggcugcacaagcuggaguacaaguaccccgcgcucaacgucaccaugcccaacaacggcaaguucgacaagcuguacaucuggggcgugcaccacccgagcacggacuccgaccagaccagccuguacgugcgcgccuccgggaaggucaccgugagcaccaagcggucccagcagacggugauccccgacaucggcuaccgccccuggguccgggggcucagcagccgcaucuccaucuacuggaccaucgugaagcccggcgacauccugcugaucaacagcaccgggaaccucaucgccccgcggggcuacuucaagauccgcaacggcaaguccagcaucaugcgguccgacgcccccaucgggaacugcagcuccgagugcaucacccccaacggcagcauccccaacgacaagccguuccagaacgugaaccgcaucacguacggggccugcccccgguacgucaagcagaacacccugaagcuggcgaccggcaugcgcaacgugcccgagaagcagacccgggggaucuucggcgccaucgccggcuucaucgagaacgggugggagggcaugguggacgggugguacggcuuccgccaccagaacuccgaggggacgggccaggccgccgaccucaagagcacccaggcggccaucgaccagaucaacggcaagcugaaccggcuggucgagaagaccaacgagaaguuccaccagaucgagaaggaguucuccgagguggaggggcgcauccaggaccucgagaaguacguggaggacaccaagaucgaccuguggagcuacaacgccgagcugcucgucgcccuggagaaccagcacacgaucgaccugaccgacuccgagaugaacaagcuguucgagcggacccgcaagcagcuccgcgagaacgccgaggacaugggcaacgggugcuucaagaucuaccacaagugcgacaacgcgugcaucggcagcauccggaacgggaccuacgaccacgacguguaccgcgacgaggcccugaacaaccgguuccagaucaagggcgucgagcucaaguccggcuacaaggacuggauccuguggaucagcuucgccaucuccugcuuccugcucugcguggugcugcugggguucaucaugugggccugccagaagggcaacauccgcugcaacaucugcaucuga

SEQ ID NO: 65158 - RNA, 1701 nt, Artificial Sequence; identical to SEQ ID NO: 65008
  derived and/or modified CDS sequence (opt1) from hemagglutinin__InfluenzaA__ABG88377

SEQ ID NO: 65159 - RNA, 1701 nt, Artificial Sequence; identical to SEQ ID NO: 65008
  derived and/or modified CDS sequence (opt1) from hemagglutinin__InfluenzaA__ABG88388

SEQ ID NO: 65160 - RNA, 1701 nt, Artificial Sequence
  derived and/or modified CDS sequence (opt1) from hemagglutinin__InfluenzaA__ABG88399
augaagaccaucaucgcccugagcuacauccucugccugguguucgcccagaagcugcccggcaacgacaacuccaccgcgacgcucugccuggggcaccacgccgucccgaacggcacccuggugaagaccaucaccaacgaccagaucgaggugacgaacgccaccgagcucguccagagcuccagcaccgggcgcaucugcgacagcccccaccggauccuggacggcaagaacugcacccugaucgacgcccuccugggggacccccacugcgacggcuuccagaacaaggagugggaccuguucguggagcgcagcaaggccuacuccaacugcuaccccuacgacgugccggacuacgcgagccuccggucccuggucgccagcuccggcacgcuggaguucaccaaggagagcuucaacuggaccgggguggcccaggacggcaaguccuacgccugcaagcgcgggagcgugaacuccuucuucagccggcucaacuggcugcacaagcuggaguacaaguaccccgcgcucaacgucaccaugcccaacaacgacaaguucgacaagcuguacaucuggggcgugcaccaccccuccacggacagcgaccagaccucccuguacgugcaggccagcgggcgcgucaccgugagcaccaagcggucccagcagacggugaucccgaacaucggcagccgccccuggguccggggcaucuccagccgcaucuccaucuacuggaccaucgugaagcccggggacauccuccugaucaacagcaccggcaaccugaucgcgccccggggguacuucaagauccgcaacggcaaguccagcaucaugcgguccgacgccccgaucggcaacugcaacagcgagugcaucacccccaacggguccauccccaacgacaagcccuuccagaacgugaaccgcaucacguacggcgccugcccgcgguacgucaagcagaacacccucaagcuggccaccgggaugcgcaacgugcccgagaagcagacccggggcaucuucggggccaucgccggcuucaucgagaacggcugggaggggaugguggacggcugguacggguuccgccaccagaacagcgagggcacggggcaggccgccgaccugaaguccacccaggcggccaucgaccagaucaacggcaagcucaaccggcugaucgagaagaccaacgagaaguuccaccagaucgagaaggaguucagcgaggucgagggccgcauccaggaccuggagaaguacguggaggacaccaagaucgaccucugguccuacaacgccgagcugcugguggcccucgagaaccagcacacgaucgaccugaccgacagcgagaugaacaagcuguucgagcggacccgcaagcagcuccgcgagaacgccgaggacauggggaacggcugcuucaagaucuaccacaagugcgacaacgcgugcaucggguccauccggaacggcaccuacgaccacgacgucuaccgcgacgaggcccugaacaaccgguuccagaucaaggggguggagcugaaguccggcuacaaggacuggauccucuggaucuccuucgccaucagcugcuuccugcugugcgucgugcuccugggcuucaucaugugggccugccagaaggggaacauccgcugcaacaucugcaucuga

SEQ ID NO: 65161 - RNA, 1701 nt, Artificial Sequence; identical to SEQ ID NO: 65048
  derived and/or modified CDS sequence (opt1) from hemagglutinin__InfluenzaA__ABG88410

SEQ ID NO: 65162 - RNA, 1701 nt, Artificial Sequence; identical to SEQ ID NO: 65048
  derived and/or modified CDS sequence (opt1) from hemagglutinin__InfluenzaA__ABG88421

SEQ ID NO: 65163 - RNA, 1701 nt, Artificial Sequence
  derived and/or modified CDS sequence (opt1) from hemagglutinin__InfluenzaA__ABG88432
augaagaccaucaucgcccugagcuacauccucugccugguguucgcccagaagcugcccggcaacgacaacuccaccgcgacgcucugccuggggcaccacgccgucccgaacggcacccuggugaagaccaucaccaacgaccagaucgaggugacgaacgccaccgagcucguccagagcuccagcaccgggcgcaucugcgacagcccccaccggauccuggacggcaagaacugcacccugaucgacgcccuccugggggacccccacugcgacggcuuccagaacaaggagugggaccuguucguggagcgcuccaaggccuacuccaacugcuaccccuacgacgugccggacuacgcgagccuccggucccuggucgccagcuccggcacgcuggaguucaucaacgaggacuucaacuggaccgggguggcccaggacggcaagagcuacgccugcaagcgcggguccgugaacagcuucuucucccggcucaacuggcugcacaagcuggaguacaaguaccccgcgcucaacgucaccaugcccaacaacggcaaguucgacaagcuguacaucuggggcgugcaccaccccagcaccgacuccgaccagacgagccuguacgugcgcgccuccgggcgggucaccgugagcaccaagcgcagccagcagaccgugaucccgaacaucggcuuccggcccuggguccgcgggcucuccagccggaucuccaucuacuggacgaucgugaagcccggcgacauccugcugaucaacagcaccgggaaccucaucgcgccccgcggcuacuucaagaugcggaacggcaaguccagcaucaugcgcuccgacgccccgaucgggaacugcagcuccgagugcaucacccccaacggcagcauccccaacgacaagcccuuccagaacgugaaccggaucaccuacggggccugcccgcgcuacgucaagcagaacacgcugaagcuggccaccggcaugcggaacgugcccgagaagcagacccgcgggaucuucggcgccaucgccggcuucaucgagaacgggugggagggcaugguggacgggugguacggcuuccggcaccagaacuccgaggggaccggccaggccgccgaccucaagagcacgcaggcggccaucgaccagaucaacggcaagcugaaccgccugaucgagaagaccaacgagaaguuccaccagaucgagaaggaguucuccgaggucgaggggcggauccaggaccucgagaaguacguggaggacaccaagaucgaccuguggagcuacaacgccggccugcucguggcccuggagaaccagcacaccaucgaccugacggacuccgagaugaacaagcuguucgagcgcacccgcaagcagcuccgggagaacgccgaggacauggggaacggcugcuucaagaucuaccacaagugcgacaacgcgugcaucgggagcauccgcaacggcaccuacgaccacgacgucuaccgggacgaggcccugaacaaccgcuuccagaucaagggcguggagcucaaguccggguacaaggacuggauccuguggaucagcuucgccaucuccugcuuccugcucugcgucgugcugcugggcuucaucaugugggccugccagaaggggaacauccggugcaacaucugcaucuga

SEQ ID NO: 65164 - RNA, 1701 nt, Artificial Sequence; identical to SEQ ID NO: 65048
  derived and/or modified CDS sequence (opt1) from hemagglutinin__InfluenzaA__ABG88443

SEQ ID NO: 65165 - RNA, 1701 nt, Artificial Sequence
  derived and/or modified CDS sequence (opt1) from hemagglutinin__InfluenzaA__ABG88454
augaagaccaucaucgcccugagcuacauccucugccugguguucgcccagaagcugcccggcaacgacaacuccaccgcgacgcucugccuggggcaccacgccgucccgaacggcacccuggugaagaccaucaccaacgaccagaucgaggugacgaacgccaccgagcucguccagagcuccagcaccgggcgcaucugcgacagcccccaccggauccuggacggcaagaacugcacccugaucgacgcccuccugggggacccccacugcgacggcuuccagaacaaggagugggaccuguucguggagcgcuccaaggccuacuccaacugcuaccccuacgacgugccggacuacgcgagccuccggucccuggucgccagcuccggcacgcuggaguucaucaacgaggacuucaacuggaccgggguggcccaggacggcaagagcuacgccugcaagcgcggguccgcgaacagcuucuucucccggcucaacuggcugcacaagcuggaguacaaguaccccgcccucaacgugaccaugcccaacaacggcaaguucgacaagcuguacaucuggggcguccaccaccccagcaccgacuccgaccagacgagccuguacgugcgcgccuccgggggcgugaccgucagcaccaagcggagccagcagaccgugaucccgaacaucgggucccgccccugggugcggggccucagcucccgcaucagcaucuacuggacgaucgucaagcccggggacauccugcugaucaacuccaccggcaaccucaucgcgccccggggcuacuucaagauccgcagcgggaaguccagcaucaugcgguccgacgccagcaucggcaacugcuccagcgagugcaucaccccgaacggguccauccccaacgacaagcccuuccagaacgugaaccgcaucaccuacggcgccugcccccgguacgugaagcagaacacgcugaagcuggccaccgggaugcgcaacgucccggagaagcagacccggggcaucuucggcgccaucgccggguucaucgagaacggcugggaggggaugguggacggcugguacggguuccgccaccagaacagcgagggcaccggccaggccgcggaccucaaguccacgcaggccgccaucgaccagaucaacgggaagcugaaccggcugaucggcaagaccaacgacaaguuccaccagaucgagaaggaguucagcgagguggaggggcgcauccaggaccucgagaaguacgucgaggacaccaagaucgaccugugguccuacaacgccgagcugcucguggcccuggagaaccagcacaccaucgaccugacggacagcgagaugaacaagcuguucgagcggacccgcaagcagcuccgcgagaacgcggaggacaugggcaacgggugcuucaagaucuaccacaagugcgacaacgccugcaucggcuccauccggaacggcaccuacgaccacgacguguaccgcgacgaggcccugaacaaccgguuccagaucaagggggucgagcucaagagcggcuacaaggacuggauccuguggaucagcuucgccaucuccugcuuccugcucugcgugguccugcugggguucaucaugugggccugccagaagggcaacauccgcugcaacaucugcaucuga

SEQ ID NO: 65166 - RNA, 1701 nt, Artificial Sequence
  derived and/or modified CDS sequence (opt1) from hemagglutinin__InfluenzaA__ABG88465
augaagaccaucaucgcccugagcuacauccucugccugguguucgcccagaagcugcccggcaacgacaacuccaccgcgacgcucugccuggggcaccacgccgucccgaacggcacccuggugaagaccaucaccaacgaccagaucgaggugacgaacgccaccgagcucguccagagcuccagcaccgggcgcaucugcgacagcccccaccggauccuggacggcaagaacugcacccugaucgacgcccuccugggggacccccacugcgacggcuuccagaacaaggagugggaccuguucguggagcgcuccaaggccuacuccaacugcuaccccuacgacgugccggacuacgcgagccuccggucccuggucgccagcuccggcacgcuggaguucaucaacgaggacuucaacuggaccgggguggcccaggacggcaagagcuacgccugcaagcgcggguccgugaacagcuucuucucccggcucaacuggcugcacaagcuggaguacaaguaccccgcgcucaacgucaccaugcccaacaacggcaaguucgacaagcuguacaucuggggcgugcaccaccccagcaccgacuccgaccagacgagccuguacgugcgcgccuccgggcgggucaccgugagcaccaagcgcagccagcagaccgugaucccgaacaucggcuuccggcccuggguccgcgggcucuccagccggaucuccaucuacuggacgaucgugaagcccggcgacauccugcugaucaacagcaccgggaaccucaucgcgccccgcggcuacuucaagauccggaacggcaaguccagcaucaugcgcuccgacgccccgaucgggaacugcagcuccgagugcaucacccccaacggcagcauccccaacgacaagcccuuccagaacgugaaccggaucaccuacggggccugcccgcgcuacgucaagcagaacacgcugaagcuggccaccggcaugcggaacauccccgagaagcagacccgcgggaucuucggcgccaucgccggcuucaucgagaacgggugggagggcaugguggacgggugguacggcuuccggcaccagaacuccgaggggaccggccaggccgccgaccucaagagcacgcaggcggccaucgaccagaucaacggcaagcugaaccgccugaucgagaagaccaacgagaaguuccaccagaucgagaaggaguucuccgagguggaggggcggauccaggaccucgagaaguacgucgaggacaccaagaucgaccuguggagcuacaacgccggccugcucguggcccuggagaaccagcacaccaucgaccugacggacuccgagaugaacaagcuguucgagcgcacccgcaagcagcuccgggagaacgccgaggacauggggaacggcugcuucaagaucuaccacaagugcgacaacgcgugcaucgggagcauccgcaacggcaccuacgaccacgacguguaccgggacgaggcccugaacaaccgcuuccagaucaagggcgucgagcucaaguccggguacaaggacuggauccuguggaucagcuucgccaucuccugcuuccugcucugcgugguccugcugggcuucaucaugugggccugccagaaggggaacauccggugcaacaucugcaucuga

SEQ ID NO: 65167 - RNA, 1701 nt, Artificial Sequence; identical to SEQ ID NO: 65048
  derived and/or modified CDS sequence (opt1) from hemagglutinin__InfluenzaA__ABG88476

SEQ ID NO: 65168 - RNA, 1701 nt, Artificial Sequence; identical to SEQ ID NO: 65048
  derived and/or modified CDS sequence (opt1) from hemagglutinin__InfluenzaA__ABG88487

SEQ ID NO: 65169 - RNA, 1701 nt, Artificial Sequence; identical to SEQ ID NO: 65048
  derived and/or modified CDS sequence (opt1) from hemagglutinin__InfluenzaA__ABG88498

SEQ ID NO: 65170 - RNA, 1701 nt, Artificial Sequence; identical to SEQ ID NO: 65048
  derived and/or modified CDS sequence (opt1) from hemagglutinin__InfluenzaA__ABG88509

SEQ ID NO: 65171 - RNA, 1701 nt, Artificial Sequence
  derived and/or modified CDS sequence (opt1) from hemagglutinin__InfluenzaA__ABG88520
augaagaccaucaucgcccugagcuacaucuccugccucguguucgcccagaagcugcccggcaacgacaacagcaccgcgacgcugugccucgggcaccacgccgucccgaacggcacccuggugaagaccaucaccaacgaccagaucgaggugacgaacgccaccgagcugguccaguccagcuccaccgggcgcaucugcgacagcccccaccggauccucgacggcaagaacugcacccugaucgacgcccugcucggggacccccacugcgacggcuuccagaacaaggagugggaccuguucguggagcgcuccaaggccuacagcaacugcuaccccuacgacgugccggacuacgcgucccugcggagccucgucgccuccagcggcacgcuggaguucaucaacgaggacuucaacuggaccgggguggcccaggacggcaaguccuacgccugcaagcgcgggagcgugaacuccuucuucagccggcugaacuggcuccacaagcuggaguacaaguaccccgcgcugaacgucaccaugcccaacaacggcaaguucgacaagcucuacaucuggggcgugcaccaccccuccaccgacagcgaccagacgucccuguacgugcgcgccagcgggcgggucaccgugagcaccaagcgcucccagcagaccgugaucccgaacaucggcuuccggcccuggguccgcgggcugagcucccggaucagcaucuacuggacgaucgugaagcccggcgacauccuccugaucaacuccaccgggaaccugaucgcgccccgcggcuacuucaagauccggaacggcaagagcuccaucaugcgcagcgacgccccgaucgggaacugcuccagcgagugcaucacccccaacggcuccauccccaacgacaagcccuuccagaacgugaaccggaucaccuacggggccugcccgcgcuacgucaagcagaacacgcucaagcuggccaccggcaugcggaacgugcccgagaagcagacccgcgggaucuucggcgccaucgccggcuucaucgagaacgggugggagggcaugguggacgggugguacggcuuccggcaccagaacagcgaggggaccggccaggccgccgaccugaaguccacgcaggcggccaucgaccagaucaacggcaagcucaaccgccugaucgagaagaccaacgagaaguuccaccagaucgagaaggaguucagcgaggucgaggggcggauccaggaccuggagaaguacguggaggacaccaagaucgaccucugguccuacaacgccggccugcugguggcccucgagaaccagcacaccaucgaccugacggacagcgagaugaacaagcuguucgagcgcacccgcaagcagcuccgggagaacgccgaggacauggggaacggcugcuucaagaucuaccacaagugcgacaacgcgugcaucggguccauccgcaacggcaccuacgaccacgacgucuaccgggacgaggcccugaacaaccgcuuccagaucaagggcguggagcucaagagcggguacaaggacuggauccuguggaucuccuucgccaucagcugcuuccugcugugcgucgugcuccugggcuucaccaugugggccugccagaaggggaacauccggugcaacaucugcaucuga

SEQ ID NO: 65172 - RNA, 1701 nt, Artificial Sequence
  derived and/or modified CDS sequence (opt1) from hemagglutinin__InfluenzaA__ABG88531
augaagaccaucaucgcccugagcuacauccucugccugguguucgcccagaagcugcccggcaacgacaacuccaccgcgacgcucugccuggggcaccacgccgucccgaacggcacccuggugaagaccaucaccaacgaccagaucgaggugacgaacgccaccgagcucguccagagcuccagcaccgggcgcaucugcgacagcccccaccggauccuggacggcaagaacugcacccugaucgacgcccuccugggggacccccacugcgacggcuuccagaacaaggagugggaccuguucguggagcgcuccaaggccuacuccaacugcuaccccuacgacgugccggacuacgcgagccuccggucccuggucgccagcuccggcacgcuggaguucaucaacgaggacuucaacuggaccgggguggcccaggacggcaagagcuacgccugcaagcgcggguccgugaacagcuucuucucccggcucaacuggcugcacaagcuggaguacaaguaccccgcgcucaacgucaccaugcccaacaacggcaaguucgacaagcuguacaucuggggcgugcaccaccccagcaccgacuccgugcagacgagccuguacguccgcgccuccgggcgggugaccgugagcaccaagcgcagccagcagaccgucaucccgaacaucggcuuccggcccugggugcgcgggcucuccagccggaucuccaucuacuggacgaucgugaagcccggcgacauccugcugaucaacagcaccgggaaccucaucgcgccccgcggcuacuucaagauccggaacggcaaguccagcaucaugcgcuccgacgccccgaucgggaacugcagcuccgagugcaucacccccaacggcagcauccccaacgacaagcccuuccagaacgucaaccggaucaccuacggggccugcccgcgcuacgugaagcagaacacgcugaagcuggccaccggcaugcggaacgugcccgagaagcagacccgcgggaucuucggcgccaucgccggcuucaucgagaacgggugggagggcauggucgacgggugguacggcuuccggcaccagaacuccgaggggaccggccaggccgccgaccucaagagcacgcaggcggccaucgaccagaucaacggcaagcugaaccgccugaucgagaagaccaacgagaaguuccaccagaucgagaaggaguucuccgagguggaggggcggauccaggaccucgagaaguacguggaggacaccaagaucgaccuguggagcuacaacgccggccugcucgucgcccuggagaaccagcacaccaucgaccugacggacuccgagaugaacaagcuguucgagcgcacccgcaagcagcuccgggagaacgccgaggacauggggaacggcugcuucaagaucuaccacaagugcgacaacgcgugcaucgggagcauccgcaacggcaccuacgaccacgacguguaccgggacgaggcccugaacaaccgcuuccagaucaagggcgucgagcucaaguccggguacaaggacuggauccuguggaucagcuucgccaucuccugcuuccugcucugcguggugcugcugggcuucaucaugugggccugccagaaggggaacauccggugcaacaucugcaucuga

SEQ ID NO: 65173 - RNA, 1698 nt, Artificial Sequence; identical to SEQ ID NO: 65059
  derived and/or modified CDS sequence (opt1) from hemagglutinin__InfluenzaA__ABG88553

SEQ ID NO: 65174 - RNA, 1701 nt, Artificial Sequence; identical to SEQ ID NO: 64734
  derived and/or modified CDS sequence (opt1) from hemagglutinin__InfluenzaA__ABG88564

SEQ ID NO: 65175 - RNA, 1701 nt, Artificial Sequence; identical to SEQ ID NO: 64764
  derived and/or modified CDS sequence (opt1) from hemagglutinin__InfluenzaA__ABG88575

SEQ ID NO: 65176 - RNA, 1701 nt, Artificial Sequence; identical to SEQ ID NO: 64674
  derived and/or modified CDS sequence (opt1) from hemagglutinin__InfluenzaA__ABG88586

SEQ ID NO: 65177 - RNA, 1701 nt, Artificial Sequence
  derived and/or modified CDS sequence (opt1) from hemagglutinin__InfluenzaA__ABG88597
augaagaccaucaucgcccugagcuacauccucugccugguguucgcccagaagcugcccgcgaacgacaacuccaccgccacgcucugccugggccaccacgccgucccgaacgggacccuggugaagaccaucaccaacgacaacaucgaggugacgaacgccaccgagcucguccagagcuccagcaccggccgcaucugcgacagcccccaccagauccuggacggggagaacugcacccugaucgacgcccuccugggcgacccccacugcgacggguuccagaacaaggagugggaccuguucguggagcggagcacggcguacuccaacugcuaccccuacgacgugccggacuacgccagccuccgcucccuggucgccagcuccggcacccuggaguucaacaacgagagcuucaacuggaccggcguggaccagaacgggaccuccagcgccugcaagcggcgcuccaacaagagcuucuucucccggcucaacuggcugcaccagcugaaguacaaguaccccgcgcucaacgugacgaugcccaacaacgagaaguucgacaagcuguacaucuggggcguccaccaccccagcaccgacuccgaccagaucagccuguacgcccaggccagcgggcgcgugaccguguccaccaagcggagccagcagacggucaucccgaacaucggcucccgccccugggugcgcggggugagcucccggaucagcaucuacuggaccaucgucaagcccggcgacauccuccugaucaacuccaccggcaaccugaucgcgccccggggguacuucaagauccgcagcggcaaguccagcaucaugcgguccaacgccccgaucgggaagugcaacagcgagugcaucacccccaacggcuccauccccaacgacaagcccuuccagaacgugaaccgcaucacguacggcgccugcccgcgguacgugaagcagaacacccucaagcuggccaccgggaugcgcaacguccccgagaagcagacccggggcaucuucggggccaucgccggcuucaucgagaacgggugggagggcaugguggacggcugguacggguuccgccaccagaacagcgagggcacggggcaggccgcggaccugaaguccacccaggccgccaucaaccagaucaacggcaagcucaaccggcugaucgagaagaccaacgagaaguuccaccagaucgagaaggaguucagcgagguggaggggcgcauccaggaccuggagaaguacgucgaggacaccaagaucgaccucugguccuacaacgccgagcugcugguggcccucgagaaccagcacacgaucgaccugaccgacagcgagaugaacaagcuguucgagcggacccgcaagcagcuccgcgagaacgcggaggacaugggcaacggcugcuucaagaucuaccacaagugcgacaacgccugcaucggguccauccggaacggcaccuacgaccacgacguguaccgcgacgaggcccugaacaaccgguuccagaucaagggggucgagcugaaguccggcuacaaggacuggauccucuggaucagcuucgccaucuccugcuuccugcugugcgugguccuccugggguucaucaugugggccugccagaagggcaacauccgcugcaacaucugcaucuga

SEQ ID NO: 65178 - RNA, 1701 nt, Artificial Sequence
  derived and/or modified CDS sequence (opt1) from hemagglutinin__InfluenzaA__ABG88608
augaagaccaucaucgcccugagcuacauccucugccugguguucgcccagaagcugcccggcaacgacaacuccaccgcgacgcucugccuggggcaccacgccgucccgaacggcacccuggugaagaccaucaccaacgaccagaucgaggugacgaacgccaccgagcucguccagagcuccagcaccgggcgcaucugcgacagcccccaccagauccuggacggcgagaacugcacccugaucgacgcccuccugggggacccccacugcgacggcuuccagaacaaggagugggaccuguucguggagcggagccgcgccuacuccaacugcuaccccuacgacgugccggacuacgucagccuccggucccugguggcgagcuccggcacgcuggaguucaacaacgagagcuucaacuggaccgggguggcccagaacggcaccuccagcgccugcaagcgccgguccgacaagagcuucuucucccgccucaacuggcugcaccagcugaaguacaaguaccccgcccucaacgucaccaugcccaacaacgagaaguucgacaagcuguacaucuggggcgugcaccaccccgggacggacagcgaccagaucucccuguacgcgcaggccagcgggcgggugaccgucagcaccaagcgcucccagcagaccgugaucccgaacaucggcagccggcccugggugcgcggcgucuccagccggaucuccaucuacuggacgaucgugaagcccggggacauccuccugaucaacagcaccggcaaccugaucgcgccccgcggguacuucaagauccgguccggcaagagcuccaucaugcgcagcgacgccccgaucggcaagugcaacuccgagugcaucacccccaacgggagcauccccaacgacaagcccuuccagaacgugaaccggaucaccuacggcccgugcccccgcuacgucaagcagaacacgcucaagcuggccaccgggaugcggaacgugcccgagaagcagacccgcggcaucuucggggccaucgccggcuucaucgagaacggcugggaggggaugauggacggcugguacggguuccggcaccagaacuccgagggcaccgggcaggccgccgaccugaaguccacgcaggccgcgaucaaccagaucaacggcaagcucaaccgccugaucgagaagaccaacgagaaguuccaccagaucgagaaggaguucuccgagguggagggccggauccaggaccuggagaaguacgucgaggacaccaagaucgaccucuggagcuacaacgccgagcugcugguggcccucgagaaccagcacaccaucgaccugacggacuccgagaugaacaagcuguucgagcgcaccaagaagcagcuccgcgagaacgccgaggacauggggaacggcugcuucaagaucuaccacaagugcgacaacgccugcaucgggagcauccggaacggcaccuacgaccacgacguguaccgcgacgaggcgcugaacacccgguuccagaucaagggggucgagcugaaguccggcuacaaggacuggauccucuggaucagcuucgccaucagcugcuuccugcugugcaucgugcuccugggcuucaucaugugggccugccagaaggggaacauccgcugcaacaucugcaucuga

SEQ ID NO: 65179 - RNA, 1701 nt, Artificial Sequence; identical to SEQ ID NO: 64586
  derived and/or modified CDS sequence (opt1) from hemagglutinin__InfluenzaA__ABG88619

SEQ ID NO: 65180 - RNA, 1701 nt, Artificial Sequence
  derived and/or modified CDS sequence (opt1) from hemagglutinin__InfluenzaA__ABG88630
augaagaccaucaucgcccugagcuacauccucugccugguguucgcccagaagcugcccggcaacgacaacuccaccgcgacgcucugccuggggcaccacgccgucccgaacggcacccuggugaagaccaucaccaacgaccagaucgaggugacgaacgccaccgagcucguccagagcuccagcaccgggcgcaucugcgacagcccccaccaggugcuggacggcgagaacugcacccugaucgacgcccuccugggggacccccacugcgacggcuuccagaacaaggagugggaccuguucguggagcggagcaaggccuacuccaacugcuaccccuacgacgucccggacuacgugagccuccgcucccugguggcgagcuccggcacgcuggaguucaacaacgagagcuucaacuggaccggggucgcccagaacggcaccuccagcgccugcaagcggcgcuccgacaagagcuucuucucccggcucaacuggcugcaccagcugaaguacaaguaccccgcccucaacgugaccaugcccaacaacgagaaguucgacaagcuguacaucuggggcgugcaccaccccgggacggacagcgaccagaucucccuguacgcgcaggccagcgggcgcgucaccgugagcaccaagcggucccagcagaccgugaucccgaacaucggcagccgccccuggguccggggcguguccagccgcaucuccaucuacuggacgaucgugaagcccggggacauccuccugaucaacagcaccggcaaccugaucgcgccccggggguacuucaagauccgcuccggcaagagcuccaucaugcggagcgacgccccgaucggcaagugcaacuccgagugcaucacccccaacgggagcauccccaacgacaagcccuuccagaacgucaaccgcaucaccuacggcgccugcccgcgguacgugaagcagaagacgcucaagcuggccaccgggaugcgcaacgugcccgagaagcagacccggggcaucuucggggccaucgccggcuucaucgagaacggcugggaggggaugauggacggcugguacggguuccgccaccagaacuccgagggcaccgggcaggccgccgaccugaaguccacgcaggcggccaucaaccagaucaacggcaagcucaaccggcugaucgagaagaccaacgagaaguuccaccagaucgagaaggaguucuccgaggucgagggccgcauccaggaccuggagaaguacguggaggacaccaagaucgaccucuggagcuacaacgccgagcugcugguggcccucgagaaccagcacaccaucgaccugacggacuccgagaugaacaagcuguucgagcggaccaagaagcagcuccgcgagaacgccgaggacauggggaacggcugcuucaagaucuaccacaagugcgacaacgcgugcaucgggagcauccgcaacggcaccuacgaccacgacgucuaccgggacgaggcccugaacaaccgcuuccagaucaaggggguggagcugaaguccggcuacaaggacuggauccucuggaucagcuucgccaucagcugcuuccugcugugcaucguccuccugggcuucaucaugugggccugccagaaggggaacauccggugcaacaucugcaucuga

SEQ ID NO: 65181 - RNA, 1701 nt, Artificial Sequence
  derived and/or modified CDS sequence (opt1) from hemagglutinin__InfluenzaA__ABG88641
augaagaccaucaucgcccugagcuacauccucugccugguguucgcccagaagcugcccggcaacgacaacuccaccgcgacgcucugccuggggcaccacgccgucccgaacggcacccuggugaagaccaucaccaacgaccagaucgaggugacgaacgccaccgagcucguccagagcuccagcaccucccgcaucugcgacagcccccaccagauccuggacggggagaacugcacccugaucgacgcccuccugggcgacccccacugcgacggguuccagaacaaggagugggaccuguucguggagcgguccaaggccuacagcaacugcuaccccuacgacgugccggacuacgucucccuccgcagccugguggcguccagcggcacgcuggaguucaacaacgaguccuucaacuggaccggcguggcccagaacgggaccagcuccgccugcaagcggcgcagcgacaaguccuucuucagccggcucaacuggcugcaccagcugaaguacaaguaccccgcccucaacgucaccaugcccaacaacgagaaguucgacaagcuguacaucuggggcgugcaccaccccgggacggacuccgaccagaucagccuguacgcgcaggccagcggccgcgugaccgucuccaccaagcggagccagcagaccgugaucccgaacaucggguccggccccugggugcgcggcgucagcucccggaucagcaucuacuggacgaucgugaagcccggggacauccuccugaucaacuccaccggcaaccugaucgcgccccgcggguacuucaagauccggagcggcaaguccagcaucaugcgcuccgacgccccgaucggcaagugcaacagcgagugcaucacccccaacggguccauccccaacggcaagcccuuccagaacgugaaccggaucaccuacggggccugcccgcgcuacgucaagcagaacacgcucaagcuggccaccggcaugcggaacgugcccgagaagcagacccgcgggaucuucggcgccaucgccggcuucaucgagaacgggugggagggcaugauggacgggugguacggcuuccggcaccagaacagcgaggggaccggccaggccgccgaccugaaguccacgcaggcggccaucaaccagaucaacggcaagcucaaccgccugaucgagaagaccaacgagaaguuccaccagaucgagaaggaguucagcgagguggaggggcggauccaggaccuggagaaguacgucgaggacaccaagaucgaccucugguccuacaacgccgagcugcugguggcccucgagaaccagcacaccaucgaccugacggacagcgagaugaacaagcuguucgagcgcaccaagaagcagcuccgggagaacgccgaggacaugggcaacgggugcuucaagaucuaccacaagugcgacaacgcgugcaucggcuccauccgcaacgggaccuacgaccacgacguguaccgcgacgaggcccugaacaaccgguuccagaucaagggcgucgagcucaagagcggcuacaaggacuggauccuguggaucagcuucgccaccuccugcuuccugcugugcaucgugcuccugggguucaucaugugggccugccagaagggcaacauccgcugcaacaucugcaucuga

SEQ ID NO: 65182 - RNA, 1701 nt, Artificial Sequence; identical to SEQ ID NO: 64540
  derived and/or modified CDS sequence (opt1) from hemagglutinin__InfluenzaA__ABG88652

SEQ ID NO: 65183 - RNA, 1701 nt, Artificial Sequence; identical to SEQ ID NO: 64540
  derived and/or modified CDS sequence (opt1) from hemagglutinin__InfluenzaA__ABG88663

SEQ ID NO: 65184 - RNA, 1701 nt, Artificial Sequence; identical to SEQ ID NO: 64540
  derived and/or modified CDS sequence (opt1) from hemagglutinin__InfluenzaA__ABG88674

SEQ ID NO: 65185 - RNA, 1701 nt, Artificial Sequence; identical to SEQ ID NO: 64540
  derived and/or modified CDS sequence (opt1) from hemagglutinin__InfluenzaA__ABG88685

SEQ ID NO: 65186 - RNA, 1701 nt, Artificial Sequence; identical to SEQ ID NO: 64540
  derived and/or modified CDS sequence (opt1) from hemagglutinin__InfluenzaA__ABG88696

SEQ ID NO: 65187 - RNA, 1701 nt, Artificial Sequence; identical to SEQ ID NO: 64306
  derived and/or modified CDS sequence (opt1) from hemagglutinin__InfluenzaA__ABG88707

SEQ ID NO: 65188 - RNA, 1701 nt, Artificial Sequence; identical to SEQ ID NO: 64306
  derived and/or modified CDS sequence (opt1) from hemagglutinin__InfluenzaA__ABG88718

SEQ ID NO: 65189 - RNA, 1701 nt, Artificial Sequence
  derived and/or modified CDS sequence (opt1) from hemagglutinin__InfluenzaA__ABG88729
augaagaccaucaucgcccugagcuacauccucugccugguguucgcccagaagcugcccggcaacgacaacuccaccgcgacgcucugccuggggcaccacgccgucccgaacggcacccuggugaagaccaucaccaacgaccagaucgaggugacgaacgccaccgagcucguccagagcuccagcaccgggcgcaucugcgacagcccccaccggauccuggacggcaagaacugcacccugaucgacgcccuccugggggacccccacugcgacggcuuccagaacaaggagugggaccuguucguggagcgcuccaaggccuacuccaacugcuaccccuacgacgugccggacuacgcgagccuccggucccuggucgccagcuccggcacgcuggaguucaucaacgaggacuucaacuggaccgggguggcccaggacggcgggagcuacgccugcaagcgcggcuccgugaacagcuucuucucccggcucaacuggcugcacaagcuggaguacaaguaccccgcgcucaacgucaccaugcccaacagcgggaaguucgacaagcuguacaucuggggcgugcaccaccccuccaccgacagcgaccagacgucccuguacgugcgcgccagcggccgggucaccgugagcaccaagcgcucccagcagaccgugacgccgaacaucgggagccggcccuggguccgcggccucuccagccggaucuccaucuacuggaccaucgugaagcccggggacauccugcugaucaacagcaccggcaaccucaucgcgccccgcggcuacuucaagauccggaacgggaaguccagcaucaugcgcuccgacgccccgaucggcaacugcagcuccgagugcaucacccccaacgggagcauccccaacgacaagcccuuccagaacgugaaccggaucacguacggcgccugcccgcgcuacgucaagcagaacacccugaagcuggccaccgggaugcggaacgugcccgagaagcagacccgcggcaucuucggcgccaucgccggguucaucgagaacggcugggaggggaugguggacggcugguacggguuccggcaccagaacuccgagggcacgggccaggccgccgaccucaagagcacccaggcggccaucgaccagaucaacgggaagcugaaccgccugaucgagaagaccaacgagaaguuccaccagaucgagaaggaguucuccgaggucgagggccggauccaggaccucgagaaguacguggaggacaccaagaucgaccuguggagcuacaacgccgagcugcucguggcccuggagaaccagcacacgaucgaccugaccgacuccgagaugaacaagcuguucgagaagacccgcaagcagcuccgcgagaacgccgaggacauggggaacggcugcuucaagaucuaccacaagugcgacaacgcgugcaucgggagcauccggaacggcaccuacgaccacgacgucuaccgcgacgaggcccugaacaaccgguuccagaucaagggcguggagcucaaguccggguacaaggacuggauccuguggaucagcuucgccaucagcugcuuccugcucugcgucgugcugcugggcuucaucaugugggccugccagaaggggaacauccgcugcaacaucugcaucuga

SEQ ID NO: 65190 - RNA, 1701 nt, Artificial Sequence
  derived and/or modified CDS sequence (opt1) from hemagglutinin__InfluenzaA__ABG88740
augaagaccaucaucgcccugagcuacauccucugccugguguucgcccagaagcugcccggcaacgacaacuccaccgcgacgcucugccuggggcaccacgccgucccgaacggcacccuggugaagaccaucaccaacgaccagaucgaggugacgaacgccaccgagcucguccagagcuccagcaccgggcgcaucugcgacagcccccaccggauccuggacggcaagaacugcacccugaucgacgcccuccugggggacccccacugcgacggcuuccagaacaaggagugggaccuguucguggagcgcuccaaggccuacuccaacugcuaccccuacgacgugccggacuacgcgagccuccggucccuggucgccagcuccggcacgcuggaguucaucaacgaggacuucaacuggaccgggguggcccaggacggcaagagcuacgccugcaagcgcggguccgugaacagcuucuucucccggcucaacuggcugcacaagcuggaguacaaguaccccgcgcucaacgucaccaugcccaacaacggcaaguucgacaagcuguacaucuggggcgugcaccaccccagcaccgacuccgaccagacgagccuguacgugcgcgccuccgggcgggucaccgugagcaccaagcgcagccagcagaccgugaucccgaacaucggcucccggcccuggguccgcgggcucagcucccggaucagcaucuacuggacgaucgugaagcccggcgacauccugcugaucaacuccaccgggaaccucaucgcgccccgcggcuacuucaagauccggaacggcaagagcuccaucaugcgcagcgacgccccgaucgggaacugcuccagcgagugcaucacccccaacggcuccauccccaacgacaagcccuuccagaacgugaaccggaucaccuacggggccugcccgcgcuacaucaagcagaacacgcugaagcuggccaccggcaugcggaacguccccgagaagcagacccgcgggaucuucggcgccaucgccggcuucaucgagaacgggugggagggcaugguggacgggugguacggcuuccggcaccagaacagcgaggggaccggccaggccgccgaccucaaguccacgcaggcggccaucgaccagaucaacggcaagcugaaccgccugaucgagaagaccaacgagaaguuccaccagaucgagaaggaguucagcgagguggaggggcggauccaggaccucgagaaguacgucgaggacaccaagaucgaccugugguccuacaacgccgagcugcucguggcccuggagaaccagcacaccaucgaccugacggacagcgagaugaacaagcuguucgagcgcacccgcaagcagcuccgggagaacgccgaggacaugggcaacgggugcuucaagaucuaccacaagugcgacaacgcgugcaucggcuccauccgcaacgggaccuacgaccacgacguguaccgggacgaggcccugaacaaccgcuuccagaucaagggcgucgagcucaagagcggcuacaaggacuggauccuguggaucuccuucgccaucagcugcuuccugcucugcgugguccugcugggguucaucaugugggccugccagaagggcaacauccggugcaacaucugcaucuga

SEQ ID NO: 65191 - RNA, 1701 nt, Artificial Sequence; identical to SEQ ID NO: 65077
  derived and/or modified CDS sequence (opt1) from hemagglutinin__InfluenzaA__ABG88751

SEQ ID NO: 65192 - RNA, 1701 nt, Artificial Sequence
  derived and/or modified CDS sequence (opt1) from hemagglutinin__InfluenzaA__ABG88762
augaagaccaucaucgcccugagcuacauccucugccugguguucacccagaagcugcccggcaacgacaacuccacggccacccucugccuggggcaccacgcggucccgaacggcacccuggugaagaccaucacgaacgaccagaucgaggugaccaacgccaccgagcucguccagagcuccagcaccgggcgcaucugcgacagcccccaccggauccuggacggcaagaacugcacgcugaucgacgcccuccugggggacccccacugcgacggcuuccagaacaaggagugggaccuguucguggagcgcagcaaggccuacuccaacugcuaccccuacgacgugccggacuacgccagccuccggucccuggucgcgagcuccggcacccuggaguucaucaacgaggacuucaacuggaccgggguggcccaggacggcgggagcuacgccugcaagcgcggcuccgugaacagcuucuucucccggcucaacuggcugcacaagcuggaguacaaguaccccgcccucaacgucaccaugcccaacaacgggaaguucgacaagcuguacaucuggggcgugcaccaccccagcacggacuccgaccagaccagccuguacgugcgcgcguccggccgggucaccgugagcaccaagcgcagccagcagacggugaucccgaacaucgggucccggcccuggguccgcggccucagcucccggaucagcaucuacuggaccaucgugaagcccggggacauccugcugaucaacuccaccggcaaccucaucgcgccccgcggcuacuucaagauccggaacgggaaguccuccaucaugcgcagcgacgccuccaucggcaacugcagcuccgagugcaucaccccgaacgggagcauccccaacgacaagcccuuccagaacgugaaccggaucacguacggcgccugcccccgcuacgucaagcagaacacccugaagcuggccaccgggaugcggaacgugccggagaagcagacccgcggcaucuucggcgccaucgccggguucaucgagaacggcugggaggggaugguggacggcugguacggguuccggcaccagaacuccgagggcacgggccaggccgccgaccucaagagcacccaggccgcgaucgaccagaucaacgggaagcugaaccgccugaucgagaagaccaacgagaaguuccaccagaucgagaaggaggucuccgagguggagggccggauccaggaccucgagaaguacguggaggacaccaagaucgaccuguggagcuacaacgccgagcugcucgucgcccuggagaaccagcacacgaucgaccugaccgacuccgagaugaacaagcuguucgagcgcacccgcaagcagcuccgggagaacgccgaggacauggggaacggcugcuucaagaucuaccacaagugcgacaacgccugcaucgggagcauccgcaacggcaccuacgaccacgacguguaccgggacgaggcgcugaacaaccgcuuccagaucaaguccgucgagcucaagagcggcuacaaggacuggauccuguggaucagcuucgccaucuccugcuuccugcucugcguggugcugcugggguucaucaugugggccugccagaagggcaacauccggugcaacaucugcaucuga

SEQ ID NO: 65193 - RNA, 1701 nt, Artificial Sequence
  derived and/or modified CDS sequence (opt1) from hemagglutinin__InfluenzaA__ABG88773
augaagaccaucaucgcccugagcuacauccucugccugguguucgcccagaagcugcccggcaacgacaacuccaccgcgacgcucugccuggggcaccacgccgucccgaacggcacccuggugaagaccaucaccaacgaccagaucgaggugacgaacgccaccgagcucguccagagcuccagcgccgggcgcaucugcgacagcccccaccggauccuggacggcaagaacugcacccugaucgacgcccuccugggggacccccacugcgacggcuuccagaacaaggagugggaccuguucguggagcgcuccaaggcguacuccaacugcuaccccuacgacgugccggacuacgccagccuccggucccuggucgccagcuccggcacccuggaguucaucaacgaggacuucaacuggacggggguggcccaggacggcaagagcuacgcgugcaagcgcggguccgugaacagcuucuucucccggcucaacuggcugcacaagcuggaguacaaguaccccgcccucaacgucaccaugcccaacaacggcaaguucgacaagcuguacaucuggggcgugcaccaccccagcaccgacuccgaccagaccagccuguacgugcgcgccuccgggcgggucacggugagcaccaagcgcagccagcagaccgugaucccgaacaucggcucccggcccuggguccgcgggcucagcucccggaucagcaucuacuggaccaucgugaagcccggcgacauccugcugaucaacuccacggggaaccucaucgcgccccgcggcuacuucaagauccggaacggcaagagcuccaucaugcgcagcgacgccccgaucgggaacugcuccagcgagugcaucacccccaacggcuccauccccaacgacaagcccuuccagaacgugaaccggaucaccuacggggccugcccgcgcuacgucaagcagaacacccugaagcuggccacgggcaugcggaacgugcccgagaagcagacccgcgggaucuucggcgccaucgccggcuucaucgagaacgggugggagggcaugguggacgggugguacggcuuccggcaccagaacagcgaggggaccggccaggccgcggaccucaaguccacccaggccgccacggaccagaucaacggcaagcugaaccgccugaucgagaagaccaacgagaaguuccaccagaucgagaaggaguucagcgaggucgaggggcggauccaggaccucgagaaguacguggaggacaccaagaucgaccugugguccuacaacgccgagcugcucguggcccuggagaaccagcacaccaucgaccugacggacagcgagaugaacaagcuguucgagcgcacccgcaagcagcuccgggagaacgcggaggacaugggcaacgggugcuucaagaucuaccacaagugcgacaacgccugcaucggcuccauccgcaacgggaccuacgaccacgacgucuaccgggacgaggcccugaacaaccgcuuccagaucaagggcguggagcucaagagcggcuacaaggacuggauccuguggaucuccuucgccaucagcugcuuccugcucugcgucgugcugcugggguucaucaugugggccugccagaagggcaacauccggugcaacaucugcaucuga

SEQ ID NO: 65194 - RNA, 1701 nt, Artificial Sequence
  derived and/or modified CDS sequence (opt1) from hemagglutinin__InfluenzaA__ABG88784
augaagaccaucaucgcccugagcuacauccucugccugguguucgcccagaagcugcccggcaacgacaacuccaccgcgacgcucugccuggggcaccacgccgucccgaacggcacccuggugaagaccaucaccaacgaccagaucgaggugacgaacgccaccgagcucguccagagcuccagcaccgggcgcaucugcgacagcccccaccggauccuggacggcaagaacugcacccugaucgacgcccuccugggggacccccacugcgacggcuuccagaacaaggagugggaccuguucguggagcgcuccaaggccuacuccaacugcuaccccuacgacgugccggacuacgcgagccuccggucccuggucgccagcuccggcacgcuggaguucaucaacgaggacuucaacuggaccgggguggcccaggacggcaagagcuacgccugcaagcgcggguccgugaacagcuucuucucccggcucaacuggcugcacaagcuggaguacaaguaccccgcgcucaacgucaccaugcccaacaacggcaaguucgacaagcuguacaucuggggcgugcaccaccccagcaccgacuccgaccagacgagccuguacgugcgcgccuccgggcgggucaccgugagcaccaagcgcagccagcagaccgugaucccgaacaucggcucccggcccuggguccgcgggcucagcucccggaucagcaucuacuggacgaucgugaagcccggcgacauccugcugaucaacuccaccgggaaccucaucgcgccccgcggcuacuucaagauccggaacggcaagagcuccaucaugcgcagcgacgccccgaucgggaacugcuccagcgagugcaucacccccaacggcuccauccccaacgacaagcccuuccagaacgugaaccggaucaccuacggggccugcccgcgcuacgucaagcagaacacgcugaagcuggccaccggcaugcggaacgugcccgagaagcagacccgcgggaucuucggcgccaucgccggcuucaucgagaacgggugggagggcaugguggacgggugguacggcuuccggcaccagaacagcgaggggaccggccaggccgccgaccucaaguccacgcaggcggccaucgaccagaucaacggcaagcugaaccgccugaucaagaagaccaacgagaaguuccaccagaucgagaaggaguucagcgaggucgaggggcggauccaggaccucgagaaguacguggaggacaccaagaucgaccugugguccuacaacgccgagcugcucguggcccuggagaaccagcacaccaucgaccugacggacagcgagaugaacaagcuguucgagcgcacccgcaagcagcuccgggagaacgccgaggacaugggcaacgggugcuucaagaucuaccacaagugcgacaacgcgugcaucggcuccauccgcaacgggaccuacgaccacgacgucuaccgggacgaggcccugaacaaccgcuuccagaucaagggcguggagcucaagagcggcuacaaggacuggauccuguggaucuccuucgccaucagcugcuuccugcucugcgucgugcugcugggguucaucaugugggccugccagaagggcaacauccggugcaacaucugcaucuga

SEQ ID NO: 65195 - RNA, 1701 nt, Artificial Sequence
  derived and/or modified CDS sequence (opt1) from hemagglutinin__InfluenzaA__ABG88806
augaagaccaucaucgcccugagcuacauccucugccugguguucgcccagaagcugcccggcaacgacaacuccaccgcgacgcucugccuggggcaccacgccgucccgaacggcacccuggugaagaccaucaccaacgaccagaucgaggugacgaacgccaccgagcucguccagagcuccagcaccgggcgcaucugcgacagcccccaccagauccuggacggcgagaacugcacccugaucgacgcccuccugggggacccccacugcgacggcuuccagaacaaggagugggaccuguucguggagcggagcaaggccuacuccaacugcuaccccuacgacgugccggacuacgucagccuccgcucccugguggcgagcuccggcacgcuggaguucaacaacgagagcuucaacuggaccgggguggcccagaacggcaccuccagcgccugcaagcggcgcuccgacaagagcuucuucucccggcucaacuggcugcaccagcugaaguacaaguaccccgcccucaacgucaccgugcccaacaacgagaaguucgacaagcuguacaucuggggcgugcaccaccccgggacggacagcgaccagaucucccuguacgcgcaggccagcgggcgcgucaccgugagcaccaagcggucccagcagaccgugaucccgaacaucggcagccgccccuggguccggggcguguccagccgcaucuccaucuacuggacgaucgugaagcccggggacauccuccugaucaacagcaccggcaaccugaucgcgccccggggguacuucaagauccgcuccggcaagagcuccaucaugcggagcgacgccccgaucggcaagugcaacuccgagugcaucacccccaacgggagcauccccaacgacaagcccuuccagaacgucaaccgcaucaccuacggcgccugcccgcgguacgugaagcagaacacgcucaagcuggccaccgggaugcgcaacgugcccgagaagcagacccggggcaucuucggggccaucgccggcuucaucgagaacggcugggaggggaugauggacggcugguacggguuccgccaccagaacuccgagggcaccgggcaggccgccgaccugaaguccacgcaggcggccaucaaccagaucaacggcaagcucaaccggcugaucgagaagaccaacgagaaguuccaccagaucgagaaggaguucuccgaggucgagggccgcauccaggaccuggagaaguacguggaggacaccaagaucgaccucuggagcuacaacgccgagcugcugguggcccucgagaaccagcacaccaucgaccugacggacuccgagaugaacaagcuguucgagcggaccaagaagcagcuccgcgagaacgccgaggacauggggaacggcugcuucaagaucuaccacaagugcgacaacgcgugcaucgggagcauccgcaacggcaccuacgaccacgacgucuaccgggacgaggcccugaacaaccgcuuccagaucaaggggguggagcugaaguccggcuacaaggacuggauccucuggaucagcuucgccaucagcugcuuccugcugugcaucguccuccugggcuucaucaugugggccugccagaaggggaacauccggugcaacaucugcaucuga

SEQ ID NO: 65196 - RNA, 1704 nt, Artificial Sequence
  derived and/or modified CDS sequence (opt1) from hemagglutinin__InfluenzaA__ABI16504
auggagaagaucgugcugcuccuggccaucgucagccuggugaaguccgaccagaucugcaucggcuaccacgccaacaacagcaccgagcaggucgacaccaucauggagaagaacgugacggugacccacgcgcaggacauccucgagaagacccacaacgggaagcugugcgaccuggacggcgugaagccccucauccugcgcgacugcuccgucgccggguggcugcucggcaacccgaugugcgacgaguucaucaacgugcccgaguggagcuacaucguggagaaggccaaccccgccaacgaccugugcuaccccgggaacuucaacgacuacgaggagcugaagcaccuccugucccggaucaaccacuucgagaagauccagaucaucagcaaguccagcugguccgaccacgaggccagcuccggcgucagcuccgcgugcccguaccagggcacccccagcuucuuccgcaacgugguguggcugaucaagaagaacaacacguaccccaccaucaagcgguccuacaacaacaccaaccaggaggaccuccugauccugugggggauccaccacagcaacaacgccgccgagcagaccaagcucuaccagaaccccacgaccuacaucuccgucggcaccagcacccugaaccugcgccucgugccgaagaucgccacgcgguccaaggugaacgggcagagcggccgcauggacuucuucuggaccauccugaagcccaacgacgcgaucaacuucgagagcaacgggaacuucaucgcccccgaguacgccuacaagaucgucaagaagggcgacuccgccaucaugaaguccgagguggaguacggcaacugcaacaccaagugccagacccccaucggggccaucaacagcagcaugccguuccacaacauccacccccugacgaucggcgagugccccaaguacgugaaguccaacaagcucguccuggcgaccgggcugcggaacagcccccuccgcgagcggcgccggaagcgcggccuguucggcgccaucgccggguucaucgagggcggguggcagggcaugguggacgggugguacggcuaccaccacuccaacgagcagggcagcggguacgccgccgacaaggaguccacccagaaggcgaucgacggcgugaccaacaaggucaacagcaucaucgacaagaugaacacgcaguucgaggccguggggcgggaguucaacaaccuggagcgccggaucgagaaccucaacaagaagauggaggacggcuuccuggacguguggaccuacaacgccgagcugcucguccugauggagaacgagcgcacccuggacuuccacgacuccaacgugaagaaccucuacgacaagguccggcugcagcugcgcgacaacgccaaggagcucgggaacggcugcuucgaguucuaccacaagugcgacaacgagugcauggagagcgugcggaacggcaccuacgacuacccgcaguacuccgaggaggcccgccugaagcgggaggagaucagcggggugaagcuggaguccaucggcacguaccagauccucagcaucuacuccaccgucgcgagcucccuggcccuggccaucaugguggccgggcucagccuguggaugugcagcaacggcucccugcagugccgcaucugcaucuga

SEQ ID NO: 65197 - RNA, 1701 nt, Artificial Sequence; identical to SEQ ID NO: 64657
  derived and/or modified CDS sequence (opt1) from hemagglutinin__InfluenzaA__ABI20793

SEQ ID NO: 65198 - RNA, 1701 nt, Artificial Sequence
  derived and/or modified CDS sequence (opt1) from hemagglutinin__InfluenzaA__ABI20837
augaaggccaagcugcucgugcugcugugcgccuucaccgcgaccuacgccgacacgaucugcaucggcuaccacgccaacaacagcaccgacaccgucgacaccgugcucgagaagaacgugacggucacccacuccgugaaccugcuggaggacagccacaacgggaagcucugccgccugaagggcaccgcgccccugcagcucgggaacugcuccguggccggcuggauccuggggaacccggagugcgagagccuguucuccaaggagagcugguccuacaucgccgagacccccaaccccgagaacggcacgugcuaccccggcuacuucgccgacuacgaggagcuccgggagcagcugagcuccgucagcuccuucgagcgcuucgagaucuucccgaaggagagcuccuggcccaaccacaccgugaccaagggggugaccgccagcugcucccacaacggcaagagcuccuucuacaagaaccugcucuggcugacggagaagaacgggcuguaccccaaccucagcaaguccuacgucaacaacaaggagaaggaggugcuggugcuguggggcguccaccaccccagcaacaucggggaccagcgggccaucuaccacaccgagaacgcguacgugagcguggucuccagccacuacucccgccgguucaccccggagaucgccaagcgccccaaggugcgggaccaggagggccgcaucaacuacuacuggacccuccuggagcccggcgacacgaucaucuucgaggccaacgggaaccugaucgcccccugguacgccuucgcgcucagccggggcuucggguccggcaucaucaccagcaacgccuccaugggcgagugcgacgccaagugccagaccccgcagggggccaucaacagcucccugcccuuccagaacgugcaccccgucaccaucggcgagugccccaaguacgugcgcagcacgaagcugcggauggugaccgggcuccgcaacaucccguccauccagagccggggccuguucggggccaucgcgggcuucaucgagggcggguggaccggcaugaucgacgggugguacggcuaccaccaccagaacgagcagggguccggcuacgccgccgaccagaaguccacccagaacgccaucaacggcaucacgaacaaggucaacagcgugaucgagaagaugaacacccaguucaccgccguggggaaggaguucaacaagcuggagcgccggauggagaaccucaacaagaaggucgacgacggcuuccuggacaucuggaccuacaacgcggagcugcucgugcugcuggagaacgagcgcacgcucgacuuccacgacagcaacgucaagaaccuguacgagaaggugaagacccagcugaagaacaacgccaaggagaucgggaacggcugcuucgaguucuaccacaagugcaacaacgagugcauggaguccgugaagaacgggaccuacgacuaccccaaguacagcgaggaguccaagcucaaccgggagaagaucgacggcgucaagcuggagagcaugggcguguaccagauccuggccaucuacagcaccguggccuccagccucguccugcuggugucccucggggccaucagcuucuggaugugcuccaacggcagccugcagugccgcaucugcaucuga

SEQ ID NO: 65199 - RNA, 1701 nt, Artificial Sequence
  derived and/or modified CDS sequence (opt1) from hemagglutinin__InfluenzaA__ABI20848
augaaggccaagcugcucgugcugcugugcgccuucaccgcgaccuacgccgacacgaucugcaucggcuaccacgccaacaacagcaccgacaccgucgacaccgugcucgagaagaacgugacggucacccacuccgugaaccugcuggaggacagccacaacgggaagcucugccgccugaagggcaccgcgccccugcagcucgggaacugcuccguggccggcuggauccuggggaacccggagugcgagagccuguucuccaaggagagcugguccuacaucgccgagacccccaaccccgagaacggcacgugcuaccccggcuacuucgccgacuacgaggagcucaaggagcagcugagcuccgucagcuccuucgagcgguucgagaucuucccgaaggagagcuccuggcccaaccacaccgugaccaagggggugaccgccagcugcucccacaacggcaagagcuccuucuacaagaaccugcucuggcugacggagaagaacgggcuguaccccaaccucagcaaguccuacgucaacaacaaggagaaggaggugcuggugcuguggggcguccaccaccccagcaacaucggggaccagcgcgccaucuaccacaccgagaacgcgcacgugagcguggucuccagccacuacucccggcgcuucaccccggagaucgccaagcggcccaaggugcgcgaccaggagggccggaucaacuacuacuggacccuccuggagcccggcgacacgaucaucuucgaggccaacgggaaccugaucgcccccugguacgccuucgcgcucagccgcggcuucggguccggcaucaucaccagcaacgccuccaugggcgagugcgacgccaagugccagaccccgcagggggccaucaacagcucccugcccuuccagaacgugcaccccgucaccaucggcgagugccccaaguacgugcggagcacgaagcugcgcauggugaccgggcuccggaacaucccguccauccagagccgcggccuguucggggccaucgcgggcuucaucgagggcggguggaccggcaugaucgacgggugguacggcuaccaccaccagaacgagcagggguccggcuacgccgccgacaagaaguccacccagaacgccaucgacggcaucacgaacaaggucaacagcgugaucgagaagaugaacacccaguucaccgccguggggaaggaguucaacaagcuggagcggcgcauggagaaccucaacaagaaggucgacgacggcuuccuggacaucuggaccuacaacgcggagcugcucgugcugcuggagaacgagcggacgcucgacuuccacgacagcaacgucaagaaccuguacgagaaggugaagaaccagcugaagaacaacgccaaggagaucgggaacggcugcuucgaguucuaccacaagugcaacaacgagugcauggaguccgugaagaacgggaccuacgacuaccccaaguacagcgaggaguccaagcucaagcgcgagaagaucgacggcgucaagcuggagagcaugggcguguaccagauccuggccaucuacagcaccguggccuccagccucguccugcuggugucccucggggccaucagcuucuggaugugcuccaacggcagccugcagugccggaucugcaucuga

SEQ ID NO: 65200 - RNA, 1701 nt, Artificial Sequence; identical to SEQ ID NO: 64945
  derived and/or modified CDS sequence (opt1) from hemagglutinin__InfluenzaA__ABI20859

SEQ ID NO: 65201 - RNA, 1701 nt, Artificial Sequence
  derived and/or modified CDS sequence (opt1) from hemagglutinin__InfluenzaA__ABI20870
augaaggccaagcugcucgugcugcugugcgccuucaccgcgaccuacgccgacacgaucugcaucggcuaccacgccaacaacagcaccgacaccgucgacaccgugcucgagaagaacgugacggucacccacuccgugaaccugcuggaggacagccacaacgggaagcucugccgccugaagggcaucgcgccccugcagcucgggaacugcuccguggccggcuggauccuggggaacccggagugcgagagccuguucuccaaggagagcugguccuacaucgccgagacccccaaccccgagaacgggaccugcuaccccggcaacuucgccgacuacgaggagcuccgggagcagcugagcuccgucagcuccuucgagcgcuucgagaucuucccgaaggagagcuccuggcccaaccacacggugaccaagggggugaccgucagcugcucccacaacggcaagagcuccuucuaccggaaccugcucuggcugaccgagaagaacgggcuguaccccaaccucagcaaguccuacgugaacaacaaggagaaggaggugcugguccuguggggcgugcaccaccccagcaacaugcgcgaccagcgggccaucuaccacacggagaacgccuacgugagcgucguguccagccacuacucccgccgguucaccccggagaucgcgaagcgccccaaggugcgggaccaggaggggcgcaucaacuacuacuggacccuccuggagcccggcgacaccaucaucuucgaggccaacggcaaccugaucgcgccccgguacgccuucgcccucagccgcggguucggcuccgggaucaucacgagcaacgccuccauggacgagugcgacgccaagugccagaccccgcagggcgccaucaacagcucccugcccuuccagaacguccaccccgugaccaucggcgagugccccaaguacgugcggagcaccaagcugcgcauggucacggggcuccggaacaucccguccauccagagccgcggccuguucggggccaucgccggcuucaucgagggcggcuggaccggcaugaucgacgggugguacggcuaccaccaccagaacgagcagggguccggcuacgcggccgaccagaaguccacccagaacgccaucaacgggaucaccaacaaggugaacagcgugaucgagaagaugaacacgcaguucaccgccgucggcaaggaguucaacaagcuggagcggcgcauggagaaccucaacaagaagguggacgacggcuuccuggacaucuggaccuacaacgccgagcugcucguccugcuggagaacgagcggacccucgacuuccacgacagcaacgugaagaaccuguacgagaaggugaagucccagcugaagaacaacgcgaaggagaucgggaacggcugcuucgaguucuaccacaagugcaacaacgagugcauggagagcgucaagaacgggacguacgacuaccccaaguacuccgaggagagcaagcucaaccgcgagaagaucgacggcgugaagcuggagagcauggggguguaccagauccuggccaucuacuccaccgucgccagcucccucgugcugcuggugagccucggcgccaucuccuucuggaugugcagcaacggcucccugcagugccggaucugcaucuga

SEQ ID NO: 65202 - RNA, 1701 nt, Artificial Sequence; identical to SEQ ID NO: 65013
  derived and/or modified CDS sequence (opt1) from hemagglutinin__InfluenzaA__ABI20881

SEQ ID NO: 65203 - RNA, 1701 nt, Artificial Sequence
  derived and/or modified CDS sequence (opt1) from hemagglutinin__InfluenzaA__ABI20892
augaagaccaucaucgcccugagcuacauccucugccugguguucgcccagaagcugcccggcaacgacaacuccaccgcgacgcucugccuggggcaccacgccgucccgaacggcacccuggugaagaccaucaccaacgaccagaucgaggugacgaacgccaccgagcucguccagagcuccagcaccgggcgcaucugcgacagcccccaccggauccuggacggcaagaacugcacccugaucgacgcccuccugggggacccccacugcgacggcuuccagaacaaggagugggaccuguucguggagcgcagcaaggccuacuccaacugcuaccccuacgacgugccggacuacgcgagccuccggucccuggucgccagcuccggcacgcuggaguucaccaaggagggguucaacuggaccggcguggcccaggacgggaaguccuacgccugcaagcgcggcuccgugaacagcuucuucucccggcucaacuggcugcacaagcuggaguacaaguaccccgcgcucaacgucaccaugcccaacaacgacaaguucgacaagcuguacaucuggggcgugcaccaccccagcacggacuccgaccagaccagccuguacgugcaggccuccgggcgcgucaccgugagcaccaagcggagccagcagacggugaucccgaacaucggcucccgccccuggguccgggggaucagcucccgcaucagcauccacuggaccaucgugaagcccggcgacauccuccugaucaccuccaccgggaaccugaucgcgccccggggcuacuucaagauccgcaacggcaagagcuccaucaugcggagcgacgccccgaucgggaacugcaacuccgagugcaucacgcccaacggcagcauccccaacgacaagcccuuccagaacgugaaccgcaucaccuacggggccugcccgcgguacgucaagcagaacacccucaagcuggccaccggcaugcgcaacgugcccgagaagcagacgcgggggaucuucggcgccaucgccggcuucaucgagaacgggugggagggcaugguggacgggugguacggcuuccgccaccagaacuccgaggggaccggccaggccgccgaccucaagagcacccaggcggccaucgaccagaucaacggcaagcugaaccggcugaucgagaagaccaacgagaaguuccaccagaucgagaaggaguucuccgaggucgaggggcgcauccaggaccuggagaaguacguggaggacacgaagaucgaccucuggagcuacaacgccgagcugcugguggcccucgagaaccagcacaccaucgaccugaccgacuccgagaugaacaagcuguucgagcggacccgcaagcagcuccgcgagaacgccgaggacaugggcaacgggugcuucaagaucuaccacaagugcgacaacgcgugcaucggcagcauccggaacgggacguacgaccacgacgucuaccgcgacgaggcccugaacaaccgguuccagaucaagggcguggagcugaaguccggcuacaaggacuggauccucuggaucagcuucgccaucuccugcuuccugcugugcgucgugcuccugggguucaucaugugggccugccagaagggcaacauccgcugcaacaucugcaucuga

SEQ ID NO: 65204 - RNA, 1701 nt, Artificial Sequence
  derived and/or modified CDS sequence (opt1) from hemagglutinin__InfluenzaA__ABI20903
augaagaccaucaucgcccugagcuacauccucugccugguguucgcccagaagcugcccggcaacgacaacuccaccgcgacgcucugccuggggcaccacgccgucccgaacggcacccuggugaagaccaucaccaacgaccagaucgaggugacgaacgccaccgagcucguccagaacagccccaccgggcgcaucugcgacagcccccaccggauccuggacggcaagaacugcacccugaucgacgcccuccugggggacccccacugcgacggcuuccagaacaaggagugggaccuguucguggagcgcuccaaggccuacuccaacugcuacccguacgacgugcccgacuacgcgagccuccggucccuggucgccagcuccggcacgcuggaguucaccaacgagaacuucaacuggaccgggguggcccaggacggcaagagcuacgccugcaagcgcggguccgugaacagcuucuucucccggcucaacuggcugcacaagcuggaguacaaguaccccgcgcucaacgucaccaugcccaacaacggcaaguucgacaagcuguacaucuggggcgugcaccacccgagcacggacuccgaccagaccagccuguacgugcgcgccuccgggaaggucaccgugagcaccaagcggucccagcagacggugauccccgacaucggcuaccgccccuggguccgggggcucagcagccgcaucuccaucuacuggaccaucgugaagcccggcgacauccugcugauccacagcaccgggaaccucaucgccccgcggggcuacuucaagauccgcaacggcaaguccagcaucaugcgguccgacgcccccaucgggaacugcagcuccgagugcaucacccccaacggcagcauccccaacgacaagccguuccagaacgugaaccgcaucacguacggggccugcccccgguacgucaagcagaacacccugaagcuggcgaccggcaugcgcaacgugcccgagaagcagacccgggggaucuucggcgccaucgccggcuucaucgagaacgggugggagggcaugguggacgggugguacggcuuccgccaccagaacuccgaggggacgggccaggccgccgaccucaagagcacccaggcggccaucgaccagaucaacggcaagcugaaccggcuggucgagaagaccaacgagaaguuccaccagaucgagaaggaguucuccgagguggaggggcgcauccaggaccucgagaaguacguggaggacaccaagaucgaccuguggagcuacaacgccgagcugcucgucgcccuggagaaccagcacacgaucgaccugaccgacuccgagaugaacaagcuguucgagcggacccgcaagcagcuccgcgagaacgccgaggacaugggcaacgggugcuucaagaucuaccacaagugcgacaacgcgugcaucggcagcauccggaacgggaccuacgaccacgacguguaccgcgacgaggcccugaacaaccgguuccagaucaagggcgucgagcucaaguccggcuacaaggacuggauccuguggaucagcuucgccaucuccugcuuccugcucugcguggugcugcugggguucaucaugugggccugccagaagggcaacauccgcugcaacaucugcaucuga

SEQ ID NO: 65205 - RNA, 1701 nt, Artificial Sequence
  derived and/or modified CDS sequence (opt1) from hemagglutinin__InfluenzaA__ABI20914
augaagaccaucaucgcccugagcuacauccucugccugguguucgcccagaagcugcccggcaacgacaacuccaccgcgacgcucugccuggggcaccacgccgucccgaacggcacccuggugaagaccaucaccaacgaccagaucgaggugacgaacgccaccgagcucguccagagcuccagcaccgggcgcaucugcgacagcccccaccggauccuggacggcaagaacugcacccugaucgacgcccuccugggggacccccacugcgacggcuuccagaacaaggagugggaccuguucguggagcgcuccaaggccuacuccaacugcuaccccuacgacgugccggacuacgcgagccuccggucccuggucgccagcuccggcacgcuggaguucaucaacgaggacuucaacuggaccgggguggcccaggacggcaagagcuacgccugcaagcgcggguccgugaacagcuucuucucccggcucaacuggcugcacaagcuggaguacaaguaccccgcgcucaacgucaccaugcccaacaacggcaaguucgacaagcuguacaucuggggcgugcaccaccccagcaccgacuccgaccagacgagccuguacgugcgcgccuccgggcgggucaccgugagcaccaagcgcagccagcagaccgugaucccgaacaucggcuuccggcccuggguccgcgggcucuccagccggaucuccaucuacuggacgaucgugaagcccggcgacauccugcugaucaacagcaccgggaaccucaucgcgccccgcggcuacuucaagauccggaacggcaaguccagcaucaugcgcuccgacgccccgaucgggaacugcagcuccgagugcaucacccccaacggcagcauccccaacgacaagcccuuccagaacgugaaccggaucaccuacggggccugcccgcgcuacgucaagcagaacacgcugaagcuggccaccggcaugcggaacgugcccgagaagcagacccgcgggaucuucggcgccaucgccggcuucaucgagaacgggugggagggcaugguggacgggugguacggcuuccggcaccagaacuccgaggggaccggccaggccgccgaccucaagagcacgcaggcggccaucgaccagaucaacggcaagcugaaccgccugaucgagaagaccaacgagaaguuccaccagaucgagaaggaguucuccgaggucgaggggcggauccaggaccucgagaaguacguggaggacaccaagaucgaccuguggagcuacaacgccggccugcucguggcccuggagaaccagcacaccaucgaccugacggacuccgagaugaacaagcuguucgagcgcacccgcaagcagcuccgggagaacgccgaggacauggggaacggcugcuucaagaucuaccacaagugcgacaacgcgugcaucgggagcauccgcaacggcaccuacgaccacgacgucuaccgggacgaggcccugaacaaccgcuuccagaucaagggcguggagcucaaguccggguacaaggacuggauccuguggaucagcuucgccaucuccugcuuccugcucugcgucgugagccugggcuucaucaugugggccugccagaaggggaacauccggugcaacaucugcaucuga

SEQ ID NO: 65206 - RNA, 1701 nt, Artificial Sequence; identical to SEQ ID NO: 65090
  derived and/or modified CDS sequence (opt1) from hemagglutinin__InfluenzaA__ABI20925

SEQ ID NO: 65207 - RNA, 1701 nt, Artificial Sequence; identical to SEQ ID NO: 65090
  derived and/or modified CDS sequence (opt1) from hemagglutinin__InfluenzaA__ABI20936

SEQ ID NO: 65208 - RNA, 1701 nt, Artificial Sequence
  derived and/or modified CDS sequence (opt1) from hemagglutinin__InfluenzaA__ABI20947
augaagaccaucaucgcccugagcuacauccucugccugguguucgcccagaagcugcccggcaacgacaacuccaccgcgacgcucugccuggggcaccacgccgucccgaacggcacccuggugaagaccaucaccaacgaccagaucgaggugacgaacgccaccgagcucguccagagcuccagcaccgggcgcaucugcgacagcccccaccggauccuggacggcaagaacugcacccugaucgacgcccuccugggggacccccacugcgacggcuuccagaacaaggagugggaccuguucguggagcgcuccaaggccuacuccaacugcuaccccuacgacgugccggacuacgcgagccuccggucccuggucgccagcuccggcacgcuggaguucaucaacgaggacuucaacuggaccgggguggcccaggacggcaagagcuacgccugcaagcgcggguccgugaacagcuucuucucccggcucaacuggcugcacaagcuggaguacaaguaccccgcgcucaacgucaccaugcccaacaacggcaaguucgacaagcuguacaucuggggcgugcaccaccccagcaccgacuccgaccagacgagccuguacgugcgcgccuccgggcgggucaccgugagcaccaagcgcagccagcagaccgugaucccgaacaucggcuuccggcccuggguccgcgggcucuccagccggaucuccaucuacuggacgaucgugaagcccggcgacauccugcugaucaacagcaccgggaaccucaucgcgccccgcggcuacuucaagauccggaacggcaaguccagcaucaugcgcuccgacgccccgaucgggaacugcagcuccgagugcaucacccccaacggcagcauccccaacgacaagcccuuccagaacgugaaccggaucaccuacggggccugcccgcgcuacgucaagcagaacacgcugaagcuggccaccggcaugcggaacgugcccgagaagcagacccgcgggaucuucggcgccaucgccggcuucaucgagaacgggugggagggcaugguggacgggugguacggcuuccggcaccagaacuccgaggggaccggccaggccgccgaccucaagagcacgcaggcggccaucgaccagaucaacggcaagcugaaccgccugaucgagaagaccaacgagaaguuccaccagaucgagcaggaguucuccgaggucgaggggcggauccaggaccucgagaaguacguggaggacaccaagaucgaccuguggagcuacaacgccggccugcucguggcccuggagaaccagcacaccaucgaccugacggacuccgagaugaacaagcuguucgagcgcacccgcaagcagcuccgggagaacgccgaggacauggggaacggcugcuucaagaucuaccacaagugcgacaacgcgugcaucgggagcauccgcaacggcaccuacgaccacgacgucuaccgggacgaggcccugaacaaccgcuuccagaucaagggcguggagcucaaguccggguacaaggacuggauccuguggaucagcuucgccaucuccugcuuccugcucugcgucgugcugcugggcuucaucaugugggccugccagaaggggaacauccggugcaacaucugcaucuga

SEQ ID NO: 65209 - RNA, 1701 nt, Artificial Sequence
  derived and/or modified CDS sequence (opt1) from hemagglutinin__InfluenzaA__ABI20958
augaagaccaucaucgcccugagcuacauccucugccugguguucgcccagaagcugcccggcaacgacaacuccaccgcgacgcucugccuggggcaccacgccgucccgaacggcacccuggugaagaccaucaccaacgaccagaucgaggugacgaacgccaccgagcucguccagagcuccagcaccgggcgcaucugcgacagcccccaccggauccuggacggcaagaacugcacccugaucgacgcccuccugggggacccccacugcgacggcuuccagaacaaggagugggaccuguucguggagcgcuccaaggccuacuccaacugcuaccccuacgacgugccggacuacgcgagccuccggucccuggucgccagcuccggcacgcuggaguucaucaacgaggacuucaacuggaccgggguggcccaggacggcaagagcuacgccugcaagcgcggguccgugaacagcuucuucucccggcucaacuggcuguacaagcuggaguacaaguaccccgcgcucaacgucaccaugcccaacaacggcaaguucgacaagcuguacaucuggggcgugcaccaccccagcaccgacuccgaccagacgagccuguacgugcgcgccuccgggcgggucaccgugagcaccaagcgcagccagcagaccgugaucccgaacaucggcuuccggcccuggguccgcgggcucuccagccggaucuccaucuacuggacgaucgugaagcccggcgacauccugcugaucaacagcaccgggaaccucaucgcgccccgcggcuacuucaagauccggaacggcaaguccagcaucaugcgcuccgacgccccgaucgggaacugcagcuccgagugcaucacccccaacggcagcauccccaacgacaagcccuuccagaacgugaaccggaucaccuacggggccugcccgcgcuacgucaagcagaacacgcugaagcuggccaccggcaugcggaacgugcccgagaagcagacccgcgggaucuucggcgccaucgccggcuucaucgagaacgggugggagggcaugguggacgggugguacggcuuccggcaccagaacuccgaggggaccggccaggccgccgaccucaagagcacgcaggcggccaucgaccagaucaacggcaagcugaaccgccugaucgagaagaccaacgagaaguuccaccagaucgagaaggaguucuccgaggucgaggggcggauccaggaccucgagaaguacguggaggacaccaagaucgaccuguggagcuacaacgccggccugcucguggcccuggagaaccagcacaccaucgaccugacggacuccgagaugaacaagcuguucgagcgcacccgcaagcagcuccgggagaacgccgaggacauggggaacggcugcuucaagaucuaccacaagugcgacaacgcgugcaucgggagcauccgcaacggcaccuacgaccacgacgucuaccgggacgaggcccugaacaaccgcuuccagaucaagggcguggagcucaaguccggguacaaggacuggauccuguggaucagcuucgccaucuccugcuuccugcucugcgucgugcugcugggcuucaucaugugggccugccagaaggggaacauccggugcaacaucugcaucuga

SEQ ID NO: 65210 - RNA, 1701 nt, Artificial Sequence
  derived and/or modified CDS sequence (opt1) from hemagglutinin__InfluenzaA__ABI20969
augaagaccaucaucgcccugagcuacauccucugccugguguucgcccagaagcugcccgucaacgacaacuccaccgcgacgcucugccugggccaccacgccgugccgaacgggacccuggugaagaccaucaccaacgaccacaucgaggucacgaacgccaccgagcucgugcagagcuccagcaccggccgcaucugcgacagcccccaccagauccuggacggggagaacugcacccugaucgacgcccuccugggcgacccccacugcgacggguuccagaacaaggaguggaaccuguucguggagcggagcacggccuacuccaacugcuaccccuacgacgucccggacuacgcgagccuccgcucccugguggccagcuccggcacccuggaguucaacaacgagagcuucaacuggaccggcguggcccagaacgggaccuccagcgccugcaagcggcgcuccaucaagagcuucuucucccggcucaacuggcugcaccagcugaaguacaaguaccccgcgcucaacgucacgaugcccaacaacgagaaguucgacaagcuguacaucuggggcgugcaccaccccagcaccgacuccgaccagaucagccuguacgcccaggccagcgggcgcgugaccgucuccaccaagcggagccagcagacggugaucccgaacaucggcucccgccccugggugcgcggggucagcucccggaucagcaucuacuggaccaucgugaagcccggcgacauccuccugaucaacuccaccggcaaccugaucgcgccccggggguacuucaagauccgcagcggcaaguccagcaucaugcgguccaacgccccgaucgggaagugcaacagcgagugcaucacccccaacggcuccauccccaacgacaagcccuuccagaacgugaaccgcaucacguacggcgccugcccgcgguacgucaagcagaacacccucaagcuggccaccgggaugcgcaacgugcccgagaagcagacccggggcaucuucggggccaucgccggcuucaucgagaacgggugggagggcaugguggacggcugguacggguuccgccaccagaacagcgagggcacggggcaggccgcggaccugaaguccacccaggccgccaucaaccagaucaacggcaagcucaaccggcugaucgagaagaccaacgagaaguuccaccagaucgagaaggaguucagcgaggucgaggggcgcauccaggaccuggagaaguacguggaggacaccaagaucgaccucugguccuacaacgccgagcugcugguggcccucgagaaccagcacacgaucgaccugaccgacagcgagaugaacaagcuguucgagcggacccgcaagcagcuccgcgagaacgcggaggacaugggcaacggcugcuucaagaucuaccacaagugcgacaacgccugcaucggguccauccggaacggcaccuacgaccacgacgucuaccgcgacgaggcccugaacaaccgguuccagaucaaggggguggagcugaaguccggcuacaaggacuggauccucuggaucagcuucgccaucuccugcuuccugcugugcgucgugcuccugggguucaucaugugggccugccagaagggcaacauccgcugcaacaucugcaucuga

SEQ ID NO: 65211 - RNA, 1701 nt, Artificial Sequence
  derived and/or modified CDS sequence (opt1) from hemagglutinin__InfluenzaA__ABI20980
augaagaccaucaucgcccugagcuacauccucugccugguguucgcccagaagcugcccgucaacgacaacuccaccgcgacgcucugccugggccaccacgccgugccgaacgggacccuggugaagaccaucaccaacgaccacaucgaggucacgaacgccaccgagcucgugcagagcuccagcaccggccgcaucugcgacagcccccaccagauccuggacggggagaacugcacccugaucgacgcccuccugggcgacccccacugcgacggguuccagaacaaggagugggaccuguucguggagcggagcacggccuacuccaacugcuaccccuacgacgucccggacuacgcgagccuccgcucccugguggccagcuccggcacccuggaguucaacaacgagagcuucaacuggaccggcguggaccagaacgggaccuccagcgccugcaagcggcgcuccacgaaguccuucuucucccggcucaacuggcugcaccagcugaaguacaaguaccccgcccucaacgucaccaugcccaacaacgagaaguucgacaagcuguacaucuggggcgugcaccaccccagcaccgacuccgaccagaucagccuguacgcgcaggccagcgggcgcgugaccgucuccacgaagcggagccagcagaccgugaccccgaacaucggcucccgccccugggugcgcggggucagcucccggaucagcaucuacuggaccaucgugaagcccggcgacauccuccugaucaacuccacgggcaaccugaucgcgccccggggguacuucaagauccgcagcggcaaguccagcaucaugcgguccaacgcccucaucgggaagugcaacagcgagugcaucaccccgaacggcuccauccccaacgacaagcccuuccagaacgugaaccgcaucaccuacggcgccugcccccgguacgucaagcagaacacccugaagcuggccacggggaugcgcaacgugccggagaagcagacccggggcaucuucggggccaucgccggcuucaucgagaacgggugggagggcaugguggacggcugguacggguuccgccaccagaacagcgagggcaccgggcaggccgccgaccucaaguccacccaggcggccaucaaccagaucaacggcaagcugaaccggcugaucgagaagacgaacgagaaguuccaccagaucgagaaggaguucagcgaggucgaggggcgcauccaggaccucgagaaguacguggaggacaccaagaucgaccugugguccuacaacgccgagauccugguggcccucgagaaccagcacaccaucgaccugaccgacagcgagaugaacaagcuguucgagcggacgcgcaagcagcuccgcgagaacgccgaggacaugggcaacggcugcuucaagaucuaccacaagugcgacaacgcgugcaucggguccauccggaacggcaccuacgaccacgacgucuaccgcgacgaggcccugaacaaccgguuccagaucaaggggguggagcucaagagcggcuacaaggacuggauccuguggaucagcuucgccaucuccugcuuccugcugugcgucgugcuccugggguucaucaugugggccugccagaagggcaacauccgcugcaacaucugcaucuga

SEQ ID NO: 65212 - RNA, 1701 nt, Artificial Sequence
  derived and/or modified CDS sequence (opt1) from hemagglutinin__InfluenzaA__ABI20991
augaagaccaucaucgcccugagcuacauccucugccugguguucgcccagaagcugcccggcaacgacaacuccaccgcgacgcucugccuggggcaccacgccgucccgaacggcacccuggugaagaccaucaccaacgaccagaucgaggugacgaacgccaccgagcucguccagagcuccagcaccgggggcaucugcgacagcccccaccagauccuggacggggagaacugcacccugaucgacgcccuccugggcgacccccacugcgacggcuuccagaacaaggagugggaccuguucguggagcgcagcaaggccuacuccaacugcuaccccuacgacgugccggacuacgcgagccuccggucccuggucgccagcuccgggacgcuggaguucaacaacgagagcuucaacuggaccggcguggcccagaacgggaccuccagcgccugcaagcgccgguccaacaagagcuucuucucccgccucaacuggcugcaccagcugaaguacaaguaccccgcgcucaacgugaccaugcccaacaacgagaaguucgacaagcuguacaucuggggcguccaccaccccagcacggacuccgaccagaucagccuguacgcccaggccccggggcgggugaccgugagcaccaagcgcucccagcagaccgucauccccaacaucggcagccggcccugggugcgcggcguguccagccggaucuccaucuacuggacgaucgucaagcccggggacauccuccugaucaacugcaccggcaaccugaucgccccgcgcggguacuucaagauccggagcggcaaguccagcaucaugcgcuccgacgccagcaucggcaagugcaacuccgagugcaucacccccaacgggagcauccccaacgacaagcccuuccagaacgugaaccggaucaccuacggcgcgugcccgcgcuacgugaagcagaacacgcucaagcuggccaccgggaugcggaacguccccgagaagcagacccgcggcaucuucggggccaucgccggcuucaucgagaacggcugggaggggaugguggacggcugguacggguuccggcaccagaacuccgagggcaccgggcaggccgcggaccugaaguccacgcaggccgccaucaaccagaucaacggcaagcucaaccgccugaucgagaagaccaacgagaaguuccaccagaucgagaaggaguucuccgagguggagggccggauccaggaccuggagaaguacgucgaggacaccaagaucgaccucuggagcuacaacgccgagcugcugguggcccucgagaaccagcacaccaucgaccugacggacuccgagaucaacaagcuguucgagcgcaccaagaagcagcuccgggagaacgcggaggacauggggaacggcugcuucaagaucuaccacaagugcgacaacgccugcaucgggagcauccgcaacggcaccuacgaccacgacguguaccgcgacgaggcccugaacaaccgguuccagaucaagggggucgagcugaaguccggcuacaaggacuggauccucuggaucagcuucgccaucagcugcuuccugcugugcgugguccuccugggcuucaucaugugggccugccagaaggggaacauccgcugcaacaucugcaucuga

SEQ ID NO: 65213 - RNA, 1701 nt, Artificial Sequence; identical to SEQ ID NO: 64734
  derived and/or modified CDS sequence (opt1) from hemagglutinin__InfluenzaA__ABI21002

SEQ ID NO: 65214 - RNA, 1701 nt, Artificial Sequence; identical to SEQ ID NO: 65178
  derived and/or modified CDS sequence (opt1) from hemagglutinin__InfluenzaA__ABI21013

SEQ ID NO: 65215 - RNA, 1701 nt, Artificial Sequence; identical to SEQ ID NO: 64664
  derived and/or modified CDS sequence (opt1) from hemagglutinin__InfluenzaA__ABI21024

SEQ ID NO: 65216 - RNA, 1701 nt, Artificial Sequence; identical to SEQ ID NO: 64540
  derived and/or modified CDS sequence (opt1) from hemagglutinin__InfluenzaA__ABI21035

SEQ ID NO: 65217 - RNA, 1701 nt, Artificial Sequence
  derived and/or modified CDS sequence (opt1) from hemagglutinin__InfluenzaA__ABI21046
augaagaccaucaucgcccugagcuacauccucugccugguguucgcccagaagcugcccggcaacgacaacuccaccgcgacgcucugccuggggcaccacgccgucccgaacggcaccaucgugaagaccaucaccaacgaccagaucgaggugacgaacgccaccgagcugguccagagcuccagcaccgggggcaucugcgacagcccccaccagauccucgacggggagaacugcacccugaucgacgcccugcucggcgacccccagugcgacggcuuccagaacaagaagugggaccuguucguggagcgcagcaaggccuacuccaacugcuaccccuacgacgugccggaccacgcgagccugcggucccucgucgccagcuccgggacgcuggaguucaacaacgagagcuucgacuggaccggcgugacccagaacgggaccuccagcgccugcaagcgccgguccaacaagagcuucuucucccgccugaacuggcucacgcaccugaaguacaaguaccccgcccugaacgugaccaugcccaacaacgagaaguucgacaagcucuacaucuggggcguccaccaccccgggaccgacaacgaccagaucagccuguacgcgcaggccuccggccggaucaccgugagcacgaagcgcagccagcagaccgugaucccgaacaucggcucccggccccgcguccgggacgugagcucccgcaucagcaucuacuggaccaucgugaagcccggggacauccugcucaucaacuccaccggcaaccugaucgcgccccggggguacuucaagauccgcagcggcaaguccagcaucaugcgguccgacgccccgaucggcaagugcaacagcgagugcaucacgcccaacggguccauccccaacgacaagcccuuccagaacgucaaccgcaucaccuacggcgccugcccgcgguacgugaagcagaacacccugaagcucgccaccgggaugcgcaacgugcccgagaagcagacgcggggcaucuucggggccaucgccggcuucaucgagaacggcugggaggggauggucgacggcugguacggguuccgccaccagaacagcgagggcaccgggcaggccgccgaccugaaguccacccaggcggccaucaaccagaucaacggcaagcugaaccggcucaucggcaagaccaacgagaaguuccaccagaucgagaaggaguucagcgagguggaggggcgcauccaggaccuggagaaguacguggaggacacgaagaucgaccugugguccuacaacgccgagcuccuggucgcccuggagaaccagcacaccaucgaccucaccgacagcgagaugaacaagcuguucgagcggaccaagaagcagcugcgcgagaacgccgaggacaugggcaacgggugcuucaagaucuaccacaagugcgacaacgcgugcaucggcuccauccgcaacgggacguacgaccacgacguguaccgggacgaggcccucaacaaccgcuuccagaucaagggcguggagcugaaguccggcuacaaggacuggauccuguggaucuccuucgccaucagcugcuuccuccugugcgucgcccugcucggguucaucaugugggccugccagaagggcaacauccggugcaacaucugcaucuga

SEQ ID NO: 65218 - RNA, 1701 nt, Artificial Sequence
  derived and/or modified CDS sequence (opt1) from hemagglutinin__InfluenzaA__ABI21057
augaagaccaucaucgcccugagcuacauccucugccugguguucgcccagaagcugcccggcaacgacaacuccaccgcgacgcucugccuggggcaccacgccgucccgaacggcaccaucgugaagaccaucaccaacgaccagaucgaggugacgaacgccaccgagcugguccagaacagcuccaccgggggcaucugcgacagcccccaccagauccucgacggggagaacugcacccugaucgacgcccugcucggcgacccccagugcgacggcuuccagaacaagaagugggaccuguucguggagcgcuccaaggccuacagcaacugcuaccccuacgacgugccggaccacgcgucccugcggagccucgucgccuccagcgggacgcuggaguucaacaacgaguccuucgacuggaccggcgugacccagaacgggaccagcuccgccugcaagcgccggagcaacaaguccuucuucagccgccugaacuggcucacgcaccugaaguacaaguaccccgcccugaacgugaccaugcccaacaacgagaaguucgacaagcucuacaucuggggcguccaccaccccgggaccgacuccgaccagaucagccuguacgcgcaggccuccggccggaucaccgugagcacgaagcgcagccagcagaccgugaucccgaacaucggcucccggccccgcguccgggacgugagcucccgcaucagcaucuacuggaccaucgugaagcccggggacauccugcucaucaacuccaccggcaaccugaucgcgccccggggguacuucaagauccgcagcggcaaguccagcaucaugcgguccgacgccccgaucggcaagugcaacagcgagugcaucacgcccaacggguccauccccaacgacaagcccuuccagaacgucaaccgcaucaccuacggcgccugcccgcgguacgugaagcagaacacccugaagcucgccaccgggaugcgcaacgugcccgagaagcagacgcggggcaucuucggggccaucgccggcuucaucgagaacggcugggaggggauggucgacggcugguacggguuccgccaccagaacagcgagggcaccgggcaggccgccgaccugaaguccacccaggcggccaucaaccagaucaacggcaagcugaaccggcucaucggcaagaccaacgagaaguuccaccagaucgagaaggaguucagcgagguggaggggcgcauccaggaccuggagaaguacguggaggacacgaagaucgaccugugguccuacaacgccgagcuccuggucgcccuggagaaccagcacaccaucgaccucaccgacagcgagaugaacaagcuguucgagcggaccaagaagcagcugcgcgagaacgccgaggacaugggcaacgggugcuucaagaucuaccacaagugcgacaacgcgugcaucggcuccauccgcaacgggacguacgaccacgacguguaccgggacgaggcccucaacaaccgcuuccagaucaagggcguggagcucaagagcggcuacaaggacuggauccuguggaucuccuucgccaucagcugcuuccugcugugcgucgcccugcucggguucaucaugugggccugccagaagggcaacauccggugcaacaucugcaucuga

SEQ ID NO: 65219 - RNA, 1701 nt, Artificial Sequence; identical to SEQ ID NO: 64267
  derived and/or modified CDS sequence (opt1) from hemagglutinin__InfluenzaA__ABI21068

SEQ ID NO: 65220 - RNA, 1701 nt, Artificial Sequence; identical to SEQ ID NO: 64306
  derived and/or modified CDS sequence (opt1) from hemagglutinin__InfluenzaA__ABI21079

SEQ ID NO: 65221 - RNA, 1701 nt, Artificial Sequence; identical to SEQ ID NO: 65137
  derived and/or modified CDS sequence (opt1) from hemagglutinin__InfluenzaA__ABI21090

SEQ ID NO: 65222 - RNA, 1701 nt, Artificial Sequence; identical to SEQ ID NO: 65137
  derived and/or modified CDS sequence (opt1) from hemagglutinin__InfluenzaA__ABI21101

SEQ ID NO: 65223 - RNA, 1701 nt, Artificial Sequence
  derived and/or modified CDS sequence (opt1) from hemagglutinin__InfluenzaA__ABI21123
augaagaccaucaucgcccugagcuacauccucugccugguguucgcccagaagcugcccggcaacgacaacuccaccgcgacgcucugccuggggcaccacgccgucccgaacggcaccaucgugaagaccaucaccaacgaccagaucgaggugacgaacgccaccgagcugguccagagcuccagcaccgggggcaucugcgacagcccccaccagauccucgacggggagaacugcacccugaucgacgcccugcucggcgacccccagugcgacggcuuccagaacaagaagugggaccuguucguggagcgcagcaaggccuacuccaacugcuaccccuacgacgugccggacuacgcgagccugcggucccucgucgccagcuccgggacgcuggaguucaacaacgagagcuucaacuggaccggcgugacccagaacgggaccuccagcgccugcaagcgccgguccaacaacagcuucuucucccgccugaacuggcucacgcaccugaaguucaaguaccccgcccugaacgugaccaugcccaacaacgagaaguucgacaagcucuacaucuggggcguccaccaccccgggaccaacaacgaccagaucagccuguacgcgcaggccuccggccggaucaccgugagcacgaagcgcagccagcagaccgugaucccgaacaucggcucccggccccgcguccgggacauccccagccgcaucuccaucuacuggaccaucgugaagcccggggacauccugcucaucaacagcaccggcaaccugaucgccccgcggggguacuucaagauccgcuccggcaagagcuccaucaugcggagcgacgcccccaucggcaagugcaacuccgagugcaucacgcccaacgggagcauccccaacgacaagccguuccagaacgugaaccgcaucaccuacggcgccugcccccgguacgucaagcagaacacccugaagcucgcgaccgggaugcgcaacgugcccgagaagcagacgcggggcaucuucggggccaucgccggcuucaucgagaacggcugggaggggaugguggacggcugguacggguuccgccaccagaacuccgagggcaucgggcaggccgccgaccugaaguccacccaggcggccaucaaccagaucaacggcaagcugaaccggcucaucggcaagaccaacgagaaguuccaccagaucgagaaggaguucuccgaggucgaggggcgcauccaggaccuggagaagcacguggaggacaccaagaucgaccuguggagcuacaacgccgagcuccugguggcccuggagaaccagcacacgaucgaccucaccgacuccgagaugaacaagcuguucgagcggaccaagaagcagcugcgcgagaacgccgaggacaugggcaacgggugcuucaagaucuaccacaagugcgacaacgcgugcaucggcagcauccgcaacgggaccuacgaccacgacgucuaccgggacgaggcccucaacaaccgcuuccagaucaagggcguggagcugaaguccggcuacaaggacuggauccuguggaucagcuucgccaucuccugcuuccuccugugcguggcccugcucggguucaucaugugggccugccagaagggcaacauccggugcaacaucugcaucuga

SEQ ID NO: 65224 - RNA, 1701 nt, Artificial Sequence
  derived and/or modified CDS sequence (opt1) from hemagglutinin__InfluenzaA__ABI21134
augaagaccaucaucgcccugagcuacauccucugccugguguucgcccagaagcugcccggcaacgacaacuccaccgcgacgcucugccuggggcaccacgccgucccgaacggcaccguggugaagaccaucaccaacgaccagaucgaggucacgaacgccaccgagcuggugcagagcuccagcaccgggggcaucugcgacagcccccaccagauccucgacggggagaacugcacccugauggacgcccugcucggcgacccccagugcgacggcuuccagaacaagaagugggaccuguucguggagcgcagcaaggccuacuccaacugcuaccccuacgacgucccggacuacgcgagccugcggucccucguggccagcuccgggacgcuggaguucaacaacgagagcuucaacuggaccggcgugacccagaacgggaccuccagcgccugcaagcgccgguccaacaacagcuucuucucccgccugaacuggcucacgcaccugaaguucaaguaccccgcccugaacgucaccaugcccaacaacgagaaguucgacaagcucuacaucuggggcgugcaccaccccgggaccgacaacgaccagaucagccuguacgcgcaggccuccggccggaucaccgugagcacgaagcgcagccagcagaccgucaucccgaacaucggcucccggagccgcgugcgggacauccccucccgcaucagcaucuacuggaccaucgugaagcccggggacauccugcucaucaacuccaccggcaaccugaucgcgccccggggguacuucaagauccgcagcggcaaguccagcaucaugcgguccgacgccccgaucggcaagugcaacagcgagugcaucacgcccaacggguccauccccaacgacaagcccuuccagaacgucaaccgcaucaccuacggcgccugcccgcgguacgugaagcagaacacccugaagcucgccaccgggaugcgcaacgugcccgagaagcagacgcggggcaucuucggggccaucgccggcuucaucgagaacggcugggaggggauggucgacggcugguacggguuccgccaccagaacagcgagggcaccgggcaggccgccgaccugaaguccacccaggcggccaucaaccagaucaacggcaagcugaaccggcucaucggcaagaccaacgagaaguuccaccagaucgagaaggaguucagcgagguggaggggcgcauccaggaccuggagaaguacguggaggacacgaagaucgaccugugguccuacaacgccgagcuccuggucgcccuggagaaccagcacaccaucgaccucaccgacagcgagaugaacaagcuguucgagcggaccaagaagcagcugcgcgagaacgccgaggacaugggcaacgggugcuucaagaucuaccacaagugcgacaacgcgugcaucggcuccauccgcaacgggacguacgaccacgacguguaccgggacgaggcccucaacaaccgcuuccagaucaagggcguggagcugaaguccggcuacaaggacuggauccuguggaucuccuucgccaucagcugcuuccuccugugcgucgcccugcucggguucaucaugugggccugccagaagggcaacauccggugcaacaucugcaucuga

SEQ ID NO: 65225 - RNA, 1701 nt, Artificial Sequence; identical to SEQ ID NO: 64306
  derived and/or modified CDS sequence (opt1) from hemagglutinin__InfluenzaA__ABI21156

SEQ ID NO: 65226 - RNA, 1701 nt, Artificial Sequence
  derived and/or modified CDS sequence (opt1) from hemagglutinin__InfluenzaA__ABI21167
augaagaccaucaucgcccugggcuacauccucugccugguguucgcccagaagcugcccgggaacgacaacagcaccgcgacgcucugccugggccaccacgccgucccgaacgggaccaucgugaagaccaucaccaacgaccagaucgaggugacgaacgccaccgagcugguccaguccagcuccaccggcgggaucugcgacagcccccaccagauccucgacggcgagaacugcacccugaucgacgcccugcucggcgacccccagugcgacggguuccagaacaagaagugggaccuguucguggagcgcuccaaggccuacagcaacugcuaccccuacgacgugccggacuacgcgucccugcggagccucgucgccuccagcggcacgcuggaguucaacaacgaguccuucaacuggaccggggugacccagaacggcaccagcuccgccugcaagcgccggagcaacaacuccuucuucagccgccugaacuggcucacgcaccugaaguucaaguaccccgcccugaacgugaccaugcccaacaacgagaaguucgacaagcucuacaucuggggcguccaccaccccgggaccaacaacgaccagaucucccuguacgcgcaggccagcggccggaucaccguguccacgaagcgcagccagcagaccgugaucccgaacaucgggagccggccccgcguccgggacauccccucccgcaucagcaucuacuggaccaucgugaagcccggcgacauccugcucaucaacuccaccgggaaccugaucgccccgcggggcuacuucaagauccgcagcggcaaguccagcaucaugcgguccgacgcccccaucgggaagugcaacagcgagugcaucacgcccaacggcuccauccccaacgacaagccguuccagaacgugaaccgcaucaccuacggggccugcccccgguacgucaagcagaacacccugaagcucgcgaccggcaugcgcaacgugcccgagaagcagacgcgggggaucuucggcgccaucgccggcuucaucgagaacgggugggagggcaugguggacgggugguacggcuuccgccaccagaacagcgaggggaucggccaggccgccgaccugaaguccacccaggcggccaucaaccagaucaacggcaagcugaaccggcucaucgggaagaccaacgagaaguuccaccagaucgagaaggaguucagcgaggucgagggccgcauccaggaccuggagaaguacguggaggacaccaagaucgaccugugguccuacaacgccgagcuccugguggcccuggagaaccagcacacgaucgaccucaccgacagcgagaugaacaagcuguucgagcggaccaagaagcagcugcgcgagaacgccgaggacauggggaacggcugcuucaagaucuaccacaagugcgacaacgcgugcaucggguccauccgcaacggcaccuacgaccacgaggucuaccgggacgaggcccucaacaaccgcuuccagaucaagggcguggagcucaagagcggguacaaggacuggauccuguggaucuccuucgccaucagcugcuuccugcugugcguggcccugcucggcuucaucaugugggccugccagaaggggaacauccggugcaacaucugcaucuga

SEQ ID NO: 65227 - RNA, 1701 nt, Artificial Sequence
  derived and/or modified CDS sequence (opt1) from hemagglutinin__InfluenzaA__ABI21178
augaagaccaucaucgcccugagcuacauccucugccugguguucgcccagaagcugcccggcaacgacaacuccaccgcgacgcucugccuggggcaccacgccgucccgaacggcaccaucgugaagaccaucaccaacgaccagaucgaggugacgaacgccaccgagcugguccagagcuccagcaccgggggcaucugcgacagcccccaccagauccucgacggggagaacugcacccugaucgacgcccugcucggcgacccccagugcgacggcuuccagaacaagaagugggaccuguucguggagcgcagcaaggccuacuccagcugcuaccccuacgacgugccggacuacgcgucccugcggagccucgucgccuccagcgggacgcuggaguucaacaacgaguccuucaacuggaccggcgugacccagaacgggaccagcuccgccugcaagcgccggagcaacaacuccuucuucagccgccugaacuggcucacgcaccugaaguucaaguaccccgcccugaacgugaccaugcccaacaacgagaaguucgacaagcucuacaucuggggcguccaccaccccgggaccaacaacgaccagaucucccuguacgcgcaggccagcggccggaucaccgugagcacgaagcgcucccagcagaccgugaucccgaacaucggcagccggccccgcguccgggacauccccucccgcaucagcaucuacuggaccaucgugaagcccggggacauccugcucaucaacuccaccggcaaccugaucgccccgcggggguacuucaagauccgcagcggcaaguccagcaucaugcgguccgacgcccccaucggcaagugcaacagcgagugcaucacgcccaacggguccauccccaacgacaagccguuccagaacgugaaccgcaucaccuacggcgccugcccccgguacgucaagcagaacacccugaagcucgcgaccgggaugcgcaacgugcccgagaagcagacgcggggcaucuucggggccaucgccggcuucaucgagaacggcugggaggggaugguggacggcugguacggguuccgccaccagaacagcgagggcaucgggcaggccgccgaccugaaguccacccaggcggccaucaaccagaucaacggcaagcugaaccggcucaucggcaagaccaacgagaaguuccaccagaucgagaaggaguucagcgaggucgaggggcgcauccaggaccuggagaaguacguggaggacaccaagaucgaccugugguccuacaacgccgagcuccugguggcccuggagaaccagcacacgaucgaccucaccgacagcgagaugaacaagcuguucgagcggaccaagaagcagcugcgcgagaacgccgaggacaugggcaacgggugcuucaagaucuaccacaagugcgacaacgcgugcaucggcuccauccgcaacgggaccuacgaccacgacgucuaccgggacgaggcccucaacaaccgcuuccagaucaagggcguggagcugaaguccggcuacaaggacuggauccuguggaucuccuucgccaucagcugcuuccuccugugcguggcccugcucggguucaucaugugggccugccagaagggcaacauccggugcaacaucugcaucuga

SEQ ID NO: 65228 - RNA, 1698 nt, Artificial Sequence
  derived and/or modified CDS sequence (opt1) from hemagglutinin__InfluenzaA__ABI21200
augaaggugaagcugcucguccugcugugcaccuucaccgccacguacgccgacaccaucugcaucggcuaccacgcgaacaacagcaccgacaccguggacacggugcucgagaagaacgucaccgugacccacuccgugaaccugcuggaggacagccacaacgggaagcucugccugcugaagggcaucgcgccccuccagcuggggaacugcuccgucgccggcuggauccuggggaacccggagugcgagcuccugaucagcaaggaguccuggagcuacaucguggagacccccaaccccgagaacggcacgugcuaccccggcuacuucgccgacuacgaggagcugcgcgagcagcucuccagcguguccagcuucgagcgguucgagaucuucccgaaggaguccagcuggcccaaccacaccgucaccgggguguccgccagcugcucccacaacggcaagagcuccuucuaccgcaaccugcuguggcucaccgggaagaacggccuguaccccaaccugagcaaguccuacgccaacaacaaggagaaggaggugcucguccuguggggcgugcaccacccgcccaacaucggggaccagcgggcccuguaccacacggagaacgccuacgugagcgucgugagcucccacuacagccgccgguucacccccgagaucgccaagcgccccaaggugcgggaccaggagggccgcaucaacuacuacuggacccuccuggagcccggggacaccaucaucuucgaggcgaacggcaaccugaucgccccgcgguucgccuucgcccucucccgcggguucggcagcggcaucaucacguccaacgcccccauggacgagugcgacgcgaagugccagacgccccagggggccaucaacagcucccugcccuuccagaacguccacccggugaccaucggcgagugccccaaguacgugcggagcgccaagcugcgcauggucaccgggcuccggaacauccccuccauccagagccgcggccuguucggggccaucgccggcuucaucgagggcggguggaccggcaugguggacgggugguacggcuaccaccaccagaacgagcagggguccggcuacgcggccgaccagaaguccacccagaacgccaucaacggcaucaccaacaaggugaacagcgucaucgagaagaugaacacccaguucacggccguggggaaggaguucaacaagcuggagcggcgcauggagaaccucaacaagaaggucgacgacggcuuccuggacaucuggaccuacaacgccgagcugcucgugcugcuggagaacgagcggacccucgacuuccacgacagcaacgugaagaaccuguacgagaaggucaagucccagcugaagaacaacgcgaaggagaucgggaacggcugcuucgaguucuaccacaagugcaacgacgagugcauggagagcgugaagaacgggaccuacgacuaccccaaguacuccgaggagagcaagcucaaccgcgagcggaucgacggcgugaagcuggaguccaugggcgucuaccagauccuggccaucuacagcacgguggccagcucccucgugcugcuggucagccucggggccaucuccuucuggaugugcagcaacggcucccugcagugccgcaucugcaucuga

SEQ ID NO: 65229 - RNA, 1698 nt, Artificial Sequence; identical to SEQ ID NO: 65228
  derived and/or modified CDS sequence (opt1) from hemagglutinin__InfluenzaA__ABI21211

SEQ ID NO: 65230 - RNA, 1698 nt, Artificial Sequence
  derived and/or modified CDS sequence (opt1) from hemagglutinin__InfluenzaA__ABI21233
augaaggugaagcugcucguccugcugugcaccuucaccgccacguacgccgacaccaucugcaucggcuaccacgcgaacaacagcaccgacaccguggacacggugcucgagaagaacgucaccgugacccacuccgugaaccugcuggaggacagccacaacgggaagcucugccugcugaagggcaucgcgccccuccagcuggggaacugcuccgucgccggcuggauccuggggaacccggagugcgagcuccugaucagcaaggaguccuggagcuacaucguggagacccccaaccccgagaacggcacgugcuaccccggcuacuucgccgacuacgaggagcugcgcgagcagcucaacuccgugagcuccuucgagcgguucgagaucuucccgaaggagagcuccuggcccaaccacaccgucaccggggugagcgccuccugcagccacaacggcaaguccagcuucuaccgcaaccugcuguggcucaccgggaagaacggccuguaccccaaccuguccaagagcuacgccaacaacaaggagaaggaggugcucguccuguggggcgugcaccacccgcccaacaucggggaccagcgggcccuguaccacacggagaacgccuacguguccgucgugagcagccacuacucccgccgguucacccccgagaucgccaagcgccccaaggugcgggaccaggagggccgcaucaacuacuacuggacccuccuggagcccggggacaccaucaucuucgaggcgaacggcaaccugaucgccccgcgguucgccuucgcccucagccgcggguucggcuccggcaucaucacgagcaacgcccccauggacgagugcgacgcgaagugccagacgccccagggggccaucaacuccagccugcccuuccagaacguccacccggugaccaucggcgagugccccaaguacgugcgguccgccaagcugcgcauggucaccgggcuccggaacauccccagcauccagucccgcggccuguucggggccaucgccggcuucaucgagggcggguggaccggcaugguggacgggugguacggcuaccaccaccagaacgagcaggggagcggcuacgcggccgaccagaaguccacccagaacgccaucaacggcaucaccaacaaggugaacagcgucaucgagaagaugaacacccaguucacggccguggggaaggaguucaacaagcuggagcggcgcauggagaaccucaacaagaaggucgacgacggcuuccuggacaucuggaccuacaacgccgagcugcucgugcugcuggagaacgagcggacccucgacuuccacgacuccaacgugaagaaccuguacgagaaggucaagagccagcugaagaacaacgcgaaggagaucgggaacggcugcuucgaguucuaccacaagugcaacgacgagugcauggaguccgugaagaacgggaccuacgacuaccccaaguacagcgaggaguccaagcucaaccgcgagcggaucgacggcgugaagcuggagagcaugggcgucuaccagauccuggccaucuacuccacgguggccagcagccucgugcugcuggucucccucggggccaucagcuucuggaugugcuccaacggcagccugcagugccgcaucugcaucuga

SEQ ID NO: 65231 - RNA, 1701 nt, Artificial Sequence
  derived and/or modified CDS sequence (opt1) from hemagglutinin__InfluenzaA__ABI21244
augaagaccaucaucgcccugagcuacauccucugccugguguucgcccagaagcugcccggcaacgacaacuccaccgcgacgcucugccuggggcaccacgccgucccgaacggcacccuggugaagaccaucaccaacgaccagaucgaggugacgaacgccaccgagcucguccagagcuccagcaccgggcgcaucugcgacagcccccaccggauccuggacggcaagaacugcacccugaucgacgcccuccugggggacccccacugcgacggcuuccagaacaaggagugggaccuguucguggagcgcuccaaggccuacuccaacugcuaccccuacgacgugccggacuacgcgagccuccggucccuggucgccagcuccggcacgcugaaguucaucaacgaggacuucaacuggaccgggguggcccaggacggcaagagcuacgccugcaagcgcggguccgugaacagcuucuucucccggcucaacuggcugcacaagcuggaguacaaguaccccgcgcucaacgucaccaugcccaacaacggcaaguucgacaagcuguacaucuggggcgugcaccaccccagcaccgacuccgaccagacgagccuguacgugcgcgccuccgggcgggucaccgugagcaccaagcgcagccagcagaccgugaucccgaacaucggcucccggcccuggguccgcgggcucagcucccggaucagcaucuacuggacgaucgugaagcccggcgacauccugcugaucaacuccaccgggaaccucaucgcgccccgcggcuacuucaagauccggagcggcaaguccagcaucaugcgcuccgacgccccgaucgggaacugcagcuccgagugcaucacccccaacggcagcauccccaacgacaagcccuuccagaacgugaaccggaucaccuacggggccugcccgcgcuacgucaagcagaacacgcugaagcuggccaccggcaugcggaacgugcccgagaagcagacccgcgggaucuucggcgccaucgccggcuucaucgagaacgggugggagggcaugguggacgggugguacggcuuccggcaccagaacuccgaggggaccggccaggccgccgaccucaagagcacgcaggcggccaucgaccagaucaacggcaagcugaaccgccugaucgagaagaccaacgagaaguuccaccagaucgagaaggaguucuccgaggucgaggggcggauccaggaccucgagaaguacguggaggacaccaagaucgaccuguggagcuacaacgccgagcugcucguggcccuggagaaccagcacaccaucgaccugacggacuccgagaugaacaagcuguucgagcgcacccgcaagcagcuccgggagaacgccgaggacaugggcaacgggugcuucaagaucuaccacaagugcgacaacgcgugcaucggcagcauccgcaacgggaccuacgaccacgacgucuaccgggacgaggcccugaacaaccgcuuccagaucaagggcguggagcucaaguccggcuacaaggacuggauccuguggaucagcuucgccaucagcugcuuccugcucugcgucgugcugcugggguucaucaugugggccugccagaagggcaacauccggugcaacaucugcaucuga

SEQ ID NO: 65232 - RNA, 1701 nt, Artificial Sequence; identical to SEQ ID NO: 65077
  derived and/or modified CDS sequence (opt1) from hemagglutinin__InfluenzaA__ABI21255

SEQ ID NO: 65233 - RNA, 1701 nt, Artificial Sequence; identical to SEQ ID NO: 65077
  derived and/or modified CDS sequence (opt1) from hemagglutinin__InfluenzaA__ABI21266

SEQ ID NO: 65234 - RNA, 1701 nt, Artificial Sequence; identical to SEQ ID NO: 65077
  derived and/or modified CDS sequence (opt1) from hemagglutinin__InfluenzaA__ABI21277

SEQ ID NO: 65235 - RNA, 1701 nt, Artificial Sequence
  derived and/or modified CDS sequence (opt1) from hemagglutinin__InfluenzaA__ABI21299
augaagaccaucaucgcccugagcuacauccucugccugguguucgcccagaagcugcccggcaacgacaacuccaccgcgacgcucugccuggggcaccacgccgucccgaacggcacccuggugaagaccaucaccaacgaccagaucgaggugacgaacgccaccgagcucguccagagcuccagcaccgggcgcaucugcgacagcccccaccggauccuggacggcaagaacugcacccugaucgacgcccuccugggggacccccacugcgacggcuuccagaacaaggagugggaccuguucguggagcgcuccaaggccuacuccaacugcuaccccuacgacgugccggacuacgcgagccuccggucccuggucgccagcuccggcacgcuggaguucaucaacgaggacuucaacuggaccgggguggcccaggacggcaagagcuacgccugcaagcgcggguccgugaacagcuucuucucccggcucaacuggcugcacaagcuggaguacaaguaccccgcgcucaacgucaccaugcccaacaacgacaaguucgacaagcuguacaucuggggcgugcaccaccccagcaccgacuccgaccagacgagccuguacgugcgcgccuccgggcgggucaccgugagcaccaagcgcagccagcagaccgugaucccgaacaucggcucccggcccuggguccgcggccucagcucccggaucagcaucuacuggacgaucgugaagcccggggacauccugcugaucaacuccaccggcaaccucaucgcgccccgcggguacuucaagauccggaacggcaagagcuccaucaugcgcagcgacgccccgaucggcaacugcuccagcgagugcaucacccccaacggguccauccccaacgacaagcccuuccagaacgugaaccggaucaccuacggcgccugcccgcgcuacgucaagcagaacacgcugaagcuggccaccgggaugcggaacgugcccgagaagcagacccgcggcaucuucggggccaucgccggcuucaucgagaacggcugggaggggaugguggacggcugguacggguuccggcaccagaacagcgagggcaccgggcaggccgccgaccucaaguccacgcaggcggccaucgaccagaucaacggcaagcugaaccgccugaucgagaagaccaacgagaaguuccaccagaucgagaaggaguucagcgaggucgagggccggauccaggaccucgagaaguacguggaggacaccaagaucgaccugugguccuacaacgccgagcugcucguggcccuggagaaccagcacaccaucgaccugacggacagcgagaugaacaagcuguucgagcgcacccgcaagcagcuccgggagaacgccgaggacauggggaacggcugcuucaagaucuaccacaagugcgacaacgcgugcaucggguccauccgcaacggcaccuacgaccacgacgucuaccgggacgaggcccugaacaaccgcuuccagaucaaggggguggagcucaagagcggcuacaaggacuggauccuguggaucuccuucgccaucagcugcuuccugcucugcgucgugcugcugggcuucaucaugugggccugccagaaggggaacauccggugcaacaucugcaucuga

SEQ ID NO: 65236 - RNA, 1701 nt, Artificial Sequence; identical to SEQ ID NO: 65077
  derived and/or modified CDS sequence (opt1) from hemagglutinin__InfluenzaA__ABI21310

SEQ ID NO: 65237 - RNA, 1701 nt, Artificial Sequence
  derived and/or modified CDS sequence (opt1) from hemagglutinin__InfluenzaA__ABI21321
augaagaccaucaucgcccugagcuacauccucugccugguguucgcccagaagcugcccggcaacgacaacuccaccgcgacgcucugccuggggcaccacgccgucccgaacggcacccuggugaagaccaucaccaacgaccagaucgaggugacgaacgccaccgagcucguccagagcuccagcaccgggcgcaucugcgacagcccccaccggauccuggacggcaagaacugcacccugaucgacgcccuccugggggacccccacugcgacggcuuccagaacaaggagugggaccuguucguggagcgcuccaaggccuacuccaacugcuaccccuacgacgugccggacuacgcgagccuccggucccuggucgccagcuccggcacgcuggaguucaucaacgaggacuucaacuggaccgggguggcccaggacggcaagagcuacgccugcaagcgcggguccgugaacagcuucuucucccggcucaacuggcugcacaagcuggaguacaaguaccccgcgcucaacgucaccaugcccaacaacggcaaguucgacaagcuguacaucuggggcgugcaccaccccagcaccgacuccgaccagacgagccuguacgugcgcgccuccgggcgggucaccgugagcaccaagcgcagccagcagaccgugaucccgaacaucggcucccggcccuggguccgcgggcucagcucccggaucagcaucuacuggacgaucgugaagcccggcgacauccugcugaucaacuccaccgggaaccucaucgcgccccgcggcuacuucaagauccggaacggcaagagcuccaucaugcgcagcgacgccccgaucgggaacugcuccagcgagugcaucacccccaacggcuccauccccaacgacaagcccuuccagaacgugaaccggaucaccuacggggccugcccgcgcuacgucaagcagaacacgcugaagcuggccaccggcaugcggaacgugcccgagaagcagacccgcgggaucuucggcgccaucgccggcuucaucgagaacgggugggagggcaugguggacgggugguacggcuuccggcaccagaacagcgaggggaccggccaggccgccgaccucaaguccacgcaggcggccaucgaccagaucaacggcaagcugaaccgccugaucgagaagaccaacgagaaguuccaccagaucgagaaggaguucagcgaggucgaggggcggauccaggaccucgagaaguacguggaggacaccaagaucgaccugugguccuacaacgccgagcugcucguggcccuggagaaccagcacaccaucgaccugacggacagcgagaugaacaagcuguucgagaagacccgcaagcagcuccgcgagaacgccgaggacaugggcaacgggugcuucaagaucuaccacaagugcgacaacgcgugcaucggcuccauccggaacgggaccuacgaccacgacgucuaccgcgacgaggcccugaacaaccgguuccagaucaagggcguggagcucaagagcggcuacaaggacuggauccuguggaucuccuucgccaucagcugcuuccugcucugcgucgugcugcugggguucaucaugugggccugccagaagggcaacauccgcugcaacaucugcaucuga

SEQ ID NO: 65238 - RNA, 1701 nt, Artificial Sequence
  derived and/or modified CDS sequence (opt1) from hemagglutinin__InfluenzaA__ABI21332
augaagaccaucaucgcccugagcuacauccucugccugguguucgcccagaagcugcccggcaacgacaacuccaccgcgacgcucugccuggggcaccacgccgucccgaacggcacccuggugaagaccaucaccaacgaccagaucgaggugacgaacgccaccgagcucguccagagcuccagcaccgggcgcaucugcgacagcccccaccggauccuggacggcaagaacugcacccugaucgacgcccuccugggggacccccacugcgacggcuuccagaacaaggagugggaccuguucguggagcgcuccaaggccuacuccaacugcuaccccuacgacgugccggacuacgcgagccuccggucccuggucgccagcuccggcacgcuggaguucaucaacgaggacuucaacuggaccgggguggcccaggacggcaagagcuacgccugcaagcgcggguccgugaacagcuucuucucccggcucaacuggcugcacaagcuggaguacaaguaccccgcgcucaacgucaccaugcccaacaacggcaaguucgacaagcuguacaucuggggcgugcaccaccccagcaccgacuccgaccagacgagccuguacgugcaggccuccgggcgcgucaccgugagcaccaagcggagccagcagaccgugaucccgaacaucggcucccgccccuggguccgggggcucagcucccgcaucagcaucuacuggacgaucgugaagcccggcgacauccugcugaucaacuccaccgggaaccucaucgcgccccggggcuacuucaagauccgcaacggcaagagcuccaucaugcggagcgacgccccgaucgggaacugcuccagcgagugcaucacccccaacggcuccauccccaacgacaagcccuuccagaacgugaaccgcaucaccuacggggccugcccgcgguacgucaagcagaacacgcugaagcuggccaccggcaugcgcaacgugcccgagaagcagacccgggggaucuucggcgccaucgccggcuucaucgagaacgggugggagggcaugguggacgggugguacggcuuccgccaccagaacagcgaggggaccggccaggccgccgaccucaaguccacgcaggcggccaucgaccagaucaacggcaagcugaaccggcugaucgagaagaccaacgagaaguuccaccagaucgagaaggaguucagcgaggucgaggggcgcauccaggaccucgagaaguacguggaggacaccaagaucgaccugugguccuacaacgccgagcugcucguggcccuggagaaccagcacaccaucgaccugacggacagcgagaugaacaagcuguucgagcggacccgcaagcagcuccgcgagaacgccgaggacaugggcaacgggugcuucaagaucuaccacaagugcgacaacgcgugcaucggcuccauccggaacgggaccuacgaccacgacgucuaccgcgacgaggcccugaacaaccgguuccagaucaagggcguggagcucaagagcggcuacaaggacuggauccuguggaucuccuucgccaucagcugcuuccugcucugcgucgugcugcugggguucaucaugugggccugccagaagggcaacauccgcugcaacaucugcaucuga

SEQ ID NO: 65239 - RNA, 1701 nt, Artificial Sequence; identical to SEQ ID NO: 65077
  derived and/or modified CDS sequence (opt1) from hemagglutinin__InfluenzaA__ABI21343

SEQ ID NO: 65240 - RNA, 1701 nt, Artificial Sequence
  derived and/or modified CDS sequence (opt1) from hemagglutinin__InfluenzaA__ABI21354
augaagaccaucaucgcccugagcuacaucuccugccucguguucgcccagaagcugcccggcaacgacaacagcaccgcgacgcugugccucgggcaccacgccgucccgaacggcacccuggugaagaccaucaccaacgaccagaucgaggugacgaacgccaccgagcugguccaguccagcuccaccgggcgcaucugcgacagcccccaccggauccucgacggcaagaacugcacccugaucgacgcccugcucggggacccccacugcgacggcuuccagaacaaggagugggaccuguucguggagcgcuccaaggccuacagcaacugcuaccccuacgacgugccggacuacgcgucccugcggagccucgucgccuccagcggcacgcuggaguucaucaacgaggacuucaacuggaccgggguggcccaggacggcaaguccuacgccugcaagcgcgggagcgugaacuccuucuucagccggcugaacuggcuccacaagcuggaguacaaguaccccgcgcugaacgucaccaugcccaacaacggcaaguucgacaagcucuacaucuggggcgugcaccaccccuccaccgacagcgaccagacgucccuguacgugcgcgccagcgggcgggucaccgugagcaccaagcgcucccagcagaccgugaucccgaacaucggcagccggcccuggguccgcgggcuguccagccggaucuccaucuacuggacgaucgugaagcccggcgacauccuccugaucaacagcaccgggaaccugaucgcgccccgcggcuacuucaagauccggaacggcaaguccagcaucaugcgcuccgacgccccgaucgggaacugcagcuccgagugcaucacccccaacggcagcauccccaacgacaagcccuuccagaacgugaaccggaucaccuacggggccugcccgcgcuacgucaagcagaacacgcucaagcuggccaccggcaugcggaacgugcccgagaagcagacccgcgggaucuucggcgccaucgccggcuucaucgagaacgggugggagggcaugguggacgggugguacggcuuccggcaccagaacuccgaggggaccggccaggccgccgaccucaagagcacgcaggcggccaucgaccagaucaacggcaagcugaaccgccugaucgagaagaccaacgagaaguuccaccagaucgagaaggaguucuccgaggucgaggggcggauccaggaccuggagaaguacguggaggacaccaagaucgaccucuggagcuacaacgccgagcugcugguggcccucgagaaccagcacaccaucgaccugacggacuccgagaugaacaagcuguucgagcgcacccgcaagcagcuccgggagaacgccgaggacaugggcaacgggugcuucaagaucuaccacaagugcgacaacgcgugcaucggcagcauccgcaacgggaccuacgaccacgacgucuaccgggacgaggcccugaacaaccgcuuccagaucaagggcguggagcugaaguccggcuacaaggacuggauccucuggaucagcuucgccaucagcugcuuccugcugugcgucgugcuccugggguucaucaugugggccugccagaagggcaacauccggugcaacaucugcaucuga

SEQ ID NO: 65241 - RNA, 1701 nt, Artificial Sequence
  derived and/or modified CDS sequence (opt1) from hemagglutinin__InfluenzaA__ABI21365
augaagaccaucaucgcccugagcuacauccucugccugguguucgcccagaagcugcccggcaacgacaacuccaccgcgacgcucugccuggggcaccacgccgucccgaacggcacccuggugaagaccaucaccaacgaccagaucgaggugacgaacgccaccgagcucguccagagcuccagcaccgggcgcaucugcgacagcccccaccggauccuggacggcaagaacugcacccugaucgacgcccuccugggggacccccacugcgacggcuuccagaacaaggagugggaccuguucguggagcgcuccaaggccuacuccaacugcuaccccuacgacgugccggacuacgcgagccuccggucccuggucgccagcuccggcacgcuggaguucaucaacgaggacuucaacuggaccgggguggcccaggacggcaagagcuacgccugcaagcgcggguccgugaacagcuucuucucccggcucaacuggcugcacaagcuggaguacaaguaccccgcgcucaacgucaccaugcccaacaacggcaaguucgacaagcuguacaucuggggcgugcaccaccccagcaccgacuccgaccagacgagccuguacgugcgcgccuccgggcgggucaccgugagcaccaagcgcagccagcagaccgugaucccgaacaucggcucccggcccuggguccgcgggcucagcucccggaucagcaucuacuggacgaucgugaagcccggcgacauccugcugaucaacuccaccgggaaccucaucgcgccccgcggcuacuucaagauccggaacggcaagagcuccaucaugcgcagcgacgccccgaucgggaacugcuccagcgagugcaucacccccaacggcuccauccccaacgacaagcccuuccagaacgugaaccggaucaccuacggggccugcccgcgcuacgucaagcagaacacgcugaagcuggccaccggcaugcggaacgugcccgagaagcagacccgcgggaucuucggcgccaucgccggcuucaucgagaacgggugggagggcaugguggacgggugguacggcuuccggcaccagaacagcgaggggaccggccaggccgccgaccucaaguccacgcaggcggccaucgaccagaucaacggcaagcugaaccgccugaucgagaagaccaacgagaaguuccaccagaucgagaaggaguucagcgaggucgaggggcggauccaggaccucgagaaguacguggaggacaccaagaucgaccugugguccuacaacgccgagcugcucguggcccuggagaaccagcacaccaucgaccugacggacagcgagauggacaagcuguucgagcgcacccgcaagcagcuccgggagaacgccgaggacaugggcaacgggugcuucaagaucuaccacaagugcgacaacgcgugcaucggcuccauccgcaacgggaccuacgaccacgacgucuaccgggacgaggcccugaacaaccgcuuccagaucaagggcguggagcucaagagcggcuacaaggacuggauccuguggaucuccuucgccaucagcugcuuccugcucugcgucgugcugcugggguucaucaugugggccugccagaagggcaacauccggugcaacaucugcaucuga

SEQ ID NO: 65242 - RNA, 1701 nt, Artificial Sequence
  derived and/or modified CDS sequence (opt1) from hemagglutinin__InfluenzaA__ABI21376
augaagaccaucaucgcccugagcuacauccucugccugguguucgcccagaagcugcccggcaacgacaacuccaccgcgacgcucugccuggggcaccacgccgucccgaacggcacccuggugaagaccaucaccaacgaccagaucgaggugacgaacgccaccgagcucguccagagcuccagcaccgggcgcaucugcgacagcccccaccggauccuggacggcaagaacugcacccugaucgacgcccuccugggggacccccacugcgacggcuuccagaacaaggagugggaccuguucguggagcgcuccaaggccuacuccaacugcuaccccuacgacgugccggacuacgcgagccuccggucccuggucgccagcuccggcacgcuggaguucaucaacgaggacuucaacuggaccgggguggcccaggacggcaagagcuacuccugcaagcgcgggagcgugaacuccuucuucagccggcucaacuggcugcacaagcuggaguacaaguaccccgcccucaacgucaccaugcccaacaacgacaaguucgacaagcuguacaucuggggcgugcaccaccccuccaccgacagcgaccagacgucccuguacgugcgcgcgagcgggcgggucaccgugagcaccaagcgcucccagcagaccgugaucccgaacaucggcagccggcccuggguccgcggccucuccagccggaucuccaucuacuggacgaucgugaagcccggggacauccugcugaucaacagcaccggcaaccucaucgcgccccgcggguacuucaagauccggaacggcaaguccagcaucaugcgcuccgacgccccgaucggcaacugcagcuccgagugcaucacccccaacgggagcauccccaacgacaagcccuuccagaacgugaaccggaucaccuacggcgccugcccgcgcuacgucaagcagaacacgcugaagcuggccaccgggaugcggaacgugcccgagaagcagacccgcggcaucuucggggccaucgccggcuucaucgagaacggcugggaggggaugguggacggcugguacggguuccggcaccagaacuccgagggcaccgggcaggccgccgaccucaagagcacgcaggccgcgaucgaccagaucaacggcaagcugaaccgccugaucgagaagaccaacgagaaguuccaccagaucgagaaggaguucuccgaggucgagggccggauccaggaccucgagaaguacguggaggacaccaagaucgaccuguggagcuacaacgccgagcugcucguggcccuggagaaccagcacaccaucgaccugacggacuccgagaugaacaagcuguucgagcgcacccgcaagcagcuccgggagaacgccgaggacauggggaacggcugcuucaagaucuaccacaagugcgacaacgccugcaucgggagcauccgcaacggcaccuacgaccacgacgucuaccgggacgaggcgcugaacaaccgcuuccagaucaaggggguggagcucaaguccggcuacaaggacuggauccuguggaucagcuucgccaucagcugcuuccugcucugcgucgugcugcugggcuucaucaugugggccugccagaaggggaacauccggugcaacaucugcaucuga

SEQ ID NO: 65243 - RNA, 1701 nt, Artificial Sequence; identical to SEQ ID NO: 65077
  derived and/or modified CDS sequence (opt1) from hemagglutinin__InfluenzaA__ABI21387

SEQ ID NO: 65244 - RNA, 1701 nt, Artificial Sequence
  derived and/or modified CDS sequence (opt1) from hemagglutinin__InfluenzaA__ABI21398
augaagaccaucaucgcccugagcuacauccucugccugguguucgcccagaagcugcccggcaacgacaacuccaccgcgacgcucugccuggggcaccacgccgucccgaacggcacccuggugaagaccaucaccaacgaccagaucgaggugacgaacgccaccgagcucguccagagcuccagcaccgggcgcaucugcgacagcccccaccggauccuggacggcaagaacugcacccugaucgacgcccuccugggggacccccacugcgacggcuuccagaacaaggagugggaccuguucguggagcgcuccaaggccuacuccaacugcuaccccuacgacgugccggacuacgcgagccuccggucccuggucgccagcuccggcacgcuggaguucgugaacgaggacuucaacuggaccgggguggcccaggacggcaagagcuacgccugcaagcgcggguccgucaacagcuucuucucccggcucaacuggcugcacaagcuggaguacaaguaccccgcgcucaacgugaccaugcccaacaacggcaaguucgacaagcuguacaucuggggcgugcaccaccccagcaccgacuccgaccagacgagccuguacguccgcgccuccgggcgggugaccgugagcaccaagcgcagccagcagaccgucaucccgaacaucggcucccggcccugggugcgcgggcucagcucccggaucagcaucuacuggacgaucgugaagcccggcgacauccugcugaucaacuccaccgggaaccucaucgcgccccgcggcuacuucaagauccggaacggcaagagcuccaucaugcgcagcgacgccccgaucgggaacugcuccagcgagugcaucacccccaacggcuccauccccaacgacaagcccuuccagaacgucaaccggaucaccuacggggccugcccgcgcuacgugaagcagaacacgcugaagcuggccaccggcaugcggaacgugcccgagaagcagacccgcgggaucuucggcgccaucgccggcuucaucgagaacgggugggagggcauggucgacgggugguacggcuuccggcaccagaacagcgaggggaccggccaggccgccgaccucaaguccacgcaggcggccaucgaccagaucaacggcaagcugaaccgccugaucgagaagaccaacgagaaguuccaccagaucgagaaggaguucagcgagguggaggggcggauccaggaccucgagaaguacguggaggacaccaagaucgaccugugguccuacaacgccgagcugcucgucgcccuggagaaccagcacaccaucgaccugacggacagcgagaugaacaagcuguucgagcgcacccgcaagcagcuccgggagaacgccgaggacaugggcaacgggugcuucaagaucuaccacaagugcgacaacgcgugcaucggcuccauccgcaacgggaccuacgaccacgacguguaccgggacgaggcccugaacaaccgcuuccagaucaagggcgucgagcucaagagcggcuacaaggacuggauccuguggaucuccuucgccaucagcugcuuccugcucugcguggugcugcugggguucaucaugugggccugccagaagggcaacauccggugcaacaucugcaucuga

SEQ ID NO: 65245 - RNA, 1701 nt, Artificial Sequence; identical to SEQ ID NO: 65077
  derived and/or modified CDS sequence (opt1) from hemagglutinin__InfluenzaA__ABI21409

SEQ ID NO: 65246 - RNA, 1701 nt, Artificial Sequence
  derived and/or modified CDS sequence (opt1) from hemagglutinin__InfluenzaA__ABI21420
augaagaccaucaucgcccugagcuacauccucugccugguguucacccagaagcugcccggcaacgacaacuccacggccacccucugccuggggcaccacgcggucccgaacggcacccuggugaagaccaucacgaacgaccagaucgaggugaccaacgccaccgagcucguccagagcuccagcaccgggcgcaucugcgacagcccccaccggauccuggacggcaagaacugcacgcugaucgacgcccuccugggggacccccacugcgacggcuuccagaacaaggagugggaccuguucguggagcgcuccaaggccuacuccaacugcuaccccuacgacgugccggacuacgccagccuccggucccuggucgcgagcuccggcacccuggaguucaucaacgaggacuucaacuggaccgggguggcccaggacggcgggagcuacuccugcaagcgcggcagcgugaacuccuucuucagccggcucaacuggcugcacaagcuggaguacaaguaccccgcccucaacgucaccaugcccaacaacgggaaguucgacaagcuguacaucuggggcgugcaccaccccuccacggacagcgaccagaccucccuguacgugcgcgccagcggccgggucaccgugagcaccaagcgcucccagcagacggugaucccgaacaucgggagccggcccuggguccgcggccucuccagccggaucuccaucuacuggaccaucgugaagcccggggacauccugcugaucaacagcaccggcaaccucaucgcgccccgcggcuacuucaagauccggaacgggaaguccagcaucaugcgcuccgacgccccgaucggcaacugcagcuccgagugcaucacccccaacgggagcauccccaacgacaagcccuuccagaacgugaaccggaucacguacggcgccugcccgcgcuacgucaagcagaacacccugaagcuggccaccgggaugcggaacgugcccgagaagcagacccgcggcaucuucggcgccaucgcgggguucaucgagaacggcugggaggggaugguggacggcugguacggguuccggcaccagaacuccgagggcacgggccaggccgccgaccucaagagcacccaggccgccaucgaccagaucaacgggaagcugaaccgccugaucgagaagaccaacgagaaguuccaccagaucgagaaggaguucuccgaggucgagggccggauccaggaccucgagaaguacguggaggacaccaagaucgaccuguggagcuacaacgcggagcugcucguggcccuggagaaccagcacacgaucgaccugaccgacuccgagaugaacaagcuguucgagcgcacccgcaagcagcuccgggagaacgccgaggacauggggaacggcugcuucaagaucuaccacaagugcgacaacgccugcaucgggagcauccgcaacggcaccuacgaccacgacgucuaccgggacgaggcccugaacaaccgcuuccagaucaaguccguggagcucaagagcggcuacaaggacuggauccuguggaucagcuucgcgaucuccugcuuccugcucugcgucgugcugcugggguucaucaugugggccugccagaagggcaacauccggugcaacaucugcaucuga

SEQ ID NO: 65247 - RNA, 1701 nt, Artificial Sequence; identical to SEQ ID NO: 65077
  derived and/or modified CDS sequence (opt1) from hemagglutinin__InfluenzaA__ABI21431

SEQ ID NO: 65248 - RNA, 1701 nt, Artificial Sequence; identical to SEQ ID NO: 65077
  derived and/or modified CDS sequence (opt1) from hemagglutinin__InfluenzaA__ABI21442

SEQ ID NO: 65249 - RNA, 1701 nt, Artificial Sequence; identical to SEQ ID NO: 65077
  derived and/or modified CDS sequence (opt1) from hemagglutinin__InfluenzaA__ABI21453

SEQ ID NO: 65250 - RNA, 1701 nt, Artificial Sequence; identical to SEQ ID NO: 65077
  derived and/or modified CDS sequence (opt1) from hemagglutinin__InfluenzaA__ABI21464

SEQ ID NO: 65251 - RNA, 1701 nt, Artificial Sequence; identical to SEQ ID NO: 65077
  derived and/or modified CDS sequence (opt1) from hemagglutinin__InfluenzaA__ABI21475

SEQ ID NO: 65252 - RNA, 1701 nt, Artificial Sequence
  derived and/or modified CDS sequence (opt1) from hemagglutinin__InfluenzaA__ABI21486
augaagaccaucaucgcccugagcuacauccucugccugguguucgcccagaagcugcccggcaacgacaacuccaccgcgacgcucugccuggggcaccacgccgucccgaacggcacccuggugaagaccaucaccaacgaccagaucgaggugacgaacgccaccgagcucguccagagcuccagcaccgggcgcaucugcgacagcccccaccggauccuggacggcaagaacugcacccugaucgacgcccuccugggggacccccacugcgacggcuuccagaacaaggagugggaccuguucguggagcgcuccaaggccuacuccaacugcuaccccuacgacgugccggacuacgcgagccuccggucccuggucgccagcuccggcacgcuggaguucaucaacgaggacuucaacuggaccgggguggcccaggacggcaagagcuacgccugcaagcgcggguccgugaacagcuucuucucccggcucaacuggcugcacaagcuggaguacaaguaccccgcgcucaacgucaccaugcccaacaacggcaaguucgacaagcuguacaucuggggcgugcaccaccccagcaccgacuccgaccagacgagccuguacgugcgcgccuccgggcgggucaccgugagcaccaagcgcagccagcagaccgugaucccgaacaucggcucccggcccuggguccgcgggcucagcucccggaucagcaucuacuggacgaucgugaagcccggcgacauccugcugaucaacuccaccgggaaccucaucgcgccccgcggcuacuucaagauccggaacggcaagagcuccaucaugcgcagcgacgccccgaucgggaacugcuccagcgagugcaucacccccaacggcuccauccccaacgacaagcccuuccagaacgugaaccggaucaccuacggggccugcccgcgcuacgucaagcagaacacgcugaagcuggccaccggcaugcggaacgugcccgagaagcagacccgcgggaucuucggcgccaucgccggcuucaucgagaacgggugggagggcaugguggacgggugguacggcuuccggcaccagaacagcgaggggaccggccaggccgccgaccucaaguccacgcaggaggcgaucgaccagaucaacggcaagcugaaccgccugaucgagaagaccaacgagaaguuccaccagaucgagaaggaguucagcgaggucgaggggcggauccaggaccucgagaaguacguggaggacaccaagaucgaccugugguccuacaacgccgagcugcucguggcccuggagaaccagcacaccaucgaccugacggacagcgagaugaacaagcuguucgagcgcacccgcaagcagcuccgggagaacgccgaggacaugggcaacgggugcuucaagaucuaccacaagugcgacaacgccugcaucggcuccauccgcaacgggaccuacgaccacgacgucuaccgggacgaggcgcugaacaaccgcuuccagaucaagggcguggagcucaagagcggcuacaaggacuggauccuguggaucuccuucgccaucagcugcuuccugcucugcgucgugcugcugggguucaucaugugggccugccagaagggcaacauccggugcaacaucugcaucuga

SEQ ID NO: 65253 - RNA, 1701 nt, Artificial Sequence; identical to SEQ ID NO: 65077
  derived and/or modified CDS sequence (opt1) from hemagglutinin__InfluenzaA__ABI21497

SEQ ID NO: 65254 - RNA, 1698 nt, Artificial Sequence
  derived and/or modified CDS sequence (opt1) from hemagglutinin__InfluenzaA__ABI21530
augaaggccaagcugcucgugcugcugugcaccuucaccgccacguacgcggacaccaucugcaucggcuaccacgccaacaacagcaccgacaccgucgacacggugcucgagaagaacgugaccgucacccacuccgugaaccugcuggaggacagccacaacgggaagcucugccugcugaagggcaucgcgccccuccagcuggggaacugcuccguggccggcuggauccuggggaacccggagugcgagagccucaucuccaaggagagcugguccuacaucgucgagacccccaaccccgagaacggcacgugcuaccccggcuacuucgccgacuacgaggagcugcgcgagcagcugagcuccgugagcuccuucgagcgguucgagaucuucccgaaggagagcuccuggcccaaccacaccgugaccggggucagcgccuccugcagccacaacggcaaguccagcuucuaccgcaaccuccuguggcugaccgagaagaacgggcucuaccccaaccuguccaagagcuacgugaacaacaaggagaaggaggugcugguccucuggggcgugcaccaccccagcaacaucggggugcagcgggccaucuaccgcacggagaacgccuacgucuccguggugagcucccacuacagccggcgcuucaccccggagaucgccaagcggcccaagguccgcgaccaggagggccggaucaacuacuacuggacccugcuggagcccggcgacaccaucaucuucgaggcgaacgggaaccucaucgcccccugguacgccuucgcccugucccgcggcuucgagagcgggaucaucacguccaacgccccgaugaacgagugcgacgcgaagugccagacgccccagggcgccaucaacagcucccugcccuuccagaacgugcaccccgugaccaucggcgagugcccgaaguacguccggagcgccaagcuccgcauggugaccgggcugcggaacauccccuccauccagagccgcggccuguucggggccaucgccggcuucaucgagggcggguggaccggcaugaucgacgggugguacggcuaccaccaccagaacgagcagggguccggcuacgcggccgaccagaaguccacccagaacgccaucaacgggaucaccaacaaggugaacagcgucaucgagaagaugaacacccaguucacggccgugggcaaggaguucaacaagcucgagcggcgcauggagaaccugaacaagaaggucgacgacggcuuccuggacaucuggaccuacaacgccgagcuccuggugcugcucgagaacgagcggacccuggacuuccacgacagcaacgugaagaaccuguacgagaaggucaagucccagcucaagaacaacgcgaaggagaucgggaacggcugcuucgaguucuaccacaagugcaacaacgagugcauggagagcgugaagaacgggaccuacgacuaccccaaguacuccgaggagagcaagcugaaccgcgagaagaucgacggcgugaagcuggagagcaugggggucuaccagauccucgccaucuacuccacgguggccagcucccuggugcugcucgucagccugggcgccaucuccuucuggaugugcagcaacggcucccugcagugccggaucugcaucuga

SEQ ID NO: 65255 - RNA, 1698 nt, Artificial Sequence
  derived and/or modified CDS sequence (opt1) from hemagglutinin__InfluenzaA__ABI21552
augaaggccaagcugcucgugcugcugugcaccuucaccgccacguacgcggacaccaucugcaucggcuaccacgccaacaacagcaccgacaccgucgacacggugcucgagaagaacgugaccgucacccacuccgugaaccugcuggaggacagccacaacgggaagcucugccugcugaagggcaucgcgccccuccagcuggggaacugcuccguggccggcuggauccuggggaacccggagugcgagagccucaucuccaaggagagcugguccuacaucgucgagacccccaaccccgagaacggcacgugcuaccccggcuacuucgccgacuacgaggagcugcgcgagcagcugagcuccgugagcuccuucgagcgguucgagaucuucccgaaggagagcuccuggcccaaccacaccgugaccggggucagcgccuccugcagccacaacggcaaguccagcuucuaccgcaaccuccuguggcugaccgagaagaacgggcucuaccccaaccuguccaagagcuacgugaacaacaaggagaaggaggugcugguccucuggggcgugcaccaccccagcaacaucggggugcagcgggccaucuaccacacggagaacgccuacgucuccguggugagcucccacuacagccgccgguucaccccggagaucgccaagcgccccaagguccgggaccaggagggccgcaucaacuacuacuggacccugcuggagcccggcgacaccaucaucuucgaggcgaacgggaaccucaucgcccccugguacgccuucgcccugucccggggcuucgagagcgggaucaucacguccaacgccccgauggacgagugcgacgcgaagugccagacgccccagggcgccaucaacagcucccugcccuuccagaacgugcaccccgugaccaucggcgagugcccgaaguacguccgcagcgccaagcuccggauggugaccgggcugcgcaacauccccuccauccagagccggggccuguucggggccaucgccggcuucaucgagggcggguggaccggcaugaucgacgggugguacggcuaccaccaccagaacgagcagggguccggcuacgcggccgaccagaaguccacccagaacgccaucaacgggaucaccaacaaggugaacagcgucaucgagaagaugaacacccaguucacggccgugggcaaggaguucaacaagcucgagcgccggauggagaaccugaacaagaaggucgacgacggcuuccuggacaucuggaccuacaacgccgagcuccuggugcugcucgagaacgagcgcacccuggacuuccacgacagcaacgugaagaaccuguacgagaaggucaagucccagcucaagaacaacgcgaaggagaucgggaacggcugcuucgaguucuaccacaagugcaacaacgagugcauggagagcgugaagaacgggaccuacgacuaccccaaguacuccgaggagagcaagcugaaccgggagaagaucgacggcgugaagcuggagagcaugggggucuaccagauccucgccaucuacuccacgguggccagcucccuggugcugcucgucagccugggcgccaucuccuucuggaugugcagcaacggcucccugcagugccgcaucugcaucuga

SEQ ID NO: 65256 - RNA, 1698 nt, Artificial Sequence
  derived and/or modified CDS sequence (opt1) from hemagglutinin__InfluenzaA__ABI21563
augaaggccaagcugcucgugcugcugugcaccuucaccgccacguacgcggacaccaucugcaucggcuaccacgccaacaacagcaccgacaccgucgacacggugcucgagaagaacgugaccgucacccacuccgugaaccugcuggaggacagccacaacgggaagcucugccugcugaagggcaucgcgccccuccagcuggggaacugcuccguggccggcuggauccuggggaacccggagugcgagagccucaucuccaaggagagcugguccuacaucgucgagacccccaaccccgagaacggcacgugcuaccccggcuacuucgccgacuacgaggagcugcgcgagcagcugagcuccgugagcuccuucgagcgguucgagaucuucccgaaggagagcuccuggcccaaccacaccgugaccggggucagcgccuccugcagccacaacggcaaguccagcuucuaccgcaaccuccuguggcugaccgagaagaacgggcucuaccccaaccuguccaagagcuacgugaacaacaaggagaaggaggugcugguccucuggggcgugcaccaccccagcaacaucggggugcagcgggccaucuaccacacggagaacgccuacgucuccguggugagcucccacuacagccgccgguucaccccggagaucgccaagcgccccaagguccggggccaggagggccgcaucaacuacuacuggacccugcuggagcccggggacaccaucaucuucgaggcgaacggcaaccucaucgcccccugguacgccuucgcccugucccggggguucgagagcggcaucaucacguccaacgccccgaugaacgagugcgacgcgaagugccagacgccccagggcgccaucaacagcucccugcccuuccagaacgugcaccccgugaccaucggggagugcccgaaguacguccgcagcgccaagcuccggauggugaccggccugcgcaacauccccuccauccagagccgggggcuguucggcgccaucgccggguucaucgagggcggcuggaccgggaugaucgacggcugguacggguaccaccaccagaacgagcagggcuccggguacgcggccgaccagaaguccacccagaacgccaucaacggcaucaccaacaaggugaacagcgucaucgagaagaugaacacccaguucacggccgugggcaaggaguucaacaagcucgagcgccggauggagaaccugaacaagaaggucgacgacggguuccuggacaucuggaccuacaacgccgagcuccuggugcugcucgagaacgagcgcacccuggacuuccacgacagcaacgugaagaaccuguacgagaaggucaagucccagcucaagaacaacgcgaaggagaucggcaacgggugcuucgaguucuaccacaagugcaacaacgagugcauggagagcgugaagaacggcaccuacgacuaccccaaguacuccgaggagagcaagcugaaccgggagaagaucgacggggugaagcuggagagcaugggcgucuaccagauccucgccaucuacuccacgguggccagcucccuggugcugcucgucagccugggcgccaucuccuucuggaugugcagcaacgggucccugcagugccgcaucugcaucuga

SEQ ID NO: 65257 - RNA, 1698 nt, Artificial Sequence; identical to SEQ ID NO: 65256
  derived and/or modified CDS sequence (opt1) from hemagglutinin__InfluenzaA__ABI21574

SEQ ID NO: 65258 - RNA, 1701 nt, Artificial Sequence
  derived and/or modified CDS sequence (opt1) from hemagglutinin__InfluenzaA__ABI21736
augaagaccaucaucgcccugagcuacauccucugccugguguucgcccagaagcugcccggcaacgacaacuccaccgcgacgcucugccuggggcaccacgccgucccgaacggcacccuggugaagaccaucaccaacgaccagaucgaggugacgaacgccaccgagcucguccagagcuccagcaccgggggcaucugcgacagcccccaccagauccuggacggggagaacugcacccugaucgacgcccuccugggcgacccccacugcgacggcuuccagaacaaggagugggaccuguucguggagcgcagcaaggccuacuccaacugcuaccccuacgacgugccggacuacgcgagccuccggucccuggucgccagcuccgggacgcuggaguucaacaacgagagcuucaacuggaccggcguggcccagaacgggaccuccagcgccugcaagcgccgguccaacaagagcuucuucucccgccucaacuggcugcaccagcugaaguacaaguaccccgcgcucaacgugaccaugcccaacaacgagaaguucgacaagcuguacaucuggggcguccaccaccccagcacggacuccgaccagaucagccuguacgcccaggccccggggcgggugaccgugagcaccaagcgcucccagcagaccgucauccccaacaucggcagccggcccugggugcgcggcguguccagccggaucuccaucuacuggacgaucgucaagcccggggacauccuccugaucaacugcaccggcaaccugaucgccccgcgcggguacuucaagauccggagcggcaaguccagcaucaugcgcuccgacgccagcaucggcaagugcaacuccgagugcaucacccccaacgggagcauccccaacgacaagcccuuccagaacgugaaccggaucaccuacggcgcgugcccgcgcuacgugaagcagaacacgcucaagcuggccaccgggaugcggaacguccccgagaagcagacccgcggcaucuucggggccaucgccggcuucaucgagaacggcugggaggggaugguggacggcugguacggguuccggcaccagaacuccgagggcaccgggcaggccgcggaccugaaguccacgcaggccgccaucaaccagaucaacggcaagcucaaccgccugaucgagaagaccaacgagaaguuccaccagaucgagaaggaguucuccgagguggagggccggauccaggaccuggagaaguacgucgaggacaccaagaucgaccucuggagcuacaacgccgagcugcugguggcccucgagaaccagcacaccaucgaccugacggacuccgagaugaacaagcuguucgagcgcaccaagaagcagcuccgggagaacgcggaggacguggggaacggcugcuucaagaucuaccacaagugcgacaacgccugcaucgggagcauccgcaacggcaccuacgaccacgacgucuaccgcgacgaggcccugaacaaccgguuccagaucaaggggguggagcugaaguccggcuacaaggacuggauccucuggaucagcuucgccaucagcugcuuccugcugugcgucgugcuccugggcuucaucaugugggccugccagaaggggaacauccgcugcaacaucugcaucuga

SEQ ID NO: 65259 - RNA, 1701 nt, Artificial Sequence
  derived and/or modified CDS sequence (opt1) from hemagglutinin__InfluenzaA__ABI22159
augaagaccaucaucgcccugagcuacauccucugccugguguucgcccagaagcugcccggcaacgacaacuccaccgcgacgcucugccuggggcaccacgccgucccgaacggcaccaucgugaagaccaucaccaacgaccagaucgaggugacgaacgccaccgagcugguccagagcuccagcaccggggagaucugcgacagcccccaccagauccucgacggcgagaacugcacccugaucgacgcccugcucggggacccccagugcgacggcuuccagaacaagaagugggaccuguucguggagcgcagcaacgccuacuccaacugcuaccccuacgacgugccggacuacgcgagccugcggucccucgucgccagcuccggcacgcuggaguucaacaacgagagcuucaacuggaccggggugacccagaacggcaccuccagcgccugcaagcgccgguccaacaacagcuucuucucccgccugaacuggcucacgcaccugaaguucaaguaccccgcccugaacgugaccaugcccaacaacgagaaguucgacaagcucuacaucuggggcguccaccaccccgggaccgacaacgaccagaucuuccuguacgcgcaggccagcgggcggaucaccguguccacgaagcgcagccagcagaccgugaucccgaacaucggcagccggccccgcguccggaacauccccucccgcaucagcaucuacuggaccaucgugaagcccggcgacauccugcucaucaacuccaccgggaaccugaucgccccgcggggcuacuucaagauccgcagcgggaaguccagcaucaugcgguccgacgcccccaucggcaagugcaacagcgagugcaucacgcccaacggcuccauccccaacgacaagccguuccagaacgugaaccgcaucaccuacggggccugcccccgguacgucaagcagaacacccugaagcucgcgaccggcaugcgcaacgugcccgagaagcagacgcgggggaucuucggcgccaucgccggguucaucgagaacggcugggagggcaugguggacgggugguacggcuuccgccaccagaacagcgaggggaucggccaggccgccgaccugaaguccacccaggcggccaucaaccagaucaacgggaagcugaaccggcucaucggcaagaccaacgagaaguuccaccagaucgagaaggaguucagcgaggucgagggccgcauccaggaccuggagaaguacguggaggacaccaagaucgaccugugguccuacaacgccgagcuccugguggcccuggagaaccagcacacgaucgaccucaccgacagcgagaugaacaagcuguucgagcggaccaagaagcagcugcgcgagaacgccgaggacauggggaacggcugcuucaagaucuaccacaagugcgacaacgcgugcaucggguccauccgcaacggcaccuacgaccacgacgucuaccgggacgaggcccucaacaaccgcuuccagaucaaggggguggagcugaaguccggcuacaaggacuggauccuguggaucuccuucgccaucagcugcuuccuccugugcguggcccugcucggcuucaucaugugggccugccagaaggggaacauccggugcaacaucugcaucuga

SEQ ID NO: 65260 - RNA, 1707 nt, Artificial Sequence
  derived and/or modified CDS sequence (opt1) from hemagglutinin__InfluenzaA__ABI23979
auggagaagaucgugcugcuccuggccaucaucagccuggucaaguccgaccagaucugcaucggcuaccacgccaacaacagcaccgagcaggucgacaccaucauggagaagaacgugacggugacccacgcgcaggacauccucgagaagacccacaacgggaagcugugcgaccuggacggcgugaagccccucauccugcgcgacugcuccguggccggguggcugcucggcaacccgaugugcgacgaguuccugaacguccccgaguggagcuacaucguggagaagaucaaccccgccaacgaccugugcuaccccgggaacuucaacgacuacgaggagcucaagcaccuccugucccggaucaaccacuucgagaagauccagaucauccccaagagcuccuggagcgaccacgaggccuccagcggcguguccagcgccugcccguaccagggccgcuccagcuucuuccggaacgucguguggcugaucaagaaggacaacgcguaccccaccaucaagcgcuccuacaacaacacgaaccaggaggaccugcuggugcucugggggauccaccaccccaacgacgccgccgagcagacccggcuguaccagaacccgaccaccuacaucagcgucggcacguccacccugaaccagcgccucgugcccaagaucgccacccggagcaaggugaacgggcaguccggccgcauggaguucuucuggaccauccugaagcccaacgacgcgaucaacuucgagagcaacgggaacuucaucgcccccgagaacgccuacaagaucgucaagaagggcgacagcacgaucaugaaguccgagcuggaguacggcaacugcaacaccaagugccagaccccgaucggggccaucaacagcuccaugcccuuccacaacauccacccccucaccaucggcgagugccccaaguacgucaagagcaaccggcuggugcuggccacggggcuccgcaacuccccgcagggcgagcggcgccggaagaagcgcggccuguucggggcgaucgccggcuucaucgagggcggguggcaggggaugguggacggcugguacggcuaccaccacagcaacgagcagggguccggcuacgccgccgacaaggagagcacccagaaggccaucgacggggugaccaacaaggugaacuccaucaucgacaagaugaacacccaguucgaggcggucggccgggaguucaacaaccuggagcgccggaucgagaaccucaacaagaagauggaggacggguuccuggacguguggacguacaacgccgagcugcucgugcugauggagaacgagcgcacccuggacuuccacgacagcaacgucaagaaccucuacgacaaggugcggcugcagcugcgcgacaacgccaaggagcucggcaacggcugcuucgaguucuaccaccggugcgacaacgagugcauggaguccguccgcaacgggaccuacgacuacccccaguacagcgaggagucccgccugaagcgggaggagaucagcggcgugaagcuggaguccaucgggaccuaccagauccucagcaucuacuccacgguggccagcucccuggcccuggcgaucauggucgccggccucagccuguggaugugcagcaacgggucccugcagugccgcaucugcaucuga

SEQ ID NO: 65261 - RNA, 1701 nt, Artificial Sequence; identical to SEQ ID NO: 64306
  derived and/or modified CDS sequence (opt1) from hemagglutinin__InfluenzaA__ABI26646

SEQ ID NO: 65262 - RNA, 1701 nt, Artificial Sequence; identical to SEQ ID NO: 64935
  derived and/or modified CDS sequence (opt1) from hemagglutinin__InfluenzaA__ABI30367

SEQ ID NO: 65263 - RNA, 1701 nt, Artificial Sequence; identical to SEQ ID NO: 64945
  derived and/or modified CDS sequence (opt1) from hemagglutinin__InfluenzaA__ABI30378

SEQ ID NO: 65264 - RNA, 1701 nt, Artificial Sequence; identical to SEQ ID NO: 64674
  derived and/or modified CDS sequence (opt1) from hemagglutinin__InfluenzaA__ABI30400

SEQ ID NO: 65265 - RNA, 1701 nt, Artificial Sequence
  derived and/or modified CDS sequence (opt1) from hemagglutinin__InfluenzaA__ABI30411
augaagaccaucaucgcccugagcuacauccucugccugguguucgcccagaagcugcccggcaacgacaacuccaccgcgacgcucugccuggggcaccacgccgucccgaacggcacccuggugaagaccaucaccaacgaccagaucgaggugacgaacgccaccgagcucguccagagcuccagcaccgggggcaucugcgacagcccccaccagauccuggacggggagaacugcacccugaucgacgcccuccugggcgacccccacugcgacggcuuccagaacaaggagugggaccuguucguggagcgcagcaaggccuacuccaacugcuaccccuacgacgugccggacuacgcgagccuccggucccuggucgccagcuccgggacgcuggaguucaacaacgagagcuucaacuggaccggcguggcccagaacgggaccuccagcgccugcaagcgccgguccaacaagagcuucuucucccgccucaacuggcugcaccagcugaaguacaaguaccccgcgcucaacgugaccaugcccaacaacgagaaguucgacaagcuguacaucuggggcguccaccaccccagcacggacuccgaccagaucagccuguacgcccaggccccggggcgggugaccgugagcaccaagcgcucccagcagaccgucauccccaacaucggcagccggcccugggugcgcggcguguccagccggaucuccaucuacuggacgaucgucaagcccggggacauccuccugaucaacugcaccggcaaccugaucgccccgcgcggguacuucaagauccggagcggcaaguccagcaucaugcgcuccgacgccagcaucggcaagugcaacuccgagugcaucacccccaacgggagcauccccaacgacaagcccuuccagaacgugaaccggaucaccuacggcgcgugcccgcgcuacgugaagcagaacacgcucaagcuggccaccgggaugcggaacguccccgagaagcagacccgcggcaucuucggggccaucgccggcuucaucgagaacggcugggaggggaugguggacggcugguacggguuccggcaccagaacuccgagggcaccgggcaggccgcggaccugaaguccacgcaggccgccaucaaccagaucaacggcaagcucaaccgccugaucgagaagaccaacgagaaguuccaccagaucgagaaggaguucuccgagguggagggccggauccaggaccuggagaaguacgucgaggacaccaagaucgaccucuggagcuacaacgccgagcugcugguggcccucgagaaccagcacaccaucgaccugacggacuccgagauggacaagcuguucgagcgcaccaagaagcagcuccgggagaacgcggaggacauggggaacggcugcuucaagaucuaccacaagugcgacaacgccugcaucgggagcauccgcaacggcaccuacgaccacgacguguaccgcgacgaggcccugaacaaccgguuccagaucaagggggucgagcugaaguccggcuacaaggacuggauccucuggaucagcuucgccaucagcugcuuccugcugugcgugguccuccugggcuucaucaugugggccugccagaaggggaacauccgcugcaacaucugcaucuga

SEQ ID NO: 65266 - RNA, 1701 nt, Artificial Sequence; identical to SEQ ID NO: 64615
  derived and/or modified CDS sequence (opt1) from hemagglutinin__InfluenzaA__ABI30422

SEQ ID NO: 65267 - RNA, 1701 nt, Artificial Sequence; identical to SEQ ID NO: 64306
  derived and/or modified CDS sequence (opt1) from hemagglutinin__InfluenzaA__ABI30433

SEQ ID NO: 65268 - RNA, 1701 nt, Artificial Sequence; identical to SEQ ID NO: 64615
  derived and/or modified CDS sequence (opt1) from hemagglutinin__InfluenzaA__ABI30444

SEQ ID NO: 65269 - RNA, 1701 nt, Artificial Sequence; identical to SEQ ID NO: 64306
  derived and/or modified CDS sequence (opt1) from hemagglutinin__InfluenzaA__ABI30455

SEQ ID NO: 65270 - RNA, 1701 nt, Artificial Sequence; identical to SEQ ID NO: 64306
  derived and/or modified CDS sequence (opt1) from hemagglutinin__InfluenzaA__ABI30466

SEQ ID NO: 65271 - RNA, 1701 nt, Artificial Sequence; identical to SEQ ID NO: 64306
  derived and/or modified CDS sequence (opt1) from hemagglutinin__InfluenzaA__ABI30477

SEQ ID NO: 65272 - RNA, 1701 nt, Artificial Sequence; identical to SEQ ID NO: 64306
  derived and/or modified CDS sequence (opt1) from hemagglutinin__InfluenzaA__ABI30488

SEQ ID NO: 65273 - RNA, 1701 nt, Artificial Sequence; identical to SEQ ID NO: 64306
  derived and/or modified CDS sequence (opt1) from hemagglutinin__InfluenzaA__ABI30499

SEQ ID NO: 65274 - RNA, 1701 nt, Artificial Sequence; identical to SEQ ID NO: 64267
  derived and/or modified CDS sequence (opt1) from hemagglutinin__InfluenzaA__ABI30510

SEQ ID NO: 65275 - RNA, 1701 nt, Artificial Sequence
  derived and/or modified CDS sequence (opt1) from hemagglutinin__InfluenzaA__ABI30521
augaagaccaucaucgcccugagcuacauccucugccugguguucgcccagaagcugcccggcaacgacaacuccaccgcgacgcucugccuggggcaccacgccgucccgaacggcaccaucgugaagaccaucaccaacgaccagaucgaggugacgaacgccaccgagcugguccagagcuccagcaccgggggcaucugcgacagcccccaccagauccucgacggggagaacugcacccugaucgacgcccugcucggcgacccccagugcgacggcuuccagaacaagaagugggaccuguucguggagcgcagcaaggccuacuccaacugcuaccccuacgacgugccggacuacgcgagccugcggucccucgucgccagcuccgggacgcuggaguucaacaacgagagcuucaacuggaccggcgugacccagaacgggaccuccagcgccugcaagcgccgguccaacaacagcuucuucucccgccugaacuggcucacgcaccugaaguucaaguaccccgcccugaacgugaccaugcccaacaacgagaaguucgacaagcucuacaucuggggcguccaccaccccgggaccaacaacgaccagaucagccuguacgcgcaggccuccggccggaucaccgugagcacgaagcgcagccagcagaccgugaucccgaacaucggcucccggccccgcguccgggacauccccagccgcaucuccaucuacuggaccaucgugaagcccggggacauccugcucaucaacagcaccggcaaccugaucgccccgcggggguacuucaagauccgcuccggcaagagcuccaucaugcggagcgacgccuccaucggcaagugcaacagcgagugcaucacgcccaacggguccauccccaacgacaagcccuuccagaacgugaaccgcaucaccuacggcgccugcccgcgguacgucaagcagaacacccugaagcucgcgaccgggaugcgcaacgugcccgagaagcagacgcggggcaucuucggggccaucgccggcuucaucgagaacggcugggaggggaugguggacggcugguacggguuccgccaccagaacagcgagggcaucgggcaggccgccgaccugaaguccacccaggcggccaucaaccagaucaacggcaagcugaaccggcucaucggcaagaccaacgagaaguuccaccagaucgagaaggaguucagcgaggucgaggggcgcauccaggaccuggagaaguacguggaggacaccaagaucgaccugugguccuacaacgccgagcuccugguggcccuggagaaccagcacacgaucgaccucaccgacagcgagaugaacaagcuguucgagcggaccaagaagcagcugcgcgagaacgccgaggacaugggcaacgggugcuucaagaucuaccacaagugcgacaacgcgugcaucggcuccauccgcaacgggaccuacgaccacgacgucuaccgggacgaggcccucaacaaccgcuuccagaucaagggcguggagcugaaguccggcuacaaggacuggauccuguggaucuccuucgccaucagcugcuuccuccugugcguggcccugcucggguucaucaugugggccugccagaagggcaacauccggugcaacaucugcaucuga

SEQ ID NO: 65276 - RNA, 1701 nt, Artificial Sequence; identical to SEQ ID NO: 64306
  derived and/or modified CDS sequence (opt1) from hemagglutinin__InfluenzaA__ABI30532

SEQ ID NO: 65277 - RNA, 1701 nt, Artificial Sequence; identical to SEQ ID NO: 65137
  derived and/or modified CDS sequence (opt1) from hemagglutinin__InfluenzaA__ABI30543

SEQ ID NO: 65278 - RNA, 1701 nt, Artificial Sequence; identical to SEQ ID NO: 64306
  derived and/or modified CDS sequence (opt1) from hemagglutinin__InfluenzaA__ABI30554

SEQ ID NO: 65279 - RNA, 1698 nt, Artificial Sequence; identical to SEQ ID NO: 65228
  derived and/or modified CDS sequence (opt1) from hemagglutinin__InfluenzaA__ABI30565

SEQ ID NO: 65280 - RNA, 1701 nt, Artificial Sequence; identical to SEQ ID NO: 64657
  derived and/or modified CDS sequence (opt1) from hemagglutinin__InfluenzaA__ABI30587

SEQ ID NO: 65281 - RNA, 1701 nt, Artificial Sequence
  derived and/or modified CDS sequence (opt1) from hemagglutinin__InfluenzaA__ABI30609
augaagaccaucaucgcccugagcuacauccucugccugguguucgcccagaagcugcccggcaacgacaacuccaccgcgacgcucugccuggggcaccacgccgucccgaacggcaccaucgugaagaccaucaugaacgaccagaucgaggugaccaacgccacggagcugguccagagcuccagcaccgggggcaucugcgacagcccccaccagauccucgacggggagaacugcacccugaucgacgcccugcucggcgacccccagugcgacggcuuccagaacaagaagugggaccuguucguggagcgcagcaaggccuacuccaacugcuaccccuacgacgugccggacuacgcgagccugcggucccucgucgccagcuccgggacccuggaguucaacaacgagagcuucaacuggacgggcgugacccagaacgggaccuccagcgccugcaagcgccgguccaacaacagcuucuucucccgccugaacuggcucacccaccugaaguucaaguaccccgcccugaacgugacgaugcccaacaacgagaaguucgacaagcucuacaucuggggcguccaccaccccgggaccgacaacgaccagaucuuccuguacgcgcaggccagcggccggaucaccguguccaccaagcgcagccagcagacggugaucccgaacaucggcagccggccccgcguccggaacauccccucccgcaucagcaucuacuggaccaucgugaagcccggggacauccugcucaucaacuccaccggcaaccugaucgccccgcggggguacuucaagauccgcagcggcaaguccagcaucaugcgguccgacgcccccaucggcaagugcaacagcgagugcaucacccccaacggguccauccccaacgacaagccguuccagaacgugaaccgcaucacguacggcgccugcccccgguacgucaagcagaacacccugaagcucgcgaccgggaugcgcaacgugcccgagaagcagacccggggcaucuucggggccaucgccggcuucaucgagaacggcugggaggggaugguggacggcugguacggguuccgccaccagaacagcgagggcacggggcaggccgccgaccugaaguccacccaggcggccaucaaccagaucaacggcaagcugaaccggcucaucggcaagaccaacgagaaguuccaccagaucgagaaggaguucagcgaggucgaggggcgcauccaggaccuggagaaguacguggaggacaccaagaucgaccugugguccuacaacgccgagcuccugguggcccuggagaaccagcacacgaucgaccucaccgacagcgagaugaacaagcuguucgagcggaccaagaagcagcugcgcgagaacgccgaggacaugggcaacgggugcuucaagaucuaccacaagugcgacaacgcgugcaucggcuccauccgcaacgggaccuacgaccacgacgucuaccgggacgaggcccucaacaaccgcuuccagaucaagggcguggagcugaaguccggcuacaaggacuggauccuguggaucuccuucgccaucagcugcuuccuccugugcguggcccugcucggguucaucaugugggccugccagaagggcaacauccggugcaacaucugcaucuga

SEQ ID NO: 65282 - RNA, 1701 nt, Artificial Sequence
  derived and/or modified CDS sequence (opt1) from hemagglutinin__InfluenzaA__ABI30620
augaagaccaucaucgcccugagcuacauccucugccugguguucgcccagaagcugcccggcaacgacaacuccaccgcgacgcucugccuggggcaccacgccgucccgaacggcaccaucgugaagaccaucaccaacgaccagaucgaggugacgaacgccaccgagcugguccagagcuccagcaccgggggcaucugcgacagcccccaccagauccucgacggggagaacugcacccugaucgacgcccugcucggcgacccccagugcgacggcuuccagaacaagaagugggaccuguucaucgagcgcagcaaggccuacuccaacugcuaccccuacgacgugccggacuacgcgagccugcggucccucguggccagcuccgggacgcuggaguucaacaacgagagcuucaacuggaccggcgucacccagaacgggaccuccagcgccugcaagcgccgguccaacaacagcuucuucucccgccugaacuggcucacgcaccugaaguucaaguaccccgcccugaacgugaccaugcccaacaacgagaaguucgacaagcucuacaucuggggcgugcaccaccccgggaccgacaacgaccagaucagccuguacgcgcaggccuccggccggaucaccgucagcacgaagcgcagccagcagaccgugaucccgaacaucggcucccggccccgcgugcgggacauccccagccgcaucuccaucuacuggaccaucgucaagcccggggacauccugcucaucaacagcaccggcaaccugaucgccccgcggggguacuucaagauccgcuccggcaagagcuccaucaugcggagcgacgcccccaucggcaagugcaacuccgagugcaucacgcccaacgggagcauccccaacgacaagccguuccagaacgugaaccgcaucaccuacggcgccugcccccgguacgugaagcagaacacccugaagcucgcgaccgggaugcgcaacguccccgagaagcagacgcggggcaucuucggggccaucgccggcuucaucgagaacggcugggaggggaugguggacggcugguacggguuccgccaccagaacuccgagggcaucgggcaggccgccgaccugaaguccacccaggcggccaucaaccagaucaacggcaagcugaaccggcucaucggcaagaccaacgagaaguuccaccagaucgagaaggaguucuccgagguggaggggcgcauccaggaccuggagaaguacgucgaggacaccaagguggaccuguggagcuacaacgccgagcuccugguggcccuggagaaccagcacacgaucgaccucaccgacuccgagaugaacaagcuguucgagcggaccaagaagcagcugcgcgagaacgccgaggacaugggcaacgggugcuucaagaucuaccacaagugcgacaacgcgugcaucggcagcauccgcaacgggaccuacgaccacgacgucuaccgggacgaggcccucaacaaccgcuuccagaucaagggcguggagcugaaguccggcuacaaggacuggauccuguggaucagcuucgccaucuccugcuuccuccugugcguggcccugcucggguucaucaugugggccugccagaagggcaacauccggugcaacaucugcaucuga

SEQ ID NO: 65283 - RNA, 1701 nt, Artificial Sequence; identical to SEQ ID NO: 64657
  derived and/or modified CDS sequence (opt1) from hemagglutinin__InfluenzaA__ABI30733

SEQ ID NO: 65284 - RNA, 1701 nt, Artificial Sequence; identical to SEQ ID NO: 64657
  derived and/or modified CDS sequence (opt1) from hemagglutinin__InfluenzaA__ABI30744

SEQ ID NO: 65285 - RNA, 1701 nt, Artificial Sequence; identical to SEQ ID NO: 64657
  derived and/or modified CDS sequence (opt1) from hemagglutinin__InfluenzaA__ABI30755

SEQ ID NO: 65286 - RNA, 1701 nt, Artificial Sequence; identical to SEQ ID NO: 64657
  derived and/or modified CDS sequence (opt1) from hemagglutinin__InfluenzaA__ABI30766

SEQ ID NO: 65287 - RNA, 1701 nt, Artificial Sequence; identical to SEQ ID NO: 64657
  derived and/or modified CDS sequence (opt1) from hemagglutinin__InfluenzaA__ABI30777

SEQ ID NO: 65288 - RNA, 1701 nt, Artificial Sequence
  derived and/or modified CDS sequence (opt1) from hemagglutinin__InfluenzaA__ABI30788
augaagaccaucaucgcccugagcuacauccucugccugguguucgcccagaagcuguccggcaacgacaacagcaccgcgacgcucugccuggggcaccacgccguccccaacggcaccaucgugaagaccaucaccaacgaccagaucgaggugacgaacgccaccgagcugguccaguccagcuccaccgggggcaucugcgacagcccgcaccagauccucgacggggagaacugcacccugaucgacgcccugcucggcgacccccagugcgacggcuuccagaacaagaagugggaccuguucguggagcgcuccaaggccuacagcaacugcuaccccuacgacgugcccgacuacgcgucccugcggagccucaucgccuccagcgggacgcuggaguucaacaacgaguccuucaacuggaccggcgucacccagaacgggaccagcuccgccugcaagcgccggagcaacuccagcuucuucucccgccugaacuggcucacgcaccugaaguucaaguacccggcccugaacgugaccaugcccaacaacgaggaguucgacaagcucuacaucuggggcgugcaccaccccgggaccuacaacgaccagaucagccuguacgcgcaggccagcggccggaucaccgucuccacgaagcgcagccagcagaccgugauccccaacaucggcucccggccgcgcgugcgggacauccccagccgcaucuccaucuacuggaccaucgucaagcccggggacauccugcucaucaacagcaccggcaaccugaucgcgccccggggguacuucaagauccgcuccggcaagagcuccaucaugcggagcgacgccccgaucggcaagugcaacuccgagugcaucacgcccaacgggagcauccccaacgacaagcccuuccagaacgugaaccgcaucaccuacggcgccugcccgcgguacgugaagcagaacacccugaagcucgccaccgggaugcgcaacguccccgagaagcagacgcggggcaucuucggggccaucgccggcuucaucgagaacggcugggaggggaugguggacggcugguacggguuccgccaccagaacuccgagggcaucgggcaggccgccgaccucaagagcacccaggcggccaucgaccagaucaacggcaagcugaaccggcugaucggcaagaccaacgagaaguuccaccagaucgagaaggaguucuccgagguggaggggcgcauccaggaccuggagaaguacgucgaggacaccaagaucgaccuguggagcuacaacgccgagcuccugguggcccuggagaaccagcacacgaucgaccucaccgacuccgagaugaacaagcuguucgagcggaccaagaagcagcugcgcgagaacgccgaggacaugggcaacgggugcuucaagaucuaccacaagugcgacaacgcgugcaucggcagcauccgcaacgggaccuacgaccacgacguguaccgggacgaggcccucaacaaccgcuuccagaucaagggcgucgagcugaaguccggcuacaaggacuggauccuguggaucagcuucgccaucagcugcuuccuccugugcguggcccugcucggguucaucaugugggccugccagaagggcaacauccggugcaacaucugcaucuga

SEQ ID NO: 65289 - RNA, 1701 nt, Artificial Sequence; identical to SEQ ID NO: 64657
  derived and/or modified CDS sequence (opt1) from hemagglutinin__InfluenzaA__ABI30799

SEQ ID NO: 65290 - RNA, 1701 nt, Artificial Sequence
  derived and/or modified CDS sequence (opt1) from hemagglutinin__InfluenzaA__ABI30810
augaagaccaucaucgcccugagcuacauccucugccugguguucgcccagaagcugcccggcaacgacaacuccaccgcgacgcucugccuggggcaccacgccgucccgaacggcaccaucgugaagaccaucaccaacgaccagaucgaggugacgaacgccaccgagcugguccagagcuccagcaccgggggcaucugcgacagcccccaccagauccucgacggggagaacugcacccugaucgacgcccugcucggcgacccccagugcgacggcuuccagaacaagaagugggaccuguucguggagcgcagcaaggccuacuccaacugcuaccccuacgacgugccggacuacgcgagccugcggucccucaucgccagcuccgggacgcuggaguucaacaacgagagcuucaacuggaccggcgucacccagaacgggaccuccagcgccugcaagcgccgguccaacagcuccuucuucagccgccugaacuggcucacgcaccugaaguucaaguaccccgcccugaacgugaccaugcccaacaacgaggaguucgacaagcucuacaucuggggcgugcaccaccccgggaccuacaacgaccagaucucccuguacgcgcaggccagcggccggaucaccgucagcacgaagcgcucccagcagaccgugaucccgaacaucggcagccggccccgcgugcgggacauccccucccgcaucagcaucuacuggaccaucgucaagcccggggacauccugcucaucaacuccaccggcaaccugaucgccccgcggggguacuucaagauccgcagcggcaaguccagcaucaugcgguccgacgcccccaucggcaagugcaacagcgagugcaucacgcccaacggguccauccccaacgacaagccguuccagaacgugaaccgcaucaccuacggcgccugcccccgguacgugaagcagaacacccugaagcucgcgaccgggaugcgcaacguccccgagaagcagacgcggggcaucuucggggccaucgccggcuucaucgagaacggcugggaggggaugguggacggcugguacggguuccgccaccagaacagcgagggcaucgggcaggccgccgaccugaaguccacccaggcggccaucgaccagaucaacggcaagcugaaccggcucaucggcaagaccaacgagaaguuccaccagaucgagaaggaguucagcgagguggaggggcgcauccaggaccuggagaaguacgucgaggacaccaagaucgaccugugguccuacaacgccgagcuccugguggcccuggagaaccagcacacgaucgaccucaccgacagcgagaugaacaagcuguucgagcggaccaagaagcagcugcgcgagaacgccgaggacaugggcaacgggugcuucaagaucuaccacaagugcgacaacgcgugcaucggcuccaucaagaacgggaccuacgaccacgacguguaccgcgacgaggcccucaacaaccgguuccagaucaagggcgucgagcugaaguccggcuacaaggacuggauccuguggaucuccuucgccaucagcugcuuccuccugugcguggcccugcucggguucaucaugugggccugccagaagggcaacauccgcugcaacaucugcaucuga

SEQ ID NO: 65291 - RNA, 1701 nt, Artificial Sequence
  derived and/or modified CDS sequence (opt1) from hemagglutinin__InfluenzaA__ABI30821
augaagaccaucaucgcccugagcuacauccucugccugguguucgcccagaagcugcccggcaacgacaacuccaccgcgacgcucugccuggggcaccacgccgucccgaacggcaccaucgugaagaccaucaccaacgaccagaucgaggugacgaacgccaccgagcugguccagagcuccagcaccgggggcaucugcgacagcccccaccagauccucgacggggagaacugcacccugaucgacgcccugcucggcgacccccagugcgacggcuuccagaacaagaagugggaccuguucguggagcgcagcaaggccuacuccaacugcuaccccuacgacgugccggacuacgcgagccugcggucccucaucgccagcuccgggacgcuggaguucaacaacgagagcuucaacuggaccggcgucacccagaacgggaccuccagcgccugcaagcgccgguccaacagcuccuucuucagccgccugaacuggcucacgcaccugaaguucaaguaccccgcccugaacguggcgaugcccaacaacgaggaguucgacaagcucuacaucuggggcgugcaccaccccgggaccuacaacgaccagaucucccuguacgcccaggccagcggccggaucaccgucagcaccaagcgcucccagcagacggugaucccgaacaucggcagccggccccgcgugcgggacauccccucccgcaucagcaucuacuggaccaucgucaagcccggggacauccugcucaucaacuccaccggcaaccugaucgccccgcggggguacuucaagauccgcagcggcaaguccagcaucaugcgguccgacgcccccaucggcaagugcaacagcgagugcaucacccccaacggguccauccccaacgacaagccguuccagaacgugaaccgcaucacguacggcgcgugcccccgguacgugaagcagaacacccugaagcucgccaccgggaugcgcaacguccccgagaagcagacccggggcaucuucggggccaucgccggcuucaucgagaacggcugggaggggaugguggacggcugguacggguuccgccaccagaacagcgagggcaucgggcaggccgcggaccugaaguccacgcaggccgccaucgaccagaucaacggcaagcugaaccggcucaucggcaagaccaacgagaaguuccaccagaucgagaaggaguucagcgagguggaggggcgcauccaggaccuggagaaguacgucgaggacaccaagaucgaccugugguccuacaacgccgagcuccugguggcccuggagaaccagcacaccaucgaccucacggacagcgagaugaacaagcuguucgagcggaccaagaagcagcugcgcgagaacgcggaggacaugggcaacgggugcuucaagaucuaccacaagugcgacaacgccugcaucggcuccauccgcaacgggaccuacgaccacgacguguaccgggacgaggcccucaacaaccgcuuccagaucaagggcgucgagcugaaguccggcuacaaggacuggauccuguggaucuccuucgccaucagcugcuuccuccugugcguggcccugcucggguucaucaugugggcgugccagaagggcaacauccggugcaacaucugcaucuga

SEQ ID NO: 65292 - RNA, 1701 nt, Artificial Sequence; identical to SEQ ID NO: 64657
  derived and/or modified CDS sequence (opt1) from hemagglutinin__InfluenzaA__ABI30832

SEQ ID NO: 65293 - RNA, 1701 nt, Artificial Sequence
  derived and/or modified CDS sequence (opt1) from hemagglutinin__InfluenzaA__ABI30843
augaagaccaucaucgcccugagcuacauccucugccugguguucgcccagaagcugcccggcaacgacaacuccaccgcgacgcucugccuggggcaccacgccgucccgaacggcaccaucgugaagaccaucaccaacgaccagaucgaggugacgaacgccaccgagcugguccagagcuccagcaccgggggcaucugcgacagcccccaccagauccucgacggggagaacugcacccugaucgacgcccugcucggcgacccccagugcgacggcuuccagaacaagaagugggaccuguucguggagcgcagcaaggccuacuccaacugcuaccccuacgacgugccggacuacgcgagccugcggucccucaucgccagcuccgggacgcuggaguucaacaacgagagcuucaacuggaccggcgucacccagaacgggaccuccagcgccugcaagcgccgguccaacagcuccuucuucagccgccugaacuggcucacgcaccugaaguucaaguaccccgcccugaacgugaccaugcccaacaacgaggaguucgacaagcucuacaucuggggcgugcaccaccccgggaccuacaacgaccagaucucccuguacgcgcaggccagcggccggaucaccgucagcacgaagcgcucccagcagaccgugaucccgaacaucggcagccggccccgcgugcgggacauccccucccgcaucagcaucuacuggaccaucgucaagcccggggacauccugcucaucaacuccaccggcaaccugaucgccccgcggggguacuucaagauccgcagcggcaaguccagcaucaugcgguccgacgcccccaucggcaagugcaacagcgagugcaucacgcccaacggguccauccccaacgacaagccguuccagaacgugaaccgcaucaccuacggcgccugcccccgguacgugaagcagaacacccugaagcucgcgaccgggaugcgcaacguccccgagaagcagacgcggggcaucuucggggccaucgccggcuucaucgagaacggcugggaggggaugguggacggcugguacggguuccgccaccagaacagcgagggcaucgggcaggccgccgaccugaaguccacccaggcggccaucgaccagaucaacggcaagcugaaccggcucaucggcaagaccaacgagaaguuccaccagaucgagaaggaguucagcgagguggaggggcgcauccaggaccuggagaaguacgucgaggacaccaagaucgaccugugguccuacaacgccgagcuccugguggcccuggagaaccagcacacgaucgaccucaccgacagcgagaugaacaagcuguucgagcggacccgcaagcagcugcgcgagaacgccgaggacaugggcaacgggugcuucaagaucuaccacaagugcgacaacgcgugcaucggcuccauccggaacgggaccuacgaccacgacguguaccgcgacgaggcccucaacaaccgguuccagaucaagggcgucgagcugaaguccggcuacaaggacuggauccuguggaucuccuucgccaucagcugcuuccuccugugcguggcccugcucggguucaucaugugggccugccagaagggcaacauccgcugcaacaucugcaucuga

SEQ ID NO: 65294 - RNA, 1701 nt, Artificial Sequence; identical to SEQ ID NO: 65237
  derived and/or modified CDS sequence (opt1) from hemagglutinin__InfluenzaA__ABI30865

SEQ ID NO: 65295 - RNA, 1707 nt, Artificial Sequence
  derived and/or modified CDS sequence (opt1) from hemagglutinin__InfluenzaA__ABI36155
auggagaagaucgugcugcuccuggccaccgucagccuggugaaguccgaccagaucugcaucggcuaccacgccaacaacagcaccgagcaggucgacacgaucauggagaagaacgugaccgugacccacgcgcaggacauccucgagaagacccacaacgggaagcugugcgaccuggacggcgugaagccccucauccugcgcgacugcuccgucgccggguggcugcucggcaacccgaugugcgacgaguucaucaacgugcccgaguggagcuacaucguggagaaggccaaccccgccaacgggcugugcuaccccggcaacuucaacgacuacgaggagcugaagcaccuccugucccggaucaaccacuucgagaagcugcagaucauccccaagagcuccuggagcgaccacgaggccucccucggcgucagcuccgcgugcccguaccuggggcgcagcuccuucuuccggaacgugguguggcugaucaagaagaacaacacguaccccaccaucaagcgcagcuacaacaacaccaaccaggaggaccuccugguccuguggggcauccaccaccccaacgacgccgccgagcagacccggcucuaccagaacccgacgaccuacaucuccguggggaccagcacccugaaccagcgccuggugcccaagaucgccacgcgguccaaggucaacggccagagcgggcgcauggaguucuucuggaccauccucaagcccaacgacgcgaucaacuucgaguccaacggcaacuucaucgcccccgaguacgccuacaagaucgugaagaagggcgacagcgccaucaugaaguccgagcuggaguacggggacugcaacaccaagugccagaccccgaugggcgccaucaacagcagcaugccccugcacaacauccacccccucacgaucggggagugccccaaguacgugaaguccaaccggcugguccuggcgaccggccuccgcaacagcccgcagcgggagcgccggcgcaagaagcggggccuguucggggccaucgccggcuucaucgagggcggguggcaggggaugguggacggcugguacggcuaccaccacuccaacgagcaggggagcggcuacgccgccgacaaggaguccacccagaaggcgaucgacggggugaccaacaaggucaacagcaucaucgacaagaugaacacgcaguucgaggccgugggccgcgaguucaacaaccuggagcggcgcaucgagaaccucaacaagaagauggaggacggguuccuggacguguggaccuacaacgccgagcugcucguccugauggagaacgagcggacccuggacuuccacgacuccaacgugaagaaccucuacgacaagguccgccugcagcugcgggacaacgccaaggagcucggcaacggcugcuucgaguucuaccacaagugcgacaacgagugcauggagagcauccgcaacgggaccuacaacuacccccaguacuccgaggaggcccgccugaagcgggaggagaucagcggcgugaagcuggaguccaucgggaucuaccagauccucagcaucuacuccacgguggcgagcucccuggcccuggccaucaugauggccggccucagccuguggaugugcuccaacgggagccugcagugccgcgucugcaucuga

SEQ ID NO: 65296 - RNA, 1707 nt, Artificial Sequence
  derived and/or modified CDS sequence (opt1) from hemagglutinin__InfluenzaA__ABI36166
auggagaagaucgugcugcuccuggccaccgucagccuggugaaguccgaccagaucugcaucggcuaccacgccaacaacagcaccgagcaggucgacacgaucauggagaagaacgugaccgugacccacgcgcaggacauccucgagaagacccacaacgggaagcugugcgaccuggacggcgugaagccccucauccugcgcgacugcuccgucgccggguggcugcucggcaacccgaugugcgacgaguucaucaacgugcccgaguggagcuacaucguggagaaggccaaccccgccaacgggcugugcuaccccggcaacuucaacgacuacgaggagcugaagcaccuccugucccggaucaaccacuucgagaagcugcagaucauccccaagagcuccuggagcgaccacgaggccucccucggcgucagcuccgcgugcccguaccuggggcgcagcuccuucuuccggaacgugguguggcugaucaagaagaacaacacguaccccaccaucaagcgcagcuacaacaacaccaaccaggaggaccuccugguccuguggggcauccaccaccccaacgacgccgccgagcagacccggcucuaccagaacccgacgaccuacaucuccguggggaccagcacccugaaccagcgccuggugcccaagaucgccacgcgguccaaggucaacggccagagcgggcgcauggaguucuucuggaccauccucaagcccaacgacgcgaucaacuucgaguccaacggcaacuucaucgcccccgaguacgccuacaagaucgugaagaagggcgacagcgccaucaugaaguccgagcuggaguacggggacugcaacaccaagugccagaccccgaugggcgccaucaacagcagcaugcccuuccacaacauccacccccugacgaucggggagugccccaaguacgugaaguccaaccggcucguccuggcgaccggccugcgcaacagcccgcagcgggagcgccggcgcaagaagcggggccucuucggggccaucgccggcuucaucgagggcggguggcaggggaugguggacggcugguacggcuaccaccacuccaacgagcaggggagcggcuacgccgccgacaaggaguccacccagaaggcgaucgacggggugaccaacaaggucaacagcaucaucgacaagaugaacacgcaguucgaggccgugggccgcgaguucaacaaccuggagcggcgcaucgagaaccugaacaagaagauggaggacggguuccucgacguguggaccuacaacgccgagcugcugguccucauggagaacgagcggacccuggacuuccacgacuccaacgugaagaaccuguacgacaagguccgccuccagcugcgggacaacgccaaggagcugggcaacggcugcuucgaguucuaccacaagugcgacaacgagugcauggagagcauccgcaacgggaccuacaacuacccccaguacuccgaggaggcccgccucaagcgggaggagaucagcggcgugaagcuggaguccaucgggaucuaccagauccugagcaucuacuccacgguggcgagcucccucgcccuggccaucaugauggccggccugagccucuggaugugcuccaacgggagccugcagugccgcgucugcaucuga

SEQ ID NO: 65297 - RNA, 1707 nt, Artificial Sequence; identical to SEQ ID NO: 65296
  derived and/or modified CDS sequence (opt1) from hemagglutinin__InfluenzaA__ABI36177

SEQ ID NO: 65298 - RNA, 1707 nt, Artificial Sequence
  derived and/or modified CDS sequence (opt1) from hemagglutinin__InfluenzaA__ABI36406
auggagaagaucgugcugcuccuggccaccgucagccuggugaaguccgaccagaucugcaucggcuaccacgccaacaacagcaccgagcaggucgacacgaucauggagaagaacgugaccgugacccacgcgcaggacauccucgagaagacccacaacgggaagcugugcgaccuggacggcgugaagccccucauccugcgcgacugcuccgucgccggguggcugcucggcaacccgaugugcgacgaguucaucaacgugcccgaguggagcuacaucguggagaaggccaaccccgccaacgggcugugcuaccccggcaacuucaacgacuacgaggagcugaagcaccuccugucccggaucaaccacuucgagaagcugcagaucauccccaagagcuccuggagcgaccacgaggccucccucggcgucagcuccgcgugcccguaccuggggcgcagcuccuucuuccggaacgugguguggcugaucaagaagaacaacacguaccccaccaucaagcgcagcuacaacaacaccaaccaggaggaccuccugguccuguggggccuccaccaccccaacgacgccgccgagcagacccggcuguaccagaacccgacgaccuacaucuccguggggaccagcacccugaaccagcgccucgugcccaagaucgccacgcgguccaaggucaacggccagagcgggcgcauggaguucuucuggaccauccugaagcccaacgacgcgaucaacuucgaguccaacggcaacuucaucgcccccgaguacgccuacaagaucgugaagaagggcgacagcgccaucaugaaguccgagcuggaguacggggacugcaacaccaagugccagaccccgaugggcgccaucaacagcagcaugcccuuccacaacauccacccccucacgaucggggagugccccaaguacgugaaguccaaccggcugguccuggcgaccggccuccgcaacagcccgcagcgggagcgccggcgcaagaagcggggccuguucggggccaucgccggcuucaucgagggcggguggcaggggaugguggacggcugguacggcuaccaccacuccaacgagcaggggagcggcuacgccgccgacaaggaguccacccagaaggcgaucgacggggugaccaacaaggucaacagcaucaucgacaagaugaacacgcaguucgaggccgugggccgcgaguucaacaaccuggagcggcgcaucgagaaccucaacaagaagauggaggacggguuccuggacguguggaccuacaacgccgagcugcucguccugauggagaacgagcggacccuggacuuccacgacuccaacgugaagaaccucuacgacaagguccgccugcagcugcgggacaacgccaaggagcucggcaacggcugcuucgaguucuaccacaagugcgacaacgagugcauggagagcauccgcaacgggaccuacaacuacccccaguacuccgaggaggcccgccugaagcgggaggagaucagcggcgugaagcuggaguccaucgggaucuaccagauccucagcaucuacuccacgguggcgagcucccuggcccuggccaucaugauggccggccucagccuguggaugugcuccaacgggagccugcagugccgcgucugcaucuga

SEQ ID NO: 65299 - RNA, 1707 nt, Artificial Sequence
  derived and/or modified CDS sequence (opt1) from hemagglutinin__InfluenzaA__ABI36450
auggagaagaucgugcugcuccuggccaucgucagccuggugaaguccgaccagaucugcaucggcuaccacgccaacaacagcaccgagcaggucgacaccaucauggagaagaacgugacggugacccacgcgcaggacauccucgggaagacccacaacggcaagcugugcgaccuggacggggugaagccccucauccugcgcgacugcuccgucgccggcuggcugcucgggaacccgaugugcgacgaguucaucaacgugcccgaguggagcuacaucguggagaaggccaaccccaccaacgaccugugcuaccccggcuccuucaacgacuacgaggagcugaagcaccuccugagccggaucaaccacuucgagaagauccagaucaucccgaaguccagcugguccgaccacgaggccagcuccggcgucagcuccgccugccccuaccuggggagccccuccuucuuccgcaacgugguguggcucaucaagaagaacagcacguaccccaccaucaagaccuccuacaacaacaccaaccaggaggaccugcugguccucuggggcauccaccacagcaacgacgcggccgagcagacgcggcuguaccagaacccgaccaccuacaucuccaucgggaccagcacgcugaaccagcgccucgugcccaagaucgccacccggagcaaggugaacggccaguccgggcgcauggaguucuucuggaccauccugaagcccaacgacgccaucaacuucgagagcaacggcaacuucaucgcgcccgaguacgccuacaagaucgucaagaagggcgacuccgccaucaugaaguccgagcuggaguacgggaacugcaacaccaagugccagacgccgaugggcgccaucaacagcagcaugcccuuccacaacauccacccccucaccaucggggagugccccaaguacgugaaguccaaccggcuggugcuggccaccggccuccgcaacagcccgcagcgggagucccgccggaagaagcgcggccuguucggggcgaucgccggcuucaucgagggcggguggcaggggauggucgacggcugguacggcuaccaccacagcaacgagcagggguccggcuacgccgccgacaaggagagcacccagaaggccaucgacggggugacgaacaaggugaacuccaucaucgacaagaugaacacccaguucgaggcggucggccgggaguucaacaaccuggagcgccggaucgagaaccucaacaagaagauggaggacggguuccuggacguguggaccuacaacgccgagcugcucgugcugauggagaacgagcgcacccuggacuuccacgacagcaacgucaagaaccucuacgacaaggugcggcugcagcugcgcgacaacgccaaggagcucggcaacggcugcuucgaguucuaccacaagugcgacaacgagugcauggaguccauccggaacgggacguacaacuacccccaguacagcgaggaggcccgccugaagcgggaggagaucuccggcgucaagcuggagagcaucgggaccuaccagauccucuccaucuacagcaccguggccagcucccuggcgcuggccaucaugaucgccggccucagccuguggaugugcuccaacgggagccugcagugccgcaucugcaucuga

SEQ ID NO: 65300 - RNA, 1707 nt, Artificial Sequence
  derived and/or modified CDS sequence (opt1) from hemagglutinin__InfluenzaA__ABI49396
auggagaagaucgugcugcuccuggccaucgucagccuggugaaguccgaccagaucugcaucggcuaccacgccaacaacagcaccgagcaggucgacaccaucauggagaagaacgugacggugacccacgcgcaggacauccucgggaagacccacaacggcaagcugugcgaccuggacggggugaagccccucauccugcgcgacugcuccgucgccggcuggcugcucgggaacccgaugugcgacgaguucaucaacgugcccgaguggagcuacaucguggagaaggccaaccccaccaacgaccugugcuaccccggcuccuucaacgacuacgaggagcugaagcaccuccugagccggaucaaccacuucgagaagauccagaucaucccgaaguccagcugguccgaccacgaggccagcuccggcgucagcuccgccugccccuaccuggggagccccuccuucuuccgcaacgugguguggcucaucaagaagaacagcacguaccccaccaucaagaaguccuacaacaacaccaaccaggaggaccugcugguccucuggggcauccaccacccgaacgacgcggccgagcagacccggcuguaccagaaccccacgaccuacaucagcaucgggaccuccacccugaaccagcgccucgugcccaagaucgccacgcggagcaaggugaacggccagagcgggcgcauggaguucuucugggccauccugaagcccaacgacgcgaucaacuucgaguccaacggcaacuucaucgccccggaguacgccuacaagaucgucaagaagggcgacagcgccaucaugaaguccgagcuggaguacgggaacugcaacaccaagugccagacccccaugggcgccaucaacagcuccaugcccuuccacaacauccacccccucaccaucggggagugcccgaaguacgugaaguccaaccggcuggugcuggcgacgggccuccgcaacagcccccagcgggagagccgccggaagaagcgcggccuguucggggccaucgccggcuucaucgagggcggguggcaggggauggucgacggcugguacggcuaccaccacuccaacgagcaggggagcggcuacgccgccgacaaggaguccacccagaaggcgaucgacggggugaccaacaaggugaacagcaucaucgacaagaugaacacccaguucgaggccgucggccgggaguucaacaaccuggagcgccggaucgagaaccucaacaagaagauggaggacggguuccuggacguguggacguacaacgccgagcugcucgugcugauggagaacgagcgcacccuggacuuccacgacuccaacgucaagaaccucuacgacaaggugcggcugcagcugcgcgacaacgccaaggagcucggcaacggcugcuucgaguucuaccacaagugcgacaacgagugcauggagagcauccggaacgggaccuacaacuacccccaguacuccgaggaggcccgccugaagcgggaggagaucagcggcgucaagcuggaguccaucgggaccuaccagauccucagcaucuacuccacgguggcgagcagccuggcccuggccaucaugaucgccggccucucccuguggaugugcagcaacgggucccugcagugccgcaucugcaucuga

SEQ ID NO: 65301 - RNA, 1704 nt, Artificial Sequence
  derived and/or modified CDS sequence (opt1) from hemagglutinin__InfluenzaA__ABI85000
augaacacccagauccuggccuucaucgccugcaugcucaucggcaccaagggggacaagaucugccugggccaccacgcgguggccaacgggacgaaggucaacacccugaccgagcgcggcaucgagguggugaacgccaccgagacggucgagaccgugaacaucaagaagaucugcacccaggggaagcggcccaccgaccucggccagugcggccugcuggggacgcucaucggcccgccccagugcgaccaguuccuggaguucgacgccaaccugaucaucgagcgccgggaggggaccgacgugugcuaccccggcaaguucaccaacgaggagagccuccgccagauccugcggggguccggcggcaucgacaaggagagcaugggguucaccuacuccggcauccgcacgaacggggccaccagcgcgugccggcgcuccggcagcuccuucuacgccgagaugaaguggcugcucagcaacuccgacaacgccgccuucccccagaugaccaagagcuaccggaacccgcgcaacaagcccgcgcugaucaucuggggcguccaccacuccgggagcgccaccgagcagacgaagcuguacggcuccgggaacaagcucaucaccgugggcagcuccaaguaccagcagagcuucacccccucccccggggcccggccccaggugaacggccagagcggccgcaucgacuuccacuggcugcugcucgacccgaacgacaccgucacguucaccuucaacggggccuucaucgcccccgaccgggcguccuucuuccgcggcgagagccugggggugcagagcgacgugccccuggacuccggcugcgagggggacugcuuccacagcggcggcaccaucgucuccagccucccguuccagaacaucaacccccggaccguggggaagugcccccgcuacgugaagcagacgucccugcugcucgccaccggcaugcggaacguccccgagaacccgaagcaggccuaccagaagcgcaugacccgggggcuguucggcgccaucgccggguucaucgagaacggcugggagggccugaucgacgggugguacggcuuccgccaccagaacgcgcagggggagggcaccgccgccgacuacaagagcacgcaguccgccaucgaccagaucaccggcaagcucaaccggcugaucgacaagaccaaccagcaguucgagcugaucgacaacgaguucagcgagaucgagcagcagaucgggaacgugaucaacuggacccgcgacuccaugacggagguguggagcuacaacgccgagcuccuggucgcgauggagaaccagcacaccaucgaccuggccgacuccgagaugaacaagcucuacgagcgcgugcggaagcagcugcgcgagaacgccgaggaggacggcaccgggugcuucgagaucuuccacaagugcgacgaccagugcauggagagcauccggaacaacaccuacgaccacacgcaguaccgcaccgagucccugcagaaccggauccagaucgaccccgugaagcucagcuccggcuacaaggacaucauccugugguucagcuucggggccuccugcuuccugcuccuggccaucgcgaugggccuggucuucaucugcaucaagaacggcaacaugcgcugcaccaucugcaucuga

SEQ ID NO: 65302 - RNA, 1701 nt, Artificial Sequence; identical to SEQ ID NO: 64854
  derived and/or modified CDS sequence (opt1) from hemagglutinin__InfluenzaA__ABI92291

SEQ ID NO: 65303 - RNA, 1701 nt, Artificial Sequence
  derived and/or modified CDS sequence (opt1) from hemagglutinin__InfluenzaA__ABI92302
augaaggccaagcugcucgugcugcugugcgcccucagcgcgaccgacgccgacaccaucugcaucggcuaccacgccaacaacuccacggacaccgucgacaccgugcuggagaagaacgugaccgucacgcacagcgugaaccugcucgaggacucccacaacgggaagcugugccgccugaagggcaucgcgccccuccagcuggggaagugcagcaucgccggcuggauccuggggaacccggagugcgagucccucuucagcaagaaguccuggagcuacaucgccgagacccccaacuccgagaacgggaccugcuaccccggcuacuucgccgacuacgaggagcugcgggagcagcugagcuccgugagcuccuucgagcgcuucgagaucuuccccaaggagagcuccuggccgaagcacaacgucacccgcggggugacggccagcugcucccacaagggcaagagcuccuucuaccggaaccuccuguggcugaccgagaagaacgggagcuaccccaaccucagcaaguccuacgugaacaacaaggagaaggagguccuggugcuguggggcgugcaccaccccagcaacaucgaggaccagaagaccaucuaccggaaggagaacgccuacgucuccguggugagcucccacuacaaccgccgguucacccccgagaucgcgaagcgcccgaagguccgggaccaggaggggcgcaucaacuacuacuggacgcuccuggagcccggcgacaccaucaucuucgaggccaacggcaaccugaucgcccccugguacgccuucgcccucagccggggguucggcuccgggaucaucaccagcaacgcguccauggacgagugcgacgccaagugccagacgccccagggcgccaucaacagcucccugccguuccagaacgugcaccccgugaccaucggcgagugccccaaguacguccgcagcaccaagcugcggauggugaccgggcuccgcaacauccccuccauccagagccggggccuguucggggccaucgccggcuucaucgagggcggcuggaccggcaugaucgacgggugguacggcuaccaccaccagaacgagcagggguccggcuacgcggccgaccagaaguccacgcagaacgccaucaacgggaucaccaacaaggugaacagcgucaucgagaagaugaacauccaguucaccgccgugggcaaggaguucaacaagcuggagaagcgcauggagaaccucaacaagaagguggacgacggcuuccuggacaucuggaccuacaacgccgagcugcucguccugcuggagaacgagcggacgcucgacuuccacgacagcaacgugaagaaccuguacgagaaggucaagucccagcugaagaacaacgcgaaggagaucgggaacggcugcuucgaguucuaccacaagugcaacaacgagugcauggagagcgugaagaacgggaccuacgacuacccgaaguacagcgaggaguccaagcucaaccgcgagaagaucgacggcgugaagcuggagagcaugggggucuaccagauccuggccaucuacuccaccguggccagcucccucgugcugcuggucagccucggcgccaucuccuucuggaugugcagcaacggcucccugcagugccggaucugcaucuga

SEQ ID NO: 65304 - RNA, 1701 nt, Artificial Sequence
  derived and/or modified CDS sequence (opt1) from hemagglutinin__InfluenzaA__ABI92313
augaaggccaagcugcucgugcugcugugcgccuucaccgcgaccuacgccgacacgaucugcaucggcuaccacgccaacaacagcaccgacaccgucgacaccgugcucgagaagaacgugacggucacccacuccgugaaccugcuggaggacagccacaacgggaagcucugccgccugaagggcaccgcgccccugcagcucgggaacugcuccguggccggcuggauccuggggaacccggagugcgagagccuguucuccaaggagagcugguccuacaucgccgagacccccaaccccgagaacggcacgugcuaccccggcuacuucgccgacuacgaggagcuccgggagcagcugagcuccaucagcuccuucgagcgcuucgagaucuucccgaaggagagcuccuggcccaaccacaccgucaccaagggggugaccgccagcugcucccacaacggcaagagcuccuucuacaagaaccugcucuggcugacggagaagaacgggcuguaccccaaccucagcaaguccuacgugaacaacaaggagaaggagguccuggugcuguggggcgugcaccaccccagcaacaucggggaccagcgggccaucuaccacaccgagaacgcguacgucagcgugguguccagccacuacucccgccgguucaccccggagaucaccaagcgccccaagguccgggaccaggagggccgcaucaacuacuacuggacgcuccuggagcccggcgacaccaucaucuucgaggccaacgggaaccugaucgcccccugguacgccuucgcccucagccggggcuucggguccggcaucaucaccagcaacgcguccaugggcgagugcgacgccaagugccagaccccgcagggggccaucaacagcucccugcccuuccagaacgugcaccccgugacgaucggcgagugccccaaguacguccgcagcaccaagcugcggauggugaccgggcuccgcaacaucccguccauccagagccggggccuguucggggccaucgccggcuucaucgagggcggguggaccggcaugaucgacgggugguacggcuaccaccaccagaacgagcagggguccggcuacgcggccgaccagaaguccacgcagaacgccaucgacggcaucaccaacaaggugaacagcgucaucgagaagaugaacacccaguucaccgccguggggaaggaguucaacaagcuggagcgccggauggagaaccucaacaagaagguggacgacggcuuccuggacaucuggacguacaacgccgagcugcucguccugcuggagaacgagcgcacccucgacuuccacgacagcaacgugaagaaccuguacgagaaggucaagaaccagcugaagaacaacgcgaaggagaucgggaacggcugcuucgaguucuaccacaagugcaacaacgagugcauggaguccgugaagaacgggaccuacgacuaccccaaguacagcgaggaguccaagcucaaccgggagaagaucgacggcgugaagcuggagagcaugggcgucuaccacauccuggccaucuacagcaccguggccuccagccucgugcugcuggucucccucggggccaucagcuucuggaugugcuccaacggcagccugcagugccgcaucugcaucuga

SEQ ID NO: 65305 - RNA, 1701 nt, Artificial Sequence
  derived and/or modified CDS sequence (opt1) from hemagglutinin__InfluenzaA__ABI92324
augaagaccaucaucgcccugagcuacauccucugccugguguucgcccagaagcugcccggcaacgacaacuccaccgcgacgcucugccuggggcaccacgccgucccgaacggcacccuggugaagaccaucaccaacgaccagaucgaggugacgaacgccaccgagcucguccagagcuccagcaccgggcgcaucugcgacagcccccaccggauccuggacggcaagaacugcacccugaucgacgcccuccugggggacccccacugcgacggcuuccagaacaaggagugggaccuguucguggagcgcuccaaggccuacuccaacugcuaccccuacgacgugccggacuacgcgagccuccggucccuggucgccagcuccggcacgcuggaguucaucaacgaggacuucaacuggaccgggguggcccaggacggcaagagcuacgccugcaagcgcggguccgugaacagcuucuucucccggcucaacuggcugcacaagcuggaguacaaguaccccgcgcucaacgucaccaugcccaacaacggcaaguucgacaagcuguacaucuggggcgugcaccaccccagcaccgacuccgaccagacgagccuguacgugcgcgccuccgggaaggucaccgugagcaccaagcggagccagcagaccgugaucccgaacaucggcuuccgccccuggguccgggggcucuccagccgcaucuccaucuacuggacgaucgugaagcccggcgacauccugcugaucaacagcaccgggaaccucaucgcgccccggggcuacuucaagauccgcaacggcaaguccagcaucaugcgguccgacgccccgaucgggaacugcagcuccgagugcaucacccccaacggcagcauccccaacgacaagcccuuccagaacgugaaccgcaucaccuacggggccugcccgcgguacgucaagcagaacacgcugaagcuggccaccggcaugcgcaacgugcccgagaagcagacccgggggaucuucggcgccaucgccggcuucaucgagaacgggugggagggcaugguggacgggugguacggcuuccgccaccagaacuccgaggggaccggccaggccgccgaccucaagagcacgcaggcggccaucgaccagaucaacggcaagcugaaccggcugaucgagaagaccaacgagaaguuccaccagaucgagaaggaguucuccgaggucgaggggcgcauccaggaccucgagaaguacguggaggacaccaagaucgaccuguggagcuacaacgccggccugcucguggcccuggagaaccagcacaccaucgaccugacggacuccgagaugaacaagcuguucgagcggacccgcaagcagcuccgcgagaacgccgaggacauggggaacggcugcuucaagaucuaccacaagugcgacaacgcgugcaucgggagcauccggaacggcaccuacgaccacgacgucuaccgcgacgaggcccugaacaaccgguuccagaucaagggcguggagcucaaguccggguacaaggacuggauccuguggaucagcuucgccaucuccugcuuccugcucugcgucgugcugcugggcuucaucaugugggccugccagaaggggaacauccgcugcaacaucugcaucuga

SEQ ID NO: 65306 - RNA, 1701 nt, Artificial Sequence
  derived and/or modified CDS sequence (opt1) from hemagglutinin__InfluenzaA__ABI92335
augaagaccaucaucgcccugagcuacauccucugccugguguucgcccagaagcugcccggcaacgacaacuccaccgcgacgcucugccuggggcaccacgccgucccgaacggcacccuggugaagaccaucaccaacgaccagaucgaggugacgaacgccaccgagcucguccagagcuccagcaccucccgcaucugcgacagcccccaccagauccuggacggggagaacugcacccugaucgacgcccuccugggcgacccccacugcgacggguuccagaacaaggagugggaccuguucguggagcgguccaaggccuacagcaacugcuaccccuacgacgugccggacuacgucucccuccgcagccugguggcguccagcggcacgcuggaguucaacaacgaguccuucaacuggaccggcguggcccagaacgggaccagcuccgccugcaagcggcgcagcgacaaguccuucuucagccggcucaacuggcugcaccagcugaaguacaaguaccccgcccucaacgucaccaugcccaacaacgagaaguucgacaagcuguacaucuggggcgugcaccaccccgggacggacuccgaccagaucagccuguacgcgcaggccagcggccgcgugaccgucuccaccaagcggagccagcagaccgugaucccgaacaucgggucccgccccugggugcggggcgucagcucccgcaucagcaucuacuggacgaucgugaagcccggcgacauccuccugaucaacuccaccgggaaccugaucgcgccccggggcuacuucaagauccgcagcgggaaguccagcaucaugcgguccgacgccccgaucggcaagugcaacagcgagugcaucacccccaacggcuccauccccaacgacaagcccuuccagaacgugaaccgcaucaccuacggggccugcccgcgguacgucaagcagaacacgcucaagcuggccaccggcaugcgcaacgugcccgagaagcagacccgggggaucuucggcgccaucgccggguucaucgagaacggcugggagggcaugauggacgggugguacggcuuccgccaccagaacagcgaggggaccggccaggccgccgaccugaaguccacgcaggcggccaucaaccagaucaacgggaagcucaaccggcugaucgagaagaccaacgagaaguuccaccagaucgagaaggaguucagcgagguggagggccgcauccaggaccuggagaaguacgucgaggacaccaagaucgaccucugguccuacaacgccgagcugcugguggcccucgagaaccagcacaccaucgaccugacggacagcgagaugaacaagcuguucgagcggaccaagaagcagcuccgcgagaacgccgaggacaugggcaacgggugcuucaagaucuaccacaagugcgacaacgcgugcaugggcuccauccgcaacgggaccuacgaccacgacguguaccgggacgaggcccugaacaaccgcuuccagaucaagggcgucgagcucaagagcggguacaaggacuggauccuguggaucagcuucgccaucuccugcuuccugcugugcaucgugcucaugggcuucaucaugugggccugccagaagggcaacauccggugcaacaucugcaucuga

SEQ ID NO: 65307 - RNA, 1701 nt, Artificial Sequence
  derived and/or modified CDS sequence (opt1) from hemagglutinin__InfluenzaA__ABI92346
augaagaccaucaucgcccugagcuacauccucugccugguguucgcccagaagcugcccggcaacgacaacuccaccgcgacgcucugccuggggcaccacgccgucccgaacggcacccuggugaagaccaucaccaacgaccagaucgaggugacgaacgccaccgagcucguccagagcuccagcaccgggcgcaucugcgacagcccccaccagauccuggacggcgagaacugcacccugaucgacgcccuccugggggacccccacugcgacggcuuccagaacaaggagugggaccuguucguggagcggagcaaggccuacuccaacugcuaccccuacgacgugccggacuacgucagccuccgcucccugguggcgagcuccggcacgcuggaguucaacaacgagagcuucaacuggaccgggguggcccagaacggcaccuccagcgccugcaagcggcgcuccgacaagagcuucuucucccggcucaacuggcugcaccagcugaaguacaaguaccccgcccucaacgucaccaugcccaacaacgagaaguucgacaagcuguacaucuggggcgugcaccaccccgggacggacagcgaccagaucucccuguacgcgcaggccagcgggcgcgugaccgucagcaccaagcggucccagcagaccgugaucccgaacaucggcagccgccccugggugcggggcgucuccagccgcaucuccaucuacuggacgaucgugaagcccggggacauccuccugaucaacagcaccggcaaccugaucgcgccccggggguacuucaagauccgcuccggcaagagcuccaucaugcggagcgacgccccgaucggcaagugcaacuccgagugcaucacccccaacgggagcauccccaacgacaagcccuuccagaacgugaaccgcaucaccuacggcgccugcccgcgguacgucaagcagaacacgcucaagcuggccaccgggaugcgcaacgugcccgagaagcagacccggggcaucuucggggccaucgccggcuucaucgagaacggcugggaggggaugauggacggcugguacggguuccgccaccagaacuccgagggcaccgggcaggccgccgaccugaaguccacgcaggcggccaucaaccagaucaacggcaagcucaaccggcugaucgagaagaccaacgagaaguuccaccagaucgagaaggaguucuccgagguggagggccgcauccaggaccuggagaaguacgucgaggacaccaagaucgaccucuggagcuacaacgccgagcugcugguggcccucgagaaccagcacaccaucgaccugacggacuccgagaugaacaagcuguucgagcggaccaagaagcagcuccgcgagaacgccgaggacauggggaacggcugcuucaagaucuaccacaagugcgacaacgcgugcaucgggagcauccgcaacggcaccuacgaccacgacguguaccgggacgaggcccugaacaaccgcuuccacaucaagggggucgagcugaaguccggcuacaaggacugggugcucuggaucagcuucgccaucagcugcuuccugcugugcaucguccuccugggcuucaucaugugggccugccagaaggggaacauccggugcaacaucugcaucuga

SEQ ID NO: 65308 - RNA, 1701 nt, Artificial Sequence; identical to SEQ ID NO: 64306
  derived and/or modified CDS sequence (opt1) from hemagglutinin__InfluenzaA__ABI92357

SEQ ID NO: 65309 - RNA, 1701 nt, Artificial Sequence; identical to SEQ ID NO: 64306
  derived and/or modified CDS sequence (opt1) from hemagglutinin__InfluenzaA__ABI92368

SEQ ID NO: 65310 - RNA, 1698 nt, Artificial Sequence; identical to SEQ ID NO: 65228
  derived and/or modified CDS sequence (opt1) from hemagglutinin__InfluenzaA__ABI92379

SEQ ID NO: 65311 - RNA, 1701 nt, Artificial Sequence
  derived and/or modified CDS sequence (opt1) from hemagglutinin__InfluenzaA__ABI92390
augaagaccaucaucgccuucagcuacauccugugccucguguucgcccagaagcugcccggcaacgacaacuccaccgcgacgcugugccucgggcaccacgccgucccgaacggcaccaucgugaagaccaucaccaacgaccagaucgaggugacgaacgccaccgagcugguccagagcuccagcaccgggggcaucugcgacagcccccaccagauccuggacggggagaacugcacccucaucgacgcccugcugggcgacccccagugcgacggcuuccagaacaagaagugggaccucuucguggagcgcuccaaggccuacuccaacugcuaccccuacgacgugccggacuacgcgagccugcggucccuggucgccagcuccgggacgcucgaguucaacaacgagagcuucaacuggaccggcgugacccagaacgggaccuccagcgccugcaagcgccgguccaacaacagcuucuucucccgccugaacuggcugacgcaccucaaguucaaguaccccgcccugaacgugaccaugcccaacaacgagaaguucgacaagcuguacaucuggggcguccaccaccccgggaccgacaacgaccagaccagccucuacgcgcaggccuccggccggaucacggugagcaccaagcgcagccagcagaccgugaccccgaacaucggcucccggccccgcguccgggacauccccagccgcaucuccaucuacuggacgaucgugaagcccggggacauccugcugaucaacagcaccggcaaccucaucgccccgcggggguacuucaagauccgcuccggcaagagcuccaucaugcggagcgacgcccccaucggcaagugcaacuccgagugcaucacccccaacgggagcauccccaacgacaagccguuccagaacgugaaccgcaucaccuacggcgccugcccccgguacgucaagcagaacacgcugaagcuggcgaccgggaugcgcaacgugcccgagaagcagacccggggcaucuucggggccaucgccggcuucaucgagaacggcugggaggggaugguggacggcugguacggguuccgccaccagaacuccgagggcaccgggcaggccgccgaccucaagagcacgcaggcggccaucaaccagaucaacggcaagcugaaccggcugaucggcaagaccaacgagaaguuccaccagaucgagaaggaguucuccgaggucgaggggcgcauccaggaccucgagaaguacguggaggacaccaagaucgaccuguggagcuacaacgccgagcugcucguggcccuggagaaccagcacaccaucgaccugacggacuccgagaugaacaagcuguucgagcggaccaagaagcagcuccgcgagaacgccgaggacaugggcaacgggugcuucaagaucuaccacaagugcgacaacgcgugcaucggcagcauccgcaacgggaccuacgaccacgacgucuaccgggacgaggcccugaacaaccgcuuccagaucaagggcguggagcucaaguccggcuacaaggacuggauccuguggaucagcuucgccaucuccugcuuccugcucugcguggcccugcugggguucaucaugugggccugccagaagggcaacauccggugcaacaucugcaucuga

SEQ ID NO: 65312 - RNA, 1701 nt, Artificial Sequence; identical to SEQ ID NO: 64306
  derived and/or modified CDS sequence (opt1) from hemagglutinin__InfluenzaA__ABI92401

SEQ ID NO: 65313 - RNA, 1701 nt, Artificial Sequence
  derived and/or modified CDS sequence (opt1) from hemagglutinin__InfluenzaA__ABI92412
augaagaccaucaucgcccugagcuacauccucugccugguguucgcccagaagcugcccggcaacgacaacuccaccgcgacgcucugccuggggcaccacgccgucccgaacggcacccuggugaagaccaucaccaacgaccagaucgaggugacgaacgccaccgagcucguccagagcuccagcaccgggggcaucugcgacagcccccaccagauccuggacggggagaacugcacccugaucgacgcccuccugggcgacccccagugcgacggcuuccagaacaagaagugggaccuguucguggagcgcagcaaggccuacuccaacugcuaccccuacgacgugccggacuacgcgagccuccggucccugaucgccagcuccgggacgcuggaguucaacaacgagagcuucaacuggaccggcgucacccagaacgggaccuccagcgccugcaagcgccgguccaacagcuccuucuucagccgccucaacuggcugacgcaccugaaguucaaguaccccgcccucaacgugaccaugcccaacaacgaggaguucgacaagcuguacaucuggggcgugcaccaccccgggaccuacaacgaccagaucucccuguacgcgcaggccagcggccggaucaccgucagcacgaagcgcucccagcagaccgugaucccgaacaucggcagccggccccgcgugcgggacauccccucccgcaucagcaucuacuggaccaucgucaagcccggggacauccuccugaucaacuccaccggcaaccugaucgccccgcggggguacuucaagauccgcagcggcaaguccagcaucaugcgguccgacgcccccaucggcaagugcaacagcgagugcaucacgcccaacggguccauccccaacgacaagccguuccagaacaucaaccgcaucaccuacggcgccugcccccgguacgugaagcagaacacccucaagcuggcgaccgggaugcgcaacgugcccgagaagcagacgcggggcaucuucggggccaucgccggcuucaucgagaacggcugggaggggauggucgacggcugguacggguuccgccaccagaacagcgagggcaucgggcaggccgccgaccugaaguccacccaggcggccaucgaccagaucaacggcaagcucaaccggcugaucggcaagaccaacgagaaguuccaccagaucgagaaggaguucagcgagguggaggggcgcauccaggaccuggagaaguacguggaggacaccaagaucgaccucugguccuacaacgccgagcugcuggucgcccucgagaaccagcacacgaucgaccugaccgacagcgagaugaacaagcuguucgagcggaccaagaagcagcuccgcgagaacgccgaggacaugggcaacgggugcuucaagaucuaccacaagugcgacaacgcgugcaucggcuccauccgcaacgggaccuacgaccacgacguguaccgggacgaggcccugaacaaccgcuuccagaucaagggcguggagcugaaguccggcuacaaggacuggauccucuggaucuccuucgccaucagcugcuuccugcugugcgucgcccuccugggguucaucaugugggccugccagaagggcaacauccggugcaacaucugcaucuga

SEQ ID NO: 65314 - RNA, 1701 nt, Artificial Sequence
  derived and/or modified CDS sequence (opt1) from hemagglutinin__InfluenzaA__ABI92423
augaagaccaucaucgcccugagcuacauccucugccugguguucgcccagaagcugcccggcaacgacaacuccaccgcgacgcucugccuggggcaccacgccgucccgaacggcaccaucgugaagaccaucaccaacgaccagaucgaggugacgaacgccaccgagcugguccagagcuccagcaccgggggcaucugcgacagcccccaccagauccucgacggggagaacugcacccugaucgacgcccugcucggcgacccccagugcgacggcuuccagaacaagaagugggaccuguucguggagcgcagcaaggccuacuccaacugcuaccccuacgacgugccggacuacgcgagccugcggucccucaucgccagcuccgggacgcuggaguucaacaacgagagcuucaacuggaccggcgucacccagaacgggaccuccagcgccugcaagcgccgguccaacagcuccuucuucagccgccugaacuggcucacgcaccugaaguucaaguaccccgcccugaacgugaccaugcccaacaacgaggaguucgacaagcucuacaucuggggcgugcaccaccccgggaccuacaacgaccagaucucccuguacgcgcaggccagcggccggaucaccgucagcacgaagcgcucccagcagaccgugaucccgaacaucggcagccggccccgcgugcgggacauccccucccgcaucagcaucuacuggaccaucgucaagcccggggacauccugcucaucaacuccaccggcaaccugaucgccccgcggggguacuucaagauccgcagcggcaaguccagcaucaugcgguccgacgcccccaucggcaagugcaacagcgagugcaucacgcccaacggguccauccccaacgacaagccguuccagaacgugaaccgcaucaccuacggcgccugcccccgguacgugaagcagaacacccugaagcucgcgaccgggaugcgcaacguccccgacaagcagacgcggggcaucuucggggccaucgccggcuucaucgagaacggcugggaggggaugguggacggcugguacggguuccgccaccagaacagcgagggcaucgggcaggccgccgaccugaaguccacccaggcggccaucgaccagaucaacggcaagcugaaccggcucaucggcaagaccaacgagaaguuccaccagaucgagaaggaguucagcgagguggaggggcgcauccaggaccuggagaaguacgucgaggacaccaagaucgaccugugguccuacaacgccgagcuccugguggcccuggagaaccagcacacgaucgaccucaccgacagcgagaugaacaagcuguucgagcggaccaagaagcagcugcgcgagaacgccgaggacaugggcaacgggugcuucaagaucuaccacaagugcgacaacgcgugcaucggcuccauccgcaacgggaccuacgaccacgacguguaccgggacgaggcccucaacaaccgcuuccagaucaagggcgucgagcugaaguccggcuacaaggacuggauccuguggaucuccuucgccaucagcugcuuccuccugugcguggcccugcucggguucaucaugugggccugccagaagggcaacauccggugcaacaucugcaucuga

SEQ ID NO: 65315 - RNA, 1701 nt, Artificial Sequence; identical to SEQ ID NO: 64657
  derived and/or modified CDS sequence (opt1) from hemagglutinin__InfluenzaA__ABI92434

SEQ ID NO: 65316 - RNA, 1701 nt, Artificial Sequence
  derived and/or modified CDS sequence (opt1) from hemagglutinin__InfluenzaA__ABI92445
augaagaccaucaucgcccugagcuacauccucugccugguguucacccagaagcugcccggcaacgacaacuccacggccacccucugccuggggcaccacgcggucccgaacggcaccaucgugaagaccaucacgaacgaccagaucgaggugaccaacgccaccgagcugguccagagcuccagcaccgggggcaucugcgacagcccccaccagauccucgacggggagaacugcacgcugaucgacgcccugcucggcgacccccagugcgacggcuuccagaacaagaagugggaccuguucguggagcgcagcaaggccuacuccaacugcuaccccuacgacgugccggacuacgccagccugcggucccucaucgcgagcuccgggacccuggaguucaacaacgagagcuucaacuggaccggcgucaaccagaacgggaccuccagcgccugcaagcgccgguccaacagcuccuucuucagccgccugaacuggcucacgcaccugaaguucaaguaccccgcccugaacgugaccaugcccaacaacgaggaguucgacaagcucuacaucuggggcgugcaccaccccgggaccuacaacgaccagaucucccuguacgcccaggcgagcggccggaucaccgucagcacgaagcgcucccagcagaccgugaucccgaacaucggcagccggccccgcgugcgggacauccccucccgcaucagcaucuacuggaccaucgucaagcccggggacauccugcucaucaacuccaccggcaaccugaucgccccgcggggguacuucaagauccgcagcggcaaguccagcaucaugcgguccgacgcccccaucggcaagugcaacagcgagugcaucacgcccaacggguccauccccaacgacaagccguuccagaacgugaaccgcaucaccuacggcgccugcccccgguacgugaagcagaacacccugaagcucgccaccgggaugcgcaacguccccgagaagcagacgcggggcaucuucggggcgaucgccggcuucaucgagaacggcugggaggggaugguggacggcugguacggguuccgccaccagaacagcgagggcaucgggcaggccgccgaccugaaguccacccaggccgcgaucgaccagaucaacggcaagcugaaccggcucaucggcaagaccaacgagaaguuccaccagaucgagaaggaguucagcgagguggaggggcgcauccaggaccuggagaaguacgucgaggacaccaagaucgaccugugguccuacaacgccgagcuccugguggcccuggagaaccagcacacgaucgaccucaccgacagcgagaugaacaagcuguucgagcggaccaagaagcagcugcgcgagaacgccgaggacaugggcaacgggugcuucaagaucuaccacaagugcgacaacacgugcaucggcuccauccgcaacgggaccuacgaccacgacguguaccgggacgaggcccucaacaaccgcuuccagaucaagggcgucgagcugaaguccggcuacaaggacuggauccuguggaucuccuucgcgaucagcugcuuccuccugugcguggcccugcucggguucaucaugugggccugccagaagggcaacauccggugcaacaucugcaucuga

SEQ ID NO: 65317 - RNA, 1701 nt, Artificial Sequence; identical to SEQ ID NO: 64657
  derived and/or modified CDS sequence (opt1) from hemagglutinin__InfluenzaA__ABI92456

SEQ ID NO: 65318 - RNA, 1701 nt, Artificial Sequence; identical to SEQ ID NO: 65265
  derived and/or modified CDS sequence (opt1) from hemagglutinin__InfluenzaA__ABI92467

SEQ ID NO: 65319 - RNA, 1701 nt, Artificial Sequence; identical to SEQ ID NO: 64674
  derived and/or modified CDS sequence (opt1) from hemagglutinin__InfluenzaA__ABI92478

SEQ ID NO: 65320 - RNA, 1701 nt, Artificial Sequence; identical to SEQ ID NO: 65265
  derived and/or modified CDS sequence (opt1) from hemagglutinin__InfluenzaA__ABI92489

SEQ ID NO: 65321 - RNA, 1701 nt, Artificial Sequence
  derived and/or modified CDS sequence (opt1) from hemagglutinin__InfluenzaA__ABI92500
augaagaccaucaucgcccugagcuacauccucugccugguguucgcccagaagcugcccggcaacgacaacuccaccgcgacgcucugccuggggcaccacgccgucccgaacggcacccuggugaagaccaucaccaacgaccagaucgaggugacgaacgccaccgagcucguccagagcuccagcaccgggggcaucugcgacagcccccaccagauccuggacggggagaacugcacccugaucgacgcccuccugggcgacccccacugcgacggcuuccagaacaaggagugggaccuguucguggagcgcagcaaggccuacuccaacugcuaccccuacgacgugccggacuacgcgagccuccggucccuggucgccagcuccgggacgcuggaguucaacaacgagagcuucaacuggaccggcguggcccagaacgggaccuccagcgccugcaagcgccgguccaacaagagcuucuucucccgccucaacuggcugcaccagcugaaguacaaguaccccgcgcucaacgugaccaugcccaacaacgagaaguucgacaagcuguacaucuggggcguccaccaccccagcacggacuccgaccagaucagccuguacgcccaggccccggggcgggugaccgugagcaccaagcgcucccagcagaccgucauccccaacaucggcagccggcccugggugcgcggcguguccagccggaucuccaucuacuggacgaucgucaagcccggggacauccuccugaucaacugcaccggcaaccugaucgccccgcgcggguacuucaagauccggagcggcaaguccagcaucaugcgcuccgacgccagcaucggcaagugcaacuccgagugcaucacccccaacgggagcauccccaacgacaagcccuuccagaacgugaaccggaucaccuacggcgcgugcccgcgcuacgugaagcagaacacgcucaagcuggccaccgggaugcggaacguccccgagaagcagacccgcggcaucuucggggccaucgccggcuucaucgagaacggcugggaggggaugguggacggcugguacggguuccggcaccagaacuccgagggcaccgggcaggccgcggaccugaaguccacgcaggccgugaucaaccagaucaacggcaagcucaaccgccugaucgagaagaccaacgagaaguuccaccagaucgagaaggaguucuccgaggucgagggccggauccaggaccuggagaaguacguggaggacaccaagaucgaccucuggagcuacaacgccgagcugcugguggcccucgagaaccagcacaccaucgaccugacggacuccgagaugaacaagcuguucgagcgcaccaagaagcagcuccgggagaacgccgaggacauggggaacggcugcuucaagaucuaccacaagugcgacaacgcgugcaucgggagcauccgcaacggcaccuacgaccacgacgucuaccgcgacgaggcccugaacaaccgguuccagaucaaggggguggagcugaaguccggcuacaaggacuggauccucuggaucagcuucgccaucagcugcuuccugcugugcgucgugcuccugggcuucaucaugugggccugccagaaggggaacauccgcugcaacaucugcaucuga

SEQ ID NO: 65322 - RNA, 1701 nt, Artificial Sequence
  derived and/or modified CDS sequence (opt1) from hemagglutinin__InfluenzaA__ABI92511
augaagaccaucaucgcccugagcuacauccucugccugguguucgcccagaagcugcccggcaacgacaacuccaccgcgacgcucugccuggggcaccacgccgucccgaacggcacccuggugaagaccaucaccaacgaccagaucgaggugacgaacgccaccgagcucguccagaacagcuccaccgggaucaucugcgacagcccccaccagauccuggacggcgagaacugcacccugaucgacgcccuccugggggacccccacugcgacggcuuccagaacaaggagugggaccuguucguggagcgcuccaaggccuacagcaacugcuaccccuacgacgugccggacuacgcgucccuccggagccuggucgccuccagcggcacgcuggaguucaacaacgaguccuucaacuggaccgggguggcccagaacggcaccagcuccgccugcaagcgccggagcgacaaguccuucuucagccgccucaacuggcugcaccagcugaaguacaaguaccccgcgcucaacgugaccaugcccaacacggagaaguucgacaagcuguacaucuggggcguccaccaccccuccaccgacagcgaccagaucucccuguacgcccaggccagcgggcgggugaccgugagcaccaagcgcucccagcagacggucaucccgaacaucgggagccggcccugggugcgcggcguguccagccgggucuccaucuacuggaccaucgugaagcccggcgacauccuccugaucaacagcaccgggaaccugaucgcgccccgcggcuacuucaagauccgguccggcaagagcuccaucaugcgcagcgacgccuccaucgggaagugcaacagcaagugcaucaccccgaacggcuccauccccaacgacaagcccuuccagaacgugaaccggaucacguacggggccugcccccgcuacgucaagcagaacacccucaagcuggccaccggcaugcggaacgugccggagaagcagacccgcgggaucuucggcgccaucgccggguucaucgagaacggcugggagggcaugguggacgggugguacggcuuccggcaccagaacagcgaggggacgggccaggccgcggaccugaaguccacccaggccgccaucaaccagaucaacgggaagcucaaccgccugaucgagaagaccaacgagaaguuccaccagaucgagaaggaguucagcgaggucgagggccggauccaggaccuggagaaguacguggaggacaccaagaucgaccucugguccuacaacgccgagcugcugguggcccucgagaaccagcacacgaucgaccugaccgacagcgagaugaacaagcuguucgagcgcaccaagaagcagcuccgggagaacgcggaggacaugggcaacgggugcuucaagaucuaccacaagugcgacaacacgugcaucggcuccauccgcaacgggaccuacgaccacgacgucuaccgcgacgaggcccugaacaaccgguuccagaucaagggcguggagcucaagagcggguacaaggacuggauccuguggaucagcuucgccaucuccugcuuccugcugugcgucgugcuccugggcuucaucaugugggccugccagaagggcaacauccgcugcaacaucugcaucuga

SEQ ID NO: 65323 - RNA, 1701 nt, Artificial Sequence
  derived and/or modified CDS sequence (opt1) from hemagglutinin__InfluenzaA__ABI92522
augaagaccaucaucgcccugagcuacauccucugccugguguucgcccagaagcugcccggcaacgacaacuccaccgcgacgcucugccuggggcaccacgccgucccgaacggcacccuggugaagaccaucaccaacgaccagaucgaggugacgaacgccaccgagcucguccagagcuccagcaccgggcgcaucugcgacagcccccaccagauccuggacggcgagaacugcacccugaucgacgcccuccugggggacccccacugcgacggcuuccagaacaaggagugggaccuguucguggagcggagcaaggccuacuccaacugcuaccccuacgacgugccggacuacgucagccuccgcucccugguggcgagcuccggcacgcuggaguucaacaacgagagcuucaacuggaccgggguggcccagaacggcaccuccagcgccugcaagcggcgcuccaacaagagcuucuucucccggcucaacuggcugcaccagcugaaguacaaguaccccgcccucaacgucaccaugcccaacaacgagaaguucgacaagcuguacaucuggggcgugcaccaccccgggacggacagcgaccagaucucccuguacgcgcaggccagcgggcgcgugaccgucagcaccaagcggucccagcagaccgugaucccgaacaucggcagccgccccugggugcggggcgucuccagccgcaucuccaucuacuggacgaucgugaagcccggggacauccuccugaucaacagcaccggcaaccugaucgcgccccggggguacuucaagauccgcuccggcaagagcuccaucaugaaguccgacgccccgaucggcaagugcaacuccgagugcaucacccccaacgggagcauccccaacgacaagcccuuccagaacgugaaccggaucaccuacggcgccugcccgcgcuacgucaagcagaacacgcucaagcuggccaccgggaugcggaacgugcccgagaagcagacccgcggcaucuucggggccaucgccggcuucaucgagaacggcugggaggggaugauggacggcugguacggguuccggcaccagaacuccgagggcaccgggcaggccgccgaccucaagagcacgcaggcggccaucaaccagaucaacggcaagcugaaccgccugaucgagaagaccaacgagaaguuccaccagaucgagaaggaguucuccgagguggagggccggauccaggaccuggagaaguacgucgaggacaccaagaucgaccucuggagcuacaacgccgagcugcugguggcccucgagaaccagcacaccaucgaccugacggacuccgagaugaacaagcuguucgagcgcaccaagaagcagcuccgggagaacgccgaggacauggggaacggcugcuucaagaucuaccacaagugcgacaacgcgugcaucgggagcauccgcaacggcaccuacgaccacgacguguaccgcgacgaggcccugaacaaccgguuccagaucaagggggucgagcugaaguccggcuacaaggacuggauccucuggaucagcuucgccaucagcugcuuccugcugugcaucgugcuccugggcuucaucaugugggccugccagaaggggaacauccgcugcaacaucugcaucuga

SEQ ID NO: 65324 - RNA, 1701 nt, Artificial Sequence
  derived and/or modified CDS sequence (opt1) from hemagglutinin__InfluenzaA__ABI92533
augaagaccaucaucgcccugagcuacauccucugccugguguucgcccagaagcugcccggcaacgacaacucccgcgcgacccucugccuggggcaccacgccgucccgaacggcacgcuggugaagaccaucaccaacgaccagaucgaggugaccaacgccacggagcucguccagagcuccagcaccgggcggaucugcgacagcccccaccagauccuggacggcgagaacugcacccugaucgacgcccuccugggggacccccacugcgacggcuuccagaacaaggagugggaccuguucguggagcgcagcaaggccuacuccaacugcuaccccuacgacgugccggacuacgucagccuccggucccugguggcgagcuccggcacccuggaguucaacaacgagagcuucaacuggacggggguggcccagaacggcaccuccagcgccugcaagcgccgguccgacaagagcuucuucucccgccucaacuggcugcaccagcugaaguacaaguaccccgcccucaacgucaccaugcccaacaacgagaaguucgacaagcuguacaucuggggcgugcaccaccccgggaccgacagcgaccagaucucccuguacgcgcaggccagcgggcgggugacggucagcaccaagcgcucccagcagaccgugaucccgaacaucggcagccggcccugggugcgcggcgucuccagccggaucuccaucuacuggaccaucgugaagcccggggacauccuccugaucaacagcacgggcaaccugaucgcgccccgcggguacuucaagauccgguccggcaagagcuccaucaugcgcagcgacgccccgaucggcaagugcaacuccgagugcaucacccccaacgggagcauccccaacgacaagcccuuccagaacgugaaccggaucaccuacggcccgugcccccgcuacgucaagcagaacacccucaagcuggccacggggaugcggaacgugcccgagaagcagacccgcggcaucuucggggccaucgccggcuucaucgagaacggcugggaggggaugauggacggcugguacggguuccggcaccagaacuccgagggcaccgggcaggccgccgaccugaaguccacccaggccgcgaucaaccagaucaacggcaagcucaaccgccugaucgagaagacgaacgagaaguuccaccagaucgagaaggaguucuccgagguggagggccggauccaggaccuggagaaguacgucgaggacaccaagaucgaccucuggagcuacaacgccgagcugcugguggcccucgagaaccagcacaccaucgaccugaccgacuccgagaugaacaagcuguucgagcgcacgaagaagcagcuccgcgagaacgccgaggacauggggaacggcugcuucaagaucuaccacaagugcgacaacgccugcaucgggagcauccggaacggcaccuacgaccacgacguguaccgcgacgaggcgcugaacaaccgguuccagaucaagggggucgagcugaaguccggcuacaaggacuggauccucuggaucagcuucgccaucagcugcuuccugcugugcaucgugcuccugggcuucaucaugugggccugccagaaggggaacauccgcugcaacaucugcaucuga

SEQ ID NO: 65325 - RNA, 1701 nt, Artificial Sequence; identical to SEQ ID NO: 65324
  derived and/or modified CDS sequence (opt1) from hemagglutinin__InfluenzaA__ABI92544

SEQ ID NO: 65326 - RNA, 1701 nt, Artificial Sequence
  derived and/or modified CDS sequence (opt1) from hemagglutinin__InfluenzaA__ABI92577
augaagaccaucaucgcccugagcuacauccucugccugguguucgcccagaagcugcccggcaacgacaacuccaccgcgacgcucugccuggggcaccacgccgucccgaacggcacccuggugaagaccaucaccaacgaccagaucgaggugacgaacgccaccgagcucguccagagcuccagcaccgggcgcaucugcgacagcccccaccagauccuggacggcgagaacugcacccugaucgacgcccuccugggggacccccacugcgacggcuuccagaacaaggagugggaccuguucguggagcggagccgcgccuacuccaacugcuaccccuacgacgugccggacuacgucagccuccggucccugguggcgagcuccggcacgcuggaguucaacaacgagagcuucaacuggaccgggguggcccagaacggcaccuccagcgccugcaagcgccgguccgacaagagcuucuucucccgccucaacuggcugcaccagcugaaguacaaguaccccgcccucaacgucaccaugcccaacaacgagaaguucgacaagcuguacaucuggggcgugcaccaccccgggacggacagcgaccagaucucccuguacgcgcaggccagcgggcgggugaccgucagcaccaagcgcucccagcagaccgugaucccgaacaucggcagccggcccugggugcgcggcgucuccagcaagaucuccaucuacuggacgaucgugaagcccggggacauccuccugaucaacagcaccggcaaccugaucgcgccccggggguacuucaagauccgcuccggcaagagcuccaucaugcggagcgacgccccgaucggcaagugcaacuccgagugcaucacccccaacgggagcauccccaacgacaagcccuuccagaacgugaaccgcaucaccuacggcccgugcccccgguacgucaagcagaacacgcucaagcuggccaccgggaugcgcaacgugcccgagaagcagacccggggcaucuucggggccaucgccggcuucaucgagaacggcugggaggggaugauggacggcugguacggguuccgccaccagaacuccgagggcaccgggcaggccgccgaccugaaguccacgcaggccgcgaucaaccagaucaacggcaagcucaaccggcugaucgagaagaccaacgagaaguuccaccagaucgagaaggaguucuccgagguggagggccgcauccaggaccuggagaaguacgucgaggacaccaagaucgaccucuggagcuacaacgccgagcugcugguggcccucgagaaccagcacaccaucgaccugacggacuccgagaugaacaagcuguucgagcggaccaagaagcagcuccgcgagaacgccgaggacauggggaacggcugcuucaagaucuaccacaagugcgacaacgccugcaucgggagcauccgcaacggcaccuacgaccacgacguguaccgggacgaggcgcugaacaaccgcuuccagaucaagggggucgagcugaaguccggcuacaaggacuggauccucuggaucagcuucgccaucagcugcuuccugcugugcaucgugcuccugggcuucaucaugugggccugccagaaggggaacauccggugcaacaucugcaucuga

SEQ ID NO: 65327 - RNA, 1701 nt, Artificial Sequence; identical to SEQ ID NO: 65063
  derived and/or modified CDS sequence (opt1) from hemagglutinin__InfluenzaA__ABI92588

SEQ ID NO: 65328 - RNA, 1701 nt, Artificial Sequence
  derived and/or modified CDS sequence (opt1) from hemagglutinin__InfluenzaA__ABI92599
augaagaccaucaucgcccugagcuacauccucugccugguguucgcccagaagcugcccggcaacgacaacuccaccgcgacgcucugccuggggcaccacgccgucccgaacggcacccuggugaagaccaucaccaacgaccagaucgaggugacgaacgccaccgagcucguccagagcuccagcaccgggcgcaucugcaacagcccccaccagauccuggacggcgagaacugcacccugaucgacgcccuccugggggacccccacugcgacggcuuccagaacaaggagugggaccuguucguggagcggagcaaggccuacuccaacugcuaccccuacgacgugccggacuacgucagccuccgcucccugguggcgagcuccggcacgcuggaguucaacaacgagagcuucaacuggaccgggguggcccagaacggcaccuccagcgccugcaagcggcgcuccgacaagagcuucuucucccggcucaacuggcugcaccagcugaaguacaaguaccccgcccucaacgucaccaugcccaacaacgagaaguucgacaagcuguacaucuggggcgugcaccaccccgggacggacagcgaccagaucucccuguacgcgcaggccagcgggcgcgugaccgucagcaccaagcggucccagcagaccgugaucccgaacaucggcagccgccccugggugcggggcgucuccagccgcaucuccaucuacuggacgaucgugaagcccggggacauccuccugaucaacagcaccggcaaccugaucgcgccccggggguacuucaagauccgcuccggcaagagcuccaucaugcggagcgacgccccgaucggcaagugcaacuccgagugcaucacccccaacgggagcauccccaacgacaagcccuuccagaacgugaaccgcaucaccuacggcgccugcccgcgguacgucaagcagaagacgcucaagcuggccaccgggaugcgcaacgugcccgagaagcagacccggggcaucuucggggccaucgccggcuucaucgagaacggcugggaggggaugauggacggcugguacggguuccgccaccagaacuccgagggcaccgggcaggccgccgaccugaaguccacgcaggcggccaucaaccagaucaacggcaagcucaaccggcugaucgagaagaccaacgagaaguuccaccagaucgagaaggaguucuccgagguggagggccgcauccaggaccuggagaaguacgucgaggacaccaagaucgaccucuggagcuacaacgccgagcugcugguggcccucgagaaccagcacaccaucgaccugacggacuccgagaugaacaagcuguucgagcggaccaagaagcagcuccgcgagaacgccgaggacauggggaacggcugcuucaagaucuaccacaagugcgacaacgcgugcaucgggagcauccgcaacggcaccuacgaccacgacguguaccgggacgaggcccugaacaaccgcuuccagaucaagggggucgagcugaaguccggcuacaaggacuggauccucuggaucagcuucgccaucagcugcuuccugcugugcaucgugcuccugggcuucaucaugugggccugccagaaggggaacauccggugcaacaucugcaucuga

SEQ ID NO: 65329 - RNA, 1701 nt, Artificial Sequence
  derived and/or modified CDS sequence (opt1) from hemagglutinin__InfluenzaA__ABI92610
augaagaccaucaucgcccugagcuacauccucugccugguguucgcccagaagcugcccggcaacgacaacuccaccgcgacgcucugccuggggcaccacgccgucccgaacggcacccuggugaagaccaucaccaacgaccagaucgaggugacgaacgccaccgagcucguccagagcuccagcaccgggcgcaucugcgacagcccccaccagauccuggacggcgagaacugcacccugaucgacgcccuccugggggacccccacugcgacggcuuccagaacaaggagugggaccuguucguggagcggagcaaggccuacuccaacugcuaccccuacgacgugccggacuacgucagccuccgcucccugguggcgagcuccggcacgcuggaguucaacaacgagagcuucaacuggaccgggguggcccagaacggcaccuccagcgccugcaagcggcgcuccgacaagagcuucuucucccggcucaacuggcugcaccagcugaaguacaaguaccccgcccucaacgucaccaugcccaacaacgagaaguucgacaagcuguacaucuggggcgugcaccaccccgggacggacagcgaccagaucucccuguacgcgcaggccagcgggcgcgugaccgucagcaccaagcggucccagcagaccgugaucccgaacaucggcagccgccccugggugcggggcgucuccagccgcaucuccaucuacuggacgaucgugaagcccggggacauccuccugaucaacagcaccggcaaccugaucgcgccccggggguacuucaagauccgcuccggcaagagcuccaucaugcggagcgacgccccgaucggcaagugcaacuccgagugcaucacccccaacgggagcauccccaacgacaagcccuuccagaacgugaaccgcaucaccuacggcgccugcccgcgguacgucaagcagaacacgcucaagcuggccaccgggaugcgcaacgugcccgagaagcagacccggggcaucuucggggccaucgccggcuucaucgagaacggcugggaggggaugauggacggcugguacggguuccgccaccagaacuccgagggcaccgggcaggccgccgaccugaaguccacgcaggcggccaucaaccagaucaacggcaagcucaaccggcugaucgagaagaccaacgagaaguuccaccagaucgagaaggaguucuccgagguggagggccgcauccaggaccuggagaaguacgucgaggacaccaagaucgaccucuggagcuacaacgccgagcugcugguggcccucgagaaccagcacaccaucgaccugacggacuccgagaugaacaagcuguucgagcggaccaagaagcagcuccgcgagaacgccgaggacauggggaacggcugcuucaagaucuaccacaagugcgacaacgcgugcaucgggagcauccgcaacggcaccuacgaccacgacguguaccgggacgaggcccugaacaaccgcuuccagaucaagggggucgagcugaaguccggcuacaaggacuggauccucuggaucagcuucgccaucagcugcuuccugcugugcaucgugcuccugggcuucaucaugugggccugccagaaggggaacauccggugcaacaucugcaucuga

SEQ ID NO: 65330 - RNA, 1701 nt, Artificial Sequence
  derived and/or modified CDS sequence (opt1) from hemagglutinin__InfluenzaA__ABI92621
augaagaccaucaucgcccugagcuacauccucugccugguguucgcccagaagcugcccggcaacgacaacuccauggcgacccucugccuggggcaccacgccgucccgaacggcacgcuggugaagaccaucaccaacgaccagaucgaggugaccaacgccacggagcucguccagagcuccagcaccgggcgcaucugcaacagcccccaccagauccuggacggcgagaacugcacccugaucgacgcccuccugggggacccccacugcgagggcuuccagaacaaggagugggaccuguucguggagcgguccaaggccuacuccaacugcuaccccuacgacgugccggacuacgucagccuccgcucccugguggcgagcuccggcacccuggaguucaacaacgagagcuucaacuggacggggguggcccagaacggcaccuccagcgccugcaagcggcgcuccgacaagagcuucuucucccggcucaacuggcugcaccagcugaaguacaaguaccccgcccucaacgucaccaugcccaacaacgagaaguucgacaagcuguacaucuggggcgugcaccaccccgggaccgacagcgaccagaucucccuguacgcgcaggccagcgggcgcgugacggucagcaccaagcggucccagcagaccgugaucccgaacaucggcagccgccccugggugcggggcgucuccagcaagaucuccaucuacuggaccaucgugaagcccggggacauccuccugaucaacagcacgggcaaccugaucgcgccccgcggguacuucaagauccgguccggcaagagcuccaucaugcgcagcgacgccccgaucgacaagugcaacuccgagugcaucacccccaacggcagcauccccaacgacaagcccuuccagaacgugaaccggaucaccuacgggcucugcccgcgcuacgucaagcagaacacccugaagcuggccacgggcaugcggaacgugcccgagaagcagacccgcgggaucuucggcgccaucgccggguucaucgagaacggcugggagggcaugauggacgggugguacggcuuccggcaccagaacuccgaggggaccggccaggccgccgaccucaagagcacccaggccgcgaucaaccagaucaacgggaagcugaaccgccugaucgagaagacgaacgagaaguuccaccagaucgagaaggaguucuccgagguggagggccggauccaggaccucgagaaguacgucgaggacaccaagaucgaccuguggagcuacaacgccgagcugcucguggcccuggagaaccagcacaccaucgaccugaccgacuccgagaugaacaagcuguucgagcgcacgaagaagcagcuccgggagaacgccgaggacaugggcaacgggugcuucaagaucuaccacaagugcgacaacgccugcaucggcagcauccgcaacgggaccuacgaccacgacguguaccgcgacgaggcgcugaacaaccgguuccagaucaagggcgucgagcucaaguccggguacaaggacuggauccuguggaucagcuucgccaucagcugcuuccugcucugcaucgugcugcugggcuucaucaugugggccugccagaagggcaacauccgcugcaacaucugcaucuga

SEQ ID NO: 65331 - RNA, 1701 nt, Artificial Sequence; identical to SEQ ID NO: 64586
  derived and/or modified CDS sequence (opt1) from hemagglutinin__InfluenzaA__ABI92632

SEQ ID NO: 65332 - RNA, 1701 nt, Artificial Sequence
  derived and/or modified CDS sequence (opt1) from hemagglutinin__InfluenzaA__ABI92643
augaagaccaucaucgcccugagcuacauccucugccugguguucgcccagaagcugcccggcaacgacaacuccaccgcgacgcucugccuggggcaccacgccgucccgaacggcaccaucgugaagaccaucaccaacgaccagaucgaggugacgaacgccaccgagcugguccagagcuccagcaccgggggcaucugcgacagcccccaccagauccucgacggggagaacugcacccugaucgacgcccugcucggcgacccccagugcgacggcuuccagaacaagaagugggaccuguucguggagcgcagcaaggccuacuccaacugcuaccccuacgacgugccggacuacgcgagccugcggucccucgucgccagcuccgggacgcuggaguucaacaacgagagcuucgacuggaccggcgugacccagaacgggaccuccagcgccugcaagcgccgguccaacaagagcuucuucucccgccugaacuggcucacgcaccugaaguacaaguaccccgcccugaacgugaccauccccaacaacgagaaguucgacaagcucuacaucuggggcguccaccaccccgggaccgacagcgaccagaucucccuguacgcgcaggccagcggccggaucaccgugagcacgaagcgcucccagcagaccgugaucccgaacaucggcagccggccccgcguccgggacguguccagccgcaucuccaucuacuggaccaucgugaagcccggggacauccugcucaucaacagcaccggcaaccugaucgcgccccggggguacuucaagauccgcuccggcaagagcuccaucaugcggagcgacgccccgaucggcaagugcaacuccgagugcaucacgcccaacgggagcauccccaacgacaagcccuuccagaacgucaaccgcaucaccuacggcgccugcccgcgguacgugaagcagaacacccugaagcucgccaccgggaugcgcaacgugcccgagaagcagacgcggggcaucuucggggccaucgccggcuucaucgagaacggcugggaggggauggucgacggcugguacggguuccgccaccagaacuccgagggcaccgggcaggccgccgaccugaaguccacccaggcggccaucaaccagaucaacggcaagcugaaccggcucaucggcaagaccaacgagaaguuccaccagaucgagaaggaguucuccgagguggaggggcgcauccaggaccuggagaaguacguggaggacacgaagaucgaccuguggagcuacaacgccgagcuccuggucgcccuggagaaccagcacaccaucgaccucaccgacuccgagaugaacaagcuguucgagcggaccaagcgccagcugcgcgagaacgccgaggacaugggcaacgggugcuucaagaucuaccacaagugcgacaacgcgugcaucggcagcauccggaacgggacguacgaccacgacguguaccgcgacgaggcccucaacaaccgguuccagaucaagggcguggagcugaaguccggcuacaaggacuggauccuguggaucagcuucgccaucagcugcuuccuccugugcgucgcccugcucggguucaucaugugggccugccagaagggcaacauccgcugcaacaucugcaucuga

SEQ ID NO: 65333 - RNA, 1701 nt, Artificial Sequence
  derived and/or modified CDS sequence (opt1) from hemagglutinin__InfluenzaA__ABI92665
augaagaccaucaucgcccugagcuacauccucugccugguguucgcccagaagcugcccggcaacgacaacuccaccgcgacgcucugccuggggcaccacgccgucccgaacggcaccaucgugaagaccaucaccaacgaccagaucgaggugacgaacgccaccgagcugguccagagcuccagcaccgggggcaucugcgacagcccccaccagauccucgacggggagaacugcacccugaucgacgcccugcucggcgacccccagugcgacggcuuccagaacaagaagugggaccuguucguggagcgcagcaaggccuacuccaacugcuaccccuacgacgugccggacuacgcgagccugcggucccucgucgccagcuccgggacgcuggaguucaacaacgagagcuucgacuggaccggcgugacccagaacgggaccuccagcgccugcaagcgcggcuccaacaagagcuucuucucccggcugaacuggcucacgcaccugaaguacaaguaccccgcccugaacgugaccaugcccaacaacgagaaguucgacaagcucuacaucuggggcguccaccaccccgggaccgacagcgaccagaucucccuguacgcgcaggccagcggccgcaucaccgugagcacgaagcggucccagcagaccgugaucccgaacaucgggagccgcccccggguccgcgacguguccagccggaucuccaucuacuggaccaucgugaagcccggcgacauccugcucaucaacagcaccgggaaccugaucgcgccccgcggcuacuucaagauccgguccggcaagagcuccaucaugcgcagcgacgccccgaucgggaagugcaacuccgagugcaucacgcccaacggcagcauccccaacgacaagcccuuccagaacgucaaccggaucaccuacggggccugcccgcgcuacgugaagcagaacacccugaagcucgccaccggcaugcggaacgugcccgagaagcagacgcgcgggaucuucggcgccaucgccggcuucaucgagaacgggugggagggcauggucgacgggugguacggcuuccggcaccagaacuccgaggggaccggccaggccgccgaccugaaguccacccaggcggccaucaaccagaucaacggcaagcugaaccgccucaucgggaagaccaacgagaaguuccaccagaucgagaaggaguucuccgagguggagggccggauccaggaccuggagaaguacguggaggacacgaagaucgaccuguggagcuacaacgccgagcuccuggucgcccuggagaaccagcacaccaucgaccucaccgacuccgagaugaacaagcuguucgagcgcaccaagcggcagcugcgcgagaacgccgaggacauggggaacggcugcuucaagaucuaccacaagugcgacaacgcgugcaucgggagcauccgcaacggcacguacgaccacgacguguaccggaacgaggcccucaacaaccgcuuccagaucaagggcguggagcugaaguccggguacaaggacuggauccuguggaucagcuucgccaucagcugcuuccuccugugcgucgcccugcucggcuucaucaugugggccugccagaaggggaacauccggugcaacaucugcaucuga

SEQ ID NO: 65334 - RNA, 1701 nt, Artificial Sequence
  derived and/or modified CDS sequence (opt1) from hemagglutinin__InfluenzaA__ABI92676
augaagaccaucaucgcccugagcuacauccucugccugguguucgcccagaagcugcccggcaacgacaacuccaccgcgacgcucugccuggggcaccacgccgucccgaacggcaccaucgugaagaccaucaccaacgaccagaucgaggugacgaacgccaccgagcugguccagagcuccagcaccgggggcaucugcgacagcccccaccagauccucgacggggagaacugcacccugaucgacgcccugcucggcgacccccagugcgacggcuuccagaacaagaagugggaccuguucguggagcgcagcaaggccuacuccaacugcuaccccuacgacgugccggaccacgcgagccugcggucccucgucgccagcuccgggacgcuggaguucaacaacgagagcuucgacuggaccggcgugacccagaacgggaccuccagcgccugcaagcgccgguccaacaagagcuucuucucccgccugaacuggcucacgcaccugaaguacaaguaccccgcccugaacgugaccaugcccaacaacgagaaguucgacaagcucuacaucuggggcguccaccaccccgggaccgacagcgaccagaucucccuguacgcgcaggccagcggccggaucaccgugagcacgaagcgcucccagcagaccgugaucccgaacaucggcagccggccccgcguccgggacguguccagccgcaucuccaucuacuggaccaucgugaagcccggggacauccugcucaucaacagcaccggcaaccugaucgcgccccggggguacuucaagauccgcaacggcaaguccagcaucaugcgguccgacgccccgaucggcaagugcaacagcgagugcaucacgcccaacggguccauccccaacgacaagcccuuccagaacgucaaccgcaucaccuacggcgccugcccgcgguacgugaagcagaacacccugaagcucgccaccgggaugcgcaacgugcccgagaagcagacgcggggcaucuucggggccaucgccggcuucaucgagaacggcugggaggggauggucgacggcugguacggguuccgccaccagaacagcgagggcaccgggcaggccgccgaccugaaguccacccaggcggccaucaaccagaucaacggcaagcugaaccggcucaucggcaagaccaacgagaaguuccaccagaucgagaaggaguucagcgagguggaggggcgcauccaggaccuggagaaguacguggaggacacgaagaucgaccugugguccuacaacgccgagcuccuggucgcccuggagaaccagcacaccaucgaccucaccgacagcgagaugaacaagcuguucgagcggaccaagaagcagcugcgcgagaacgccgaggacaugggcaacgggugcuucaagaucuaccacaagugcgacaacgcgugcaucggcuccauccgcaacgggacguacgaccacgacguguaccgggacgaggcccucaacaaccgcuuccagaucaagggcguggagcugaaguccggcuacaaggacuggauccuguggaucuccuucgccaucagcugcuuccuccugugcgucgcccugcucggguucaucaugugggccugccagaagggcaacauccggugcaacaucugcaucuga

SEQ ID NO: 65335 - RNA, 1701 nt, Artificial Sequence
  derived and/or modified CDS sequence (opt1) from hemagglutinin__InfluenzaA__ABI92687
augaagaccaucaucgcccugagcuacauccucugccugguguucgcccagaagcugcccggcaacgacaacuccaccgcgacgcucugccuggggcaccacgccgucccgaacggcaccaucgugaagaccaucaccaacgaccagaucgaggugacgaacgccaccgagcugguccagagcuccagcaccgggggcaucugcgacagcccccaccagauccucgacggggagaacugcacccugaucgacgcccugcucggcgacccccagugcgacggcuuccagaacaagaagugggaccuguucguggagcgcagcaaggccuacuccaacugcuaccccuacgacgugccggacuacgcgagccugcggucccucgucgccagcuccgggacgcuggaguucaacaacgagagcuucgacuggaccggcgugacccagaacgggaccuccagcgccugcaagcgcggcuccaacaagagcuucuucucccggcugaacuggcucacgcaccugaaguacaaguaccccgcccugaacgugaccaugcccaacaacgagaaguucgacaagcucuacaucuggggcguccaccaccccgggaccgacagcgaccagaucucccuguacgcgcaggccagcggccgcaucaccgugagcacgaagcggucccagcagaccgugaucccgaacaucgggagccgcccccggguccgcgacguguccagccggaucuccaucuacuggaccaucgugaagcccggcgacauccugcucaucaacagcaccgggaaccugaucgcgccccgcggcuacuucaagauccgguccggcaagagcuccaucaugcgcagcgacgccccgaucgggaagugcaacuccgagugcaucacgcccaacggcagcauccccaacgacaagcccuuccagaacgucaaccggaucaccuacggggccugcccgcgcuacgugaagcagaacacccugaagcucgccaccggcaugcggaacgugcccgagaagcagacgcgcgggaucuucggcgccaucgccggcuucaucgagaacgggugggagggcauggucgacgggugguacggcuuccggcaccagaacuccgaggggaccggccaggccgccgaccugaaguccacccaggcggccaucaaccagaucaacggcaagcugaaccgccucaucgggaagaccaacgagaaguuccaccagaucgagaaggaguucuccgagguggagggccggauccaggaccuggagaaguacguggaggacacgaagaucgaccuguggagcuacaacgccgagcuccuggucgcccuggagaaccagcacaccaucgaccucaccgacuccgagaugaacaagcuguucgagcgcaccaagcggcagcugcgcgagaacgccgaggacauggggaacggcugcuucaagaucuaccacaagugcgacaacgcgugcaucgggagcauccgcaacggcacguacgaccacgacguguaccgggacgaggcccucaacaaccgcuuccagaucaagggcguggagcugaaguccggguacaaggacuggauccuguggaucagcuucgccaucagcugcuuccuccugugcgucgcccugcucggcuucaucaugugggccugccagaaggggaacauccggugcaacaucugcaucuga

SEQ ID NO: 65336 - RNA, 1701 nt, Artificial Sequence; identical to SEQ ID NO: 65335
  derived and/or modified CDS sequence (opt1) from hemagglutinin__InfluenzaA__ABI92698

SEQ ID NO: 65337 - RNA, 1701 nt, Artificial Sequence; identical to SEQ ID NO: 64540
  derived and/or modified CDS sequence (opt1) from hemagglutinin__InfluenzaA__ABI92709

SEQ ID NO: 65338 - RNA, 1701 nt, Artificial Sequence
  derived and/or modified CDS sequence (opt1) from hemagglutinin__InfluenzaA__ABI92720
augaagaccaucaucgcccugagcuacauccucugccugguguucgcccagaagcugcccggcaacgacaacuccaccgcgacgcucugccuggggcaccacgccgucccgaacggcaccaucgugaagaccaucaccaacgaccagaucgaggugacgaacgccaccgagcugguccagagcuccagcaccgggggcaucugcgacagcccccaccagauccucgacggggagaacugcacccugaucgacgcccugcucggcgacccccagugcgacggcuuccagaacaagaagugggaccuguucguggagcgcagcaaggccuacuccaacugcuaccccuacgacgugccggaccacgcgagccugcggucccucgucgccagcuccgggacgcuggaguucaacaacgagagcuucgacuggaccggcgugacccagaacgggaccuccagcgccugcaagcgccgguccaacaagagcuucuucucccgccugaacuggcucacgcaccugaaguacaaguaccccgcccugaacgugaccaugcccaacaacgagaaguucgacaagcucuacaucuggggcguccaccaccccgggaccgagagcgaccagaucucccuguacgcgcaggccagcggccggaucaccgugagcacgaagcgcucccagcagaccgugaucccgaacaucggcagccggccccgcguccgggacguguccagccgcaucuccaucuacuggaccaucgugaagcccggggacauccugcucaucaacagcaccggcaaccugaucgcgccccggggguacuucaagauccgcuccggcaagagcuccaucaugcggagcgacgccccgaucggcaagugcaacuccgagugcaucacgcccaacgggagcauccccaacgacaagcccuuccagaacgucaaccgcaucaccuacggcgccugcccgcgguacgugaagcagaacacccugaagcucgccaccgggaugcgcaacgugcccgagaagcagacgcggggcaucuucggggccaucgccggcuucaucgagaacggcugggaggggauggucgacggcugguacggguuccgccaccagaacuccgagggcaccgggcaggccgccgaccugaaguccacccaggcggccaucaaccagaucaacggcaagcugaaccggcucaucggcaagaccaacgagaaguuccaccagaucgagaaggaguucuccgagguggaggggcgcauccaggaccuggagaaguacguggaggacacgaagaucgaccuguggagcuacaacgccgagcuccuggucgcccuggagaaccagcacaccaucgaccucaccgacuccgagaugaacaagcuguucgagcggaccaagaagcagcugcgcgagaacgccgaggacaugggcaacgggugcuucaagaucuaccacaagugcgacaacgcgugcaucggcagcauccgcaacgggacguacgaccacgacguguaccgggacgaggcccucaacaaccgcuuccagaucaagggcguggagcugaaguccggcuacaaggacuggauccuguggaucagcuucgccaucagcugcuuccuccugugcgucgcccugcucggguucaucaugugggccugccagaagggcaacauccggugcaacaucugcaucuga

SEQ ID NO: 65339 - RNA, 1701 nt, Artificial Sequence
  derived and/or modified CDS sequence (opt1) from hemagglutinin__InfluenzaA__ABI92731
augaagaccaucaucgcccugagcuacauccucugccugguguucgcccagaagcugcccggcaacgacaacuccaccgcgacgcucugccuggggcaccacgccgucccgaacggcaccaucgugaagaccaucaccaacgaccagaucgaggugacgaacgccaccgagcugguccagagcuccagcaccgggggcaucugcgacagcccccaccagauccucgacggggagaacugcacccugaucgacgcccugcucggcgacccccagugcgacggcuuccagaacaagaagugggaccuguucguggagcgcagcaaggccuacuccaacugcuaccccuacgacgugccggacuacgcgagccugcggucccucgucgccagcuccgggacgcuggaguucaacaacgagagcuucgacuggaccggcgugacccagaacgggaccuccagcgccugcaagcgccgguccaacaagagcuucuucucccgccugaacuggcucacgcaccugaaguacaaguaccccgcccugaacgugaccaugcccaacaacgagaaguucgacaagcucuacaucuggggcguccaccaccccgggaccgacagcgaccagaucucccuguacgcgcaggccagcggccggaucaccgugagcacgaagcgcucccagcagaccgugaucccgaacaucggcagccggccccgcguccgggacguguccagccgcaucuccaucuacuggaccaucgugaagcccggggacauccugcucaucaacagcaccggcaaccugaucgcgccccggggguacuucaagauccgcuccggcaagagcuccaucaugcggagcgacgccccgaucggcaagugcaacuccgagugcaucacgcccaacgggagcauccccaacgacaagcccuuccagaacgucaaccgcaucaccuacggcgccugcccgcgguacgugaagcagaacacccugaagcucgccaccgggaugcgcaacgugcccgagaagcagacgcggggcaucuucggggccaucgccggcuucaucgagaacggcugggaggggauggucgacggcugguacggguuccgccaccagaacuccgagggcaccgggcaggccgccgaccugaaguccacccaggcggccaucaaccagaucaacggcaagcugaaccggcucaucggcaagaccaacgagaaguuccaccagaucgagaaggaguucuccgagguggaggggcgcauccaggaccuggagaaguacguggaggacacgaagaucgaccuguggagcuacaacgccgagcuccuggucgcccuggagaaccagcacaccaucgaccucaccgacuccgagaugaacaagcuguucgagcggaccaagcgccagcugcgcgagaacgccgaggacaugggcaacgggugcuucaagaucuaccacaagugcgacaacgcgugcaucggcagcauccggaacgggacguacgaccacgacguguaccgcgacgaggcccucaacaaccgguuccagaucaagggcguggagcugaaguccggcuacaaggacuggauccuguggaucagcuucgccaucagcugcuuccuccugugcgucgcccugcucggguucaucaugugggccugccagaagggcaacauccgcugcaacaucugcaucuga

SEQ ID NO: 65340 - RNA, 1701 nt, Artificial Sequence
  derived and/or modified CDS sequence (opt1) from hemagglutinin__InfluenzaA__ABI92742
augaagaccaucaucgcccugagcuacauccucugccugguguucucccagaagcugcccggcaacgacaacagcaccgccacgcucugccuggggcaccacgcggucccgaacggcaccaucgugaagaccaucaccaacgaccagaucgaggugacgaacgccaccgagcugguccaguccagcuccaccgggggcaucugcgacagcccccaccagauccucgacggggagaacugcacccugaucgacgcccugcucggcgacccccagugcgacggcuuccagaacaagaagugggaccuguucguggagcgcuccaaggccuacagcaacugcuaccccuacgacgugccggaccacgccucccugcggagccucgucgcguccagcgggacgcuggaguucaacaacgaguccuucgacuggaccggcgugacccagaacgggaccagcuccgccugcaagcgccggagcaacaaguccuucuucagccgccugaacuggcucacgcaccugaaguacaaguaccccgcccugaacgugaccaugcccaacaacgagaaguucgacaagcucuacaucuggggcguccaccaccccgggaccgacuccgaccagaucagccuguacgcccaggcgagcggccggaucaccguguccacgaagcgcagccagcagaccgugaucccgaacaucggcucccggccccgcguccgggacgugagcucccgcaucagcaucuacuggaccaucgugaagcccggggacauccugcucaucaacuccaccggcaaccugaucgcgccccggggguacuucaagauccgcagcggcaaguccagcaucaugcgguccgacgccccgaucggcaagugcaacagcgagugcaucacgcccaacggguccauccccaacgacaagcccuuccagaacgucaaccgcaucaccuacggcgccugcccgcgguacgugaagcagaacacccugaagcucgccaccgggaugcgcaacgugcccgagaagcagacgcggggcaucuucggggccaucgccggcuucaucgagaacggcugggaggggauggucgacggcugguacggguuccgccaccagaacagcgagggcaccgggcaggccgccgaccugaaguccacccaggccgcgaucaaccagaucaacggcaagcugaaccggcucaucggcaagaccaacgagaaguuccaccagaucgagaaggaguucagcgagguggaggggcgcauccaggaccuggagaaguacguggaggacacgaagaucgaccugugguccuacaacgccgagcuccuggucgcccuggagaaccagcacaccaucgaccucaccgacagcgagaugaacaagcuguucgagcggaccaagaagcagcugcgcgagaacgccgaggacaugggcaacgggugcuucaagaucuaccacaagugcgacaacgccugcaucggcuccauccgcaacgggacguacgaccacgacguguaccgggacgaggcgcucaacaaccgcuuccagaucaagggcguggagcucaagagcggcuacaaggacuggauccuguggaucagcuucgccaucuccugcuuccugcugugcgucgcccugcucggguucaucaugugggccugccagaagggcaacauccggugcaacaucugcaucuga

SEQ ID NO: 65341 - RNA, 1701 nt, Artificial Sequence
  derived and/or modified CDS sequence (opt1) from hemagglutinin__InfluenzaA__ABI92753
augaagaccaucaucgcccugagcuacauccucugccugguguucgcccagaagcugcccggcaacgacaacuccaccgcgacgcucugccuggggcaccacgccgucccgaacggcaccaucgugaagaccaucaccaacgaccagaucgaggugacgaacgccaccgagcugguccagagcuccagcaccgggggcaucugcgacagcccccaccagauccucgacggggagaacugcacccugaucgacgcccugcucggcgacccccagugcgacggcuuccagaacaagaagugggaccuguucguggagcgcagcaaggccuacuccaacugcuaccccuacgacgugccggacuacgcguaccugcggagccucgucgccuccagcgggacgcuggaguucaacaacgaguccuucgacuggaccggcgugacccagaacgggaccagcuccgccugcaagcgccggagcaacaaguccuucuucagccgccugaacuggcucacgcaccugaaguacaaguaccccgcccugaacgugaccaugcccaacaacgagaaguucgacaagcucuacaucuggggcguccaccaccccgggaccgacuccgaccagaucagccuguacgcgcaggccuccggccggaucaccgugagcacgaagcgcagccagcagaccgugaucccgaacaucggcucccggccccgcguccgggacgugagcucccgcaucagcaucuacuggaccaucgugaagcccggggacauccugcucaucaacuccaccggcaaccugaucgcgccccggggguacuucaagauccgcagcggcaaguccagcaucaugcgguccgacgccccgaucggcaagugcaacagcgagugcaucacgcccaacggguccauccccaacgacaagcccuuccagaacgucaaccgcaucaccuacggcgccugcccgcgguacgugaagcagaacacccugaagcucgccaccgggaugcgcaacgugcccgagaagcagacgcggggcaucuucggggccaucgccggcuucaucgagaacggcugggaggggauggucgacggcugguacggguuccgccaccagaacagcgagggcaccgggcaggccgccgaccugaaguccacccaggcggccaucaaccagaucaacggcaagcugaaccggcucaucggcaagaccaacgagaaguuccaccagaucgagaaggaguucagcgagguggaggggcgcauccaggaccuggagaaguacguggaggacacgaagaucgaccugugguccuacaacgccgagcuccuggucgcccuggagaaccagcacaccaucgaccucaccgacagcgagaugaacaagcuguucgagcggaccaagcgccagcugcgcgagaacgccgaggacaugggcaacgggugcuucaagaucuaccacaagugcgacaacgcgugcaucggcuccauccggaacgggacguacgaccacgacguguaccgcgacgaggcccucaacaaccgguuccagaucaagggcguggagcugaaguccggcuacaaggacuggauccuguggaucuccuucgccaucagcugcuuccuccugugcgucgcccugcucggguucaucaugugggccugccagaagggcaacauccgcugcaacaucugcaucuga

SEQ ID NO: 65342 - RNA, 1701 nt, Artificial Sequence
  derived and/or modified CDS sequence (opt1) from hemagglutinin__InfluenzaA__ABI92764
augaagaccaucaucgcccugagcuacauccucugccugguguucgcccagaagcugcccggcaacgacaacuccaccgcgacgcucugccuggggcaccacgccgucccgaacggcaccaucgugaagaccaucaccaacgaccagaucgaggugacgaacgccaccgagcugguccagagcuccagcaccggggagaucugcgacagcccccaccagauccucgacggcgagaacugcacccugaucgacgcccugcucggggacccccagugcgacggcuuccagaacaagaagugggaccuguucguggagcgcagcaaggccuacuccaacugcuaccccuacgacgugccggacuacgcgagccugcggucccucgucgccagcuccggcacgcuggaguucaacaacgagagcuucgacuggaccggggugacccagaacggcaccuccagcgccugcaagcgcggguccaacaagagcuucuucucccggcugaacuggcucacgcaccugaaguacaaguaccccgcccugaacgugaccaugcccaacaacgagaaguucgacaagcucuacaucuggggcguccaccaccccgggaccgacagcgaccagaucucccuguacgcgcaggccagcggccgcaucaccgugagcacgaagcggucccagcagaccgugaucccgaacaucggcagccgcccccggguccgcgacguguccagccggaucuccaucuacuggaccaucgugaagcccggggacauccugcucaucaacagcaccggcaaccugaucgcgccccgcggguacuucaagauccgguccggcaagagcuccaucaugcgcagcgacgccccgaucggcaagugcaacuccgagugcaucacgcccaacgggagcauccccaacgacaagcccuuccagaacgucaaccggaucaccuacggcgccugcccgcgcuacgugaagcagaacacccugaagcucgccaccgggaugcggaacgugcccgagaagcagacgcgcggcaucuucggggccaucgccggcuucaucgagaacggcugggaggggauggucgacggcugguacggguuccggcaccagaacuccgagggcaccgggcaggccgccgaccugaaguccacccaggcggccaucaaccagaucaacggcaagcugaaccgccucaucggcaagaccaacgagaaguuccaccagaucgagaaggaguucuccgagguggaggggcggauccaggaccuggagaaguacguggaggacacgaagaucgaccuguggagcuacaacgccgagcuccuggucgcccuggagaaccagcacaccaucgaccucaccgacuccgagaugaacaagcuguucgagcgcaccaagcggcagcugcgcgagaacgccgaggacaugggcaacgggugcuucaagaucuaccacaagugcgacaacgcgugcaucggcagcauccgcaacgggacguacgaccacgacguguaccgggacgaggcccucaacaaccgcuuccagaucaagggcguggagcugaaguccggcuacaaggacuggauccuguggaucagcuucgccaucagcugcuuccuccugugcgucgcccugcucggguucaucaugugggccugccagaagggcaacauccggugcaacaucugcaucuga

SEQ ID NO: 65343 - RNA, 1701 nt, Artificial Sequence; identical to SEQ ID NO: 65335
  derived and/or modified CDS sequence (opt1) from hemagglutinin__InfluenzaA__ABI92775

SEQ ID NO: 65344 - RNA, 1701 nt, Artificial Sequence; identical to SEQ ID NO: 64267
  derived and/or modified CDS sequence (opt1) from hemagglutinin__InfluenzaA__ABI92786

SEQ ID NO: 65345 - RNA, 1701 nt, Artificial Sequence
  derived and/or modified CDS sequence (opt1) from hemagglutinin__InfluenzaA__ABI92797
augaagaccaucaucgcccugagcuacauccucugccugguguucgcccagaagcugcccggcaacgacaacuccaccgcgacgcucugccuggggcaccacgccgucccgaacggcaccaucgugaagaccaucaccaacgaccagaucgaggugacgaacgccaccgagcugguccagagcuccagcaccgggggcaucugcgacagcccccaccagauccucgacggggagaacugcacccugaucgacgcccugcucggcgacccccagugcgacggcuuccagaacaagaagugggaccuguucguggagcgcagcaaggccuacuccaacugcuaccccuacgacgugccggacuacgcgagccugcggucccucgucgccagcuccgggacgcuggaguucaacaacgagagcuucaacuggaccggcgugacccagaacgggaccuccagcgccugcaagcgccgguccaacaacagcuucuucucccgccugaacuggcucacgcaccugaaguucaaguaccccgcccugaacgugaccaugcccaacaacgagaaguucgacaagcucuacaucuggggcguccaccaccccgggaccgacaacgaccagaucagccuguacgcgcaggccuccggccggaucaccgugagcacgaagcgcagccagcagaccgugaucuccaacaucggcagccggccgcgcguccgggacauccccucccgcaucagcaucuacuggaccaucgugaagcccggggacauccugcucaucaacuccaccggcaaccugaucgcgccccggggguacuucaagauccgcagcggcaaguccagcaucaugcgguccgacgccccgaucggcaagugcaacagcgagugcaucacgcccaacggguccauccccaacgacaagcccuuccagaacgugaaccgcaucaccuacggcgccugcccgcgguacgucaagcagaacacccugaagcucgccaccgggaugcgcaacgugcccgagaagcagacgcggggcaucuucggggccaucgccggcuucaucgagaacggcugggaggggaugguggacggcugguacggguuccgccaccagaacagcgagggcaucgggcaggccgccgaccugaaguccacccaggcggccaucaaccagaucaacggcaagcugaaccggcucaucggcaagaccaacgagaaguuccaccagaucgagaaggaguucagcgaggucgaggggcgcauccaggaccuggagaaguacguggaggacaccaagaucgaccugugguccuacaacgccgagcuccugguggcccuggagaaccagcacacgaucgaccucaccgacagcgagaugaacaagcuguucgagcggaccaagaagcagcugcgcgagaacgccgaggacaugggcaacgggugcuucaagaucuaccacaagugcgacaacgcgugcaucggcuccauccgcaacgggaccuacgaccacgacgucuaccgggacgaggcccucaacaaccgcuuccagaucaagggcguggagcugaaguccggcuacaaggacuggauccuguggaucuccuucgccaucagcugcuuccuccugugcguggcccugcucggguucaucaugugggccugccagaagggcaacauccggugcaacaucugcaucuga

SEQ ID NO: 65346 - RNA, 1701 nt, Artificial Sequence; identical to SEQ ID NO: 64267
  derived and/or modified CDS sequence (opt1) from hemagglutinin__InfluenzaA__ABI92808

SEQ ID NO: 65347 - RNA, 1701 nt, Artificial Sequence; identical to SEQ ID NO: 64267
  derived and/or modified CDS sequence (opt1) from hemagglutinin__InfluenzaA__ABI92819

SEQ ID NO: 65348 - RNA, 1701 nt, Artificial Sequence; identical to SEQ ID NO: 64267
  derived and/or modified CDS sequence (opt1) from hemagglutinin__InfluenzaA__ABI92841

SEQ ID NO: 65349 - RNA, 1701 nt, Artificial Sequence
  derived and/or modified CDS sequence (opt1) from hemagglutinin__InfluenzaA__ABI92852
augaagaccaucaucgcccugagcuacauccucugccugguguucgcccagaagcugcccggcaacgacaacuccaccgcgacgcucugccuggggcaccacgccgucccgaacggcaccaucgugaagaccaucaccaacgaccagaucgaggugacgaacgccaccgagcugguccagagcuccagcaccgggggcaucugcgacagcccccaccagauccucgacggggagaacugcacccugaucgacgcccugcucggcgacccccagugcgacggcuuccagaacaagaagugggaccuguucguggagcgcagcaaggccuacuccaacugcuaccccuacgacgugccggacuacgcgagccugcggucccucgucgccagcuccgggacgcuggaguucaacaacgagagcuucaacuggaccggcgugacccagaacgggaccuccagcgccugcaagcgccgguccaacaacagcuucuucucccgccugaacuggcucacgcaccugaaguucaaguaccccgcccugaacgugaccaugcccaacaacgagaaguucgacaagcucuacaucuggggcguccaccaccccgggaccgacaacgaccagaucagccuguacgcgcaggccuccggccggaucaccgugagcacgaagcgcagccagcagaccgugaucccgaacaucggcuaccggccccgcguccgggacauccccucccgcaucagcaucuacuggaccaucgugaagcccggggacauccugcucaucaacuccaccggcaaccugaucgccccgcggggguacuucaagauccgcagcggcaaguccagcaucaugcgguccgacgcccccaucggcaagugcaacagcgagugcaucacgcccaacggguccauccccaacgacaagccguuccagaacgugaaccgcaucaccuacggcgccugcccccgguacgucaagcagaacacccugaagcucgcgaccgggaugcgcaacgugcccgagaagcagacgcggggcaucuucggggccaucgccggcuucaucgagaacggcugggaggggaugguggacggcugguacggguuccgccaccagaacagcgagggcaucgggcaggccgccgaccugaaguccacccaggcggccaucaaccagaucaacggcaagcugaaccggcucaucggcaagaccaacgagaaguuccaccagaucgagaaggaguucagcgaggucgaggggcgcauccaggaccuggagaaguacguggaggacaccaagaucgaccugugguccuacaacgccgagcuccugguggcccuggagaaccagcacacgaucgaccucaccgacagcgagaugaacaagcuguucgagcggaccaagaagcagcugcgcgagaacgccgaggacaugggcaacgggugcuucaagaucuaccacaagugcgacaacgcgugcaucggcuccauccgcaacgggaccuacgaccacgacgucuaccgggacgaggcccucaacaaccgcuuccagaucaagggcguggagcugaaguccggcuacaaggacuggauccuguggaucuccuucgccaucagcugcuuccuccugugcguggcccugcucggguucaucaugugggccugccagaagggcaacauccggugcaacaucugcaucuga

SEQ ID NO: 65350 - RNA, 1701 nt, Artificial Sequence
  derived and/or modified CDS sequence (opt1) from hemagglutinin__InfluenzaA__ABI92863
augaagaccaucaucgcccugagcuacauccucugccugguguucgcccagaagcugcccggcaacgacaacuccaccgcgacgcucugccuggggcaccacgccgucccgaacggcaccaucgugaagaccaucaccaacgaccagaucgaggugacgaacgccaccgagcugguccagagcuccagcaccgggggcaucugcgacagcccccaccagauccucgacggggagaacugcacccugaucgacgcccugcucggcgacccccagugcgacggcuuccagaacaagaagugggaccuguucguggagcgcagcaaggcccacuccaacugcuaccccuacgacgugccggacuacgcgagccugcggucccucaucgccagcuccgggacgcuggaguucaacaacgagagcuucaacuggaccggcgucacccagaacgggaccuccagcgccugcaagcgccgguccaaccagagcuucuucucccgccugaacuggcucacgcaccugaaguucaaguaccccgcccugaacgugaccaugcccaacaacgagaaguucgacaagcucuacaucuggggcgugcaccaccccgggaccgacagcgaccagaucucccuguacgcgcaggccccgggccggaucaccgucagcacgaagcgcagccagcagaccgugauccccaacaucggcucccggccccgcgugcgggacaucagcucccgcaucagcaucuacuggaccaucgucaagcccggggacauccugcucaucaacuccaccggcaaccugaucgccccgcggggguacuucaagauccgcagcggcaaguccagcaucaugaaguccgacgcccccaucggccggugcaacagcgagugcaucacgcccaacggguccauccccaacgacaagccguuccagaacgugaaccgcaucaccuacggcgccugcccccgguacgugaagcagaacacccugaagcucgcgaccgggaugcgcaacguccccgagaagcagacgcggggcaucuucggggccaucgccggcuucaucgagaacggcugggaggggaugguggacggcugguacggguuccgccaccagaacagcgagggcaccgggcaggccgccgaccugaaguccacccaggcggccaucaaccagaucaacggcaagcugaaccggcucaucggcaagaccaacgagaaguuccaccagaucgagaaggaguucagcgagguggaggggcgcauccaggaccuggagaaguacgucgaggacacgaagaucgaccugugguccuacaacgccgagcuccugguggcccuggagaaccagcacaccaucgaccucaccgacagcgagaugaacaagcuguucgagcggaccaagaagcagcugcgcgagaacgccgaggacaugggcaacgggugcuucaagaucuaccacaagugcgacaacgcgugcaucggcuccauccgcaacgggacguacgaccacgacguguaccgggacgaggcccucaacaaccgcuuccagaucaagggcgucgagcugaaguccggcuacaaggacuggauccuguggaucuccuucgccaucagcugccuccugcugugcguggcccuccugggguucaucaugugggccugccagaagggcaacauccggugcaacaucugcaucuga

SEQ ID NO: 65351 - RNA, 1701 nt, Artificial Sequence; identical to SEQ ID NO: 64267
  derived and/or modified CDS sequence (opt1) from hemagglutinin__InfluenzaA__ABI92874

SEQ ID NO: 65352 - RNA, 1701 nt, Artificial Sequence; identical to SEQ ID NO: 64267
  derived and/or modified CDS sequence (opt1) from hemagglutinin__InfluenzaA__ABI92885

SEQ ID NO: 65353 - RNA, 1701 nt, Artificial Sequence
  derived and/or modified CDS sequence (opt1) from hemagglutinin__InfluenzaA__ABI92907
augaagaccaucaucgcccugagcuacauccucugccugguguucgcccagaagcugcccggcaacgacaacuccaccgcgacgcucugccuggggcaccacgccgucccgaacggcaccaucgugaagaccaucaccaacgaccagaucgaggugacgaacgccaccgagcugguccagagcuccagcaccgggggcaucugcgacucccccuaccagauccucgacggggagaacugcacccugaucgacgcccugcucggcgacccccagugcgacggcuuccagaacaagaagugggaccuguucguggagcgcagcaaggccuacuccaacugcuaccccuacgacgugccggacuacgucagccugcggucccucguggcgagcuccgggacgcuggaguucaacaacgagagcuucaacuggaccggcgugacccagaacgggaccuccagcgccugcaagcgccgguccaacaacagcuucuucucccgccugaacuggcucacgcaccugaaguucaaguaccccgcccugaacgucaccaugcccaacaacgagaaguucgacaagcucuacaucuggggcgugcaccaccccgggaccgacaacgaccagaucagccuguacgcccaggcguccggccggaucaccgugagcacgaagcgcagccagcagaccgucaucccgaacaucggcucccggccccgcgugcgggacauccccagccgcaucuccaucuacuggaccaucgugaagcccggggacauccugcucaucaacagcaccggcaaccugaucgccccgcggggguacuucaagauccgcuccggcaagagcuccaucaugcggagcgacgcccccaucggcaagugcaacuccgagugcaucacgcccaacgggagcauccccaacgacaagccguuccagaacgucaaccgcaucaccuacggcgccugcccccgguacgugaagcagaacacccugaagcucgccaccgggaugcgcaacgugcccgagaagcagacgcggggcaucuucggggcgaucgccggcuucaucgagaacggcugggaggggauggucgacggcugguacggguuccgccaccagaacuccgagggcaucgggcaggccgccgaccucaagagcacccaggccgcgaucaaccagaucaacggcaagcugaaccggcugaucggcaagaccaacgagaaguuccaccagaucgagaaggaguucuccgagguggaggggcgcauccaggaccuggagaaguacguggaggacaccaagaucgaccuguggagcuacaacgccgagcuccuggucgcccuggagaaccagcacacgaucgaccucaccgacuccgagaugaacaagcuguucgagcggaccaagaagcagcugcgcgagaacgccgaggacaugggcaacgggugcuucaagaucuaccacaagugcgacaacgccugcaucggcagcauccgcaacgggaccuacgaccacgacguguaccgggacgaggcgcucaacaaccgcuuccagaucaagggcguggagcugaaguccggcuacaaggacuggauccuguggaucagcuucgccaucuccugcuuccuccugugcgucgcccugcucggguucaucaugugggccugccagaagggcaacauccggugcaacaucugcaucuga

SEQ ID NO: 65354 - RNA, 1701 nt, Artificial Sequence; identical to SEQ ID NO: 64267
  derived and/or modified CDS sequence (opt1) from hemagglutinin__InfluenzaA__ABI92918

SEQ ID NO: 65355 - RNA, 1701 nt, Artificial Sequence; identical to SEQ ID NO: 65353
  derived and/or modified CDS sequence (opt1) from hemagglutinin__InfluenzaA__ABI92929

SEQ ID NO: 65356 - RNA, 1701 nt, Artificial Sequence
  derived and/or modified CDS sequence (opt1) from hemagglutinin__InfluenzaA__ABI92940
augaagaccaucaucgccuucaacuacauccugugccucguguucgcccagaagcugcccggcaacgacaacagcaccgcgacgcugugccucgggcaccacgccgucccgaacggcaccaucgugaagaccaucaccaacgaccagaucgaggugacgaacgccaccgagcugguccaguccagcuccaccgggggcaucugcgacagcccccaccagauccuggacggggagaacugcacccucaucgacgcccugcugggcgacccccagugcgacggcuuccagaacaagaagugggaccucuucguggagcgcuccaaggccuacagcaacugcuaccccuacgacgugccggacuacgcgucccugcggagccuggucgccuccagcgggacgcucgaguucaacaacgagaucuucaacuggaccggcgugacccagaacgggaccuccagcgccugcaagcgccgguccaacaacagcuucuucucccgccugaacuggcugacgcaccucaaguucaaguaccccgcccugaacgugaccaugcccaacaacgagaaguucgacaagcuguacaucuggggcguccaccaccccgggaccgacaacgaccagaucagccucuacgcgcaggccuccggccggaucaccgugagcacgaagcgcucccagcagaccgugaucccgaacaucggcagccggccccgcguccgggacauccccagccgcaucuccaucuacuggaccaucgugaagcccggggacauccugcugaucaacagcaccggcaaccucaucgccccgcggggguacuucaagauccgcuccggcaagagcuccaucaugcggagcgacgcccccaucggcaagugcaacuccgagugcaucacgcccaacgggagcauccccaacgacaagccguuccagaacgugaaccgcaucaccuacggcgccugcccccgguacgucaagcagaacacccugaagcuggcgaccgggaugcgcaacgugcccgagaagcagacgcggggcaucuucggggccaucgccggcuucaucgagaacggcugggaggggaugguggacggcugguacggguuccgccaccagaacuccgagggcaccgggcaggccgccgaccucaagagcacccaggcggccaucaaccagaucaacggcaagcugaaccggcugaucggcaagaccaacgagaaguuccaccagaucgagaaggaguucuccgaggucgaggggcgcauccaggaccucgagaaguacguggaggacacgaagaucgaccuguggagcuacaacgccgagcugcucguggcccuggagaaccagcacaccaucgaccugaccgacuccgagaugaacaagcuguucgagcggaccaagaagcagcuccgcgagaacgccgaggacaugggcaacgggugcuucaagaucuaccacaagugcgacaacgcgugcaucggcagcauccgcaacgggacguacgaccacgacgucuaccgggacgaggcccugaacaaccgcuuccagaucaagggcguggagcucaaguccggcuacaaggacuggauccuguggaucagcuucgccaucuccugcuuccugcucugcguggcccugcugggguucaucaugugggccugccagaagggcaacauccggugcaacaucugcaucuga

SEQ ID NO: 65357 - RNA, 1701 nt, Artificial Sequence
  derived and/or modified CDS sequence (opt1) from hemagglutinin__InfluenzaA__ABI92951
augaagaccaucaucgcccugagcuacauccucugccugguguucgcccagaagcugcccggcaacgacaacuccaccgcgacgcucugccuggggcaccacgccgucccgaacggcaccaucgugaagaccaucaccaacgaccagaucgaggugacgaacgccaccgagcugguccagagcuccagcaccgggggcaucugcgacagcccccaccagauccucgacggggagaacugcacccugaucgacgcccugcucggcgacccccagugcgacggcuuccagaacaagaagugggaccuguucguggagcgcuccaaggccuacuccaacugcuaccccuacgacgugccggacuacgcgagccugcggucccucaucgccagcuccgggacgcuggaguucaacaacgagagcuucaacuggaccggcgucacccagaacgggaccuccagcgccugcaagcgccgguccaacagcuccuucuucagccgccugaacuggcucacgcaccugaaguucaaguaccccgcccugaacgugaccaugcccaacaacgaggaguucgacaagcucuacaucuggggcgugcaccaccccgggaccuacaacgaccagaucucccuguacgcgcaggccagcggccggaucaccgucagcacgaagcgcucccagcagaccgugaucccgaacaucggcagccggccccgcgugcgggacauccccucccgcaucagcaucuacuggaccaucgucaagcccggggacauccugcucaucaacuccaccggcaaccugaucgccccgcggggguacuucaagauccgcagcggcaaguccagcaucaugcgguccgacgcccccaucggcaagugcaacagcgagugcaucacgcccaacggguccauccccaacgacaagccguuccagaacgugaaccgcaucaccuacggcgccugcccccgguacgugaagcagaacacccugaagcucgcgaccgggaugcgcaacguccccgagaagcagacgcggggcaucuucggggccaucgccggcuucaucgagaacggcugggaggggaugguggacggcugguacggguuccgccaccagaacagcgagggcaucgggcaggccgccgaccugaaguccacccaggcggccaucgaccagaucaacggcaagcugaaccggcucaucggcaagaccaacgagaaguuccaccagaucgagaaggaguucagcgagguggaggggcgcauccaggaccuggagaaguacgucgaggacaccaagaucgaccugugguccuacaacgccgagcuccugguggcccuggagaaccagcacacgaucgaccucaccgacagcgagaugaacaagcuguucgagcggaccaagaagcagcugcgcgagaacgccgaggacaugggcaacgggugcuucaagaucuaccacaagugcgacaacuccugcaucggcagcauccgcaacgggaccuacgaccacgacguguaccgggacgaggcgcucaacaaccgcuuccagaucaagggcgucgagcugaaguccggcuacaaggacuggauccuguggaucagcuucgccaucagcugcuuccuccugugcguggcccugcucggguucaucaugugggccugccagaagggcaacauccggugcaacaucugcaucuga

SEQ ID NO: 65358 - RNA, 1701 nt, Artificial Sequence
  derived and/or modified CDS sequence (opt1) from hemagglutinin__InfluenzaA__ABI92962
augaagaccaucaucgcccugagcuacauccucugccugguguucgcccagaagcugcccggcaacgacaacuccaccgcgacgcucugccuggggcaccacgccgucccgaacggcaccaucgugaagaccaucaccaacgaccagaucgaggugacgaacgccaccgagcugguccagagcuccagcaccgggggcaucugcgacagcccccaccagauccucgacggggagaacugcacccugaucgacgcccugcucggcgacccccagugcgacggcuuccagaacaagaagugggaccuguucguggagcgcaacaaggccuacagcaacugcuaccccuacgacgugccggacuacgcgucccugcggagccucaucgccuccagcgggacgcuggaguucaacaacgaguccuucaacuggaccggcgucacccagaacgggaccagcuccgccugcaagcgccggagcaacuccagcuucuucucccgccugaacuggcucacgcaccugaaguucaaguaccccgcccugaacgugaccaugcccaacaacgaggaguucgacaagcucuacaucuggggcgugcaccaccccgggaccuacaacgaccagaucagccuguacgcgcaggccuccggccggaucaccgucagcacgaagcgcagccagcagaccgugaucccgaacaucggcucccggccccgcgugcgggacauccccagccgcaucuccaucuacuggaccaucgucaagcccggggacauccugcucaucaacagcaccggcaaccugaucgccccgcggggguacuucaagauccgcuccggcaagagcuccaucaugcggagcgacgcccccaucggcaagugcaacuccgagugcaucacgcccaacgggagcauccccaacgacaagccguuccagaacgugaaccgcaucaccuacggcgccugcccccgguacgugaagcagaacacccugaagcucgcgaccgggaugcgcaacguccccgagaagcagacgcggggcaucuucggggccaucgccggcuucaucgagaacggcugggaggggaugguggacggcugguacggguuccgccaccagaacuccgagggcaucgggcaggccgccgaccugaaguccacccaggcggccaucgaccagaucaacggcaagcugaaccggcucaucggcaagaccaacgagaaguuccaccagaucgagaaggaguucuccgagguggaggggcgcauccaggaccuggagaaguacgucgaggacaccaagaucgaccuguggagcuacaacgccgagcuccugguggcccuggagaaccagcacacgaucgaccucaccgacuccgagaugaacaagcuguucgagcggaccaagaagcagcugcgcgagaacgccgaggacaugggcaacgggugcuucaagaucuaccacaagugcgacaacgcgugcaucggcagcauccgcaacgggaccuacgaccacgacguguaccgggacgaggcccucaacaaccgcuuccagaucaagggcgucgagcugaaguccggcuacaaggacuggauccuguggaucagcuucgccaucuccugcuuccuccugugcguggcccugcucggguucaucaugugggccugccagaagggcaacauccggugcaacaucugcaucuga

SEQ ID NO: 65359 - RNA, 1701 nt, Artificial Sequence; identical to SEQ ID NO: 64657
  derived and/or modified CDS sequence (opt1) from hemagglutinin__InfluenzaA__ABI92973

SEQ ID NO: 65360 - RNA, 1701 nt, Artificial Sequence; identical to SEQ ID NO: 64657
  derived and/or modified CDS sequence (opt1) from hemagglutinin__InfluenzaA__ABI92984

SEQ ID NO: 65361 - RNA, 1701 nt, Artificial Sequence
  derived and/or modified CDS sequence (opt1) from hemagglutinin__InfluenzaA__ABI92995
augaagaccaucaucgcccugagcuacauccucugccugguguucgcccagaagcugcccggcaacgacaacuccaccgcgacgcucugccuggggcaccacgccgucccgaacggcaccaucgugaagaccaucaccaacgaccagaucgaggugacgaacgccaccgagcugguccagagcuccagcaccgggggcaucugcgacagcccccaccagauccucgacggggagaacugcacccugaucgacgcccugcucggcgacccccagugcgacggcuuccagaacaagaagugggaccuguucguggagcgcagcaaggccuacuccaacugcuaccccuacgacgugccggacuacgcgagccugcggucccucaucgccagcuccgggacgcuggaguucaacaacgagagcuucaacuggaccggcgucacccagaacgggaccuccagcgccugcaagcgccgguccaacagcuccuucuucagccgccugaacuggcucacgcaccugaaguucaaguaccccgcccugaacgugaccaugcccaacaacgaggaguucgacaagcucuacaucuggggcgugcaccaccccgggaccuacaacgaccagaucucccuguacgcgcaggccagcggccggaucaccgucagcacgaagcgcucccagcagaccgugaucccgaacaucggcagccggccccgcauccgggacauccccucccgcaucagcaucuacuggaccaucgugaagcccggggacauccugcucaucaacuccaccggcaaccugaucgccccgcggggguacuucaagauccgcagcggcaaguccagcaucaugcgguccgacgcccccaucggcaagugcaacagcgagugcaucacgcccaacggguccauccccaacgacaagccguuccagaacgucaaccgcaucaccuacggcgccugccccaaguacgugaagcagaacacccugaagcucgcgaccgggaugcggaacgugcccgagaagcagacgcgcggcaucuucggggccaucgccggcuucaucgagaacggcugggaggggauggucgacggcugguacggguuccggcaccagaacagcgagggcaucgggcaggccgccgaccugaaguccacccaggcggccaucgaccagaucaacggcaagcugaaccgccucaucggcaagaccaacgagaaguuccaccagaucgagaaggaguucagcgagguggaggggcggauccaggaccuggagaaguacguggaggacaccaagaucgaccugugguccuacaacgccgagcuccuggucgcccuggagaaccagcacacgaucgaccucaccgacagcgagaugaacaagcuguucgagcgcaccaagaagcagcugcgggagaacgccgaggacaugggcaacgggugcuucaagaucuaccacaagugcgacaacgcgugcaucggcuccauccgcaacgggaccuacgaccacgacguguaccgcgacgaggcccucaacaaccgguuccagaucaagggcguggagcugaaguccggcuacaaggacuggauccuguggaucuccuucgccaucagcugcuuccuccugugcgucgcccugcucggguucaucaugugggccugccagaagggcaacauccgcugcaacaucugcaucuga

SEQ ID NO: 65362 - RNA, 1701 nt, Artificial Sequence; identical to SEQ ID NO: 64657
  derived and/or modified CDS sequence (opt1) from hemagglutinin__InfluenzaA__ABI93006

SEQ ID NO: 65363 - RNA, 1701 nt, Artificial Sequence; identical to SEQ ID NO: 64657
  derived and/or modified CDS sequence (opt1) from hemagglutinin__InfluenzaA__ABI93017

SEQ ID NO: 65364 - RNA, 1698 nt, Artificial Sequence; identical to SEQ ID NO: 65256
  derived and/or modified CDS sequence (opt1) from hemagglutinin__InfluenzaA__ABI93028

SEQ ID NO: 65365 - RNA, 1701 nt, Artificial Sequence; identical to SEQ ID NO: 64990
  derived and/or modified CDS sequence (opt1) from hemagglutinin__InfluenzaA__ABI93039

SEQ ID NO: 65366 - RNA, 1701 nt, Artificial Sequence
  derived and/or modified CDS sequence (opt1) from hemagglutinin__InfluenzaA__ABI93061
augaagaccaucaucgcccugagcuacauccucugccugguguucgcccagaagcugcccggcaacgacaacuccaccgcgacgcucugccuggggcaccacgccgucccgaacggcacccuggugaagaccaucaccaacgaccagaucgaggugacgaacgccaccgagcucguccagagcuccagcaccgggcgcaucugcgacagcccccaccagauccuggacggcgagaacugcacccugaucgacgcccuccugggggacccccacugcgacggcuuccagaacaaggagugggaccuguucguggagcggagcaaggccuacuccaacugcuaccccuacgacgugccggacuacgcgagccuccgcucccuggucgccagcuccggcacgcuggaguucaacaacgagagcuucaacuggaccgggguggcccagaacggcaccuccagcgccugcaagcggcgcuccaacaagagcuucuucucccggcucaacuggcugcaccagcugaaguacaaguaccccgcgcucaacgugaccaugcccaacaacgagaaguucgacaagcuguacaucuggggcguccaccaccccagcacggacuccgaccagaucagccuguacgcccaggccagcgggcgcgugaccguguccaccaagcggagccagcagaccgucaucccgaacaucgggucccgccccugggugcggggcgugagcucccgcaucagcaucuacuggacgaucgucaagcccggcgacauccuccugaucaacuccaccgggaaccugaucgcgccccggggcuacuucaagauccgcagcgggaaguccagcaucaugcgguccgacgccagcaucggcaagugcaacuccgagugcaucaccccgaacggcagcauccccaacgacaagcccuuccagaacgugaaccgcaucaccuacggggccugcccccgguacgugaagcagaacacgcucaagcuggccaccggcaugcgcaacgucccggagaagcagacccgggggaucuucggcgccaucgccggguucaucgagaacggcugggagggcaugguggacgggugguacggcuuccgccaccagaacuccgaggggaccggccaggccgcggaccugaaguccacgcaggccgccaucaaccagaucaacgggaagcucaaccggcugaucgagaagaccaacgagaaguuccaccagaucgagaaggaguucuccgagguggagggccgcauccaggaccuggagaaguacgucgaggacaccaagaucgaccucuggagcuacaacgccgagcugcugguggcccucgagaaccagcacaccaucgaccugacggacuccgagaugaacaagcuguucgagcggaccaagaagcagcuccgcgagaacgcggaggacaugggcaacgggugcuucaagaucuaccacaagugcgacaacgccugcaucggcagcauccgcaacgggaccuacgaccacgacguguaccgggacgaggcccugaacaaccgcuuccagaucaagggcgucgagcucaagagcggguacaaggacuggauccuguggaucuccuucgccaucagcugcuuccugcugugcgugguccuccugggcuucaucaugugggccugccagaagggcaacauccggugcaacaucugcaucuga

SEQ ID NO: 65367 - RNA, 1701 nt, Artificial Sequence; identical to SEQ ID NO: 64674
  derived and/or modified CDS sequence (opt1) from hemagglutinin__InfluenzaA__ABI93072

SEQ ID NO: 65368 - RNA, 1701 nt, Artificial Sequence; identical to SEQ ID NO: 64674
  derived and/or modified CDS sequence (opt1) from hemagglutinin__InfluenzaA__ABI93083

SEQ ID NO: 65369 - RNA, 1701 nt, Artificial Sequence; identical to SEQ ID NO: 64674
  derived and/or modified CDS sequence (opt1) from hemagglutinin__InfluenzaA__ABI93094

SEQ ID NO: 65370 - RNA, 1701 nt, Artificial Sequence; identical to SEQ ID NO: 64674
  derived and/or modified CDS sequence (opt1) from hemagglutinin__InfluenzaA__ABI93105

SEQ ID NO: 65371 - RNA, 1701 nt, Artificial Sequence
  derived and/or modified CDS sequence (opt1) from hemagglutinin__InfluenzaA__ABI93116
augaagaccaucaucgcccugagcuacauccucugccugguguucgcccagaagcugcccggcaacgacaacuccaccgcgacgcucugccuggggcaccacgccgucccgaacggcacccuggugaagaccaucaccaacgaccagaucgaggugacgaacgccaccgagcucguccagagcuccagcaccgggggcaucugcgacagcccccaccagauccuggacggggagaacugcacccugaucgacgcccuccugggcgacccccacugcgacggcuuccagaacaaggagugggaccuguucguggagcgcagcaaggccuacuccaacugcuaccccuacgacgugccggacuacgcgagccuccggucccuggucgccagcuccgggacgcuggaguucaacaacgagagcuucaacuggaccggcguggcccagaacgggaccuccagcgccugcaagcgccgguccaacaagagcuucuucucccgccucaacuggcugcaccagcugaaguacaaguaccccgcgcucaacgugaccaugcccaacaacgagaaguucgacaagcuguacaucuggggcguccaccaccccagcacggacuccgaccagaucagccuguacgcccaggccccggggcgggugaccgugagcaccaagcgcucccagcagaccgucauccccaacaucggcagccggcccugggugcgcggcguguccagccggaucuccaucuacuggacgaucgucaagcccggggacauccuccugaucaacugcaccggcaaccugaucgccccgcgcggguacuucaagaugcggagcggcaaguccagcaucaugcgcuccgacgccagcaucggcaagugcaacuccgagugcaucacccccaacgggagcauccccaacgacaagcccuuccagaacgugaaccggaucaccuacggcgcgugcccgcgcuacgugaagcagaacacgcucaagcuggccaccgggaugcggaacguccccgagaagcagacccgcggcaucuucggggccaucgccggcuucaucgagaacggcugggaggggaugguggacggcugguacggguuccggcaccagaacuccgagggcaccgggcaggccgcggaccugaaguccacgcaggccgccaucaaccagaucaacggcaagcucaaccgccugaucgagaagaccaacgagaaguuccaccagaucgagaaggaguucuccgagguggagggccggauccaggaccuggagaaguacgucgaggacaccaagaucgaccucuggagcuacaacgccgagcugcugguggcccucgagaaccagcacaccaucgaccugacggacuccgagaugaacaagcuguucgagcgcaccaagaagcagcuccgggagaacgcggaggacauggggaacggcugcuucaagaucuaccacaagugcgacaacgccugcaucgggagcauccgcaacggcaccuacgaccacgggguguaccgcgacgaggcccugaacaaccgguuccagaucaagggcgucgagcugaaguccggcuacaaggacuggauccucuggaucagcuucgccaucagcugcuuccugcugugcgugguccuccugggguucaucaugugggccugccagaagggcaacauccgcugcaacaucugcaucuga

SEQ ID NO: 65372 - RNA, 1689 nt, Artificial Sequence
  derived and/or modified CDS sequence (opt1) from hemagglutinin__InfluenzaA__ABI94581
augaacacccagauccugguguucgcccucgucgccagcauccccaccaacgcggacaagaucugccugggccaccacgccguguccaacgggacgaaggugaacacccugaccgagcgcggcgucgagguggugaacgccaccgagacggucgagcggaccaacgugccgcgcaucugcagcaaggggaagcggaccguggaccucggccagugcgggcugcugggcaccaucacgggcccgccccagugcgaccaguuccucgaguucuccgccgaccugaucaucgagcgccgggaggggagcgacgucugcuaccccggcaaguucgugaacgaggaggcccugcgccagauccuccgggaguccgggggcaucgacaaggagaccaugggguucaccuacagcggcauccgcaccaacggcacgaccuccgcgugccggcgcagcggguccagcuucuacgccgagaugaaguggcugcuguccaacaccgacaacgccgccuucccgcagaugaccaagagcuacaagaacacgcggaaggaccccgcgcucaucaucuggggcauccaccacuccgggagcaccaccgagcagaccaagcuguacggcuccggcaacaagcugaucacgguggggagcuccaacuaccagcagagcuucguccccucccccggcgcccgcccccaggugaacgggcagagcggccggaucgacuuccacuggcucauccugaaccccaacgacaccgugaccuucagcuucaacggggccuucaucgcccccgaccgcgccuccuuccugcggggcaagagcaugggcauccaguccgagguccagguggacgcgaacugcgagggggacugcuaccacagcggcgggaccaucaucuccaaccuccccuuccagaacaucaacagccgcgccgugggcaagugcccgcgguacgucaagcaggagucccugcugcucgccacggggaugaagaacgugcccgagauccccaagcgccggcgccggggccuguucggcgccaucgccggguucaucgagaacggcugggaggggcugaucgacggcugguacggguuccgccaccagaacgcgcagggcgagggcaccgccgccgacuacaagagcacccaguccgccaucgaccagaucaccgggaagcucaaccgccugaucgagaagacgaaccagcaguucgagcugaucgacaacgaguucaccgagguggagaagcagaucggcaacgucaucaacuggacccgggacagcaugaccgaggugugguccuacaacgccgagcuccugguggcgauggagaaccagcacacgaucgaccuggccgacagcgagaugaacaagcucuacgagcgcgucaagcggcagcugcgcgagaacgccgaggaggacgggaccggcugcuucgagaucuuccacaagugcgacgacgacugcauggccuccauccggaacaacaccuacgaccacagcaaguaccgcgaggaggccauccagaaccggauccagaucgaccccgugaagcuguccagcggcuacaaggacgucauccucugguucuccuucggggcgagcugcuucauccugcuggccaucgccaugggccucguguucaucugcgugaagaacgggaacaugcgcugcaccaucugcaucuga

SEQ ID NO: 65373 - RNA, 1701 nt, Artificial Sequence; identical to SEQ ID NO: 64790
  derived and/or modified CDS sequence (opt1) from hemagglutinin__InfluenzaA__ABI95228

SEQ ID NO: 65374 - RNA, 1701 nt, Artificial Sequence
  derived and/or modified CDS sequence (opt1) from hemagglutinin__InfluenzaA__ABI95239
augaagaccaucaucgcccugagcuacauccucugccugguguucgcccagaagcugcccggcaacgacaacuccaccgcgacgcucugccuggggcaccacgccgucccgaacggcaccaucgugaagaccaucaccaacgaccagaucgaggugacgaacgccaccgagcugguccagagcuccagcaccgggggcaucugcgacagcccccaccagauccucgacggggagaacugcacccugaucgacgcccugcucggcgacccccagugcgacggcuuccagaacaagaagugggaccuguucguggagcgcagcaaggccuacuccaacugcuaccccuacgacgugccggacuacgcgagccugcggucccucgucgccagcuccgggacgcuggaguucaacaacgagagcuucaacuggaccggcgugacccagaacgggaccuccagcgccugcaagcgccgguccaacaacagcuucuucucccgccugaacuggcucacgcaccugaaguucaaguaccccgcccugaacgugaccaugcccaacaacgagaaguucgacaagcucuacaucuggggcguccaccaccccgggaccgacaacgaccagaucagccuguacgcgcaggccuccggccggaucaccgugagcacgaagcgcagccagcagaccgugaucccgaacaucggcucccggccccgcguccgggacauccccagccgcaucuccaucuacuggaccaucgugaagcccggggacauccugcucaucaacagcaccggcaaccugaucgccccgcggggguacuucaagauccgcuccggcaagagcuccaucaugcggagcgacgcccccaucggcaagugcaacuccgagugcaucacgcccaacgggagcauccccaacgacaagccguuccagaacgugaaccgcaucaccuacggcgccugcccccgguacgucaagcagaacacccugaagcucgcgaccgggaugcgcaacgugcccgagaagcagacgcggggcaucuucggggccaucgccggcuucaucgagaacggcugggaggggauggugaacggcugguacggguuccgccaccagaacuccgagggcaucgggcaggccgccgaccugaaguccacccaggcggccaucaaccagaucaacggcaagcugaaccggcucaucggcaagaccaacgagaaguuccaccagaucgagaaggaguucuccgaggucgaggggcgcauccaggaccuggagaaguacguggaggacaccaagaucgaccuguggagcuacaacgccgagcuccugguggcccuggagaaccagcacacgaucgaccucaccgacuccgagaugaacaagcuguucgagcggaccaagaagcagcugcgcgagaacgccgaggacaugggcaacgggugcuucaagaucuaccacaagugcgacaacgcgugcaucggcagcauccgcaacgggaccuacgaccacgacgucuaccgggacgaggcccucaacaaccgcuuccagaucaagggcguggagcugaaguccggcuacaaggacuggauccuguggaucagcuucgccaucuccugcuuccuccugugcguggcccugcucggguucaucaugugggccugccagaagggcaacauccggugcaacaucugcaucuga

SEQ ID NO: 65375 - RNA, 1698 nt, Artificial Sequence
  derived and/or modified CDS sequence (opt1) from hemagglutinin__InfluenzaA__ABI95250
augaaggccaagcugcucgugcugcugugcaccuucaccgccacguacgcggacaccaucugcgucggcuaccacgccaacaacagcaccgacaccguggacacggugcucgagaagaacgucaccgugacccacuccgugaaccugcuggaggacagccacaacgggaagcucugccugcugaagggcaucgcgccccuccagcuggggaacugcuccgucgccggcuggauccuggggaacccggagugcgagagccucaucuccaaggagagcugguccuacaucguggagacccccaaccccgagaacggcacgugcuaccccggcuacuucgccgacuacgaggagcugcgcgagcagcugagcuccgugagcuccuucgagcgguucgagaucuucccgaaggagagcuccuggcccaaccacaccgucaccggggugagcgccuccugcagccacaacggcaaguccagcuucuaccgcaaccuccuguggcugaccgagaagaacgggcucuaccccaaccuguccaagagcuacgugaacaacaaggagaaggagguccuggugcucuggggcgugcaccaccccagcaacaucggggaccagcgggccaucuaccacacggagaacgccuacgucuccguggugagcucccacuacagccgccgguucaccccggagaucgccaagcgccccaagguccggggccaggagggccgcaucaacuacuacuggacccugcuggagcccggggacaccaucaucuucgaggcgaacggcaaccucaucgcccccugguacgccuucgcccugucccggggguucggcagcggcaucaucacguccaacgccccgaugaacgagugcgacgcgaagugccagacgccccagggggccaucaacagcucccugcccuuccagaacgugcaccccgugaccaucggcgagugcccgaaguacguccgcagcgccaagcuccggauggugaccgggcugcgcaacauccccuccauccagagccggggccuguucggggccaucgccggcuucaucgagggcggguggaccggcaugaucgacgggugguacggcuaccaccaccagaacgagcagggguccggcuacgcggccgaccagaaguccacccagaacgccaucaacggcaucaccaacaaggugaacagcgucaucgagaagaugaacacccaguucacggccguggggaaggaguucaacaagcucgagcgccggauggagaaccugaacaagaaggucgacgacggcuuccuggacaucuggaccuacaacgccgagcuccuggugcugcucgagaacgagcgcacccuggacuuccacgacagcaacgugaagaaccuguacgagaaggucaagucccagcucaagaacaacgcgaaggagaucgggaacggcugcuucgaguucuaccacaagugcaacaacgagugcauggagagcgugaagaacgggaccuacgacuaccccaaguacuccgaggagagcaagcugaaccgggagaagaucgacggcgugaagcuggagagcaugggcgucuaccagauccucgccaucuacuccacgguggccagcucccuggugcugcucgucagccugggggccaucuccuucuggaugugcagcaacggcucccugcagugccgcaucugcaucuga

SEQ ID NO: 65376 - RNA, 1698 nt, Artificial Sequence
  derived and/or modified CDS sequence (opt1) from hemagglutinin__InfluenzaA__ABI95261
augaaggccaagcugcucgugcugcugugcaccuucaccgccacguacgcggacaccaucugcaucggcuaccacgccaacaacagcaccgacaccgucgacacggugcucgagaagaacgugaccgucacccacuccgugaaccugcuggaggacagccacaacgggaagcucugccugcugaagggcaucgcgccccuccagcuggggaacugcuccguggccggcuggauccuggggaacccggagugcgagagccucaucuccaaggagagcugguccuacaucgucgagacccccaaccccgagaacggcacgugcuaccccggcuacuucgccgacuacgaggagcugcgcgagcagcugagcuccgugagcuccuucgagcgguucgagaucuucccgaaggagagcuccuggcccaaccacaccgugaccggggucagcgccuccugcagccacaacggcaaguccagcuucuaccgcaaccuccuguggcugaccgagaagaacgggcucuaccccaaccuguccaagagcuacgugaacaacaaggagaaggaggugcugguccucuggggcgugcaccaccccagcaacaucggggugcagcgggccaucuaccacacggagaacgccuacgucuccguggugagcucccacuacagccgccgguucaccccggagaucgccaagcgccccaagguccgggaccaggagggccgcaucaacuacuacuggacccugcuggagcccggcgacaccaucaucuucgaggcgaacgggaaccucaucgcccccugguacgccuucgcccugucccggggcuucgagagcgggaucaucacguccaacgccccgaugaacgagugcgacgcgaagugccagacgccccagggcgccaucaacagcucccugcccuuccagaacgugcaccccgugaccaucggcgagugcccgaaguacguccgcagcgccaagcuccggauggugaccgggcugcgcaacauccccuccauccagagccggggccuguucggggccaucgccggcuucaucgagggcggguggaccggcaugaucgacgggugguacggcuaccaccaccagaacgagcagggguccggcuacgcggccgaccagaaguccacccagaacgccaucaacgggaucaccaacaaggugaacagcgucaucgagaagaugaacacccaguucacggccgugggcaaggaguucaacaagcucgagcgccggauggagaaccugaacaagaaggucgacgacggcuuccuggacaucuggaccuacaacgccgagcuccuggugcugcucgagaacgagcgcacccuggacuuccacgacagcaacgugaagaaccuguacgagaaggucaagucccagcucaagaacaacgcgaaggagaucgggaacggcugcuucgaguucuaccacaagugcaacaacgagugcauggagagcgugaagaacgggaccuacgacuaccccaaguacuccgaggagagcaagcugaaccgggagaagaucgacggcgugaagcuggagagcaugggggucuaccagauccucgccaucuacuccacgguggccagcucccuggugcugcucgucagccugggcgccaucuccuucuggaugugcagcaacggcucccugcagugccgcaucugcaucuga

SEQ ID NO: 65377 - RNA, 1698 nt, Artificial Sequence; identical to SEQ ID NO: 65256
  derived and/or modified CDS sequence (opt1) from hemagglutinin__InfluenzaA__ABI95272

SEQ ID NO: 65378 - RNA, 1698 nt, Artificial Sequence; identical to SEQ ID NO: 65256
  derived and/or modified CDS sequence (opt1) from hemagglutinin__InfluenzaA__ABI95283

SEQ ID NO: 65379 - RNA, 1698 nt, Artificial Sequence; identical to SEQ ID NO: 64320
  derived and/or modified CDS sequence (opt1) from hemagglutinin__InfluenzaA__ABI95294

SEQ ID NO: 65380 - RNA, 1698 nt, Artificial Sequence
  derived and/or modified CDS sequence (opt1) from hemagglutinin__InfluenzaA__ABI96104
augaaggugaagcugcucauccugcugugcaccuucaccgccacguacgccgacaccaucugcaucggcuaccacgcgaacaacagcaccgacaccgucgacacggugcucgagaagaacgugaccgucacccacuccgugaaccugcuggaggacagccacaacgggaagcucugccugcugaagggcaucgcgccccuccagcuggggaacugcuccguggccggcuggauccuggggaacccggagugcgagcuccugaucagcaaggaguccuggagcuacaucgucgagacccccaaccccgagaacggcgccugcuaccccggcuacuucgccgacuacgaggagcugcgcgagcagcucuccagcguguccagcuucgagcgguucgagaucuucccgaaggaguccagcuggcccaaccacacggugaccggggucuccgccagcugcucccacaacggcaagagcuccuucuaccgcaaccugcuguggcucaccgggaagaacggccuguaccccaaccugaucaagagcuacgccaacaacaaggagaaggaggugcucauccuguggggcgugcaccacccgcccaacaucggggaccagcggacccuguaccacacggagaacgccuacgucuccguggugagcagccacuacucccgccgguucacccccgagaucaccaagcgccccaagguccgggaccaggagggccgcaucaacuacuacuggacccuccuggagcccggggacacgaucaucuucgaggccaacggcaaccugaucgcgccgugguacgccuucgcccucagccggggguucggcuccggcaucaucaccagcaacgcccccauggacgagugcgacgccaagugccagacgccccagggggcgaucaacuccagccugcccuuccagaacgugcacccggugaccaucggcgagugccccaaguacguccgcuccgccaagcugcggauggugaccgggcuccgcaacauccccagcauccagucccggggccuguucggggccaucgccggcuucaucgagggcggguggaccggcaugguggacgggugguacggcuaccaccaccagaacgagcaggggagcggcuacgccgcggaccagaaguccacccagaacgccaucaacggcaucaccaacaaggucaacagcgugaucgagaagaugaacacgcaguucaccgccguggggaaggaguucaacaagcuggagcgccggauggagaaccucaacaagaaggucgacgacggcuuccuggacaucuggaccuacaacgccgagcugcucgugcugcuggagaacgagcgcacccucgacuuccacgacuccaacgucaagaaccuguacgagaaggucaagagccagcugaagaacaacgccaaggagaucgggaacggcugcuucgaguucuaccacaagugcaacaacgagugcauggaguccgugaagaacgggacguacgacuaccccaaguacagcgaggaguccaagcucaaccgggagaagaucgacggcgugaagcuggacagcaugggcguguaccagauccuggcgaucuacuccaccguggccagcagccucguccugcuggugucccucggggccaucagcuucuggaugugcuccaacggcagccugcagugccgcaucugcaucuga

SEQ ID NO: 65381 - RNA, 1701 nt, Artificial Sequence; identical to SEQ ID NO: 64674
  derived and/or modified CDS sequence (opt1) from hemagglutinin__InfluenzaA__ABJ09107

SEQ ID NO: 65382 - RNA, 1701 nt, Artificial Sequence
  derived and/or modified CDS sequence (opt1) from hemagglutinin__InfluenzaA__ABJ09140
augaagaccaucaucgcccugagcuacauccucugccugguguucgcccagaagcugcccggcaacgacaacuccaccgcgacgcucugccuggggcaccacgccgucccgaacggcacccuggugaagaccaucaccaacgaccagaucgaggugacgaacgccaccgagcucguccagagcuccagcaccgggcgcaucugcgacagcccccaccggauccuggacggcaagaacugcacccugaucgacgcccuccugggggacccccacugcgacggcuuccagaacaaggagugggaccuguucguggagcgcuccaaggccuacuccaacugcuaccccuacgacgugccggacuacgcgagccuccggucccuggucgccagcuccggcacgcuggaguucaucaacgaggacuucaacuggaccgggguggcccaggacggcaagagcuacuccugcaagcgcgggagcgugaacuccuucuucagccggcucaacuggcugcacaagcuggaguacaaguaccccgcccucaacgucaccaugcccaacaacggcaaguucgacaagcuguacaucuggggcgugcaccaccccuccaccgacagcgaccagacgucccuguacgugcgcgcgagcgggcgggucaccgugagcaccaagcgcucccagcagaccgugaucccgaacaucggcuuccggcccuggguccgcgggcucagcucccggaucagcaucuacuggacgaucgugaagcccggcgacauccugcugaucaacuccaccgggaaccucaucgcgccccgcggcuacuucaagauccggaacggcaagagcuccaucaugcgcagcgacgccccgaucgggaacugcuccagcgagugcaucacccccaacggcuccauccccaacgacaagcccuuccagaacgugaaccggaucaccuacggggccugcccgcgcuacgucaagcagaacacgcugaagcuggccaccggcaugcggaacgugcccgagaagcagacccgcgggaucuucggcgccaucgccggcuucaucgagaacgggugggagggcaugguggacgggugguacggcuuccggcaccagaacagcgaggggaccggccaggccgccgaccucaaguccacgcaggccgcgaucgaccagaucaacggcaagcugaaccgccugaucgagaagaccaacgagaaguuccaccagaucgagaaggaguucagcgaggucgaggggcggauccaggaccucgagaaguacguggaggacaccaagaucgaccugugguccuacaacgccggccugcucguggcccuggagaaccagcacaccaucgaccugacggacagcgagaugaacaagcuguucgagcgcacccgcaagcagcuccgggagaacgccgaggacauggggaacggcugcuucaagaucuaccacaagugcgacaacgccugcaucggguccauccgcaacggcaccuacgaccacgacgucuaccgggacgaggcgcugaacaaccgcuuccagaucaagggcguggagcucaagagcggguacaaggacuggauccuguggaucuccuucgccaucagcugcuuccugcucugcgucgugcugcugggcuucaucaugugggccugccagaaggggaacauccggugcaacaucugcaucuga

SEQ ID NO: 65383 - RNA, 1698 nt, Artificial Sequence
  derived and/or modified CDS sequence (opt1) from hemagglutinin__InfluenzaA__ABJ09151
augaaggccaagcugcucgugcugcugugcaccuucaccgccacguacgcggacaccaucugcaucggcuaccacgccaacaacagcaccgacaccgucgacacggugcucgagaagaacgugaccgucacccacuccgugaaccugcuggaggacagccacaacgggaagcucugccugcugaagggcaucgcgccccuccagcuggggaacugcuccguggccggcuggauccuggggaacccggagugcgagcuccugaucagcaaggaguccuggagcuacaucgucgagacccccaaccccgagaacggcacgugcuaccccggcuacuucgccgacuacgaggagcugcgcgagcagcucuccagcguguccagcuucgagcgguucgagaucuucccgaagggguccagcuggcccaaccacaccgugaccggcgucuccgccagcugcucccacaacggcaagagcuccuucuaccgcaaccugcuguggcucaccgggaagaacgggcuguaccccaaccugagcauguccuacgugaacaacaagggcaaggaggugcucguccuguggggcgugcaccacccgcccaacaucggggaccagcgggcccuguaccacacggagaacgccuacgugagcgucgugagcucccacuacagccgccgguucacccccgagaucgccaagcgccccaaggugcgggaccaggagggccgcaucaacuacuacuggacccuccuggagcccggggacaccaucaucuucgaggcgaacggcaaccugaucgccccgugguacgccuucgcccucucccggggcuucgggagcggcaucaucacguccaacgcccccaugggggagugcgacgcgaagugccagacgccccagggcgccaucaacagcucccugcccuuccagaacguccacccggugaccaucggggagugccccaaguacgugcgcagcgccaagcugcggauggucaccggccuccgcaacauccccuccauccagagccggggccuguucggggccaucgccggcuucaucgagggcggguggaccgggaugguggacggcugguacggcuaccaccaccagaacgagcagggguccggcuacgcggccgaccagaaguccacccagaacgccaucaacgggaucaccaacaaggugaacagcgucaucgagaagaugaacacccaguucacggccgugggcaaggaguucaacaagcuggagcgccggauggagaaccucaacaagaaggucgacgacggguuccuggacaucuggaccuacaacgccgagcugcucgugcugcuggagaacgagcgcacccucgacuuccacgacagcaacgugaagaaccuguacgagaaggucaagucccagcugaagaacaacgcgaaggagaucggcaacggcugcuucgaguucuaccacaagugcaacaacgagugcauggagagcgugaagaacgggaccuacgacuaccccaaguacuccaaggagagcaagcucaaccgggagaagaucgacggcgugaagcuggaguccaugggggucuaccagauccuggccaucuacagcacgguggccagcucccucgugcugcuggucagccucggcgccaucuccuucuggaugugcagcaacggcucccugcagugccgcaucugcaucuga

SEQ ID NO: 65384 - RNA, 1701 nt, Artificial Sequence
  derived and/or modified CDS sequence (opt1) from hemagglutinin__InfluenzaA__ABJ09162
augaagaccaucaucgcccugagcuacauccucugccugguguucgcccagaagcugcccggcaacgacaacuccaccgcgacgcucugccuggggcaccacgccgucccgaacggcaccaucgugaagaccaucaccaacgaccagaucgaggugacgaacgccaccgagcugguccagagcuccagcaccgggggcaucugcgacagcccccaccagauccucgacggggagaacugcacccugaucgacgcccugcucggcgacccccagugcgacggcuuccagaacaagaagugggaccuguucguggagcgcuccaaggccuacuccaacugcuaccccuacgacgugccggacuacgcgagccugcggucccucgucgccagcuccgggacgcuggaguucaacaacgagagcuucaacuggaccggcgugacccagaacgggaccuccagcgccugcaagcgccgguccaacaacagcuucuucucccgccugaacuggcucacgcaccugaaguucaaguaccccgcccugaacgugaccaugcccaacaacgagaaguucgacaagcucuacaucuggggcguccaccaccccgggaccaacaacgaccagaucagccuguacgcgcaggccuccggccggaucaccgugagcacgaagcgcagccagcagaccgugaucccgaacaucggcucccggccccgcguccgggacauccccagccgcaucuccaucuacuggaccaucgugaagcccggggacauccugcucaucaacagcaccggcaaccugaucgccccgcggggguacuucaagauccgcuccggcaagagcuccaucaugcggagcgacgcccccaucggcaagugcaacuccgagugcaucacgcccaacgggagcauccccaacgacaagccguuccagaacgugaaccgcaucaccuacggcgccugcccccgguacgucaagcagaacacccugaagcucgcgaccgggaugcgcaacgugcccgagaagcagacgcggggcaucuucggggccaucgccggcuucaucgagaacggcugggaggggaugguggacggcugguacggguuccgccaccagaacuccgagggcaucgggcaggccgccgaccucaagagcacccaggcggccaucaaccagaucaacggcaagcugaaccggcucaucggcaagaccaacgagaaguuccaccagaucgagaaggaguucuccgaggucgaggggcgcauccaggaccuggagaaguacguggaggacaccaagaucgaccuguggagcuacaacgccgagauccucguggcccuggagaaccagcacacgaucgaccugaccgacuccgagaugaacaagcuguucgagcggaccaagaagcagcugcgcgagaacgccgaggacaugggcaacgggugcuucaagaucuaccacaagugcgacaacgcgugcaucggcagcauccgcaacgggaccuacgaccacgacgucuaccgggacgaggcccugaacaaccgcuuccagaucaagggcguggagcucaaguccggcuacaaggacuggauccuguggaucagcuucgccaucuccugcuuccugcucugcguggcccugcugggguucaucaugugggccugccagaagggcaacauccggugcaacaucugcaucuga

SEQ ID NO: 65385 - RNA, 1701 nt, Artificial Sequence; identical to SEQ ID NO: 64267
  derived and/or modified CDS sequence (opt1) from hemagglutinin__InfluenzaA__ABJ09173

SEQ ID NO: 65386 - RNA, 1698 nt, Artificial Sequence
  derived and/or modified CDS sequence (opt1) from hemagglutinin__InfluenzaA__ABJ09184
augaaggugaagcugcucguccugcugugcaccuucaccgccacguacgccgacaccaucugcaucggcuaccacgcgaacaacagcaccgacaccguggacacggugcucgagaagaacgucaccgugacccacuccgugaaccugcuggaggacagccacaacgggaagcucugccugcugaagggcaucgcgccccuccagcuggggaacugcuccgucgccggcuggauccuggggaacccggagugcgagcuccugaucagcaaggaguccuggagcuacaucguggagacccccaaccccgagaacggcacgugcuaccccggcuacuucgccgacuacgaggagcugcgcgagcagcucuccagcguguccagcuucgagcgguucgagaucuucccgaaggaguccagcuggcccaaccacaccgucaccgggguguccgccagcugcucccacaacggcaagagcuccuucuaccgcaaccugcuguggcucaccgggaagaacggccuguaccccaaccugagcaaguccuacgccaacaacaaggagaaggaggugcucguccuguggggcgugcaccacccgcccaacaucggggaccagcgggcccuguaccacacggagaacgccuacgugagcgucgugagcucccacuacagccgccgguucacccccgagaucgccaagcgccccaaggugcgggaccaggagggccgcaucaacuacuacuggacccuccuggaggcgggggacaccaucaucuucgaggccaacggcaaccugaucgcgccccgguucgccuucgcccucucccgcggguucggcagcggcaucaucacguccaacgccccgauggacgagugcgacgccaagugccagacgccccagggggccaucaacagcucccugcccuuccagaacguccaccccgugaccaucggcgagugcccgaaguacgugcggagcgccaagcugcgcauggccaccgggcuccggaacauccccuccauccagagccgcggccuguucggggcgaucgccggcuucaucgagggcggguggaccggcauggucgacgggugguacggcuaccaccaccagaacgagcagggguccggcuacgccgccgaccagaaguccacccagaacgccaucaacggcaucaccaacaaggugaacagcgugaucgagaagaugaacacccaguucacggcggucgggaaggaguucagcaagcuggagcggcgcauggagaaccucaacaagaagguggacgacggcuuccuggacaucuggaccuacaacgccgagcugcucguccugcuggagaacgagcggacccucgacuuccacgacuccaacgugaagaaccuguacgagaaggucaagagccagcugaagaacaacgccaaggagaucgggaacggcugcuucgaguucuaccacaagugcaacgacgagugcauggaguccgugaagaacgggaccuacgacuaccccaaguacagcgaggaguccaagcucaaccgcgagaagaucgacggcgugaagcuggagagcaugggcguguaccagauccuggccaucuacagcacggucgccuccagccucgugcugcuggugucccucggggcgaucagcuucuggaugugcuccaacggcagccugcagugccggaucugcaucuga

SEQ ID NO: 65387 - RNA, 1701 nt, Artificial Sequence; identical to SEQ ID NO: 64657
  derived and/or modified CDS sequence (opt1) from hemagglutinin__InfluenzaA__ABJ09195

SEQ ID NO: 65388 - RNA, 1701 nt, Artificial Sequence; identical to SEQ ID NO: 64657
  derived and/or modified CDS sequence (opt1) from hemagglutinin__InfluenzaA__ABJ09206

SEQ ID NO: 65389 - RNA, 1701 nt, Artificial Sequence; identical to SEQ ID NO: 65237
  derived and/or modified CDS sequence (opt1) from hemagglutinin__InfluenzaA__ABJ09217

SEQ ID NO: 65390 - RNA, 1701 nt, Artificial Sequence; identical to SEQ ID NO: 64674
  derived and/or modified CDS sequence (opt1) from hemagglutinin__InfluenzaA__ABJ09228

SEQ ID NO: 65391 - RNA, 1701 nt, Artificial Sequence
  derived and/or modified CDS sequence (opt1) from hemagglutinin__InfluenzaA__ABJ09239
augaagaccaucaucgcccugagcuacauccucugccugguguucgcccagaagcugcccggcaacgacaacuccaccgcgacgcucugccuggggcaccacgccgucccgaacggcacccuggugaagaccaucaccaacgaccagaucgaggugacgaacgccaccgagcucguccagagcuccagcaccgggggcaucugcgacagcccccaccagauccuggacggggagaacugcacccugaucgacgcccuccugggcgacccccacugcgacggcuuccagaacaaggagugggaccuguucguggagcgcagcaaggccuacuccaacugcuaccccuacgacgugccggacuacgcgagccuccggucccuggucgccagcuccgggacgauggaguucaacaacgagagcuucaacuggaccggcguggcccagaacgggaccuccagcgccugcaagcgccgguccaacaagagcuucuucucccgccugaacuggcuccaccagcugaaguacaaguaccccgcgcugaacgugaccaugcccaacaacgagaaguucgacaagcucuacaucuggggcguccaccaccccagcacggacuccgaccagaucagccuguacgcccaggccccggggcgggugaccgugagcaccaagcgcucccagcagaccgucauccccaacaucggcagccggcccugggugcgcggcguguccagccggaucuccaucuacuggacgaucgucaagcccggggacauccugcucaucaacugcaccggcaaccugaucgccccgcgcggguacuucaagauccggagcggcaaguccagcaucaugcgcuccgacgccagcaucggcaagugcaacuccgagugcaucacccccaacgggagcauccccaacgacaagcccuuccagaacgugaaccggaucaccuacggcgcgugcccgcgcuacgugaagcagaacacgcugaagcucgccaccgggaugcggaacguccccgagaagcagacccgcggcaucuucggggccaucgccggcuucaucgagaacggcugggaggggaugguggacggcugguacggguuccggcaccagaacuccgagggcaccgggcaggccgcggaccugaaguccacgcaggccgccaucaaccagaucaacggcaagcugaaccgccucaucgagaagaccaacgagaaguuccaccagaucgagaaggaguucuccgagguggagggccggauccaggaccuggagaaguacgucgaggacaccaagaucgaccuguggagcuacaacgccgagcuccugguggcccuggagaaccagcacaccaucgaccucacggacuccgagaugaacaagcuguucgagcgcaccaagaagcagcugcgggagaacgcggaggacauggggaacggcugcuucaagaucuaccacaagugcgacaacgccugcaucgggagcauccgcaacggcaccuacgaccacgacguguaccgcgacgaggcccucaacaaccgguuccagaucaagggggucgagcugaaguccggcuacaaggacuggauccuguggaucagcuucgccaucagcugcuuccuccugugcgugguccugcucggcuucaucaugugggccugccagaaggggaacauccgcugcaacaucugcaucuga

SEQ ID NO: 65392 - RNA, 1701 nt, Artificial Sequence
  derived and/or modified CDS sequence (opt1) from hemagglutinin__InfluenzaA__ABJ09250
augaagaccaucaucgcccugagcuacauccucugccugguguucgcccagaagcugcccggcaacgacaacuccaccgcgacgcucugccuggggcaccacgccgucccgaacggcacccuggugaagaccaucaccaacgaccagaucgaggugacgaacgccaccgagcucguccagagcuccagcaccgggcgcaucugcgacagcccccaccagauccuggacggcgagaacugcacccugaucgacgcccuccugggggacccccacugcgacggcuuccagaacaaggagugggaccuguucguggagcggagcaaggccuacuccaacugcuaccccuacgacgugccggacuacgcgagccuccgcucccuggucgccagcuccggcacgcuggaguucaacaacgagagcuucaacuggaccgggguggcccagaacggcaccuccagcgccugcaagcggcgcuccaacaagagcuucuucucccggcucaacuggcugcaccagcugaaguacaaguaccccgcgcucaacgugaccaugcccaacaacgagaaguucgacaagcuguacaucugggggauccaccaccccagcacggacuccgaccagaucagccuguacgcccaggccagcggccgcgucaccguguccaccaagcggagccagcagaccgugaucccgaacaucgggucccgccccuggguccggggcgugagcucccgcaucagcaucuacuggacgaucgugaagcccggcgacauccuccugaucaacuccaccgggaaccugaucgcgccccggggcuacuucaagauccgcagcgggaaguccagcaucaugcgguccgacgccccgaucggcaagugcaacagcgagugcaucacccccaacggcuccauccccaacgacaagcccuuccagaacgucaaccgcaucaccuacggggccugcccgcgguacgugaagcagaacacgcucaagcuggccaccggcaugcgcaacgugcccgagaagcagacccgggggaucuucggcgccaucgccggguucaucgagaacggcugggagggcauggucgacgggugguacggcuuccgccaccagaacagcgaggggaccggccaggccgcggaccugaaguccacgcaggccgccaucaaccagaucaacgggaagcucaaccggcugaucgagaagaccaacgagaaguuccaccagaucgagaaggaguucagcgagguggagggccgcauccaggaccuggagaaguacguggaggacaccaagaucgaccucugguccuacaacgccgagcugcuggucgcccucgagaaccagcacaccaucgaccugacggacagcgagaugaacaagcuguucgagcggaccaagaagcagcuccgcgagaacgcggaggacaugggcaacgggugcuucaagaucuaccacaagugcgacaacgccugcaucggcuccauccgcaacgagaccuacgaccacgacguguaccgggacgaggcccugaacaaccgcuuccagaucaaggggguggagcugaaguccggcuacaaggacuggauccucuggaucagcuucgccaucuccugcuuccugcugugcgucgugcuccugggguucaucaugugggccugccagaagggcaacauccggugcaacaucugcaucuga

SEQ ID NO: 65393 - RNA, 1701 nt, Artificial Sequence
  derived and/or modified CDS sequence (opt1) from hemagglutinin__InfluenzaA__ABJ09261
augaagaccaucaucgcccugagcuacauccucugccugguguucgcccagaagcugcccggcaacgacaacuccaccgcgacgcucugccuggggcaccacgccgucccgaacggcacccuggugaagaccaucaccaacgaccagaucgaggugacgaacgccaccgagcucguccagagcuccagcaccgggaagaucugcgacagcccccaccagauccuggacggcgagaacugcacccugaucgacgcccuccugggggacccccacugcgacggcuuccagaacaaggagugggaccuguucguggagcgcagcaaggccuacuccaacugcuaccccuacgacgugccggacuacgcgagccuccggucccuggucgccagcuccggcacgcuggaguucaacaacgagagcuucaacuggaccgggguggcccagaacggcaccuccagcgccugcaagcgccgguccaucaagagcuucuucucccgccucaacuggcugcaccagcugaaguacaaguaccccgcgcucaacgugaccaugcccaacaacgagaaguucgacaagcuguacaucuggggcguccaccaccccagcacggacuccgaccagaccagccuguacgcccaggccagcgggcgggugaccguguccaccaagcgcagccagcagacggucaucccgaacaucgggucccggcccugggugcgcggcgugagcucccggaucagcaucuacuggaccaucgucaagcccggcgacauccuccugaucaacuccaccgggaaccugaucgcgccccgcggcuacuucaagauccggagcgggaaguccagcaucaugcgcuccgacgccccgaucggcaagugcaacagcgagugcaucacccccaacggcuccauccccaacgacaagcccuuccagaacgugaaccggaucacguacggggccugcccgcgcuacgugaagcagaacacccucaagcuggccaccggcaugcggaacguccccgagaagcagacccgcgggaucuucggcgccaucgccggguucaucgagaacggcugggagggcaugguggacgggugguacggcuuccggcaccagaacagcgaggggacgggccaggccgcggaccugaaguccacccaggccgccaucaaccagaucaacgggaagcucaaccgccugaucgagaagaccaacgagaaguaccaccagaucgagaaggaguucagcgagguggagggccggauccaggaccuggagaaguacgucgaggacaccaagaucgaccucugguccuacaacgccgagcugcugguggcccucgagaaccagcacacgaucgaccugaccgacagcgagaugaacaagcuguucgagcgcacccggaagcagcuccgcgagaacgcggaggacaugggcaacgggugcuucaagaucuaccacaagugcgacaacgccugcaucggcuccauccgcaacgggaccuacgaccacgacguguaccgggacgaggcccugaacaaccgcuuccagaucaagggcgucgagcugaaguccggguacaaggacuggauccucuggaucagcuucgccaucuccugcuuccugcugugcgugguccuccugggcuucaucaugugggccugccagaagggcaacauccggugcaacaucugcaucuga

SEQ ID NO: 65394 - RNA, 1701 nt, Artificial Sequence
  derived and/or modified CDS sequence (opt1) from hemagglutinin__InfluenzaA__ABJ09272
augaagaccaucaucgcccugagcuacauccucugccugguguucgcccagaagcugcccggcaacgacaacuccaccgcgacgcucugccuggggcaccacgccgucccgaacggcacccuggugaagaccaucaccaacgaccagaucgaggugacgaacgccaccgagcucguccagagcuccagcaccgggcgcaucugcaacagcccccaccagauccuggacggcgagaacugcacccugaucgacgcccuccugggggacccccacugcgacggcuuccagaacaaggagugggaccuguucguggagcggcgcaaggccuacagcaacugcuaccccuacgacgugccggacuacgcgucccuccggagccuggucgccuccagcggcacgcuggaguucaacaacgaguccuucaacuggaccgggguggcccagaacggcaccagcuccgccugcaagcgccggagcaucaaguccuucuucagccgccucaacuggcugcaccagcugaaguacaaguaccccgcgcucaacgugaccaugcccaacaacgagaaguucgacaagcuguacaucuggggcguccaccaccccuccacggacagcgaccagaucucccuguacgcccaggccagcgggcgggugaccgugagcaccaagcgcucccagcagaccgucaucccgaacaucgggagccggcccugggugcgcggcguguccagccggaucuccaucuacuggacgaucgucaagcccggcgacauccuccugaucaacagcaccgggaaccugaucgcgccccgcggcuacuucaagauccgguccgggaaguccuccaucaugcgcagcgacgccccgaucggcaagugcaacuccgagugcaucacccccaacggcagcauccccaacgacaagcccuuccagaacgugaaccggaucaccuacggggccugcccgcgcuacgugaagcagaacacgcucaagcuggccaccggcaugcggaacguccccgagaagcagacccgcgggaucuucggcgccaucgccggguucaucgagaacggcugggagggcaugguggacgggugguacggcuuccggcaccagaacuccgaggggaccggccaggccgcggaccucaagagcacgcaggccgccaucaaccagaucaacgggaagcugaaccgccugaucgagaagaccaacgagaaguuccaccagaucgagaaggaguucuccgagguggagggccggauccaggaccuggagaaggacgucgaggacaccaagaucgaccucuggagcuacaacgccgagcugcugguggcccucgagaaccagcacaccaucgaccugacggacuccgagaugaacaagcuguucgagcgcaccaagaagcagcuccgcgagaacgcggaggacaugggcaacgggugcuucaagaucuaccacaagugcgacaacgccugcaucggcagcauccggaacgggaccuacgaccacgacguguaccgcgacgaggcccugaacaaccgguuccagaucaagggcgucgagcugaaguccggguacaaggacuggauccucuggaucagcuucgccaucagcugcuuccugcugugcgugguccuccugggcuucaucaugugggccugccagaagggcaacauccgcugcaacaucugcaucuga

SEQ ID NO: 65395 - RNA, 1701 nt, Artificial Sequence; identical to SEQ ID NO: 64096
  derived and/or modified CDS sequence (opt1) from hemagglutinin__InfluenzaA__ABJ09294

SEQ ID NO: 65396 - RNA, 1701 nt, Artificial Sequence
  derived and/or modified CDS sequence (opt1) from hemagglutinin__InfluenzaA__ABJ09305
augaagaccaucaucgcccugagcuacauccucugccugguguucgcccagaagcugcccggcaacgacaacuccaccgcgacgcucugccuggggcaccacgccgucccgaacggcacccuggugaagaccaucaccaacgaccagaucgaggugacgaacgccaccgagcucguccagagcuccagcaccgggcgcaucugcgacagcccccaccagauccuggacggcgagaacugcacccugaucgacgcccuccugggggacccccacugcgacggcuuccagaacaaggagugggaccuguucguggagcggagcaaggccuacuccaacugcuaccccuacgacgugccggacuacgcgagccuccgcucccuggucgccagcuccggcacgcuggaguucaacaacgagagcuucaacuggaccgggguggcccagaacggcaccuccagcgccugcaagcggcgcuccaacaagagcuucuucucccggcucaacuggcugcaccagcugaaguacaaguaccccgcgcucaacgugaccaugcccaacaacgagaaguucgacaagcuguacaucuggggcguccaccaccccagcacggacuccgaccagaucagccuguacgcccaggccagcgggcgcgugaccguguccaccaagcggagccagcagaccgucaucccgaacaucgggucccgccccugggugcggggcgugagcucccgcaucagcaucuacuggacgaucgucaagcccggcgacauccuccugaucaacuccaccgggaaccugaucgcgccccggggcuacuucaagauccgcagcgggaaguccagcaucaugcgguccgacgccccgaucggcaagugcaacagcgagugcaucacccccaacggcuccauccccaacgacaagcccuuccagaacgugaaccgcaucaccuacggggccugcccgcgguacgugaagcagaacacgcucaagcuggccaccggcaugcgcaacguccccgagaagcagacccgggggaucuucggcgccaucgccggguucaucgagaacggcugggagggcaugguggacgggugguacggcuuccgccaccagaacagcgaggggaccggccaggccgcggaccugaaguccacgcaggccgccaucaaccagaucaacgggaagcucaaccggcugaucgagaagaccaacgagaaguuccaccagaucgagaaggaguucagcgagguggagggccgcauccaggaccuggagaaguacgucgaggacaccaagaucgaccucugguccuacaacgccgagcugcugguggcccucgagaaccagcacaccaucgaccugacggacagcgagaugaacaagcuguucgagcggaccaagaagcagcuccgcgagaacgcggaggacaugggcaacgggugcuucaagaucuaccacaagugcgacaacgccugcaucggcuccauccgcaacgagaccuacgaccacgacguguaccgggacgaggcccugaacaaccgcuuccagaucaagggggucgagcugaaguccggcuacaaggacuggauccucuggaucagcuucgccaucuccugcuuccugcugugcgugguccuccugggguucaucaugugggccugccagaagggcaacauccggugcaacaucugcaucuga

SEQ ID NO: 65397 - RNA, 1701 nt, Artificial Sequence
  derived and/or modified CDS sequence (opt1) from hemagglutinin__InfluenzaA__ABJ09316
augaagaccaucaucgcccugagcuacauccucugccugguguucgcccagaagcugcccggcaacgacaacuccaccgcgacgcucugccuggggcaccacgccgucccgaacggcacccuggugaagaccaucaccaacgaccagaucgaggugacgaacgccaccgagcucguccagagcuccagcaccgggcgcaucugcgacagcccccaccagauccuggacggcgagaacugcacccugaucgacgcccuccugggggacccccacugcgacggcuuccagaacaaggagugggaccuguucguggagcggagcaaggccuacuccaacugcuaccccuacgacgugccggacuacgcgagccuccgcucccuggucgccagcuccggcacgcuggaguucaacaacgagagcuucaacuggaccgggguggcccagaacggcaccuccagcgccugcaagcggcgcuccaacaagagcuucuucucccggcucaacuggcugcaccagcugaaguacaaguaccccgcgcucaacgugaccaugcccaacaacgagaaguucgacaagcuguacaucuggggcguccaccaccccagcacggacuccgaccagaucagccuguacgcccaggccagcgggcgcgugaccguguccaccaagcggagccagcagaccgucaucccgaacaucgggucccgccacugggugcggggcgugagcucccgcaucagcaucuacuggacgaucgucaagcccggcgacauccuccugaucaacuccaccgggaaccugaucgcgccccggggcuacuucaagauccgcagcgggaaguccagcaucaugcgguccgacgccagcaucggcaagugcaacuccgagugcaucacccccaacggcagcaucccgaacgacaagcccuuccagaacgugaaccgcaucaccuacggggccugcccccgguacgugaagcagaacacgcucaagcuggccaccggcaugcgcaacguccccgagaagcagacccgggggaucuucggcgccaucgccggguucaucgagaacggcugggagggcaugguggacgggugguacggcuuccgccaccagaacuccgaggggaccggccaggccgcggaccugaaguccacgcaggccgccaucaaccagaucaacgggaagcucaaccggcugaucgagaagaccaacgagaaguuccaccagaucgagaaggaguucuccgagguggagggccgcauccaggaccuggagaaguacgucgaggacaccaagaucgaccucuggagcuacaacgccgagcugcugguggcccucgagaaccagcacaccaucgaccugacggacuccgagaugaacaagcuguucgagcggaccaagaagcagcuccgcgagaacgcggaggacaugggcaacgggugcuucaagaucuaccacaagugcgacaacgccugcaucggcagcauccgcaacgggaccuacgaccacgacguguaccgggacgaggcccugaacaaccgcuuccagaucaagggcgucgagcucaagagcggguacaaggacuggauccuguggaucuccuucgccaucagcugcuuccugcugugcgugguccuccugggcuucaucaugugggccugccagaagggcaacauccggugcaacaucugcaucuga

SEQ ID NO: 65398 - RNA, 1701 nt, Artificial Sequence; identical to SEQ ID NO: 64674
  derived and/or modified CDS sequence (opt1) from hemagglutinin__InfluenzaA__ABJ09338

SEQ ID NO: 65399 - RNA, 1701 nt, Artificial Sequence
  derived and/or modified CDS sequence (opt1) from hemagglutinin__InfluenzaA__ABJ09349
augaagaccaucaucgcccugagcuacauccucugccugguguucgcccagaagcugcccggcaacgacaacuccaccgcgacgcucugccuggggcaccacgccgucccgaacggcacccuggugaagaccaucaccaacgaccagaucgaggugacgaacgccaccgagcucauccagagcuccagcaccgggggcaucugcgacagcccccaccagauccuggacggggagaacugcacccugaucgacgcccuccugggcgacccccacugcgacggcuuccagaacaaggagugggaccuguucgucgagcgcagcaaggccuacuccaacugcuaccccuacgacgugccggacuacgcgagccuccggucccugguggccagcuccgggacgcuggaguucaacaacgagagcuucaacuggaccggcgucgcccagaacgggaccuccagcgccugcaagcgccgguccaacaagagcuucuucucccgccucaacuggcugcaccagcugaaguacaaguaccccgcgcucaacgugaccaugcccaacaacgagaaguucgacaagcuguacaucuggggcgugcaccaccccagcacggacuccgaccagaucagccuguacgcccaggccccggggcgggucaccgugagcaccaagcgcucccagcagaccgugauccccaacaucggcagccggcccuggguccgcggcguguccagccggaucuccaucuacuggacgaucgugaagcccggggacauccuccugaucaacugcaccggcaaccugaucgccccgcgcggguacuucaagauccggagcggcaaguccagcaucaugcgcuccgacgccagcaucggcaagugcaacuccgagugcaucacccccaacgggagcauccccaacgacaagcccuuccagaacgucaaccggaucaccuacggcgcgugcccgcgcuacgugaagcagaacacgcucaagcuggccaccgggaugcggaacgugcccgagaagcagacccgcggcaucuucggggccaucgccggcuucaucgagaacggcugggaggggauggucgacggcugguacggguuccggcaccagaacuccgagggcaccgggcaggccgcggaccugaaguccacgcaggccgccaucaaccagaucaacggcaagcucaaccgccugaucgagaagaccaacgagaaguuccaccagaucgagaaggaguucuccgagguggagggccggauccaggaccuggagaaguacguggaggacaccaagaucgaccucuggagcuacaacgccgagcugcuggucgcccucgagaaccagcacaccaucgaccugacggacuccgagaugaacaagcuguucgagcgcaccaagaagcagcuccgggagaacgcggaggacauggggaacggcugcuucaagaucuaccacaagugcgacaacgccugcaucgggagcauccgcaacggcaccuacgaccacgacguguaccgcgacgaggcccugaacaaccgguuccagaucaaggggguggagcugaaguccggcuacaaggacuggauccucuggaucagcuucgccaucagcugcuuccugcugugcgucgugcuccugggcuucaucaugugggccugccagaaggggaacauccgcugcaacaucugcaucuga

SEQ ID NO: 65400 - RNA, 1701 nt, Artificial Sequence; identical to SEQ ID NO: 64674
  derived and/or modified CDS sequence (opt1) from hemagglutinin__InfluenzaA__ABJ09360

SEQ ID NO: 65401 - RNA, 1701 nt, Artificial Sequence
  derived and/or modified CDS sequence (opt1) from hemagglutinin__InfluenzaA__ABJ09371
augaagaccaucaucgcccugagcuacauccucugccugguguucgcccagaagcugcccggcaacgacaacuccaccgcgacgcucugccuggggcaccacgccgucccgaacggcaccaucgugaagaccaucaccaacgaccagaucgaggugacgaacgccaccgagcugguccagagcuccagcaccgggggcaucugcgacagcccccaccagauccucgacggggagaacugcacccugaucgacgcccugcucggcgacccccagugcgacggcuuccagaacaagaagugggaccuguucguggagcgcagcaaggccuacuccaacugcuaccccuacgacgugccggacuacgcgagccugcggucccucaucgccagcuccgggacgcuggaguucaacaacgagagcuucaacuggaccggcgucacccagaacgggaccuccagcgccugcaagcgccgguccaacagcuccuucuucagccgccugaacuggcucacgcaccugaaguucaaguaccccgcccugaacgugaccaugcccaacaacgaggaguucgacaagcucuacaucuggggcgugcaccaccccgggaccuacaacgaccagaucucccuguacgcgcaggccagcggccggaucaccgucagcacgaagcgcucccagcagaccgugaucccgaacaucggcagccggcugcgcgugcgggacauccccucccgcaucagcaucuacuggaccaucgucaagcccggggacauccuccugaucaacuccaccggcaaccugaucgcgccccggggguacuucaagauccgcagcggcaaguccagcaucaugcgguccgacgccccgaucggcaagugcaacagcgagugcaucacgcccaacggguccauccccaacgacaagcccuuccagaacgugaaccgcaucaccuacggcgccugcccgcgguacgugaagcagaacacccucaagcuggccaccgggaugcgcaacguccccgagaagcagacgcggggcaucuucggggccaucgccggcuucaucgagaacggcugggaggggaugguggacggcugguacggguuccgccaccagaacagcgagggcaucgggcaggccgccgaccugaaguccacccaggcggccaucgaccagaucaacggcaagcucaaccggcugaucggcaagaccaacgagaaguuccaccagaucgagaaggaguucagcgagguggaggggcgcauccaggaccuggagaaguacgucgaggacaccaagaucgaccucugguccuacaacgccgagcugcugguggcccucgagaaccagcacacgaucgaccugaccgacagcgagaugaacaagcuguucgagcggaccaagaagcagcuccgcgagaacgccgaggacaugggcaacgggugcuucaagaucuaccacaagugcgacaacgcgugcaucggcuccauccgcaacgggaccuacgaccacgacguguaccgggacgaggcccugaacaaccgcuuccagaucaagggcgucgagcugaaguccggcuacaaggacuggauccucuggaucuccuucgccaucagcugcuuccugcugugcguggcccuccugggguucaucaugugggccugccagaagggcaacauccggugcaacaucugcaucuga

SEQ ID NO: 65402 - RNA, 1701 nt, Artificial Sequence; identical to SEQ ID NO: 64657
  derived and/or modified CDS sequence (opt1) from hemagglutinin__InfluenzaA__ABJ09382

SEQ ID NO: 65403 - RNA, 1701 nt, Artificial Sequence
  derived and/or modified CDS sequence (opt1) from hemagglutinin__InfluenzaA__ABJ16587
augaagaccaucaucgcccugagcuacaucuccugccucguguucgcccagaagcugcccggcaacgacaacagcaccgcgacgcugugccucgggcaccacgccgucccgaacggcacccuggugaagaccaucaccaacgaccagaucgaggugacgaacgccaccgagcugguccaguccagcuccaccgggcgcaucugcgacagcccccaccagauccucgacggcgagaacugcacccugaucgacgcccugcucggggacccccacugcgacggcuuccagaacaaggagugggaccuguucguggagcgguccaaggccuacagcaacugcuaccccuacgacgugccggacuacgcgucccugcgcagccucgucgccuccagcggcacgcuggaguucaacaacgaguccuucaacuggaccgggguggcccagaacggcaccagcuccgccugcaagcggcgcagcaucaaguccuucuucagccggcugaacuggcuccaccagcugaaguaccgcuaccccgcgcugaacgugaccaugcccaacaacgacaaguucgacaagcucuacaucuggggcguccaccaccccuccacggacagcgaccagaccagccuguacgcccaggccuccgggcgggugaccgugagcaccaagcgcucccagcagacggucaucccgaacaucgggagccggcccugggugcgcggcguguccagccggaucuccaucuacuggaccaucgucaagcccggcgacauccugcucaucaacagcaccgggaaccugaucgcgccccgcggcuacuucaagauccgguccggcaagagcuccaucaugcgcagcgacgccccgaucgggaagugcaacuccgagugcaucacccccaacggcagcauccccaacgacaagcccuuccagaacgugaaccggaucacguacggggccugcccgcgcuacgugaagcagaacacccugaagcucgccaccggcaugcggaacguccccgagaagcagacccgcgggaucuucggcgccaucgccggguucaucgagaacggcugggagggcaugauggacgggugguacggcuuccggcaccagaacuccgaggggacgggccaggccgcggaccucaagagcacccaggccgccaucaaccagaucaacgggaagcugaaccgccugaucgagaagaccaacgagaaguuccaccagaucgagaaggaguucuccgagguggagggccggauccaggaccuggagaaguacguggaggacaccaagaucgaccuguggagcuacaacgccgagcuccuggucgcccuggagaaccagcacacgaucgaccucaccgacuccgagaugaacaagcuguucgagcgcacccgcaagcagcugcgggagaacgcggaggacaugggcaacgggugcuucaagaucuaccacaagugcgacaacgccugcaucggcagcauccgcaacgggaccuacgaccacgacguguaccgggacgaggcccucaacaaccgcuuccagaucaagggcguggagcucaagagcggguacaaggacuggauccuguggaucuccuucgccaucagcugcuuccugcugugcgucgugcugcucggcuucaucaugugggccugccagaagggcaacauccggugcaacaucugcaucuga

SEQ ID NO: 65404 - RNA, 1701 nt, Artificial Sequence
  derived and/or modified CDS sequence (opt1) from hemagglutinin__InfluenzaA__ABJ16598
augaagaccaucaucgcccugagcuacauccucugccugguguucgcccagaagcugcccggcaacgacaacuccaccgcgacgcucugccuggggcaccacgccgucccgaacggcacccuggugaagaccaucaccaacgaccagaucgaggugacgaacgccaccgagcucguccagagcuccagcaccgggcgcaucugcaacagcccccaccagauccuggacggcgagaacugcacccugaucgacgcccuccugggggacccccacugcgacggcuuccagaacaaggagugggaccuguucguggagcggagcaaggccuacuccaacugcuaccccuacgacgugccggacuacgcgagccuccgcucccuggucgccagcuccggcacgcuggaguucaacaacgagagcuucaacuggaccgggguggcccagaacggcaccuccagcgccugcaagcggcgcuccaucaagagcuucuucucccggcucaacuggcugcaccagcugaaguacaaguaccccgcgcucaacgugaccaugcccaacaacgagaaguucgacaagcuguacaucuggggcguccaccaccccagcacggacuccgaccagaucagccuguacgcccaggccagcgggcgcgugaccguguccaccaagcggagccagcagaccgucaucccgaacaucgggucccgccccugggugcggggcgugagcucccgcaucagcaucuacuggacgaucgucaagcccggcgacauccuccugaucaacuccaccgggaaccugaucgcgccccggggcuacuucaagauccgcagcgggaaguccagcaucaugcgguccgacgccccgaucggcaagugcaacagcgagugcaucacccccaacggcuccauccccaacgacaagcccuuccagaacgugaaccgcaucaccuacggggccugcccgcgguacgugaagcagaacacgcucaagcuggccaccggcaugcgcaacguccccgagaagcagacccgggggaucuucggcgccaucgccggguucaucgagaacggcugggagggcaugguggacgggugguacggcuuccgccaccagaacagcgaggggaccggccaggccgcggaccugaaguccacgcaggccgccaucaaccagaucaacgggaagcucaaccggcugaucgagaagaccaacgagaaguuccaccagaucgagaaggaguucagcgagguggagggccgcauccaggaccuggagaaguacgucgaggacaccaagaucgaccucugguccuacaacgccgagcugcugguggcccucgagaaccagcacaccaucgaccugacggacagcgagaugaacaagcuguucgagcggaccaagaagcagcuccgcgagaacgcggaggacaugggcaacgggugcuucaagaucuaccacaagugcgacaacgccugcaucggcuccauccgcaacgggaccuacgaccacgacguguaccgggacgaggcccugaacaaccgcuuccagaucaagggcgucgagcugaaguccggguacaaggacuggauccucuggaucagcuucgccaucuccugcuuccugcugugcgugguccuccugggcuucaucaugugggccugccagaagggcaacauccggugcaacaucugcaucuga

SEQ ID NO: 65405 - RNA, 1701 nt, Artificial Sequence
  derived and/or modified CDS sequence (opt1) from hemagglutinin__InfluenzaA__ABJ16620
augaagaccaucaucgcccugagcuacauccucugccugguguucgcccagaagcugcccggcaacgacaacuccaccgcgacgcucugccuggggcaccacgccgucccgaacggcacccuggugaagaccaucaccaacgaccagaucgaggugacgaacgccaccgagcucguccagagcuccagcaccgggcgcaucugcaacagcccccaccagauccuggacggcgagaacugcacccugaucgacgcccuccugggggacccccacugcgacggcuuccagaacaaggagugggaccuguucguggagcggaacaaggccuacagcaacugcuaccccuacgacgugccggacuacgcgucccuccgcagccuggucgccuccagcggcacgcuggaguucaacaacgaguccuucaacuggaccgggguggcccagaacggcaccagcuccgccugcaagcggcgcagcaucaaguccuucuucagccggcucaacuggcugcaccagcugaaguacaaguaccccgcgcucaacgugaccaugcccaacaacgagaaguucgacaagcuguacaucuggggcguccaccaccccuccacggacagcgaccagaucucccuguacgcccaggccagcgggcgcgugaccgugagcaccaagcggucccagcagaccgucaucccgaacaucgggagccgccccugggugcggggcguguccagccgcaucuccaucuacuggacgaucgucaagcccggcgacauccuccugaucaacagcaccgggaaccugaucgcgccccggggcuacuucaagauccgcuccgggaaguccuccaucaugcggagcgacgccccgaucggcaagugcaacuccgagugcaucacccccaacggcagcauccccaacgacaagcccuuccagaacgugaaccgcaucaccuacggggccugcccgcgguacgugaagcagaacacgcucaagcuggccaccggcaugcgcaacguccccgagaagcagacccgggggaucuucggcgccaucgccggguucaucgagaacggcugggagggcaugguggacgggugguacggcuuccgccaccagaacuccgaggggaccggccaggccgcggaccucaagagcacgcaggccgccaucaaccagaucaacgggaagcugaaccggcugaucgagaagaccaacaagaaguuccaccagaucgagaaggaguucuccgagguggagggccgcauccaggaccuggagaaguacgucgaggacaccaagaucgaccucuggagcuacaacgccgagcugcugguggcccucgagaaccagcacaccaucgaccugacggacuccgagaugaacaagcuguucgagcggaccaagaagcagcuccgcgagaacgcggaggacaugggcaacgggugcuucaagaucuaccacaagugcgacaacgccugcaucggcagcauccgcaacgggaccuacgaccacgacguguaccgggacgaggcccugaacaaccgcuuccagaucaagggcgucgagcugaaguccggguacaaggacuggauccucuggaucagcuucgccaucagcugcuuccugcugugcgugguccuccugggcuucaucaugugggccugccagaagggcaacauccggugcaacaucugcaucuga

SEQ ID NO: 65406 - RNA, 1701 nt, Artificial Sequence
  derived and/or modified CDS sequence (opt1) from hemagglutinin__InfluenzaA__ABJ16631
augaagaccaucaucgcccugagcuacauccucugccugguguucgcccagaagcugcccggcaacgacaacuccaccgcgacgcucugccuggggcaccacgccgucccgaacggcaccaucgugaagaccaucaccaacgaccagaucgaggugacgaacgccaccgagcugguccagagcuccagcaccgggggcaucugcgacagcccccaccagauccucgacggggagaacugcacccugaucgacgcccugcucggcgacccccagugcgacggcuuccagaacaagaagugggaccuguucguggagcgcagcaaggccuacuccaacugcuaccccuacgacgugccggacuacgcgagccugcggucccucaucgccagcuccgggacgcuggaguucaacaacgagagcuucaacuggaccggcgucacccagaacgggaccuccagcgccugcaagcgccgguccaacagcuccuucuucagccgccugaacuggcucacgcaccugaaguucaaguaccccgcccugaacgugaccaugcccaacaacgaggaguucgacaagcucuacaucuggggcgugcaccaccccgggaccuacaacgaccagaucucccuguacgcgcaggccagcggccggaucaccgucagcacgaagcgcucccagcagaccgugaucccgaacaucggcagccggccccgcgugcgggacauccccucccgcaucagcaucuacuggaccaucgucaagcccggggacauccugcucaucaacuccaccggcaaccugaucgccccgcggggguacuucaagauccgcagcggcaaguccagcaucaugcgguccgacgcccccaucggcaagugcaacagcgagugcaucacgcccaacggguccauccccaacgacaagccguuccagaacgugaaccgcaucaccuacggcgccugcccccgguacgugaagcagaacacccugaagcucgcgaccgggaugcgcaacguccccgagaagcagacgcggggcaucuucggggccaucgccggcuucaucgagaacggcugggaggggaugguggacggcugguacggguuccgccaccagaacagcgagggcaucgggcaggccgccgaccugaaguccacccaggcggccaucgaccagaucaacggcaagcugaaccggcucaucggcaagaccaacgagaaguuccaccagaucgagaaggaguucagcgagguggaggggcgcauccaggaccuggagaaguacgucgaggacaccaagaucgaccugugguccuacaacgccgagcuccugguggcccuggagaaccagcacacgaucgaccucaccgacagcgagaugaacaagcuguucgagaagaccaagaagcagcugcgggagaacgccgaggacaugggcaacgggugcuucaagaucuaccacaagugcgacaacgcgugcaucggcuccauccgcaacgggaccuacgaccacgacguguaccgcgacgaggcccucaacaaccgguuccagaucaagggcgucgagcugaaguccggcuacaaggacuggauccuguggaucuccuucgccaucagcugcuuccuccugugcguggcccugcucggguucaucaugugggccugccagaagggcaacauccgcugcaacaucugcaucuga

SEQ ID NO: 65407 - RNA, 1698 nt, Artificial Sequence
  derived and/or modified CDS sequence (opt1) from hemagglutinin__InfluenzaA__ABJ16664
augaaggugaagcugcucguccugcugugcaccuucaccgccacguacgccgacaccaucugcaucggcuaccacgcgaacaacagcaccgacaccguggacacggugcucgagaagaacgucaccgugacccacuccgugaaccugcuggaggacagccacaacgggaagcucugccugcugaagggcaucgcgccccuccagcuggggaacugcuccgucgccggcuggauccuggggaacccggagugcgagcuccugaucagcaaggaguccuggagcuacaucguggagacccccaaccccgagaacggcacgugcuaccccggccacuucgccgacuacgaggagcugcgcgagcagcucuccagcguguccagcuucgagcgguucgagaucuucccgaaggaguccagcuggcccaaccacaccgucaccgggguguccgccagcugcucccacaacggcaagagcuccuucuaccgcaaccugcuguggcucaccgggaagaacggccuguaccccaaccugagcaaguccuacgccaacaacaaggagaaggaggugcucguccuguggggcgugcaccacccgcccaacaucggggaccagcgggcccuguaccacacggagaacgccuacgugagcgucgugagcucccacuacagccgccgguucacccccgagaucgccaagcgccccaaggugcgggaccaggagggccgcaucaacuacuacuggacccuccuggagcccggggacaccaucaucuucgaggcgaacggcaaccugaucgccccgcgguucgccuucgcccucucccgcggguucggcagcggcaucaucacguccaacgcccccauggacgagugcgacgcgaagugccagacgccccagggggccaucaacagcucccugcccuuccagaacguccacccggugaccaucggcgagugccccaaguacgugcggagcgccaagcugcgcauggucaccgggcuccggaacauccccuccauccagagccgcggccuguucggggccaucgccggcuucaucgagggcggguggaccggcaugguggacgggugguacggcuaccaccaccagaacgagcagggguccggcuacgcggccgaccagaaguccacccagaacgccaucaacggcaucaccaacaaggugaacagcgucaucgagaagaugaacacccaguucacggccguggggaaggaguucaacaagcuggagcggcgcauggagaaccucaacaagaaggucgacgacggcuuccuggacaucuggaccuacaacgccgagcugcucgugcugcuggagaacgagcggacccucgacuuccacgacagcaacgugaagaaccuguacgagaaggucaagucccagcugaagaacaacgcgaaggagaucgggaacggcugcuucgaguucuaccacaagugcaacgacgagugcauggagagcgugaagaacgggaccuacgacuaccccaaguacuccgaggagagcaagcucaaccgcgagcggaucgacggcgugaagcuggaguccaugggcgucuaccagauccuggccaucuacagcacgguggccagcucccucgugcugcuggucagccucggggccaucuccuucuggaugugcagcaacggcucccugcagugccgcaucugcaucuga

SEQ ID NO: 65408 - RNA, 1698 nt, Artificial Sequence; identical to SEQ ID NO: 65228
  derived and/or modified CDS sequence (opt1) from hemagglutinin__InfluenzaA__ABJ16675

SEQ ID NO: 65409 - RNA, 1698 nt, Artificial Sequence
  derived and/or modified CDS sequence (opt1) from hemagglutinin__InfluenzaA__ABJ16686
augaaggugaagcugcucguccugcugugcaccuucaccgccacguacgccgacaccaucugcaucggcuaccacgcgaacaacagcaccgacaccguggacacggugcucgagaagaacgucaccgugacccacuccgugaaccugcuggaggacagccacaacgggaagcucugccugcugaagggcaucgcgccccuccagcuggggaacugcuccgucgccggcuggauccuggggaacccggagugcgagcuccugaucagcaaggaguccuggagcuacaucguggagacccccaaccccgagaacggcacgugcuaccccggcuacuucgccgacuacgaggagcugcgcgagcagcucuccagcguguccagcuucgagcgguucgagaucuucccgaaggaguccagcuggcccaaccacaccgucaccgggguguccgccagcugcucccacaacggcaagagcuccuucuaccgcaaccugcuguggcucaccgggaagaacggccuguaccccaaccugagcaaguccuacgccaacaacaaggagaaggaggugcucguccuguggggcgugcaccacccgcccaacaucggggaccagcgggcccuguaccacacggagaacgccuacgugagcgucgugagcucccacuacagccgccgguucacccccgagaucgccaagcgccccaaggugcgggaccaggagggccgcaucaacuacuacuggacccuccuggagcccggggacaccaucaucuucgaggcgaacggcaaccugaucgccccgcgguucgccuucgcccucucccgcggguucggcagcggcaucaucacguccaacgcccccauggacgagugcgacgcgaagugccagacgccccagggggccaucaacagcucccugcccuuccagaacguccacccggugaccaucggcgagugccccaaguacgugcggagcgccaagcugcgcauggccaccgggcuccggaacauccccuccauccagagccgcggccuguucggggccaucgcgggcuucaucgagggcggguggaccggcauggucgacgggugguacggcuaccaccaccagaacgagcagggguccggcuacgccgccgaccagaaguccacccagaacgccaucaacggcaucaccaacaaggugaacagcgugaucgagaagaugaacacccaguucacggccgucgggaaggaguucagcaagcuggagcggcgcauggagaaccucaacaagaagguggacgacggcuuccuggacaucuggaccuacaacgcggagcugcucguccugcuggagaacgagcggacccucgacuuccacgacuccaacgugaagaaccuguacgagaaggucaagagccagcugaagaacaacgccaaggagaucgggaacggcugcuucgaguucuaccacaagugcaacgacgagugcauggaguccgugaagaacgggaccuacgacuaccccaaguacagcgaggaguccaagcucaaccgcgagaagaucgacggcgugaagcuggagagcaugggcguguaccagauccuggccaucuacagcacggucgccuccagccucgugcugcuggugucccucggggccaucagcuucuggaugugcuccaacggcagccugcagugccggaucugcaucuga

SEQ ID NO: 65410 - RNA, 1701 nt, Artificial Sequence
  derived and/or modified CDS sequence (opt1) from hemagglutinin__InfluenzaA__ABJ16697
augaagaccaucaucgcccugagcuacauccucugccugguguucgcccagaagcugcccggcaacgacaacuccaccgcgacgcucugccuggggcaccacgccgucccgaacggcacccuggugaagaccaucaccaacgaccagaucgaggugacgaacgccaccgagcucguccagagcuccagcaccgggggcaucugcgacagcccccaccagauccuggacggggagaacugcacccugaucgacgcccuccugggcgacccccacugcgacggcuuccagaacaaggagugggaccuguucguggagcgcagcaaggccuacuccaacugcuaccccuacgacgugccggacuacgcgagccuccggucccuggucgccagcuccgggacgcuggaguucaacaacgagagcuucaacuggaccggcguggcccagaacgggaccuccagcgccugcaagcgccgguccaacaagagcuucuucucccgccucaacuggcugcaccagcugaaguacaaguaccccgcgcucaacgugaccaugcccaacaacgagaaguucgacaagcuguacaucuggggcguccaccaccccagcacggacuccgaccagaucagccuguacgcccaggccccggggcgggugaccgugagcaccaagcgcucccagcagaccgucauccccaacaucggcagccggcccugggugcgcggcguguccagccggaucuccaucuacuggacgaucgucaagcccggggacauccuccugaucaacugcaccggcaaccugaucgccccgcgcggguacuucaagauccggagcggcaaguccagcaucaugcgcuccgacgccagcaucggcaagugcaacuccgagugcaucacccccaacgggagcauccccaacgacaagcccuuccagaacgugaaccggaucaccuacggcgcgugcccgcgcuacgugaagcagaacacgcucaagcuggccaccgggaugcggaacguccccgagaagcagacccgcggcaucuucggggccaucgccggcuucaucgagaacggcugggaggggaugguggacggcugguacggguuccggcaccagaacuccgagggcaccgggcaggccgcggaccugaaguccacgcaggccgccaucaaccagaucaacggcaagcucaaccgccugaucgagaagaccaacgagaaguuccaccagaucgagaaggaguucuccgagguggagggccggauccaggaccuggagaaguacgucgaggacaccaagaucgaccucuggagcuacaacgccgagcugcugguggcccucgagaaccagcacaccaucgaccugacggacuccgagaugaacaagcuguucgagcgcaccaagaagcagcuccgggagaacgcggaggacauggggaacggcugcuucaagaucuaccacaagugcgacaacgccugcaucgggagcauccgcaacggcaccuacgaccacgacguguaccgcgacgaggcccugaacaaccgguuccagaucaagggggucgagcugaaguccggcuacaaggacuggauccucuggaucagcuucgccaucagcugcuuccugcugugcgccgugcuccugggcuucaucaugugggcgugccagaaggggaacauccgcugcaacaucugcaucuga

SEQ ID NO: 65411 - RNA, 1701 nt, Artificial Sequence
  derived and/or modified CDS sequence (opt1) from hemagglutinin__InfluenzaA__ABJ16730
augaaggccaagcugcucgugcugcugugcgccuucaccgcgaccuacgccgacacgaucugcaucggcuaccacgccaacaacagcaccgacaccgucgacaccgugcucgagaagaacgugacggucacccacuccgugaaccugcuggaggacagccacaacgggaagcucugccgccugaagggcaccgcgccccugcagcucgggaacugcuccaucgccggcuggauccuggggaacccggagugcgagagccuguucuccaaggagagcugguccuacaucgccgagacccccaaccccaagaacggcacgugcuaccccggcuacuucgccgacuacgaggagcuccgggagcagcugagcuccgugagcuccuucgagcgcuucgagaucuucccgaaggacagcuccuggcccaaccacaccgucaccaagggggugaccgccagcugcucccacaacggcaagagcuccuucuacaagaaccugcucuggcugacggagaagaacgggcuguaccccaaccucagcaaguccuacgugaacaagaagggcaaggagguccuggugcuguggggcgugcaccaccccagcaacaugggggaccagcgggccaucuaccacaaggagaacgcguacgucagcgugcucuccagccacuacucccgccgguucaccccggagaucgcccgccggcccaaggugcgcgaccaggagggccggaucaacuacuacuggacccugcuggagcccggggacaccaucaucuucgaggccaacggcaaccucaucgcccccugguacgccuucgcgcugagccgcggguucggcuccggcaucaucaucagcaacgccuccaugggggagugcgacgccaagugccagacgccgcagggcgccaucaacagcucccugcccuuccagaacguccaccccgugaccaucggggagugccccaaguacgugcggagcaccaagcuccgcauggucaccggccugcggaacgugccguccauccagagccgcgggcuguucggcgccaucgcgggcuucaucgagggcggguggacggggaugaucgacggcugguacggguaccaccaccagaacgagcagggcuccggcuacgccgccgaccagaaguccacccagaacgccaucaacgggaucaccaacaaggugaacagcaucaucgagaagaugaacacccaguucacggccgucggcaaggaguucaacaagcucgagcggcgcauggagaaccugaacaagaagguggacgacggguuccuggacaucuggaccuacaacgcggagcuccuggugcugcucgagaacgagcggacccuggacuuccacgacagcaacgucaagaaccuguacgagaaggugaagaaccagcucaagaacaacgccaaggagaucggcaacgggugcuucgaguucuaccacaagugcaacaacgagugcauggaguccgucaagaacggcaccuacgacuaccccaaguacagcaaggaguccaagcugaaccgcgagaagaucgacggcgugaagcuggagagcauggggguguaccagauccucgccaucuacagcacggucgccuccagccuggugcugcucgugucccugggcgccaucagcuucuggaugugcuccaacgggagccugcagugccggaucugcaucuga

SEQ ID NO: 65412 - RNA, 1701 nt, Artificial Sequence
  derived and/or modified CDS sequence (opt1) from hemagglutinin__InfluenzaA__ABJ16741
augaagaccaucaucgcccugagcuacauccucugccugguguucgcccagaagcugcccggcaacgacaacuccaccgcgacgcucugccuggggcaccacgccgucccgaacggcacccuggugaagaccaucaccaacgaccagaucgaggugacgaacgccaccgagcucguccagagcuccagcaccgggggcaucugcgacagcccccaccagauccuggacggggagaacugcacccugaucgacgcccuccugggcgacccccacugcgacggcuuccagaacaaggagugggaccuguucguggagcgcagcaaggccuacuccaacugcuaccccuacgacgugccggacuacgcgagccuccggucccuggucgccagcuccgggacgcuggaguucaacaacgagagcuucaacuggaccggcguggcccagaacgggaccuccagcgccugcaagcgccgguccaacaagggcuucuucagccgccucaacuggcugcaccagcugaaguacaaguaccccgcgcucaacgugaccaugcccaacaacgagaaguucgacaagcuguacaucuggggcguccaccaccccuccacggacagcgaccagaucucccuguacgcccaggccccggggcgggugaccgugagcaccaagcgcagccagcagaccgucauccccaacaucggcucccggcccugggugcgcggggugagcuccaucaucagcaucuacuggacgaucgucaagcccggcgacauccuccugaucaacugcaccgggaaccugaucgccccgcggggcuacuucaagauccgcuccggcaagagcuccaucaugcggagcgacgccuccaucgggaagugcaacagcgagugcaucacccccaacggcuccauccccaacgacaagcccuuccagaacgugaaccgcaucaccuacggggcgugcccgcgguacgugaagcagaacacgcucaagcuggccaccggcaugcgcaacguccccgagaagcagacccgggggaucuucggcgccaucgccggcuucaucgagaacgggugggagggcaugguggacgggugguacggcuuccgccaccagaacagcgaggggaccggccaggccgcggaccugaaguccacgcaggccgccaucaaccagaucaacggcaagcucaaccggcugaucgggaagaccaacgagaaguuccaccagaucgagaaggaguucagcgagguggagggccgcauccaggaccuggagaaguacgucgaggacaccaagaucgaccucugguccuacaacgccgagcugcugguggcccucgagaaccagcacaccaucgaccugacggacagcgagaugaacaagcuguucgagcggaccaagaagcagcuccgcgagaacgcggaggacauggggaacggcugcuucaagaucuaccacaagugcgacaacgccugcaucggguccauccggaacggcaccuacgaccacgacguguaccgcgacgaggcccugaacaaccgcuuccagaucaagggcgucgagcugaaguccggguacaaggacuggauccucuggaucuccuucgccaucagcugcuuccugcugugcgugguccuccugggcuucaucaugugggccugccagaaggggaacauccggugcaacaucugcaucuga

SEQ ID NO: 65413 - RNA, 1701 nt, Artificial Sequence
  derived and/or modified CDS sequence (opt1) from hemagglutinin__InfluenzaA__ABJ16752
augaagaccaucaucgcccugagcuacauccucugccugguguucgcccagaagcugcccggcaacgacaacuccaccgcgacgcucugccuggggcaccacgccgucccgaacggcacccuggugaagaccaucaccaacgaccagaucgaggugacgaacgccaccgagcucguccagagcuccagcaccgggggcaucugcgacagcccccaccagauccuggacggggagaacugcacccugaucgacgcccuccugggcgacccccacugcgacggcuuccagaacaaggagugggaccuguucguggagcgcagcaaggccuacuccaacugcuaccccuacgacgugccggacuacgcgagccuccggucccuggucgccagcuccgggacgcuggaguucaacaacgagagcuucaacuggaccggcguggcccagaacgggaccuccagcgccugcaagcgccgguccaacaagagcuucuucucccgccucaacuggcugcaccagcugaaguacaaguaccccgcgcucaacgugaccaugcccaacaacgagaaguucgacaagcuguacaucuggggcguccaccaccccagcacggacuccgaccagaucagccuguacgcccaggccccggggcgggugaccgugagcaccaagcgcucccagcagaccgucauccccaacaucggcagccggcccugggugcgcggcguguccagcgggaucuccaucuacuggacgaucgucaagcccggcgacauccuccugaucaacugcaccgggaaccugaucgccccgcggggcuacuucaagauccgcagcggcaaguccagcaucaugcgguccgacgccagcaucgggaagugcaacuccgagugcaucacccccaacggcagcauccccaacgacaagcccuuccagaacgugaaccgcaucaccuacggggcgugcccgcgguacgugaagcagaacacgcucaagcuggccaccggcaugcgcaacguccccgagaagcagacccgggggaucuucggcgccaucgccggcuucaucgagaacgggugggagggcaugguggacgggugguacggcuuccgccaccagaacuccgaggggaccggccaggccgcggaccugaaguccacgcaggccgccaucaaccagaucaacggcaagcucaaccggcugaucgagaagaccaacgagaaguuccaccagaucgagaaggaguucuccgagguggaggggcgcauccaggaccuggagaaguacgucgaggacaccaagaucgaccucuggagcuacaacgccgagcugcugguggcccucgagaaccagcacaccaucgaccugacggacuccgagaugaacaagcuguucgagcggaccaagaagcagcuccgcgagaacgcggaggacaugggcaacgggugcuucaagaucuaccacaagugcgacaacgccugcaucggcagcauccggaacgggaccuacgaccacgacguguaccgcgacgaggcccugaacaaccgcuuccagaucaagggcgucgagcugaaguccggcuacaaggacuggauccucuggaucagcuucgccaucagcugcuuccugcugugcgugguccuccugggguucaucaugugggccugccagaagggcaacauccggugcaacaucugcaucuga

SEQ ID NO: 65414 - RNA, 1701 nt, Artificial Sequence
  derived and/or modified CDS sequence (opt1) from hemagglutinin__InfluenzaA__ABJ16763
augaagaccaucaucgcccugagcuacauccucugccugguguucgcccagaagcugcccggcaacgacaacuccaccgcgacgcucugccuggggcaccacgccgucccgaacggcacccuggugaagaccaucaccaacgaccagaucgaggugacgaacgccaccgagcucguccagagcuccagcaccgggggcaucugcgacagcccccaccagauccuggacggggagaacugcacccugaucgacgcccuccugggcgacccccacugcgacggcuuccagaacaaggagugggaccuguucguggagcgcagcaaggccuacuccaacugcuaccccuacgacgugccggacuacgcgagccuccggucccuggucgccagcuccgggacgcuggaguucaacaacgagagcuucaacuggaccggcguggcccagaacgggaccuccagcgccugcaagcgccgguccaacaagagcuucuucucccgccucaacuggcugcaccagcugaaguacaaguaccccgcgcucaacgugaccaugcccaacaacgagaaguucgacaagcuguacaucuggggcguccaccaccccagcacggacuccgaccagaucagccuguacgcccaggccccggggcgggugaccgugagcaccaagcgcucccagcagaccgucauccccaacaucggcagccggcacugggugcgcggcguguccagccggaucuccaucuacuggacgaucgucaagcccggggacauccuccugaucaacugcaccggcaaccugaucgcgccccgcggguacuucaagauccggagcggcaaguccagcaucaugcgcuccgacgccagcaucggcaagugcaacuccgagugcaucaccccgaacgggagcauccccaacgacaagcccuuccagaacgugaaccggaucaccuacggcgccugcccccgcuacgugaagcagaacacgcucaagcuggccaccgggaugcggaacgucccggagaagcagacccgcggcaucuucggggccaucgccggcuucaucgagaacggcugggaggggaugguggacggcugguacggguuccggcaccagaacuccgagggcaccgggcaggccgcggaccugaaguccacgcaggccgccaucaaccagaucaacggcaagcucaaccgccugaucgagaagaccaacgagaaguuccaccagaucgagaaggaguucuccgagguggagggccggauccaggaccuggagaaguacgucgaggacaccaagaucgaccucuggagcuacaacgccgagcugcugguggcccucgagaaccagcacaccaucgaccugacggacuccgagaugaacaagcuguucgagcgcaccaagaagcagcuccgggagaacgcggaggacauggggaacggcugcuucaagaucuaccacaagugcgacaacgccugcaucgggagcauccgcaacggcaccuacgaccacgacguguaccgcgacgaggcccugaacaaccgguuccagaucaagggggucgagcugaaguccggcuacaaggacuggauccucuggaucagcuucgccaucagcugcuuccugcugugcgugguccuccugggcuucaucaugugggccugccagaaggggaacauccgcugcaacaucugcaucuga

SEQ ID NO: 65415 - RNA, 1701 nt, Artificial Sequence
  derived and/or modified CDS sequence (opt1) from hemagglutinin__InfluenzaA__ABJ16774
augaagaccaucaucgcccugagcuacauccucugccugguguucgcccagaagcugcccgucaacgacaacuccaccgcgacgcucugccugggccaccacgccgugccgaacgggacccuggugaagaccaucaccaacgaccacaucgaggucacgaacgccaccgagcucgugcagagcucccccaccggccgcaucugcgacagcccccaccagauccuggacggggagaacugcacccugaucgacgcccuccugggcgacccccacugcgacggguuccagaacaaggagugggaccuguucguggagcgguccacggccuacagcaacugcuacccguacgacguccccgacuacgcgucccuccgcagccugguggccuccagcggcacccuggaguucaacaacgaguccuucaacuggaccggcguggcccagaacgggaccagcuccgccugcaagcggcgcagcaucaaguccuucuucagccggcucaacuggcugcaccagcugaaguacaaguaccccgcgcucaacgucacgaugcccaacaacgagaaguucgacaagcuguacaucuggggcgugcaccacccguccaccgacagcgaccagaucucccuguacgcccaggccagcgggcgcgugaccgucagcaccaagcggucccagcagacggugauccccaacaucggcagcgggcccugggugcgcggcgucuccagccggaucuccaucuacuggaccaucgugaagcccggcgacauccuccugaucaacagcaccgggaaccugaucgccccgcgcggcuacuucaagauccggaacgggaaguccagcaucaugcgcuccaacacccccaucggcaagugcaacagcgagugcaucacgcccaacggcuccauccccaacgacaagccguuccagaacgugaaccggaucaccuacggggccugcccccgcuacgucaagcagaacacccucaagcuggcgaccggcaugcggaacgugcccgagaagcagacgcgcgggaucuucggcgccaucgccggguucaucgagaacggcugggagggcaugguggacgggugguacggcuuccggcaccagaacagcgaggggaccggccaggccgccgaccugaaguccacccaggcggccaucaaccagaucaacgggaagcucaaccgccugaucgagaagaccaacgagaaguuccaccagaucgagaaggaguucagcgaggucgagggccggauccaggaccuggagaaguacguggaggacacgaagaucgaccucugguccuacaacgccgagcugcugguggcccucgagaaccagcacaccaucgaccugaccgacagcgagaugaacaagcuguucgagcgcacccggaagcagcuccgcgagaacgccgaggacaugggcaacgggugcuucaagaucuaccacaagugcgacaacgcgugcaucggcuccauccgcaacgggacguacgaccacgacgucuaccgggacgaggcccugaacaaccgcuuccagaucaagggcguggagcucaagagcggguacaaggacuggauccuguggaucuccuucgccaucagcugcuuccugcugugcgucgugcuccugggcuucaucaugugggccugccagaagggcaacauccggugcaacaucugcaucuga

SEQ ID NO: 65416 - RNA, 1701 nt, Artificial Sequence
  derived and/or modified CDS sequence (opt1) from hemagglutinin__InfluenzaA__ABJ16785
augaagaccaucaucgcccugagcuacauccucugccugguguucgcccagaagcugcccggcaacgacaacuccaccgcgacgcucugccuggggcaccacgccgucccgaacggcacccuggugaagaccaucaccaacgaccagaucgaggugacgaacgccaccgagcucguccagagcuccagcaccgggggcaucugcgacagcccccaccagauccuggacggggagaacugcacccugaucgacgcccuccugggcgacccccacugcgacggcuuccagaacaaggagugggaccuguucguggagcgcagcaaggccuacuccaacugcuaccccuacgacgugccggacuacgcgagccuccggucccuggucgccagcuccgggacgcuggaguucaacaacgagagcuucaacuggaccggcguggcccagaacgggaccuccuacgccugcaagcgccggagcaacaaguccuucuucagccgccucaacuggcugcaccagcugaaguacaaguaccccgcgcucaacgugaccaugcccaacaacgagaaguucgacaagcuguacaucuggggcguccaccaccccuccacggacagcgaccagaucucccuguacgcccaggccccggggcgggugaccgugagcaccaagcgcagccagcagaccgucauccccaacaucggcucccggcccugggugcgcggcgugagcucccggaucagcaucuacuggacgaucgucaagcccggggacauccuccugaucaacugcaccggcaaccugaucgccccgcgcggguacuucaagauccgguccggcaagagcuccaucaugcgcagcgacgccuccaucggcaagugcaacagcgagugcaucacccccaacggguccauccccaacgacaagcccuuccagaacgugaaccggaucaccuacggcgcgugcccgcgcuacgugaagcagaacacgcucaagcuggccaccgggaugcggaacguccccgagaagcagacccgcggcaucuucggggccaucgccggcuucaucgagaacggcugggaggggaugguggacggcugguacggguuccggcaccagaacagcgagggcaccgggcaggccgcggaccugaaguccacgcaggccgccaucaaccagaucaacggcaagcucaaccgccugaucgagaagaccaacgagaaguuccaccagaucgagaaggaguucagcgagguggagggccggauccaggaccuggagaaguacgucgaggacaccaagaucgaccucugguccuacaacgccgagcugcugguggcccucgagaaccagcacaccaucgaccugacggacagcgagaugaacaagcuguucgagcgcaccaagaagcagcuccgggagaacgcggaggacauggggaacggcugcuucaagaucuaccacaagugcgacaacgccugcaucggguccauccgcaacggcaccuacgaccacgacguguaccgcgacgaggcccugaacaaccgguuccagaucaagggggucgagcugaaguccggcuacaaggacuggauccucuggaucuccuucgccaucagcugcuuccugcugugcgugguccuccugggcuucaucaugugggccugccagaaggggaacauccgcugcaacaucugcaucuga

SEQ ID NO: 65417 - RNA, 1701 nt, Artificial Sequence; identical to SEQ ID NO: 64934
  derived and/or modified CDS sequence (opt1) from hemagglutinin__InfluenzaA__ABJ53438

SEQ ID NO: 65418 - RNA, 1698 nt, Artificial Sequence; identical to SEQ ID NO: 64766
  derived and/or modified CDS sequence (opt1) from hemagglutinin__InfluenzaA__ABJ53449

SEQ ID NO: 65419 - RNA, 1701 nt, Artificial Sequence
  derived and/or modified CDS sequence (opt1) from hemagglutinin__InfluenzaA__ABJ53471
augaagaccaucaucgcccugagcuacauccucugccugguguucgcccagaagauccccggcaacgacaacuccaccgcgacgcugugccucgggcaccacgccgucccgaacggcaccaucgugaagaccaucaccaacgaccagaucgaggugacgaacgccaccgagcugguccagagcuccagcaccgggggcaucugcgacagcccccaccagauccuggacggggagaacugcacccucaucgacgcccugcugggcgacccccagugcgacggcuuccagaacaagaagugggaccucuucguggagcgcuccaaggccuacuccaacugcuaccccuacgacgugccggacuacgcgagccugcggucccuggucgccagcuccgggacgcucgaguucaacaacgagagcuucaacuggaccggcgugacccagaacgggaccuccagcgccugcaagcgcggcuccaacaacagcuucuucucccggcugaacuggcugacgcaccucaaguucaaguaccccgcccugaacgugaccaugcccaacaacgagaaguucgacaagcuguacaucuggggcguccaccaccccgggaccgacaacgaccagaucuuccucuacgcgcaggccagcggccgcaucaccguguccacgaagcggagccagcagaccgugaucccgaacaucgggagccgcccccggguccgcaacauccccucccggaucagcaucuacuggaccaucgugaagcccggcgacauccugcugaucaacuccaccgggaaccucaucgccccgcgcggcuacuucaagauccggagcggcaaguccagcaucaugcgcuccgacgcccccaucgggaagugcaacagcgagugcaucacgcccaacggcuccauccccaacgacaagccguuccagaacgugaaccggaucaccuacggggccugcccccgcuacgucaagcagaacacccugaagcuggcgaccggcaugcggaacgugcccgagaagcagacgcgcgggaucuucggcgccaucgccggcuucaucgagaacgggugggagggcaugguggacgggugguacggcuuccggcaccagaacagcgaggggaucggccaggccgccgaccucaaguccacccaggcggccaucaaccagaucaacggcaagcugaaccgccugaucgggaagaccaacgagaaguuccaccagaucgagaaggaguucagcgaggucgagggccggauccaggaccucgagaaguacguggaggacaccaagaucgaccugugguccuacaacgccgagcugcucguggcccuggagaaccagcacacgaucgaccugaccgacagcgagaugaacaagcuguucgagcgcaccaagaagcagcuccgggagaacgccgaggacauggggaacggcugcuucaagaucuaccacaagugcgacaacgcgugcaucggguccauccgcaacggcaccuacgaccacgacgucuaccgcgacgaggcccugaacaaccgguuccagaucaagggcguggagcucaagagcggguacaaggacuggauccuguggaucuccuucgccaucagcugcuuccugcucugcguggcccugcugggcuucaucaugugggccugccagaaggggaacauccgcugcaacaucugcaucuga

SEQ ID NO: 65420 - RNA, 1701 nt, Artificial Sequence
  derived and/or modified CDS sequence (opt1) from hemagglutinin__InfluenzaA__ABJ53482
augaagaccaucaucgcccugagcuacauccucugccugguguucgcccagaagcugcccggcaacgacaacuccaccgcgacgcucugccuggggcaccacgccgucccgaacggcaccaucgugcgcaccaucaccaacgaccagaucgaggugacgaacgccaccgagcugguccagagcuccagcaccggggagaucugcgacagcccccaccagauccucgacggcgagaacugcacccugaucgacgcccugcucggggacccccagugcgacggcuuccagaacaagaagugggaccuguucguggagcggagcaaggccuacuccaacugcuaccccuacgacgugccggacuacgcgagccugcgcucccucgucgccagcuccggcacgcuggaguucaacaacgagagcuucaacuggaccggggugacccagaacggcaccuccagcgccugcaagcggcgcuccaacaacagcuucuucucccggcugaacuggcucacgcaccugaaguucaaguaccccgcccugaacgugaccaugcccaacaacgagaaguucgacaagcucuacaucuggggcguccaccaccccgggaccgacaacgaccagaucuuccuguacgcgcaggccagcgggcgcaucaccguguccacgaagcggagccagcagaccgugaucccgaacaucggcagccgcccccggguccgcaacauccccucccggaucagcaucuacuggaccaucgugaagcccggcgacauccugcucaucaacuccaccgggaaccugaucgccccgcgcggcuacuucaagauccggagcgggaaguccagcaucaugcgcuccgacgcccccaucggcaagugcaacagcgagugcaucacgcccaacggcuccauccccaacgacaagccguuccagaacgugaaccggaucaccuacggggccugcccccgcuacgucaagcagaacacccugaagcucgcgaccggcaugcggaacgugcccgagaagcagacgcgcgggaucuucggcgccaucgccggguucaucgagaacggcugggagggcaugguggacgggugguacggcuuccggcaccagaacagcgaggggaucggccaggccgccgaccugaaguccacccaggcggccaucaaccagaucaacgggaagcugaaccgccucaucggcaagaccaacgagaaguuccaccagaucgagaaggaguucagcgaggucgagggccggauccaggaccuggagaaguacguggaggacaccaagaucgaccugugguccuacaacgccgagcuccugguggcccuggagaaccagcacacgaucgaccucaccgacagcgagaugaacaagcuguucgagcgcaccaagaagcagcugcgcgagaacgccgaggacauggggaacggcugcuucaagaucuaccacaagugcgacaacgcgugcaucggguccauccggaacggcaccuacgaccacgacgucuaccgcgacgaggcccucaacaaccgguuccagaucaaggggguggagcugaaguccggcuacaaggacuggauccuguggaucuccuucgccaucagcugcuuccuccugugcguggcccugcucggcuucaucaugugggccugccagaaggggaacauccgcugcaacaucugcaucuga

SEQ ID NO: 65421 - RNA, 1698 nt, Artificial Sequence; identical to SEQ ID NO: 65256
  derived and/or modified CDS sequence (opt1) from hemagglutinin__InfluenzaA__ABJ53493

SEQ ID NO: 65422 - RNA, 1698 nt, Artificial Sequence
  derived and/or modified CDS sequence (opt1) from hemagglutinin__InfluenzaA__ABJ53504
augaaggccaagcugcucgugcugcugugcaccuucaccgccacguacgcggacaccaucugcaucggcuaccacgccaacaacagcaccgacaccgucgacacggugcucgagaagaacgugaccgucacccacuccgugaaccugcuggaggacagccacaacgggaagcucugccugcugaagggcaucgcgccccuccagcuggggaacugcuccguggccggcuggauccuggggaacccggagugcgagagccucaucuccaaggagagcugguccuacaucgucgagacccccaaccccgagaacggcacgugcuaccccggcuacuucgccgacuacgaggagcugcgcgagcagcugagcuccgugagcuccuucgagcgguucgagaucuucccgaaggagagcuccuggcccaaccacaccgugaccggggucagcgccuccugcagccacaacggcaaguccagcuucuaccgcaaccuccuguggcugaccgagaagaacgggcucuaccccaaccuguccaagagcuacgugaacaacaaggagaaggaggugcugguccucuggggcgugcaccaccccagcaacaucggggugcagcgggccaucuaccacacggagaacgccuacgucuccguggugagcucccacuacagccgccgguucaccccggagaucgccaagcgccccaagguccgggaccaggagggccgcaucaacuacuacuggacccugcuggagcccggcgacaccaucaucuucgaggcgaacgggaaccucaucgcccccugguacgccuucgcccugucccggggcuucgagagcgggaucaucacguccaacgccccgaugaacgagugcgacgcgaagugccagacgccccugggcgccaucaacagcucccuccccuuccagaacgugcaccccgugaccaucggcgagugcccgaaguacguccgcagcgccaagcugcggauggugaccgggcugcgcaacauccccuccauccagagccggggccucuucggggccaucgccggcuucaucgagggcggguggaccggcaugaucgacgggugguacggcuaccaccaccagaacgagcagggguccggcuacgcggccgaccagaaguccacccagaacgccaucaacgggaucaccaacaaggugaacagcgucaucgagaagaugaacacccaguucacggccgugggcaaggaguucaacaagcuggagcgccggauggagaaccugaacaagaaggucgacgacggcuuccucgacaucuggaccuacaacgccgagcugcuggugcuccuggagaacgagcgcacccuggacuuccacgacagcaacgugaagaaccucuacgagaaggucaagucccagcugaagaacaacgcgaaggagaucgggaacggcugcuucgaguucuaccacaagugcaacaacgagugcauggagagcgugaagaacgggaccuacgacuaccccaaguacuccgaggagagcaagcugaaccgggagaagaucgacggcgugaagcucgagagcaugggggucuaccagauccuggccaucuacuccacgguggccagcucccuggugcuccuggucagccugggcgccaucuccuucuggaugugcagcaacggcucccuccagugccgcaucugcaucuga

SEQ ID NO: 65423 - RNA, 1701 nt, Artificial Sequence; identical to SEQ ID NO: 65411
  derived and/or modified CDS sequence (opt1) from hemagglutinin__InfluenzaA__ABJ53515

SEQ ID NO: 65424 - RNA, 1701 nt, Artificial Sequence
  derived and/or modified CDS sequence (opt1) from hemagglutinin__InfluenzaA__ABK39962
augaagaccaucaucgcccugagcuacauccucugccugguguucgcccagaagcugcccggcaacgacaacuccaccgcgacgcucugccuggggcaccacgccgucccgaacggcacccuggugaagaccaucaccaacgaccagaucgaggugacgaacgccaccgagcucguccagagcuccagcaccgggcgcaucugcgacagcccccaccagauccuggacggcgagaacugcacccugaucgacgcccuccugggggacccccacugcgacggcuuccagaacaaggagugggaccuguucguggagcggagcaaggccuacuccaacugcuaccccuacgacgugccggacuacgucagccuccgcucccugguggcgagcuccggcacgcuggaguucaacaacgagagcuucaacuggaccgggguggcccagaacggcaccuccagcgccugcaagcggcgcuccgacaagagcuucuucucccggcucaacuggcugcaccagcugaaguacaaguaccccgcccucaacgucaccaugcccaacaacgagaaguucgacaagcuguacaucuggggcgugcaccaccccgggacggacagcgaccagaucucccuguacgcgcaggccagcgggcgcgugaccgucagcaccaagcggucccagcagaccgugaucccgaacaucggcagccgccccugggugcggggcgucuccagccgcaucuccaucuacuggacgaucgugaagcccggggacauccuccugaucaacagcaccggcaaccugaucgcgccccggggguacuucaagauccgcuccggcaagagcuccaucaugcggagcgacgccccgaucggcaagugcaacuccgagugcaucacccccaacgggagcauccccaacgacaagcccuuccagaacgugaaccgcaucaccuacggcgccugcccgcgguacgucaagcagaagacgcucaagcuggccaccgggaugcgcaacgugcccgagaagcagacccggggcaucuucggggccaucgccggcuucaucgagaacggcugggaggggaugauggacggcugguacggguuccgccaccagaacuccgagggcaccgggcaggccgccgaccugaaguccacgcaggcggccaucaaccagaucaacggcaagcucaaccggcugaucgagaagaccaacgagaaguuccaccagaucgagaaggaguucuccgagguggagggccgcauccaggaccuggagaaguacgucgaggacaccaagaucgaccucuggagcuacaacgccgagcugcugguggcccucgagaaccagcacaccaucgaccugacggacuccgagaugaacaagcuguucgagcggaccaagaagcagcuccgcgagaacgccgaggacauggggaacggcugcuucaagaucuaccacaagugcgacaacgcgugcaucgggagcauccgcaacggcaccuacgaccacgacguguaccgggacgaggcccugaacaaccgcuuccagaucaagggggucgagcugaaguccggcuacaaggacuggauccucuggaucagcuucgccaucagcugcuuccugcugugcaucgugcuccugggcuucaucaugugggccugccagaaggggaacauccggugcaacaucugcaucuga

SEQ ID NO: 65425 - RNA, 1701 nt, Artificial Sequence; identical to SEQ ID NO: 64654
  derived and/or modified CDS sequence (opt1) from hemagglutinin__InfluenzaA__ABK39973

SEQ ID NO: 65426 - RNA, 1701 nt, Artificial Sequence
  derived and/or modified CDS sequence (opt1) from hemagglutinin__InfluenzaA__ABK39984
augaagaccaucaucgcccugagcuacauccucugccugguguucgcccagaagcugcccggcaacgacaacucccgcgcgacccucugccuggggcaccacgccgucccgaacggcacgaucgugaagaccaucaccaacgaccagaucgaggugaccaacgccacggagcugguccagagcuccagcaccgggggcaucugcgacagcccccaccagauccucgacggggagaacugcacccugaucgacgcccugcucggcgacccccagugcgacggcuuccagaacaagaagugggaccuguucguggagcggagcaaggccuacuccaacugcuaccccuacgacgugccggacuacgcgagccugcgcucccucgucgccagcuccgggacccuggaguucaacaacgagagcuucaacuggacgggcgugacccagaacgggaccuccagcgccugcaagcggcgcuccaacaacagcuucuucucccggcugaacuggcucacccaccugaaguucaaguaccccgcccugaacgugacgaugcccaacaacgagaaguucgacaagcucuacaucuggggcguccaccaccccgggaccgacaacgaccagaucuuccuguacgcgcaggccagcggccgcaucaccguguccaccaagcggagccagcagacggugaucccgaacaucggcagccgcccccggguccgcaacauccccucccggaucagcaucuacuggaccaucgugaagcccggggacauccugcucaucaacuccaccggcaaccugaucgccccgcgcggguacuucaagauccggagcggcaaguccagcaucaugcgcuccgacgcccccaucggcaagugcaacagcgagugcaucacccccaacggguccauccccaacgacaagccguuccagaacgugaaccggaucacguacggcgccugcccccgcuacgucaagcagaacacccugaagcucgcgaccgggaugcggaacgugcccgagaagcagacccgcggcaucuucggggccaucgccggcuucaucgagaacggcugggaggggaugguggacggcugguacggguuccggcaccagaacagcgagggcaucgggcaggccgccgaccugaaguccacgcaggcggccaucgaccagaucaacggcaagcugaaccgccucaucggcaagaccaacgagaaguuccaccagaucgagaaggaguucagcgaggucgaggggcggauccaggaccuggagaaguacguggaggacaccaagaucgaccugugguccuacaacgccgagcuccugguggcccuggagaaccagcacaccaucgaccucacggacagcgagaugaacaagcuguucgagcgcaccaagaagcagcugcgcgagaacgccgaggacaugggcaacgggugcuucaagaucuaccacaagugcgacaacgcgugcaucggcuccauccggaacgggaccuacgaccacgacgucuaccgcgacgaggcccucaacaaccgguuccagaucaagggcguggagcugaaguccggcuacaaggacuggauccuguggaucuccuucgccaucagcugcuuccuccugugcguggcccugcucggguucaucaugugggccugccagaagggcaacauccgcugcaacaucugcaucuga

SEQ ID NO: 65427 - RNA, 1698 nt, Artificial Sequence
  derived and/or modified CDS sequence (opt1) from hemagglutinin__InfluenzaA__ABK39995
augaaggugaagcugcucauccugcugugcaccuucaccgccacguacgccgacaccaucugcaucggcuaccacgcgaacaacagcaccgacaccgucgacacggugcucgagaagaacgugaccgucacccacuccgugaaccugcuggaggacagccacaacgggaagcucugccugcugaagggcaucgcgccccuccagcuggggaacugcuccguggccggcuggauccuggggaacccggagugcgagcuccugaucagcaaggaguccuggagcuacaucgucgagacccccaaccccgagaacggcgccugcuaccccggcuacuucgccgacuacgaggagcugcgcgagcagcucuccagcguguacuccuucgagcgguucgagaucuucccgaaggagagcuccuggcccaaccacacggugaccggggucagcgccuccugcagccacaacggcaaguccagcuucuaccgcaaccugcuguggcucaccgggaagaacggccuguaccccaaccuguccaagagcuacgccaacaacaaggagaaggaggugcucauccuguggggcgugcaccacccgcccaacaucgggaaccagcggacccuguaccacacggagaacgccuacgucuccguggugagcagccacuacucccgccgguucacccccgagaucaccaagcgccccaagguccgggaccaggagggccgcaucaacuacuacuggacccuccuggagcccggggacacgaucaucuucgaggccaacggcaaccugaucgcgccgugguacgccuucgcccucagccggggguucggcuccggcaucaucaccagcaacgcccccauggacgagugcgacgccaagugccagacgccccagggggcgaucaacuccagccugcccuuccagaacgugcacccggugaccaucggcgagugccccaaguacguccgcuccgccaagcugcggauggugaccgggcuccgcaacauccccagcauccagucccggggccuguucggggccaucgccggcuucaucgagggcggguggaccggcaugguggacgggugguacggcuaccaccaccagaacgagcaggggagcggcuacgccgcggaccagaaguccacccagaacgccaucaacggcaucaccaacaaggucaacagcgugaucgagaagaugaacacgcaguucaccgccguggggaaggaguucaacaagcuggagcgccggauggagaaccucaacaagaaggucgacgacggcuuccuggacaucuggaccuacaacgccgagcugcucgugcugcuggagaacgagcgcacccucgacuuccacgacuccaacgucaagaaccuguacgagaaggucaagagccagcugaagaacaacgccaaggagaucgggaacggcugcuucgaguucuaccacaagugcaacaacgagugcauggaguccgugaagaacgggacguacgacuaccccaaguacagcgaggaguccaagcucaaccgggagaagaucgacggcgugaagcuggacagcaugggcguguaccagauccuggcgaucuacuccaccguggccagcagccucguccugcuggugucccucggggccaucagcuucuggaugugcuccaacggcagccugcagugccgcaucugcaucuga

SEQ ID NO: 65428 - RNA, 1701 nt, Artificial Sequence
  derived and/or modified CDS sequence (opt1) from hemagglutinin__InfluenzaA__ABK40017
augaagaccaucaucgcccugagcuacauccucugccugguguucgcccagaagcugcccggcaacgacaacuccaccgcgacgcucugccuggggcaccacgccgucccgaacggcaccaucgugaagaccaucaccaacgaccagaucgaggugacgaacgccaccgagcugguccagagcuccagcaccgggggcaucugcgacagcccccaccagauccucgacggggagaacugcacccugaucgacgcccugcucggcgacccccagugcgacggcuuccagaacaagaagugggaccuguucguggagcgcagcaaggccuacuccaacugcuaccccuacgacgugccggacuacgcgagccugcggucccucgucgccagcuccgggacgcuggaguucaacaacgagagcuucaacuggaccggcgugacccagaacgggaccuccagcgccugcaagcgccgguccaacaacagcuucuucucccgccugaacuggcucacgcaccugaaguucaaguaccccgcccugaacgugaccaugcccaacaacaagaaguucgacaagcucuacaucuggggcguccaccaccccgggaccgacaacgaccagaucagccuguacgcgcaggccuccggccggaucaccgugagcacgaagcgcagccagcagaccgugaucccgaacaucggcucccggccccgcguccgggacauccccagccgcaucuccaucuacuggaccaucgugaagcccggggacauccugcucaucaacagcaccggcaaccugaucgccccgcggggguacuucaagauccgcuccggcaagagcuccaucaugcggagcgacgcccccaucggcaagugcaacuccgagugcaucacgcccaacgggagcauccccaacgacaagccguuccagaacgugaaccgcaucaccuacggcgccugcccccgguacgucaagcagaacacccugaagcucgcgaccgggaugcgcaacgugcccgagaagcagacgcggggcaucuucggggccaucgccggcuucaucgagaacggcugggaggggaugguggacggcugguacggguuccgccaccagaacuccgagggcaucgggcaggccgccgaccugaaguccacccaggcggccaucaaccagaucaacggcaagcugaaccggcucaucggcaagaccaacgagaaguuccaccagaucgagaaggaguucuccgaggucgaggggcgcauccaggaccuggagaaguacguggaggacaccaagaucgaccuguggagcuacaacgccgagcuccugguggcccuggagaaccagcacacgaucgaccucaccgacuccgagaugaacaagcuguucgagcggaccaagaagcagcugcgcgagaacgccgaggacaugggcaacgggugcuucaagaucuaccacaagugcgacaacgcgugcaucggcagcauccgcaacgggaccuacgaccacgacgucuaccgggacgaggcccucaacaaccgcuuccagaucaagggcguggagcugaaguccggcuacaaggacuggauccuguggaucagcuucgccaucuccugcuuccuccugugcguggcccugcucggguucaucaugugggccugccagaagggcaacauccggugcaacaucugcaucuga

SEQ ID NO: 65429 - RNA, 1701 nt, Artificial Sequence
  derived and/or modified CDS sequence (opt1) from hemagglutinin__InfluenzaA__ABK40028
augaaggccaagcugcucgugcugcugugcgccuucaccgcgaccuacgccgacacgaucugcaucggcuaccacgccaacaacagcaccgacaccgucgacaccgugcucgagaagaacgugacggucacccacuccgugaaccugcuggaggacagccacaacgggaagcucugccgccugaagggcaccgcgccccugcagcucgggaacugcuccaucgccggcuggauccuggggaacccggagugcgagagccuguucuccaaggagagcugguccuacaucgccgagacccccaaccccaagaacggcacgugcuaccccggcuacuucgccgacuacgaggagcuccgggagcagcugagcuccgugagcuccuucgagcgcuucgagaucuucccgaaggacagcuccuggcccaaccacaccgucaccaagggggugaccgccagcugcucccacaacggcaagagcuccuucuacaagaaccugcucuggcugacggagaagaacgggcuguaccccaaccucagcaaguccuacgugaacaagaagggcaaggagguccuggugcuguggggcgugcaccaccccagcaacaugggggaccagcgggccaucuaccacaaggagaacgcguacgucaccgugcucagcucccacuacagccgccgguucaccccggagaucgcccgccggcccaaggugcgcgaccaggagggccggaucaacuacuacuggacccugcuggagcccggggacacgaucaucuucgaggccaacggcaaccucaucgcccccugguacgccuucgcgcugucccgcggguucggcagcggcaucaucaucuccaacgccagcaugggggagugcgacgccaagugccagaccccgcagggcgccaucaacuccagccugcccuuccagaacguccaccccgugaccaucggggagugccccaaguacgugcgguccaccaagcuccgcauggucacgggccugcggaacgugccgagcauccagucccgcgggcuguucggcgccaucgcgggcuucaucgagggcggguggaccgggaugaucgacggcugguacggguaccaccaccagaacgagcagggcagcggcuacgccgccgaccagaaguccacccagaacgccaucaacgggaucaccaacaaggugaacagcaucaucgagaagaugaacacgcaguucaccgccgucggcaaggaguucaacaagcucgagcggcgcauggagaaccugaacaagaagguggacgacggguuccuggacaucuggaccuacaacgcggagcuccuggugcugcucgagaacgagcggacccuggacuuccacgacuccaacgucaagaaccuguacgagaaggugaagaaccagcucaagaacaacgccaaggagaucggcaacgggugcuucgaguucuaccacaagugcaacaacgagugcauggagagcgucaagaacggcacguacgacuaccccaaguacuccaaggagagcaagcugaaccgcgagaagaucgacggcgugaagcuggaguccauggggguguaccagauccucgccaucuacagcaccgucgccagcucccuggugcugcucgugagccugggcgccaucuccuucuggaugugcagcaacgggucccugcagugccggaucugcaucuga

SEQ ID NO: 65430 - RNA, 1701 nt, Artificial Sequence; identical to SEQ ID NO: 65411
  derived and/or modified CDS sequence (opt1) from hemagglutinin__InfluenzaA__ABK40039

SEQ ID NO: 65431 - RNA, 1701 nt, Artificial Sequence; identical to SEQ ID NO: 65411
  derived and/or modified CDS sequence (opt1) from hemagglutinin__InfluenzaA__ABK40050

SEQ ID NO: 65432 - RNA, 1701 nt, Artificial Sequence; identical to SEQ ID NO: 64674
  derived and/or modified CDS sequence (opt1) from hemagglutinin__InfluenzaA__ABK40061

SEQ ID NO: 65433 - RNA, 1701 nt, Artificial Sequence; identical to SEQ ID NO: 64674
  derived and/or modified CDS sequence (opt1) from hemagglutinin__InfluenzaA__ABK40075

SEQ ID NO: 65434 - RNA, 1701 nt, Artificial Sequence; identical to SEQ ID NO: 64945
  derived and/or modified CDS sequence (opt1) from hemagglutinin__InfluenzaA__ABK40510

SEQ ID NO: 65435 - RNA, 1701 nt, Artificial Sequence; identical to SEQ ID NO: 64945
  derived and/or modified CDS sequence (opt1) from hemagglutinin__InfluenzaA__ABK40534

SEQ ID NO: 65436 - RNA, 1701 nt, Artificial Sequence
  derived and/or modified CDS sequence (opt1) from hemagglutinin__InfluenzaA__ABK40546
augaaggccaagcugcucgugcugcugugcgcccucagcgcgaccgacgccgacaccaucugcaucggcuaccacgccaacaacuccacggacaccgucgacaccgugcuggagaagaacgugaccgucacgcacagcgugaaccugcucgaggacaaccacaacgggaagcugugcaagcugaagggcaucgcgccccuccagcuggggaagugcuccaucgccggcuggauccuggggaacccggagugcgagagccucuucuccaacaagagcugguccuacaucgccgagacccccaacagcgagaacgggaccugcuaccccggcuacuucgccgacuacgaggagcugcgcgagcagcuguccagcguguccagcuucgagcgguucgagaucuuccccaaggaguccagcuggccgaagcacaacgucaccaagggggugacggccuccugcagccacaagggcaaguccagcuucuaccgcaaccuccuguggcugaccgagaagaacggguccuaccccaaccucagcaagagcuacgugaacaacaaggagaaggagguccuggugcuguggggcgugcaccaccccuccaacaucgaggaccagaagaccaucuaccggaaggagaacgccuacgucagcgugguguccagccacuacaaccgccgguucacccccgagaucgcgaagcgcccgaagguccggaaccaggaggggcgcaucaacuacuacuggacgcuccuggagcccggcgacaccaucaucuucgaggccaacggcaaccugaucgcccccugguacgccuucgcccucucccggggguucggcagcgggaucaucaccuccaacgcgagcauggacgagugcgacgccaagugccagacgccccagggcgccaucaacuccagccugccguuccagaacgugcaccccgugaccaucggcgagugccccaaguacguccgcuccaccaagcugcggauggugaccgggcuccgcaacauccccagcauccagucccggggccuguucggggccaucgccggcuucaucgagggcggcuggaccggcaugaucgacgggugguacggcuaccaccaccagaacgagcaggggagcggcuacgcggccgaccagaaguccacgcagaacgccaucaacgggaucaccaacaaggugaacagcaucaucgagaagaugaacacccaguucaccgccgucggcaaggaguucaacaagcuggagaagcgcauggagaaccucaacaagaagguggacgacggcuuccuggacaucuggacguacaacgccgagcugcucgugcugcuggagaacgagcggacccucgacuuccacgacuccaacgucaagaaccuguacgagaaggucaagagccagcugaagaacaacgcgaaggagaucgggaacggcugcuucgaguucuaccacaagugcaacaacgagugcauggaguccgugaagaacgggaccuacgacuacccgaaguacagcgaggagagcaagcucaaccgcgagaagaucgacggcgugaagcuggaguccauggggguguaccagauccuggccaucuacagcaccgucgccuccagccucgugcugcuggugucccucggcgccaucagcuucuggaugugcuccaacggcagccugcagugccggaucugcaucuga

SEQ ID NO: 65437 - RNA, 1701 nt, Artificial Sequence; identical to SEQ ID NO: 64945
  derived and/or modified CDS sequence (opt1) from hemagglutinin__InfluenzaA__ABK40557

SEQ ID NO: 65438 - RNA, 1701 nt, Artificial Sequence; identical to SEQ ID NO: 64945
  derived and/or modified CDS sequence (opt1) from hemagglutinin__InfluenzaA__ABK40568

SEQ ID NO: 65439 - RNA, 1701 nt, Artificial Sequence; identical to SEQ ID NO: 64945
  derived and/or modified CDS sequence (opt1) from hemagglutinin__InfluenzaA__ABK40579

SEQ ID NO: 65440 - RNA, 1701 nt, Artificial Sequence
  derived and/or modified CDS sequence (opt1) from hemagglutinin__InfluenzaA__ABK40590
augaaggccaagcugcucgugcugcugugcgcccucagcgcgaccgacgccgacaccaucugcaucggcuaccacgccaacaacuccacggacaccgucgacaccgugcuggagaagaacgugaccgucacgcacagcgugaaccugcucgaggacaaccacaacgggaagcugugcaagcugaagggcaucgcgccccuccagcuggggaagugcuccaucgccggcuggauccuggggaacccggagugcgagagccucuucuccaagaaguccuggagcuacaucgccgagacccccaacagcgagaacgggaccugcuaccccggcuacuucgccgacuacgaggagcugcgcgagcagcuguccagcguguccagcuucgagcgguucgagaucuuccccaaggaguccagcuggccgaagcacaacgucaccaagggggugacggccuccugcagccacaagggcaaguccagcuucuaccgcaaccuccuguggcugaccgagaagaacggguccuaccccaaccucagcaagagcuacgugaacaacaaggagaaggagguccuggugcuguggggcgugcaccaccccuccaacaucgaggaccagaagaccaucuaccggaaggagaacgccuacgucagcgugguguccagccacuacaaccgccgguucacccccgagaucgcgaagcgcccgaagguccggaaccaggaggggcgcaucaacuacuacuggacgcuccuggagcccggcgacaccaucaucuucgaggccaacggcaaccugaucgcccccugguacgccuucgcccucucccggggguucggcagcgggaucaucaccuccaacgcgagcauggacgagugcgacgccaagugccagacgccccagggcgccaucaacuccagccugccguuccagaacgugcaccccgugaccaucggcgagugccccaaguacguccgcuccaccaagcugcggauggugaccgggcuccgcaacauccccagcauccagucccggggccuguucggggccaucgccggcuucaucgagggcggcuggaccggcaugaucgacgggugguacggcuaccaccaccagaacgagcaggggagcggcuacgcggccgaccagaaguccacgcagaacgccaucaacgggaucaccaacaaggugaacagcaucaucgagaagaugaacacccaguucaccgccgucggcaaggaguucaacaagcuggagaagcgcauggagaaccucaacaagaagguggacgacggcuuccuggacaucuggacguacaacgccgagcugcucgugcugcuggagaacgagcggacccucgacuuccacgacuccaacgucaagaaccuguacgagaaggugaagaaccagcugaagaacaacgcgaaggagaucgggaacggcugcuucgaguucuaccacaagugcaacaacgagugcauggagagcgucaagaacgggaccuacgacuacccgaaguacuccgaggagagcaagcucaaccgcgagaagaucgacggcgugaagcuggagagcauggggguguaccagauccuggccaucuacuccaccgucgccagcucccucgugcugcuggugagccucggcgccaucuccuucuggaugugcagcaacggcucccugcagugccggaucugcaucuga

SEQ ID NO: 65441 - RNA, 1701 nt, Artificial Sequence; identical to SEQ ID NO: 64945
  derived and/or modified CDS sequence (opt1) from hemagglutinin__InfluenzaA__ABK40601

SEQ ID NO: 65442 - RNA, 1701 nt, Artificial Sequence; identical to SEQ ID NO: 64674
  derived and/or modified CDS sequence (opt1) from hemagglutinin__InfluenzaA__ABK40612

SEQ ID NO: 65443 - RNA, 1701 nt, Artificial Sequence
  derived and/or modified CDS sequence (opt1) from hemagglutinin__InfluenzaA__ABK40623
augaagaccaucaucgcccugagcuacauccucugccugguguucgcccagaagcugcccgucaacgacaacuccaccgcgacgcucugccugggccaccacgccgugccgaacgggacccuggugaagaccaucaccaacgaccacaucgaggucacgaacgccaccgagcucgugcagagcuccagcaccggccgcaucugcgacagcccccaccagauccuggacggggagaacugcacccugaucgacgcccuccugggcgacccccacugcgacggguuccagaacaaggagugggaccuguucguggagcgguccacggccuacuccaacugcuaccccuacgacgucccggacuacgcgagccuccgcucccugguggccagcuccggcacccuggaguucaacaacgagagcuucaacuggaccggcguggcccagaacgggaccuccagcgccugcaagcggcgcuccaucaagagcuucuucucccggcucaacuggcugcaccagcugaaguacaaguaccccgcgcucaacgucacgaugcccaacaacgagaaguucgacaagcuguacaucuggggcgugcaccaccccagcaccgacuccgaccagaucagccuguacgcccaggccagcgggcgcgugaccgucuccaccaagcggagccagcagacggugaucccgaacaucggcucccgccccugggugcgcggggucagcucccggaucagcaucuacuggaccaucgugaagcccggcgacauccuccugaucaacuccaccggcaaccugaucgcgccccggggguacuucaagauccgcagcggcaaguccagcaucaugcgguccaacgccccgaucgggaagugcaacagcgagugcaucacccccaacggcuccauccccaacgacaagcccuuccagaacgugaaccgcaucgccuacggcgccugcccgcgguacgucaagcagaacacgcucaagcuggccaccgggaugcgcaacgugcccgagaagcagacccggggcaucuucggggccaucgccggcuucaucgagaacgggugggagggcaugguggacggcugguacggguuccgccaccugaacagcgagggcaccgggcaggcggccgaccucaaguccacgcaggccgccaucaaccagaucaacggcaagcugaaccggcugaucgagaagaccaacgagaaguuccaccagaucgagaaggaguucagcgaggucgaggggcgcauccaggaccucgagaaguacgugaaggacaccaagaucgaccugugguccuacaacgccgagcugcucguggcgcuggagaaccagcacaccaucgaccugacggacagcgagaugaacaagcuguucgagcggacccgcaagcagcuccgcgagaacgccgaggacgucggcaacggcugcuucaagaucuaccacaagugcgacaacgccugcaucggguccauccggaacggcaccuacgaccacgacguguaccgcgacgaggcccugaacaaccgguuccagaucaagggggucgagcucaagagcggcuacaaggacuggauccuguggaucagcuucgccaucuccugcuuccugcucugcguggugcugcugggguucaucaugugggcgugccagaagggcaacauccgcugcaacaucugcaucuga

SEQ ID NO: 65444 - RNA, 1701 nt, Artificial Sequence; identical to SEQ ID NO: 65008
  derived and/or modified CDS sequence (opt1) from hemagglutinin__InfluenzaA__ABK40645

SEQ ID NO: 65445 - RNA, 1701 nt, Artificial Sequence
  derived and/or modified CDS sequence (opt1) from hemagglutinin__InfluenzaA__ABK40656
augaagaccaucaucgcccugagcuacauccucugccugguguucgcccagaagcugcccggcaacgacaacuccaccgcgacgcucugccuggggcaccacgccgucccgaacggcacccuggugaagaccaucaccaacgaccagaucgaggugacgaacgccaccgagcucguccagagcucccccaccgggcgcaucugcgacagcccccaccggauccuggacggcaagaacugcacccugaucgacgcccuccugggggacccccacugcgacggcuuccagaacaaggagugggaccuguucguggagcgcuccaaggccuacagcaacugcuacccguacgacgugcccgacuacgcgucccuccggagccuggucgccuccagcggcacgcuggaguucaccaacgagaacuucaacuggaccgggguggcccaggacggcaaguccuacagcugcaagcgcggguccgugaacagcuucuucucccggcucaacuggcugcacaagcuggaguacaaguaccccgcccucaacgucaccaugcccaacaacggcaaguucgacaagcuguacaucuggggcgugcaccacccgagcacggacuccgaccagaccagccuguacgugcgcgcguccgggaaggucaccgugagcaccaagcggagccagcagacggugauccccgacaucggcuaccgccccuggguccgggggcucuccagccgcaucuccaucuacuggaccaucgugaagcccggcgacauccugcugaucaacagcaccgggaaccucaucgccccgcggggcuacuucaagauccgcaacggcaaguccagcaucaugcgguccgacgcccccaucgggaacugcagcuccgagugcaucacccccaacggcagcauccccaacgacaagccguuccagaacgugaaccgcaucacguacgggaccugcccccgguacgucaagcagaacacccugaagcuggccaccggcaugcgcaacgugcccgagaagcagacgcgggggaucuucggcgccaucgcgggcuucaucgagaacgggugggagggcaugguggacgggugguacggcuuccgccaccagaacuccgaggggaccggccaggccgccgaccucaagagcacccaggccgccaucgaccagaucaacggcaagcugaaccggcuggucgagaagaccaacgagaaguuccaccagaucgagaaggaguucuccgagguggaggggcgcauccaggaccucgagaaguacguggaggacacgaagaucgaccuguggagcuacaacgcggagcugcucgucgcccuggagaaccagcacaccaucgaccugaccgacuccgagaugaacaagcuguucgagcggacccgcaagcagcuccgcgagaacgccgaggacaugggcaacgggugcuucaagaucuaccacaagugcgacaacgccugcaucggcagcauccggaacgggacguacgaccacgacguguaccgcgacgaggcccugaacaaccgguuccagaucaagggcgucgagcucaaguccggcuacaaggacuggauccuguggaucagcuucgcgaucuccugcuuccugcucugcguggugcugcugggguucaucaugugggccugccagaagggcaacauccgcugcaacaucugcaucuga

SEQ ID NO: 65446 - RNA, 1701 nt, Artificial Sequence
  derived and/or modified CDS sequence (opt1) from hemagglutinin__InfluenzaA__ABK40667
augaagaccaucaucgcccugagcuacauccucugccugguguucgcccagaagcugcccggcaacgacaacuccaccgcgacgcucugccuggggcaccacgccgucccgaacggcacccuggugaagaccaucaccaacgaccagaucgaggugacgaacgccaccgagcucguccagagcuccagcaccgggcgcaucugcgacagcccccaccggauccuggacggcaagaacugcacccugaucgacgcccuccugggggacccccacugcgacggcuuccagaacaaggagugggaccuguucguggagcgcagcaaggccuacuccaacugcuaccccuacgacgugccggacuacgcgagccuccggucccuggucgccagcuccggcacgcuggaguucaccaacgagggguucaacuggaccggcguggcccaggacgggaaguccuacgccugcaagcgcggcuccgugaacagcuucuucucccggcucaacuggcugcacaagcuggaguacaaguaccccgcgcucaacgucaccaugcccaacaacgacaaguucgacaagcuguacaucuggggcgugcaccaccccagcacggacuccgaccagaccagccuguacgugcaggccuccgggcgcgucaccgugagcaccaagcggagccagcagacggugaucccgaacaucggcucccgccccuggguccgggggaucagcucccgcaucagcaucuacuggaccaucgugaagcccggcgacauccuccugaucaacuccaccgggaaccugaucgcgccccggggcuacuucaagcuccgcaacggcaagagcuccaucaugcggagcgacgccccgaucgacaacugcaacuccgagugcaucacccccaacgggagcauccccaacgacaagcccuuccagaacgugaaccgcaucacguacggcgccugcccgcgguacgucaagcagaacacccugaagcuggccaccgggaugcgcaacgugcccgagaagcagacccggggcaucuucggggccaucgccggcuucaucgagaacggcugggaggggaugguggacggcugguacggguuccgccaccagaacuccgagggcacggggcaggccgccgaccucaagagcacccaggcggccaucgaccagaucaacggcaagcugaaccggcugaccgagaagaccaacgagaaguuccaccagaucgagaaggaguucuccgaggucgagggccgcauccaggaccucgagaaguacguggaggacacgaagaucgaccuguggagcuacaacgccgagcugcucguggcccuggagaaccagcacaccaucgaccugaccgacuccgagaugaacaagcuguucgagcggacccgcaagcagcuccgcgagaacgccgaggacauggggaacggcugcuucaagaucuaccacaagugcgacaacgcgugcaucgggagcauccggaacggcacguacaaccacgacgucuaccgcgacgaggcccugaacaaccgguuccagaucaaggggguggagcucaaguccggcuacaaggacuggauccuguggaucagcuucgccaucuccugcuuccugcucugcgucgugcugcugggcuucaucaugugggccugccagaaggggaacauccgcugcaacaucugcaucuga

SEQ ID NO: 65447 - RNA, 1701 nt, Artificial Sequence; identical to SEQ ID NO: 65090
  derived and/or modified CDS sequence (opt1) from hemagglutinin__InfluenzaA__ABK40678

SEQ ID NO: 65448 - RNA, 1698 nt, Artificial Sequence
  derived and/or modified CDS sequence (opt1) from hemagglutinin__InfluenzaA__ABK40689
augaaggugaagcugcucguccugcugugcaccuucaccgccacguacgccgacaccaucugcaucggcuaccacgcgaacaacagcaccgacaccguggacacggugcucgagaagaacgucaccgugacccacuccgugaaccugcuggaggacagccacaacgggaagcucugccugcugaagggcaucgcgccccuccagcuggggaacugcuccgucgccggcuggauccuggggaacccggagugcgagcuccugaucagcaaggaguccuggagcuacaucguggagacccccaaccccgagaacggcacgugcuaccccggcuacuucgccgacuacgaggagcugcgcgagcagcucuccagcguguccagcuucgagcgguucgagaucuucccgaaggaguccagcuggcccaaccacaccgucaccgggguguccgccagcugcucccacaacggcaagagcuccuucuaccgcaaccugcuguggcucaccgggaagaacggccuguaccccaaccugagcaaguccuacgccaacaacaaggagaaggaggugcucguccuguggggcgugcaccacccgcccaacaucgggaaccagcgggcccuguaccacacggagaacgccuacgugagcgucgugagcucccacuacagccgccgguucacccccgagaucgccaagcgccccaaggugcgggaccaggagggccgcaucaacuacuacuggacccuccuggagcccggggacaccaucaucuucgaggcgaacggcaaccugaucgccccgcgguucgccuucgcccucucccgcggguucggcagcggcaucaucacguccaacgcccccauggacgagugcgacgcgaagugccagacgccccagggggccaucaacagcucccugcccuuccagaacguccacccggugaccaucggcgagugccccaaguacgugcggagcgccaagcugcgcauggccaccgggcuccggaacauccccuccauccagagccgcggccuguucggggccaucgcgggcuucaucgagggcggguggaccggcauggucgacgggugguacggcuaccaccaccagaacgagcagggguccggcuacgccgccgaccagaaguccacccagaacgccaucaacggcaucaccaacaaggugaacagcgugaucgagaagaugaacacccaguucacggccgucgggaaggaguucagcaagcuggagcggcgcauggagaaccucaacaagaagguggacgacggcuuccuggacaucuggaccuacaacgcggagcugcucguccugcuggagaacgagcggacccucgacuuccacgacuccaacgugaagaaccuguacgagaaggucaagagccagcugaagaacaacgccaaggagaucgggaacggcugcuucgaguucuaccacaagugcaacgacgagugcauggaguccgugaagaacgggaccuacgacuaccccaaguacagcgaggaguccaagcucaaccgcgagaagaucgacggcgugaagcuggagagcaugggcguguaccagauccuggccaucuacagcacggucgccuccagccucgugcugcuggugucccucggggccaucagcuucuggaugugcuccaacggcagccugcagugccggaucugcaucuga

SEQ ID NO: 65449 - RNA, 1701 nt, Artificial Sequence; identical to SEQ ID NO: 64674
  derived and/or modified CDS sequence (opt1) from hemagglutinin__InfluenzaA__ABK40700

SEQ ID NO: 65450 - RNA, 1701 nt, Artificial Sequence; identical to SEQ ID NO: 64674
  derived and/or modified CDS sequence (opt1) from hemagglutinin__InfluenzaA__ABK40711

SEQ ID NO: 65451 - RNA, 1701 nt, Artificial Sequence
  derived and/or modified CDS sequence (opt1) from hemagglutinin__InfluenzaA__ABK40722
augaagaccaucaucgcccugagcuacauccucugccugguguucgcccagaagcugcccggcaacgacaacuccaccgcgacgcucugccuggggcaccacgccgucccgaacggcacccuggugaagaccaucaccaacgaccagaucgaggugacgaacgccaccgagcucguccagagcuccagcaccgggggcaucugcgacagcccccaccagauccuggacggggagaacugcacccugaucgacgcccuccugggcgacccccacugcgacggcuuccagaacaaggagugggaccuguucguggagcgcagcaaggccuacuccaacugcuaccccuacgacgugccggacuacgcgagccuccggucccuggucgccagcuccgggacgcuggaguucaacaacgagagcuucaacuggaccggcguggcccagaacgggaccuccagcgccugcaagcgccgguccaacaagagcuucuucucccgccucaacuggcugcaccagcugaaguacaaguaccccgcgcucaacgugaccaugcccaacaacgagaaguucgacaagcuguacaucuggggcguccaccaccccagcacggacaacgaccagaucucccuguacgcccaggccccggggcgggugaccgugagcaccaagcgcagccagcagaccgucauccccaacaucggcucccggcccugggugcgcggcgugagcucccggaucagcaucuacuggacgaucgucaagcccggggacauccuccugaucaacugcaccggcaaccugaucgccccgcgcggguacuucaagauccgguccggcaagagcuccaucaugcgcagcgacgccuccaucggcaagugcaacagcgagugcaucacccccaacggguccauccccaacgacaagcccuuccagaacgugaaccggaucaccuacggcgcgugcccgcgcuacgugaagcagaacacgcucaagcuggccaccgggaugcggaacguccccgagaagcagacccgcggcaucuucggggccaucgccggcuucaucgagaacggcugggaggggaugguggacggcugguacggguuccggcaccagaacagcgagggcaccgggcaggccgcggaccugaaguccacgcaggccgccaucaaccagaucaacggcaagcucaaccgccugaucgagaagaccaacgagaaguuccaccagaucgagaaggaguucagcgagguggagggccggauccaggaccuggagaaguacgucgaggacaccaagaucgaccucugguccuacaacgccgagcugcugguggcccucgagaaccagcacaccaucgaccugacggacagcgagaugaacaagcuguucgagcgcaccaagaagcagcuccgggagaacgcggaggacauggggaacggcugcuucaagaucuaccacaagugcgacaacgccugcaucggguccauccgcaacggcaccuacgaccacgacguguaccgcgacgaggcccugaacaaccgguuccagaucaagggggucgagcugaaguccggcuacaaggacuggauccucuggaucuccuucgccaucagcugcuuccugcugugcgugguccuccugggcuucaucaugugggccugccagaaggggaacauccgcugcaacaucugcaucuga

SEQ ID NO: 65452 - RNA, 1701 nt, Artificial Sequence; identical to SEQ ID NO: 64674
  derived and/or modified CDS sequence (opt1) from hemagglutinin__InfluenzaA__ABK40733

SEQ ID NO: 65453 - RNA, 1701 nt, Artificial Sequence; identical to SEQ ID NO: 65329
  derived and/or modified CDS sequence (opt1) from hemagglutinin__InfluenzaA__ABK40744

SEQ ID NO: 65454 - RNA, 1701 nt, Artificial Sequence; identical to SEQ ID NO: 64939
  derived and/or modified CDS sequence (opt1) from hemagglutinin__InfluenzaA__ABK79948

SEQ ID NO: 65455 - RNA, 1698 nt, Artificial Sequence; identical to SEQ ID NO: 65228
  derived and/or modified CDS sequence (opt1) from hemagglutinin__InfluenzaA__ABK79959

SEQ ID NO: 65456 - RNA, 1701 nt, Artificial Sequence
  derived and/or modified CDS sequence (opt1) from hemagglutinin__InfluenzaA__ABK79970
augaaggccaagcugcucgugcugcugugcgccuucaccgcgaccuacgccgacacgaucugcaucggcuaccacgccaacaacagcaccgacaccgucgacaccgugcucgagaagaacgugacggucacccacuccgugaaccugcuggaggacagccacaacgggaagcucugccgccugaagggcaccgcgccccugcagcucgggaacugcuccaucgccggcuggauccuggggaacccggagugcgagagccuguucuccaagaaguccuggagcuacaucgccgagacccccaaccccaagaacggcacgugcuaccccggcuacuucgccgacuacgaggagcuccgggagcagcugagcuccgugagcuccuucgagcgcuucgagaucuucccgaaggacagcuccuggcccaaccacaccgucaccaagggggugaccgccagcugcucccacaacggcaagagcuccuucuacaagaaccugcucuggcugacggagaagaacgggcuguaccccaaccucagcaaguccuacgugaacaagaagggcaaggagguccuggugcuguggggcgugcaccaccccagcaacaugggggaccagcgggccaucuaccacaaggagaacgcguacgucagcgugcucuccagccacuacucccgccgguucaccccggagaucgcccgccggcccaaggugcgcgaccaggagggccggaucaacuacuacuggacccugcuggagcccggggacaccaucaucuucgaggccaacggcaaccucaucgcccccugguacgccuucgcgcugagccgcggguucggcuccggcaucaucaucagcaacgccuccaugggggagugcgacgccaagugccagacgccgcagggcgccaucaacagcucccugcccuuccagaacguccaccccgugaccaucggggagugccccaaguacgugcggagcaccaagcuccgcauggucaccggccugcggaacgugccguccauccagagccgcgggcuguucggcgccaucgcgggcuucaucgagggcggguggacggggaugaucgacggcugguacggguaccaccaccagaacgagcagggcuccggcuacgccgccgaccagaaguccacccagaacgccaucaacgggaucaccaacaaggugaacagcaucaucgagaagaugaacacccaguucacggccgucggcaaggaguucaacaagcucgagcggcgcauggagaaccugaacaagaagguggacgacggguuccuggacaucuggaccuacaacgcggagcuccuggugcugcucgagaacgagcggacccuggacuuccacgacagcaacgucaagaaccuguacgagaaggugaagaaccagcucaagaacaacgccaaggagaucggcaacgggugcuucgaguucuaccacaagugcaacaacgagugcauggaguccgucaagaacggcaccuacgacuaccccaaguacagcaaggaguccaagcugaaccgcgagaagaucgacggcgugaagcuggagagcauggggguguaccagauccucgccaucuacagcacggucgccuccagccuggugcugcucgugucccugggcgccaucagcuucuggaugugcuccaacgggagccugcagugccggaucugcaucuga

SEQ ID NO: 65457 - RNA, 1701 nt, Artificial Sequence
  derived and/or modified CDS sequence (opt1) from hemagglutinin__InfluenzaA__ABK79981
augaagaccaucaucgcccugagcuacauccucugccugguguucacccagaagcugcccggcaacgacaacuccacggccacccucugccuggggcaccacgcggucccgaacggcacccuggugaagaccaucacgaacgaccagaucgaggugaccaacgccaccgagcucguccagagcuccagcaccgggggcaucugcgacagcccccaccagauccuggacggggagaacugcacgcugaucgacgcccuccugggcgacccccacugcgacggcuuccagaacaaggagugggaccuguucguggagcgcagcaaggccuacuccaacugcuaccccuacgacgugccggacuacgccagccuccggucccuggucgcgagcuccgggacccuggaguucaacaacgagagcuucaacuggaccggcguggcccagaacgggaccuccagcgccugcaagcgccgguccaacaagagcuucuucucccgccucaacuggcugcaccagcugaaguacaaguaccccgcccucaacgugacgaugcccaacaacgagaaguucgacaagcuguacaucuggggcguccaccaccccagcaccgacuccgaccagaucagccuguacgcgcaggccccggggcgggugaccgugagcaccaagcgcucccagcagacggucauccccaacaucggcagccggcccugggugcgcggcguguccagccggaucuccaucuacuggaccaucgucaagcccggggacauccuccugaucaacugcaccggcaaccugaucgccccgcgcggguacuucaagauccggagcggcaaguccagcaucaugcgcuccgacgccagcaucggcaagugcaacuccgagugcaucacccccaacgggagcauccccaacgacaagcccuuccagaacgugaaccggaucacguacggcgccugcccgcgcuacgugaagcagaacacccucaagcuggcgaccgggaugcggaacguccccgagaagcagacccgcggcaucuucggggccaucgccggcuucaucgagaacggcugggaggggaugguggacggcugguacggguuccggcaccagaacuccgagggcacggggcaggccgccgaccugaaguccacccaggcggccaucaaccagaucaacggcaagcucaaccgccugaucgagaagaccaacgagaaguuccaccagaucgagaaggaguucuccgagguggagggccggauccaggaccuggagaaguacgucgaggacaccaagaucgaccucuggagcuacaacgccgagcugcugguggcccucgagaaccagcacacgaucgaccugaccgacuccgagaugaacaagcuguucgagcgcaccaagaagcagcuccgggagaacgccgaggacauggggaacggcugcuucaagaucuaccacaagugcgacaacgcgugcaucgggagcauccgcaacggcaccuacgaccacgacguguaccgcgacgaggcccugaacaaccgguuccagaucaagggggucgagcugaaguccggcuacaaggacuggauccucuggaucagcuucgccaucagcugcuuccugcugugcgugguccuccugggcuucaucaugugggccugccagaaggggaacauccgcugcaacaucugcaucuga

SEQ ID NO: 65458 - RNA, 1701 nt, Artificial Sequence; identical to SEQ ID NO: 64674
  derived and/or modified CDS sequence (opt1) from hemagglutinin__InfluenzaA__ABK79992

SEQ ID NO: 65459 - RNA, 1701 nt, Artificial Sequence; identical to SEQ ID NO: 64945
  derived and/or modified CDS sequence (opt1) from hemagglutinin__InfluenzaA__ABK80025

SEQ ID NO: 65460 - RNA, 1701 nt, Artificial Sequence; identical to SEQ ID NO: 64945
  derived and/or modified CDS sequence (opt1) from hemagglutinin__InfluenzaA__ABK80036

SEQ ID NO: 65461 - RNA, 1701 nt, Artificial Sequence; identical to SEQ ID NO: 64945
  derived and/or modified CDS sequence (opt1) from hemagglutinin__InfluenzaA__ABK80047

SEQ ID NO: 65462 - RNA, 1701 nt, Artificial Sequence; identical to SEQ ID NO: 64790
  derived and/or modified CDS sequence (opt1) from hemagglutinin__InfluenzaA__ABK80058

SEQ ID NO: 65463 - RNA, 1701 nt, Artificial Sequence
  derived and/or modified CDS sequence (opt1) from hemagglutinin__InfluenzaA__ABK80069
augaagaccaucaucgcccugagcuacauccucugccugguguucgcccagaagcugcccgucaacgacaacuccaccgcgacgcucugccugggccaccacgccgugccgaacgggacccuggugaagaccaucaccaacgaccacaucgaggucacgaacgccaccgagcucgugcagagcuccagcaccggccgcaucugcgacagcccccaccagauccuggacggggagaacugcacccugaucgacgcccuccugggcgacccccacugcgacggguuccagaacaaggagugggaccuguucguggagcgguccacggccuacuccaacugcuaccccuacgacgucccggacuacgcgagccuccgcucccugguggccagcuccggcacccuggaguucaacaacgagagcuucaacuggaccggcguggcccagaacgggaccuccagcgccugcaagcggcgcuccaucaagagcuucuucucccggcucaacuggcugcaccagcugaaguacaaguaccccgcgcucaacgucacgaugcccaacaacgagaaguucgacaagcuguacaucuggggcgugcaccaccccagcaccgacuccgaccagaucagccuguacgcccaggccagcgggcgcgugaccgucuccaccaagcggagccagcagacggugaucccgaacaucggcucccgccccuggauccgcggggugagcucccggaucagcaucuacuggaccaucgucaagcccggcgacauccuccugaucaacuccaccggcaaccugaucgcgccccggggguacuucaagauccgcagcggcaaguccagcaucaugcgguccaacgccccgaucgggaagugcaacagcgagugcaucacccccaacggcuccauccccaacgacaagcccuuccagaacgugaaccgcaucgccuacggcgccugcccgcgguacgugaagcagaacacgcucaagcuggccaccgggaugcgcaacguccccgagaagcagacccggggcaucuucggggccaucgccggcuucaucgagaacgggugggagggcaugguggacggcugguacggguuccgccaccugaacagcgagggcaccgggcaggcggccgaccucaaguccacgcaggccgccaucaaccagaucaacggcaagcugaaccggcugaucgagaagaccaacgagaaguuccaccagaucgagaaggaguucagcgagguggaggggcgcauccaggaccucgagaaguacgucgaggacaccaagaucgaccugugguccuacaacgccgagcugcucguggcgcuggagaaccagcacaccaucgaccugacggacagcgagaugaacaagcuguucgagcggacccgcaagcagcuccgcgagaacgccgaggacgugggcaacggcugcuucaagaucuaccacaagugcgacaacgccugcaucggguccauccggaacggcaccuacgaccacgacgucuaccgcgacgaggcccugaacaaccgguuccagaucaaggggguggagcucaagagcggcuacaaggacuggauccuguggaucagcuucgccaucuccugcuuccugcucugcgucgugcugcugggguucaucaugugggcgugccagaagggcaacauccgcugcaacaucugcaucuga

SEQ ID NO: 65464 - RNA, 1701 nt, Artificial Sequence
  derived and/or modified CDS sequence (opt1) from hemagglutinin__InfluenzaA__ABK80080
augaagaccaucaucgcccugagcuacauccucugccugguguucgcccagaagcugcccgucaacgacaacuccaccgcgacgcucugccugggccaccacgccgugccgaacgggacccuggugaagaccaucaccaacgaccacaucgaggucacgaacgccaccgagcucgugcagagcuccagcaccggccgcaucugcgacagcccccaccagauccuggacggggagaacugcacccugaucgacgcccuccugggcgacccccacugcgacggguuccagaacaaggagugggaccuguucguggagcgguccacggccuacuccaacugcuaccccuacgacgucccggacuacgcgagccuccgcucccugguggccagcuccggcacccuggaguucaacaacgagagcuucaacuggaccggcguggcccagaacgggaccuccagcgccugcaagcggcgcuccaucaagagcuucuucucccggcucaacuggcugcaccagcugaaguacaaguaccccgcgcucaacgucacgaugcccaacaacgagaaguucgacaagcuguacaucuggggcgugcaccaccccagcaccgacuccgaccagaucagccuguacgcccaggccagcgggcgcgugaccgucuccaccaagcggagccagcagacggugaucccgaacaucggcucccgccccugggugcgcggggucagcucccggaucagcaucuacuggaccaucgugaagcccggcgacauccuccugaucaacuccaccggcaaccugaucgcgccccggggguacuucaagauccgcagcggcaaguccagcaucaugcgguccaacgccccgaucgggaagugcaacagcgagugcaucacccccaacggcuccauccccaacgacaagcccuuccagaacgugaaccgcaucacguacggcgccugcccgcgguacgucaagcagaacacccucaagcuggccaccgggaugcgcaacgugcccgagaagcagacccggggcaucuucggggccaucgccggcuucaucgagaacgggugggagggcaugguggacggcugguacggguuccgccaccagaacagcgagggcacggggcaggccgcggaccugaaguccacccaggccgccaucaaccagaucaacggcaagcucaaccggcugaucgagaagaccaacgagaaguuccaccagaucgagaaggaguucagcgaggucgaggggcgcauccaggaccuggagaaguacguggaggacaccaagaucgaccucugguccuacaacgccgagcugcugguggcccucgagaaccagcacacgaucgaccugaccgacagcgagaugaacaagcuguucgagcggacccgcaagcagcuccgcgagaacgcggaggacaugggcaacggcugccugaagaucuaccacaagugcgacaacgccugcaucggguccauccggaacggcaccuacgaccacgacgucuaccgcgacgaggcccugaacaaccgguuccagaucaaggggguggagcucaagagcggcuacaaggacuggauccuguggaucagcuucgccaucuccugcuuccugcucugcgucgugcugcugggguucaucaugugggccugccagaagggcaacauccgcugcaacaucugcaucuga

SEQ ID NO: 65465 - RNA, 1701 nt, Artificial Sequence; identical to SEQ ID NO: 64674
  derived and/or modified CDS sequence (opt1) from hemagglutinin__InfluenzaA__ABK80091

SEQ ID NO: 65466 - RNA, 1701 nt, Artificial Sequence; identical to SEQ ID NO: 64674
  derived and/or modified CDS sequence (opt1) from hemagglutinin__InfluenzaA__ABK80102

SEQ ID NO: 65467 - RNA, 1701 nt, Artificial Sequence; identical to SEQ ID NO: 64075
  derived and/or modified CDS sequence (opt1) from hemagglutinin__InfluenzaA__ABK80113

SEQ ID NO: 65468 - RNA, 1701 nt, Artificial Sequence
  derived and/or modified CDS sequence (opt1) from hemagglutinin__InfluenzaA__ABK80124
augaagaccaucaucgcccugagcuacauccucugccugguguucgcccagaagcugcccggcaacgacaacuccaccgcgacgcucugccuggggcaccacgccgucccgaacggcacccuggugaagaccaucaccaacgaccagaucgaggugacgaacgccaccgagcucguccagagcuccagcaccgggcgcaucugcgacagcccccaccagauccuggacggcgagaacugcacccugaucgacgcccuccugggggacccccacugcgacggcuuccagaacaaggagugggaccuguucguggagcggagcaaggccuacuccaacugcuaccccuacgacgugccggacuacgucagccuccgcucccugguggcgagcuccggcacgcuggaguucaacaacgagagcuucaacuggaccgggguggcccagaacggcaccuccagcgccugcaagcggcgcuccgacaagagcuucuucucccggcucaacuggcugcaccagcugaaguacaaguaccccgcccucaacgucaccaugcccaacaacgagaaguucgacaagcuguacaucuggggcgugcaccaccccgggacggacagcgaccagaucucccuguacgcgcaggccagcgggcgcgugaccgucagcaccaagcggucccagcagaccgugaucccgaacaucggcagccgccccugggugcggggcgucuccagccgcaucuccaucuacuggacgaucgugaagcccggggacauccuccugaucaacagcaccggcaaccugaucgcgccccggggguacuucaagauccgcuccggcaagagcuccaucaugcggagcgacgccccgaucggcaagugcaacuccgagugcaucacccccaacgggagcauccccaacgacaagcccuuccagaacgugaaccgcaucaccuacggcccgugcccccgguacgucaagcagaacacgcucaagcuggccaccgggaugcgcaacgugcccgagaagcagacccggggcaucuucggggccaucgccggcuucaucgagaacggcugggaggggaugauggacggcugguacggguuccgccaccagaacuccgagggcaccgggcaggccgccgaccugaaguccacgcaggccgcgaucaaccagaucaacggcaagcucaaccggcugaucgagaagaccaacgagaaguuccaccagaucgagaaggaguucuccgagguggagggccgcauccaggaccuggagaaguacgucgaggacaccaagaucgaccucuggagcuacaacgccgagcugcugguggcccucgagaaccagcacaccaucgaccugacggacuccgagaugaacaagcuguucgagcggaccaagaagcagcuccgcgagaacgccgaggacauggggaacggcugcuucaagaucuaccacaagugcgacaacgccugcaucgggagcauccgcaacggcaccuacgaccacgacguguaccgggacgaggcgcugaacaaccgcuuccagaucaagggggucgagcugaaguccggcuacaagaacuggauccucuggaucagcuucgccaucagcugcuuccugcugugcaucgugcuccugggcuucaucaugugggccugccagaaggggaacauccggugcaacaucugcaucuga

SEQ ID NO: 65469 - RNA, 1701 nt, Artificial Sequence; identical to SEQ ID NO: 64075
  derived and/or modified CDS sequence (opt1) from hemagglutinin__InfluenzaA__ABK80135

SEQ ID NO: 65470 - RNA, 1701 nt, Artificial Sequence; identical to SEQ ID NO: 64075
  derived and/or modified CDS sequence (opt1) from hemagglutinin__InfluenzaA__ABK80146

SEQ ID NO: 65471 - RNA, 1701 nt, Artificial Sequence; identical to SEQ ID NO: 64075
  derived and/or modified CDS sequence (opt1) from hemagglutinin__InfluenzaA__ABK80157

SEQ ID NO: 65472 - RNA, 1701 nt, Artificial Sequence; identical to SEQ ID NO: 64586
  derived and/or modified CDS sequence (opt1) from hemagglutinin__InfluenzaA__ABK80168

SEQ ID NO: 65473 - RNA, 1701 nt, Artificial Sequence
  derived and/or modified CDS sequence (opt1) from hemagglutinin__InfluenzaA__ABK80179
augaagaccaucaucgcccugagcuacauccucugccugguguucgcccagaagcugcccggcaacgacaacuccaccgcgacgcucugccuggggcaccacgccgucccgaacggcacccuggugaagaccaucaccaacgaccagaucgaggugacgaacgccaccgagcucguccagagcuccagcaccgggcgcaucugcgacagcccccaccagauccuggacggcgagaacugcacccugaucgacgcccuccugggggacccccacugcgacggcuuccagaacaaggagugggaccuguucguggagcggagcaaggccuacuccaacugcuaccccuacgacgugccggacuacgucagccuccgcucccugguggcgagcuccggcacgcuggaguucaacaacgagagcuucaacuggaccgggguggcccagaacggcaccuccagcgccugcaagcggcgcuccgacaagagcuucuucucccggcucaacuggcugcaccagcugaaguacaaguaccccgcccucaacgucaccaugcccaacaacgagaaguucgacaagcuguacaucuggggcgugcaccaccccgggacggacagcgaccagaucucccuguacgcgcaggccagcgggcgcgugaccgucagcaccaagcggucccagcagaccgugaucccgaacaucggcagccgccccugggugcggggcgucuccagccgcaucuccaucuacuggacgaucgugaagcccggggacauccuccugaucaacagcaccggcaaccugaucgcgccccggggguacuucaagauccgcuccggcaagagcuccaucaugcggagcgacgccccgaucggcaagugcaacuccgagugcaucacccccaacgggagcgugcccaacgacaagcccuuccagaacgucaaccgcaucaccuacggcgccugcccgcgguacgugaagcagaacacgcucaagcuggccaccgggaugcgcaacgugcccgagaagcagacccggggcaucuucggggccaucgccggcuucaucgagaacggcugggaggggaugauggacggcugguacggguuccgccaccagaacuccgagggcaccgggcaggccgccgaccugaaguccacgcaggcggccaucaaccagaucaacggcaagcucaaccggcugaucgagaagaccaacgagaaguuccaccagaucgagaaggaguucuccgaggucgagggccgcauccaggaccuggagaaguacguggaggacaccaagaucgaccucuggagcuacaacgccgagcugcugguggcccucgagaaccagcacaccaucgaccugacggacuccgagaugaacaagcuguucgagcggaccaagaagcagcuccgcgagaacgccgaggacauggggaacggcugcuucaagaucuaccacaagugcgacaacgcgugcaucgggagcauccgcaacggcaccuacgaccacgacgucuaccgggacgaggcccugaacaaccgccugcagaucaaggggguggagcucaaguccggcuacaaggacuggauccuguggaucagcuucgccaucagcugcuuccugcucugcaucguccugcugggcuucaucaugugggccugccagaaggggaacauccggugcaacaucugcaucuga

SEQ ID NO: 65474 - RNA, 1701 nt, Artificial Sequence; identical to SEQ ID NO: 64586
  derived and/or modified CDS sequence (opt1) from hemagglutinin__InfluenzaA__ABK80190

SEQ ID NO: 65475 - RNA, 1701 nt, Artificial Sequence; identical to SEQ ID NO: 65329
  derived and/or modified CDS sequence (opt1) from hemagglutinin__InfluenzaA__ABK80201

SEQ ID NO: 65476 - RNA, 1701 nt, Artificial Sequence
  derived and/or modified CDS sequence (opt1) from hemagglutinin__InfluenzaA__ABK80212
augaagaccaucaucgcccugagcuacauccucugccugguguucgcccagaagcugcccggcaacgacaacuccaccgcgacgcucugccuggggcaccacgccgucccgaacggcaccaucgugaagaccaucaccaacgaccagaucgaggugacgaacgccaccgagcugguccagagcuccagcaccgggggcaucugcgacagcccccaccagauccucgacggggagaacugcacccugaucgacgcccugcucggcgacccccagugcgacggcuuccagaacaagaagugggaccuguucguggagcgcagcaaggccuacuccaacugcuaccccuacgacgugccggacuacgcgagccugcggucccucgucgccagcuccgggacgcuggaguucaacaacgagagcuucgacuggaccggcgugacccagaacgggaccuccagcgccugcaagcgccgguccaacaagagcuucuucucccgccugaacuggcucacgcaccugaaguacaaguaccccgcccugaacgugaccaugcccaacaacgagaaguucgacaagcucuacaucuggggcguccaccaccccgggaccgacagcgaccagaucucccuguacgcgcaggccagcggccggaucaccgugagcacgaagcgcucccagcagaccgugaucccgaacaucggcagccggccccgcguccgggacguguccagccgcaucuccaucuacuggaccaucgugaagcccggggacauccugcucaucaacagcaccggcaaccugaucgcgccccggggguacuucaagauccgcuccggcaagagcuccaucaugcggagcgacgccccgaucggcaagugcaacuccgagugcaucacgcccaacgggagcauccccaacgacaagcccuuccagaacgucaaccgcaucaccuacggcgccugcccgcgguacgugaagcagaacacccugaagcucgccaccgggaugcgcaacgugcccgagaagcagacgcggggcaucuucggggccaucgccggcuucaucgagaacggcugggaggggauggucgacggcugguacggguuccgccaccagaacuccgagggcaccgggcaggccgccgaccugaaguccacccaggcggccaucaaccagaucaacggcaagcugaaccggcucaucggcaagaccaacgagaaguuccaccagaucgagaaggaguucuccgagguggaggggcgcauccaggaccuggagaaguacguggaggacacgaagaucgaccuguggagcuacaacgccgagcuccuggucgcccuggagaaccagcacaccaucgaccucaccgacuccgagaugaacaagcuguucgagcggaccaagaagcagcugcgcgagaacgccgaggacaugggcaacgggugcuucaagaucuaccacaagugcgacaacgcgugcaucggcagcauccgcaacgggacguacgaccacgacguguaccgggacgaggcccucaacaaccgcuuccagaucaagggcguggagcugaaguccggcuacaagaacuggauccuguggaucagcuucgccaucagcugcuuccuccugugcgucgcccugcucggguucaucaugugggccugccagaagggcaacauccggugcaacaucugcaucuga

SEQ ID NO: 65477 - RNA, 1701 nt, Artificial Sequence; identical to SEQ ID NO: 64540
  derived and/or modified CDS sequence (opt1) from hemagglutinin__InfluenzaA__ABK80223

SEQ ID NO: 65478 - RNA, 1701 nt, Artificial Sequence
  derived and/or modified CDS sequence (opt1) from hemagglutinin__InfluenzaA__ABK80234
augcgcaccaucaucgcccugagcuacauccucugccugguguucgcccagaagcugcccggcaacgacaacuccaccgcgacgcucugccuggggcaccacgccgucccgaacggcaccaucgugaagaccaucaccaacgaccagaucgaggugacgaacgccaccgagcugguccagagcuccagcaccgggggcaucugcgacagcccccaccagauccucgacggggagaacugcacccugaucgacgcccugcucggcgacccccagugcgacggcuuccagaacaagaagugggaccuguucguggagcggagcaaggccuacuccaacugcuaccccuacgacgugccggaccacgcgagccugcgcucccucgucgccagcuccgggacgcuggaguucaacaacgagagcuucgacuggaccggcgugacccagaacgggaccuccagcgccugcaagcggcgcuccaacaagagcuucuucucccggcugaacuggcucacgcaccugaaguacaaguaccccgcccugaacgugaccaugcccaacaacgagaaguucgacaagcucuacaucuggggcguccaccaccccgggaccgacagcgaccagaucucccuguacgcgcaggccagcggccgcaucaccgugagcacgaagcggucccagcagaccgugaucccgaacaucggcagccgcccccggguccgcgacguguccagccggaucuccaucuacuggaccaucgugaagcccggggacauccugcucaucaacagcaccggcaaccugaucgcgccccgcggguacuucaagauccgguccggcaagagcuccaucaugcgcagcgacgccccgaucggcaagugcaacuccgagugcaucacgcccaacgggagcauccccaacgacaagcccuuccagaacgucaaccggaucaccuacggcgccugcccgcgcuacgugaagcagaacacccugaagcucgccaccgggaugcggaacgugcccgagaagcagacgcgcggcaucuucggggccaucgccggcuucaucgagaacggcugggaggggauggucgacggcugguacggguuccggcaccagaacuccgagggcaccgggcaggccgccgaccugaaguccacccaggcggccaucaaccagaucaacggcaagcugaaccgccucaucggcaagaccaacgagaaguuccaccagaucgagaaggaguucuccgagguggaggggcggauccaggaccuggagaaguacguggaggacacgaagaucgaccuguggagcuacaacgccgagcuccuggucgcccuggagaaccagcacaccaucgaccucaccgacuccgagaugaacaagcuguucgagcgcaccaagaagcagcugcgcgagaacgccgaggacaugggcaacgggugcuucaagaucuaccacaagugcgacaacgcgugcaucggcagcauccggaacgggacguacgaccacgacguguaccgcgacgaggcccucaacaaccgguuccagaucaagggcguggagcugaaguccggcuacaaggacuggauccuguggaucagcuucgccaucagcugcuuccuccugugcgucgcccugcucggguucaucaugugggccugccagaagggcaacauccgcugcaacaucugcaucuga

SEQ ID NO: 65479 - RNA, 1701 nt, Artificial Sequence
  derived and/or modified CDS sequence (opt1) from hemagglutinin__InfluenzaA__ABK80245
augaagaccaucaucgcccugagcuacauccucugccugguguucgcccagaagcugcccggcaacgacaacuccaccgcgacgcucugccuggggcaccacgccgucccgaacggcaccaucgugaagaccaucaccaacgaccagaucgaggugacgaacgccaccgagcugguccagagcuccagcaccgggggcaucugcgacagcccccaccagauccucgacggggagaacugcacccugaucgacgcccugcucggcgacccccagugcgacggcuuccagaacaagaagugggaccuguucguggagcgcagcaaggcccacuccaacugcuaccccuacgacgugccggacuacgcgagccugcggucccucaucgccagcuccgggacgcuggaguucaacaacgagagcuucaacuggaccggcgucacccagaacgggaccuccagcgccugcaagcgccgguccaaccagagcuucuucucccgccugaacuggcucacgcaccugaaguucaaguaccccgcccugaacgugaccaugcccaacaacgagaaguucgacaagcucuacaucuggggcgugcaccaccccgggaccgacagcgaccagaucucccuguacgcgcaggccccgggccggaucaccgucagcacgaagcgcagccagcagaccgugauccccaacaucggcucccggccccgcgugcgggacaucagcucccgcaucagcaucuacuggaccaucgucaagcccggggacauccugcucaucaacuccaccggcaaccugaucgccccgcggggguacuucaagauccgcagcggcaaguccagcaucaugaaguccgacgcccccaucggcaagugcaacagcgagugcaucacgcccaacggguccauccccaacgacaagccguuccagaacgugaaccggaucaccuacggcgccugcccccgcuacgugaagcagaacacccugaagcucgcgaccgggaugcggaacguccccgagaagcagacgcgcggcaucuucggggccaucgccggcuucaucgagaacggcugggaggggaugguggacggcugguacggguuccggcaccagaacagcgagggcaccgggcaggccgccgaccugaaguccacccaggcggccaucaaccagaucaacggcaagcugaaccgccucaucggcaagaccaacgagaaguuccaccagaucgagaaggaguucagcgagguggaggggcggauccaggaccuggagaaguacgucgaggacacgaagaucgaccugugguccuacaacgccgagcuccugguggcccuggagaaccagcacaccaucgaccucaccgacagcgagaugaacaagcuguucgagcgcaccaagaagcagcugcgggagaacgccgaggacaugggcaacgggugcuucaagaucuaccacaagugcgacaacgcgugcaucggcuccauccgcaacgggacguacgaccacgacguguaccgcgacgaggcccucaacaaccgguuccagaucaagggcgucgagcugaaguccggcuacaaggacuggauccuguggaucuccuucgccaucagcugccuccugcugugcguggcccuccugggguucaucaugugggccugccagaagggcaacauccgcugcaacaucugcaucuga

SEQ ID NO: 65480 - RNA, 1701 nt, Artificial Sequence; identical to SEQ ID NO: 65479
  derived and/or modified CDS sequence (opt1) from hemagglutinin__InfluenzaA__ABK80256

SEQ ID NO: 65481 - RNA, 1701 nt, Artificial Sequence; identical to SEQ ID NO: 64636
  derived and/or modified CDS sequence (opt1) from hemagglutinin__InfluenzaA__ABK80267

SEQ ID NO: 65482 - RNA, 1701 nt, Artificial Sequence; identical to SEQ ID NO: 64657
  derived and/or modified CDS sequence (opt1) from hemagglutinin__InfluenzaA__ABK80278

SEQ ID NO: 65483 - RNA, 1701 nt, Artificial Sequence
  derived and/or modified CDS sequence (opt1) from hemagglutinin__InfluenzaA__ABK80289
augaagaccaucaucgcccugagcuacauccucugccugguguucgcccagaagcugcccggcaacgacaacuccaccgcgacgcucugccuggggcaccacgccgucccgaacggcaccaucgugaagaccaucaccaacgaccagaucgaggugacgaacgccaccgagcugguccagagcuccagcaccgggggcaucugcgacagcccccaccagauccucgacggggagaacugcacccugaucgacgcccugcucggcgacccccagugcgacggcuuccagaacaagaagugggaccuguucguggagcgcagcaaggccuacuccaacugcuaccccuacgacgugccggacuacgcgagccugcggucccucgucgccagcuccgggacgcuggaguucaacaacgagagcuucaacuggaccggcgugacccagaacgggaccuccagcgccugcaagcgccgguccaacaacagcuucuucucccgccugaacuggcucacgcaccugaaguucaaguaccccgcccugaacgugaccaugcccaacaacgagaaguucgacaagcucuacaucuggggcguccaccaccccgggaccgacaacgaccagaucuuccuguacgcgcaggccagcggccggaucaccguguccacgaagcgcagccagcagaccgugaucccgaacaucggcagccggccccgcguccggaacauccccucccgcaucagcaucuacuggaccaucgugaagcccggggacauccugcucaucaacuccaccggcaaccugaucgccccgcggggguacuucaagauccgcagcggcaaguccagcaucaugcgguccgacgcccccaucggcaagugcaacagcgagugcaucacgcccaacggguccauccccaacgacaagccguuccagaacgugaaccgcaucaccuacggcgccugcccccgguacgucaagcagaacacccugaagcucgcgaccgggaugcgcaacgugcccgagaagcagacgcggggcaucuucggggccaucgccggcuucaucgagaacggcugggaggggaugguggacggcugguacggguuccgccaccagaacagcgagggcaccgggcaggccgccgaccugaaguccacccaggcggccaucaaccagaucaacggcaagcugaaccggcucaucggcaagaccaacgagaaguuccaccagaucgagaaggaguucagcgaggucgaggggcgcauccaggaccuggagaaguacguggaggacacgaagaucgaccugugguccuacaacgccgagcuccugguggcccuggagaaccagcacaccaucgaccucaccgacagcgagaugaacaagcuguucgagcggaccaagaagcagcugcgcgagaacgccgaggacaugggcaacgggugcuucaagaucuaccacaagugcgacaacgcgugcaucggcuccauccgcaacgggacguacgaccacgacgucuaccgggacgaggcccucaacaaccgcuuccagaucaagggcguggagcugaaguccggcuacaaggacuggauccuguggaucuccuucgccaucagcugcuuccuccugugcguggcccugcucggguucaucaugugggccugccagaagggcaacauccggugcaacaucugcaucuga

SEQ ID NO: 65484 - RNA, 1701 nt, Artificial Sequence; identical to SEQ ID NO: 64075
  derived and/or modified CDS sequence (opt1) from hemagglutinin__InfluenzaA__ABK80300

SEQ ID NO: 65485 - RNA, 1701 nt, Artificial Sequence; identical to SEQ ID NO: 64075
  derived and/or modified CDS sequence (opt1) from hemagglutinin__InfluenzaA__ABK80311

SEQ ID NO: 65486 - RNA, 1707 nt, Artificial Sequence
  derived and/or modified CDS sequence (opt1) from hemagglutinin__InfluenzaA__ABL07019
auggagaagaucgugcugcuccugagcaucgucucccuggucaagagcgaccagaucugcaucggcuaccacgccaacaacuccaccgagcaggucgacaccaucauggagaagaacgugacggugacccacgcccaggacauccucgagaagacccacaacgggaagcugugcgaccuggacggcgugaagccccucauccugcgcgacugcagcguggcgggguggcugcucggcaacccgaugugcgacgaguucaucaacgugcccgagugguccuacaucguggagaaggccaaccccaccaacgaccugugcuaccccgggagcuucaacgacuacgaggagcugaagcaccuccugucccggaucaaccacuucgagaagauccagaucauccccaagagcuccuggagcgaccacgaggccuccagcggcgucuccagcgccugcccguaccugggcucccccagcuucuuccgcaacgugguguggcucacgaagaagaacuccaccuaccccaccaucaagaaguccuacaacaacaccaaccaggaggaccugcugguccucugggggauccaccacccgaacaacgaggccgagcagacgcggcuguaccagaaccccaccaccuacaucuccaucggcaccagcacgcugaaccagcgccucgugcccaagaucgcgacccggagcaaggugaacgggcaguccggccgcauggaguucuucuggaccauccugaagcccaacgacgccaucaacuucgagagcaacgggaacuucaucgccccggaguacgccuacaagaucgucaagaagggcgacuccgcgaucaugaaguccgagcuggaguacagcaacugcaacaccaagugccagacgcccaugggcgccaucaacagcuccaugcccuuccacaacauccacccccucaccaucggggagugcccgaaguacgucaagagcaaccggcuggugcuggccaccggccuccgcaacagcccccagcgggagagccgccggaagaagcgcgggcuguucggcgccaucgccggcuucaucgagggcggguggcaggggaugguggacggcugguacggguaccaccacuccaacgagcagggcagcggcuacgcggccgacaaggaguccacccagaaggccaucgacggggugacgaacaaggugaacagcaucaucgacaagaugaacacccaguucgaggccgucggccgggaguucaacaaccuggagcgccggaucgagaaccucaacaagaagauggaggacggguuccuggacguguggaccuacaacgccgagcugcucgugcugauggagaacgagcgcacccuggacuuccacgacuccaacgucaagaaccucuacgacaaggugcggcugcagcugcgcgacaacgcgaaggagcucggcaacgggugcuucgaguucuaccacaagugcgacaacgagugcauggagagcauccggaacggcacguacaacuacccccaguacuccgaggaggcccgccugaagcgggaggagaucagcggcgucaagcuggaguccaucgggaccuaccagauccucagcaucuacagcaccguggccuccagccuggcccuggccaucaugaucgcgggccucucccuguggaugugcagcaacgggucccugcagugccgcaucugcaucuga

SEQ ID NO: 65487 - RNA, 1707 nt, Artificial Sequence
  derived and/or modified CDS sequence (opt1) from hemagglutinin__InfluenzaA__ABL07030
auggagaagaucgugcugcuccuggccaucgucagccuggugaaguccgaccagaucugcaucggcuaccacgccaacaacagcaccgagcaggucgacaccaucauggagaagaacgugacggugacccacgcgcaggacauccucgagaagacccacaacgggaagcugugcgaccuggacggcgugaagccccucauccugcgcgacugcuccgucgccggguggcugcucggcaacccgaugugcgacgaguucaucaacgugcccgaguggagcuacaucguggagaaggccaaccccaccaacgaccugugcuaccccggguccuucaacgacuacgaggagcugaagcaccuccugagccggaucaaccacuucgagaagauccagaucaucccgaaguccagcugguccgaccacgaggccagcuccggcgucagcuccgccugccccuaccugggcagccccuccuucuuccgcaacgugguguggcucaucaagaagaacagcacguaccccaccaucaagaaguccuacaacaacaccaaccaggaggaccugcugguccucugggggauccaccacccgaacgacgcggccgagcagacccggcuguaccagaaccccacgaccuacaucagcaucggcaccuccacccugaaccagcgccucgugcccaagaucgccacgcggagcaaggugaacgggcagagcggccgcauggaguucuucugggccauccugaagcccaacgacgcgaucaacuucgaguccaacgggaacuucaucgccccggaguacgccuacaagaucgucaagaagggcgacagcgccaucaugaaguccgagcuggaguacggcaacugcaacaccaagugccagacccccaugggggccaucaacagcuccaugcccuuccacaacauccacccccucaccaucggcgagugcccgaaguacgugaaguccaaccggcuggugcuggcgacggggcuccgcaacagcccccagcgggagagccgccggaagaagcgcggccuguucggcgccaucgccggguucaucgagggcggguggcagggcauggucgacgggugguacggcuaccaccacuccaacgagcagggcagcggguacgccgccgacaaggaguccacccagaaggcgaucgacggcgugaccaacaaggugaacagcaucaucgacaagaugaacacccaguucgaggccgucgggcgggaguucaacaaccuggagcgccggaucgagaaccucaacaagaagauggaggacggcuuccuggacguguggacguacaacgccgagcugcucgugcugauggagaacgagcgcacccuggacuuccacgacuccaacgucaagaaccucuacgacaaggugcggcugcagcugcgcgacaacgccaaggagcucgggaacggcugcuucgaguucuaccacaagugcgacaacgagugcauggagagcauccggaacggcaccuacaacuacccccaguacuccgaggaggcccgccugaagcgggaggagaucagcggggucaagcuggaguccaucggcaccuaccagauccucagcaucuacuccacgguggcgagcagccuggcccuggccaucaugaucgccgggcucucccuguggaugugcagcaacggcucccugcagugccgcaucugcaucuga

SEQ ID NO: 65488 - RNA, 1707 nt, Artificial Sequence
  derived and/or modified CDS sequence (opt1) from hemagglutinin__InfluenzaA__ABL10088
auggagaagaucgugcugcuguucgccaucgucagccuggugaaguccgaccagaucugcaucggcuaccacgccaacaacagcaccgagcaggucgacaccaucauggagaagaacgugacggugacccacgcgcaggacauccuggagaagacccacaacgggaagcucugcgaccuggacggcgugaagccccugauccuccgcgacugcuccgucgccggguggcugcugggcaacccgaugugcgacgaguucaucaacgugcccgaguggagcuacaucguggagaaggccaaccccgucaacgaccucugcuaccccggggacuucaacgacuacgaggagcugaagcaccuccucucccggaucaaccacuucgagaagauccagaucauccccaagagcuccuggagcucccacgaggccagccugggcguguccagcgccugcccguaccagggcaaguccagcuucuuccgcaacguggucuggcugaucaagaagaacuccaccuaccccacgaucaagcggagcuacaacaacaccaaccaggaggaccuccuggugcugugggggauccaccaccccaacgacgcggccgagcagaccaagcucuaccagaacccgaccacguacaucuccgugggcaccagcacccugaaccagcgccuggucccccggaucgccacccgcuccgaggugaacgggcagagcggccggauggaguucuucuggacgauccucaagcccaacgacgccaucaacuucgagagcaacgggaacuucguggcgcccgaguacgccuacaagaucgucaagaagggcgacuccaccaucaugaaguccgagcuggaguacggcaacugcaacaccaagugccagaccccgaugggggccaucaacagcagcaugcccuuccacaacauccacccccugacgaucggcgagugccccaaguacgugaaguccaaccgccucgugcuggccaccgggcugcggaacagcccgcagcgcgagcggcgccggaagaagcgcggccucuucggcgccaucgcgggguucaucgagggcggguggcagggcauggucgacgggugguacggcuaccaccacuccaacgagcagggcagcggguacgccgccaacaaggaguccacccagaaggccaucgacggcgugaccaacaaggugaacagcaucaucgacaagaugaacacgcaguucgaggccgucgggcgggaguucaacaaccuggagcgccggaucgagaaccugaacaagaagauggaggacggcuuccucgacguguggaccuacaacgcggagcugcugguccucauggagaacgagcgcacccuggacuuccacgacuccaacgugaagaaccuguacgacaaggugcggcuccagcugcgcgacaacgccaaggagcuggggaacggcugcuucgaguucuaccacaagugcgacaacgagugcauggagagcguccggaacggcaccuacgacuacccccaguacuccgaggaggcccgccucaagcgcgaggagaucagcggggugaagcuggaguccaucggcaucuaccagauccugagcaucuacuccacgguggccagcucccucgcccuggcgaucauggucgccgggcugagccucuggaugugcagcaacggcucccugcagugccggaucugcaucuga

SEQ ID NO: 65489 - RNA, 1707 nt, Artificial Sequence
  derived and/or modified CDS sequence (opt1) from hemagglutinin__InfluenzaA__ABL31766
auggagaagaucgugcugcuccuggccaucgucagcuucgugaaguccgaccagaucugcaucggcuaccacgccaacaacagcaccgagcaggucgacaccaucauggagaagaacgugacggugacccacgcgcaggacauccuggagaagacccacaacgggaagcucugcgaccuggacggcgugaagccccugauccuccgcgacugcuccgucgccggguggcugcugggcaacccgaugugcgacgaguucaucaacgugcccgaguggagcuacaucguggagaaggccaaccccaccaacgaccucugcuaccccggguccuucaacgacuacgaggagcugaagcaccuccugagccggaucaaccacuucgagaagauccagaucaucccgaaguccagcugguccgaccacgaggccagcuccggcgucagcuccgccugccccuaccugggcagccccuccuucuuccgcaacgugguguggcugaucaagaagaacagcacguaccccaccaucaagaaguccuacaacaacaccaaccaggaggaccuccugguccugugggggauccaccacccgaacgacgcggccgagcagacccggcucuaccagaaccccacgaccuacaucagcaucggcaccuccacccugaaccagcgccuggugcccaagaucgccacgcggagcaaggugaacgggcagagcggccgcauggaguucuucugggccauccucaagcccaacgacgcgaucaacuucgaguccaacgggaacuucaucgccccggaguacgccuacaagaucgucaagaagggcgacagcgccaucaugaaguccgagcuggaguacggcaacugcaacaccaagugccagacccccaugggggccaucaacagcuccaugcccuuccacaacauccacccccugaccaucggcgagugcccgaaguacgugaaguccaaccggcucgugcuggcgacggggcugcgcaacagcccccagcgggagagccgccggaagaagcgcggccucuucggcgccaucgccggguucaucgagggcggguggcagggcauggucgacgggugguacggcuaccaccacuccaacgagcagggcagcggguacgccgccgacaaggaguccacccagaaggcgaucgacggcgugaccaacaaggugaacagcaucaucgacaagaugaacacccaguucgaggccgucgggcgggaguucaacaaccuggagcgccggaucgagaaccugaacaagaagauggaggacggcuuccucgacguguggacguacaacgccgagcugcuggugcucauggagaacgagcgcacccuggacuuccacgacuccaacgucaagaaccuguacgacaaggugcggcuccagcugcgcgacaacgccaaggagcuggggaacggcugcuucgaguucuaccacaagugcgacaacgagugcauggagagcauccggaacggcaccuacaacuacccccaguacuccgaggaggcccgccucaagcgggaggagaucagcggggucaagcuggaguccaucggcaccuaccagauccugagcaucuacuccacgguggcgagcagccucgcccuggccaucaugaucgccgggcugucccucuggaugugcagcaacggcucccugcagugccgcaucugcaucuga

SEQ ID NO: 65490 - RNA, 1707 nt, Artificial Sequence
  derived and/or modified CDS sequence (opt1) from hemagglutinin__InfluenzaA__ABL31780
auggagaagaucgugcugcuccugagcaucgucucccuggugaaguccgaccagaucugcaucggcuaccacgccaacaacuccaccgagcaggucgacaccaucauggagaagaacgugacggugacccacgcccaggacauccucgagaagacccacaacgggaagcugugcgaccuggacggcgugaagccccucauccugcgcgacugcagcgucgcgggguggcugcucggcaacccgaugugcgacgaguucaucaacgugcccgagugguccuacaucguggagaaggccaaccccaccaacgaccugugcuaccccgggagcuucaacgacuacgaggagcugaagcaccuccugucccggaucaaccacuucgagaagauccagaucaucccgaagggcagcugguccgaccacgaggccagcuccggcgucagcuccgccugccccuaccugcgcagccccuccuucuuccggaacgugguguggcucaucaagaagaacagcacguaccccaccaucaagaaguccuacaacaacaccaaccaggaggaccugcugguccucugggggauccaccacccgaacaacgaggccgagcagacccgccuguaccagaaccccacgaccuacaucagcaucggcaccuccacccugaaccagcggcucgugcccaagaucgcgacgcgcagcaaggugaacgggcagagcggccggauggaguucuucuggaccauccugaagcccaacgacgccaucaacuucgaguccaacgggaacuucaucgccccggaguacgccuacaagaucgucaagaagggcgacagcgcgaucaugaaguccgagcuggaguacggcaacugcaacaccaagugccagacccccaugggggccaucaacagcuccaugcccuuccacaacauccacccccucacgaucggcgagugcccgaaguacgucaagagcaaccgccuggugcuggccaccgggcuccggaacagcccccagcgcgagagccggcgcaagaagcggggccuguucggcgccaucgccggguucaucgagggcggguggcagggcaugguggacgggugguacggcuaccaccacuccaacgagcagggcagcggguacgcggccgacaaggaguccacccagaaggccaucgacggcgugaccaacaaggugaacagcaucaucgacaagaugaacacgcaguucgaggccgucgggcgcgaguucaacaaccuggagcggcgcaucgagaaccucaacaagaagauggaggacggcuuccuggacguguggaccuacaacgccgagcugcucgugcugauggagaacgagcggacccuggacuuccacgacuccaacgucaagaaccucuacgacaaggugcgccugcagcugcgggacaacgcgaaggagcucgggaacggcugcuucgaguucuaccacaagugcgacaacgagugcauggagagcauccgcaacggcaccuacaacuacccccaguacuccgaggaggcccggcugaagcgcgaggagaucagcggggucaagcuggaguccaucggcacguaccagauccucagcaucuacuccaccguggccagcagccuggcccuggccaucaugaucgcggggcucucccuguggaugugcagcaacggcucccugcagugccgcaucugcaucuga

SEQ ID NO: 65491 - RNA, 1701 nt, Artificial Sequence
  derived and/or modified CDS sequence (opt1) from hemagglutinin__InfluenzaA__ABL67165
augaagaccaucaucgcccugagcuacauccucugccugguguucgcccagaagcugcccggcaacgacaacuccaccgcgacgcucugccuggggcaccacgccgucccgaacggcaccaucgugaagaccaucaccaacgaccagaucgaggugacgaacgccaccgagcugguccagagcuccagcaccuccgggaucugcgacagcccccaccagauccucgacggcgagaacugcacccugaucgacgcccugcucggggacccccagugcgacggcuuccagaacaagaagugggaccuguucguggagcgcuccaaggccuacagcaacugcuaccccuacgacgugccggaccacgcgucccugcggagccucgucgccuccagcggcacgcuggaguucaacaacgaguccuucgacuggaccggggugacccagaacggcaccagcuccgccugcaagcgccggagcaacaaguccuucuucagccgccugaacuggcucacgcaccugaaguacaaguaccccgcccugaacgugaccaugcccaacaacgagaaguucgacaagcucuacaucuggggcguccaccaccccgggaccgacuccgaccagaucagccuguacgcgcaggccagcgggcggaucaccguguccacgaagcgcagccagcagaccgugaucccgaacaucggcucccggccccgcguccgggacgugagcucccgcaucagcaucuacuggaccaucgugaagcccggcgacauccugcucaucaacuccaccgggaaccugaucgcgccccggggcuacuucaagauccgcagcgggaaguccagcaucaugcgguccgacgccccgaucggcaagugcaacagcgagugcaucacgcccaacggcuccauccccaacgacaagcccuuccagaacgucaaccgcaucaccuacggggccugcccgcgguacgugaagcagaacacccugaagcucgccaccggcaugcgcaacgugcccgagaagaagacgcgggggaucuucggcgccaucgccggguucaucgagaacggcugggagggcauggucgacgggugguacggcuuccgccaccagaacagcgaggggaccggccaggccgccgaccugaaguccacccaggcggccaucaaccagaucaacgggaagcugaaccggcucaucggcaagaccaacgagaaguuccaccagaucgagaaggaguucagcgagguggagggccgcauccaggaccuggagaaguacguggaggacacgaagaucgaccugugguccuacaacgccgagcuccuggucgcccuggagaaccagcacaccaucgaccucaccgacagcgagaugaacaagcuguucgagcggaccaagaagcagcugcgcgagaacgccgaggacauggggaacggcugcuucaagaucuaccacaagugcgacaacgcgugcaucggguccauccgcaacggcacguacgaccacgacguguaccgggacgaggcccucaacaaccgcuuccagaucaaggggguggagcucaagagcggcuacaaggacuggauccuguggaucagcuucgccaucuccugcuuccugcugugcgucgcccugcucggcuucaucaugugggccugccagaaggggaacauccggugcaacaucugcaucuga

SEQ ID NO: 65492 - RNA, 1701 nt, Artificial Sequence
  derived and/or modified CDS sequence (opt1) from hemagglutinin__InfluenzaA__ABL67176
augaagaccaucaucgcccugagcuacauccucugccugguguucacccagaagcugcccggcaacgacaacuccacggccacccucugccuggggcaccacgcggucccgaacggcacccuggugaagaccaucacgaacgaccagaucgaggugaccaacgccaccgagcucguccagagcuccagcaccgggggcaucugcgacagcccccaccagauccuggacggggagaacugcacgcugaucgacgcccuccugggcgacccccacugcgacggcuuccagaacaaggagugggaccuguucguggagcgcagccgggccuacuccaacugcuaccccuacgacgugccggacuacgccagccuccgcucccuggucgcgagcuccgggacccuggaguucaacaacgagagcuucaacuggaccggcguggcccagaacgggaccuccagcgccugcaagcggcgcuccaacaagagcuucuucucccggcucaacuggcugcaccagcugaaguacaaguaccccgcccucaacgugacgaugcccaacaacgagaaguucgacaagcuguacaucuggggcguccaccaccccagcaccgacuccgaccagaucagccuguacgcgcaggccccggggcgcgugaccgugagcaccaagcggucccagcagacggucauccccaacaucggcagccgccccugggugcggggcguguccagccgcaucuccaucuacuggaccaucgucaagcccggggacauccuccugaucaacugcaccggcaaccugaucgccccgcggggguacuucaagauccgcagcggcaaguccagcaucaugcgguccgacgccagcaucggcaagugcaacuccgagugcaucacccccaacgggagcauccccaacgacaagcccuuccagaacgugaaccgcaucacguacggcgccugcccgcgguacgugaagcagaacacccucaagcuggcgaccgggaugcgcaacguccccgagaagcagacccggggcaucuucggggccaucgccggcuucaucgagaacggcugggaggggaugguggacggcugguacggguuccgccaccagaacuccgagggcacggggcaggccgccgaccugaaguccacccaggcggccaucaaccagaucaacggcaagcucaaccggcugaucgagaagaccaacgagaaguuccaccagaucgagaaggaguucuccgagguggagggccgcauccaggaccuggagaaguacgucgaggacaccaagaucgaccucuggagcuacaacgccgagcugcugguggcccucgagaaccagcacacgaucgaccugaccgacuccgagaugaacaagcuguucgagcggaccaagaagcagcuccgcgagaacgccgaggacauggggaacggcugcuucaagaucuaccacaagugcgacaacgcgugcaucgggagcauccgcaacggcaccuacgaccacgacguguaccgggacgaggcccugaacaaccgcuuccagaucaagggggucgagcugaaguccggcuacaaggacuggauccucuggaucagcuucgccaucagcugcuuccugcugugcgugguccuccugggcuucaucaugugggccugccagaaggggaacauccggugcaacaucugcaucuga

SEQ ID NO: 65493 - RNA, 1701 nt, Artificial Sequence; identical to SEQ ID NO: 65456
  derived and/or modified CDS sequence (opt1) from hemagglutinin__InfluenzaA__ABL67187

SEQ ID NO: 65494 - RNA, 1701 nt, Artificial Sequence; identical to SEQ ID NO: 65411
  derived and/or modified CDS sequence (opt1) from hemagglutinin__InfluenzaA__ABL67209

SEQ ID NO: 65495 - RNA, 1701 nt, Artificial Sequence; identical to SEQ ID NO: 64945
  derived and/or modified CDS sequence (opt1) from hemagglutinin__InfluenzaA__ABL67253

SEQ ID NO: 65496 - RNA, 1701 nt, Artificial Sequence
  derived and/or modified CDS sequence (opt1) from hemagglutinin__InfluenzaA__ABL67264
augaaggccaagcugcucgugcugcugugcgcccucagcgcgaccgacgccgacaccaucugcaucggcuaccacgccaacaacuccacggacaccgucgacaccgugcuggagaagaacgugaccgucacgcacagcgugaaccugcucgaggacaaccacaacgggaagcugugcaagcugaagggcaucgcgccccuccagcuggggaagugcuccaucgccggcuggauccuggggaacccggagugcgagagccucuucuccaagaaguccuggagcuacaucgccgagacccccaacagcgagaacgggaccugcuaccccggcuacuucgccgacuacgaggagcugcgcgagcagcuguccagcguguccagcuucgagcgguucgagaucuuccccaaggaguccagcuggccgaagcacaacgucaccaagggggugacggccuccugcagccacaagggcaaguccagcuucuaccgcaaccuccuguggcugaccgagaagaacggguccuaccccaaccucagcaagagcuacgugaacaacaaggagaaggagguccuggugcuguggggcgugcaccaccccuccaacaucgaggaccagaagaccaucuaccggaaggagaacgccuacgucagcgugguguccagccacuacaaccgccgguucacccccgagaucgcgaagcgcccgaagguccggaaccaggaggggcgcaucaacuacuacuggacgcuccuggagcccggcgacaccaucaucuucgaggccaacggcaaccugaucgcccccugguacgccuucgcccucucccggggguucggcagcgggaucaucaccuccaacgcgagcauggacgagugcgacgccaagugccagacgccccagggcgccaucaacuccagcuucccguuccagaacgugcaccccgugaccaucggcgagugccccaaguacguccgcuccaccaagcugcggauggugaccgggcugcgcaacauccccagcauccagucccggggccucuucggggccaucgccggcuucaucgagggcggcuggaccggcaugaucgacgggugguacggcuaccaccaccagaacgagcaggggagcggcuacgcggccgaccagaaguccacgcagaacgccaucaacgggaucaccaacaaggugaacagcaucaucgagaagaugaacacccaguucaccgccgucggcaaggaguucaacaagcuggagaagcgcauggagaaccugaacaagaagguggacgacggcuuccucgacaucuggacguacaacgccgagcugcuggugcuccuggagaacgagcggacccuggacuuccacgacuccaacgucaagaaccucuacgagaaggucaagagccagcugaagaacaacgcgaaggagaucgggaacggcugcuucgaguucuaccacaagugcaacaacgagugcauggaguccgugaagaacgggaccuacgacuacccgaaguacagcgaggagagcaagcugaaccgcgagaagaucgacggcgugaagcucgaguccauggggguguaccagauccuggccaucuacagcaccgucgccuccagccuggugcuccuggugucccugggcgccaucagcuucuggaugugcuccaacggcagccuccagugccggaucugcaucuga

SEQ ID NO: 65497 - RNA, 1701 nt, Artificial Sequence
  derived and/or modified CDS sequence (opt1) from hemagglutinin__InfluenzaA__ABL67275
augaagaccaucaucgcccugagcuacauccucugccugguguucgcccagaagcugcccgucaacgacaacuccaccgcgacgcucugccugggccaccacgccgugccgaacgggacccuggugaagaccaucaccaacgaccacaucgaggucacgaacgccaccgagcucgugcagagcuccagcaccggccgcaucugcgacagcccccaccagauccuggacggggagaacugcacccugaucgacgcccuccugggcgacccccacugcgacggguuccagaacaaggagugggaccuguucguggagcggagcacggccuacuccaacugcuaccccuacgacgucccggacuacgcgagccuccgcucccugguggccagcuccggcacccuggaguucaacaacgagagcuucaacuggaccggcguggcccagaacgggaccuccagcgccugcaagcggcgcuccaucaagagcuucuucucccggcucaacuggcugcaccagcugaaguacaaguaccccgcgcucaacgucacgaugcccaacaacgagaaguucgacaagcuguacaucuggggcgugcaccaccccagcaccgacuccgaccagaucagccuguacgcccaggccagcgggcgcgugaccgucuccaccaagcggagccagcagacggugaucccgaacaucggcucccgccccugggugcgcggggucagcucccggaucagcaucuacuggaccaucgugaagcccggcgacauccuccugaucaacuccaccggcaaccugaucgcgccccggggguacuucaagauccgcagcggcaaguccagcaucaugcgguccaacgccccgaucgggaagugcaacagcgagugcaucacccccaacggcuccauccccaacgacaagcccuuccagaacgugaaccgcaucacguacggcgccugcccgcgguacgucaagcagaacacccucaagcuggccaccgggaugcgcaacgugcccgagaagcagacccggggcaucuucggggccaucgccggcuucaucgagaacgggugggagggcaugguggacggcugguacggguuccgccaccagaacagcgagggcacggggcaggccgcggaccugaaguccacccaggccgccaucaaccagaucaacggcaagcucaaccggcugaucgagaagaccaacgagaaguuccaccagaucgagaaggaguucagcgaggucgaggggcgcauccaggaccuggagaaguacguggaggacaccaagaucgaccucugguccuacaacgccgagcugcugguggcccucgagaaccagcacacgaucgaccugaccgacagcgagaugaacaagcuguucgagcggacccgcaagcagcuccgcgagaacgcggaggacgucggcaacggcugcuucaagaucuaccacaagugcgacaacgccugcaucggguccauccggaacggcaccuacgaccacgacguguaccgcgacgaggcccugaacaaccgguuccagaucaagggggucaagcugaaguccggcuacaaggacuggauccucuggaucagcuucgccaucuccugcuuccugcugugcguggugcuccugggguucaucaugugggccugccagaagggcaacauccgcugcaacaucugcaucuga

SEQ ID NO: 65498 - RNA, 1701 nt, Artificial Sequence
  derived and/or modified CDS sequence (opt1) from hemagglutinin__InfluenzaA__ABL67286
augaagaccaucaucgcccugagcuacauccucugccugguguucgcccagaagcugcccggcaacgacaacuccaccgcgacgcucugccuggggcaccacgccgucccgaacggcacccuggugaagaccaucaccaacgaccagaucgaggugacgaacgccaccgagcucguccagagcuccagcaccgggcgcaucugcgacagcccccaccagauccuggacggcgagaacugcacccugaucgacgcccuccugggggacccccacugcgacggcuuccagaacaaggagugggaccuguucguggagcggagcaaggccuacuccaacugcuaccccuacgacgugccggacuacgucagccuccgcucccugguggcgagcuccggcacgcuggaguucaacaacgagagcuucaacuggaccgggguggcccagaacggcaccuccagcgccugcaagcggcgcuccgacaagagcuucuucucccggcucaacuggcugcaccagcugaaguacaaguaccccgcccucaacgucaccaugcccaacaacgagaaguucgacaagcuguacaucuggggcgugcaccaccccgggacggacagcgaccagaucucccuguacgcgcaggccagcgggcgcgugaccgucagcaccaagcggucccagcagaccgugaucccgaacaucggcagccgccccugggugcggggcgucuccagccgcaucuccaucuacuggacgaucgugaaguccggggacauccuccugaucaacuccaccggcaaccugaucgcgccccggggguacuucaagauccgcagcggcaaguccagcaucaugcgguccgacgcccccaucggcaagugcaacagcgagugcaucaccccgaacggguccauccccaacgacaagcccuuccagaacgugaaccgcaucaccuacggccccugcccgcgguacgucaagcagaacacgcucaagcuggccaccgggaugcgcaacgugcccgagaagcagacccggggcaucuucggggccaucgccggcuucaucgagaacggcugggaggggaugauggacggcugguacggguuccgccaccagaacagcgagggcaccgggcaggccgccgaccugaaguccacgcaggccgcgaucaaccagaucaacggcaagcucaaccggcugaucgagaagaccaacgagaaguuccaccagaucgagaaggaguucagcgagguggagggccgcauccaggaccuggagaaguacgucgaggacaccaagaucgaccucugguccuacaacgccgagcugcugguggcccucgagaaccagcacaccaucgaccugacggacagcgagaugaacaagcuguucgagcggaccaagaagcagcuccgcgagaacgccgaggacauggggaacggcugcuucaagaucuaccacaagugcgacaacgccugcaucggguccauccgcaacggcaccuacgaccacgacguguaccgggacgaggcgcugaacaaccgcuuccagaucaagggggucgagcucaagagcggcuacaaggacuggauccuguggaucagcuucgccaucuccugcuuccugcugugcaucgugcuccugggcuucaucaugugggccugccagaaggggaacauccggugcaacaucugcaucuga

SEQ ID NO: 65499 - RNA, 1701 nt, Artificial Sequence; identical to SEQ ID NO: 65029
  derived and/or modified CDS sequence (opt1) from hemagglutinin__InfluenzaA__ABL67297

SEQ ID NO: 65500 - RNA, 1701 nt, Artificial Sequence
  derived and/or modified CDS sequence (opt1) from hemagglutinin__InfluenzaA__ABL67308
augaagaccaucaucgcccugagcuacauccucugccugguguucgcccagaagcugcccggcaacgacaacuccauggcgacccucugccuggggcaccacgccgucccgaacggcacgcuggugaagaccaucaccaacgaccagaucgaggugaccaacgccacggagcucguccagagcuccagcaccgggcgcaucugcgacagcccccaccagauccuggacggcgagaacugcacccugaucgacgcccuccugggggacccccacugcgacggcuuccagaacaaggagugggaccuguucguggagcgguccaaggccuacuccagcugcuaccccuacgacgugccggacuacgucucccuccgcagccugguggcguccagcggcacccuggaguucaacaacgaguccuucaacuggacggggguggcccagaacggcaccagcuccgccugcaagcggcgcagcgacaaguccuucuucagccggcucaacuggcugcaccagcugaaguacaaguaccccgcccucaacgucaccaugcccaacaacgagaaguucgacaagcuguacaucuggggcgugcaccaccccgggaccgacuccgaccagaucagccuguacgcgcaggccagcgggcgcgugacggucuccaccaagcggagccagcagaccgugaucccgaacaucggcucccgccccugggugcggggcgucagcucccgcaucagcaucuacuggaccaucgugaagcccggggacauccuccugaucaacuccacgggcaaccugaucgcgccccggggguacuucaagauccgcagcggcaaguccagcaucaugcgguccgacgccccgaucgacaagugcaacagcgagugcaucacccccaacggcuccauccccaacgacaagcccuuccagaacgugaaccgcaucaccuacgggcucugcccgcgguacgucaagcagaacacccugaagcuggccacgggcaugcgcaacgugcccgagaagcagacccgggggaucuucggcgccaucgccggguucaucgagaacggcugggagggcaugauggacgggugguacggcuuccgccaccagaacagcgaggggaccggccaggccgccgaccucaaguccacccaggccgcgaucaaccagaucaacgggaagcugaaccggcugaucgagaagacgaacgagaaguuccaccagaucgagaaggaguucagcgagguggagggccgcauccaggaccucgagaaguacgucgaggacaccaagaucgaccugugguccuacaacgccgagcugcucguggcccuggagaaccagcacaccaucgaccugaccgacagcgagaugaacaagcuguucgagcggacgaagaagcagcuccgcgagaacgccgaggacaugggcaacgggugcuucaagaucuaccacaagugcgacaacgccugcaucggcuccauccgcaacgggaccuacgaccacgacguguaccgggacgaggcgcugaacaaccgcuuccagaucaagggcgucgagcucaagagcggguacaaggacuggauccuguggaucagcuucgccaucuccugcuuccugcucugcaucgugcugcugggcuucaucaugugggccugccagaagggcaacguccggugcaacaucugcaucuga

SEQ ID NO: 65501 - RNA, 1701 nt, Artificial Sequence; identical to SEQ ID NO: 64586
  derived and/or modified CDS sequence (opt1) from hemagglutinin__InfluenzaA__ABL67319

SEQ ID NO: 65502 - RNA, 1701 nt, Artificial Sequence; identical to SEQ ID NO: 65329
  derived and/or modified CDS sequence (opt1) from hemagglutinin__InfluenzaA__ABL67330

SEQ ID NO: 65503 - RNA, 1701 nt, Artificial Sequence; identical to SEQ ID NO: 64540
  derived and/or modified CDS sequence (opt1) from hemagglutinin__InfluenzaA__ABL67341

SEQ ID NO: 65504 - RNA, 1701 nt, Artificial Sequence; identical to SEQ ID NO: 64540
  derived and/or modified CDS sequence (opt1) from hemagglutinin__InfluenzaA__ABL67352

SEQ ID NO: 65505 - RNA, 1701 nt, Artificial Sequence; identical to SEQ ID NO: 64056
  derived and/or modified CDS sequence (opt1) from hemagglutinin__InfluenzaA__ABL67363

SEQ ID NO: 65506 - RNA, 1701 nt, Artificial Sequence
  derived and/or modified CDS sequence (opt1) from hemagglutinin__InfluenzaA__ABL67374
augaagaccaucaucgcccugagcuacauccucugccugguguucgcccagaagcugcccggcaacgacaacuccaccgcgacgcucugccuggggcaccacgccgucccgaacggcaccaucgugaagaccaucaccaacgaccagaucgaggugacgaacgccaccgagcugguccagagcuccagcaccgggggcaucugcgacagcccccaccagauccucgacggggagaacugcacccugaucgacgcccugcucggcgacccccagugcgacggcuuccagaacaagaagugggaccuguucguggagcgcagcaaggcccacuccaacugcuaccccuacgacgugccggacuacgcgagccugcggucccucaucgccagcuccgggacgcuggaguucaacaacgagagcuucaacuggaccggcgucacccagaacgggaccuccagcgccugcaagcgccgguccaaccagagcuucuucucccgccugaacuggcucacgcaccugaaguucaaguaccccgcccugaacgugaccaugcccaacaacgagaaguucgacaagcucuacaucuggggcgugcaccaccccgggaccgacagcgaccagaucucccuguacgcgcaggccccgggccggaucaccgucagcacgaagcgcagccagcagaccgugauccccaacaucggcucccggccccgcgugcgggacaucagcucccgcaucagcaucuacuggaccaucgucaagcccggggacauccugcucaucaacuccaccggcaaccugaucgccccgcggggguacuucaagaugcgcagcggcaaguccagcaucaugaaguccgacgcccccaucggcaagugcaacagcgagugcaucacgcccaacggguccauccccaacgacaagccguuccagaacgugaaccggaucaccuacggcgccugcccccgcuacgugaagcagaacacccugaagcucgcgaccgggaugcggaacguccccgagaagcagacgcgcggcaucuucggggccaucgccggcuucaucgagaacggcugggaggggaugguggacggcugguacggguuccggcaccagaacagcgagggcaccgggcaggccgccgaccugaaguccacccaggcggccaucaaccagaucaacggcaagcugaaccgccucaucggcaagaccaacgagaaguuccaccagaucgagaaggaguucagcgagguggaggggcggauccaggaccuggagaaguacgucgaggacacgaagaucgaccugugguccuacaacgccgagcuccugguggcccuggagaaccagcacaccaucgaccucaccgacagcgagaugaacaagcuguucgagcgcaccaagaagcagcugcgggagaacgccgaggacaugggcgacgggugcuucaagaucuaccacaagugcgacaacgcgugcaucggcuccauccgcaacgggacguacgaccacgacguguaccgcgacgaggcccucaacaaccgguuccagaucaagggcgucgagcugaaguccggcuacaaggacuggauccuguggaucuccuucgccaucagcugccuccugcugugcguggcccuccugggguucaucaugugggccugccagaagggcaacauccgcugcaacaucugcaucuga

SEQ ID NO: 65507 - RNA, 1701 nt, Artificial Sequence; identical to SEQ ID NO: 64306
  derived and/or modified CDS sequence (opt1) from hemagglutinin__InfluenzaA__ABL67385

SEQ ID NO: 65508 - RNA, 1701 nt, Artificial Sequence; identical to SEQ ID NO: 64636
  derived and/or modified CDS sequence (opt1) from hemagglutinin__InfluenzaA__ABL67396

SEQ ID NO: 65509 - RNA, 1701 nt, Artificial Sequence; identical to SEQ ID NO: 64654
  derived and/or modified CDS sequence (opt1) from hemagglutinin__InfluenzaA__ABL67407

SEQ ID NO: 65510 - RNA, 1701 nt, Artificial Sequence
  derived and/or modified CDS sequence (opt1) from hemagglutinin__InfluenzaA__ABL67418
augaagaccaucaucgcccugagcuacauccucugccugguguucgcccagaagcugcccggcaacgacaacuccaccgcgacgcucugccuggggcaccacgccgucccgaacggcaccaucgugaagaccaucaccaacgaccagaucgaggugacgaacgccaccgagcugguccagagcuccagcaccgggggcaucugcaacagcccccaccagauccucgacggggagaacugcacccugaucgacgcccugcucggcgacccccagugcgacggcuuccagaacaagaagugggaccuguucguggagcgcagcaaggccuacuccaacugcuaccccuacgacgugccggacuacgcgagccugcggucccucgucgccagcuccgggacgcuggaguucaacaacgagagcuucaacuggaccggcgugacccagaacgggaccuccagcgccugcaagcgccgguccaacaacagcuucuucucccgccugaacuggcucacgcaccugaaguucaaguaccccgcccugaacgugaccaugcccaacaacgagaaguucgacaagcucuacaucuggggcguccaccaccccgggaccgacaacgaccagaucuuccuguacgcgcaggccagcggccggaucaccguguccacgaagcgcagccagcagaccgugaucccgaacaucggcagccggccccgcguccggaacauccccucccgcaucagcaucuacuggaccaucgugaagcccggggacauccugcucaucaacuccaccggcaaccugaucgccccgcggggguacuucaagauccgcagcggcaaguccagcaucaugcgguccgacgcccccaucggcaagugcaacagcgagugcaucacgcccaacggguccauccccaacgacaagccguuccagaacgugaaccgcaucaccuacggcgccugcccccgguacgucaagcagaacacccugaagcucgcgaccgggaugcgcaacgugcccgagaagcagacgcggggcaucuucggggccaucgccggcuucaucgagaacggcugggaggggaugguggacggcugguacggguuccgccaccagaacagcgagggcaucgggcaggccgccgaccugaaguccacccaggcggccaucaaccagaucaacggcaagcugaaccggcucaucggcaagaccaacgagaaguuccaccagaucgagaaggaguucagcgaggucgaggggcgcauccaggaccuggagaaguacguggaggacaccaagaucgaccugugguccuacaacgccgagcuccugguggcccuggagaaccagcacacgaucgaccucaccgacagcgagaugaacaagcuguucgagcggaccaagaagcagcugcgcgagaacgccgaggacaugggcaacgggugcuucaagaucuaccacaagugcgacaacgcgugcaucggcuccauccgcaacgggaccuacgaccacgacgucuaccgggacgaggcccucaacaaccgcuuccagaucaagggcguggagcugaaguccggcuacaaggacuggauccuguggaucuccuucgccaucagcugcuuccuccugugcguggcccugcucggguucaucaugugggccugccagaagggcaacauccggugcaacaucugcaucuga

SEQ ID NO: 65511 - RNA, 1707 nt, Artificial Sequence; identical to SEQ ID NO: 64052
  derived and/or modified CDS sequence (opt1) from hemagglutinin__InfluenzaA__ABL67781

SEQ ID NO: 65512 - RNA, 1707 nt, Artificial Sequence
  derived and/or modified CDS sequence (opt1) from hemagglutinin__InfluenzaA__ABL67794
auggagaagaucgugcugcuguucgccaucgucagccuggugaaguccgaccagaucugcaucggcuaccacgccaacaacagcaccgagcaggucgacaccaucauggagaagaacgugacggugacccacgcgcaggacauccuggagaagacccacaacgggaagcucugcgaccuggacggcgugaagccccugauccuccgcgacugcuccgucgccggguggcugcugggcaacccgaugugcgacgaguucaucaacgugcccgaguggagcuacaucguggagaaggccaaccccgucaacgaccucugcuaccccggggacuucaacgacuacgaggagcugaagcaccuccucucccggaucaaccacuucgagaagauccagaucauccccaagagcuccuggagcucccacgaggccagccugggcguguccagcgccugcccguaccagggcaaguccagcuucuuccgcaacguggucuggcugaucaagaagaacuccaccuaccccacgaucaagcggagcuacaacaacaccaaccaggaggaccuccuggugcugugggggauccaccaccccaacgacgcggccgagcagaccaagcucuaccagaacccgaccacguacaucuccgugggcaccagcacccugaaccagcgccuggucccccggaucgccacccgcuccaaggugaacgggcagagcggccggauggaguucuucuggacgauccucaagcccaacgacgccaucaacuucgagagcaacgggaacuucaucgcgcccgaguacgccuacaagaucgugaagaagggcgacuccaccaucaugaaguccgagcuggaguacggcaacugcaacaccaagugccagaccccgaugggggccaucaacagcagcaugcccuuccacaacauccacccccugacgaucggcgagugccccaaguacgucaaguccaaccgccucgugcuggccaccgggcugcggaacagcccgcagcgcgagaagcggcgcaagaagcggggccucuucggcgccaucgcgggguucaucgagggcggguggcagggcaugguggacgggugguacggcuaccaccacuccaacgagcagggcagcggguacgccgccgacaaggaguccacccagaaggccaucgacggcgucaccaacaaggugaacagcaucaucgacaagaugaacacgcaguucgaggccguggggcgcgaguucaacaaccuggagcggcgcaucgagaaccugaacaagaagauggaggacggcuuccucgacgucuggaccuacaacgcggagcugcuggugcucauggagaacgagcggacccuggacuuccacgacuccaacgucaagaaccuguacgacaaggugcgccuccagcugcgggacaacgccaaggagcuggggaacggcugcuucgaguucuaccacaagugcgacaacgagugcauggagagcgugcgcaacggcaccuacgacuacccccaguacuccgaggaggcccggcucaagcgcgaggagaucagcggggucaagcuggaguccaucggcaucuaccagauccugagcaucuacuccacgguggccagcucccucgcccuggcgaucaugguggccgggcugagccucuggaugugcagcaacggcucccugcagugccgcaucugcaucuga

SEQ ID NO: 65513 - RNA, 1707 nt, Artificial Sequence
  derived and/or modified CDS sequence (opt1) from hemagglutinin__InfluenzaA__ABL67816
auggagaagaucgugcugcuguucgccaucgucagccuggugaaguccgaccagaucugcaucggcuaccacgccaacaacagcaccgagcaggucgacaccaucauggagaagaacgugacggugacccacgcgcaggacauccuggagaagacccacaacgggaagcucugcgaccuggacggcgugaagccccugauccuccgcgacugcuccgucgccggguggcugcugggcaacccgaugugcgacgaguucaucaacgugcccgaguggagcuacaucguggagaaggccaaccccgucaacgaccucugcuaccccggggacuucaacgacuacgaggagcugaagcaccuccucucccggaucaaccacuucgagaagauccagaucauccccaagagcuccuggagcucccacgaggccagccugggcguguccagcgccugcccguaccagggcaaguccagcuucuuccgcaacguggucuggcugaucaagaagaacuccaccuaccccacgaucaagcggagcuacaacaacaccaaccaggaggaccuccuggugcugugggggauccaccaccccaacgacgcggccgagcagaccaagcucuaccagaacccgaccacguacaucuccgugggcaccagcacccugaaccagcgccuggucccccggaucgccacccgcuccaaggugaacgggcagagcggccggauggaguucuucuggacgauccucaagcccaacgacgccaucaacuucgagagcaacgggaacuucaucgcgcccgaguacgccuacaagaucgugaagaagggcgacuccaccaucaugaaguccgagcuggaguacggcaacugcaacaccaagugccagaccccgaugggggccaucaacagcagcaugcccuuccacaacauccacccccugacgaucggcgagugccccaaguacgucaaguccaaccgccucgugcuggccaccgggcugcggaacagcccgcagcgcgagcggcgccggaagaagcgcggccucuucggcgccaucgcgggguucaucgagggcggguggcagggcaugguggacgggugguacggcuaccaccacuccaacgagcagggcagcggguacgccgccgacaaggaguccacccagaaggccaucgacggcgucaccaacaaggugaacagcaucaucaacaagaugaacacgcaguucgaggccguggggcgggaguucaacaaccuggagcgccggaucgagaaccugaacaagaagauggaggacggcuuccucgacgucuggaccuacaacgcggagcugcuggugcucauggagaacgagcgcacccuggacuuccacgacuccaacgucaagaaccuguacgacaaggugcggcuccagcugcgcgacaacgccaaggagcuggggaacggcugcuucgaguucuaccacaagugcgacaacgagugcauggagagcgugcggaacggcaccuacgacuacccccaguacuccgaggaggcccgccucaagcgcgaggagaucagcggggucaagcuggaguccaucggcaucuaccagauccugagcaucuacuccacgguggccagcucccucgcccuggcgaucaugguggccgggcugagccucuggaugugcagcaacggcucccugcagugccggaucugcaucuga

SEQ ID NO: 65514 - RNA, 1707 nt, Artificial Sequence
  derived and/or modified CDS sequence (opt1) from hemagglutinin__InfluenzaA__ABL67827
auggagaagaucgugcugcuguucgccaucgucagccuggugaaguccgaccacaucugcaucggcuaccacgccaacaacagcaccgagcaggucgacaccaucauggagaagaacgugacggugacccacgcgcaggacauccuggagaagacccacaacgggaagcucugcgaccuggacggcgugaagccccugauccuccgcgacugcuccgucgccggguggcugcugggcaacccgaugugcgacgaguucaucaacgugcccgaguggagcuacaucguggagaaggccaaccccgucaacgaccucugcuaccccggggacuucaacgacuacgaggagcugaagcaccuccucucccggaucaaccacuucgagaagauccagaucauccccaagagcuccuggagcucccacgaggccagccugggcguguccagcgccugcccguaccagggcaaguccagcuucuuccgcaacguggucuggcugaucaagaagaacuccaccuaccccacgaucaagcggagcuacaacaacaccaaccaggaggaccuccuggugcugugggggauccaccaccccaacgacgcggccgagcagaccaagcucuaccagaacccgaccacguacaucuccgugggcaccagcacccugaaccagcgccuggucccccggaucgccacccgcuccaaggugaacgggcagagcggccggauggaguucuucuggacgauccucaagcccaacgacgccaucaacuucgagagcaacgggaacuucaucgcgcccgaguacgccuacgagaucgugaagaagggcgacuccaccaucaugaaguccgagcuggaguacggcaacugcaacaccaagugccagaccccgaugggggccaucaacagcagcaugcccuuccacaacauccacccccugacgaucggcgagugccccaaguacgucaaguccaaccgccucgugcuggccaccgggcugcggaacagcccgcagaucgagcgccggcgcaagaagcggggccucuucggcgccaucgcgggguuccuggagggcggguggcagggcaugguggacgggugguacggcuaccaccacuccaacgagcagggcagcggguacgccgccgacaaggaguccacccagaaggccaucgacggcgucaccaacaaggugaacagcaucaucaacaagaugaacacgcaguucgaggccguggggcgcgaguucaacaaccuggagcggcgcaucgagaaccucaacaagaagauggaggacggcuuccuggacgucuggaccuacaacgcggagcugcucgugcugauggagaacgagcggacccuggacuuccacgacuccaacgucaagaaccucuacgacaaggugcgccugcagcugcgggacaacgccaaggagcucgggaacggcugcuucgaguucuaccacaagugcgacaacgagugcauggagagcgugcgcaacggcaccuacgacuacccccaguacuccgaggaggcccggcugaagcgcgaggagaucagcggggucaagcuggaguccaucggcaucuaccagauccucagcaucuacuccacgguggccagcucccuggcccuggcgaucaugguggccgggcucagccuguggaugugcagcaacggcucccugcagugccgcaucugcaucuga

SEQ ID NO: 65515 - RNA, 1701 nt, Artificial Sequence
  derived and/or modified CDS sequence (opt1) from hemagglutinin__InfluenzaA__ABM22015
augaagaccaucaucgcccugagcuacauccucugccugguguucgcccagaagcugcccggcaacgacaacuccaccgcgacgcucugccuggggcaccacgccgucccgaacggcaccaucgugaagaccaucaccaacgaccagaucgaggugacgaacgccaccgagcugguccagagcuccagcaccgggggcaucugcgacagcccccaccagauccucgacggggagaacugcacccugaucgacgcccugcucggcgacccccagugcgacggcuuccagaacaagaagugggaccuguucguggagcgcagcaaggccuacuccaacugcuaccccuacgacgugccggacuacgcgagccugcggucccucgucgccagcuccgggacgcuggaguucaacaacgagagcuucaacuggaccggcgugacccagaacgggaccuccagcgccugcaagcgccgguccaacaacagcuucuucucccgccugaacuggcucacgcaccugaaguucaaguaccccgcccugaacgugaccaugcccaacaacgagaaguucgacaagcucuacaucuggggcguccaccaccccgggaccgacaacgaccagaucuuccuguacgcgcaggccagcggccggaucaccguguccacgaagcgcagccagcagaccgugaucccgaacaucggcagccggccccgcguccggaacauccccucccgcaucagcaucuacuggaccaucgugaagcccggggacauccugcucaucaacuccaccggcaaccugaucgccccgcggggguacuucaagauccgcagcggcaaguccagcaucaugcgguccgacgcccccaucggcaagugcaacagcgagugcaucacgcccaacggguccauccccaacgacaagccguuccagaacgugaaccgcaucaccuacggcgccugcccccgguacgucaagcagaacacccugaagcucgcgaccgggaugcgcaacgugcccgagaagcagacgcggggcaucuucggggccaucgccggcuucaucgagaacggcugggaggggaugguggacggcugguacggguuccgccaccagaacagcgagggcaucgggcaggccgccgaccugaaguccacccaggcggccaucaaccagaucaacggcaagcugaaccggcucaucggcaagaccaacgagaaguuccaccagaucgagaaggaguucagcgaggucgaggggcgcauccaggaccuggagaaguacguggaggacaccaagaucgaccugugguccuacaacgccgagcuccugguggcccuggagaaccagcacacgaucgaccucaccgacagcgagaugaacaagcuguucgagcggaccaagaagcagcugcgcgagaacgccgaggacaugggcaacgggugcuucaagaucuaccacaagugcgacaacgcgugcaucggcuccauccgcaacgggaccuacgaccacgacgucuaccgggacgaggcccucaacaaccgcuuccagaucaagggcguggagcugaaguccggcuacaaggacuggauccuguggaucuccuucgccaucagcugcuuccuccugugcguggcccugcucggguucaucaugugggccugccagaagggcaacauccggugcgacaucugcaucuga

SEQ ID NO: 65516 - RNA, 1701 nt, Artificial Sequence
  derived and/or modified CDS sequence (opt1) from hemagglutinin__InfluenzaA__ABM22026
augaaggccaagcugcucgugcugcugugcgccuucaccgcgaccuacgccgacacgaucugcaucggcuaccacgccaacaacagcaccgacaccgucgacaccgugcucgagaagaacgugacggucacccacuccgugaaccugcuggaggacagccacaacgggaagcucugccgccugaagggcaccgcgccccugcagcucgggaacugcuccaucgccggcuggauccuggggaacccggagugcgagagccuguucuccaaggagagcugguccuacaucgccgagacccccaaccccaagaacggcacgugcuaccccggcuacuucgccgacuacgaggagcuccgggagcagcugagcuccgugagcuccuucaagcgcuucgagaucuucccgaaggacagcuccuggcccaaccacaccgucaccaagggggugaccgccagcugcucccacaacggcaagagcuccuucuacaagaaccugcucuggcugacggagaagaacgggcuguaccccaaccucagcaaguccuacgugaacaagaagggcaaggagguccuggugcuguggggcgugcaccaccccagcaacaugggggaccagcgggccaucuaccacaaggagaacgcguacgucagcgugcucuccagccacuacucccgccgguucaccccggagaucgcccgccggcccaaggugcgcgaccaggagggccggaucaacuacuacuggacccugcuggagcccggggacaccaucaucuucgaggccaacggcaaccucaucgcccccugguacgccuucgcgcugagccgcggguucggcuccggcaucaucaucagcaacgccuccaugggggagugcgacgccaagugccagacgccgcagggcgccaucaacagcucccugcccuuccagaacguccaccccgugaccaucggggagugccccaaguacgugcggagcaccaagcuccgcauggucaccggccugcggaacgugccguccauccagagccgcgggcuguucggcgccaucgcgggcuucaucgagggcggguggacggggaugaucgacggcugguacggguaccaccaccagaacgagcagggcuccggcuacgccgccgaccagaaguccacccagaacgccaucaacgggaucaccaacaaggugaacagcaucaucgagaagaugaacacccaguucacggccgucggcaaggaguucaacaagcucgagcggcgcauggagaaccugaacaagaagguggacgacggguuccuggacaucuggaccuacaacgcggagcuccuggugcugcucgagaacgagcggacccuggacuuccacgacagcaacgucaagaaccuguacgagaaggugaagaaccagcucaagaacaacgccaaggagaucggcaacgggugcuucgaguucuaccacaagugcaacaacgagugcauggaguccgucaagaacggcaccuacgacuaccccaaguacagcaaggaguccaagcugaaccgcgagaagaucgacggcgugaagcuggagagcauggggguguaccagauccucgccaucuacagcacggucgccuccagccuggugcugcucgugucccugggcgccaucagcuucuggaugugcuccaacgggagccugcagugccggaucugcaucuga

SEQ ID NO: 65517 - RNA, 1701 nt, Artificial Sequence; identical to SEQ ID NO: 64657
  derived and/or modified CDS sequence (opt1) from hemagglutinin__InfluenzaA__ABM22037

SEQ ID NO: 65518 - RNA, 1701 nt, Artificial Sequence; identical to SEQ ID NO: 64075
  derived and/or modified CDS sequence (opt1) from hemagglutinin__InfluenzaA__ABM22059

SEQ ID NO: 65519 - RNA, 1701 nt, Artificial Sequence; identical to SEQ ID NO: 65329
  derived and/or modified CDS sequence (opt1) from hemagglutinin__InfluenzaA__ABM22070

SEQ ID NO: 65520 - RNA, 1701 nt, Artificial Sequence
  derived and/or modified CDS sequence (opt1) from hemagglutinin__InfluenzaA__ABM22081
augaagaccaucaucgcccugagcuacauccucugccugguguucgcccagaagcugcccggcaacgacaacuccaccgcgacgcucugccuggggcaccacgccgucccgaacggcaccaucgugaagaccaucaccaacgaccagaucgaggugacgaacgccaccgagcugguccagagcuccagcaccgggggcaucugcgacagcccccaccagauccucgacggggagaacugcacccugaucgacgcccugcucggcgacccccagugcgacggcuuccagaacaagaagugggaccuguucguggagcgcagcaaggccuacuccaacugcuaccccuacgacgugccggaccacgcgagccugcggucccucgucgccagcuccgggacgcuggaguucaacaacgagagcuucgacuggaccggcgugacccagaacgggaccuccagcgccugcaagcgccgguccaacaagagcuucuucucccgccugaacuggcucacgcaccugaaguacaaguaccccgcccugaacgugaccaugcccaacaacgagaaguucgacaagcucuacaucuggggcguccaccaccccgggaccgacagcgaccagaucucccuguacgcgcaggccagcggccggaucaccgugagcacgaagcgcucccagcagaccgugaucccgaacaucggcagccggccccgcguccgggacguguccagccgcaucuccaucuacuggaccaucgugaagcccggggacauccugcucaucaacagcaccggcaaccugaucgcgccccggggguacuucaagauccgcuccggcaagagcuccaucaugcggagcgacgccccgaucggcaagugcaacuccgagugcaucacgcccaacgggagcauccccaacgacaagcccuuccagaacgucaaccgcaucaccuacggcgccugcccgcgguacgugaagcagaacacccugaagcucgccaccgggaugcgcaacauccccgagaagcagacgcggggcaucuucggggccaucgccggcuucaucgagaacggcugggaggggaugguggacggcugguacggguuccgccaccagaacuccgagggcaccgggcaggccgccgaccugaaguccacccaggcggccaucaaccagaucaacggcaagcugaaccggcucaucggcaagaccaacgagaaguuccaccagaucgagaaggaguucuccgaggucgaggggcgcauccaggaccuggagaaguacguggaggacacgaagaucgaccuguggagcuacaacgccgagcuccugguggcccuggagaaccagcacaccaucgaccucaccgacuccgagaugaacaagcuguucgagcggaccaagaagcagcugcgcgagaacgccgaggacaugggcaacgggugcuucaagaucuaccacaagugcgacaacgcgugcaucggcagcauccgcaacgggacguacgaccacgacgucuaccgggacgaggcccucaacaaccgcuuccagaucaagggcguggagcugaaguccggcuacaaggacuggauccuguggaucagcuucgccaucagcugcuuccuccugugcguggcccugcucggguucaucaugugggccugccagaagggcaacauccggugcaacaucugcaucuga

SEQ ID NO: 65521 - RNA, 1701 nt, Artificial Sequence
  derived and/or modified CDS sequence (opt1) from hemagglutinin__InfluenzaA__ABM22092
augaagaccaucaucgcccugagcuacauccucugccugguguucgcccagaagcugcccggcaacgacaacuccaccgcgacgcucugccuggggcaccacgccgucccgaacggcaccaucgugaagaccaucaccaacgaccagaucgaggugacgaacgccaccgagcugguccagagcuccagcaccggggagaucugcgacagcccccaccagauccucgacggcgagaacugcacccugaucgacgcccugcucggggacccccagugcgacggcuuccagaacaagaagugggaccuguucguggagcgcagcaaggccuacuccaacugcuaccccuacgacgugccggaccacgcgagccugcggucccucgucgccagcuccggcacgcuggaguucaacaacgagagcuucgacugggccggggugacccagaacggcaccuccagcgccugcaagcgccgguccaacaagagcuucuucucccgccugaacuggcucacccaccugaaguacaaguaccccgcgcugaacgugacgaugcccaacaacgagaaguucgacaagcucuacaucuggggcguccaccaccccgggaccgacagcgaccagaucucccuguacgcccaggccagcgggcggaucaccgugagcaccaagcgcucccagcagacggugaucccgaacaucggcagccggccccgcguccgggacguguccagccgcaucuccaucuacuggaccaucgugaagcccggcgacauccugcucaucaacagcaccgggaaccugaucgcgccccggggcuacuucaagauccgcuccgggaaguccuccaucaugcggagcgacgccccgaucggcaagugcaacuccgagugcaucacccccaacggcagcauccccaacgacaagcccuuccagaacgucaaccgcaucacguacggggccugcccgcgguacgugaagcagaacacccugaagcucgccaccggcaugcgcaacgugcccgagaagcagacccgggggaucuucggcgccaucgccggguucaucgagaacggcugggagggcauggucgacgggugguacggcuuccgccaccagaacuccgaggggacgggccaggccgcggaccucaagagcacccaggccgccaucaaccagaucaacgggaagcugaaccggcugaucggcaagaccaacgagaaguuccaccagaucgagaaggaguucuccgagguggagggccgcauccaggaccuggagaaguacguggaggacaccaagaucgaccuguggagcuacaacgccgagcuccuggucgcccuggagaaccagcacacgaucgaccucaccgacuccgagaugaacaagcuguucgagcggaccaagaagcagcugcgcgagaacgcggaggacauggggaacggcugcuucaagaucuaccacaagugcgacaacgccugcaucgggagcauccgcaacggcaccuacgaccacgacguguaccgggacgaggcccucaacaaccgcuuccagaucaaggggguggagcugaaguccggcuacaaggacuggauccuguggaucagcuucgccaucagcugcuuccuccugugcgucgcccugcucggcuucaucaugugggcgugccagaaggggaacauccggugcaacaucugcaucuga

SEQ ID NO: 65522 - RNA, 1701 nt, Artificial Sequence; identical to SEQ ID NO: 65334
  derived and/or modified CDS sequence (opt1) from hemagglutinin__InfluenzaA__ABM22103

SEQ ID NO: 65523 - RNA, 1701 nt, Artificial Sequence; identical to SEQ ID NO: 64540
  derived and/or modified CDS sequence (opt1) from hemagglutinin__InfluenzaA__ABM22114

SEQ ID NO: 65524 - RNA, 1701 nt, Artificial Sequence; identical to SEQ ID NO: 65479
  derived and/or modified CDS sequence (opt1) from hemagglutinin__InfluenzaA__ABM22125

SEQ ID NO: 65525 - RNA, 1701 nt, Artificial Sequence
  derived and/or modified CDS sequence (opt1) from hemagglutinin__InfluenzaA__ABM22136
augaagaccaucaucgcccugagcuacauccucugccugguguucgcccagaagcugcccggcaacgacaacuccaccgcgacgcucugccuggggcaccacgccgucccgaacggcaccaucgugaagaccaucaccaacgaccagaucgaggugacgaacgccaccgagcugguccagagcuccagcaccgggggcaucugcgacagcccccaccagauccucgacggggagaacugcacccugaucgacgcccugcucggcgacccccagugcgacggcuuccagaacaagaagugggaccuguucguggagcgcagcaaggccuacuccaacugcuaccccuacgacgugccggacuacgcgagccugcggucccucgucgccagcuccgggacgcuggaguucaacaacgagagcuucaacuggaccggcgugacccagaacgggaccuccagcgccugcaagcgccgguccaacaacagcuucuucucccgccugaacuggcucacgcaccugaaguucaaguaccccgcccugaacgugaccaugcccaacaacgagaaguucgacaagcucuacaucuggggcguccaccaccccgggaccgacaacgaccagaucuuccuguacgcgcaggccagcggccggaucaccguguccacgaagcgcagccagcagaccgugaucccgaacaucggcagccggccccgcguccggaacauccccucccgcaucagcaucuacuggaccaucgugaagcccggggacauccugcucaucaacuccaccggcaaccugaucgccccgcggggguacuucaagauccgcagcggcaaguccagcaucaugcgguccgacgcccccaucggcaagugcaacagcgagugcaucacgcccaacggguccauccccaacgacaagccguuccagaacgugaaccgcaucaccuacggcgccugcccccgguacgucaagcagaacacccugaagcucgcgaucgggaugcgcaacgugcccgagaagcagacccggggcaucuucggggccaucgccggcuucaucgagaacggcugggaggggaugguggacggcugguacggguuccgccaccagaacagcgagggcaucgggcaggccgccgaccugaaguccacgcaggcggccaucaaccagaucaacggcaagcugaaccggcucaucggcaagaccaacgagaaguuccaccagaucgagaaggaguucagcgaggucgaggggcgcauccaggaccuggagaaguacguggaggacaccaagaucgaccugugguccuacaacgccgagcuccugguggcccuggagaaccagcacaccaucgaccucacggacagcgagaugaacaagcuguucgagcggaccaagaagcagcugcgcgagaacgccgaggacaugggcaacgggugcuucaagaucuaccacaagugcgacaacgcgugcaucggcuccauccgcaacgggaccuacgaccacgacgucuaccgggacgaggcccucaacaaccgcuuccagaucaagggcguggagcugaaguccggcuacaaggacuggauccuguggaucuccuucgccaucagcugcuuccuccugugcguggcccugcucggguucaucaugugggccugccagaagggcaacauccggugcaacaucugcaucuga

SEQ ID NO: 65526 - RNA, 1701 nt, Artificial Sequence; identical to SEQ ID NO: 64657
  derived and/or modified CDS sequence (opt1) from hemagglutinin__InfluenzaA__ABM22147

SEQ ID NO: 65527 - RNA, 1701 nt, Artificial Sequence; identical to SEQ ID NO: 64945
  derived and/or modified CDS sequence (opt1) from hemagglutinin__InfluenzaA__ABM22158

SEQ ID NO: 65528 - RNA, 1701 nt, Artificial Sequence; identical to SEQ ID NO: 64945
  derived and/or modified CDS sequence (opt1) from hemagglutinin__InfluenzaA__ABM22169

SEQ ID NO: 65529 - RNA, 1701 nt, Artificial Sequence; identical to SEQ ID NO: 64945
  derived and/or modified CDS sequence (opt1) from hemagglutinin__InfluenzaA__ABM22180

SEQ ID NO: 65530 - RNA, 1701 nt, Artificial Sequence; identical to SEQ ID NO: 64945
  derived and/or modified CDS sequence (opt1) from hemagglutinin__InfluenzaA__ABM22191

SEQ ID NO: 65531 - RNA, 1701 nt, Artificial Sequence; identical to SEQ ID NO: 64945
  derived and/or modified CDS sequence (opt1) from hemagglutinin__InfluenzaA__ABM22202

SEQ ID NO: 65532 - RNA, 1701 nt, Artificial Sequence; identical to SEQ ID NO: 64945
  derived and/or modified CDS sequence (opt1) from hemagglutinin__InfluenzaA__ABM22213

SEQ ID NO: 65533 - RNA, 1701 nt, Artificial Sequence; identical to SEQ ID NO: 64945
  derived and/or modified CDS sequence (opt1) from hemagglutinin__InfluenzaA__ABM22224

SEQ ID NO: 65534 - RNA, 1701 nt, Artificial Sequence; identical to SEQ ID NO: 64945
  derived and/or modified CDS sequence (opt1) from hemagglutinin__InfluenzaA__ABM22235

SEQ ID NO: 65535 - RNA, 1701 nt, Artificial Sequence
  derived and/or modified CDS sequence (opt1) from hemagglutinin__InfluenzaA__ABM22268
augaaggugaagcugcucguccugcugugcgccuucaccgccaccuacgcggacacgaucugcaucggcuaccacgccaacaacagcaccgacaccguggacaccgugcucgagaagaacgucacggugacccacuccgugaaccugcuggaggacagccacaacgggaagcucugccgccugaagggcaccgcgccccugcagcucgggaacugcuccgucgccggcuggauccuggggaacccggagugcgagagccuguucuccaaggagagcugguccuacaucgccgagacccccaaccccgagaacggcacgugcuaccccggcuacuucgccgacuacgaggagcuccgggagcagcugagcuccgugagcuccuucgagcgcuucgagaucuucccgaaggagagcuccuggcccaaccacaccgugaccaagggggucaccgccagcugcucccacaacggcaagagcuccuucuacaagaaccugcucuggcugacggagaagaacgggcuguaccccaaccucagcaaguccuacgugaacaacaaggagaaggaggugcugguccuguggggcgugcaccaccccagcaacaucggggaccagcgggccaucuaccacaccgagaacgccuacgugagcgucguguccagccacuacucccgccgguucaccccggagaucgcgaagcgccccaaggugcgggaccaggagggccgcaucaacuacuacuggacccuccuggagcccggcgacacgaucaucuucgaggccaacgggaaccugaucgcccccugguacgccuucgcccucagccggggcuucggguccggcaucaucaccagcaacgcguccaugggcgagugcgacgccaagugccagaccccgcagggggccaucaacagcucccugcccuuccagaacguccaccccgugaccaucggcgagugccccaaguacgugcgcagcacgaagcugcggauggucaccgggcuccgcaacaucccguccauccagagccggggccuguucggggccaucgccggcuucaucgagggcggguggaccggcaugaucgacgggugguacggcuaccaccaccagaacgagcagggguccggcuacgcggccgaccagaaguccacccagaacgccaucgacggcaucacgaacaaggugaacagcgugaucgagaagaugaacacccaguucaccgccgucgggaaggaguucaacaagcuggagcgccggauggagaaccucaacaagaagguggacgacggcuuccuggacaucuggaccuacaacgccgagcugcucguccugcuggagaacgagcgcacgcucgacuuccacgacagcaacgugaagaaccuguacgagaaggugaagaaccagcugaagaacaacgcgaaggagaucgggaacggcugcuucgaguucuaccacaagugcaacaacgagugcauggaguccgucaagaacgggaccuacgacuaccccaaguacagcgaggaguccaagcucaaccgggagaagaucgacggcgugaagcuggagagcaugggcguguaccagauccuggccaucuacagcaccgucgccuccagccucgugcugcuggugucccucggggccaucagcuucuggaugugcuccaacggcagccugcagugccgcaucugcaucuga

SEQ ID NO: 65536 - RNA, 1701 nt, Artificial Sequence
  derived and/or modified CDS sequence (opt1) from hemagglutinin__InfluenzaA__ABM22279
augaaggccaagcugcucgugcugcugugcgccuucaccgcgaccuacgccgacacgaucugcaucggcuaccacgccaacaacagcaccgacaccgucgacaccgugcucgagaagaacgugacggucacccacuccgugaaccugcuggaggaccgccacaacgggaagcucugccggcugaagggcaccgcgccccugcagcucgggaacugcagcguggccggcuggauccuggggaacccggagugcgagucccuguucagcaaggaguccuggagcuacaucgccgagacccccaaccccgagaacggcacgugcuaccccggcuacuucgccgacuacgaggagcuccgcgagcagcuguccagcgucuccagcuucgagcgguucgagaucuucccgaaggaguccagcuggcccaaccacaccgugaccaagggggugaccgccuccugcagccacaacggcaaguccagcuucuacaagaaccugcucuggcugacggagaagaacgggcuguaccccaaccucuccaagagcuacgucaacaacaaggagaaggaggugcuggugcuguggggcguccaccaccccuccaacaucggggaccagcgcgccaucuaccacaccgagaacgcguacgugagcguggucagcucccacuacagccggcgcuucaccccggagaucgccaagcggcccaaggugcgcgaccaggagggccggaucaacuacuacuggacccuccuggagcccggcgacacgaucaucuucgaggccaacgggaaccugaucgcccccugguacgccuucgcgcucucccgcggcuucgggagcggcaucaucaccuccaacgccagcaugggcgacugcgacgccaagugccagaccccgcagggggccaucaacuccagccugcccuuccagaacgugcaccccgucaccaucggcgggugccccaaguacgugcgguccacgaagcugcgcauggugaccggccuccggaacaucccgagcauccagucccgcgggcuguucggcgccaucgcgggcuucaucgagggcggguggaccgggaugaucgacggcugguacggguaccaccaccagaacgagcagggcagcggcuacgccgccgacaagaaguccacccagaacgccaucgacgggaucacgaacaaggucaacagcgugaucgagaagaugaacacccaguucaccgccgugggcaaggaguucaacaagcuggagcggcgcauggagaaccucaacaagaaggucgacgacggguuccuggacaucuggaccuacaacgcggagcugcucgugcugcuggagaacgagcggacgcucgacuaccacgacuccaacgucaagaaccuguacgagaaggugaagaaccagcugaagaacaacgccaaggagaucggcaacgggugcuucgaguucuaccacaagugcaacaacgagugcauggagagcgugaagaacggcaccuacgacuaccccaaguacuccgaggagagcaagcucaagcgcgagaagaucgacggcgucaagcuggaguccauggggguguaccagauccuggccaucuacagcaccguggccagcucccucguccugcuggugagccucggcgccaucuccuucuggaugugcagcaacgggucccugcagugccggaucugcaucuga

SEQ ID NO: 65537 - RNA, 1701 nt, Artificial Sequence
  derived and/or modified CDS sequence (opt1) from hemagglutinin__InfluenzaA__ABM22290
augaaggccaagcugcucgugcugcugugcgccuucaccgcgaccuacgccgacacgaucugcaucggcuaccacgccaacaacagcaccgacaccgucgacaccgugcucgagaagaacgugacggucacccacuccgugaaccugcuggagaacagccacaacgggaagcucugccgccugaagggcaccgcgccccugcagcucgggaacugcuccguggccggcuggauccuggggaacccggagugcgagagccuguucuccaaggagagcugguccuacaucgccgagacccccaaccccgagaacggcacgugcuaccccggcuacuucgccgacuacgaggagcuccgggagcagcugagcuccgucagcuccuucgagcgcuucgagaucuucccgaaggagagcuccuggcccaaccacaccgugaccaagggggugaccgccagcugcucccacaacggcaagagcuccuucuacaagaaccugcucuggcugacggagaagaacgggcuguaccccaaccucagcaaguccuacgucaacaacaaggagaaggaggugcuggugcuguggggcguccaccaccccagcaacaucggggaccagcgggccaucuaccacaccgagaacgcguacgugagcguggucuccagccacuacucccgccgguucaccccggagaucgccaagcgccccaaggugcgggaccaggagggccgcaucaacuacuacuggacccuccuggagcccggcgacacgaucaucuucgaggccaacgggaaccugaucgcccccugguacgccuucgcgcucagccggggcuucggguccggcaucaucaccagcaacgccuccaugggcgagugcgacgccaagugccagaccccgcagggggccaucaacagcucccugcccuuccagaacgugcaccccgucaccaucggcgagugccccaaguacgugcgcagcacgaagcugcggauggugaccgggcuccgcaacaucccguccauccagagccggggccuguucggggccaucgcgggcuucaucgagggcggguggaccggcaugaucgacgggugguacggcuaccaccaccagaacgagcagggguccggcuacgccgccgaccagaaguccacccagaacgccaucgacggcaucacgaacaaggucaacagcgugaucgagaagaugaacacccaguucaccgccguggggaaggaguucaacaagcuggagcgccggauggagaaccucaacaagaaggucgacgacggcuuccuggacaucuggaccuacaacgcggagcugcucgugcugcuggagaacgagcgcacgcucgacuuccacgacagcaacgucaagaaccuguacgagaaggugaagaaccagcugaagaacaacgccaaggagaucgggaacggcugcuucgaguucuaccacaagugcaacaacgagugcauggaguccgugaagaacgggaccuacgacuaccccaaguacagcgaggaguccaagcucaaccgggagaagaucgacggcgucaagcuggagagcaugggcguguaccagauccuggccaucuacagcaccguggccuccagccucguccugcuggugucccucggggccaucagcuucuggaugugcuccaacggcagccugcagugccgcaucugcaucuga

SEQ ID NO: 65538 - RNA, 1701 nt, Artificial Sequence; identical to SEQ ID NO: 64279
  derived and/or modified CDS sequence (opt1) from hemagglutinin__InfluenzaA__ABM22301

SEQ ID NO: 65539 - RNA, 1701 nt, Artificial Sequence; identical to SEQ ID NO: 64279
  derived and/or modified CDS sequence (opt1) from hemagglutinin__InfluenzaA__ABM22312

SEQ ID NO: 65540 - RNA, 1701 nt, Artificial Sequence; identical to SEQ ID NO: 64279
  derived and/or modified CDS sequence (opt1) from hemagglutinin__InfluenzaA__ABM22323

SEQ ID NO: 65541 - RNA, 1701 nt, Artificial Sequence; identical to SEQ ID NO: 64279
  derived and/or modified CDS sequence (opt1) from hemagglutinin__InfluenzaA__ABM22334

SEQ ID NO: 65542 - RNA, 1701 nt, Artificial Sequence; identical to SEQ ID NO: 64280
  derived and/or modified CDS sequence (opt1) from hemagglutinin__InfluenzaA__ABM22345

SEQ ID NO: 65543 - RNA, 1701 nt, Artificial Sequence; identical to SEQ ID NO: 64280
  derived and/or modified CDS sequence (opt1) from hemagglutinin__InfluenzaA__ABM22356

SEQ ID NO: 65544 - RNA, 1701 nt, Artificial Sequence; identical to SEQ ID NO: 64280
  derived and/or modified CDS sequence (opt1) from hemagglutinin__InfluenzaA__ABM22367

SEQ ID NO: 65545 - RNA, 1698 nt, Artificial Sequence; identical to SEQ ID NO: 64865
  derived and/or modified CDS sequence (opt1) from hemagglutinin__InfluenzaA__ABM66864

SEQ ID NO: 65546 - RNA, 1701 nt, Artificial Sequence; identical to SEQ ID NO: 64945
  derived and/or modified CDS sequence (opt1) from hemagglutinin__InfluenzaA__ABM66886

SEQ ID NO: 65547 - RNA, 1701 nt, Artificial Sequence; identical to SEQ ID NO: 64945
  derived and/or modified CDS sequence (opt1) from hemagglutinin__InfluenzaA__ABM66897

SEQ ID NO: 65548 - RNA, 1701 nt, Artificial Sequence; identical to SEQ ID NO: 64945
  derived and/or modified CDS sequence (opt1) from hemagglutinin__InfluenzaA__ABM66908

SEQ ID NO: 65549 - RNA, 1701 nt, Artificial Sequence; identical to SEQ ID NO: 64280
  derived and/or modified CDS sequence (opt1) from hemagglutinin__InfluenzaA__ABM66919

SEQ ID NO: 65550 - RNA, 1701 nt, Artificial Sequence; identical to SEQ ID NO: 64280
  derived and/or modified CDS sequence (opt1) from hemagglutinin__InfluenzaA__ABM66930

SEQ ID NO: 65551 - RNA, 1701 nt, Artificial Sequence; identical to SEQ ID NO: 64280
  derived and/or modified CDS sequence (opt1) from hemagglutinin__InfluenzaA__ABM66941

SEQ ID NO: 65552 - RNA, 1701 nt, Artificial Sequence; identical to SEQ ID NO: 64280
  derived and/or modified CDS sequence (opt1) from hemagglutinin__InfluenzaA__ABM66952

SEQ ID NO: 65553 - RNA, 1701 nt, Artificial Sequence; identical to SEQ ID NO: 64280
  derived and/or modified CDS sequence (opt1) from hemagglutinin__InfluenzaA__ABM66963

SEQ ID NO: 65554 - RNA, 1701 nt, Artificial Sequence; identical to SEQ ID NO: 64280
  derived and/or modified CDS sequence (opt1) from hemagglutinin__InfluenzaA__ABM66974

SEQ ID NO: 65555 - RNA, 1701 nt, Artificial Sequence; identical to SEQ ID NO: 64280
  derived and/or modified CDS sequence (opt1) from hemagglutinin__InfluenzaA__ABM66985

SEQ ID NO: 65556 - RNA, 1701 nt, Artificial Sequence; identical to SEQ ID NO: 64280
  derived and/or modified CDS sequence (opt1) from hemagglutinin__InfluenzaA__ABM66996

SEQ ID NO: 65557 - RNA, 1701 nt, Artificial Sequence; identical to SEQ ID NO: 64280
  derived and/or modified CDS sequence (opt1) from hemagglutinin__InfluenzaA__ABM67007

SEQ ID NO: 65558 - RNA, 1701 nt, Artificial Sequence; identical to SEQ ID NO: 64280
  derived and/or modified CDS sequence (opt1) from hemagglutinin__InfluenzaA__ABM67018

SEQ ID NO: 65559 - RNA, 1701 nt, Artificial Sequence
  derived and/or modified CDS sequence (opt1) from hemagglutinin__InfluenzaA__ABM67029
augaagaccaucaucgcccugagcuacaucaucugccucguguucgcccagaagcugcccggcaacgacaacuccaccgcgacgcugugccucgggcaccacgccgucccgaacggcaccaucgugaagaccaucaccaacgaccagaucgaggugacgaacgccaccgagcugguccagagcuccagcaccggggagaucugcgacagcccccaccagauccuggacggcgagaacugcacccucaucgacgcccugcugggggacccccagugcgacggcuuccagaacaagaagugggaccucuucguggagcgcuccaaggccuacuccaacugcuaccccuacgacgugccggacuacgcgagccugcggucccuggucgccagcuccggcacgcucgaguucaacaacgagagcuucaacuggaccggggugacccagaacggcaccuccagcgccugcaagcgccgguccaacaacagcuucuucucccgccugaacuggcugacgcaccucaaguucaaguaccccgcccugaacgugaccaugcccaacaacgagaaguucgacaagcuguacaucuggggcguccaccaccccgggaccgacaacgaccagaucuuccucuacgcgcaggccagcgggcggaucaccguguccacgaagcgcagccagcagaccgugaucccgaacaucggcagccggccccgcguccgggacauccccucccgcaucagcaucuacuggaccaucgugaagcccggcgacauccugcugaucaacuccaccgggaaccucaucgccccgcggggcuacuuccgcauccggagcgggaaguccagcaucaugcgcuccgacgcccccaucggcaagugcaacagcgagugcaucacgcccaacggcuccauccccaacgacaagccguuccagaacgugaaccggaucaccuacggggccugcccccgcuacgucaagcagaacacccugaagcuggcgaccggcaugcggaacgugcccgagaagcagacgcgcgggaucuucggcgccaucgccggguucaucgagaacggcugggagggcaugguggacgggugguacggcuuccggcaccagaacagcgaggggaucggccaggccgccgaccucaaguccacccaggcggccaucaaccagaucaacgggaagcugaaccgccugaucggcaagaccaacgagaaguuccaccagaucgagaaggaguucagcgaggucgagggccggauccaggaccucgagaaguacguggaggacaccaagaucgaccugugguccuacaacgccgagcugcucguggcccuggagaaccagcacacgaucgaccugaccgacagcgagaugaacaagcuguucgagcgcaccaagaagcagcuccgcgagaacgccgaggacauggggaacggcugcuucaagaucuaccacaagugcgacaacgcgugcaucggguccauccggaacggcaccuacgaccacgacgucuaccgcgacgaggcccugaacaaccgguuccagaucaaggggguggagcucaagagcggcuacaaggacuggauccuguggaucuccuucgccaucagcugcuuccugcucugcguggcccugcugggcuucaucaugugggccugccagaaggggaacauccgcugcaacaucugcaucuga

SEQ ID NO: 65560 - RNA, 1698 nt, Artificial Sequence; identical to SEQ ID NO: 64323
  derived and/or modified CDS sequence (opt1) from hemagglutinin__InfluenzaA__ABM67051

SEQ ID NO: 65561 - RNA, 1707 nt, Artificial Sequence
  derived and/or modified CDS sequence (opt1) from hemagglutinin__InfluenzaA__ABM90467
auggagaagaucgugcugcuccugagcaucgucucccuggucaagagcgaccagaucugcaucggcuaccacgccaacaacuccaccgagcaggucgacaccaucauggagaagaacgugacggugacccacgcccaggacauccucgagaagacccacaacgggaagcugugcgaccuggacggcgugaagccccucauccugcgcgacugcagcguggcgggguggcugcucggcaacccgaugugcgacgaguucaucaacgugcccgagugguccuacaucguggagaaggccaaccccaccaacgaccugugcuaccccgggagcuucaacgacuacgaggagcugaagcaccuccugucccggaucaaccacuucgagaagauccagaucauccccaagagcuccuggagcgaccacgaggccuccagcggcgucuccagcgccugcccguaccugggcucccccagcuucuuccgcaacgugguguggcucaucaagaagaacuccacguaccccaccaucaagaaguccuacaacaacaccaaccaggaggaccugcugguccucugggggauccaccacccgaacaacgaggccgagcagacccggcuguaccagaaccccacgaccuacaucagcaucggcaccagcacccugaaccagcgccucgugcccaagaucgcgacgcggagcaaggugaacgggcaguccggccgcauggaguucuucuggaccauccugaagcccaacgacgccaucaacuucgagagcaacgggaacuucaucgccccggaguacgccuacaagaucgucaagaagggcgacuccgcgaucaugaaguccgagcuggaguacggcaacugcaacaccaagugccagacccccaugggggccaucaacagcagcaugcccuuccacaacauccacccccucacgaucggcgagugcccgaaguacgugaaguccaaccggcuggugcuggccaccgggcuccgcaacagcccccagcgggagucccgccggaagaagcgcggccuguucggcgccaucgccggguucaucgagggcggguggcagggcauggucgacgggugguacggcuaccaccacagcaacgagcagggcuccggguacgcggccgacaaggagagcacccagaaggccaucgacggcgugaccaacaaggugaacuccaucaucgacaagaugaacacgcaguucgaggccgucgggcgggaguucaacaaccuggagcgccggaucgagaaccucaacaagaagauggaggacggcuuccuggacguguggaccuacaacgccgagcugcucgugcugauggagaacgagcgcacccuggacuuccacgacagcaacgucaagaaccucuacgacaaggugcggcugcagcugcgcgacaacgcgaaggagcucgggaacggcugcuucgaguucuaccacaagugcgacaacgagugcauggaguccauccggaacggcaccuacaacuacccccaguacagcgaggaggcccgccugaagcgggaggagaucuccggggucaagcuggagagcaucggcacguaccagauccucuccaucuacagcaccguggccagcucccuggcccuggccaucaugaucgcggggcucagccuguggaugugcuccaacggcagccugcagugccgcaucugcaucuga

SEQ ID NO: 65562 - RNA, 1707 nt, Artificial Sequence
  derived and/or modified CDS sequence (opt1) from hemagglutinin__InfluenzaA__ABM90511
auggagaagaucgugcugcuccugagcaucgucucccuggucaagagcgaccagaucugcaucggcuaccacgccaacaacuccaccgagcaggucgacaccaucaucgagaagaacgugacggugacccacgcccaggacauccucgagaagacccacaacgggaagcugugcgaccuggacggcgugaagccccucauccugaaggacugcagcguggcgggguggcugcucggcaacccgaugugcgacgaguucaucaacgugcccgagugguccuacaucguggagaaggccaaccccaccaacgaccugugcuaccccgggagcuucaacgacuacgaggagcugaagcaccuccugucccgcaucaaccacuucgagaagauccagaucauccccaagagcuccuggagcgaccacgaggccuccagcggcgucuccagcgccugcccguaccugggcucccccagcuucuuccggaacgugguguggcucaucaagaagaacuccacguaccccaccaucaagaaguccuacaacaacaccaaccaggaggaccugcugguccucugggggauccaccacccgaacaacgaggaggagcagacccgccuguaccagaaccccacgaccuacaucagcaucggcaccagcacccugaaccagcggcucgugcccaagaucgccacgcgcagcaaggugaacgggcaguccggccggauggaguucuucuggaccauccugaagcccaacgacgcgaucaacuucgagagcaacgggaacuucaucgccccggaguacgccuacaagaucgucaagaagggcgacuccgccaucaugaaguccgagcuggaguacagcaacugcaacaccaagugccagacccccaugggcgcgaucaacagcuccaugcccuuccacaacauccacccccucacgaucggggagugcccgaaguacgucaagagcucccgccuggugcuggccaccggccuccggaacagcccccagcgcgagucccggcgcaagaagcgggggcuguucggcgccaucgccggcuucaucgagggcggguggcaggggaugguggacggcugguacggguaccaccacagcaacgagcagggcuccggcuacgccgcggacaaggagagcacccagaaggccaucgacggggugaccaacaaggugaacuccaucaucgacaagaugaacacgcaguucgaggccgucggccgcgaguucaacaaccuggagcggcgcaucgagaaccucaacaagaagauggaggacggguuccuggacguguggaccuacaacgccgagcugcucgugcugauggagaacgagcggacccuggacuuccacgacagcaacgucaagaaccucuacgacaaggugcgccugcagcugcgggacaacgccaaggagcucggcaacgggugcuucgaguucuaccacaagugcgacaacgagugcauggaguccauccgcaacggcaccuacaacuacccccaguacagcgaggaggcgcggcugaagcgcgaggagaucuccggcgucaagcuggagagcaucgggacguaccagauccucagcaucuacuccaccguggccagcucccuggcccuggccaucaugaucgccggccucagccuguggaugugcuccaacgggagccugcagugccggaucugcaucuga

SEQ ID NO: 65563 - RNA, 1707 nt, Artificial Sequence
  derived and/or modified CDS sequence (opt1) from hemagglutinin__InfluenzaA__ABM90533
auggagaagaucgugcugcuccugagcaucgucucccuggucaagagcgaccagaucugcaucggcuaccacgccaacaacuccaccgagcaggucgacaccaucauggagaagaacgugacggugacccacgcccaggacauccucgagaagacccacaacgggaagcugugcgaccuggacggcgugaagccccucauccugaaggacugcagcguggcgggguggcugcucggcaacccgaugugcgacgaguucaucaacgugcccgagugguccuacaucguggagaaggccaaccccaccaacgaccugugcuaccccgggagcuucaacgacuacgaggagcugaagcaccuccugucccgcaucaaccacuucgagaagauccagaucauccccaagagcuccuggagcgaccacgaggccuccagcggcgucuccagcgccugcccguaccugggcucccccagcuucuuccggaacgugguguggcucaucaagaagaacuccacguaccccaccaucaagaaguccuacaacaacaccaaccaggaggaccugcugguccucugggggauccaccacccgaacaacgaggaggagcagacccgccuguaccagaaccccacgaccuacaucagcaucggcaccagcacccugaaccagcggcucgugcccaagaucgccacgcgcagcaaggugaacgggcaguccggccggauggaguucuucuggaccauccugaagcccaacgacgcgaucaacuucgagagcaacgggaacuucaucgccccggaguacgccuacaagaucgucaagaagggcgacuccgccaucaugaaguccgagcuggaguacagcaacugcaacaccaagugccagacccccaugggcgcgaucaacagcuccaugcccuuccacaacauccacccccucacgaucggggagugcccgaaguacgucaagagcucccgccuggugcuggccaccggccuccggaacagcccccagcgcgagucccggcgcaagaagcgggggcuguucggcgccaucgccggcuucaucgagggcggguggcaggggaugguggacggcugguacggguaccaccacagcaacgagcagggcuccggcuacgccgcggacaaggagagcacccagaaggccaucgacggggugaccaacaaggugaacuccaucaucgacaagaugaacacgcaguucgaggccgucggccgcgaguucaacaaccuggagcggcgcaucgagaaccucaacaagaagauggaggacggguuccuggacguguggaccuacaacgccgagcugcucgugcugauggagaacgagcggacccuggacuuccacgacagcaacgucaagaaccucuacgacaaggugcgccugcagcugcgggacaacgccaaggagcucggcaacgggugcuucgaguucuaccacaagugcgacaacgagugcauggaguccauccgcaacggcaccuacaacuacccccaguacagcgaggaggcgcggcugaagcgcgaggagaucuccggcgucaagcuggagagcaucgggacguaccagauccucagcaucuacuccaccguggccagcucccuggcccuggccaucaugaucgccggccucagccuguggaugugcuccaacgggagccugcagugccggaucugcaucuga

SEQ ID NO: 65564 - RNA, 1707 nt, Artificial Sequence; identical to SEQ ID NO: 65563
  derived and/or modified CDS sequence (opt1) from hemagglutinin__InfluenzaA__ABM90544

SEQ ID NO: 65565 - RNA, 1701 nt, Artificial Sequence
  derived and/or modified CDS sequence (opt1) from hemagglutinin__InfluenzaA__ABN50900
augaaggccaagcugcucgugcugcugugcgcccucagcgcgaccgacgccgacaccaucugcaucggcuaccacgccaacaacuccacggacaccgucgacaccgugcuggagaagaacgugaccgucacgcacagcgugaaccugcucgaggacucccacaacgggaagcugugccgccugaagggcaucgcgccccuccagcuggggaagugcagcaucgccggcuggauccuggggaacccggagugcgagucccucuucagcaagaaguccuggagcuacaucgccgagacccccaacuccgagaacgggaccugcuaccccggcuacuucgccgacuacgaggagcugcgggagcagcugagcuccgugagcuccuucgagcgcuucgagaucuuccccaaggagagcuccuggccgaagcacaacgucacccggggcgugacggccagcugcucccacaagggcaagagcuccuucuaccgcaaccuccuguggcugaccgagaagaacgggagcuaccccaaccucagcaaguccuacgugaacaacaaggagaaggagguccuggugcuguggggcgugcaccaccccagcaacaucgaggaccagaagaccaucuaccggaaggagaacgccuacgucuccguggugagcucccacuacaaccgccgguucacccccgagaucgcgaagcgcccgaagguccgggggcaggagggccgcaucaacuacuacuggacgcuccuggagcccggcgacaccaucaucuucgaggccaacgggaaccugaucgcccccugguacgccuucgcccucagccggggcuucggguccggcaucaucaccagcaacgcguccauggacgagugcgacgccaagugccagacgccccagggcgccaucaacagcucccugccguuccagaacgugcaccccgugaccaucggggagugccccaaguacguccgcagcaccaagcugcggauggugaccggccuccgcaacauccccuccauccagagccgggggcuguucggcgccaucgccggguucaucgagggcggcuggaccgggaugaucgacggcugguacggguaccaccaccagaacgagcagggcuccggguacgcggccgaccagaaguccacgcagaacgccaucaacggcaucaccaacaaggugaacagcgucaucgagaagaugaacacccaguucaccgccgugggcaaggaguucaacaagcuggagaagcgcauggagaaccucaacaagaagguggacgacggguuccuggacaucuggacguacaacgccgagcugcucguccugcuggagaacgagcggacccucgacuuccacgacagcaacgugaagaaccuguacgagaaggucaagucccagcugaagaacaacgcgaaggagaucggcaacgggugcuucgaguucuaccacaagugcaacaacgagugcauggagagcgugaagaacggcaccuacgacuacccgaaguacagcgaggaguccaagcucaaccgcgagaagaucgacggggugaagcuggagagcaugggcgucuaccagauccuggccaucuacuccaccguggccagcucccucgugcugcuggucagccucggcgccaucuccuucuggaugugcagcaacgggucccugcagugccggaucugcaucuga

SEQ ID NO: 65566 - RNA, 1701 nt, Artificial Sequence; identical to SEQ ID NO: 64945
  derived and/or modified CDS sequence (opt1) from hemagglutinin__InfluenzaA__ABN50917

SEQ ID NO: 65567 - RNA, 1701 nt, Artificial Sequence
  derived and/or modified CDS sequence (opt1) from hemagglutinin__InfluenzaA__ABN50928
augaaggccaagcugcucauccugcugugcgccuucaccgcgaccgacgccgacacgaucugcaucggcuaccacgccaacaacagcaccgacaccguggacaccguccucgagaagaacgugacggugacccacuccgucaaccugcuggaggacagccacaacgggaagcucugccgccugaagggcaucgcgccccugcagcucgggaacugcuccaucgccggcuggauccuggggaacccggagugcgagagccuguucuccaagaaguccuggagcuacaucgccgagacccccaacagcgagaacgggaccugcuaccccggcuacuucgccgacuacgaggagcuccgggagcagcuguccagcguguccagcuucgagcgcuucgagaucuuccccaaggaguccagcuggccgaaccacacggugaccaagggcgucaccgccuccugcagccacaagggcaaguccagcuucuaccggaaccugcucuggcugaccgagaagaacggguccuaccccaaccugagcaagagcuacgugaacaacaaggagaaggaggugcucguccuguggggcgugcaccaccccuccaacaucggggaccagcgcgccaucuaccacacggagaacgcguacgugagcgucguguccagccacuacaaccggcgcuucacccccgagaucgccaagcggccgaaggugcgcggccaggagggccggaucaacuacuacuggacccugcucgagcccggggacaccaucaucuucgaggccaacggcaaccugaucgcccccugguacgccuucgcgcugucccgcggguucggcagcggcaucaucacguccaacgccagcauggacgagugcgacgccaagugccagacgccccagggggccaucaacuccagccucccguuccagaacguccaccccgugaccaucggcgagugccccaaguacgugcgguccaccaagcugcgcauggucaccgggcugcggaacauccccagcauccagucccgcggccucuucggggccaucgcgggcuucaucgagggcggguggaccggcaugaucgacgggugguacggcuaccaccaccagaacgagcaggggagcggcuacgccgccgaccagaaguccacccagaacgccaucaacggcaucaccaacaaggugaacagcgugaucgagaagaugaacacgcaguucaccgccgucgggaaggaguucaacaagcuggagcggcgcauggagaaccugaacaagaagguggacgacggcuuccucgacaucuggaccuacaacgcggagcugcuggugcuccuggagaacgagcggacccuggacuuccacgacuccaacgucaagaaccucuacgagaaggucaagagccagcugaagaacaacgccaaggagaucgggaacggcugcuucgaguucuaccacaagugcaacaacgagugcauggaguccgugaagaacgggacguacgacuacccgaaguacagcgaggagagcaagcugaaccgcgagaagaucgacggcgugaagcucgaguccaugggcguguaccagauccuggccaucuacagcaccgucgccuccagccuggugcuccuggugucccugggggccaucagcuucuggaugugcuccaacggcagccuccagugccggaucugcaucuga

SEQ ID NO: 65568 - RNA, 1701 nt, Artificial Sequence
  derived and/or modified CDS sequence (opt1) from hemagglutinin__InfluenzaA__ABN50940
augaaggccaagcugcucgugcugcugugcgccuucaccgcgaccgacgccgacacgaucugcaucggcuaccacgccaacaacagcaccgacaccgucgacaccgugcucgagaagaacgugacggucacccacuccgugaaccugcuggaggacagccacaacgggaagcucugccgccugaagggcaucgcgccccugcagcucgggaacugcuccaucgccggcuggauccuggggaacccggagugcgagagccuguucuccaagaaguccuggagcuacaucgccgagacccccaacagcgagaacgggaccugcuaccccggcuacuucuccgacuacgaggagcuccgggagcagcugagcuccgugagcuccuucgagcgcuucgagaucuuccccaaggagagcuccuggccgaaccacacggucaccaagggggugaccgccagcugcucccacaagggcaagagcuccuucuaccggaaccugcucuggcugaccgagaagaacgggagcuaccccaaccugagcaaguccuacgugaacaacaaggagaaggagguccucgugcuguggggcgugcaccaccccagcaacaucggggaccagcgcgccaucuaccacacggagaacgccuacgucuccguggugagcucccacuacaaccggcgcuucacccccgagaucgcgaagcggccgaagguccgcgaccaggagggccggaucaacuacuacuggacccugcucgagcccgaggacaccaucaucuucgaggccaacggcaaccugaucgcccccugguacgccuucgcccugagccgcggguucggcuccgggaucaucacgagcaacgcguccauggacgagugcgacgccaagugccagacgccccagggcgccaucaacagcucccucccguuccagaacgugcaccccgugaccaucggcgagugccccaaguacguccggagcaccaagcugcgcauggugaccgggcugcggaacauccccuccauccagagccgcggccucuucggggccaucgccggcuucaucgagggcggcuggaccggcaugaucgacgggugguacggcuaccaccaccagaacgagcagggguccggcuacgcggccgaccagaaguccacccagaacgccaucaacgggaucaccaacaaggugaacagcgucaucgagaagaugaacacgcaguucaccgccgugggcaaggaguucaacaagcuggagcggcgcauggagaaccugaacaagaagguggacgacggcuuccucgacaucuggaccuacaacgccgagcugcugguccuccuggagaacgagcggacccuggacuuccacgacagcaacgugaagaaccucuacgagaaggucaagucccagcugaagaacaacgcgaaggagaucgggaacggcugcuucgaguucuaccacaagugcaacaacgagugcauggagagcgugaagaacgggacguacgacuacccgaaguacagcgaggaguccaagcugaaccgcgagaagaucgacggcgugaagcucgagagcaugggggucuaccagauccuggccaucuacuccaccguggccagcucccuggugcuccuggucagccugggcgccaucuccuucuggaugugcagcaacggcucccuccagugccggaucugcaucuga

SEQ ID NO: 65569 - RNA, 1701 nt, Artificial Sequence; identical to SEQ ID NO: 65535
  derived and/or modified CDS sequence (opt1) from hemagglutinin__InfluenzaA__ABN50951

SEQ ID NO: 65570 - RNA, 1701 nt, Artificial Sequence
  derived and/or modified CDS sequence (opt1) from hemagglutinin__InfluenzaA__ABN50962
augaaggccaagcugcucgugcugcugugcgccuucaccgcgaccuacgccgacacgaucugcaucggcuaccacgccaacaacagcaccgacaccgucgacaccgugcucgagaagaacgugacggucacccacuccgugaaccugcuggaggacagccacaacgggaagcucugccgccugaagggcaccgcgccccugcagcucgggaacugcuccguggccggcuggauccuggggaacccggagugcgagagccuguucuccaaggagagcugguccuacaucgccgagacccccaaccccgagaacggcacgugcuaccccggcuacuucgccgacuacgaggagcuccgggagcagcugagcuccgucagcuccuucgagcgcuucgagaucuucccgaaggagagcuccuggcccaaccacaccgugaccaagggggugaccgccagcugcucccacaacggcaagagcuccuucuacaagaaccugcucuggcugacggagaagaacgggcuguaccccaaccucagcaaguccuacgucaacaacaaggagaaggaggugcuggugcuguggggcguccaccaccccagcaacaucggggaccagcgggccaucuaccacaccgagaacgcguacgugagcguggucuccagccacuacucccgccgguucaccccggagaucgccaagcgccccaaggugcgggaccaggagggccgcaucaacuacuacuggacccuccuggagcccggcgacacgaucaucuucgaggccaacgggaaccugaucgcccccugguacgccuucgcgcucagccggggcuucggguccggcaucaucaccagcaacgccuccaugggcgagugcgacgccaagugccagaccccgcagggggccaucaacagcucccugcccuuccagaacgugcaccccgucaccaucggcgagugccccaaguacgugcgcagcacgaagcugcggauggugaccgggcuccgcaacaucccguccauccagagccggggccuguucggggccaucgcgggcuucaucgagggcggguggaccggcaugaucgacgggugguacggcuaccaccaccagaacgagcagggguccggcuacgccgccgacaagaaguccacccagaacgccaucgacggcaucacgaacaaggucaacagcgugaucgagaagaugaacacccaguucaccgccguggggaaggaguucaacaagcuggagcgccggauggagaaccucaacaagaaggucgacgacggcuuccuggacaucuggaccuacaacgcggagcugcucgugcugcuggagaacgagcgcacgcucgacuuccacgacagcaacgucaagaaccuguacgagaaggugaagaaccagcugaagaacaacgccaaggagaucgggaacggcugcuucgaguucuaccacaagugcaacaacgagugcauggaguccgugaagaacgggaccuacgacuaccccaaguacagcgaggaguccaagcucaagcgggagaagaucgacggcgucaagcuggagagcaugggcguguaccagauccuggccaucuacagcaccguggccuccagccucguccugcuggugucccucggggccaucagcuucuggaugugcuccaacggcagccugcagugccgcaucugcaucuga

SEQ ID NO: 65571 - RNA, 1701 nt, Artificial Sequence; identical to SEQ ID NO: 64934
  derived and/or modified CDS sequence (opt1) from hemagglutinin__InfluenzaA__ABN50973

SEQ ID NO: 65572 - RNA, 1701 nt, Artificial Sequence; identical to SEQ ID NO: 64279
  derived and/or modified CDS sequence (opt1) from hemagglutinin__InfluenzaA__ABN50984

SEQ ID NO: 65573 - RNA, 1701 nt, Artificial Sequence; identical to SEQ ID NO: 64280
  derived and/or modified CDS sequence (opt1) from hemagglutinin__InfluenzaA__ABN50995

SEQ ID NO: 65574 - RNA, 1701 nt, Artificial Sequence
  derived and/or modified CDS sequence (opt1) from hemagglutinin__InfluenzaA__ABN51043
augaagaccaucaucgcccugagcuacauccucugccugguguucgcccagaagcugcccggcaacgacaacuccaccgcgacgcucugccuggggcaccacgccgucccgaacggcaccaucgugaagaccaucaccaacgaccagaucgaggugacgaacgccaccgagcugguccagagcuccagcaccggggagaucugcgacagcccccaccagauccucgacggcgagaacugcacccugaucgacgcccugcucggggacccccagugcgacggcuuccagaacaagaagugggaccuguucguggagcgcagcaaggccuacuccaacugcuaccccuacgacgugccggacuacgcgagccugcggucccucgucgccagcuccggcacgcuggaguucaacaacgagagcuucaacuggaccggggugacccagaacggcaccuccagcgccugcaagcgccgguccaacaacagcuucuucucccgccugaacuggcucacgcaccugaaguucaaguaccccgcccugaacgugaccaugcccaacaacgagaaguucgacaagcucuacaucuggggcguccaccaccccgggaccgacaacgaccagaucuuccuguacgcgcaggccagcgggcggaucaccguguccacgaagcgcagccagcagaccgugaucccgaacaucggcagccggccccgcguccgggacauccccucccgcaucagcaucuacuggaccaucgugaagcccggcgacauccugcucaucaacuccaccgggaaccugaucgccccgcggggcuacuucaagauccgcagcgggaaguccagcaucaugcgguccgacgcccccaucggcaagugcaacagcgagugcaucacgcccaacggcuccauccccaacgacaagccguuccagaacgugaaccgcaucaccuacggggccugcccccgguacgucaagcagaacacccugaagcucgcgaccggcaugcgcaacgugcccgagaagcagacgcgggggaucuucggcgccaucgccggguucaucgagaacggcugggagggcaugguggacgggugguacggcuuccgccaccagaacagcgaggggaucggccaggccgccgaccugaaguccacccaggcggccaucaaccagaucaacgggaagcugaaccggcucaucggcaagaccaacgagaaguuccaccagaucgagaaggaguucagcgaggucgagggccgcauccaggaccuggagaaguacguggaggacaccaagaucgaccugugguccuacaacgccgagcuccugguggcccuggagaaccagcacacgaucgaccucaccgacagcgagaugaacaagcuguucgagcggaccaagaagcagcugcgcgagaacgccgaggacauggggaacggcugcuucaagaucuaccacaagugcgacaacgcgugcaucggguccauccgcaacggcaccuacgaccacgacgucuaccgggacgaggcccucaacaaccgcuuccagaucaaggggguggagcugaaguccggcuacaaggacuggauccuguggaucuccuucgccaucagcugcuuccuccugugcgugguccugcucggcuucaucaugugggccugccagaaggggaacauccggugcaacaucugcaucuga

SEQ ID NO: 65575 - RNA, 1701 nt, Artificial Sequence; identical to SEQ ID NO: 65420
  derived and/or modified CDS sequence (opt1) from hemagglutinin__InfluenzaA__ABN51054

SEQ ID NO: 65576 - RNA, 1701 nt, Artificial Sequence
  derived and/or modified CDS sequence (opt1) from hemagglutinin__InfluenzaA__ABN51066
augaaggccaagcugcucgugcugcugugcgccuucaccgcgaccuacgccgacacgaucugcaucggcuaccacgccaacaacagcaccgacaccgucgacaccgugcucgagaagaacgugacggucacccacuccgugaaccugcuggaggacagccacaacgggaagcucugccgccugaagggcaccgcgccccugcagcucgggaacugcuccguggccggcuggauccuggggaacccggagugcgagagccuguucuccaaggagagcugguccuacaucgccgagacccccaaccccgagaacggcacgugcuaccccggcuacuucgccgacuacgaggagcuccgggagcagcugagcuccgucagcuccuucgagcgcuucgagaucuucccgaagaaguccagcuggcccaaccacaccgugaccaagggggugaccgccagcugcucccacaacggcaagagcuccuucuacaagaaccugcucuggcugacggagaagaacgggcuguaccccaaccucagcaaguccuacgucaacaacaaggagaaggaggugcuggugcuguggggcguccaccaccccagcaacaucggggaccagcggaccaucuaccacaccgagaacgccuacgugagcguggucuccagccacuacucccgccgguucaccccggagaucgcgaagcgccccaaggugcgggaccaggagggccgcaucaacuacuacuggacgcuccuggagcccggcgacaccaucaucuucgaggccaacgggaaccugaucgcccccugguacgccuucgcccucagccggggcuucggguccggcaucaucaccagcaacgcguccaugggcgacugcgacgccaagugccagaccccgcagggggccaucaacagcucccugcccuuccagaacgugcaccccgucacgaucggcgagugccccaaguacgugcgcagcaccaagcugcggauggugaccgggcuccgcaacaucccguccauccagagccggggccuguucggggccaucgccggcuucaucgagggcggguggaccggcaugaucgacgggugguacggcuaccaccaccagaacgagcagggguccggcuacgcggccgacaagaaguccacgcagaacgccaucgacggcaucaccaacaaggucaacagcgugaucgagaagaugaacacccaguucaccgccguggggaaggaguucaacaagcuggagcgccggauggagaaccucaacaagaaggucgacgacggcuuccuggacaucuggacguacaacgccgagcugcucgugcugcuggagaacgagcgcacccucgacuuccacgacagcaacgucaagaaccuguacgagaaggugaagaaccagcugaagaacaacgcgaaggagaucgggaacggcugcuucgaguucuaccacaagugcaacaacgagugcaucgaguccgugaagaacgggaccuacgacuaccccaaguacagcgaggaguccaagcucaagcgggagaagaucgacggcgucaagcuggagagcaugggcguguaccagauccuggccaucuacagcaccguggccuccagccucguccugcuggugucccucggggccaucggcuucuggaugugcagcaacgggucccugcagugccgcaucugcaucuga

SEQ ID NO: 65577 - RNA, 1698 nt, Artificial Sequence; identical to SEQ ID NO: 64320
  derived and/or modified CDS sequence (opt1) from hemagglutinin__InfluenzaA__ABN51077

SEQ ID NO: 65578 - RNA, 1698 nt, Artificial Sequence; identical to SEQ ID NO: 64323
  derived and/or modified CDS sequence (opt1) from hemagglutinin__InfluenzaA__ABN51088

SEQ ID NO: 65579 - RNA, 1701 nt, Artificial Sequence
  derived and/or modified CDS sequence (opt1) from hemagglutinin__InfluenzaA__ABN51099
augaagaccaucaucgcccugagcuacaucuucugccucgcccugggccaggaccugcccgggaacgacaacuccaccgcgacgcucugccugggccaccacgccgugccgaacgggacccuggucaagaccaucaccaacgaccagaucgaggugacgaacgccaccgagcucgugcagagcuccagcaccggcaagaucugcaacaacccccaccgcauccuggacgggaucgacugcacccugaucgacgcccuccugggcgacccccacugcgacgucuuccagaacgagacgugggaccuguucguggagcgguccaaggccuucagcaacugcuaccccuacgacgugccggacuacgcgucccuccgcagccuggucgccuccagcggcacccuggaguucaucaccgagggguucaccuggacgggcgugacccagaacgggggcuccaacgccugcaagcgggggcccggcagcggcuucuucucccgccucaacuggcugaccaagagcggguccaccuaccccgugcugaacgucacgaugcccaacaacgacaacuucgacaagcucuacaucuggggcgugcaccacccgagcaccaaccaggagcagaccucccuguacgugcaggccagcgggcgggucaccguguccacgcgccggagccagcagaccaucauccccaacaucggcagccgccccugggugcggggccuguccagccgcaucuccaucuacuggaccaucgucaagcccggggacgugcucgugaucaacagcaacggcaaccugaucgcgccgcggggguacuucaagaugcgcaccggcaaguccagcaucaugcgguccgacgcccccaucgacacgugcaucagcgagugcaucacccccaacggguccauccccaacgacaagccguuccagaacgucaacaagaucaccuacggcgccugccccaaguacgugaagcagaacacccugaagcucgccacgggcaugcgcaacgugcccgagaagcagacccgggggcuguucggcgccaucgcgggguucaucgagaacggcugggaggggaugaucgacggcugguacggcuuccgccaccagaacagcgaggggaccggccaggccgccgaccugaaguccacccaggccgccaucgaccagaucaacgggaagcucaaccgggucaucgagaagaugaacgagaaguuccaccagaucgagaaggaguucagcgagguggagggccgcauccaggaccuggagaaguacguggaggacacgaagaucgaccugugguccuacaacgcggagcuccuggucgcccuggagaaccagcacaccaucgaccucaccgacagcgagaugaacaagcuguucgagaagacccggcgccagcugcgggagaacgccgaggacauggggaacggcugcuucaagaucuaccacaagugcgacaacgccugcaucgaguccauccgcaacggcacguacgaccacgacguguaccgcgacgaggcccucaacaaccgguuccagaucaagggggucgagcucaagagcggcuacaaggacuggauccuguggaucuccuucgcgaucagcugcuuccugcugugcguggugcugcucggguucaucaugugggccugccagcgcggcaacauccggugcaacaucugcaucuga

SEQ ID NO: 65580 - RNA, 1701 nt, Artificial Sequence
  derived and/or modified CDS sequence (opt1) from hemagglutinin__InfluenzaA__ABN51110
augaagaccaucaucgcccugagcuacaucuucugccucgcccugggccaggaccugcccgggaacgacaacuccaccgcgacgcucugccugggccaccacgccgugccgaacgggacccuggucaagaccaucaccgacgaccagaucgaggugacgaacgccaccgagcucgugcagagcuccagcaccggcaagaucugcaacaacccccaccgcauccuggacgggaucaacugcacccugaucgacgcccuccugggcgacccccacugcgacgucuuccaggacgagacgugggaccuguucguggagcgguccaaggccuucagcaacugcuaccccuacgacgugccggacuacgcgucccuccgcagccuggucgccuccagcggcacccuggaguucaucaccgagggguucaccuggacgggcgugacccagaacgggggcuccaacgccugcaagcgggggcccggcagcggcuucuucucccgccucaacuggcugaccaagagcggguccaccuaccccgugcugaacgucacgaugcccaacaacgacaacuucgacaagcucuacaucuggggcgugcaccacccgagcaccaaccaggagcagaccucccuguacgugcaggccagcgggcgggucaccguguccacgcgccggagccagcagaccaucauccccaacaucggcagccgccccugggugcggggccuguccagccgcaucuccaucuacuggaccaucgucaagcccggggacgugcucgugaucaacagcaacggcaaccugaucgcgccgcggggguacuucaagaugcgcaccggcaaguccagcaucaugcgguccgacgcccccaucgacacgugcaucagcgagugcaucacccccaacggguccauccccaacgacaagccguuccagaacgucaacaagaucaccuacggcgccugccccaaguacgugaagcagaacacccugaagcucgccacgggcaugcgcaacgugcccgagaagcagacccgggggcuguucggcgccaucgcgggguucaucgagaacggcugggaggggaugaucgacggcugguacggcuuccgccaccagaacagcgaggggaccggccaggccgccgaccugaaguccacccaggccgccaucgaccagaucaacgggaagcucaaccgggucaucgagaagacgaacgagaaguuccaccagaucgagaaggaguucagcgagguggagggccgcauccaggaccuggagaaguacguggaggacaccaagaucgaccugugguccuacaacgcggagcuccuggucgcccuggagaaccagcacaccaucgaccucaccgacagcgagaugaacaagcuguucgagaagacgcggcgccagcugcgggagaacgccgaggacauggggaacggcugcuucaagaucuaccacaagugcgacaacgccugcaucgaguccauccgcaacggcaccuacgaccacgacguguaccgcgacgaggcccucaacaaccgguuccagaucaagggggucgagcucaagagcggcuacaaggacuggauccuguggaucuccuucgcgaucagcugcuuccugcugugcguggugcugcucggguucaucaugugggccugccagcgcggcaacauccggugcaacaucugcaucuga

SEQ ID NO: 65581 - RNA, 1701 nt, Artificial Sequence
  derived and/or modified CDS sequence (opt1) from hemagglutinin__InfluenzaA__ABN51121
augaagaccaucaucgcccugagcuacaucuucugccucgcccugggccaggaccugcccgggaacgacaacuccaccgcgacgcucugccugggccaccacgccgugccgaacgggacccuggucaagaccaucaccgacgaccagaucgaggugacgaacgccaccgagcucgugcagagcuccagcaccggcaagaucugcaacaacccccaccgcauccuggacgggaucaacugcacccugaucgacgcccuccugggcgacccccacugcgacgucuuccaggacgagacgugggaccuguucguggagcgguccaaggccuucagcaacugcuaccccuacgacgugccggacuacgcgucccuccgcagccuggucgccuccagcggcacccuggaguucaucaccgagggguucaccuggacgggcgugacccagaacgggggcuccaacgccugcaagcgggggcccggcagcggcuucuucucccgccucaacuggcugaccaagagcggguccaccuaccccgugcugaacgucacgaugcccaacaacgacaacuucgacaagcucuacaucuggggcgugcaccacccgagcaccaaccaggagcagaccucccuguacgugcaggccagcgggcgggucaccguguccacgcgccggagccagcagaccaucauccccaacaucggcagccgccccugggugcggggccuguccagccgcaucuccaucuacuggaccaucgucaagcccggggacgugcucgugaucaacagcaacggcaaccugaucgcgccgcggggguacuucaagaugcgcaccggcaaguccagcaucaugcgguccgacgcccccaucgacacgugcaucagcgagugcaucacccccaacggguccauccccaacgacaagccguuccagaacgucaacaagaucaccuacgggaccugccccaaguacgugaagcagaacacgcugaagcucgccaccggcaugcgcaacgugcccgagaagcagacccggggccuguucggcgccaucgccggguucaucgagaacggcugggaggggaugaucgacggcugguacggcuuccgccaccagaacagcgaggggaccggccaggcggccgaccugaaguccacgcaggccgccaucgaccagaucaacgggaagcucaaccgggucaucgagaagaccaacgagaaguuccaccagaucgagaaggaguucagcgagguggagggccgcauccaggaccuggagaaguacguggaggacaccaagaucgaccugugguccuacaacgccgagcuccuggucgcgcuggagaaccagcacaccaucgaccucacggaccuggagaugaacaagcuguucgagaagacccggcgccagcuccgggagaacgccgaggacauggggaacggcugcuucaagaucuaccacaagugcgacaacgccugcaucgagagcauccgcaacggcaccuacgaccacgacguguaccgcgacgaggcccugaacaaccgguuccagaucaagggggucgagcugaaguccggcuacaaggacuggauccucuggaucagcuucgccaucuccugcuuccugcugugcguggugcuccugggguucaucaugugggcgugccagcgcggcaacauccggugcaacaucugcaucuga

SEQ ID NO: 65582 - RNA, 1701 nt, Artificial Sequence
  derived and/or modified CDS sequence (opt1) from hemagglutinin__InfluenzaA__ABN51132
augaagaccaucaucgcccugagcuacaucuucugccucgcccugggccaggaccugcccgggaacgacaacuccaccgcgacgcucugccugggccaccacgccgugccgaacgggacccuggucaagaccaucaccgacgaccagaucgaggugacgaacgccaccgagcucgugcagagcuccagcaccggcaagaucugcaacaacccccaccgcauccuggacgggaucaacugcacccugaucgacgcccuccugggcgacccccacugcgacgucuuccaggacgagacgugggaccuguucguggagcgguccaaggccuucagcaacugcuaccccuacgacgugccggacuacgcgucccuccgcagccuggucgccuccagcggcacccuggaguucaucaccgagggguucaccuggacgggcgugacccagaacgggggcuccaacgccugcaagcgggggcccggcagcggcuucuucucccgccucaacuggcugaccaagagcggguccaccuaccccgugcugaacgucacgaugcccaacaacgacaacuucgacaagcucuacaucuggggcgugcaccacccgagcaccaaccaggagcagaccucccuguacgugcaggccagcgggcgggucaccguguccacgcgccggagccagcagaccaucauccccaacaucggcagccgccccugggugcggggccuguccagccgcaucuccaucuacuggaccaucgucaagcccggggacgugcucgugaucaacagcaacggcaaccugaucgcgccgcggggguacuucaagaugcgcaccggcaaguccagcaucaugcgguccgacgccagcaucgacacgugcaucuccgagugcaucacccccaacgggagcauccccaacgacaagcccuuccagaacgucaacaagaucaccuacggcgccugcccgaaguacgugaagcagaacacccugaagcucgccacgggcaugcgcaacgugcccgagaagcagacccgggggcuguucggcgccaucgcgggguucaucgagaacggcugggaggggaugaucgacggcugguacggcuuccgccaccagaacuccgaggggaccggccaggccgccgaccucaagagcacccaggccgccaucgaccagaucaacgggaagcugaaccgggucaucgagaagacgaacgagaaguuccaccagaucgagaaggaguucuccgagguggagggccgcauccaggaccuggagaaguacguggaggacaccaagaucgaccuguggagcuacaacgcggagcuccuggucgcccuggagaaccagcacaccaucgaccucaccgacuccgagaugaacaagcuguucgagaagacgcggcgccagcugcgggagaacgccgaggacauggggaacggcugcuucaagaucuaccacaagugcgacaacgccugcaucgagagcauccgcaacggcaccuacgaccacgacguguaccgcgacgaggcccucaacaaccgguuccagaucaagggggucgagcugaaguccggcuacaaggacuggauccuguggaucagcuucgcgaucuccugcuuccuccugugcguggugcugcucggguucaucaugugggccugccagcgcggcaacauccggugcaacaucugcaucuga

SEQ ID NO: 65583 - RNA, 1698 nt, Artificial Sequence; identical to SEQ ID NO: 64824
  derived and/or modified CDS sequence (opt1) from hemagglutinin__InfluenzaA__ABN51143

SEQ ID NO: 65584 - RNA, 1701 nt, Artificial Sequence
  derived and/or modified CDS sequence (opt1) from hemagglutinin__InfluenzaA__ABN51154
augaagaccaucaucgcccugagcuacauccucugccugguguucacccagaagcugcccggcaacgacaacuccacggccacccucugccuggggcaccacgcggucccgaacggcacccuggugaagaccaucacgaacgaccagaucgaggugaccaacgccaccgagcucguccagagcuccagcaccgggcgcaucugcgacagcccccaccagauccuggacggcgagaacugcacgcugaucgacgcccuccugggggacccccacugcgacggcuuccagaacaaggagugggaccuguucguggagcggagcaaggccuacuccaacugcuaccccuacgacgugccggacuacgucagccuccgcucccugguggccagcuccggcacccuggaguucaacaacgagagcuucaacuggaccgggguggcgcagaacggcaccuccagcgccugcaagcggcgcuccgacaagagcuucuucucccggcucaacuggcugcaccagcugaaguacaaguaccccgcccucaacgucacgaugcccaacaacgagaaguucgacaagcuguacaucuggggcgugcaccaccccgggaccgacagcgaccagaucucccuguacgcccaggcgagcgggcgcgugaccgucagcaccaagcggucccagcagacggugaucccgaacaucggcagcggccccugggugcgcggggucuccagccggaucuccaucuacuggaccaucgugaagcccggcgacauccuccugaucaacagcaccgggaaccugaucgcgccccgcggcuacuucaagauccgguccggcaagagcuccaucaugcgcagcgacgccccgaucgggaagugcaacuccgagugcaucacccccaacggcagcauccccaacgacaagcccuuccagaacgugaaccggaucacguacgggccgugcccccgcuacgucaagcagaacacccucaagcuggccaccggcaugcggaacgugcccgagaagcagacccgcgggaucuucggcgccaucgccggcuucaucgagaacgggugggagggcaugauggacgggugguacggcuuccggcaccagaacuccgaggggacgggccaggccgccgaccugaaguccacccaggccgccaucaaccagaucaacggcaagcucaaccgccugaucgagaagaccaacgagaaguuccaccagaucgagaaggaguucuccgagguggaggggcggauccaggaccuggagaaguacgucgaggacaccaagaucgaccucuggagcuacaacgcggagcugcugguggcccucgagaaccagcacacgaucgaccugaccgacuccgagaugaacaagcuguucgagcgcaccaagaagcagcuccgggagaacgccgaggacaugggcaacgggugcuucaagaucuaccacaagugcgacaacgccugcaucggcagcauccgcaacgggaccuacgaccacgacguguaccgcgacgaggcccugaacaaccgguuccagaucaagggcgucgagcugaaguccggcuacaaggacuggauccucuggaucagcuucgcgaucagcugcuuccugcugugcaucgugcuccugggguucaucaugugggccugccagaagggcaacauccgcugcaacaucugcaucuga

SEQ ID NO: 65585 - RNA, 1701 nt, Artificial Sequence
  derived and/or modified CDS sequence (opt1) from hemagglutinin__InfluenzaA__ABN59390
augaagaccaucaucgcccugagcuacaucaucugccucguguucgcccagaagcugcccggcaacgacaacuccaccgcgacgcugugccucgggcaccacgccgucccgaacggcaccaucgugaagaccaucaccaacgaccagaucgaggugacgaacgccaccgagcugguccagagcuccagcaccggggagaucugcgacagcccccaccagauccuggacggcgagaacugcacccucaucgacgcccugcugggggacccccagugcgacggcuuccagaacaagaagugggaccucuucguggagcgcuccaaggccuacuccaacugcuaccccuacgacgugccggacuacgcgagccugcggucccuggucgccagcuccggcacgcucgaguucaacaacgagagcuucaacuggaccggggugacccagaacggcaccuccagcgccugcaagcgccgguccaacaacagcuucuucucccgccugaacuggcugacgcaccucaaguucaaguaccccgcccugaacgugaccaugcccaacaacgagaaguucgacaagcuguacaucuggggcguccaccaccccgggaccgacaacgaccagaucuuccucuacgcgcaggccagcgggcggaucaccguguccacgaagcgcagccagcagaccgugaucccgaacaucggcagccggccccgcguccggaacauccccucccgcaucagcaucuacuggaccaucgugaagcccggcgacauccugcugaucaacuccaccgggaaccucaucgccccgcggggcuacuuccgcauccggagcgggaaguccagcaucaugcgcuccgacgcccccaucggcaagugcaacagcgagugcaucacgcccaacggcuccauccccaacgacaagccguuccagaacgugaaccggaucaccuacggggccugcccccgcuacgucaagcagaacacccugaagcuggcgaccggcaugcggaacgugcccgagaagcagacgcgcgggaucuucggcgccaucgccggguucaucgagaacggcugggagggcaugguggacgggugguacggcuuccggcaccagaacagcgaggggaucggccaggccgccgaccucaaguccacccaggcggccaucaaccagaucaacgggaagcugaaccgccugaucggcaagaccaacgagaaguuccaccagaucgagaaggaguucagcgaggucgagggccggauccaggaccucgagaaguacguggaggacaccaagaucgaccugugguccuacaacgccgagcugcucguggcccuggagaaccagcacacgaucgaccugaccgacagcgagaugaacaagcuguucgagcgcaccaagaagcagcuccgcgagaacgccgaggacauggggaacggcugcuucaagaucuaccacaagugcgacaacgcgugcaucggguccauccggaacggcaccuacgaccacgacgucuaccgcgacgaggcccugaacaaccgguuccagaucaaggggguggagcucaagagcggcuacaaggacuggauccuguggaucuccuucgccaucagcugcuuccugcucugcguggcccugcugggcuucaucaugugggccugccagaaggggaacauccgcugcaacaucugcaucuga

SEQ ID NO: 65586 - RNA, 1701 nt, Artificial Sequence
  derived and/or modified CDS sequence (opt1) from hemagglutinin__InfluenzaA__ABN59401
augaaggccaagcugcucgugcugcugugcgcccucagcgcgaccgacgccgacaccaucugcaucggcuaccacgccaacaacuccacggacaccgucgacaccgugcuggagaagaacgugaccgucacgcacagcgugaaccugcucgaggacucccacaacgggaagcugugccgccugaagggcaucgcgccccuccagcuggggaagugcaacaucgccggcuggauccuggggaacccggagugcgagagccucuucuccaagaaguccuggagcuacaucgccgagacccccaacagcgagaacgggaccugcuaccccggcuacuucgccgacuacgaggagcugcgggagcagcuguccagcguguccagcuucgagcgcuucgagaucuuccccaaggagcgguccuggccgaagcacaacaucacccgcggcgucacggccgccugcagccacaagggcaaguccagcuucuaccggaaccuccuguggcugaccgagaagaacggguccuaccccaaccucaacaagagcuacgugaacaacaaggagaaggaggugcugguccuguggggcgugcaccaccccuccaacaucgaggaccagaagacccucuaccgcaaggagaacgcguacgugagcgucgugagcuccaacuacaaccggcgcuucacccccgagaucgccgagcggccgaaggugcgcgggcaggccggccggaucaacuacuacuggacgcugcuggagcccggcgacaccaucaucuucgaggccaacgggaaccucaucgcccccuggcacgcguucgcccugagccgcggcuucggguccggcaucaucaccagcaacgccuccauggacgagugcgacaccaagugccagacgccccagggcgccaucaacagcucccugccguuccagaacauccaccccgucaccaucggggagugccccaaguacgugcggagcaccaagcuccgcauggugaccggccugcggaacauccccuccauccagagccgcgggcuguucggcgccaucgcgggguucaucgagggcggcuggacggggaugaucgacggcugguacggguaccaccaccagaacgagcagggcuccggguacgccgccgaccagaaguccacccagaacgccaucaacggcaucaccaacaaggucaacagcgugaucgagaagaugaacacccaguucacggccgugggcaaggaguucaacaagcucgagaagcggauggagaaccugaacaagaaggucgacgacggguuccuggacaucuggaccuacaacgcggagcuccuggugcugcucgagaacgagcgcacccuggacuuccacgacagcaacgugaagaaccuguacgagaaggucaagucccagcucaagaacaacgccaaggagaucggcaacgggugcuucgaguucuaccacaagugcaacaacgagugcauggagagcgugaagaacggcaccuacgacuacccgaaguacuccgaggagagcaagcugaaccgggagaagaucgacggggucaagcuggaguccaugggcguguaccagauccucgccaucuacagcacgguggccagcucccugguccugcucgugagccugggcgccaucuccuucuggaugugcagcaacgggucccugcagugccgcaucugcaucuga

SEQ ID NO: 65587 - RNA, 1698 nt, Artificial Sequence
  derived and/or modified CDS sequence (opt1) from hemagglutinin__InfluenzaA__ABN59412
augaaggccaaccugcucgugcugcugugcgcccucgcggccgccgacgccgacaccaucugcaucggcuaccacgccaacaacagcaccgacacggucgacaccgugcuggagaagaacgugaccgucacccacuccgugaaccugcucgaggacagccacaacgggaagcugugccgccugaagggcaucgcgccccuccagcuggggaagugcaacaucgccggcuggcugcucgggaacccggagugcgacccccugcugcccgugcgguccuggagcuacaucgucgagacgcccaacuccgagaacggcaucugcuacccgggcgacuucaucgacuacgaggagcuccgcgagcagcugagcuccgugagcuccuucgagcgguucgagaucuuccccaaggagagcuccuggcccaaccacaacaccaacggggugaccgccgccugcagccacgagggcaaguccagcuucuaccgcaaccugcucuggcugaccgagaaggagggguccuaccccaagcugaagaacagcuacgucaacaagaagggcaaggaggugcucgugcugugggggauccaccacccgcccaacuccaaggagcagcagaaccuguaccagaacgagaacgcguacgucagcguggugacguccaacuacaaccggcgcuucacccccgagaucgccgagcggcccaagguccgcgaccaggccggccggaugaacuacuacuggacccuccugaagccgggcgacaccaucaucuucgaggccaacgggaaccugaucgcccccauguacgcguucgcccucagccgcggcuucgggagcggcaucaucacguccaacgccagcaugcacgagugcaacaccaagugccagacgccccugggcgccaucaacuccagccugcccuaccagaacauccacccggugaccaucggggagugccccaaguacgugcgguccgccaagcuccgcauggucaccggccugcggaacauccccagcauccagucccgcgggcuguucggcgcgaucgccggguucaucgagggcggcuggaccgggaugaucgacggcugguacggguaccaccaccagaacgagcagggcagcggguacgccgccgaccagaaguccacccagaacgccaucaacggcaucaccaacaaggugaacacggugaucgagaagaugaacauccaguucaccgcggucggcaaggaguucaacaagcucgagaagcggauggagaaccugaacaagaagguggacgacggguuccuggacaucuggaccuacaacgccgagcuccuggugcugcucgagaacgagcgcacccuggaguuccacgacagcaacgucaagaaccuguacgagaaggugaagucccagcucaagaacaacgccaaggagaucggcaacgggugcuucgaguucuaccacaagugcgacaacgagugcauggagagcguccggaacggcacguacgacuaccccaaguacuccgaggagagcaagcugaaccgcgagaagguggacggggugaagcuggaguccaugggcaucuaccagauccucgccaucuacagcaccgucgccuccagccuggugcugcucgugucccugggcgcgaucagcuucuggaugugcagcaacgggucccugcagugccggaucugcaucuga

SEQ ID NO: 65588 - RNA, 1701 nt, Artificial Sequence
  derived and/or modified CDS sequence (opt1) from hemagglutinin__InfluenzaA__ABN59423
augaaggccaagcugcucgugcugcugugcgcccucagcgcgaccgacgccgacaccaucugcaucggcuaccacgccaacaacuccacggacaccgucgacaccgugcuggagaagaacgugaccgucacgcacagcgugaaccugcucgaggacucccacaacgggaagcugugccgccugaagggcaucgcgccccuccagcuggggaagugcagcaucgccggcuggauccuggggaacccggagugcgagucccucuucagcaagaaguccuggagcuacaucgccgagacccccaacuccgagaacgggaccugcuaccccggcuacuucgccgacuacgaggagcugcgggagcagcugagcuccgugagcuccuucgagcgcuucgagaucuuccccaaggagcggagcuggccgaagcacaacgucacccgcggggugacggccuccugcagccacaagggcaaguccagcuucuaccggaaccuccuguggcugaccgagaagaacggguccuaccccaaccucagcaagagcuacgugaacaacaaggagaaggagguccuggugcuguggggcgugcaccaccccuccaacaucgagaaccagaagaccaucuaccgcaaggagaacgccuacgucagcgugguguccagcaacuacaaccggcgcuucacccccgagaucgcggagcggccgaagguccgcgaccaggaggggcggaucaacuacuacuggacgcuccuggagcccggcgacaccaucaucuucgaggccaacggcaaccugaucgcccccugguacgccuucgcccucucccgcggguucggcagcgggaucaucaccuccaacgcgagcauggacgagugcgacaccaagugccagacgccccagggcgccaucaacuccagccugccguuccagaacgugcaccccgugaccaucggcgagugccccaaguacguccgguccaccaagcugcgcauggugaccgggcuccggaacauccccagcauccagucccgcggccuguucggggccaucgccggcuucaucgagggcggcuggacgggcaugaucgacgggugguacggcuaccaccaccagaacgagcaggggagcggcuacgccgcggaccagaaguccacccagaacgccaucaacgggaucaccaacaaggugaacagcgucaucgagaagaugaacacccaguucacggccgugggcaaggaguucaacaagcuggagaagcggauggagaaccucaacaagaagguggacgacggcuuccuggacaucuggaccuacaacgccgagcugcucguccugcuggagaacgagcgcacccucgacuuccacgacuccaacgugaagaaccuguacgagaaggucaagagccagcugaagaacaacgccaaggagaucgggaacggcugcuucgaguucuaccacaagugcaacaacgagugcauggaguccgugaagaacgggaccuacgacuacccgaaguacagcgaggagagcaagcucaaccgggagaagaucgacggcgugaagcuggaguccaugggggucuaccagauccuggcgaucuacagcacgguggccuccagccucgugcugcuggucucccucggcgccaucagcuucuggaugugcuccaacggcagccugcagugccgcaucugcaucuga

SEQ ID NO: 65589 - RNA, 1701 nt, Artificial Sequence; identical to SEQ ID NO: 64790
  derived and/or modified CDS sequence (opt1) from hemagglutinin__InfluenzaA__ABO32656

SEQ ID NO: 65590 - RNA, 1701 nt, Artificial Sequence
  derived and/or modified CDS sequence (opt1) from hemagglutinin__InfluenzaA__ABO32667
augaagaccaucaucgcccugagcuacauccucugccugguguucgcccagaagcugcccggcaacgacaacuccaccgcgacgcucugccuggggcaccacgccgucccgaacggcacccuggugaagaccaucaccaacgaccagaucgaggugacgaacgccaccgagcucguccagagcuccagcaccgggggcaucugcgacagcccccaccagauccuggacggggagaacugcacccugaucgacgcccuccugggcgacccccacugcgacggcuuccagaacaaggagugggaccuguucguggagcgcagcaaggccuacuccaacugcuaccccuacgacgugccggacuacgcgagccuccggucccuggucgccagcuccgggacgcuggaguucaacaacgagagcuucaacuggaccggcguggcccagaacgggaccuccagcgccugcaagcgccgguccaacaagagcuucuucucccgccucaacuggcugcaccagcugaaguacaaguaccccgcgcucaacgugaccaugcccaacaacgagaaguucgacaagcuguacaucuggggcguccaccaccccagcacggacuccgaccagaucagccuguacgcccaggccagcgggcgggugaccguguccaccaagcgcagccagcagaccgucaucccgaacaucggcucccggcccugggugcgcgacgugagcucccggaucagcaucuacuggacgaucgucaagcccggcgacauccuccugaucaacuccaccgggaaccugaucgcgccccgcggcuacuucaagauccggagcgggaaguccagcaucaugcgcuccgacgccccgaucggcaagugcaacagcgagugcaucacccccaacggcuccauccccaacgacaagcccuuccagaacgugaaccggaucaccuacggggccugcccgcgcuacgugaagcagaacacgcucaagcuggccaccggcaugcggaacguccccgagaagcagacccgcgggaucuucggcgccaucgccggguucaucgagaacggcugggagggcaugguggacgggugguacggcuuccggcaccagaacagcgaggggaccggccaggccgcggaccugaaguccacgcaggccgccaucaaccagaucaacgggaagcucaaccgccugaucggcaagaccaacgagaaguuccaccagaucgagaaggaguucagcgagguggagggccggauccaggaccuggagaaguacgucgaggacaccaagaucgaccucugguccuacaacgccgagcugcugguggcccucgagaaccagcacaccaucgaccugacggacagcgagaugaacaagcuguucgagcgcaccaagaagcagcuccgggagaacgcggaggacauggggaacggcugcuucaagaucuaccacaagugcgacaacgccugcaucggguccauccgcaacggcaccuacgaccacgacguguaccgcgacgaggcccugaacaaccgguuccagaucaagggggucgagcugaaguccggcuacaaggacuggauccucuggaucagcuucgccaucuccugcuuccugcugugcgugguccuccugggcuucaucaugugggccugccagaaggggaacauccgcugcaacaucugcaucuga

SEQ ID NO: 65591 - RNA, 1698 nt, Artificial Sequence
  derived and/or modified CDS sequence (opt1) from hemagglutinin__InfluenzaA__ABO32678
augaaggugaagcugcucguccugcugugcaccuucaccgccacguacgccgacaccaucugcaucggcuaccacgcgaacaacagcaccgacaccguggacacggugcucgagaagaacgucaccgugacccacuccgugaaccugcuggaggacagccacaacgggaagcucugccugcugaagggcaucgcgccccuccagcuggggaacugcuccgucgccggcuggauccuggggaacccggagugcgagcuccugaucagcaaggaguccuggagcuacaucguggagacccccaaccccgagaacggcacgugcuaccccggcuacuucgccgacuacgaggagcugcgcgagcagcucuccagcguguccagcuucgagcgguucgagaucuucccgaaggaguccagcuggcccaaccacaccgucaccgggguguccgccagcugcucccacaacggcaagagcuccuucuaccgcaaccugcuguggcucaccgggaagaacggccuguaccccaaccugagcaaguccuacgccaacaacaaggagaaggaggugcucguccuguggggcgugcaccacccgcccaacaucggggaccagcgggcccuguaccacacggagaacgccuacgugagcgucgugagcucccacuacagccgccgguucacccccgagaucgccaagcgccccaaggugcgggaccaggagggccgcaucaacuacuacuggacccuccuggagcccggggacaccaucaucuucgaggcgaacggcaaccugaucgccccgcgguucgccuucgcccucucccgcggguucggcagcggcaucaucacguccaacgcccccauggacgagugcgacgcgaagugccagacgccccagggggccaucaacagcucccugcccuuccagaacguccacccggugaccaucggcgagugccccaaguacgugcggagcgccaagcugcgcauggccaccgggcuccggaacauccccuccauccagagccgcggccuguucggggccaucgcgggcuucaucgagggcggguggaccggcauggucgacgggugguacggcuaccaccaccagaacgagcagggguccggcuacgccgccgaccagaaguccacccagaacgccaucaacggcaucaccaacaaggugaacagcgugaucgagaagaugaacacccaguucacggccgucgggaaggaguucagcaagcuggagcggcgcauggagaaccuccacaagaagguggacgacggcuuccuggacaucuggaccuacaacgcggagcugcucguccugcuggagaacgagcggacccucgacuuccacgacuccaacgugaagaaccuguacgagaaggucaagagccagcugaagaacaacgccaaggagaucgggaacggcugcuucgaguucuaccacaagugcaacgacgagugcauggaguccgugaagaacgggaccuacgacuaccccaaguacagcgaggaguccaagcucaaccgcgagaagaucgacggcgugaagcuggagagcaugggcguguaccagauccuggccaucuacagcacggucgccuccagccucgugcugcuggugucccucggggccaucagcuucuggaugugcuccaacggcagccugcagugccggaucugcaucuga

SEQ ID NO: 65592 - RNA, 1701 nt, Artificial Sequence
  derived and/or modified CDS sequence (opt1) from hemagglutinin__InfluenzaA__ABO32692
augaagaccaucaucgcccugagcuacauccucugccugguguucgcccagaagcugcccggcaacgacaacuccaccgcgacgcucugccuggggcaccacgccgucccgaacggcaccaucgugaagaccaucaccaacgaccagaucgaggugacgaacgccaccgagcugguccagagcuccagcaccgggggcaucugcgacagcccccaccagauccucgacggggagaacugcacccugaucgacgcccugcucggcgacccccagugcgacggcuuccagaacaagaagugggaccuguucguggagcgcagcaaggccuacuccaacugcuaccccuacgacgugccggacuacgcgagccugcggucccucgucgccagcuccgggacgcuggaguucaacaacgagagcuucaacuggaccggcgugacccagaacgggaccuccagcgccugcaagcgccgguccaacaacagcuucuucucccgccugaacuggcucacgcaccugaaguucaaguaccccgcccugaacgugaccaugcccaacaacgagaaguucgacaagcucuacaucuggggcguccaccaccccgggaccgacaacgaccagaucuuccuguacgcgcaggccagcggccggaucaccguguccacgaagcgcagccagcagaccgugaucccgaacaucggcagccggccccgcguccggaacauccccucccgcaucagcaucuacuggaccaucgugaagcccggggacauccugcucaucaacuccaccggcaaccugaucgccccgcggggguacuucaagauccgcagcggcaaguccagcaucaugcgguccgacgcccccaucggcaagugcaacagcgagugcaucacgcccaacggguccauccccaacgacaagccguuccagaacgugaaccgcaucaccuacggcgccugcccccgguacgucaagcagaacacccugaagcucgcgaccgggaugcgcaacgugcccgagaagcagacgcggggcaucuucggggccaucgccggcuucaucgagaacggcugggaggggaugguggacggcugguacggguuccgccaccagaacagcgagggcaucgggcaggccgccgaccugaaguccacccaggcggccaucaaccagaucaacggcaagcugaaccggcucaucggcaagaccaacgagaaguuccaccagaucgagaaggaguucagcgaggucgaggggcgcauccaggaccuggagaaguacguggaggacaccaagaucgaccugugguccuacaacgccgagcuccugguggcccuggagaaccagcacacgaucgaccucaccgacagcgagaugaacaagcuguucgagcggaccaagaagcagcugcgcgagaacgccgaggacaugggcaacgggugcuucaagaucuaccacaagugcgacaacgcgugcaucggcuccauccgcaacgggaccuacgaccacgacgucuaccgggacgaggcccucaacaaccgcuuccagaucaagggcguggagcugaaguccggcuacaaggacuggauccuguggaucuccuucgccaucagcugcuuccuccugugcgugguccugcucggguucaucaugugggccugccagaagggcaacauccggugcaacaucugcaucuga

SEQ ID NO: 65593 - RNA, 1701 nt, Artificial Sequence; identical to SEQ ID NO: 65457
  derived and/or modified CDS sequence (opt1) from hemagglutinin__InfluenzaA__ABO32751

SEQ ID NO: 65594 - RNA, 1701 nt, Artificial Sequence; identical to SEQ ID NO: 65457
  derived and/or modified CDS sequence (opt1) from hemagglutinin__InfluenzaA__ABO32762

SEQ ID NO: 65595 - RNA, 1701 nt, Artificial Sequence; identical to SEQ ID NO: 65479
  derived and/or modified CDS sequence (opt1) from hemagglutinin__InfluenzaA__ABO32775

SEQ ID NO: 65596 - RNA, 1701 nt, Artificial Sequence; identical to SEQ ID NO: 64267
  derived and/or modified CDS sequence (opt1) from hemagglutinin__InfluenzaA__ABO32790

SEQ ID NO: 65597 - RNA, 1701 nt, Artificial Sequence
  derived and/or modified CDS sequence (opt1) from hemagglutinin__InfluenzaA__ABO32803
augaagaccaucaucgcccugagcuacauccucugccugguguucgcccagaagcugcccggcaacgacaacuccaccgcgacgcucugccuggggcaccacgccgucccgaacggcaccaucgugaagaccaucaccaacgaccagaucgaggugacgaacgccaccgagcugguccagagcuccagcaccgggggcaucugcgacagcccccaccagauccucgacggggagaacugcacccugaucgacgcccugcucggcgacccccagugcgacggcuuccagaacaagaagugggaccuguucguggagcgcagcaaggccuacuccaacugcuaccccuacgacgugccggacuacgucagccugcggucccucguggcgagcuccgggacgcuggaguucaacaacgagagcuucaacuggaccggcgugacccagaacgggaccuccagcgccugcaagcgccgguccaacaacagcuucuucucccgccugaacuggcucacgcaccugaaguucaaguaccccgcccugaacgucaccaugcccaacaacgagaaguucgacaagcucuacaucuggggcgugcaccaccccgggaccgacaacgaccagaucagccuguacgcccaggcguccggccggaucaccgugagcacgaagcgcagccagcagaccgucaucccgaacaucggcucccggccccgcgugcgggacauccccagccgcaucuccaucuacuggaccaucgugaagcccggggacacccugcucaucaacagcacgggcaaccugaucgccccgcggggguacuucaagauccgcuccggcaagagcuccaucaugcggagcgacgcccccaucgacaagugcaacuccgagugcaucacccccaacggcagcauccccaacgacaagccguuccagaacgucaaccgcaucaccuacggggccugcccccgguacgugaagcagaacacccugaagcucgccacgggcaugcgcaacgugcccgagaagcagacccgggggaucuucggcgcgaucgccggguucaucgagaacggcugggagggcauggucgacgggugguacggcuuccgccaccagaacuccgaggggaucggccaggccgccgaccugaaguccacccaggccgcgaucaaccagaucaacgggaagcugaaccggcucaucggcaagaccaacgagaaguuccaccagaucgagaaggaguucuccgagguggagggccgcauccaggaccuggagaaguacguggaggacacgaagaucgaccuguggagcuacaacgccgagcuccuggucgcccuggagaaccagcacaccaucgaccucaccgacuccgagaugaacaagcuguucgagcggaccaagaagcagcugcgcgagaacgccgaggacauggggaacggcugcuucaagaucuaccacaagugcgacaacgccugcaucgggagcauccgcaacggcacguacgaccacgacguguaccgggacgaggcgcucaacaaccgcuuccagaucaaggggguggagcugaaguccggcuacaaggacuggauccuguggaucagcuucgccaucuccugcuuccuccugugcgucgcccugcucggcuucaucaugugggccugccagaaggggaacauccggugcaacaucugcaucuga

SEQ ID NO: 65598 - RNA, 1701 nt, Artificial Sequence; identical to SEQ ID NO: 64657
  derived and/or modified CDS sequence (opt1) from hemagglutinin__InfluenzaA__ABO32816

SEQ ID NO: 65599 - RNA, 1701 nt, Artificial Sequence; identical to SEQ ID NO: 64280
  derived and/or modified CDS sequence (opt1) from hemagglutinin__InfluenzaA__ABO32827

SEQ ID NO: 65600 - RNA, 1701 nt, Artificial Sequence
  derived and/or modified CDS sequence (opt1) from hemagglutinin__InfluenzaA__ABO32838
augaagaccaucaucgcccugagcuacauccucugccugguguucgcccagaagcugcccggcaacgacaacuccaccgcgacgcucugccuggggcaccacgccgucccgaacggcaccaucgugaagaccaucaccaacgaccagaucgaggugacgaacgccaccgagcugguccagagcuccagcaccgggggcaucugcgacagcccccaccagauccucgacggggagaacugcacccugaucgacgcccugcucggcgacccccagugcgacggcuuccagaacaagcgcugggaccuguucguggagcggagcaaggccuacuccaacugcuaccccuacgacgugccggacuacgcgagccugcgcucccucgucgccagcuccgggacgcuggaguucaacaacgagagcuucaacuggaccggcgugacccagaacgggaccuccagcgccugcaagcggcgcuccaacaacagcuucuucucccggcugaacuggcucacgcaccugaaguucaaguaccccgcccugaacgugaccaugcccaacaacgagaaguucgacaagcucuacaucuggggcguccaccaccccgggaccgacaacgaccagaucuuccuguacgcgcaggccagcggccgcaucaccguguccacgaagcggagccagcagaccgugaucccgaacaucggcagccgcccccggguccgcaacauccccucccggaucagcaucuacuggaccaucgugaagcccggggacauccugcucaucaacuccaccggcaaccugaucgccccgcgcggguacuucaagauccggagcggcaaguccagcaucaugcgcuccgacgcccccaucggcaagugcaacagcgagugcaucacgcccaacggguccauccccaacgacaagccguuccagaacgugaaccggaucaccuacggcgccugcccccgcuacgucaagcagaacacccugaagcucgcgaccgggaugcggaacgugcccgagaagcagacgcgcggcaucuucggggccaucgccggcuucaucgagaacggcugggaggggaugguggacggcugguacggguuccggcaccagaacagcgagggcaucgggcaggccgccgaccugaaguccacccaggcggccaucaaccagaucaacggcaagcugaaccgccucaucggcaagaccaacgagaaguuccaccagaucgagaaggaguucagcgaggucgaggggcggauccaggaccuggagaaguacguggaggacaccaagaucgaccugugguccuacaacgccgagcuccugguggcccuggagaaccagcacacgaucgaccucaccgacagcgagaugaacaagcuguucgagcgcaccaagaagcagcugcgcgagaacgccgaggacaugggcaacgggugcuucaagaucuaccacaagugcgacaacgcgugcaucggcuccauccggaacgggaccuacgaccacgacgucuaccgcgacgaggcccucaacaaccgguuccagaucaagggcguggagcugaaguccggcuacaaggacuggauccuguggaucuccuucgccaucagcugcuuccuccugugcguggcccugcucggguucaucaugugggccugccagaagggcaacauccgcugcaacaucugcaucuga

SEQ ID NO: 65601 - RNA, 1701 nt, Artificial Sequence; identical to SEQ ID NO: 65600
  derived and/or modified CDS sequence (opt1) from hemagglutinin__InfluenzaA__ABO32849

SEQ ID NO: 65602 - RNA, 1701 nt, Artificial Sequence
  derived and/or modified CDS sequence (opt1) from hemagglutinin__InfluenzaA__ABO32860
augaagaccaucaucgcccugagcuacauccucugccugguguucgcccagaagcugcccggcaacgacaacuccaccgcgacgcucugccuggggcaccacgccgucccgaacggcaccaucgugaagaccaucaccaacgaccagaucgaggugacgaacgccaccgagcugguccagagcuccagcaccgggggcaucugcgacagcccccaccagauccucgacggggagaacugcacccugaucgacgcccugcucggcgacccccagugcgacggcuuccagaacaagcgcugggaccuguucguggagcggagcaaggccuacuccaacugcuaccccuacgacgugccggacuacgcgagccugcgcucccucgucgccagcuccgggacgcuggaguucaacaacgagagcuucaacuggaccggcgugacccagaacgggaccuccagcgccugcaagcggcgcuccaacaacagcuucuucucccggcugaacuggcucacgcaccugaaguucaaguaccccgcccugaacgugaccaugcccaacaacgagaaguucgacaagcucuacaucuggggcguccaccaccccgggaccgacaacgaccagaucuuccuguacgcgcaggccagcggccgcaucaccguguccacgaagcggagccagcagaccgugaucccgaacaucggcagccgcccccggguccgcgacauccccucccggaucagcaucuacuggaccaucgugaagcccggggacauccugcucaucaacuccaccggcaaccugaucgccccgcgcggguacuucaagauccggagcggcaaguccagcaucaugcgcuccgacgcccccaucggcaagugcaacagcgagugcaucacgcccaacggguccauccccaacgacaagccguuccagaacgugaaccggaucaccuacggcgccugcccccgcuacgucaagcagaacacccugaagcucgcgaccgggaugcggaacgugcccgagaagcagacgcgcggcaucuucggggccaucgccggcuucaucgagaacggcugggaggggaugguggacggcugguacggguuccggcaccagaacagcgagggcaucgggcaggccgccgaccugaaguccacccaggcggccaucaaccagaucaacggcaagcugaaccgccucaucggcaagaccaacgagaaguuccaccagaucgagaaggaguucagcgaggucgaggggcggauccaggaccuggagaaguacguggaggacaccaagaucgaccugugguccuacaacgccgagcuccugguggcccuggagaaccagcacacgaucgaccucaccgacagcgagaugaacaagcuguucgagcgcaccaagaagcagcugcgcgagaacgccgaggacaugggcaacgggugcuucaagaucuaccacaagugcgacaacgcgugcaucggcuccauccggaacgggaccuacgaccacgacgucuaccgcgacgaggcccucaacaaccgguuccagaucaagggcguggagcugaaguccggcuacaaggacuggauccuguggaucuccuucgccaucagcugcuuccuccugugcguggcccugcucggguucaucaugugggccugccagaagggcaacauccgcugcaacaucugcaucuga

SEQ ID NO: 65603 - RNA, 1701 nt, Artificial Sequence; identical to SEQ ID NO: 65585
  derived and/or modified CDS sequence (opt1) from hemagglutinin__InfluenzaA__ABO32871

SEQ ID NO: 65604 - RNA, 1701 nt, Artificial Sequence
  derived and/or modified CDS sequence (opt1) from hemagglutinin__InfluenzaA__ABO32882
augaagaccaucaucgcccugagcuacaucaucugccucguguucgcccagaagcugcccggcaacgacaacuccaccgcgacgcugugccucgggcaccacgccgucccgaacggcaccaucgugaagaccaucaccaacgaccagaucgaggugacgaacgccaccgagcugguccagagcuccagcaccggggagaucugcgacagcccccaccagauccuggacggcgagaacugcacccucaucgacgcccugcugggggacccccagugcgacggcuuccagaacaagaagugggaccucuucguggagcgcagcaaggccuacuccaacugcuaccccuacgacgugccggacuacgcgagccugcggucccuggucgccagcuccggcacgcucgaguucaacaacgagagcuucaacuggaccggggugacccagaacggcaccuccagcgccugcaagcgccgguccaacaacagcuucuucucccgccugaacuggcugacgcaccucaaguucaaguaccccgcccugaacgugaccaugcccaacaacgagaaguucgacaagcuguacaucuggggcguccaccaccccgggaccgacaacgaccagaucuucccguacgcgcaggccagcgggcggaucaccguguccacgaagcgcagccagcagaccgugauccccaacaucggcagccggccccgcguccggaacauccccucccgcaucagcaucuacuggaccaucgugaagccgggcgacauccuccugaucaacuccaccgggaaccugaucgcgccccggggcuacuuccgcauccggagcgggaaguccagcaucaugcgcuccgacgcccccaucggcaagugcaacagcgagugcaucacgcccaacggcuccaucccgaacgacaagcccuuccagaacgugaaccggaucaccuacggggccugcccccgcuacgucaagcagaacacccucaagcuggccaccggcaugcggaacgugcccgagaagcagacgcgcgggaucuucggcgccaucgccggguucaucgagaacggcugggagggcaugguggacgggugguacggcuuccggcaccagaacagcgaggggaucggccaggccgccgaccugaaguccacccaggcggccaucaaccagaucaacgggaagcucaaccgccugaucggcaagaccaacgagaaguuccaccagaucgagaaggaguucagcgaggucgagggccggauccaggaccuggagaaguacguggaggacaccaagaucgaccucugguccuacaacgccgagcugcugguggcccucgagaaccagcacacgaucgaccugaccgacagcgagaugaacaagcuguucgagcgcaccaagaagcagcuccgcgagaacgccgaggacauggggaacggcugcuucaagaucuaccacaagugcgacaacgcgugcaucggguccauccggaacggcaccuacgaccacgacgucuaccgcgacgaggcccugaacaaccgguuccagaucaaggggguggagcugaaguccggcuacaaggacuggauccucuggaucuccuucgccaucagcugcuuccugcugugcguggcccuccugggcuucaucaugugggccugccagaaggggaacauccgcugcaacaucugcaucuga

SEQ ID NO: 65605 - RNA, 1701 nt, Artificial Sequence
  derived and/or modified CDS sequence (opt1) from hemagglutinin__InfluenzaA__ABO32893
augaagaccaucaucgcccugagcuacauccucugccugguguucgcccagaagcugcccggcaacgacaacuccaccgcgacgcucugccuggggcaccacgccgucccgaacggcaccaucgugaagaccaucaccaacgaccagaucgaggugacgaacgccaccgagcugguccagagcuccagcaccggggagaucugcgacagcccccaccagauccucgacggcgagaacugcacccugaucgacgcccugcucggggacccccagugcgacggcuuccagaacaagaagugggaccuguucguggagcgcagcaaggccuacuccaacugcuaccccuacgacgugccggacuacgcgagccugcggucccucgucgccagcuccggcacgcuggaguucaacaacgagagcuucaacuggaccggggugacccagaacggcaccuccagcgccugcaagcgccgguccaacaacagcuucuucucccgccugaacuggcucacgcaccugaaguucaaguaccccgcccugaacgugaccaugcccaacaacgagaaguucgacaagcucuacaucuggggcguccaccaccccgggaccgacaacgaccagaucuuccuguacgcgcaggccagcgggcggaucaccguguccacgaagcgcagccagcagaccgugaucccgaacaucggcagccggccccgcguccggaacauccccucccgcaucagcaucuacuggaccaucgugaagcccggcgacauccugcucaucaacuccaccgggaaccugaucgccccgcggggcuacuucaagauccgcagcgggaaguccagcaucaugcgguccgacgcccccaucggcaagugcaacagcgagugcaucacgcccaacggcuccauccccaacgacaagccguuccagaacgugaaccgcaucaccuacggggccugcccccgguacgucaagcagaacacccugaagcucgcgaccggcaugcgcaacgugcccgagaagcagacgcgggggaucuucggcgccaucgccggguucaucgagaacggcugggagggcaugguggacgggugguacggcuuccgccaccagaacagcgaggggaucggccaggccgccgaccugaaguccacccaggcggccaucaaccagaucaacgggaagcugaaccggcucaucggcaagaccaacgagaaguuccaccagaucgagaaggaguucagcgaggucgagggccgcauccaggaccuggagaaguacguggaggacaccaagaucgaccugugguccuacaacgccgagcuccugguggcccuggagaaccagcacacgaucgaccucaccgacagcgagaugaacaagcuguucgagcggaccaagaagcagcugcgcgagaacgccgaggacauggggaacggcugcuucaagaucuaccacaagugcgacaacgcgugcaucggguccauccgcaacggcaccuacgaccacgacgucuaccgggacgaggcccucaacaaccgcuuccagaucaaggggguggagcugaaguccggcuacaaggacuggauccuguggaucuccuucgccaucagcugcuuccuccugugcgugguccugcucggcuucaucaugugggccugccagaaggggaacauccggugcaacaucugcaucuga

SEQ ID NO: 65606 - RNA, 1701 nt, Artificial Sequence; identical to SEQ ID NO: 65605
  derived and/or modified CDS sequence (opt1) from hemagglutinin__InfluenzaA__ABO32904

SEQ ID NO: 65607 - RNA, 1701 nt, Artificial Sequence; identical to SEQ ID NO: 65420
  derived and/or modified CDS sequence (opt1) from hemagglutinin__InfluenzaA__ABO32915

SEQ ID NO: 65608 - RNA, 1701 nt, Artificial Sequence; identical to SEQ ID NO: 65420
  derived and/or modified CDS sequence (opt1) from hemagglutinin__InfluenzaA__ABO32926

SEQ ID NO: 65609 - RNA, 1701 nt, Artificial Sequence
  derived and/or modified CDS sequence (opt1) from hemagglutinin__InfluenzaA__ABO32937
augaagaccaucaucgcccugagcuacauccucugccugguguucgcccagaagcugcccggcaacgacaacuccaccgcgacgcucugccuggggcaccacgccgucccgaacggcaccaucgugcgcaccaucaccaacgaccagaucgaggugacgaacgccaccgagcugguccagagcuccagcaccggggagaucugcgacagcccccaccagauccucgacggcgagaacugcacccugaucgacgcccugcucggggacccccagugcgacggcuuccagaacaagaagugggaccuguucguggagcggagcaaggccuacuccaacugcuaccccuacgacgugccggacuacgcgagccugcgcucccucgucgccagcuccggcacgcuggaguucaacaacgagagcuucaacuggaccggggugacccagaacggcaccuccagcuccugcaagcggcgcagcaacaacuccuucuucagccggcugaacuggcucacgcaccugaaguucaaguaccccgcccugaacgugaccaugcccaacaacgagaaguucgacaagcucuacaucuggggcguccaccaccccgggaccgacaacgaccagaucuuccuguacgcccaggcguccgggcgcaucaccgugagcacgaagcggagccagcagaccgugaucccgaacaucggcucccgcccccggguccgcaacauccccagccggaucuccaucuacuggaccaucgugaagcccggcgacauccugcucaucaacagcaccgggaaccugaucgccccgcgcggcuacuucaagauccgguccgggaaguccuccaucaugcgcagcgacgcccccaucggcaagugcaacuccgagugcaucacgcccaacggcagcauccccaacgacaagccguuccagaacgugaaccggaucaccuacggggccugcccccgcuacgucaagcagaacacccugaagcucgccaccggcaugcggaacgugcccgagaagcagacgcgcgggaucuucggcgcgaucgccggguucaucgagaacggcugggagggcaugguggacgggugguacggcuuccggcaccagaacuccgaggggaucggccaggccgccgaccucaagagcacccaggccgcgaucaaccagaucaacgggaagcugaaccgccugaucggcaagaccaacgagaaguuccaccagaucgagaaggaguucuccgaggucgagggccggauccaggaccuggagaaguacguggaggacaccaagaucgaccuguggagcuacaacgccgagcuccugguggcccuggagaaccagcacacgaucgaccucaccgacuccgagaugaacaagcuguucgagcgcaccaagaagcagcugcgcgagaacgccgaggacauggggaacggcugcuucaagaucuaccacaagugcgacaacgccugcaucgggagcauccggaacggcaccuacgaccacgacgucuaccgcgacgaggcgcucaacaaccgguuccagaucaaggggguggagcugaaguccggcuacaaggacuggauccuguggaucagcuucgccaucuccugcuuccuccugugcguggcccugcucggcuucaucaugugggccugccagaaggggaacauccgcugcaacaucugcaucuga

SEQ ID NO: 65610 - RNA, 1698 nt, Artificial Sequence
  derived and/or modified CDS sequence (opt1) from hemagglutinin__InfluenzaA__ABO32948
augcgcgccaagcugcucgugcugcugugcaccuucaccgccacguacgcggacaccaucugcaucggcuaccacgccaacaacagcaccgacaccgucgacacggugcucgagaagaacgugaccgucacccacuccgugaaccugcuggaggacagccacaacgggaagcucugccugcugaagggcaucgcgccccuccagcuggggaacugcuccguggccggcuggauccuggggaacccggagugcgagcuccugaucagcaaggaguccuggagcuacaucgucgagacccccaaccccgagaacggcacgugcuaccccggcuacuucgccgacuacgaggagcugcgggagcagcucuccagcguguccagcuucgagcgcuucgagaucuucccgaagggguccagcuggcccaaccacaccgugaccggcgucuccgccagcugcucccacaacggcaagagcuccuucuaccggaaccugcuguggcucaccgggaagaacgggcuguaccccaaccugagcauguccuacgugaacaacaaggagaaggaggugcucguccuguggggcgugcaccacccgcccaacaucggcgaccagcgcgcccuguaccacacggagaacgccuacgugagcgucgugagcucccacuacagccggcgcuucacccccgagaucgccaagcggcccaaggugcgcgaccaggaggggcggaucaacuacuacuggacccuccuggagcccggcgacaccaucaucuucgaggcgaacgggaaccugaucgccccgugguacgccuucgcccucucccgcggcuucggcagcgggaucaucacguccaacgcccccauggacgagugcgacgcgaagugccagacgccccagggcgccaucaacagcucccugcccuuccagaacguccacccggugaccaucggggagugccccaaguacgugcggagcgccaagcugcgcauggucaccggccuccggaacauccccuccauccagagccgcgggcuguucggcgccaucgccggcuucaucgagggcggguggaccgggaugguggacggcugguacggguaccaccaccagaacgagcagggcuccggcuacgcggccgaccagaaguccacccagaacgccaucaacgggaucaccaacaaggugaacagcgucaucgagaagaugaacacccaguucacggccgugggcaaggaguucaacaagcuggagcggcgcauggagaaccucaacaagaaggucgacgacggguuccuggacaucuggaccuacaacgccgagcugcucgugcugcuggagaacgagcggacccucgacuuccacgacagcaacgugaagaaccuguacgagaaggucaagucccagcugaagaacaacgcgaaggagaucggcaacgggugcuucgaguucuaccacaagugcaacaacgagugcauggagagcgugaagaacggcaccuacgacuaccccaaguacuccgaggagagcaagcucaaccgcgagaagaucgacggcgugaagcuggaguccaugggggucuaccagauccuggccaucuacagcacgguggccagcucccucgugcugcuggucagccucggcgccaucuccuucuggaugugcagcaacgggucccugcagugccggaucugcaucuga

SEQ ID NO: 65611 - RNA, 1698 nt, Artificial Sequence
  derived and/or modified CDS sequence (opt1) from hemagglutinin__InfluenzaA__ABO32959
augaaggccaagcugcucgugcugcugugcaccuucaccgccacguacgcggacaccaucugcaucggcuaccacgccaacaacagcaccgacaccgucgacacggugcucgagaagaacgugaccgucacccacuccgugaaccugcuggaggacagccacaacgggaagcucugccugcugaagggcaucgcgccccuccagcuggggaacugcuccguggccggcuggauccuggggaacccggagugcgagcuccugaucagcaaggaguccuggagcuacaucgucgagacccccaaccccgagaacggcacgugcuaccccggcuacuucgccgacuacgaggagcugcgcgagcagcucuccagcguguccagcuucgagcgguucgagaucuucccgaaggaguccagcuggcccaaccacaccgugaccggggucuccgccagcugcucccacaacggcaagagcuccuucuaccgcaaccugcuguggcucaccgggaagaacggccuguaccccaaccugagccgguccuacgugaacaacaaggagaaggaggugcucguccuguggggcgugcaccacccgcccaacaucggggaccagcgcgcccuguaccacacggagaacgccuacgugagcgucgugagcucccacuacagccggcgcuucacccccgagaucgccaagcggcccaaggugcgcgaccaggagggccggaucaacuacuacuggacccuccuggagcccggggacacccugaucuucgaggcgaacggcaaccucaucgccccgugguacgccuucgcccugucccgcggguucggcagcggcaucaucacguccaacgcccccauggacgagugcgacgcgaagugccagacgccccagggggccaucaacagcucccugcccuuccagaacguccacccggugaccaucggcgagugccccaaguacgugcggagcaccaagcuccgcauggucaccgggcugcggaacauccccuccauccagagccgcggccuguucggggccaucgccggcuucaucgagggcggguggaccggcaugguggacgggugguacggcuaccaccaccagaacgagcagggguccggcuacgccgcggaccagaaguccacccagaacgccaucaacggcaucaccaacaaggugaacagcgucaucgagaagaugaacacgcaguucaccgccguggggaaggaguucaacaagcucgagcggcgcauggagaaccugaacaagaaggucgacgacggcuuccuggacaucuggaccuacaacgccgagcuccuggugcugcucgagaacgagcggacccuggacuuccacgacagcaacgugaagaaccuguacgagaaggucaagucccagcucaagaacaacgccaaggagaucgggaacggcugcuucgaguucuaccacaagugcaacaacgagugcauggagagcgugaagaacgggacguacgacuaccccaaguacuccgaggagagcaagcugaaccgcgagaagaucgacggcgugaagcuggaguccaugggcgucuaccagauccucgcgaucuacagcaccguggccagcucccuggugcugcucgucagccugggggccaucuccuucuggaugugcagcaacggcucccugcagugccggaucugcaucuga

SEQ ID NO: 65612 - RNA, 1698 nt, Artificial Sequence; identical to SEQ ID NO: 65228
  derived and/or modified CDS sequence (opt1) from hemagglutinin__InfluenzaA__ABO32970

SEQ ID NO: 65613 - RNA, 1701 nt, Artificial Sequence
  derived and/or modified CDS sequence (opt1) from hemagglutinin__InfluenzaA__ABO32981
augaaggccaagcugcucgugcugcugugcgcccucagcgcgaccgacgccgacaccaucugcaucggcuaccacgccaacaacuccacggacaccgucgacaccgugcuggagaagaacgugaccgucacgcacagcgugaaccugcucgaggacucccacaacgggaagcugugccgccugaagggcaucgcgccccuccagcuggggaagugcagcaucgccggcuggauccuggggaacccggagugcgagucccucuucagcaagaaguccuggagcuacaucgccgagacccccaacuccgagaacgggaccugcuaccccggcuacuucgccgacuacgaggagcugcgggagcagcugagcuccgugagcuccuucgagcgcuucgagaucuuccccaaggagcggagcuggccgaagcacaacgucacccgcggggugacggccuccugcagccacaagggcaaguccagcuucuaccggaaccuccuguggcugaccgagaagaacggguccuaccccaaccucagcaagagcuacgugaacaacaaggagaaggagguccuggugcuguggggcgugcaccaccccuccaacaucaaggaccagaagaccaucuaccgcaaggagaacgccuacgucagcgugguguccagcaacuacaaccggcgcuucacccccgagaucgcggagcggccgaagguccgcgaccaggccgggcggaucaacuacuacuggacgcuccuggagcccggcgacaccaucaucuucgaggccaacggcaaccugaucgcccccugguacgccuucgcgcucucccgcggguucggcagcgggaucaucaccuccaacgccagcauggacgagugcgacaccaagugccagacgccccagggcgccaucaacuccagccugccguuccagaacgugcaccccgugaccaucggcgagugccccaaguacguccgguccaccaagcugcgcauggugaccgggcuccggaacauccccagcauccagucccgcggccuguucggggccaucgccggcuucaucgagggcggcuggacgggcaugaucgacgggugguacggcuaccaccaccagaacgagcaggggagcggcuacgcggccgaccagaaguccacccagaacgccaucaacgggaucaccaacaaggugaacagcgucaucgagaagaugaacacccaguucacggccgugggcaaggaguucaacaagcuggagaagcggauggagaaccucaacaagaagguggacgacggcuuccuggacaucuggaccuacaacgccgagcugcucguccugcuggagaacgagcgcacccucgacuuccacgacuccaacgugaagaaccuguacgagaaggucaagagccagcugaagaacaacgcgaaggagaucgggaacggcugcuucgaguucuaccacaagugcaacaacgagugcauggaguccgugaagaacgggaccuacgacuacccgaaguacagcgaggagagcaagcucaaccgggagaagaucgacggcgugaagcuggaguccaugggggucuaccagauccuggccaucuacagcacgguggccuccagccucgugcugcuggucucccucggcgccaucagcuucuggaugugcuccaacggcagccugcagugccgcaucugcaucuga

SEQ ID NO: 65614 - RNA, 1701 nt, Artificial Sequence
  derived and/or modified CDS sequence (opt1) from hemagglutinin__InfluenzaA__ABO32992
augaaggccaagcugcucgugcugcugugcgcccucagcgcgaccgacgccgacaccaucugcaucggcuaccacgccaacaacuccacggacaccgucgacaccgugcuggagaagaacgugaccgucacgcacagcgugaaccugcucgaggacucccacaacgggaagcugugccgccugaagggcaucgcgccccuccagcuggggaagugcagcaucgccggcuggauccuggggaacccggagugcgagucccucuucagcaagaaguccuggagcuacaucgccgagacccccaacuccgagaacgggaccugcuaccccggcuacuucgccgacuacgaggagcugcgggagcagcugagcuccgugagcuccuucgagcgcuucgagaucuuccccaaggagcggagcuggccgaagcacgacgucacccgcggggugacggccuccugcagccacaagggcaaguccagcuucuaccggaaccuccuguggcugaccgagaagaacggguccuaccccaaccucagcaagagcuacgugaacaacaaggagaaggagguccuggugcuguggggcgugcaccaccccuccaacaucgaggaccagaagaccaucuaccgcaaggagaacgccuacgucagcgugguguccagcaacuacaaccggcgcuucacccccgagaucuccgagcggccgaagguccgcgaccagaaggggcggaucaacuacuacuggacgcuccuggagcccggcgacaccaucaucuucgaggcgaacggcaaccugaucgcccccugguacgccuucgcccucagccgcggguucggcuccgggaucaucaccagcaacgccuccauggacgagugcgacaccaagugccagacgccccagggcgcgaucaacagcucccugccguuccagaacgugcaccccgugaccaucggcgagugccccaaguacguccggagcaccaagcugcgcauggugaccgggcuccggaacauccccuccauccagagccgcggccuguucggggccaucgccggcuucaucgagggcggcuggacgggcaugaucgacgggugguacggcuaccaccaccagaacgagcagggguccggcuacgccgccgaccagaaguccacccagaacgcgaucaacgggaucaccaacaaggugaacagcgucaucgagaagaugaacacccaguucacggccgugggcaaggaguucaacaagcuggagaagcggauggagaaccucaacaagaagguggacgacggcuuccuggacaucuggaccuacaacgccgagcugcucguccugcuggagaacgagcgcacccucgacuuccacgacagcaacgugaagaaccuguacgagaaggucaagucccagcugaagaacaacgccaaggagaucgggaacggcugcuucgaguucuaccacaagugcaacaacgagugcauggagagcgugaagaacgggaccuacgacuacccgaaguacagcgaggaguccaagcucaaccgggagaagaucgacggcgugaagcuggagagcaugggggucuaccagauccuggccaucuacuccacgguggcgagcucccucgugcugcuggucagccucggcgccaucuccuucuggaugugcagcaacggcucccugcagugccgcaucugcaucuga

SEQ ID NO: 65615 - RNA, 1701 nt, Artificial Sequence
  derived and/or modified CDS sequence (opt1) from hemagglutinin__InfluenzaA__ABO33006
augaaggccaagauccuggugcuccugugcgcccugagcgcgaccgacgccgacaccaucugcaucggcuaccacgccaacaacuccacggacaccgucgacaccgugcucgagaagaacgugaccgucacgcacagcgugaaccugcuggaggacucccacaacgggaagcucugccgccugaagggcaucgcgccccugcagcucgggaagugcagcaucgccggcuggauccuggggaacccggagugcgagucccuguucagcaagaaguccuggagcuacaucgccgagacccccaacuccgagaacgggaccugcuaccccggcuacuucgccgacuacgaggagcuccgggagcagcugagcuccgugagcuccuucgagcgcuucgagaucuuccccaaggagcggagcuggccgaagcacaacgucacccgcggggugacggccuccugcagccacaagggcaaguccagcuucuaccggaaccugcucuggcugaccgagaagaacggguccuaccccaaccugagcaagagcuacgugaacaacaaggagaaggagguccucgugcuguggggcgugcaccaccccuccaacaucgaggaccagaagaccaucuaccgcaaggagaacgccuacgucagcgugguguccagcaacuacaaccggcgcuucacccccgagaucuccaagcggccgaagguccgcgaccaggaggggcggaucaacuacuacuggacgcugcucgagcccggcgacaccaucaucuucgaggcgaacggcaaccugaucgcccccugguacgccuucgcccugagccgcggguucggcuccgggaucaucaccagcaacgccuccauggacgagugcgacaccaagugccagacgccccagggcgcgaucaacagcucccucccguuccagaacgugcaccccgugaccaucggcgagugccccaaguacguccggagcaccaagcugcgcauggugaccgggcugcggaacauccccuccauccagagccgcggccucuucggggccaucgccggcuucaucgagggcggcuggacgggcaugaucgacgggugguacggcuaccaccaccagaacgagcagggguccggcuacgccgccgaccagaaguccacccagaacgcgaucaacgggaucaccaacaaggugaacagcgucaucgagaagaugaacacccaguucacggccgugggcaaggaguucaacaagcuggagaagcggauggagaaccugaacaagaagguggacgacggcuuccucgacaucuggaccuacaacgccgagcugcugguccuccuggagaacgagcgcacccuggacuuccacgacagcaacgugaagaaccucuacgagaaggucaagucccagcugaagaacaacgccaaggagaucgggaacggcugcuucgaguucuaccacaagugcaacaacgagugcauggagagcgugaagaacgggaccuacgacuacccgaaguacagcgaggaguccaagcugaaccgggagaagaucgacggcgugaagcucgagagcaugggggucuaccagauccuggccaucuacuccacgguggcgagcucccuggugcuccuggucagccugggcgccaucuccuucuggaugugcagcaacggcucccuccagugccgcaucugcaucuga

SEQ ID NO: 65616 - RNA, 1701 nt, Artificial Sequence
  derived and/or modified CDS sequence (opt1) from hemagglutinin__InfluenzaA__ABO33025
augaaggccaagcugcucgugcugcugugcgcccucagcgcgaccgacgccgacaccaucugcaucggcuaccacgccaacaacuccacggacaccgucgacaccgugcuggagaagaacgugaccgucacgcacagcgugaaccugcucgaggacaaccacaacgggaagcugugcaagcugaagggcaucgcgccccuccagcuggggaagugcuccaucgccggcuggauccuggggaacccggagugcgagagccucuucuccaagaaguccuggagcuacaucgccgagacccccaacagcgagaacgggaccugcuaccccggcuacuucgccgacuacgaggagcugcgcgagcagcuguccagcguguccagcuucgagcgguucgagaucuuccccaaggaguccagcuggccgaaccacaacgucaccaagggggugacggccuccugcagccacaagggcaaguccagcuucuaccgcaaccuccuguggcugaccgagaagaacggguccuaccccaaccucagcaagagcuacgugaacaacaaggagaaggagguccuggugcuguggggcgugcaccaccccuccaacaucaaggaccagcggaccaucuaccgcaaggagaacgccuacgucagcgugguguccagccacuacaaccggcgcuucacccccgagaucgcgaagcggccgaagguccgcgaccaggaggggcggaucaacuacuacuggacgcuccuggagcccggcgacaccaucaucuucgaggccaacggcaaccugaucgcccccugguacgccuucgcccucucccgcggguucggcagcgggaucaucaccuccaacgcgagcauggacgagugcgacgccaagugccagacgccccagggcgccaucaacuccagccugccguuccagaacgugcaccccgugaccaucggcgagugccccaaguacguccgguccaccaagcugcgcauggugaccgggcuccggaacauccccagcauccagucccgcggccuguucggggccaucgccggcuucaucgagggcggcuggaccggcaugaucgacgggugguacggcuaccaccaccagaacgagcaggggagcggcuacgcggccgaccagaaguccacgcagagcgccaucaacgggaucaccaacaaggugaacuccaucaucgagaagaugaacacccaguucaccgccgucggcaaggaguucaacaagcuggagaagcggauggagaaccucaacaagaagguggacgacggcuuccuggacaucuggacguacaacgccgagcugcucgugcugcuggagaacgagcgcacccucgacuuccacgacagcaacgucaagaaccuguacgagaaggugaagucccagcugaagaacaacgcgaaggagaucgggaacggcugcuucgaguucuaccacaagugcaacaacgagugcauggagagcgucaagaacgggaccuacgacuacccgaaguacagcgaggaguccaagcucaaccgggagaagaucgacggcgugaagcuggagagcauggggguguaccagauccuggccaucuacuccaccgucgccagcucccucgugcugcuggugagccucggcgccaucuccuucuggaugugcagcaacggcucccugcagugccgcaucugcaucuga

SEQ ID NO: 65617 - RNA, 1701 nt, Artificial Sequence
  derived and/or modified CDS sequence (opt1) from hemagglutinin__InfluenzaA__ABO33036
augaagaccaucaucgcccugagcuacauccucugccugguguucgcccagaagcugcccggcaacgacaacuccaccgcgacgcucugccuggggcaccacgccgucccgaacggcacccuggugaagaccaucaccaacgaccagaucgaggugacgaacgccaccgagcucguccagagcuccagcaccgggcgcaucugcaacagcccccaccagauccuggacggcgagaacugcacccugaucgacgcccuccugggggacccccacugcgacggcuuccagaacaaggagugggaccuguucguggagcggcgcaaggccuacagcaacugcuaccccuacgacgugccggacuacgcgucccuccggagccuggucgccuccagcggcacgcuggaguucaacaacgaguccuucaacuggaccgggguggcccagaacggcaccagcuccgccugcaagcgccggagcaucaaguccuucuucagccgccucaacuggcugcaccagcugaaguacaaguaccccgcgcucaacgugaccaugcccaacaacgagaaguucgacaagcuguacaucuggggcguccaccaccccuccacggacagcgaccagaucucccuguacgcccaggccagcgggcgggugaccgugagcaccaagcgcucccagcagaccgucaucccgaacaucgggagccggcccugggugcgcggcguguccagccggaucuccaucuacuggacgaucgucaagcccggcgacauccuccugaucaacagcaccgggaaccugaucgcgccccgcggcuacuucaagauccgguccgggaaguccuccaucaugcgcagcgacgccccgaucggcaagugcaacuccgagugcaucacccccaacggcagcauccccaacgacaagcccuuccagaacgugaaccggaucaccuacggggccugcccgcgcuacgugaagcagaacacgcucaagcuggccaccggcaugcggaacguccccgagaagcagacccgcgggaucuucggcgccaucgccggguucaucgagaacggcugggagggcaugguggacgggugguacggcuuccggcaccagaacuccgaggggaccggccaggccgcggaccucaagagcacgcaggccgccaucaaccagaucaacgggaagcugaaccgccugaucgagaagaccaacgagaaguuccaccagaucgagaaggaguucuccgagguggagggccggauccaggaccuggagaaguacgucgaggacaccaagaucgaccucuggagcuacaacgccgagcugcugguggcccucgagaaccagcacaccaucgaccugacggacuccgagaugaacaagcuguucgagcgcaccaagaagcagcuccgcgagaacgcggaggacaugggcaacgggugcuucaagaucuaccacaagugcgacaacgccugcaucggcagcauccggaacgggaccuacgaccacgacguguaccgcgacgaggcccugaacaaccgguuccagaucaagggcgucgagcugaaguccggguacaaggacuggauccucuggaucagcuucgccaucagcugcuuccugcugugcgugguccuccugggcuucaucaugugggccugccagaagggcaacauccgcugcaacaucugcaucuga

SEQ ID NO: 65618 - RNA, 1701 nt, Artificial Sequence; identical to SEQ ID NO: 64096
  derived and/or modified CDS sequence (opt1) from hemagglutinin__InfluenzaA__ABO33047

SEQ ID NO: 65619 - RNA, 1701 nt, Artificial Sequence; identical to SEQ ID NO: 64674
  derived and/or modified CDS sequence (opt1) from hemagglutinin__InfluenzaA__ABO33058

SEQ ID NO: 65620 - RNA, 1701 nt, Artificial Sequence
  derived and/or modified CDS sequence (opt1) from hemagglutinin__InfluenzaA__ABO33069
augaagaccaucaucgcccugagcuacaucuucugccucguguucgcccagaaccugcccggcaacgacaacuccaccgcgacgcugugccucgggcaccacgccgucccgaacggcacccuggugaagaccaucaccaacgaccagaucgaggugacgaacgccaccgagcugguccagagcuccagcaccgggcgcaucugcgacagcccccaccggauccucgacggcaagaacugcacccugaucgacgcccugcucggggacccccacugcgacggcuuccagaacgagaagugggaccuguucguggagcgcagcaaggccuucuccaacugcuaccccuacgacgugccggacuacgcgagccugcggucccucgucgccagcuccggcacgcuggaguucaucaacgagggguucaacuggaccggcgugacccagaacgggggcagcuacgccugcaagcgcgggcccgacaacuccuucuucagccggcugaacuggcucuacgaguccgagagcaaguaccccgugcugaacgucaccaugcccaacaacgacaacuucgacaagcuguacaucuggggcgugcaccacccguccacggacaaggagcagaccaaccucuacgugcaggccagcggccgcgucaccguguccaccaagaagucccagcagacgaucauccccaacguggggagccggcccuggguccgcggccuguccagccggaucuccaucuacuggaccaucgugaagcccggggacauccugcucaucaacagcaacggcaaccugaucgcgccgcgcggcuacuucaagauccggaccgggaaguccagcaucaugcgcuccgacgcccccaucgggaccugcagcuccgagugcaucacgcccaacggcagcauccccaacgacaagccguuccagaacgugaacaagaucaccuacggcgccugccccaaguacgucaagcagaacacccugaagcucgccaccgggaugcggaacgugcccgagaagcagacgcgcggcaucuucggcgccaucgcgggguucaucgagaacggcugggaggggaugguggacggcugguacggguuccggcaccagaacuccgagggcaccggccaggccgccgaccucaagagcacccaggccgccaucgaccagaucaacgggaagcugaaccgcgucaucgagaagaccaacgagaaguuccaccagaucgagaaggaguucuccgagguggagggccggauccaggaccucgagaaguacaucgaggacacgaagaucgaccuguggagcuacaacgcggagcugcucguggcccuggagaaccagcacaccaucgaccugaccgacuccaagaugaacaagcuguucgagaagacccgccggcagcugcgcgagaacgccgaggacauggggaacggcugcuucaagaucuaccacaagugcgacaacgccugcaucgggagcauccggaacggcacguacgaccacgacgucuaccgcgacgaggcccugaacaaccgcuuccagaucaagggcguggagcucaaguccggguacaaggacuggauccuguggaucagcuucgcgaucuccugcuuccugcucugcgucgugcugcugggcuucaucaugugggccugccagaaggggaacauccggugcaacaucugcaucuga

SEQ ID NO: 65621 - RNA, 1701 nt, Artificial Sequence; identical to SEQ ID NO: 64945
  derived and/or modified CDS sequence (opt1) from hemagglutinin__InfluenzaA__ABO37988

SEQ ID NO: 65622 - RNA, 1701 nt, Artificial Sequence
  derived and/or modified CDS sequence (opt1) from hemagglutinin__InfluenzaA__ABO38010
augaaggccaagcugcucgugcugcugugcgccuucaccgcgaccuacgccgacacgaucugcaucggcuaccacgccaacaacagcaccgacaccgucgacaccgugcucgagaagaacgugacggucacccacuccgugaaccugcuggaggacagccacaacgggaagcucugccgccugaagggcaccgcgccccugcagcucgggaacugcuccguggccggcuggauccuggggaacccggagugcgagagccuguucuccaaggagagcugguccuacaucgccgagacccccaaccccgagaacggcacgugcuaccccggcuacuucgccgacuacgaggagcuccgggagcagcugagcuccgucagcuccuucgagcgcuucgagaucuucccgaaggagagcuccuggcccaaccacaccgugaccaagggggugaccgccagcugcucccacaacggcaagagcuccuucuacaagaaccugcucuggcugacggagaagaacgggcuguaccccaaccucagcaaguccuacgucaacaacaaggagaaggaggugcuggugcuguggggcguccaccaccccagcaacaucggggaccagcgggccaucuaccacaccgagaacgcguacgugagcguggucuccagccacuacucccgccgguucaccccggagaucgccaagcgccccaaggugcgggaccaggagggccgcaucaacuacuacuggacccuccuggagcccggcgacacgaucaucuucgaggccaacgggaaccugaucgcccccugguacgccuucgcgcucagccggggcgugggguccggcaucaucaccagcaacgccuccaugggcgacugcgacgccaagugccagaccccgcagggggccaucaacagcucccugcccuuccagaacguccaccccgugaccaucggcgagugccccaaguacgugcgcagcacgaagcugcggauggucaccgggcuccgcaacaucccguccauccagagccggggccuguucggggccaucgcgggcuucaucgagggcggguggaccggcaugaucgacgggugguacggcuaccaccaccagaacgagcagggguccggcuacgccgccgacaagaaguccacccagaacgccaucgacggcaucacgaacaaggugaacagcgugaucgagaagaugaacacccaguucaccgccgucgggaaggaguucaacaagcuggagcgccggauggagaaccucaacaagaagguggacgacggcuuccuggacaucuggaccuacaacgcggagcugcucguccugcuggagaacgagcgcacgcucgacuuccacgacagcaacgugaagaaccuguacgagaaggugaagaaccagcugaagaacaacgccaaggagaucgggaacggcugcuucgaguucuaccacaagugcaacaacgagugcauggaguccgucaagaacgggaccuacgacuaccccaaguacagcgaggaguccaagcucaagcgggagaagaucgacggcgugaagcuggagagcaugggcguguaccagauccuggccaucuacagcaccgucgccuccagccucgugcugcuggugucccucggggccaucagcuucuggaugugcuccaacggcagccugcagugccgcaucugcaucuga

SEQ ID NO: 65623 - RNA, 1698 nt, Artificial Sequence
  derived and/or modified CDS sequence (opt1) from hemagglutinin__InfluenzaA__ABO38021
augaaggccaagcugcucgugcugcugugcaccuucaccgccacguacgcggacaccaucugcaucggcuaccacgccaacaacagcaccgacaccgucgacacggugcucgagaagaacgugaccgucacccacuccgugaaccugcuggaggacagccacaacgggaagcucugccugcugaagggcaucgcgccccuccagcuggggaacugcuccguggccggcuggauccuggggaacccggagugcgagcuccugauccccaaggagagcugguccuacaucgucgagacccccaaccccgagaacggcacgugcuacccgggcuacuucgccgacuacgaggagcugcgcgagcagcucagcuccgugagcuccuucgagcgguucgagaucuuccccaaggagagcuccuggcccaaccacaccgugaccggggucagcgccuccugcagccacaacggcaaguccagcuucuaccgcaaccugcuguggcucaccgggaagaacggccuguaccccaaccuguccaagagcuacgccaacaacaaggagaaggaggugcucgugcuguggggcguccaccacccgcccaacaucggggaccagcgggcccuguaccacacggagaacgccuacguguccguggucagcagccacuacucccgccgguucauccccgagauggcgaagcgccccaaggugcgggaccaggagggccgcaucaacuacuacuggacccuccuggagccgggggacaccaucaucuucgaggccaacggcaaccugaucgcccccugguacgccuucgcccucagccggggguucggcuccggcaucaucaccagcaacgcgcccaugggggagugcgacgccaagugccagacgccccagggcgccaucaacuccagccugccguuccagaacgugcaccccgucaccaucggggagugccccaaguacgugcgcuccgccaagcugcggauggugaccggccuccgcaacauccccagcauccagucccgggggcuguucggcgccaucgcgggcuucaucgagggcggguggaccgggauggucgacggcugguacggguaccaccaccagaacgagcagggcagcggcuacgccgccgaccagaaguccacgcagaacgccaucaacgggaucaccaacaaggugaacagcgugaucgagaagaugaacacccaguucaccgccgucggcaaggaguucaacaagcuggagcgccggauggagaaccucaacaagaagguggacgacggguuccuggacaucuggacguacaacgcggagcugcucguccugcuggagaacgagcgcacccucgacuuccacgacuccaacgugaagaaccuguacgagaaggucaagagccagcugaagaacaacgccaaggagaucggcaacgggugcuucgaguucuaccacaagugcaacaacgagugcauggaguccgugaagaacggcaccuacgacuacccgaaguacagcgaggaguccaagcucaaccgggagaagaucgacggcgugaagcuggagagcauggggguguaccagauccuggccaucuacuccaccgucgccagcagccucgugcugcuggugucccucggcgccaucagcuucuggaugugcuccaacgggagccugcagugccgcaucugcaucuga

SEQ ID NO: 65624 - RNA, 1698 nt, Artificial Sequence
  derived and/or modified CDS sequence (opt1) from hemagglutinin__InfluenzaA__ABO38032
augaaggugaagcugcucguccugcugugcaccuucaccgccacguacgccgacaccaucugcaucggcuaccacgcgaacaacagcaccgacaccguggacacggugcucgagaagaacgucaccgugacccacuccgugaaccugcuggaggacagccacaacgggaagcucugccugcugaagggcaucgcgccccuccagcuggggaacugcuccgucgccggcuggauccuggggaacccggagugcgagcuccugaucagcaaggaguccuggagcuacaucguggagacccccgaccccgagaacggcacgugcuaccccggcuacuucgccgacuacgaggagcugcgcgagcagcucuccagcguguccagcuucgagcgguucgagaucuucccgaaggaguccagcuggcccaaccacaccgucaccgggguguccgccagcugcucccacaacggcaagagcuccuucuaccgcaaccugcuguggcucaccgggaagaacggccuguaccccaaccugagcaaguccuacgccaacaacaaggagaaggaggugcucguccuguggggcgugcaccacccgcccaacaucggggaccagcgggcccuguaccacacggagaacgccuacgugagcgucgugagcucccacuacagccgccgguucacccccgagaucgccaagcgccccaaggugcgggaccaggagggccgcaucaacuacuacuggacccuccuggagcccggggacaccaucaucuucgaggcgaacggcaaccugaucgccccgcgguacgccuucgcccucucccgcggguucggcagcggcaucaucacguccaacgcccccauggacgagugcgacgcgaagugccagacccccaagggggccaucaacagcucccugcccuuccagaacguccacccggugaccaucggcgagugccccaaguacgugcggagcgccaagcugcgcauggucaccgggcuccggaacauccccuccauccagagccgcggccuguucggggccaucgccggcuucaucgagggcggguggacgggcaugguggacgggugguacggcuaccaccaccagaacgagcagggguccggcuacgcggccgaccagaaguccacccagaacgccaucaacggcaucaccaacaaggugaacagcgucaucgagaagaugaacacccaguucacggccguggggaaggaguucaacaagcuggagcggcgcauggagaaccucaacaagaaggucgacgacggcuuccuggacaucuggaccuacaacgccgagcugcucgugcugcuggagaacgagcggacccucgacuuccacgacagcaacgugaagaaccuguacgagaaggucaagucccagcugaagaacaacgcgaaggagaucgggaacggcugcuucgaguucuaccacaagugcaacaacgagugcauggagagcgugaagaacgggaccuacgacuaccccaaguacuccgaggagagcaagcucaaccgcgagaagaucgacggcgugaagcuggaguccaugggcaucuaccagauccuggccaucuacagcacggucgccagcucccucgugcugcuggugagccucggggccaucuccuucuggaugugcagcaacggcucccugcagugccggaucugcaucuga

SEQ ID NO: 65625 - RNA, 1698 nt, Artificial Sequence; identical to SEQ ID NO: 64824
  derived and/or modified CDS sequence (opt1) from hemagglutinin__InfluenzaA__ABO38043

SEQ ID NO: 65626 - RNA, 1701 nt, Artificial Sequence
  derived and/or modified CDS sequence (opt1) from hemagglutinin__InfluenzaA__ABO38054
augaaggcccgccugcucgugcugcugugcgcccucgcggccaccgacgccgacaccaucugcaucggcuaccacgccaacaacagcacggacaccgucgacaccgugcuggagaagaacgugaccgucacgcacuccgugaaccugcucgaggacagccacaacgggaagcugugccggcugaagggcaucgcgccccuccagcuggggaagugcaacaucgccggcuggauccuggggaacccggagugcgagucccuccugagcgagcgcuccuggagcuacaucguggagacccccaacuccgagaacgggaccugcuaccccggcgacuucaucgacuacgaggagcugcgggagcagcucagcuccgucagcuccuucgagcgcuucgagaucuucagcaaggaguccagcuggcccaagcacaacaccacgcgcggggugaccgccgccugcucccacgccggcaagagcuccuucuaccggaaccugcuguggcucaccgagaaggacgggagcuacccgaaccugaacaacuccuacgugaacaagaagggcaaggagguccuggugcucuggggcgugcaccaccccagcaacaucaaggaccagcagacccuguaccagaaggagaacgcguacgucagcgugguguccagcaacuacaaccggcgcuucacgcccgagaucgccgagcggcccaagguccgcggccaggccggccggaugaacuacuacuggacccugcucaagccgggggacaccaucauguucgaggccaacggcaaccugaucgcccccugguacgcguucgcccugucccgcggguucggcagcggcaucaucaccuccaacgccagcaugcacgagugcgacacgaagugccagacgccccagggggccaucaacuccagccuccccuuccagaacauccacccggugaccaucggcgagugccccaaguacgugcgguccaccaagcugcgcauggucaccgggcugcggaacauccccagcauccagucccgcggccucuucggggccaucgcgggcuucaucgagggcggguggaccggcaugaucgacgggugguacggcuaccaccaccagaacgagcaggggagcggcuacgccgccgaccagaaguccacccagaacgccaucaacggcaucaccaacaaggugaacagcgugaucgagaagaugaacacgcaguucaccgccgucgggaaggaguucaacaaccuggagaagcggauggagaaccugaacaagaagguggacgacggcuuccucgacaucuggaccuacaacgcggagcugcuggugcuccuggagaacgagcgcacccuggacuuccacgacuccaacgucaagaaccucuacgagaaggugaagaaccagcugcggaacaacgccaaggagaucgggaacggcugcuucgaguucuaccacaagugcaacaacgagugcauggagagcgucaagaacgggacguacgacuaccccaaguacuccgaggagagcaagcugaaccgcgagaagaucgacggcgugaagcucgaguccaugggcguguaccagauccuggccaucuacagcaccgucgccagcucccuggugcuccuggugagccugggggccaucuccuucuggaugugcagcaacggcucccuccagugccggaucugcaucuga

SEQ ID NO: 65627 - RNA, 1701 nt, Artificial Sequence
  derived and/or modified CDS sequence (opt1) from hemagglutinin__InfluenzaA__ABO38065
augaaggccaagcugcucgugcugcugugcgcccucagcgcgaccgacgccgacaccaucugcaucggcuaccacgccaacaacuccacggacaccgucgacaccgugcuggagaagaacgugaccgucacgcacagcgugaaccugcucgaggacucccacaacgggaagcugugccgccugaagggcaucgcgccccuccagcuggggaagugcagcaucgccggcuggauccuggggaacccggagugcgagucccucuucagcaagaaguccuggagcuacaucgccgagacccccaacuccgagaacgggaccugcuaccccggcuacuucgccgacuacgaggagcugcgggagcagcugagcuccgugagcuccuucgagcgcuucgagaucuuccccaaggagcggagcuggccgaagcacaacaucacccgcggcgucacggccuccugcagccacaagggcaaguccagcuucuaccggaaccuccuguggcugaccgagaagaacggguccuaccccaaccucagcaagagcuacgugaacaacaaggagaaggaggugcugguccuguggggcgugcaccaccccuccaacaucgaggaccagaagaccaucuaccgcaaggagaacgccuacgugagcgucguguccagcaacuacaaccggcgcuucacccccgagaucgcgaagcggccgaaggugcgcgggcaggagggccggaucaacuacuacuggacgcuccuggagcccggcgacaccaucaucuucgaggccaacgggaaccugaucgcccccugguacgccuucgcccucucccgcggcuucgggagcggcaucaucaccuccaacgcgagcauggacgagugcgacaccaagugccagacgccccagggcgccaucaacuccagccugccguuccagaacguccaccccgugaccaucggggagugccccaaguacgugcgguccaccaagcugcgcauggucaccggccuccggaacauccccagcauccagucccgcgggcuguucggcgccaucgccggguucaucgagggcggcuggacggggaugaucgacggcugguacggguaccaccaccagaacgagcagggcagcggguacgccgcggaccagaaguccacccagaacgccaucaacggcaucaccaacaaggugaacagcgugaucgagaagaugaacacccaguucacggccgucggcaaggaguucaacaagcuggagaagcggauggagaaccucaacaagaagguggacgacggguuccuggacaucuggaccuacaacgccgagcugcucgugcugcuggagaacgagcgcacccucgacuuccacgacuccaacgucaagaaccuguacgagaaggucaagagccagcugaagaacaacgccaaggagaucggcaacgggugcuucgaguucuaccacaagugcaacaacgagugcauggaguccgugaagaacggcaccuacgacuacccgaaguacagcgaggagagcaagcucaaccgggagaagaucgacggggugaagcuggaguccaugggcguguaccagauccuggcgaucuacagcacggucgccuccagccucgugcugcuggugucccucggcgccaucagcuucuggaugugcuccaacgggagccugcagugccgcaucugcaucuga

SEQ ID NO: 65628 - RNA, 1701 nt, Artificial Sequence; identical to SEQ ID NO: 64267
  derived and/or modified CDS sequence (opt1) from hemagglutinin__InfluenzaA__ABO38076

SEQ ID NO: 65629 - RNA, 1701 nt, Artificial Sequence
  derived and/or modified CDS sequence (opt1) from hemagglutinin__InfluenzaA__ABO38087
augaagaccaucaucgcccugagcuacauccucugccugguguucgcccagaagcugcccgucaacgacaacuccaccgcgacgcucugccugggccaccacgccgugccgaacgggacccuggugaagaccaucaccaacgaccacaucgaggucacgaacgccaccgagcucgugcagagcuccagcaccggccgcaucugcgacagcccccaccagauccuggacggggagaacugcacccugaucgacgcccuccugggcgacccccacugcgacggguuccagaacaaggagugggaccuguucguggagcggagcacggccuacuccaacugcuaccccuacgacgucccggacuacgcgagccuccgcucccugguggccagcuccggcacccuggaguucaacaacgagagcuucaacuggaccggcguggcccagaacgggaccuccagcgccugcaagcggcgcuccaucaagagcuucuucucccggcucaacuggcugcaccagcugaaguacaaguaccccgcgcucaacgucacgaugcccaacaacgagaaguucgacaagcuguacaucuggggcgugcaccaccccagcaccgacuccgaccagaucagccuguacgcccaggccagcgggcgcgugaccgucuccaccaagcggagccagcagacggugaucccgaacaucggcucccgccccugggugcgcggggucagcucccggaucagcaucuacuggaccaucgugaagcccggcgacauccuccugaucaacuccaccggcaaccugaucgcgccccggggguacuucaagauccgcagcggcaaguccagcaucaugcgguccaacgccccgaucgggaagugcaacagcgagugcaucacccccaacggcuccauccccaacgacaagcccuuccagaacgugaaccgcaucacguacggcgccugcccgcgguacgucaagcagaacacccucaagcuggccaccgggaugcgcaacgugcccgagaagcagacccggggcaucuucggggccaucgccggcuucaucgagaacgggugggagggcaugguggacggcugguacggguuccgccaccagaacagcgagggcacggggcaggccgcggaccugaaguccacccaggccgccaucaaccagaucaacggcaagcucaaccggcugaucgagaagaccaacgagaaguuccaccagaucgagaaggaguucagcgaggucgaggggcgcauccaggaccuggagaaguacguggaggacaccaagaucgaccucugguccuacaacgccgagcugcugguggcccucgagaaccagcacacgaucgaccugaccgacagcgagaugaacaagcuguucgagcggacccgcaagcagcuccgcgagaacgcggaggacgucggcaacggcugcuucaagaucuaccacaagugcgacaacgccugcaucggguccauccggaacggcaccuacgaccacgacguguaccgcgacgaggcccugaacaaccgguuccagaucaagggggucgagcugaaguccggcuacaaggacuggauccucuggaucagcuucgccaucuccugcuuccugcugugcguggugcuccugggguucaucaugugggccugccagaagggcaacauccgcugcaacaucugcaucuga

SEQ ID NO: 65630 - RNA, 1689 nt, Artificial Sequence
  derived and/or modified CDS sequence (opt1) from hemagglutinin__InfluenzaA__ABO38098
auggccaucaucuaccugauccuccuguucaccgccgugcgcggcgaccagaucugcaucggguaccacgcgaacaacagcaccgagaaggucgacacgauccuggagcggaacgugaccgugacccacgccaaggacauccucgagaagacccacaacggcaagcugugcaagcugaacgggaucccgccccucgagcugggcgacugcuccaucgccggguggcugcucggcaaccccgagugcgaccgccugcugagcguccccgagugguccuacaucauggagaaggagaacccccgggacggccucugcuacccggggagcuucaacgacuacgaggagcugaagcaccuccuguccagcgugaagcacuucgagaaggugaagauccugcccaaggaccgcuggacgcagcacaccaccaccggcgggucccgggccugcgccgucagcggcaaccccuccuucuuccgcaacaugguguggcugacgaagaaggggagcaacuaccccguggcgaagggcuccuacaacaacaccagcggcgagcagaugcucaucaucuggggcguccaccacccgaacgacgagaccgagcagcggacccuguaccagaacguggggacguacguguccgucgggaccagcacccugaacaagcgcuccacccccgacaucgccacgcggcccaaggugaacggccagggcgggcgcauggaguucagcuggacccuccuggacaugugggacaccaucaacuucgaguccaccggcaaccugaucgcccccgaguacggguucaagaucagcaagcggggcuccagcgggaucaugaagacggagggcacccucggcaacugcgagaccaagugccagaccccgcugggggccaucaacacgacccugcccuuccacaacgugcacccccucaccaucggcgagugccccaaguacgucaagagcgagaagcuggugcuggcgaccgggcuccgcaacgugccgcagaucgagucccggggccuguucggggccaucgccggcuucaucgagggcggguggcagggcauggucgacgggugguacggcuaccaccacagcaacgaccagggguccggcuacgccgccgacaaggagagcacgcagaaggcguucgacggcaucaccaacaaggugaacuccgugaucgagaagaugaacacccaguucgaggccgucgggaaggaguucagcaaccuggagcgccggcucgagaaccugaacaagaagauggaggacggcuuccuggacguguggaccuacaacgccgagcuccuggugcugauggagaacgagcgcacgcucgacuuccacgacuccaacgucaagaaccuguacgacaaggugcggaugcagcugcgcgacaacgucaaggagcucgggaacggcugcuucgaguucuaccacaagugcgacgacgagugcaugaacagcgugaagaacggcaccuacgacuaccccaaguacgaggaggaguccaagcugaaccggaacgagaucaagggggugaagcugagcuccaugggcgucuaccagauccucgccaucuacgccaccguggcggggagccugucccuggccaucaugauggccggcaucagcuucuggaugugcuccaacgggagccuccagugccgcaucugcaucuga

SEQ ID NO: 65631 - RNA, 1701 nt, Artificial Sequence
  derived and/or modified CDS sequence (opt1) from hemagglutinin__InfluenzaA__ABO38230
augaagaccaucaucgcccugagcuacaucuucugccagguguucgcccagaaccuccccggcaacgacaacuccaccgcgacgcugugccuggggcaccacgccgucccgaacggcacccucgugaagaccaucaccaacgaccagaucgaggugacgaacgccaccgagcugguccagagcuccagcaccgggcgcaucugcgacaacccccaccggauccuggacggcaagaacugcacccucaucgacgcccugcugggggacccccacugcgacggcuuccagaacgagaagugggaccucuucguggagcgcuccaaggccuucagcaacugcuaccccuacgacgugccggacuacgcgucccugcggagccuggucgccuccagcggcacgcucgaguucuucaacgagggguucaacuggaccggcgugacccagaacgggggcuccuacgccugcaagcgcgggcccgacaacagcuucuucucccggcugaacuggcuguacaagagcgaguccaccuaccccgugcucaacgucacgaugcccaacaacgacaacuucgacaagcuguacaucuggggcgugcaccacccgagcaccgacaaggagcagaccaaccuguacgugcaggccuccggccgcgucaccgugagcacgaagcggucccagcagaccaucauccccagcguggggagccgccccuggguccggggccucuccagccgcaucuccaucuacuggaccaucgugaagcccggggacgugcugcugaucaacagcaacggcaaccucaucgcgccgcggggcuacuucaagauccgcaccgggaaguccagcaucaugcgguccgacgcccccaucggcacgugcagcuccgagugcaucacccccaacgggagcauccccaacgacaagccguuccagaacgucgacaagaucaccuacggcgccugccccaaguacgugaagcagaacacccugaagcuggccacggggaugcgcaacgugcccgagaagcagacccggggcaucuucggcgccaucgcgggguucaucgagaacggcugggaggggaugaucgacggcugguacggguuccgccaccagaacuccgagggcaccggccaggccgccgaccucaagagcacccaggccgccaucgaccagaucaacgggaagcugaaccgggucaucgagaagacgaacgagaaguuccaccagaucgagaaggaguucuccgagguggagggccgcauccaggaccuggagaaguacguggaggacaccaagaucgaccucuggagcuacaacgcggagcugcuggucgcccucgagaaccagcacaccaucgaccugaccgacuccgagaugaacaagcuguucgagaagacgcggcgccagcuccgggagaacgccgaggacauggggaacggcugcuucaagaucuaccacaagugcgacaacgccugcaucgggagcauccgcaacggcaccuacgaccacgacguguaccgcgacgaggcccugaacaaccgguuccagaucaagggcgucgagcugaaguccggguacaaggacuggauccucuggaucagcuucgcgaucuccugcuuccugcugugcguggugcuccugggcuucaucaugugggccugccagaaggggaacauccgcugcaacaucugcaucuga

SEQ ID NO: 65632 - RNA, 1701 nt, Artificial Sequence
  derived and/or modified CDS sequence (opt1) from hemagglutinin__InfluenzaA__ABO38241
augaagaccaucaucgcccugagcuacaucuccugccucguguucgcccagaagcugcccggcaacgacaacagcaccgcgacgcugugccucgggcaccacgccgucccgaacggcacccuggugaagaccaucaccaacgaccagaucgaggugacgaacgccaccgagcugguccaguccagcuccaccgggcgcaucugcgacagcccccaccggauccucgacggcaagaacugcacccugaucgacgcccugcucggggacccccacugcgacggcuuccagaacgagaagugggaccuguucguggagcgcuccaaggccuucagcaacugcuaccccuacgacgugccggacuacgcgucccugcggagccucgucgccuccagcggcacgcuggaguucaucaacgagggguucaacuggaccggcgugacccaguccgggggcagcuacacgugcaagcgcggguccgugaacagcuucuucucccggcugaacuggcucuacgagagcgaguccaaguaccccgcccugaacgucaccaugcccaacaacggcaaguucgacaagcuguacaucuggggcgugcaccaccccagcaccgacaaggagcagaccaaccucuacgugcgcgccagcgggcgggucaccguguccacgaagcgcagccagcagaccgugaucccgaacaucggcccccggcccuggguccgcgggcuguccagccggaucuccaucuacuggaccaucgugaagcccggcgacauccugcucaucaacagcaccggcaaccugaucgcgccgcgcggguacuucaagauccggacgggcaaguccagcaucaugcgcuccgacgcccccaucgggaccugcagcuccggcugcaucacccccaacgggagcauccccaacgacaagccguuccagaacgugaacaagaucaccuacggcgccugcccccgguacgucaagcagaacacgcugaagcucgccaccggcaugcgcaacgugcccgagaagcagacccgggggaucuucggcgccaucgcgggguucaucgagaacggcugggaggggaugguggacggcugguacggcuuccgccaccagaacuccgaggggaccggccaggccgccgaccucaagagcacgcaggccgccaucgaccagaucaacgggaagcugaaccggcucaucgagaagaccaacgagaaguuccaccagaucgagaaggaguucuccgaggucgagggccgcauccaggaccuggagaaguacguggaggacaccaagaucgaccuguggagcuacaacgcggagcuccugguggcccuggagaaccagcacaccaucgacaugacggacuccgagaugaacaagcuguucgagaagacccggaagcagcugcgcgagaacgccgaggacauggggaacggcugcuucaagaucuaccacaagugcgacaacgccugcaucggcagcauccgcaacgggaccuacgaccacgacgucuaccgggacgaggcccugaacaaccgcuuccagaucaagggcguggagcucaaguccggguacaaggacuggauccuguggaucagcuucgcgaucagcugcuuccugcucugcgucgugcugcugggcuucaucaugugggccugccagaagggcaacauccggugcaacaucugcaucuga

SEQ ID NO: 65633 - RNA, 1701 nt, Artificial Sequence; identical to SEQ ID NO: 64306
  derived and/or modified CDS sequence (opt1) from hemagglutinin__InfluenzaA__ABO38252

SEQ ID NO: 65634 - RNA, 1689 nt, Artificial Sequence
  derived and/or modified CDS sequence (opt1) from hemagglutinin__InfluenzaA__ABO38296
auggugaucaucuaccugauccuccuguucaccgccguccgcggcgaccagaucugcaucggguaccacgccaacaacagcaccgagaagguggacacgauccuggagcggaacgugaccgucacccacgcgaaggacauccucgagaagacccacaacggcaagcugugcaagcugaacgggaucccgccccucgagcugggcgacugcuccaucgccggguggcugcucggcaaccccgagugcgaccgccugcugagcgugcccgagugguccuacaucauggagaaggagaacccccgggacggccucugcuacccggggagcuucaacgacuacgaggagcugaagcacuuccuguccagcgugaagcacuucgagaaggucaagauccuccccaaggaccgcuggacgcagcacaccaccaccggcgggucccgggccugcgccgugagcggcaaccccuccuucuuccgcaacaugguguggcugacgaagaaggggagcaacuaccccgucgccaagggcuccuacaacaacaccagcggcgagcagaugcugaucaucuggggcgugcaccacccgaacgacgagaccgagcagcggacccucuaccagaacguggggacguacgucuccguggggaccagcacccugaacaagcgcuccacccccgacaucgcgacgcggcccaaggugaacggccugggcgggcgcauggaguucagcuggacccuccuggacaugugggacaccaucaacuucgaguccaccggcaaccugaucgcccccgaguacggguucaagaucagcaagcggggcuccagcgggaucaugaagacggagggcacccucggcaacugcgagaccaagugccagaccccgcugggggccaucaacacgacccugcccuuccacaacguccacccccucaccaucggcgagugccccaaguacgucaagagcgagaagcuggugcuggccaccgggcuccgcaacgugccgcagaucgagucccggggccuguucggggcgaucgccggcuucaucgagggcggguggcagggcaugguggacgggugguacggcuaccaccacagcaacgaccagggguccggcuacgccgccgacaaggagagcacgcagaaggccuucgacggcaucaccaacaaggugaacuccgucaucgagaagaugaacacccaguucgaggcgguggggaaggaguucagcaaccuggagcgccggcucgagaaccugaacaagaagauggaggacggcuuccuggacguguggaccuacaacgccgagcuccugguccugauggagaacgagcgcacgcucgacuuccacgacuccaacgugaagaaccuguacgacaagguccggaugcagcugcgcgacaacgccaaggagcucgggaacggcugcuucgaguucuaccacaagugcgacgacgagugcaugaacagcgugaagaacggcaccuacuacuaccccaaguacgaggaggaguccaagcugaaccggaacgagaucaagggggugaagcugagcuccaugggcgucuaccagauccucgccaucuacgccaccguggcggggagccugucccuggccaucaugauggccggcaucagcuucuggaugugcuccaacgggagccuccagugccgcaucugcaucuga

SEQ ID NO: 65635 - RNA, 1698 nt, Artificial Sequence; identical to SEQ ID NO: 64894
  derived and/or modified CDS sequence (opt1) from hemagglutinin__InfluenzaA__ABO38318

SEQ ID NO: 65636 - RNA, 1698 nt, Artificial Sequence; identical to SEQ ID NO: 64824
  derived and/or modified CDS sequence (opt1) from hemagglutinin__InfluenzaA__ABO38329

SEQ ID NO: 65637 - RNA, 1701 nt, Artificial Sequence
  derived and/or modified CDS sequence (opt1) from hemagglutinin__InfluenzaA__ABO38351
augaaggcccgccugcucgugcugcugugcgcccucgcggccaccgacgccgacaccaucugcaucggcuaccacgccaacaacagcacggacaccgucgacaccgugcuggagaagaacgugaccgucacgcacuccgugaaccugcucgaggacagccacaacgggaagcugugccggcugaagggcaucgcgccccuccagcuggggaagugcaacaucgccggcuggcugcucgggaacccggagugcgacccccugcugcccgcccgcuccuggagcuacaucguggagacccccaacuccgagaacggcaucugcuacccgggcgccuucaucgacuacgaggagcuccgggagcagcugagcuccgucagcuccuucgagcgcuucgagaucuuccccaaggagagcuccuggcccaaccacaacaccaacaucggggugaccgccgcgugcagccacgccggcaaguccagcuucuaccggaaccugcucuggcugacgaagaagggcggguccuaccccaagcugaagaacagcuacgugaacaagaaggggaaggagguccucgugcuguggggcauccaccacccguccaacagcaaggaccagcagacccuguaccagaacgagaacgccuacguguccgucgugagcagcaacuacaaccgccgguucacccccgagaucgccgagcgccccgaggugcgggaccaggccggccgcaugaacuacuacuggacccuccuggagcccggggacacgaucauguucgaggcgaacggcaaccuggucgccccgugguacgccuucgcccucucccggggguucggcagcggcaucaucaccuccaacgccagcaugcacgagugcaacaccaagugccagacgccccagggggcgaucaacuccagccugcccuuccagaacauccaccccgugaccaucggcgagugcccgaaguacgugcgcuccgccaagcugcggauggucaccgggcuccgcaacauccccagcauccagucccggggccuguucggggccaucgccggcuucaucgagggcggguggaccggcaugaucgacgggugguacggcuaccaccaccagaacgagcaggggagcggcuacgccgcggaccagaaguccacccagaacgccaucaacggcaucacgaacaaggugaacagcgugaucgagaagaugaacacccaguucaccgccgucgggaaggaguucaacaaccuggagaagcgcauggagaaccucaacaagaagguggacgacggcuuccuggacaucuggaccuacaacgccgagcugcucgugcugcuggagaacgagcggacgcucgacuuccacgacuccaacgucaagaaccuguacgagaaggucaagagccagcugaagaacaacgccaaggagaucgggaacggcugcuucgaguucuaccacaagugcgacaacgagugcauggaguccgugcgcaacgggaccuacgacuaccccaaguacagcgaggaguccaagcucaaccgggagaagaucgacggcgugaagcuggagagcaugggcguguaccagauccuggcgaucuacuccaccgucgccagcagccucgugcugcuggugucccucggggccaucagcuucuggaugugcuccaacggcagccugcagugccgcaucugcaucuga

SEQ ID NO: 65638 - RNA, 1701 nt, Artificial Sequence
  derived and/or modified CDS sequence (opt1) from hemagglutinin__InfluenzaA__ABO38362
augaaggccaagcugcucgugcugcugugcgcccucagcgcgaccgacgccgacaccaucugcaucggcuaccacgccaacaacuccacggacaccgucgacaccgugcuggagaagaacgugaccgucacgcacagcgugaaccugcucgaggacucccacaacgggaagcugugccgccugaagggcaucgcgccccuccagcuggggaagugcagcaucgccggcuggauccuggggaacccggagugcgagucccucgugagcaagaaguccuggagcuacaucgccgagacccccaacuccgagaacgggaccugcuaccccggcuacuucgccgacuacgaggagcugcgggagcagcugagcuccgucagcuccuucgagcgcuucgagaucuuccccaaggagagcuccuggccgaagcacaacgugacccgcggggugacggccagcugcucccacaagggcaagagcuccuucuaccggaaccuccuguggcugaccgagaagaacgggagcuaccccaaccucagcaaguccuacgucaacaacaaggagaaggaggugcuggugcuguggggcguccaccaccccagcaacaucgagaaccagaagaccaucuaccggaaggagaacgccuacguguccguggucagcucccacuacaaccgccgguucacccccgagaucgcgaagcgcccgaaggugcgggaccaggaggggcgcaucaacuacuacuggacgcuccuggagcccggcgacaccaucaucuucgaggccaacggcaaccugaucgcccccugguacgccuucgcccucagccggggguucggcuccgggaucaucaccagcaacgcguccaucgacgagugcgacgccaagugccagacgccccagggcgccaucaacagcucccugccguuccagaacgugcaccccgucaccaucggcgagugccccaaguacgugcgcagcaccaagcugcggauggugaccgggcuccgcaacauccccuccauccagagccggggccuguucggggccaucgccggcuucaucgagggcggcuggaccggcaugaucgacgggugguacggcuaccaccaccagaacgagcagggguccggcuacgcggccgaccagaaguccacgcagaacgccaucaacgggaucaccaacaaggucaacagcgugaucgagaagaugaacacccaguucaccgccgugggcaaggaguucaacaagcuggagaagcgcauggagaaccucaacaagaaggucgacgacggcuuccuggacaucuggacguacaacgccgagcugcucgugcugcuggagaacgagcggacccucgacuuccacgacagcaacgucaagaaccuguacgagaaggugaagucccagcugaagaacaacgcgaaggagaucgggaacggcugcuucgaguucuaccacaagugcaacaacgagugcauggagagcgugaagaacgggaccuacgacuacccgaaguacagcgaggaguccaagcucaaccgcgagaagaucgacggcgucaagcuggagagcauggggguguaccagauccuggccaucuacuccaccguggccagcucccucguccugcuggugagccucggcgccaucuccuucuggaugugcagcaacggcucccugcagugccggaucugcaucuga

SEQ ID NO: 65639 - RNA, 1698 nt, Artificial Sequence
  derived and/or modified CDS sequence (opt1) from hemagglutinin__InfluenzaA__ABO38373
augaaggcccgccugcucgugcugcugugcgcccucgcggccaccgacgccgacaccaucugcaucggcuaccacgccaacaacagcacggacaccgucgacaccgugcuggagaagaacgugaccgucacgcacuccgugaaccugcucgaggacagccacaacgggaagcugugccggcugaagggcaucgcgccccuccagcuggggaagugcaacaucgccggcuggauccuggggaacccggagugcgagucccuccugagcgagcgcuccuggagcuacaucguggagacccccaacuccgagaacgggaccugcuaccccggcgacuucaucgacuacgaggagcugcgggagcagcucagcuccgucagcuccuucgagcgcuucgagaucuucagcaaggaguccagcuggcccaagcacaccaccgggggcgugaccgccgccugcucccacgccggcaagagcuccuucuaccggaaccugcuguggcucaccgagaaggacggcagcuacccgaaccugaacaacuccuacgugaacaagaaggggaaggagguccuggugcucuggggcgugcaccaccccagcaacaucaaggaccagcagacccuguaccagaaggagaacgcguacgucagcgugguguccagcaacuacaaccgccgguucacgcccgagaucgccgagcgccccaagguccggggccaggccgggcgcaucaacuacuacuggacccugcucaagccgggcgacaccaucauguucgaggccaacgggaaccugaucgcccccugguacgcguucgcccugucccggggcuucggcagcgggaucaucaccuccaacgccagcaugcacgagugcgacacgaagugccagacgccccagggcgccaucaacuccagccuccccuuccagaacauccacccggugaccaucggggagugccccaaguacgugcgcuccaccaagcugcggauggucacgggccugcgcaacauccccagcauccagucccggggccucuucggggccaucgcgggcuucaucgagggcggguggaccgggaugaucgacggcugguacggguaccaccaccagaacgagcagggcagcggcuacgccgccgaccagaaguccacccagaacgccaucaacgggaucaccaacaaggugaacagcgugaucgagaagaugaacacgcaguucaccgccgucggcaaggaguucaacaaccuggagaagcgcauggagaaccugaacaagaagguggacgacggguuccucgacaucuggaccuacaacgcggagcugcuggugcuccuggagaacgagcggacccuggacuuccacgacuccaacgucaagaaccucuacgagaaggugaagaaccagcugcgcaacaacgccaaggagaucggcaacgggugcuucgaguucuaccacaagugcaacaacgagugcauggagagcgucaagaacggcacguacgacuaccccaaguacuccgaggagagcaagcugaaccgggagaagaucgacggcgugaagcucgaguccauggggguguaccagauccuggccaucuacagcaccgccgccagcucccugguccuccuggugagccugggcgcgaucuccuucuggaugugcagcaacgggucccuccagugccgcaucugcaucuga

SEQ ID NO: 65640 - RNA, 1701 nt, Artificial Sequence
  derived and/or modified CDS sequence (opt1) from hemagglutinin__InfluenzaA__ABO38384
augaaggcccgccugcucgugcugcugugcgcccucgcggccgccgacgccgacaccaucugcaucggcuaccacgccaacaacagcaccgacacggucgacaccgugcuggagaagaacgugaccgucacccacuccgugaaccugcucgaggacagccacaacgggaagcugugccggcugaagggcaucccgccccuccagcuggggaagugcaacaucgcgggcuggcugcucgggaaccccgagugcgacucccugcugcccgcccgcagcugguccuacaucguggagacgcccaacagcgagaacggcgccugcuacccgggcgacuucaucaacuacgaggagcuccgggagcagcuguccagcgucuccagcuucgagcgcuucgagaucuuccccaaggaguccagcuggcccaagcacaacaccaccaagggggugaccgccgcgugcucccacgccggcaagagcuccuucuaccggaaccugcucuggcugacgaagaaggaggacagcuaccccaagcugaagaacuccuacgugaacaagaaggggaaggagguccucgugcuguggggcgugcaccacccgagcuccagcaaggagcagcagacccuguaccagaacgagaacgccuacgucagcgugguguccagcaacuacaaccgccgguucacccccgagaucgccgagcgccccaagguccgggaccagaccgggcgcaugaacuacuacuggacgcuccuggagcccggcgacaccaucaucuucgaggccaacggcaaccugaucgcgccgugguacgccuucgcccucucccggggguucggcagcgggaucaucaccuccaacgccagcaugcacgagugcaacaccaagugccagacgccccagggcgccaucaacuccagccugcccuuccagaacauccaccccgugaccaucggcgagugcccgaaguacgugcgcuccgcgaagcugcggauggucaccgggcuccgcaacauccccagcauccagucccggggccuguucggggccaucgccggcuucaucgagggcggguggaccggcaugaucgacgggugguacggcuaccaccaccagaacgagcaggggagcggcuacgccgccgaccagaaguccacgcagaacgcgaucaacgggaucaccaacaaggugaacagcgugaucgagaagaugaacacccaguucaccgccgucggcaaggaguucaacaaccuggagaagcgcauggagaaccucaacaagaagguggacgacggcuuccuggacaucuggacguacaacgccgagcugcucgugcugcuggagaacgagcggacccucgacuuccacgacuccaacgucaagaaccuguacgagaaggucaagagccagcugaagaacaacgccaaggagaucgggaacggcugcuucgaguucuaccacaagugcgacaacgagugcauggaguccgugcgcaacgggaccuacgacuaccccaaguacagcgaggaguccaagcucaaccgggagaagaucgacggcgugaagcuggagagcauggggguguaccagauccuggccaucuacagcaccgucgcguccagccucgugcugcuggugucccucggcgccaucagcuucuggaugugcuccaacggcagccugcagugccgcaucugcaucuga

SEQ ID NO: 65641 - RNA, 1701 nt, Artificial Sequence
  derived and/or modified CDS sequence (opt1) from hemagglutinin__InfluenzaA__ABO38395
augaaggccaagcugcucgugcugcugugcgccuucaccgcgaccgacgccgacacgaucugcaucggcuaccacgccaacaacagcaccgacaccgucgacaccgugcucgagaagaacgugacggucacccacuccgugaaccugcuggaggacagccacaacgggaagcucugccgccugaagggcaucgcgccccugcagcucgggaacugcuccaucgccggcuggauccuggggaacccggagugcgagagccuguucuccaagaaguccuggagcuacaucgccgagacccccaacagcgagaacgggaccugcuaccccggcuacuucgccgacuacgaggagcuccgggagcagcuguccagcguguccagcuucgagcgcuucgagaucuuccccaaggaguccagcuggccgaaccacacggucaccaagggggugaccgccuccugcagccacaagggccgguccagcuucuaccgcaaccugcucuggcugaccaagaagaacggguccuaccccaaccugagcaagagcuacgugaacaacaaggagaaggagguccucgugcuguggggcgugcaccaccccuccaacaucggggaccagcgggccaucuaccacacggagaacgcguacgucagcgugguguccagccacuacaaccgccgguucacccccgagaucgccaagcgcccgaagguccgggaccaggagggccgcaucaacuacuacuggacccugcucgagcccggcgacaccaucaucuucgaggccaacgggaaccugaucgcccccugguacgccuucgcgcugucccggggcuucgggagcggcaucaucacguccaacgccagcauggacgagugcgacgccaagugccagacgccccagggcgccaucaacuccagccucccguuccagaacgugcaccccgugaccaucggggagugccccaaguacguccgcuccaccaagcugcggauggugaccggccugcgcaacauccccagcauccagucccggggccucuucggcgccaucgcgggguucaucgagggcggcuggaccgggaugaucgacggcugguacggguaccaccaccagaacgagcagggcagcggguacgccgccgaccagaaguccacccagaacgccaucaacggcaucaccaacaaggugaacagcgucaucgagaagaugaacacgcaguucaccgccgugggcaaggaguucaacaagcuggagcgccggauggagaaccugaacaagaagguggacgacggguuccucgacaucuggaccuacaacgcggagcugcugguccuccuggagaacgagcgcacccuggacuuccacgacuccaacgugaagaaccucuacgagaaggucaagagccagcugaagaacaacgccaaggagaucggcaacgggugcuucgaguucuaccacaagugcaacaacgagugcauggaguccgugaagaacggcacguacgacuacccgaaguacagcgaggagagcaagcugaaccgggagaagaucgacggggugaagcucgaguccaugggcgucuaccagauccuggccaucuacagcaccguggccuccagccuggugcuccuggucucccugggcgccaucagcuucuggaugugcuccaacgggagccuccagugccgcaucugcaucuga

SEQ ID NO: 65642 - RNA, 1701 nt, Artificial Sequence
  derived and/or modified CDS sequence (opt1) from hemagglutinin__InfluenzaA__ABO38406
augaaggccaagcugcucgugcugcugugcgcccucagcgcgaccgacgccgacaccaucugcaucggcuaccacgccaacaacuccacggacaccgucgacaccgugcuggagaagaacgugaccgucacgcacagcgugaaccugcucgaggacaaccacaacgggaagcugugcaagcugaagggcaucgcgccccuccagcuggggaagugcuccaucgccggcuggauccuggggaacccggagugcgagagccucuucuccaagaaguccuggagcuacaucgccgagacccccaacagcgagaacgggaccugcuaccccggcuacuucgccgacuacgaggagcugcgcgagcagcuguccagcguguccagcuucgagcgguucgagaucuuccccaaggaguccagcuggccgaaccacaacgucaccaagggggugacggccuccugcagccacaagggcaaguccagcuucuaccgcaaccuccuguggcugaccgagaagaagggguccuaccccaaccucagcaagagcuacgugaacaacaaggagaaggagguccuggugcuguggggcauccaccaccccuccaacaucgaggaccagaagaccaucuaccggaaggagaacgccuacgugagcgucguguccagccacuacaaccgccgguucacccccgagaucgcgaagcgcccgaaggugcgggaccaggaggggcgcaucaacuacuacuggacgcuccuggagcccggcgacaccaucaucuucgaggccaacggcaaccugaucgcccccugguacgccuucgcccucucccggggguucggcagcgggaucaucaccuccaacgcgagcauggacgagugcgacgccaagugccagacgccccgcggcgccaucaacuccagccugccguuccagaacguccaccccgugaccaucggcgagugccccaaguacgugcgguccaccaagcugcgcauggucaccgggcuccggaacauccccagcauccagucccgcggccuguucggggccaucgccggcuucaucgagggcggcuggaccggcaugaucgacgggugguacggcuaccaccaccagaacgagcaggggagcggcuacgcggccgaccagaaguccacgcagagcgccaucaacgggaucaccaacaaggugaacuccaucaucgagaagaugaacacccaguucaccgccgugggcaaggaguucaacaagcuggagaagcggauggagaaccucaacaagaaggucgacgacggcuuccuggacaucuggacguacaacgccgagcugcucgugcugcuggagaacgagcgcacccucgacuuccacgacagcaacgugaagaaccuguacgagaaggucaagucccagcugaagaacaacgcgaaggagaucgggaacggcugcuucgaguucuaccacaagugcaacaacgagugcauggagagcgugaagaacgggaccuacgacuacccgaaguacagcgaggaguccaagcucaaccgggagaagaucgacggcgucaagcuggagagcauggggguguaccagauccuggccaucuacuccaccguggccagcucccucguccugcuggugagccucggcgccaucuccuucuggaugugcagcaacggcucccugcagugccgcaucugcaucuga

SEQ ID NO: 65643 - RNA, 1701 nt, Artificial Sequence
  derived and/or modified CDS sequence (opt1) from hemagglutinin__InfluenzaA__ABO38417
augaagaccaucaucgcccugagcuacauccucugccugguguucgcccagaagcugcccgucaacgacaacuccaccgcgacgcucugccugggccaccacgccgugccgaacgggacccuggugaagaccaucaccaacgaccacaucgaggucacgaacgccaccgagcucgugcagagcucccccaccggccgcaucugcgacagcccccaccagauccuggacggggagaacugcacccugaucgacgcccuccugggcgacccccacugcgacggguuccagaacaaggagugggaccuguucguggagcgguccacggccuacagcaacugcuacccguacgacguccccgacuacgcgucccuccgcagccugguggccuccagcggcacccuggaguucaacaacgaguccuucaacuggaccggcguggcccagaacgggaccagcuccgccugcaagcggcgcagcaucaaguccuucuucagccggcucaacuggcugcaccagcugaaguacaaguaccccgcgcucaacgucacgaugcccaacaacgagaaguucgacaagcuguacaucuggggcgugcaccacccguccaccgacagcgaccagaucucccuguacgcccaggccagcgggcgcgugaccgucagcaccaagcggucccagcagacggugauccccaacaucggcagccgccccugggugcgcggggucuccagccggaucuccaucuacuggaccaucgugaagcccggcgacauccuccugaucaacagcaccggcaaccugaucgccccgcggggguacuucaagauccgcuccggcaagagcuccaucaugcggagcaacacccccaucgggaagugcaacuccgagugcaucacgcccaacggcagcauccccaacgacaagccguuccagaacgugaaccgcaucaccuacggcgccugcccccgguacgucaagcagaacacccucaagcuggcgaccgggaugcgcaacgugcccgagaagcagacgcggggcaucuucggggccaucgccggcuucaucgagaacgggugggagggcaugguggacggcugguacggguuccgccaccagaacuccgagggcaccgggcaggccgccgaccucaagagcacccaggcggccaucaaccagaucaacggcaagcugaaccggcugaucgagaagaccaacgagaaguuccaccagaucgagaaggaguucuccgaggucgaggggcgcauccaggaccuggagaaguacguggaggacacgaagaucgaccucuggagcuacaacgccgagcugcugguggcccucgagaaccagcacaccaucgaccugaccgacuccgagaugaacaagcuguucgagcggacccgcaagcagcuccgcgagaacgccgaggacaugggcaacggcugcuucaagaucuaccacaagugcgacaacgcgugcaucgggagcauccggaacggcacguacgaccacgacgucuaccgcgacgaggcccugaacaaccgguuccagaucaaggggguggagcugaaguccggcuacaaggacuggauccucuggaucagcuucgccaucagcugcuuccugcugugcgucgugcuccugggguucaucaugugggccugccagaagggcaacauccgcugcaacaucugcaucuga

SEQ ID NO: 65644 - RNA, 1689 nt, Artificial Sequence
  derived and/or modified CDS sequence (opt1) from hemagglutinin__InfluenzaA__ABO38712
auggccaucaucuacuucauccugcuguucaccgccgugcgcggcgaccagaucugcaucggguaccacgcgaacaacagcaccgagaaggucgacacgauccuggagcggaacgugaccgugacccacgccaaggacauccuggagaagacccacaacggcaagcucugcaagcugaacgggaucccgccccuggagcucggcgacugcuccaucgccggguggcugcugggcaaccccgagugcgaccgccuccugcggguccccgaguggagcuacaucauggagaaggagaacccccgcuacucccugugcuacccgggcagcuucaacgacuacgaggagcucaagcaccuccuguccagcgugaagcacuucgagaaggugcggauccuccccaaggacggguggacgcagcacaccaccuccggcgggagcaaggccugcgccgucuccggcaagagcuccuucuuccgcaacaugguguggcugaccaagaaggggcccaacuaccccguggcgaagcggagcuacaacaacacguccggcgagcagaugcugaucaucuggggcguccaccacccgaaggacgaggccgagcagcgcgcccucuaccagaagguggggaccuacgugagcgccuccaccagcacccugaacaagcgguccacgcccgagaucgcggcccgccccgaggucaacggccuggggagccggauggaguucuccuggacccuccuggacgugugggacaccaucaacuucgagagcaccggcaaccugguggcccccgaguacggcuucaagaucagcaagcgcggguccagcggcaucaugaagacggaggggacccucggcaacugcgagaccaagugccagaccccgcugggggccaucaacacgacccugcccuuccacaacguccacccccucaccaucggcgagugccccaaguacgugaaguccgagaagcuggugcuggccaccggccuccggaacgucccgcagaucgagagccgcgggcuguucggcgcgaucgccggguucaucgagggcggguggcagggcaugguggacggcugguacggguaccaccacuccaacgaccagggcagcggguacgccgccgacaaggaguccacgcagaaggccuucgaccggaucaccaacaaggugaacagcgucaucgagaagaugaacacccaguucgaggcggugggcaaggaguucuccaaccuggagaagcgccucgagaaccugaacaagaagauggaggacggguuccuggacguguggaccuacaacgccgagcuccugguccugauggagaacgagcggacgcucgacuuccacgacagcaacgugaagaaccuguacaacaagguccgcaugcagcugcgggacaacgugaaggagcucggcaacggcugcuucgaguucuaccacaagugcgacgacgagugcauguccagcgugaagaacgggaccuacgacuaccccaaguacgaggaggaguccaagcugaagcgcaacgagaucaagggcgucaagcugagcuccauggggguguaccagauccucgccaucuacgccaccguggccggcagccugucccuggcgaucaugaucgccggcaucagccucuggaugugcuccaacgggagccugcagugccggaucugcaucuga

SEQ ID NO: 65645 - RNA, 1689 nt, Artificial Sequence
  derived and/or modified CDS sequence (opt1) from hemagglutinin__InfluenzaA__ABO38723
auggccaucaucuacuucauccugcuguucaccgccgugcgcggcgaccagaucugcaucggguaccacgcgaacaacagcaccgagaaggucgacacgauccuggagcggaacgugaccgugacccacgccaaggacauccuggagaagacccacaacggcaagcucugcaagcugaacgggaucccgccccuggagcucggcgacugcuccaucgccggguggcugcugggcaaccccgagugcgaccgccuccugcggguccccgaguggagcuacaucauggagaaggagaacccccgcuacucccugugcuacccgggcagcuucaacgacuacgaggagcucaagcaccuccuguccagcgugaagcacuucgagaaggugcggauccuccccaaggacggguggacgcagcacaccaccuccggcgggagcaaggccugcgccgucuccggcaagagcuccuucuuccgcaacaugguguggcugaccaagaaggggcccaacuaccccguggcgaagcggagcuacaacaacacguccggcgagcagaugcugaucaucuggggcguccaccacccgaacgacgaggccgagcagcgcgcccucuaccagaagguggggaccuacgugagcgccuccaccagcacccugaacaagcgguccacgcccgagaucgcggcccgccccgaggucaacggccuggggagccggauggaguucuccuggacccuccuggacgugugggacaccaucaacuucgagagcaccggcaaccugguggcccccgaguacggcuucaagaucagcaagcgcggguccagcggcaucaugaagacggaggggacccucggcaacugcgagaccaagugccagaccccgcugggggccaucaacacgacccugcccuuccacaacguccacccccucaccaucggcgagugccccaaguacgugaaguccgagaagcuggugcuggccaccggccuccggaacgucccgcagaucgagagccgcgggcuguucggcgcgaucgccggguucaucgagggcggguggcagggcaugguggacggcugguacggguaccaccacuccaacgaccagggcagcggguacgccgccgacaaggaguccacgcagaaggccuucgaccggaucaccaacaaggugaacagcgucaucgagaagaugaacacccaguucgaggcggugggcaaggaguucuccaaccuggagaagcgccucgggaaccugaacaagaagauggaggacggcuuccuggacguguggaccuacaacgccgagcuccugguccugauggagaacgagcggacgcucgacuuccacgacagcaacgugaagaaccuguacaacaagguccgcaugcagcugcgggacaacgugaaggagcucggcaacgggugcuucgaguucuaccacaagugcgacgacgagugcauguccagcgugaagaacggcaccuacgacuaccccaaguacgaggaggaguccaagcugaagcgcaacgagaucaagggggucaagcugagcuccaugggcguguaccagauccucgccaucuacgccaccguggccggcagccugucccuggcgaucaugaucgccgggaucagccucuggaugugcuccaacggcagccugcagugccggaucugcaucuga

SEQ ID NO: 65646 - RNA, 1698 nt, Artificial Sequence
  derived and/or modified CDS sequence (opt1) from hemagglutinin__InfluenzaA__ABO44046
augaaggugaagcugcucguccugcugugcaccuucaccgccacguacgccgacaccaucugcaucggcuaccacgcgaacaacagcaccgacaccguggacacggugcucgagaagaacgucaccgugacccacuccgugaaccugcuggaggacagccacaacgggaagcucugccugcugaagggcaucgcgccccuccagcuggggaacugcuccgucgccggcuggauccuggggaacccggagugcgagcuccugaucagcaaggaguccuggagcuacaucguggagacccccaaccccgagaacggcacgugcuaccccggcuacuucgccgacuacgaggagcugcgcgagcagcucuccagcguguccagcuucgagcgguucgagaucuucccgaaggaguccagcuggcccaaccacaccgucaccgggguguccgccagcugcucccacaacggcaagagcuccuucuaccgcaaccugcuguggcucaccgggaagaacggccuguaccccaaccugagcaaguccuacgccaacaacaaggagaaggaggugcucguccuguggggcgugcaccacccgcccaacaucggggaccagcgggcccuguaccacacggagaacgccuacgugagcgucgugagcucccacuacagccgccgguucacccccgagaucgccaagcgccccaaggugcgggaccaggagggccgcaucaacuacuacuggacccuccuggagcccggggacaccaucaucuucgaggcgaacggcaaccugaucgccccgcgguacgccuucgcccucucccgcggguucggcagcggcaucaucacguccaacgcccccauggacgagugcgacgcgaagugccagacgccccagggggccaucaacagcucccugcccuuccagaacguccacccggugaccaucggcgagugccccaaguacgugcggagcgccaagcugcgcauggucaccgggcuccggaacauccccuccauccagagccgcggccuguucggggccaucgccggcuucaucgagggcggguggaccggcaugguggacgggugguacggcuaccaccaccagaacgagcagggguccggcuacgcggccgaccagaaguccacccagaacgccaucaacggcaucaccaacaagaugaacagcgugaucgagaagaugaacacccaguucacggccgucgggaaggaguucaacaagcuggagcggcgcauggagaaccucaacaagaagguggacgacggcuuccuggacaucuggaccuacaacgccgagcugcucguccugcuggagaacgagcggacccucgacuuccacgacagcaacgugaagaaccuguacgagaaggugaagucccagcugaagaacaacgcgaaggagaucgggaacggcugcuucgaguucuaccacaagugcaacaacgagugcauggagagcgucaagaacgggaccuacgacuaccccaaguacuccgaggagagcaagcucaaccgcgagaagaucgacggcgugaagcuggaguccaugggcguguaccagauccuggccaucuacagcacggucgccagcucccucgugcugcuggugagccucggggccaucuccuucuggaugugcagcaacggcucccugcagugccggaucugcaucuga

SEQ ID NO: 65647 - RNA, 1689 nt, Artificial Sequence
  derived and/or modified CDS sequence (opt1) from hemagglutinin__InfluenzaA__ABO44057
auggccaucaucuaccugauccuccuguucaccgccgugcgcggcgaccagaucugcaucggguaccacgcgaacaacagcaccgagaaggucgacacgauccuggagcggaacgugaccgugacccacgccaaggacauccucgagaagacccacaacggcaagcugugcaagcugaacgggaucccgccccucgagcugggcgacugcuccaucgccggguggcugcucggcaaccccgagugcgaccgccugcugcggguccccgaguggagcuacaucauggagaaggagaacccccgcuacucccucugcuacccgggcagcuucaacgacuacgaggagcugaagcaccuccuguccagcgugaagcacuucgagaaggugaagauccugcccaaggacggguggacgcagcacgagaccgacggcggguccaaggccugcgccgucagcggcaaggcguccuucuuccggaacaugguguggcugaccaagcgcgggcccaacuaccagguggccaagcggagcuacaacaacaccuccggcgagcagaugcucaucaucuggggcguccaccaccccaaggacgaggccgagcagcgcgcccuguaccagaagguggggacguacgugagcgcguccaccagcacccugaacaagcgguccaccccggagaucgccgcccgccccgaggucaacggccucgagagccggauggaguucuccuggacgcugcuggacgugugggacaccaucaacuucgagagcaccgggaaccucguggcccccgaguacggcuucaagaucuccaagcgcggcagcagcgggaucaugaagaccgagggcacgcuggggaacugcgagaccaagugccagacgccccugggcgccaucaacaccacccucccguuccacaacguccacccccugaccaucggggagugccccaaguacgugaaguccgagaagcuggugcucgcgaccggccugcggaacgucccccagaucgagagccgcggccuguucggggccaucgccggcuucaucgagggcggguggcaggggaugguggacggcugguacggcuaccaccacuccaacgaccaggggagcggcuacgccgccgacaaggaguccacccagaaggcguucgaccggaucacgaacaaggugaacagcgucaucgagaagaugaacauccaguucgaggccguggggaaggaguucuccaaccucgagaagcgccuggagaaccugaacaagaagauggaggacggcuuccucgacguguggaccuacaacgccgagcugcugguccucauggagaacgagcggacccuggacuuccacgacagcaacgugaagaaccuguacgacaagguccgcaugcagcuccgggacaacgugaaggagcuggggaacggcugcuucgaguucuaccacaagugcgacgacgagugcaugaacuccgugaagaacggcaccuacgacuacccgaaguacgaggaggagagcaagcugaagcgcaacgagaucaagggggucaagcucuccagcaugggcguguaccagauccuggccaucuacgccacgguggcggggucccugagccucgccaucaugaucgccggcaucuccuucuggaugugcagcaacggcucccugcagugccgggucugcaucuga

SEQ ID NO: 65648 - RNA, 1701 nt, Artificial Sequence; identical to SEQ ID NO: 64280
  derived and/or modified CDS sequence (opt1) from hemagglutinin__InfluenzaA__ABO44079

SEQ ID NO: 65649 - RNA, 1689 nt, Artificial Sequence
  derived and/or modified CDS sequence (opt1) from hemagglutinin__InfluenzaA__ABO44090
auggccaucaucuaccugauccuccuguucaccgccgugcgcggcgaccagaucugcaucggguaccacgcgaacaacagcaccgagaaggucgacacgauccuggagcggaacgugaccgugacccacgccaaggacauccucgagaagacccacaacggcaagcugugcaagcugaacgggaucccgccccucgagcugggcgacugcuccaucgccggguggcugcucggcaaccccgagugcgaccgccugcugcggguccccgaguggagcuacaucauggagaaggagaacccccgcgacggccucugcuacccgggguccuucaacgacuacgaggagcugaagcaccuccugagcuccgugaagcacuucgagaaggugaagauccugcccaaggaccgguggacgcagcacaccaccaccggcgggagccgcgccugcgccgucuccggcaaccccagcuucuuccggaacaugaucuggcugacgaagaagggguccaacuaccccguggcgaagggcagcuacaacaacaccuccggcgagcagaugcucaucaucuggggcgugcaccacccgaacgacgagaccgagcagcgcacccuguaccagaacgucgggacguacgugagcguggucaccuccacccugaacaagcggagcacccccaagaucgccacgcgccccaaggugaacgggcucggcggccggauggaguucuccuggacccugcuggacaugugggacaccaucaacuucgagagcaccgggaaccucaucgcccccgaguacggcuucaagaucuccaagcgcgggagcuccggcaucaugaagacggaggggacccuggagaacugcgagaccaagugccagaccccgcugggcgccaucaacacgacccuccccuuccacaacgugcacccccugaccaucggcgagugccccaaguacgucaagagcgagaagcuggugcucgcgaccgggcugcggaacgugccgcagaucgagagccgcggccuguucggggccaucgccggcuucaucgagggcggguggcagggcauggucgacgggugguacggcuaccaccacuccaacgaccaggggagcggcuacgccgccgacaaggaguccacgcagcgggcguucgacgggaucaccaacaaggugaacagcgugaucgagaagaugaacacccaguucgaggccgucggcaaggaguucuccaaccucgagcgccggcuggagaaccugaacaagaagauggaggacggccuccuggacguguggaccuacaacgccgagcugcucgugcugauggagaacgagcgcauccuggacuuccacgacagcaacgucaagaaccucuacgacaaggugcggaugcagcugcgcgacaacgucaaggagcuggggaacggcugcuucgaguucuaccacaagugcgacgacgagugcaugaacuccgugaagaacgggacguacgacuaccccaaguacgaggaggagagcaagcucaaccggaacgagaucaagggcgugaagcuguccagcaugggcgucuaccagauccuggccaucuacgccaccguggcggggucccucagccuggccaucaugauggccggcaucuccuucuggaugugcagcaacgggucccugcagugccgcaucugcaucuga

SEQ ID NO: 65650 - RNA, 1689 nt, Artificial Sequence
  derived and/or modified CDS sequence (opt1) from hemagglutinin__InfluenzaA__ABO44101
auggccaucaucuaccugauccuccuguucaccgccgugcgcggcgaccagaucugcaucggguaccacgcgaacaacagcaccgagaaggucgacacgauccuggagcggaacgugaccgugacccacgccaaggacauccucgagaagacccacaacggcaagcugugcaagcugaacgggaucccgccccucgagcugggcgacugcuccaucgccggguggcugcucggcaaccccgagugcgaccgccugcugcggguccccgaguggagcuacaucauggagaaggagaacccccgcuacucccucugcuacccgggcagcuucaacgacuacgaggagcugaagcaccuccuguccagcgugaagcacuucgagaaggugaagauccugcccaaggacggguggacgcagcacaagaccgacggcggguccaaggccugcgccgucagcggcaagcccuccuucuuccggaacaugguguggcugaccaagaaggggcccaacuacccgguggcgaagcgcagcuacaacaacaccuccggcgagcagaugcucaucaucuggggcguccaccaccccaacgacgaggccgagcagcgggcccuguaccagaagguggggacguacgugagcgccuccaccagcacccugaacaagcgcuccacccccgagaucgcggcccggcccgaggucagcggccucgggucccgcauggaguucagcuggacgcugcuggacgugugggacaccaucuccuucgagagcaccggcaaccucguggccccggaguacggcuucaagaucagcaagcggggguccagcggcaucaugaagaccgaggggacgcugggcaacugcgagaccaagugccagacgccccugggggccaucaacaccacccuccccuuccacaacguccacccccugaccaucggcgagugcccgaaguacgugaaguccgagaagcuggugcucgccaccggccugcgcaacgucccccagaucgagagccgggggcuguucggcgcgaucgccggguucaucgagggcggguggcagggcaugguggacggcugguacggguaccaccacuccaacgaccagggcagcggguacgccgccgacaaggaguccacccagaaggccuucgaccgcaucacgaacaaggugaacagcgucaucgagaagaugaacacccaguucgaggcggugggcaaggaguucuccaaccucgagaagcggcuggagaaccugaacaagaagauggaggacggguuccucgacguguggaccuacaacgccgagcugcugguccucauggagaacgagcgcacccuggacuuccacgacagcaacgugaagaaccuguacgacaagguccggaugcagcuccgcgacaacgugaaggagcugggcaacggcugcuucgaguucuaccacaagugcgacgacgagugcaugaacuccgugaagaacgggacguacgacuaccccaaguacgaggaggagagcaagcugaagcggaacgagaucaagggcgucaagcucuccagcauggggguguaccagauccuggccaucuacgccaccguggccggcucccugagccucgcgaucaugaucgccggcaucuccuucuggaugugcagcaacgggucccugcagugccgcaucugcaucuga

SEQ ID NO: 65651 - RNA, 1701 nt, Artificial Sequence
  derived and/or modified CDS sequence (opt1) from hemagglutinin__InfluenzaA__ABO44123
augaaggccaagcugcucgugcugcugugcgccuucaccgcgaccgacgccgacacgaucugcaucggcuaccacgccaacaacagcaccgacaccgucgacaccgugcucgagaagaacgugacggucacccacuccgugaaccugcuggaggacagccacaacgggaagcucugccgccugaagggcaucgcgccccugcagcucgggaacugcuccaucgccggcuggauccuggggaacccggagugcgagagccuguucuccaagaaguccuggagcuacaucgccgagacccccaacagcgagaacgggaccugcuaccccggcuacuucgccgacuacgaggagcuccgggagcagcuguccagcguguccagcuucgagcgcuucgagaucuuccccaaggaguccagcuggccgaaccacacggucaccaagggggugaccgccuccugcagccacaagggcaaguccagcuucuaccggaaccugcucuggcugaccaagaagaacggguccuaccccaaccugagcaagagcuacgugaacaacaaggagaaggagguccucgugcuguggggcgugcaccaccccuccaacaucggggaccagcgcgccaucuaccacacggagaacgcguacgucagcgugguguccagccacuacaaccggcgcuucacccccgagaucgccaagcggccgaagguccgcgaccaggagggccggaucaacuacuacuggacccugcucgagcccggcgacaccaucaucuucgaggccaacgggaaccugaucgcccccugguacgccuucgcgcugucccgcggcuucgggagcggcaucaucacguccaacgccagcauggacgagugcgacgccaagugccagacgccccagggcgccaucaacuccagccucccguuccagaacgugcaccccgugaccaucggggagugccccaaguacguccgguccaccaagcugcgcauggugaccggccugcggaacauccccagcauccagucccgcggccucuucggcgccaucgcgggguucaucgagggcggcuggaccgggaugaucgacggcugguacggguaccaccaccagaacgagcagggcagcggguacgccgccgaccagaaguccacccagaacgccaucaacggcaucaccaacaaggugaacagcgucaucgagaagaugaacacgcaguucaccgccgugggcaaggaguucaacaagcuggagcggcgcauggagaaccugaacaagaagguggacgacggguuccucgacaucuggaccuacaacgcggagcugcugguccuccuggagaacgagcggacccuggacuuccacgacuccaacgugaagaaccucuacgagaaggucaagagccagcugaagaacaacgccaaggagaucggcaacgggugcuucgaguucuaccacaagugcaacaacgagugcauggaguccgugaagaacggcacguacgacuacccgaaguacagcgaggagagcaagcugaaccgcgagaagaucgacggggugaagcucgaguccaugggcgucuaccagauccuggccaucuacagcaccguggccuccagccuggugcuccuggucucccugggcgccaucagcuucuggaugugcuccaacgggagccuccagugccggaucugcaucuga

SEQ ID NO: 65652 - RNA, 1701 nt, Artificial Sequence
  derived and/or modified CDS sequence (opt1) from hemagglutinin__InfluenzaA__ABO44134
augaaggccaagcugcucgugcugcugugcgcccucagcgcgaccgacgccgacaccaucugcaucggcuaccacgccaacaacuccacggacaccgucgacaccgugcuggagaagaacgugaccgucacgcacagcgugaaccugcucgaggacucccacaacgggaagcugugccgccugaagggcaucgcgccccuccagcuggggaagugcagcaucgccggcuggauccuggggaacccggagugcgagucccucuucagcaagaaguccuggagcuacaucgccgagacccccaacuccgagaacgggaccugcuaccccggcuacuucgccgacuacgaggagcugcgggagcagcugagcuccgugagcuccuucgagcgcuucgagaucuuccccaaggagcggagcuggccgaagcacaacgucacccgcggcgugacggccuccugcagccacaagggcaaguccagcuucuaccggaaccuccuguggcugaccgagaagaacggguccuaccccaaccucagcaagagcuacgugaacaacaaggagaaggagguccuggugcuguggggcgugcaccaccccuccaacaucgaggaccagaagaccaucuaccgcaaggagaacgccuacgucagcgugguguccagcaacuacaaccggcgcuucacccccgagaucgcggagcggccgaagguccgcgggcaggccggccggaucaacuacuacuggacgcuccuggagcccggcgacaccaucaucuucgaggccaacgggaaccugaucgcccccuggcacgccuucgcgcucucccgcggcuucgggagcggcaucaucaccuccaacgccagcauggacgagugcgacaccaagugccagacgccccagggcgccaucaacuccagccugccguuccagaacauccaccccgugaccaucggggagugccccaaguacgugcgguccaccaagcugcgcauggucaccggccuccggaacauccccagcauccagucccgcgggcuguucggcgccaucgccggguucaucgagggcggcuggacggggaugaucgacggcugguacggguaccaccaccagaacgagcagggcagcggguacgcggccgaccagaaguccacccagaacgccaucaacggcaucaccaacaaggugaacagcgugaucgagaagaugaacacccaguucacggccgucggcaaggaguucaacaagcuggagaagcggauggagaaccucaacaagaagguggacgacggguuccuggacaucuggaccuacaacgccgagcugcucgugcugcuggagaacgagcgcacccucgacuuccacgacuccaacgucaagaaccuguacgagaaggucaagagccagcugaagaacaacgcgaaggagaucggcaacgggugcuucgaguucuaccacaagugcaacaacgagugcauggaguccgugaagaacggcaccuacgacuacccgaaguacagcgaggagagcaagcucaaccgggagaagaucgacggggugaagcuggaguccaugggcguguaccagauccuggccaucuacagcacggucgccuccagccucgugcugcuggugucccucggcgccaucagcuucuggaugugcuccaacgggagccugcagugccgcaucugcaucuga

SEQ ID NO: 65653 - RNA, 1701 nt, Artificial Sequence
  derived and/or modified CDS sequence (opt1) from hemagglutinin__InfluenzaA__ABO52071
augaagaccaucaucgcccugagcuacauccucugccugguguucgcccagaagcugcccggcaacgacaacuccaccgcgacgcucugccuggggcaccacgccgucccgaacggcaccaucgugaagaccaucaccaacgaccagaucgaggugacgaacgccaccgagcugguccagaacagcuccaccgggggcaucugcgacagcccccaccagauccucgacggggagaacugcacccugaucgacgcccugcucggcgacccccagugcgacggcuuccagaacaagaagugggaccuguucguggagcgcuccaaggccuacagcaacugcuaccccuacgacgugccggacuacgcgucccugcggagccucgucgccuccagcgggacgcuggaguucaacaacgaguccuucaacuggaccggcgugacccagaacgggaccagcuccgccugcaagcgccggagcaacaacuccuucuucagccgccugaacuggcucacgcaccugaaguucaaguaccccgcccugaacgugaccaugcccaacaacgagaaguucgacaagcucuacaucuggggcguccaccaccccuccaccgacaacgaccagaucagccuguacgcgcaggccuccgggcggaucaccgugagcacgaagcgcagccagcagaccgugaucccgaacaucggcucccggccccgcguccgggacauccccagccgcaucuccaucuacuggaccaucgugaagcccggcgacauccugcucaucaacagcaccgggaaccugaucgccccgcggggcuacuucaagauccgcuccggcaagagcuccaucaugcggagcgacgcccccaucgggaagugcaacuccgagugcaucacgcccaacggcagcauccccaacgacaagccguuccagaacgugaaccgcaucaccuacggggccugcccccgguacgucaagcagaacacccugaagcucgcgaccggcaugcgcaacgugcccgagaagcagacgcgggggaucuucggcgccaucgccggguucaucgagaacggcugggagggcaugguggacgggugguacggcuuccgccaccagaacuccgaggggaucggccaggccgccgaccucaagagcacccaggcggccaucaaccagaucaacgggaagcugaaccggcugaucggcaagaccaacgagaaguuccaccagaucgagaaggaguucuccgaggucgagggccgcauccaggaccuggagaaguacguggaggacaccaagaucgaccuguggagcuacaacgccgagcuccugguggcccuggagaaccagcacacgaucgaccucaccgacuccgagaugaacaagcuguucgagcggaccaagaagcagcugcgcgagaacgccgaggacauggggaacggcugcuucaagaucuaccacaagugcgacaacgcgugcaucgggagcauccgcaacggcaccuacgaccacgacgucuaccgggacgaggcccucaacaaccgcuuccagaucaaggggguggagcugaaguccggcuacaaggacuggauccuguggaucagcuucgccaucuccugcuuccuccugugcguggcccugcucggcuucaucaugugggccugccagaaggggaacauccggugcaacaucugcaucuga

SEQ ID NO: 65654 - RNA, 1701 nt, Artificial Sequence
  derived and/or modified CDS sequence (opt1) from hemagglutinin__InfluenzaA__ABO52225
augaaggccaagcugcucgugcugcugugcgccuucaccgcgaccuacgccgacacgaucugcaucggcuaccacgccaacaacagcaccgacaccgucgacaccgugcucgagaagaacgugacggucacccacuccgugaaccugcuggaggacagccacaacgggaagcucugccgccugaagggcaccgcgccccugcagcucgggaacugcuccguggccggcuggauccuggggaacccggagugcgagagccuguucuccaaggagagcugguccuacaucgccgagacccccaaccccgagaacggcacgugcuaccccggcuacuucgccgacuacgaggagcucaaggagcagcugagcuccgucagcuccuucgagcgguucgagaucuucccgaaggagagcuccuggcccaaccacaccgugaccaagggggugaccgccagcugcucccacaacggcaagagcuccuucuacaagaaccugcucuggcugacggagaagaacgggcuguaccccaaccucagcaaguccuacgucaacaacaaggagaaggaggugcuggugcuguggggcguccaccaccccagcaacaucggggaccagcgcgccaucuaccacaccgagaacgcguacgugagcguggucuccagccacuacucccggcgcuucaccccggagaucgccaagcggcccaaggugcgcgaccaggagggccggaucaacuacuacuggacccuccuggagcccggcgacacgaucaucuucgaggccaacgggaaccugaucgcccccugguacgccuucgcgcucagccgcggcuucggguccggcaucaucaccagcaacgccuccaugggcgagugcgacgccaagugccagaccccgcagggggccaucaacagcucccugcccuuccagaacgugcaccccgucaccaucggcgagugccccaaguacgugcggagcacgaagcugcgcauggugaccgggcuccggaacaucccguccauccagagccgcggccuguucggggccaucgcgggcuucaucgagggcggguggaccggcaugaucgacgggugguacggcuaccaccaccagaacgagcagggguccggcuacgccgccgacaagaaguccacccagaacgccaucgacggcaucacgaacaaggucaacagcgugaucgagaagaugaacacccaguucaccgccguggggaaggaguucaacaagcuggagcggcgcauggagaaccucaacaagaaggucgacgacggcuuccuggacaucuggaccuacaacgcggagcugcucgugcugcuggagaacgagcggacgcucgacuuccacgacagcaacgucaagaaccuguacgagaaggugaagaaccagcugaagaacaacgccaaggagaucgggaacggcugcuucgaguucuaccacaagugcaacgacgagugcauggaguccgugaagaacgggaccuacgacuaccccaaguacagcgaggaguccaagcucaagcgcgagaagaucgacggcgucaagcuggagagcaugggcguguaccagauccuggccaucuacagcaccguggccuccagccucguccugcuggugucccucggggccaucagcuucuggaugugcuccaacggcagccugcagugccggaucugcaucuga

SEQ ID NO: 65655 - RNA, 1689 nt, Artificial Sequence
  derived and/or modified CDS sequence (opt1) from hemagglutinin__InfluenzaA__ABO52236
auggccaucaucuaccugauccuccuguucaccgccgugcgcggcgaccagaucugcaucggguaccacgcgaacaacagcaccgagaaggucgacacgauccuggagcggaacgugaccgugacccacgccaaggacauccucgagaagacccacaacggcaagcugugcaagcugaacgggaucccgccccucgagcugggcgacugcuccaucgccggguggcugcucggcaaccccgagugcgaccgccugcugagcguccccgagugguccuacaucauggagaaggagaacccccgggacggccucugcuacccggggagcuucaacgacuacgaggagcugaagcacuuccuguccagcgugaagcacuucgagaaggugaagauccuccccaaggaccgcuggacgcagcacaccaccaccggcgggucccgggccugcgccgucagcggcaaccccuccuucuuccgcaacaugguguggcugacgaagaaggggagcaacuaccccguggcgaagggcuccuacaacaacaccagcggcgagcagaugcugaucaucuggggcguccaccacccgaacgacgagaccgagcagcggacccucuaccagaacguggggacguacguguccgucgggaccagcacccugaacaagcgcuccacccccgacaucgccacgcggcccaaggugaacggccugggcgggcgcauggaguucagcuggacccuccuggacaugugggacaccaucaacuucgaguccaccggcaaccugaucgcccccgaguacggguucaagaucagcaagcggggcuccagcgggaucaugaagacggagggcacccucggcaacugcgagaccaagugccagaccccgcugggggccaucaacacgacccugcccuuccacaacgugcacccccucaccaucggcgagugccccaaguacgucaagagcgagaagcuggugcuggcgaccgggcuccgcaacgugccgcagaucgagucccggggccuguucggggccaucgccggcuucaucgagggcggguggcagggcauggucgacgggugguacggcuaccaccacagcaacgaccagggguccggcuacgccgccgacaaggagagcacgcagaaggcguucgacggcaucaccaacaaggugaacuccgugaucgagaagaugaacacccaguucgaggccgucgggaaggaguucagcaaccuggagcgccggcucgagaaccugaacaagaagauggaggacggcuuccuggacguguggaccuacaacgccgagcuccuggugcugauggagaacgagcgcacgcucgacuuccacgacuccaacgucaagaaccuguacgacaaggugcggaugcagcugcgcgacaacgccaaggagcucgggaacggcugcuucgaguucuaccacaagugcgacgacgagugcaugaacagcgucaagaacggcaccuacuacuaccccaaguacgaggaggaguccaagcugaaccggaacgagaucaagggggugaagcugagcuccaugggcguguaccagauccucgccaucuacgcgaccgucgccgggagccugucccuggccaucaugauggccggcaucagcuucuggaugugcuccaacgggagccuccagugccgcaucugcaucuga

SEQ ID NO: 65656 - RNA, 1689 nt, Artificial Sequence
  derived and/or modified CDS sequence (opt1) from hemagglutinin__InfluenzaA__ABO52247
auggccaucaucuaccugauccuccuguucaccgccgugcgcggcgaccagaucugcaucggguaccacgcgaacaacagcaccgagaaggucgacacgauccuggagcggaacgugaccgugacccacgccaaggacauccucgagaagacccacaacggcaagcugugcaagcugaacgggaucccgccccucgagcugggcgacugcuccaucgccggguggcugcucggcaaccccgagugcgaccgccugcugcggguccccgaguggagcuacaucauggagaaggagaacccccgcuacucccucugcuacccgggcagcuucaacgacuacgaggagcugaagcaccuccuguccagcgugaagcacuucgagaaggugaagauccugcccaaggacggguggacgcagcacaagaccgacggcggguccaaggccugcgccgucagcggcaagcccuccuucuuccggaacaugguguggcugaccaagaaggggcccaacuacccgguggcgaagcgcagcuacaacaacaccuccggcgagcagaugcucaucaucuggggcguccaccaccccaacgacgaggccgagcagcgggcccuguaccagaagguggggacguacgugagcgccuccaccagcacccugaacaagcgcuccacccccgagaucgcggcccggcccgaggucagcggccucgggucccgcauggaguucagcuggacgcugcuggacgugugggacaccaucuccuucgagagcaccggcaaccucguggccccggaguacggcuucaagaucagcaagcggggguccagcggcaucaugaagaccgaggggacgcugggcaacugcgagaccaagugccagacgccccugggggccaucaacaccacccuccccuuccacaacguccacccccugaccaucggcgagugcccgaaguacgugaaguccgagaagcuggugcucgccaccggcccccgcaacgucccccagaucgagagccgggggcuguucggcgcgaucgccggguucaucgagggcggguggcagggcaugguggacggcugguacggguaccaccacuccaacgaccagggcagcggguacgccgccgacaaggaguccacccagaaggccuucgaccgcaucacgaacaaggugaacagcgucaucgagaagaugaacacccaguucgaggcggugggcaaggaguucuccaaccuggagaagcggcucgagaaccugaacaagaagauggaggacggguuccuggacguguggaccuacaacgccgagcuccugguccugauggagaacgagcgcacccucgacuuccacgacagcaacgugaagaaccuguacgacaagguccggaugcagcugcgcgacaacgugaaggagcucggcaacggcugcuucgaguucuaccacaagugcgacgacgagugcaugaacuccgugaagaacgggacguacgacuaccccaaguacgaggaggagagcaagcugaagcggaacgagaucaagggcgucaagcuguccagcauggggguguaccagauccucgccaucuacgccaccguggccggcucccugagccuggcgaucaugaucgccggcaucuccuucuggaugugcagcaacgggucccuccagugccgcaucugcaucuga

SEQ ID NO: 65657 - RNA, 1701 nt, Artificial Sequence
  derived and/or modified CDS sequence (opt1) from hemagglutinin__InfluenzaA__ABO52258
augaaggccaagcugcucgugcugcugugcgcccucagcgcgaccgacgccgacaccaucugcaucggcuaccacgccaacaacuccacggacaccgucgacaccgugcuggagaagaacgugaccgucacgcacagcgugaaccugcucgaggacucccacaacgggaagcugugccgccugaagggcaucgcgccccuccagcuggggaagugcagcaucgccggcuggauccuggggaacccggagugcgagucccucuucagcaagaaguccuggagcuacaucgccgagacccccaacuccgagaacgggaccugcuaccccggcuacuucgccgacuacgaggagcugcgggagcagcugagcuccgugagcuccuucgagcgcuucgagaucuuccccaaggagagcuccuggccgaagcacaacgucacccgcggggugacggccagcugcucccacaagggcaagugcagcuucuaccggaaccuccuguggcugaccgagaagaacggguccuaccccaaccucagcaagagcuacgugaacaacaaggagaaggagguccuggugcuguggggcgugcaccaccccuccaacaucgaggaccagaagaccaucuaccggaaggagaacgccuacgucagcgugguguccagccacuacaaccgccgguucacccccgagaucgcgaagcgcccgaagguccgggaccaggaggggcgcaucaacuacuacuggacgcuccuggagcccggcgacaccaucaucuucgaggccaacggcaaccugaucgcccccugguacgccuucgcccucucccggggguucggcagcgggaucaucaccuccaacgcgagcauggacgagugcgacgccaagugccagacgccccagggcgccaucaacuccagccugccguuccagaacgugcaccccgugaccaucggcgagugccccaaguacguccgcuccaccaagcugcggauggugaccgggcuccgcaacauccccagcauccagucccggggccuguucggggccaucgccggcuucaucgagggcggcuggaccggcaugaucgacgggugguacggcuaccaccaccagaacgagcaggggagcggcuacgcggccgaccagaaguccacgcagaacgccaucaacgggaucaccaacaaggugaacagcgucaucgagaagaugaacacccaguucaccgccgugggcaaggaguucaacaagcuggagaagcgcauggagaaccucaacaagaagguggacgacggcuuccuggacaucuggacguacaacgccgagcugcucguccugcuggagaacgagcggacccucgacuuccacgacuccaacgugaagaaccuguacgagaaggucaagagccagcugaagaacaacgcgaaggagaucgggaacggcugcuucgaguucuaccacaagugcaacaacgagugcauggaguccgugaagaacgggaccuacgacuacccgaaguacagcgaggagagcaagcucaaccgcgagaagaucgacggcgugaagcuggaguccaugggggucuaccagauccuggccaucuacagcaccguggccuccagccucgugcugcuggucucccucggcgccaucagcuucuggaugugcuccaacggcagccugcagugccggaucugcaucuga

SEQ ID NO: 65658 - RNA, 1701 nt, Artificial Sequence
  derived and/or modified CDS sequence (opt1) from hemagglutinin__InfluenzaA__ABO52280
augaaggcccgccugcucauccugcugugcgcccucagcgcgaccgacgccgacaccaucugcaucggcuaccacgccaacaacuccacggacaccguggacaccguccuggagaagaacgugaccgugacgcacagcgucaaccugcucgaggacucccacaacgggaagcugugccggcugaagggcaucgcgccccuccagcuggggaagugcaacaucgccggcuggauccuggggaacccggagugcgagagccuccuguccaaccgcagcugguccuacaucgccgagacccccaacagcgagaacggcaucugcuaccccggcgacuucgccgacuacgaggagcugcgggagcagcucuccagcguguccagcuucgagcgcuucgagaucuuccccaaggaguccagcuggccgaagcacaacaucacccgcggggugaccgucgccugcucccacgccaagaaguccagcuucuacaagaaccugcuguggcucacggaggcgaacggccuguaccccagccuguccaagagcuacgugaacgaccgggagaaggaggugcucguccuguggggcgugcaccaccccagcaacaucgaggaccagcggacccuguaccgcaaggagaacgccuacguguccgucgugagcuccaacuacaaccggcgcuucacccccgagaucgccgagcggccgaaggugcgcgggcagcccgggcggaugaacuacuacuggacccuccuggagcccggcgacaagaucaucuucgaggccaacggcaaccugaucgcccccugguacgcguucgcccucagccgcgggccgggcuccgggaucaucacgagcaacgccuccauggacgagugcgacaccaagugccagacgccccagggcgccaucaacagcucccugcccuuccagaacauccaccccgucaccaucggcgagugcccgaaguacgugcggagcaccaagcugcgcauggugaccgggcuccggaacauccccuccauccagagccgcggccuguucggggccaucgcgggcuucaucgagggcggguggaccggcauggucgacgggugguacggcuaccaccaccagaacgagcagggguccggcuacgccgccgaccagaaguccacccagaacgccaucaacgggaucacgaacaaggugaacagcgugaucgagaagaugaacacccaguucaccgccgucggcaaggaguucaacaagcuggagaagcggauggagaaccucaacaagaagguggacgacggcuuccuggacaucuggaccuacaacgcggagcugcucgugcugcuggagaacgagcgcacgcucgacuuccacgacagcaacgucaagaaccuguacgagaaggugaagaaccagcugcggaacaacgccaaggagaucgggaacggcugcuucgaguucuaccacaagugcgacaacgagugcauggaguccgucaagaacgggaccuacgacuaccccaaguacagcgaggaguccaagcucaaccgcgccaagaucgacggcgugaagcuggagagcauggggguguaccagauccuggccaucuacagcaccgucgccuccagccucgugcugcuggugucccucggcgcgaucagcuucuggaugugcuccaacggcagccugcagugccgcaucugcaucuga

SEQ ID NO: 65659 - RNA, 1689 nt, Artificial Sequence
  derived and/or modified CDS sequence (opt1) from hemagglutinin__InfluenzaA__ABO52302
auggccaucaucuaccugauccuccuguucaccgccgugcgcggcgaccagaucugcaucggguaccacgcgaacaacagcaccgagaaggucgacacgauccuggagcggaacgugaccgugacccacgccaaggacauccucgagaagacccacaacggcaagcugugcaagcugaacgggaucccgccccucgagcugggcaacugcuccaucgccggguggcugcucggcaaccccgagugcgaccgccugcugagcguccccgagugguccuacaucauggagaaggagaacccccgggacggccucugcuacccggggagcuucaacgacuacgaggagcugaagcaccuccuguccagcgugaagcacuucgagaaggugaagauccugcccaaggaccgcuggacgcagcacaccaccaccggcgggucccgggccugcgccgucagcggcaaccccuccuucuuccgcaacaugguguggcugacgaagaaggggagcaacuaccccguggcgaagggcuccuacaacaacaccagcggcgagcagaugcucaucaucuggggcguccaccacccgaacgacgagaccgagcagcggacccuguaccagaacguggggacguacguguccgucgggaccagcacccugaacaagcgcuccacccccgacaucgccacgcggcccaaggugaacggccucggcgggcgcauggaguucagcuggacccugcuggacaugugggacaccaucaacuucgaguccaccggcaaccucaucgcccccgaguacggguucaagaucagcaagcggggcuccagcgggaucaugaagacggagggcacccugggcaacugcgagaccaagugccagaccccgcugggggccaucaacacgacccuccccuuccacaacgugcacccccugaccaucggcgagugccccaaguacgucaagagcgagaagcuggugcucgcgaccgggcugcgcaacgugccgcagaucgagucccggggccuguucggggccaucgccggcuucaucgagggcggguggcagggcauggucgacgggugguacggcuaccaccacagcaacgaccagggguccggcuacgccgccgacaaggagagcacgcagaaggcguucgacggcaucaccaacaaggugaacuccgugaucgagaagaugaacacccaguucgaggccgucgggaaggaguucagcaaccucgagcgccggcuggagaaccugaacaagaagauggaggacggcuuccucgacguguggaccuacaacgccgagcugcuggugcucauggagaacgagcgcacgcuggacuuccacgacuccaacgucaagaaccuguacgacaaggugcggaugcagcuccgcgacaacgucaaggagcuggggaacggcugcuucgaguucuaccacaagugcgacgacgagugcaugaacagcgugaagaacggcaccuacgacuaccccaaguacgaggaggaguccaagcugaaccggaacgagaucaagggggugaagcucagcuccaugggcaucuaccagauccuggccaucuacgccaccgucgcggggagccugucccucgccaucaugauggccggcaucagcuucuggaugugcuccaacgggagccugcagugccgcaucugcaucuga

SEQ ID NO: 65660 - RNA, 1701 nt, Artificial Sequence
  derived and/or modified CDS sequence (opt1) from hemagglutinin__InfluenzaA__ABO52313
augaagaccaucaucgcccugagcuacaucuucugccucguguucgcccagaaccugcccggcaacgacaacuccaccgcgacgcugugccucgggcaccacgccgucccgaacggcacccuggugaagaccaucaccaacgaccagaucgaggugacgaacgccaccgagcugguccagagcuccagcaccgggaagaucugcaacaacccccaccgcauccucgacggcaucaacugcacccugaucgacgcccugcucggggacccccacugcgacggcuuccagaacgagaagugggaccuguucguggagcgguccaaggccuucagcaacugcuaccccuacgacgugccggacuacgcgucccugcgcagccucgucgccuccagcggcacgcuggaguucaucaacgagggguucaacuggaccggcgugacccagaacgggggcuccaacgccugcaagcgggggcccgacagcggcuucuucucccgccugaacuggcucuacaagagcggcuccaccuaccccgugcugaacgucacgaugcccaacaacgacaacuucgacaagcuguacaucuggggcgugcaccacccgagcaccgaccaggagcagaccaaccucuacgugcaggccuccgggcgggucaccgugagcacgaagcgcucccagcagaccaucauccccaacguggggagccggcccuggguccgcggccugagcucccggaucagcaucuacuggaccaucgugaagcccggcgacauccuggugaucaacuccaacgggaaccucaucgcgccgcgcggccacuucaagaugcggaccggcaagagcuccaucaugcgcagcgacgcccccaucgggacgugcuccagcgagugcaucacccccaacggguccauccccaacgacaagccguuccagaacgucaacaagaucaccuacggcgccugccccaaguacgugaagcagaacacccugaagcuggccacgggcaugcggaacgugcccgagaagcagacccgcgggaucuucggcgccaucgcgggguucaucgagaacggcugggaggggaugaucgacggcugguacggcuuccggcaccgcaacagcgaggggaccggccaggccgccgaccucaaguccacccaggccgccaucgaccagaucaacgggaagcugaaccgggucaucgagaagacgaacgagaaguuccaccagaucgagaaggaguucagcgagguggagggccgcauccaggaccuggagaaguacguggaggacaccaagaucgaccucugguccuacaacgcggagcugcuggucgcccucgagaaccagcacaccaucgaccugaccgacagcgagaugaacaagcuguucgagaagacgcggcgccagcuccgggagaacgccgaggacauggggaacggcugcuucaagaucuaccacaagugcgacaacgccugcaucggcuccauccgcaacgggaccuacgaccacgacguguaccgcgacgaggcccugaacaaccgguuccagaucaagggcgucgagcucaagagcggguacaaggacuggauccuguggaucuccuucgcgaucagcugcuuccugcugugcguggugcuccugggcuucaucaugugggccugccagaagggcaacauccgcugcaacaucugcaucuga

SEQ ID NO: 65661 - RNA, 1701 nt, Artificial Sequence
  derived and/or modified CDS sequence (opt1) from hemagglutinin__InfluenzaA__ABO52335
augaagaccaucaucgcccugagcuacaucuucugccucgugcugggccaggacuucccccgcaacgacaacuccaccgccacgcugugccucgggcaccacgcggucccgaacggcacccuggugaagaccaucaccaacgaccagaucgaggugacgaacgccaccgagcugguccagagcuccagcaccgggaagaucugcaacaacccccaccggauccucgacggcaucgacugcacccugaucgacgcccugcucggggacccccacugcgacggcuuccagaacgagacgugggaccuguucguggagcgcuccaaggccuucagcaacugcuaccccuacgacgugccggacuacgccucccugcggagccucgucgcguccagcggcacccuggaguucaucaacgagggguucaccuggaccggcgugacgcagaacgggggcuccaacgccugcaagcgcgggcccgacagcggcuucuucucccggcugaacuggcucuacaagagcggcaacaccuaccccgugcugaacgucaccaugcccaacaacgacaacuucgacaagcuguacaucuggggcgugcaccacccguccaccgaccaggaccagacgagccucuacgugcaggccuccggccgcgucaccgugagcaccaagcggucccagcagaccgugauccccaacaucgggccccgccccuggguccggggccugagcagccgcaucuccaucuacuggacgaucgugaagccgggcgacauccugcucaucaacagcaacgggaaccugaucgcgccccggggcuacuucaagaugcgcaccgggaaguccagcaucaugcgguccgacgcccccaucgggaccugcaucagcgagugcaucacccccaacggguccaucccgaacgacaagcccuuccagaacgugaacaagaucacguacggcgccugccccaaguacgucaagcagaacacccugaagcucgccaccggcaugcgcaacgugcccgagaagcagacccgggggaucuucggcgccaucgccggguucaucgagaacggcugggaggggaugaucgacggcugguacggcuuccgccaccagaacagcgaggggacgggccaggcggccgaccugaaguccacccaggccgccaucgaccagaucaacgggaagcugaaccgggugaucgagaagaccaacgagaaguuccaccagaucgagaaggaguucagcgaggucgagggccgcauccaggaccucgagaaguacguggaggacaccaagaucgaccugugguccuacaacgccgagcugcucguggcgcuggagaaccagcacacgaucgaccugaccgacagcgagaugaacaagcuguucgagaagacccggcgccagcuccgggagaacgccgaggacauggggaacggcugcuucaagaucuaccaccgcugcgacaacgccugcaucggcuccauccgcaacgggaccuacgaccacgacgucuaccgggacgaggcccugaacaaccgcuuccagaucaagggcguggagcucaagagcggguacaaggacuggauccuguggaucuccuucgccaucagcugcuuccugcucugcgucgugcugcugggcuucaucaugugggcgugccagaagggcaacauccggugcaacaucugcaucuga

SEQ ID NO: 65662 - RNA, 1701 nt, Artificial Sequence
  derived and/or modified CDS sequence (opt1) from hemagglutinin__InfluenzaA__ABO52346
augaagaccaucaucgcccugagcuacaucuucugccucguguucgcccaggaccugcccggcaacgacaacuccaccgcgacgcugugccucgggcaccacgccgucccgaacggcacccuggugaagaccaucaccaacgaccagaucgaggugacgaacgccaccgagcugguccagagcuccagcaccgggaagaucugcgacaacccccaccgcauccucgacggcaucaacugcacccugaucgacgcccugcucggggacccccacugcgacggcuuccagaacgagaagugggaccuguucguggagcgguccaaggccuucagcgacugcuaccccuacgacgugccggacuacgcgucccugcgcagccucgucgccuccagcggcacgcuggaguucaucaacgagggguucaacuggaccggcgugacccagaacgggggcuccagcgccugcaagcgggggcccgacaacggcuucuucucccgccugaacuggcucuacaagagcggcuccaccuaccccgugcagaacgucacgaugcccaacaacgacaacagcgacaagcuguacaucuggggcgugcaccacccguccaccgacaaggagcagaccgaccuguacgugcaggccagcgggaaggucaccguguccacgaagcggagccagcagaccgugauccccaacgucgggagccgccccugggugcggggccucuccagccgcguguccaucuacuggaccaucgucaagcccggcgacauccuggugaucaacagcaacgggaaccugaucgcgccgcggggcuacuucaagaugcgcaccgggaaguccagcaucaugcgguccgacgcccccaucggcacgugcagcuccgagugcaucacccccaacgggagcauccccaacgacaagccguuccagaacgugaacaagaucaccuacggcgccugccccaaguacgucaagcagaacacccucaagcuggccacgggcaugcgcaacgugcccgagaagcagacccgggggaucuucggcgccaucgcgggguucaucgagaacggcugggaggggaugaucgacggcugguacggcuuccgccaccagaacuccgaggggaccggccaggccgccgaccucaagagcacccaggccgccaucgaccagaucaacgggaagcugaaccgggugaucgagaagacgaacgagaaguuccaccagaucgagaaggaguucuccgaggucgagggccgcauccaggaccuggagaaguacguggaggacaccaagaucgaccuguggagcuacaacgcggagcuccuggucgcccuggagaaccagcacaccaucgaccucaccgacuccgagaugaacaagcuguucgagaagacgcggcgccagcugcgggagaacgccgaggacauggggaacggcugcuucaagaucuaccacaagugcgacaacgccugcaucggcagcauccgcaacgggaccuacgaccacgacguguaccgggacgaggcccucaacaaccgcuuccagaucaagggcguggagcugaaguccggguacaaggacuggauccuguggaucagcuucgcgaucuccugcuuccuccugugcgucgugcugcucggcuucaucaugugggccugccagaagggcaacauccgcugcaacaucugcaucuga

SEQ ID NO: 65663 - RNA, 1701 nt, Artificial Sequence
  derived and/or modified CDS sequence (opt1) from hemagglutinin__InfluenzaA__ABO52357
augaagaccaucaucgcccugagcuacaucuucugccucgcccugggccaggaccugcccgggaacgacaacuccaccgcgacgcucugccugggccaccacgccgugccgaacgggacccuggucaagaccaucaccgacgaccagaucgaggugacgaacgccaccgagcucgugcagagcuccagcaccggcaagaucugcaacaacccccaccgcauccuggacgggaucgacugcacccugaucgacgcccuccugggcgacccccacugcgacgucuuccagaacgagacgugggaccuguucguggagcgguccaaggccuucagcaacugcuaccccuacgacgugccggacuacgcgucccuccgcagccuggucgccuccagcggcacccuggaguucaucaccgagggguucaccuggacgggcgugacccagaacgggggcuccaacgccugcaagcgggggcccggcagcggcuucuucucccgccucaacuggcugaccaagagcggguccaccuaccccgugcugaacgucacgaugcccaacaacgacaacuucgacaagcucuacaucuggggcgugcaccacccgagcaccaaccaggagcagaccucccuguacgugcaggccagcgggcgggucaccguguccacgcgccggagccagcagaccaucauccccaacaucggcagccgccccugggugcggggccuguccagccgcaucuccaucuacuggaccaucgucaagcccggggacgugcucgugaucaacagcaacggcaaccugaucgcgccgcggggguacuucaagaugcgcaccggcaaguccagcaucaugcgguccgacgcccccaucgacacgugcaucuucgagugcaucacccccaacgggagcauccccaacgacaagccguuccagaacgucaacaagaucaccuacggcgccugccccaaguacgugaagcagaacacccugaagcucgccacgggcaugcgcaacgugcccgagaagcagacccgggggaucuucggcgccaucgcgggguucaucgagaacggcugggaggggaugaucgacggcugguacggcuuccgccaccagaacuccgaggggaccggccaggccgccgaccucaagagcacccaggccgccaucgaccagaucaacgggaagcugaaccgggucaucgagaagacgaacgagaaguuccaccagaucgagaaggaguucuccgagguggagggccgcauccaggaccucgagaaguacguggaggacaccaagaucgaccuguggagcuacaacgcggagcugcucgucgcccuggagaaccagcacaccaucgaccugaccgacuccgagaugaacaagcuguucgagaagacgcggcgccagcugcgggagaacgccgaggacauggggaacggcugcuucaagaucuaccacaagugcgacaacgccugcaucgagagcauccgcaacggcaccuacgaccacgacguguaccgcgacgaggcccugaacaaccgguuccagaucaagggggucgagcucaaguccggcuacaaggacuggauccuguggaucagcuucgcgaucuccugcuuccugcucugcguggugcugcugggguucaucaugugggccugccagcgcggcaacauccggugcaacaucugcaucuga

SEQ ID NO: 65664 - RNA, 1701 nt, Artificial Sequence
  derived and/or modified CDS sequence (opt1) from hemagglutinin__InfluenzaA__ABO52368
augaagaccaucaucgcccugagcuacaucuucugccucgcccugggccaggaccugcccgggaacgacaacuccaccgcgacgcucugccugggccaccacgccgugccgaacgggacccuggucaagaccaucaccaacgaccagaucgaggugacgaacgccaccgagcucgugcagagcuccagcaccggcaagaucugcaacaacccccaccgcauccuggacgggaucaacugcacccugaucgacgcccuccugggcgacccccacugcgacgucuuccaggacgagacgugggaccuguucguggagcgguccaaggccuucagcaacugcuaccccuacgacgugccggacuacgcgucccuccgcagccuggucgccuccagcggcacccuggaguucaucaccgagggguucaccuggacgggcgugacccagaacgggggcuccaacgccugcaagcgggggcccggcagcggcuucuucucccgccucaacuggcugaccaagagcggguccaccuaccccgugcugaacgucacgaugcccaacaacgacaacuucgacaagcucuacaucuggggcgugcaccacccgagcaccaaccaggagcagaccucccuguacgugcaggccagcgggcgggucaccguguccacgcgccggagccagcagaccaucauccccaacaucggcagccgccccugggugcggggccuguccagccgcaucuccaucuacuggaccaucgucaagcccggggacgugcucgugaucaacagcaacggcaaccugaucgcgccgcggggguacuucaagaugcgcaccggcaaguccagcaucaugcgguccgacgcccccaucgacacgugcaucagcgagugcaucacccccaacggguccauccccaacgacaagccguuccagaacgucaacaagaucaccuacggcgccugccccaaguacgugaagcagaacacccugaagcucgccacgggcaugcgcaacgugcccgagaagcagacccgggggcuguucggcgccaucgcgggguucaucgagaacggcugggaggggaugaucgacggcugguacggcuuccgccaccagaacagcgaggggaccggccaggccgccgaccugaaguccacccaggccgccaucgaccagaucaacgggaagcucaaccgggucaucgagaagacgaacgagaaguuccaccagaucgagaaggaguucagcgagguggagggccgcauccaggaccuggagaaguacguggaggacaccaagaucgaccugugguccuacaacgcggagcuccuggucgcccuggagaaccagcacaccaucgaccucaccgacagcgagaugaacaagcuguucgagaagacgcggcgccagcugcgggagaacgccgaggacauggggaacggcugcuucaagaucuaccacaagugcgacaacgccugcaucgaguccauccgcaacggcaccuacgaccacgacguguaccgcgacgaggcccucaacaaccgguuccagaucaagggggucgagcucaagagcggcuacaaggacuggauccuguggaucuccuucgcgaucagcugcuuccugcugugcguggugcugcucggguucaucaugugggccugccagcgcggcaacauccggugcaacaucugcaucuga

SEQ ID NO: 65665 - RNA, 1701 nt, Artificial Sequence
  derived and/or modified CDS sequence (opt1) from hemagglutinin__InfluenzaA__ABO52797
augaaggccaagcugcucgugcugcugugcgcccucagcgcgaccgacgccgacaccaucugcaucggcuaccacgccaacaacuccacggacaccgucgacaccgugcuggagaagaacgugaccgucacgcacagcgugaaccugcucgaggacaaccacaacgggaagcugugcaagcugaagggcaucgcgccccuccagcuggggaagugcuccaucgccggcuggauccuggggaacccggagugcgagagccucuucuccaagaaguccuggagcuacaucgccgagacccccaacagcgagaacgggaccugcuaccccggcuacuucgccgacuacgaggagcugcgcgagcagcuguccagcguguccagcuucgagcgguucgagaucuuccccaaggaguccagcuggccgaaccacaacgucaccaagggggugacggccuccugcagccacaagggcaaguccagcuucuaccgcaaccuccuguggcugaccgagaagaacggguccuaccccagccucagcaaguccuacgugaacaacaaggagaaggagguccuggugcuguggggcgugcaccaccccagcaacaucaaggaccagaagaccaucuaccggaaggagaacgccuacgucuccguggugagcucccacuacaaccgccgguucacccccgagaucgcgaagcgcccgaagguccgggaccaggaggggcgcaucaacuacuacuggacgcuccuggagcccggcgacaccaucaucuucgaggccaacggcaaccugaucgcccccugguacgccuucgcccucagccggggguucggcuccgggaucaucaccagcaacgcguccauggacgagugcgacgccaagugccagacgccccagggcgccaucaacagcucccugccguuccagaacgugcaccccgugaccaucggcgagugccccaaguacguccgcagcaccaagcugcggauggugaccgggcuccgcaacauccccuccauccagagccggggccuguucggggccaucgccggcuucaucgagggcggcuggaccggcaugaucgacgggugguacggcuaccaccaccagaacgagcagggguccggcuacgcggccgaccagaaguccacgcagagcgccaucaacgggaucaccaacaaggugaacagcaucaucgagaagaugaacacccaguucaccgccgucggcaaggaguucaacaagcuggagaagcgcauggagaaccucaacaagaagguggacgacggcuuccuggacaucuggacguacaacgccgagcugcucgugcugcuggagaacgagcggacccucgacuuccacgacuccaacgucaagaaccuguacgagaaggucaagagccagcugaagaacaacgcgaaggagaucgggaacggcugcuucgaguucuaccacaagugcaacaacgagugcauggagagcgugaagaacgggaccuacgacuacccgaaguacuccgaggagagcaagcucaaccgcgagaagaucgacggcgugaagcuggaguccauggggguguaccagauccuggccaucuacagcaccgucgccuccagccucgugcugcuggugucccucggcgccaucagcuucuggaugugcuccaacggcagccugcagugccggaucugcaucuga

SEQ ID NO: 65666 - RNA, 1698 nt, Artificial Sequence; identical to SEQ ID NO: 64766
  derived and/or modified CDS sequence (opt1) from hemagglutinin__InfluenzaA__ABP49217

SEQ ID NO: 65667 - RNA, 1698 nt, Artificial Sequence
  derived and/or modified CDS sequence (opt1) from hemagglutinin__InfluenzaA__ABP49305
augaaggccaagcugauggugcuccugugcaccuucaccgccacguacgcggacaccaucugcaucggcuaccacgccaacaacagcaccgacaccgucgacacggugcuggagaagaacgugaccgucacccacuccgugaaccuccuggaggacagccacaacgggaagcugugccuccugaagggcaucgcgccccugcagcucgggaacugcuccguggccggcuggauccuggggaacccggagugcgagcugcucaucagcaaggaguccuggagcuacaucgucgagacccccaaccccgagaacggcacgugcuaccccggcuacuucgccgacuacgaggagcugcgcgagcagcuguccagcguguccagcuucgagcgguucgagaucuucccgaaggaguccagcuggcccaaccacaccgugaccggggucuccgccagcugcucccacaacggcaagagcuccuucuaccgcaaccuccuguggcugaccgggaagaacggccucuaccccaaccugagcaaguccuacgccaacaacaaggagaaggaggugcuggugcucuggggcguccaccacccgcccaacaucggggaccagcgggcccuguaccacacggagaacgccuacgugagcguggucagcucccacuacagccgccgguucacccccgagaucgcgaagcgccccaaggugcgggaccaggagggccgcaucaacuacuacuggacccugcucgagcccggggacaccaucaucuucgaggccaacggcaaccugaucgccccgugguacgccuucgcccugucccggggguucggcagcggcaucaucacguccaacgcgcccaugggggagugcgacgccaagugccagacgccccagggcgccaucaacagcucccuccccuuccagaacgugcacccggucaccaucggggagugccccaaguacgugcgcagcgccaagcugcggauggugaccggccugcgcaacauccccuccauccagagccggggccucuucggggccaucgcgggcuucaucgagggcggguggaccgggauggucgacggcugguacggguaccaccaccagaacgagcagggcuccggcuacgccgccgaccagaaguccacccagaacgccaucaacgggaucaccaacaaggugaacagcgugaucgagaagaugaacacccaguucacggccgucggcaaggaguucaacaagcuggagcgccggauggagaaccugaacaagaagguggacgacggguuccucgacaucuggaccuacaacgcggagcugcugguccuccuggagaacgagcgcacccuggacuuccacgacagcaacgugaagaaccucuacgagaaggugaagucccagcugaagaacaacgccaaggagaucggcaacgggugcuucgaguucuaccacaagugcaacaacgagugcauggagagcgucaagaacggcaccuacgacuaccccaaguacuccgaggagagcaagcugaaccgggagaagaucgacggcgugaagcucgaguccauggggguguaccagauccuggccaucuacagcacggucgccagcucccuggugcuccuggugagccugggcgccaucuccuucuggaugugcagcaacgggucccuccagugccgcaucugcaucuga

SEQ ID NO: 65668 - RNA, 1701 nt, Artificial Sequence
  derived and/or modified CDS sequence (opt1) from hemagglutinin__InfluenzaA__ABP49316
augaaggccaagcugcucgugcugcugugcgcccucagcgcgaccgacgccgacaccaucugcaucggcuaccacgccaacaacuccacggacaccgucgacaccgugcuggagaagaacgugaccgucacgcacagcgugaaccugcucgaggacucccacaacgggaagcugugccgccugaagggcaucgcgccccuccagcuggggaagugcaacaucgccggcuggauccuggggaacccggagugcgagagccucuucuccaagaaguccuggagcuacaucgccgagacccccaacagcgagaacgggaccugcuaccccggcuacuucgccgacuacgaggagcugcgggagcagcuguccagcguguccagcuucgagcgcuucgagaucuuccccaaggagcgguccuggccgaagcacaacaucacccgcggcgucacggccgccugcagccacaagggcaaguccagcuucuaccggaaccuccuguggcugaccgagaagaacggguccuaccccaaccucaagaaguccuacgugaacaacaaggagaaggaggugcugguccuguggggcgugcaccaccccagcaacaucgaggaccagaagacccucuaccgcaaggagaacgcguacgugagcgucgugagcuccaacuacaacaagcgguucacccccgagaucgccgagcgcccgaaggugcgggggcaggccggccgcaucaacuacuacuggacgcugcuggagcccggcgacaccaucaucuucgaggccaacgggaaccucaucgcccccuggcacgcguucgcccugagccggggcuucggguccggcaucaucaccagcaacgccuccauggacgagugcgacaccaagugccagacgccccagggcgccaucaacagcucccugccguuccagaacauccaccccgucaccaucggggagugccccaaguacgugcgcagcaccaagcuccggauggugaccggccugcgcaacauccccuccauccagagccgggggcuguucggcgccaucgcgggguucaucgagggcggcuggacggggaugaucgacggcugguacggguaccaccaccagaacgagcagggcuccggguacgccgccgaccagaaguccacccagaacgccaucaacggcaucaccaacaaggucaacagcgugaucgagaagaugaacacccaguucacggccgugggcaaggaguucaacaagcucgagaagcgcauggagaaccugaacaagaaggucgacgacggguuccuggacaucuggaccuacaacgcggagcuccuggugcugcucgagaacgagcggacccuggacuuccacgacagcaacgugaagaaccuguacgagaaggucaagucccagcucaagaacaacgccaaggagaucggcaacgggugcuucgaguucuaccacaagugcaacaacgagugcauggagagcgugaagaacggcaccuacgacuacccgaaguacuccgaggagagcaagcugaaccgcgagaagaucgacggggucaagcuggaguccaugggcguguaccagauccucgccaucuacagcacgguggccagcucccugguccugcucgugagccugggcgccaucuccuucuggaugugcagcaacgggucccugcagugccggaucugcaucuga

SEQ ID NO: 65669 - RNA, 1701 nt, Artificial Sequence
  derived and/or modified CDS sequence (opt1) from hemagglutinin__InfluenzaA__ABP49327
augaaggcccgccugcucgugcugcugugcgcccucgcggccaccgacgccgacaccaucugcaucggcuaccacgccaacaacagcacggacaccgucgacaccgugcuggagaagaacgugaccgucacgcacuccgugaaccugcucgaggacagccacaacgggaagcugugccggcugaagggcaucgcgccccuccagcugcgcaagugcaacaucgccggguggauccugggcaacccggagugcgagucccuccugagcgagcgguccuggagcuacaucguggagacccccaacuccgagaacgggaccugcuaccccggcgacuucaccaacuacgaggagcugcgcgagcagcucagcuccgucagcuccuucgagcgguucgagaucuuccccaaggagagcuccuggccgaagcacaacacgacccgcggcgugaccgccgccugcagccacgccgggaaguccagcuucuaccggaaccugcuguggcucaccgagaaggacggcuccuaccccaaccugaacaacagcuacgugaacaagaaggggaaggagguccuggugcucuggggcgugcaccaccccuccaacaucaaggaccagcagacgcuguaccagaaggagaacgcguacgucagcguggugagcuccaacuacaaccgccgguucacccccgagaucgccgagcgcccgaagguccgggggcaggccggccgcaugaacuacuacuggacccugcucaagcccggcgacaccaucauguucgaggccaacgggaaccugaucgcccccugguacgcguucgcccugagccggggcuucggguccggcaucaucacgagcaacgccuccaugcacgagugcgacaccaagugccagacgccccagggcgccaucaacagcucccucccguuccagaacauccaccccgugaccaucggggagugccccaaguacgugcgcagcaccaagcugcggauggucaccggccugcgcaacauccccuccauccagagccggggccucuucggggccaucgcgggguucaucgagggcggcuggaccgggaugaucgacggcugguacggguaccaccaccagaacgagcagggcuccggguacgccgccgaccagaaguccacccagaacgccaucaacggcaucacgaacaaggugaacagcgugaucgagaagaugaacacccaguucaccgccgucggcaaggaguucaacaaccuggagaagcgcauggagaaccugaacaagaagguggacgacggguuccucgacaucuggaccuacaacgcggagcugcugauccuccuggagaacgagcggacgcuggacuuccacgacagcaacgugaagaaccucuacgagaaggucaagucccagcugcgcaacaacgccaaggagaucggcaacgggugcuucgaguucuaccacaagugcaacaacgagugcauggagagcgugaagaacggcaccuacgacuacccgaaguacuccgaggagagcaagcugaaccgggagaagaucgacggggucaagcucgaguccaugggcguguaccagauccuggccaucuacagcaccguggccagcucccugguccuccuggugagccugggcgccaucuccuucuggaugugcagcaacgggucccuccagugccgcaucugcaucuga

SEQ ID NO: 65670 - RNA, 1701 nt, Artificial Sequence
  derived and/or modified CDS sequence (opt1) from hemagglutinin__InfluenzaA__ABP49338
augaaggccaagcugcucgugcugcugugcgcccucagcgcgaccgacgccgacaccaucugcaucggcuaccacgccaacaacuccacggacaccgucgacaccgugcuggagaagaacgugaccgucacgcacagcgugaaccugcucgaggacucccacaacgggaagcugugccgccugaagggcaucgcgccccuccagcuggggaagugcagcaucgccggcuggauccuggggaacccggagugcgagucccucuucagcaagaaguccuggagcuacaucgccgagacccccaacuccgagaacgggaccugcuaccccggcuacuucgccgacuacgaggagcugcgggagcagcugagcuccgugagcuccuucgagcgcuucgagaucuuccccaaggagcggagcuggccgaagcacaacgucacccgcggcgugacggccuccugcagccacaagggcaaguccagcuucuaccggaaccuccuguggcugaccgagaagaacggguccuaccccaaccucagcaagagcuacgugaacaacaaggagaaggagguccuggugcuguggggcgugcaccaccccuccaacaucgaggaccagaagaccaucuaccgcaaggagaacgccuacgucagcgugguguccagcaacuacaaccggcgcuucacccccgagaucgcgaagcggccgaagguccgcgggcaggagggccggaucaacuacuacuggacgcuccuggagcccggcgacaccaucaucuucgaggccaacgggaaccugaucgcccccugguacgccuucgcccucucccgcggcuucgggagcggcaucaucaccuccaacgcgagcauggacgagugcgacaccaagugccagacgccccagggcgccaucaacuccagccugccguuccagaacgugcaccccgugaccaucggggagugccccaaguacguccgguccaccaagcugcgcauggugaccggccuccggaacauccccagcauccagucccgcgggcuguucggcgccaucgccggguucaucgagggcggcuggacggggaugaucgacggcugguacggguaccaccaccagaacgagcagggcagcggguacgccgcggaccagaaguccacccagaacgccaucaacggcaucaccaacaaggugaacagcgucaucgagaagaugaacacccaguucacggccgugggcaaggaguucaacaagcuggagaagcggauggagaaccucaacaagaagguggacgacggguuccuggacaucuggaccuacaacgccgagcugcucguccugcuggagaacgagcgcacccucgacuuccacgacuccaacgugaagaaccuguacgagaaggucaagagccagcugaagaacaacgccaaggagaucggcaacgggugcuucgaguucuaccacaagugcaacaacgagugcauggaguccgugaagaacggcaccuacgacuacccgaaguacagcgaggagagcaagcucaaccgggagaagaucgacggggugaagcuggaguccaugggcgucuaccagauccuggcgaucuacagcacgguggccuccagccucgugcugcuggucucccucggcgccaucagcuucuggaugugcuccaacgggagccugcagugccgcaucugcaucuga

SEQ ID NO: 65671 - RNA, 1701 nt, Artificial Sequence
  derived and/or modified CDS sequence (opt1) from hemagglutinin__InfluenzaA__ABP49349
augaaggccaagcugcucgugcugcugugcgcccucagcgcgaccgacgccgacaccaucugcaucggcuaccacgccaacaacuccacggacaccgucgacaccgugcuggagaagaacgugaccgucacgcacagcgugaaccugcucgaggacaaccacaacgggaagcugugcaagcugaagggcaucgcgccccuccagcuggggaagugcuccaucgccggcuggauccuggggaacccggagugcgagagccucuucuccaagaaguccuggagcuacaucgccgagacccccaacagcgagaacgggaccugcuaccccggcuacuucgccgacuacgaggagcugcgcgagcagcuguccagcguguccagcuucgagcgguucgagaucuuccccaaggaguccagcuggccgaaccacaacgucaccaagggggugacggccuccugcagccacaagggcaaguccagcuucuaccgcaaccuccuguggcugaccgagaagaacggguccuaccccaaccucagcaagagcuacgugaacaacaaggagaaggagguccuggugcuguggggcauccaccaccccuccaacaucgaggaccagaagaccaucuaccggaaggagaacgccuacgugagcgucguguccagccacuacaaccgccgguucacccccgagaucgcgaagcgcccgaaggugcgggaccaggaggggcgcaucaacuacuacuggacgcuccuggagcccggcgacaccaucaucuucgaggccaacggcaaccugaucgcccccugguacgccuucgcccucucccggggguucggcagcgggaucaucaccuccaacgcgagcauggacgagugcgacgccaagugccagacgccccugggcgccaucaacuccagccugccguuccagaacguccaccccgugaccaucggcgagugccccaaguacgugcgcuccaccaagcuccggauggucaccgggcugcgcaacauccccagcauccagucccggggccuguucggggccaucgccggcuucaucgagggcggcuggaccggcaugaucgacgggugguacggcuaccaccaccagaacgagcaggggagcggcuacgcggccgaccagaaguccacgcagagcgccaucaacgggaucaccaacaaggugaacuccaucaucgagaagaugaacacccaguucaccgccgugggcaaggaguucaacaagcucgagaagcgcauggagaaccugaacaagaaggucgacgacggcuuccuggacaucuggacguacaacgccgagcuccuggugcugcucgagaacgagcggacccuggacuuccacgacagcaacgugaagaaccuguacgagaaggucaagucccagcucaagaacaacgcgaaggagaucgggaacggcugcuucgaguucuaccacaagugcaacaacgagugcauggagagcgugaagaacgggaccuacgacuacccgaaguacagcgaggaguccaagcugaaccgcgagaagaucgacggcgucaagcuggagagcauggggguguaccagauccucgccaucuacuccaccguggccagcucccugguccugcucgugagccugggcgccaucuccuucuggaugugcagcaacggcucccugcagugccggaucugcaucuga

SEQ ID NO: 65672 - RNA, 1701 nt, Artificial Sequence
  derived and/or modified CDS sequence (opt1) from hemagglutinin__InfluenzaA__ABP49360
augaaggccaagcugcucauccugcugugcgccuucaccgcgaccgacgccgacacgaucugcaucggcuaccacgccaacaacagcaccgacaccguggacaccguccucgagaagaacgugacggugacccacuccgucaaccugcuggaggacagccacaacgggaagcucugccgccugaagggcaucgcgccccugcagcucgggaacugcuccaucgccggcuggauccuggggaacccggagugcgagagccuguucuccaagaaguccuggagcuacaucgccgagacccccaacagcgagaacgggaccugcuaccccggcuacuucgccgacuacgaggagcuccgggagcagcuguccagcguguccagcuucgagcgcuucgagaucuuccccaaggaguccagcuggccgaaccacacggugaccaagggggucaccgccuccugcagccacaacggcaaguccagcuucuaccggaaccugcucuggcugaccaagaagaacggguccuaccccaaccugagcaagagcuacgugaacaacaaggagaaggaggugcucguccuguggggcgugcaccaccccuccaacaucggggaccagcgcgccaucuaccacacggagaacgcguacgugagcgucguguccagccacuacaaccggcgcuucacccccgagaucgccaagcggccgaaggugcgcgaccaggagggccggaucaacuacuacuggacccugcucgagcccggcgacaccaucaucuucgaggccaacgggaaccugaucgcccccugguacgccuucgcgcugucccgcggcuucgggagcggcaucaucacguccaacgccagcauggacgagugcgacgccaagugccagacgccccagggcgccaucaacuccagccucccguuccagaacguccaccccgugaccaucggggagugccccaaguacgugcgguccaccaagcugcgcauggucaccggccugcggaacauccccagcauccagucccgcggccucuucggcgccaucgcgggguucaucgagggcggcuggaccgggaugaucgacggcugguacggguaccaccaccagaacgagcagggcagcggguacgccgccgaccagaaguccacccagaacgccaucaacggcaucaccaacaaggugaacagcgugaucgagaagaugaacacgcaguucaccgccgucggcaaggaguucaacaagcuggagcggcgcauggagaaccugaacaagaagguggacgacggguuccucgacaucuggaccuacaacgcggagcugcuggugcuccuggagaacgagcggacccuggacuuccacgacuccaacgucaagaaccucuacgagaaggucaagagccagcugaagaacaacgccaaggagaucggcaacgggugcuucgaguucuaccacaagugcaacaacgagugcauggaguccgugaagaacggcacguacgacuacccgaaguacagcgaggagagcaagcugaaccgcgagaagaucgacggggugaagcucgaguccaugggcguguaccagauccuggccaucuacagcaccgucgccuccagccuggugcuccuggugucccugggcgccaucagcuucuggaugugcuccaacgggagccuccagugccggaucugcaucuga

SEQ ID NO: 65673 - RNA, 1701 nt, Artificial Sequence; identical to SEQ ID NO: 64674
  derived and/or modified CDS sequence (opt1) from hemagglutinin__InfluenzaA__ABP49371

SEQ ID NO: 65674 - RNA, 1701 nt, Artificial Sequence; identical to SEQ ID NO: 65411
  derived and/or modified CDS sequence (opt1) from hemagglutinin__InfluenzaA__ABP49382

SEQ ID NO: 65675 - RNA, 1698 nt, Artificial Sequence
  derived and/or modified CDS sequence (opt1) from hemagglutinin__InfluenzaA__ABP49393
augaaggugaagcugcucguccugcugugcaccuucaccgccacguacgccgacaccaucugcaucggcuaccacgcgaacaacagcaccgacaccguggacacggugcucgagaagaacgucaccgugacccacuccgugaaccugcuggaggacagccacaacgggaagcucugccugcugaagggcaucgcgccccuccagcuggggaacugcuccgucgccggcuggauccuggggaacccggagugcgagcuccugaucagcaaggaguccuggagcuacaucguggagacccccaaccccgagaacggcacgugcuaccccggcuacuucgccgacuacgaggagcugcgcgagcagcucuccagcguguccagcuucgagcgguucgagaucuucccgaaggaguccagcuggcccaaccacaccgucaccgggguguccgccagcugcucccacaacggcaagagcuccuucuaccgcaaccugcuguggcucaccgggaagaacggccuguaccccaaccugagcaaguccuacgccaacaacaaggagaaggaggugcucguccugugggggauccaccacccgcccaacaucggcgaccagcgggcccuguaccacacggagaacgccuacgugagcguggucagcucccacuacagccgccgguucacccccgagaucgccaagcgccccaaggugcgggaccaggagggccgcaucaacuacuacuggacccuccuggagcccggggacaccaucaucuucgaggcgaacggcaaccugaucgccccgcgguucgccuucgcccucucccgcggguucggcagcggcaucaucacguccaacgcccccauggacgagugcgacgcgaagugccagacgccccagggggccaucaacagcucccugcccuuccagaacgugcacccggucaccaucggcgagugccccaaguacgugcggagcgccaagcugcgcauggugaccgggcuccggaacauccccuccauccagagccgcggccuguucggggccaucgccggcuucaucgagggcggguggaccggcauggucgacgggugguacggcuaccaccaccagaacgagcagggguccggcuacgcggccgaccagaaguccacccagaacgccaucaacggcaucaccaacaaggugaacagcgugaucgagaagaugaacacccaguucacggccgucgggaaggaguucaacaagcuggagcggcgcauggagaaccucaacaagaagguggacgacggcuuccuggacaucuggaccuacaacgccgagcugcucguccugcuggagaacgagcggacccucgacuuccacgacagcaacgugaagaaccuguacgagaaggugaagucccagcugaagaacaacgcgaaggagaucgggaacggcugcuucgaguucuaccacaagugcaacgacgagugcauggagagcgucaagaacgggaccuacgacuaccccaaguacuccgaggagagcaagcucaaccgcgagcggaucgacggcgugaagcuggaguccaugggcguguaccagauccuggccaucuacagcacggucgccagcucccucgugcugcuggugagccucggggccaucuccuucuggaugugcagcaacggcucccugcagugccgcaucugcaucuga

SEQ ID NO: 65676 - RNA, 1701 nt, Artificial Sequence
  derived and/or modified CDS sequence (opt1) from hemagglutinin__InfluenzaA__ABP49404
augaagaccaucaucgcccugagcuacacccucugccugguguucgcccagaagcugcccggcaacgacaacuccacggcgacccucugccuggggcaccacgccgucccgaacggcaccaucgugaagaccaucacgaacgaccagaucgaggugaccaacgccaccgagcugguccagagcuccagcaccgggggcaucugcgacagcccccaccagauccucgacggggagaacugcacgcugaucggcgcccugcucggcgacccccagugcgacggguuccagaacaagaagugggaccuguucguggagcgcagcaaggccuacuccaacugcuaccccuacgacgugccggacuacgcgagccugcggucccucgucgccagcuccggcacccuggaguucaacaacgagagcuucaacuggaccggggugacccagaacggcacguccagcgccugcaagcgccgguccaacaacagcuucuucucccgccugaacuggcucacccaccugaaguucaaguaccccgcccugaacgugaccaugcccaacaacgagaaguucgacaagcucuacaucuggggcguccaccaccccgggaccuacaacgaccagaucagccuguacgcgcaggccuccggccggaucacggugagcaccaagcgcagccagcagaccgugaucccgaacaucgggucccggccccgcguccgggacauccccagccgcaucuccaucuacuggaccaucgugaagcccggcgacauccugcucaucaacagcacggggaaccugaucgccccgcggggcuacuucaagauccgcuccggcaagagcuccaucaugcggagcgacgcccccaucgggaagugcaacuccgagugcaucacccccaacggcagcauccccaacgacaagccguuccagaacgugaaccgcaucaccuacggggccugcccccgguacgucaagcagaacacccugaagcucgcgacgggcaugcgcaacgugcccgagaagcagacccgggggaucuucggcgccaucgccggcuucaucgagaacgggugggagggcaugguggacgggugguacggcuuccgccaccagaacuccgaggggaucggccaggccgccgaccugaaguccacccaggcggccaucaaccagaucaacggcaagcugaaccggcucaucgggaagaccaacgagaaguuccaccagaucgagaaggaguucuccgaggucgagggccgcauccaggaccuggagaaguacguggaggacacgaagaucgaccuguggagcuacaacgccgagcuccugguggcccuggagaaccagcacaccaucgaccucaccgacuccgagaugaacaagcuguucgagcggaccaagaagcagcugcgcgagaacgccgaggacauggggaacggcugcuucaagaucuaccacaagugcgacaacgcgugcaucgggagcauccgcaacggcacguacgaccacgacgucuaccgggacgaggcccucaacaaccgcuuccagaucaagggcguggagcugaaguccggguacaaggacuggauccuguggaucagcuucgccaucuccugcuuccuccugugcguggcccugcucggcuucaucaugugggccugccagaaggggaacauccggugcaacaucugcaucuga

SEQ ID NO: 65677 - RNA, 1701 nt, Artificial Sequence; identical to SEQ ID NO: 64674
  derived and/or modified CDS sequence (opt1) from hemagglutinin__InfluenzaA__ABP49415

SEQ ID NO: 65678 - RNA, 1701 nt, Artificial Sequence; identical to SEQ ID NO: 64674
  derived and/or modified CDS sequence (opt1) from hemagglutinin__InfluenzaA__ABP49426

SEQ ID NO: 65679 - RNA, 1689 nt, Artificial Sequence
  derived and/or modified CDS sequence (opt1) from hemagglutinin__InfluenzaA__ABP49437
auggccaucaucuaccugauccuccuguucaccgccgugcgcggcgaccagaucugcaucggguaccacgcgaacaacagcaccgagaaggucgacacgauccuggagcggaacgugaccgugacccacgccaaggacauccucgagaagacccacaacggcaagcugugcaagcugaacgggaucccgccccucgagcugggcgacugcuccaucgccggguggcugcucggcaaccccgagugcgaccgccugcugagcguccccgagugguccuacaucauggagaaggagaacccccgggacggccucugcuacccggggagcuucaacgacuacgaggagcugaagcaccuccuguccagcgugaagcacuucgagaaggugaagauccugcccaaggaccgcuggacgcagcacaccaccaccggcgggucccgggccugcgccgucagcggcaaccccuccuucuuccgcaacaugguguggcugacgaagaaggggagcaacuaccccguggcgaagggcuccuacaacaacaccagcggcgagcagaugcucaucaucuggggcguccaccacccgaacgacgagaccgagcagcggacccuguaccagaacguggggacguacguguccgucgggaccagcacccugaacaagcgcuccacccccgagaucgccacgcggcccaaggugaacggccucggcgggcgcauggaguucagcuggacccugcuggacaugugggacaccaucaacuucgaguccaccggcaaccucaucgcccccgaguacggguucaagaucagcaagcggggcuccagcgggaucaugaagacggagggcacccuggagaacugcgagaccaagugccagaccccgcugggcgccaucaacacgacccuccccuuccacaacgugcacccccugaccaucggggagugccccaaguacgucaagagcgagaagcuggugcucgcgaccggccugcgcaacgugccgcagaucgagucccgggggcuguucggcgccaucgccggguucaucgagggcggcuggcaggggauggucgacggcugguacggguaccaccacagcaacgaccagggcuccggguacgccgccgacaaggagagcacgcagaaggcguucgacggcaucaccaacaaggugaacuccgugaucgagaagaugaacacccaguucgaggccgucggcaaggaguucagcaaccucgagcgccggcuggagaaccugaacaagaagauggaggacggguuccucgacguguggaccuacaacgccgagcugcuggugcucauggagaacgagcgcacgcuggacuuccacgacuccaacgucaagaaccuguacgacaaggugcggaugcagcuccgcgacaacgucaaggagcugggcaacgggugcuucgaguucuaccacaagugcgacgacgagugcaugaacagcgugaagaacggcaccuacgacuaccccaaguacgaggaggaguccaagcugaaccggaacgagaucaagggcgugaagcucagcuccaugggggucuaccagauccuggccaucuacgccaccguggcgggcagccugucccucgccaucaugauggccgggaucagcuucuggaugugcuccaacggcagccugcagugccgcaucugcaucuga

SEQ ID NO: 65680 - RNA, 1701 nt, Artificial Sequence
  derived and/or modified CDS sequence (opt1) from hemagglutinin__InfluenzaA__ABP49448
augaaggccaagcugcucgugcugcugugcgcccucagcgcgaccgacgccgacaccaucugcaucggcuaccacgccaacaacuccacggacaccgucgacaccgugcuggagaagaacgugaccgucacgcacagcgugaaccugcucgaggacucccacaacgggaagcugugccgccugaagggcaucgcgccccuccagcuggggaagugcagcaucgccggcuggauccuggggaacccggagugcgagucccucuucagcaagaaguccuggagcuacaucgccgagacccccaacuccgagaacgggaccugcuaccccggcuacuucgccgacuacgaggagcugcgggagcagcugagcuccgugagcuccuucgagcgcuucgagaucuuccccaaggagcggagcuggccgaagcacaacgucacccgcggcgugacggccuccugcagccacaagggcaaguccagcuucuaccggaaccuccuguggcugaccgagaagaacggguccuaccccaaccucagcaagagcuacgugaacaacaaggagaaggagguccuggugcuguggggcgugcaccaccccuccaacaucgaggaccagaagaccaucuaccgcaaggagaacgccuacgucagcgugguguccagcaacuacaaccggcgcuucacccccgagaucuccgagcggccgaagguccgcgggcaggagggccggaucaacuacuacuggacgcuccuggagcccggcgacaccaucaucuucgaggcgaacgggaaccugaucgcccccugguacgccuucgcccucagccgcggcuucggguccggcaucaucaccagcaacgccuccauggacgagugcgacaccaagugccagacgccccagggcgcgaucaacagcucccugccguuccagaacgugcaccccgugaccaucggggagugccccaaguacguccggagcaccaagcugcgcauggugaccggccuccggaacauccccuccauccagagccgcgggcuguucggcgccaucgccggguucaucgagggcggcuggacggggaugaucgacggcugguacggguaccaccaccagaacgagcagggcuccggguacgccgccgaccagaaguccacccagaacgcgaucaacggcaucaccaacaaggugaacagcgucaucgagaagaugaacacccaguucacggccgugggcaaggaguucaacaagcuggagaagcggauggagaaccucaacaagaagguggacgacggguuccuggacaucuggaccuacaacgccgagcugcucguccugcuggagaacgagcgcacccucgacuuccacgacagcaacgugaagaaccuguacgagaaggucaagucccagcugaagaacaacgccaaggagaucggcaacgggugcuucgaguucuaccacaagugcaacaacgagugcauggagagcgugaagaacggcaccuacgacuacccgaaguacagcgaggaguccaagcucaaccgggagaagaucgacggggugaagcuggagagcaugggcgucuaccagauccuggccaucuacuccacgguggcgagcucccucgugcugcuggucagccucggcgccaucuccuucuggaugugcagcaacgggucccugcagugccgcaucugcaucuga

SEQ ID NO: 65681 - RNA, 1689 nt, Artificial Sequence
  derived and/or modified CDS sequence (opt1) from hemagglutinin__InfluenzaA__ABP49459
auggccaucaucuaccugauccuccuguucaccgccgugcgcggcgaccagaucugcaucggguaccacgcgaacaacagcaccgagaaggucgacacgauccuggagcggaacgugaccgugacccacgccaaggacauccucgagaagacccacaacggcaagcugugcaagcugaacgggaucccgccccucgagcugggcgacugcuccaucgccggguggcugcucggcaaccccgagugcgaccgccugcugagcguccccgagugguccuacaucauggagaaggagaacccccgggacggccucugcuacccggggagcuucaacgacuacgaggagcugaagcaccuccuguccagcgugaagcacuucgagaaggugaagauccugcccaaggaccgcuggacgcagcacaccaccaccggcgggucccgggccugcgccgucagcggcaaccccuccuucuuccgcaacaugguguggcugacgaagaaggggagcaacuaccccguggcgaagggcuccuacaacaacaccagcggcgagcagaugcucaucaucuggggcguccaccacccgaacgacgagaccgagcagcggacccuguaccagaacguggggacguacguguccgucgggacccccacccugaacaagcgcagcacccccgacaucgccacgcggcccaaggugaacggccagggcgggcgcauggaguucuccuggacccuccuggacaugugggacaccaucaacuucgagagcaccggcaaccugaucgccccggaguacggguucaagaucuccaagcggggcagcuccgggaucaugaagacggagggcacccucggcaacugcgagaccaagugccagacgccccugggggccaucaacaccacccugcccuuccacaacgugcacccccucaccaucggcgagugcccgaaguacgucaagagcgagaagcuggugcuggcgaccgggcuccgcaacgugccccagaucgagagccggggccuguucggggccaucgccggcuucaucgagggcggguggcagggcauggucgacgggugguacggcuaccaccacuccaacgaccaggggagcggcuacgccgccgacaaggaguccacgcagaaggcguucgacggcaucaccaacaaggugaacagcgugaucgagaagaugaacacccaguucgaggccgucgggaaggaguucuccaaccuggagcgccggcucgagaaccugaacaagaagauggaggacggcuuccuggacguguggaccuacaacgccgagcuccuggugcugauggagaacgagcgcacgcucgacuuccacgacagcaacgucaagaaccuguacgacaaggugcggaugcagcugcgcgacaacgucaaggagcucgggaacggcugcuucgaguucuaccacaagugcgacgacgagugcaugaacuccgugaagaacggcaccuacgacuaccccaaguacgaggaggagagcaagcugaaccggaacgagaucaagggggugaagcuguccagcaugggcgucuaccagauccucgccaucuacgccaccguggcggggucccugagccuggccaucaugauggccggcaucuccuucuggaugugcagcaacgggucccuccagugccgcaucugcaucuga

SEQ ID NO: 65682 - RNA, 1689 nt, Artificial Sequence
  derived and/or modified CDS sequence (opt1) from hemagglutinin__InfluenzaA__ABP49470
auggccaucaucuaccugauccuccuguucaccgccgugcgcggcgaccagaucugcaucggguaccacgcgaacaacagcaccgagaaggucgacacgauccuggagcggaacgugaccgugacccacgccaaggacauccucgagaagacccacaacggcaagcugugcaagcugaacgggaucccgccccucgagcugggcgacugcuccaucgccggguggcugcucggcaaccccgagugcgaccgccugcugagcguccccgagugguccuacaucauggagaaggagaacccccgggacggccucugcuacccggggagcuucaacgacuacgaggagcugaagcaccuccuguccagcgugaagcacuucgagaaggugaagauccugcccaaggaccgcuggacgcagcacaccaccaccggcgggucccgggccugcgccgucagcggcaaccccuccuucuuccgcaacaugguguggcugacgaagaaggggagcaacuaccccguggcgaagggcuccuacaacaacaccagcggcgagcagaugcucaucaucuggggcguccaccacccgaacgacgagaccgagcagcggacccuguaccagaacguggggacguacguguccgucagcaccuccacccugaacaagcgcagcacccccgacaucgccacgcggcccaaggugaacgggcucggcggccgcauggaguucuccuggacccugcuggacaugugggacaccaucaacuucgagagcaccgggaaccucaucgcccccgaguacggcuucaagaucuccaagcgggggagcagcggcaucaugaagacggaggggacccugggcaacugcgagaccaagugccagaccccgcugggcgccaucaacacgacccuccccuuccacaacgugcacccccugaccaucggggagugccccaaguacgucaaguccgagaagcuggugcucgcgaccggccugcgcaacgugccgcagaucgagagccgggggcuguucggcgccaucgccggguucaucgagggcggcuggcaggggauggucgacggcugguacggguaccaccacuccaacgaccagggcagcggguacgccgccgacaaggaguccacgcagaaggcguucgacggcaucaccaacaaggugaacagcgugaucgagaagaugaacacccaguucgaggccgucggcaaggaguucuccaaccucgagcgccggcuggagaaccugaacaagaagauggaggacggguuccucgacguguggaccuacaacgccgagcugcuggugcucauggagaacgagcgcacgcuggacuuccacgacagcaacgucaagaaccuguacgacaaggugcggaugcagcuccgcgacaacgucaaggagcugggcaacgggugcuucgaguucuaccacaagugcgacgacgagugcaugaacuccgugaagaacggcaccuacgacuaccccaaguacgaggaggagagcaagcugaaccggaacgagaucaagggcgugaagcucuccagcaugggggucuaccagauccuggccaucuacgccaccguggcgggcucccugagccucgccaucaugauggccgggaucuccuucuggaugugcagcaacggcucccugcagugccgcaucugcaucuga

SEQ ID NO: 65683 - RNA, 1701 nt, Artificial Sequence
  derived and/or modified CDS sequence (opt1) from hemagglutinin__InfluenzaA__ABP49492
augaagaccaucaucgcccugagcuacaucuucugccucguguucgcccagggccugcccgggaacgacaacuccaccgcgacgcugugccucggccaccacgccgucccgaacgggacccuggugaagaccaucaccaacgaccagaucgaggugacgaacgccaccgagcugguccagagcuccagcaccggcaagaucugcgacaacccccaccgcauccucgacgggaucaacugcacccugaucgacgcccugcucggcgacccccacugcgacggcuuccagaacgagaagugggaccuguucguggagcgguccaaggccuucagcaacugcuaccccuacgacgugccggacuacgcgucccugcgcagccucgucgccuccagcgggacgcuggaguucaucaacgagggcuucaacuggaccggggugacccagaacggcggguccagcuccugcaagcggggccccgacaacggcuucuucagccgccugaacuggcucuacaaguccgggagcaccuaccccgugcagaacgucacgaugcccaacaacgacaacuccgacaagcuguacaucuggggcgugcaccacccgagcaccgacaaggagcagaccgaccuguacgugcaggccuccgggaaggucaccgugagcacgaagcggagccagcagaccgugauccccaacgucggcucccgccccugggugcggggccucagcucccgcgugagcaucuacuggaccaucgucaagcccggggacauccuggugaucaacuccaacggcaaccugaucgccccgcggggguacuucaagaugcgcaccggcaagagcuccaucaugcggagcgacgcgcccaucgggacgugcuccagcgagugcaucacccccaacggcuccauccccaacgacaagccguuccagaacgugaacaagaucaccuacggcgccugccccaaguacgucaagcagaacacccucaagcuggccacggggaugcgcaacgugcccgagaagcagacccggggcaucuucggggccaucgccggcuucaucgagaacgggugggagggcaugaucgacggcugguacggguuccgccaccagaacagcgagggcaccgggcaggcggccgaccugaaguccacccaggccgccaucgaccagaucaacggcaagcucaaccgggugaucgagaagacgaacgagaaguuccaccagaucgagaaggaguucagcgaggucgaggggcgcauccaggaccuggagaaguacguggaggacaccaagaucgaccugugguccuacaacgccgagcuccuggucgcgcuggagaaccagcacaccaucgaccucaccgacagcgagaugaacaagcuguucgagaagacgcggcgccagcugcgggagaacgccgaggacaugggcaacggcugcuucaagaucuaccacaagugcgacaacgccugcaucggguccauccgcaacggcaccuacgaccacgacguguaccgggacgaggcccucaacaaccgcuuccagaucaaggggguggagcucaagagcggcuacaaggacuggauccuguggaucuccuucgccaucagcugcuuccugcugugcgucgugcugcucggcuucaucaugugggcgugccagaaggggaacauccgcugcaacaucugcaucuga

SEQ ID NO: 65684 - RNA, 1701 nt, Artificial Sequence; identical to SEQ ID NO: 65580
  derived and/or modified CDS sequence (opt1) from hemagglutinin__InfluenzaA__ABP49503

SEQ ID NO: 65685 - RNA, 1701 nt, Artificial Sequence
  derived and/or modified CDS sequence (opt1) from hemagglutinin__InfluenzaA__ABP49514
augaagaccaucaucgcccugagcuacaucuucuaccucgcccugggccaggaccugcccgggaacgacaacuccaccgcgacgcucugccugggccaccacgccgugccgaacgggacccuggucaagaccaucaccaacgaccagaucgaggugacgaacgccaccgagcucgugcagagcuccagcaccggcaagaucugcaacaacccccaccgcauccuggacgggaucgacugcacccugaucgacgcccuccugggcgacccccacugcgacgucuuccagaacgagacgugggaccuguucguggagcgguccaaggccuucagcaacugcuaccccuacgacgugccggacuacgcgucccuccgcagccuggucgccuccagcggcacccuggaguucaucaccgagggguucaccuggacgggcgugacccagaacgggggcuccaacgccugcaagcgggggcccggcagcggcuucuucucccgccucaacuggcugaccaagagcggguccaccuaccccgugcugaacgucacgaugcccaacaacgacaacuucgacaagcucuacaucuggggcgugcaccacccgagcaccaaccaggagcagaccucccuguacgugcaggccagcgggcgggucaccguguccacgcgccggagccagcagaccaucauccccaacaucggcagccgccccugggugcggggccuguccagccgcaucuccaucuacuggaccaucgucaagcccggggacgugcucgugaucaacagcaacggcaaccugaucgcgccgcggggguacuucaagaugcgcaccggcaaguccagcaucaugcgguccgacgcccccaucgacacgugcaucagcgagugcaucacccccaacggguccauccccaacgacaagccguuccagaacgucaacaagaucaccuacggcgccugccccaaguacgugaagcagaacacccugaagcucgccacgggcaugcgcaacgugcccgagaagcagacccgggggcuguucggcgccaucgcgggguucaucgagaacggcugggaggggaugaucgacggcugguacggcuuccgccaccagaacagcgaggggaccggccaggccgccgaccugaaguccacccaggccgccaucgaccagaucaacgggaagcucaaccgggucaucgagaagacgaacgagaaguuccaccagaucgagaaggaguucagcgagguggagggccgcauccaggaccuggagaaguacguggaggacaccaagaucgaccugugguccuacaacgcggagcuccuggucgcccuggagaaccagcacaccaucgaccucaccgacagcgagaugaacaagcuguucgagaagacgcggcgccagcugcgggagaacgccgaggacauggggaacggcugcuucaagaucuaccacaagugcgacaacgccugcaucgaguccauccgcaacggcaccuacgaccacgacguguaccgcgacgaggcccucaacaaccgguuccagaucaagggggucgagcucaagagcggcuacaaggacuggauccuguggaucuccuucgcgaucagcugcuuccugcugugcguggugcugcucggguucaucaugugggccugccagcgcggcaacauccggugcaacaucugcaucuga

SEQ ID NO: 65686 - RNA, 1701 nt, Artificial Sequence
  derived and/or modified CDS sequence (opt1) from hemagglutinin__InfluenzaA__ABQ01311
augaaggcccgccugcucauccugcugugcgcccucagcgcgaccgacgccgacaccaucugcaucggcuaccacgccaacaacuccacggacaccguggacaccguccuggagaagaacgugaccgugacgcacagcgucaaccugcucgaggacucccacaacgggaagcugugccggcugaagggcaucgcgccccuccagcuggggaagugcaacaucgccggcuggauccuggggaacccggagugcgagagccuccuguccaaccgcagcugguccuacaucgccgagacccccaacagcgagaacgggaccugcuaccccggcgacuucgccgacuacgaggagcugcgggagcagcucuccagcguguccagcuucgagcgcuucgagaucuuccccaaggagcgguccuggccgaagcacaacaucacccgcggggugacggccgccugcagccacgcgaagaaguccagcuucuacaagaaccugcuguggcucaccgaggccaacggcuccuaccccaaccugagcaaguccuacgucaacaacaaggagaaggaggugcuggugcucuggggcguccaccaccccagcaagaucgaggaccagcggacccuguaccgcaaggagaacgccuacgugagcguggucuccagcaacuacaaccggcgcuucacccccgagaucgccgagcggccgaaggugcgcggccaggccgggcggaugaacuacuacuggacgcugcucgagcccggcgacaagaucaucuucgaggcgaacggcaaccugaucgcccccugguacgccuucgcccugucccgcgggcucggcagcgggaucaucaccuccaacgccagcauggacgagugcgacaccaagugccagacgccccagggcgcgaucaacuccagccugccguuccagaacauccaccccgugaccaucggcgagugccccaaguacguccgguccaccaagcugcgcauggugaccgggcuccggaacauccccagcauccagucccgcggccuguucggggccaucgccggcuucaucgagggcggguggaccggcaugguggacgggugguacggcuaccaccaccagaacgagcaggggagcggcuacgccgccgaccagaaguccacgcagaacgcgaucaacgggaucaccaacaaggucaacagcgugaucgagaagaugaacacccaguucaccgccgugggcaaggaguucaacaagcuggagaagcggauggagaaccucaacaagaaggucgacgacggcuuccuggacaucuggacguacaacgccgagcugcucgugcugcuggagaacgagcgcacccucgacuuccacgacuccaacgugaagaaccuguacgagaaggucaagaaccagcugcggaacaacgccaaggagaucgggaacggcugcuucgaguucuaccacaagugcgacaacgagugcauggagagcgugaagaacgggaccuacgacuacccgaaguacuccgaggagagcaagcucaaccgcgagaagaucgacggcgucaagcuggaguccauggggguguaccagauccuggccaucuacagcaccguggcgagcucccucguccugcuggugagccucggcgccaucuccuucuggaugugcagcaacggcucccugcagugccgcaucugcaucuga

SEQ ID NO: 65687 - RNA, 1701 nt, Artificial Sequence
  derived and/or modified CDS sequence (opt1) from hemagglutinin__InfluenzaA__ABQ01322
augaaggccaagcugcucgugcugcugugcgcccucagcgcgaccgacgccgacaccaucugcaucggcuaccacgccaacaacuccacggacaccgucgacaccgugcuggagaagaacgugaccgucacgcacagcgugaaccugcucgaggacucccacaacgggaagcugugccgccugaagggcaucgcgccccuccaccuggggaagugcagcaucgccggcuggauccuggggaacccggagugcgagucccucuucagcaagaaguccuggagcuacaucgccgagacccccaacuccgagaacgggaccugcuaccccggcuacuucgccgacuacgaggagcugcgggagcagcugagcuccgugagcuccuucgagcgcuucgagaucuuccccaaggagcggagcuggccgaagcacaacgucacccgcggcgugacggccgccugcucccacaagggcaagagcuccuucuaccggaaccuccuguggcugaccgagaagaacgggagcuaccccaaccucuccaagagcuacgugaacaacaaggagaaggagguccuggugcuguggggcgugcaccaccccagcaacaucgaggaccagaagaccaucuaccgcaaggagaacgcguacgucuccguggugagcuccaacuacaaccggcgcuucacccccgagaucgccaagcggccgaagguccgcgggcaggagggccggaucaacuacuacuggacgcuccuggagcccggcgacaccaucaucuucgaggccaacgggaaccugaucgcccccugguacgccuucgcgcucagccgcggcuucggguccggcaucaucaccagcaacgccuccauggacgagugcgacgccaagugccagacgccccagggcgccaucaacagcucccugccguuccagaacgugcaccccgugaccaucggggagugccccaaguacguccggagcaccaagcugcgcauggugaccggccuccggaacauccccuccauccagagccgcgggcuguucggcgccaucgcgggguucaucgagggcggcuggaccgggaugaucgacggcugguacggguaccaccaccagaacgagcagggcuccggguacgccgccgaccagaaguccacgcagaacgccaucaacggcaucaccaacaaggugaacagcgucaucgagaagaugaacacccaguucaccgccgugggcaaggaguucaacaagcuggagaagcggauggagaaccucaacaagaagguggacgacggguuccuggacaucuggacguacaacgcggagcugcucguccugcuggagaacgagcgcacccucgacuuccacgacagcaacgugaagaaccuguacgagaaggucaagucccagcugaagaacaacgccaaggagaucggcaacgggugcuucgaguucuaccacaagugcaacaacgagugcauggagagcgugaagaacggcaccuacgacuacccgaaguacuccgaggagagcaagcucaaccgggagaagaucgacggggugaagcuggagagcaugggcgucuaccagauccuggccaucuacuccaccguggccagcucccucgugcugcuggucagccucggcgccaucuccuucuggaugugcagcaacgggucccugcagugccgcaucugcaucuga

SEQ ID NO: 65688 - RNA, 1701 nt, Artificial Sequence; identical to SEQ ID NO: 64674
  derived and/or modified CDS sequence (opt1) from hemagglutinin__InfluenzaA__ABQ01333

SEQ ID NO: 65689 - RNA, 1701 nt, Artificial Sequence
  derived and/or modified CDS sequence (opt1) from hemagglutinin__InfluenzaA__ABQ01344
augaagaccaucaucgcccugagcuacauccucugccugguguucgcccagaagcugcccggcaacgacaacuccaccgcgacgcucugccuggggcaccacgccgucccgaacggcacccuggugaagaccaucaccaacgaccagaucgaggugacgaacgccaccgagcucguccagagcuccagcaccgggggcaucugcgacagcccccaccagauccuggacggggagaacugcacccugaucgacgcccuccugggcgacccccacugcgacggcuuccagaacaaggagugggaccuguucguggagcgcagcaaggccuacuccaacugcuaccccuacgacgugccggacuacgcgagccuccggucccuggucgccagcuccgggacgcuggaguucaacaacgagagcuucaacuggaccggcguggcccagaacgggaccuccagcgccugcaagcgccgguccaacaagagcuucuucucccgccucaacuggcugcaccagcugaaguacaaguaccccgcgcucaacgugaccaugcccaacaacgagaaguucgacaagcuguacaucuggggcguccaccaccccagcacggacuccgaccagaucagccuguacgcccaggccccggggcgggugaccgugagcaccaagcgcucccagcagaccgucauccccaacaucggcagccggcccugggugcgcggcguguccagccggaucuccaucuacuggacgaucgucaagcccggggacauccuccugaucaacugcaccggcaaccugaucgccccgcgcggguacuucaagauccggagcggcaaguccagcaucaugcgcuccgacgccagcaucggcaagugcaacuccgagugcaucacccccaacgggagcauccccaacgacaagcccuuccagaacgugaaccggaucaccuacggcgcgugcccgcgcuacgugaagcagaacacgcucaagcuggccaccgggaugcggaacguccccgagaagcagacccgcggcaucuucggggccaucgccggcuucaucgagaacggcugggaggggaugguggacggcugguacggguuccggcaccagaacuccgagggcaccgggcaggccgcggaccugaaguccacgcaggccgccaucaaccagaucaacggcaagcucaaccgccugaucggcaagaccaacgagaaguuccaccagaucgagaaggaguucuccgagguggaggggcggauccaggaccuggagaaguacgucgaggacaccaagaucgaccucuggagcuacaacgccgagcugcugguggcccucgagaaccagcacaccaucgaccugacggacuccgagaugaacaagcuguucgagcgcaccaagaagcagcuccgggagaacgcggaggacaugggcaacgggugcuucaagaucuaccacaagugcgacaacgccugcaucggcagcauccgcaacgggaccuacgaccacgacguguaccgcgacgaggcccugaacaaccgguuccagaucaagggcgucgagcugaaguccggcuacaaggacuggauccucuggaucagcuucgccaucagcugcuuccugcugugcgugguccuccugggguucaucaugugggccugccagaagggcaacauccgcugcaacaucugcaucuga

SEQ ID NO: 65690 - RNA, 1689 nt, Artificial Sequence
  derived and/or modified CDS sequence (opt1) from hemagglutinin__InfluenzaA__ABQ01355
auggccaucaucuaccugauccuccuguucaccgccgugcgcggcgaccagaucugcaucggguaccacgcgaacaacagcaccgagaaggucgacacgauccuggagcggaacgugaccgugacccacgccaaggacauccucgagaagacccacaacggcaagcugugcaagcugaacgggaucccgccccucgagcugggcgacugcuccaucgccggguggcugcucggcaaccccgagugcgaccgccugcugcggguccccgaguggagcuacaucauggagaaggagaacccccgcgacggccucugcuacccgggguccuucaacgacuacgaggagcugaagcaccuccugagcuccgugaagcacuucgagaaggugcggauccugcccaaggaccgcuggacgcagcacaccaccaccggcgggagccgggccugcgccgucuccggcaaccccagcuucuuccgcaacaugaucuggcugacgaagaagggguccaacuaccccguggcgaagggcagcuacaacaacaccuccggcgagcagaugcucaucaucuggggcgugcaccacccgaucgacgagaccgagcagcggacccuguaccagaacgucgagacguacgugagcguggucaccuccacccugaacaagcgcagcacccccaagaucgccacgcggcccaaggugaacgggcucgggggccgcauggaguucuccuggacccugcuggacaugugggacaccaucaacuucgagagcaccggcaaccucaucgcccccgaguacggguucaagaucuccaagcggggcagcuccgggaucaugaagacggagggcacccuggagaacugcgagaccaagugccagaccccgcugggggccaucaacacgacccuccccuuccacaacgugcacccccugaccaucggcgagugccccaaguacgucaagagcgagaagcuggugcucgcgaccggccugcgcaacgugccgcagaucgagagccgggggcuguucggcgccaucgccggguucaucgagggcggguggcagggcauggucgacggcugguacggguaccaccacuccaacgaccagggcagcggguacgccgccgacaaggaguccacgcagcgcgcguucgacggcaucaccaacaaggugaacagcgugaucgagaagaugaacacccaguucgaggccgucgggaaggaguucuccaaccucgagcggcgccuggagaaccugaacaagaagauggaggacggcuuccucgacguguggaccuacaacgccgagcugcuggugcucauggagaacgagcggacgcuggacuuccacgacagcaacgucaagaaccuguacgacaaggugcgcaugcagcuccgggacaacgucaaggagcugggcaacgggugcuucgaguucuaccacaagugcgacgacgagugcaugaacuccgugaagaacggcaccuacgacuaccccaaguacgaggaggagagcaagcugaaccgcaacgagaucaagggggugaagcucuccagcaugggcgucuaccagauccuggccaucuacgccaccguggcgggcucccugagccucgccaucaugauggccgggaucuccuucuggaugugcagcaacggcucccugcagugccgcaucugcaucuga

SEQ ID NO: 65691 - RNA, 1701 nt, Artificial Sequence
  derived and/or modified CDS sequence (opt1) from hemagglutinin__InfluenzaA__ABQ01366
augaagaccaucaucgcccugagcuacaucuucugccucguguucgcccaggaccugcccggcaacgacaacuccaccgcgacgcugugccucgggcaccacgccgucccgaacggcacccuggugaagaccaucaccaacgaccagaucgaggugacgaacgccaccgagcugguccagagcuccagcaccgggaagaucugcgacaacccccaccgcauccucgacggcaucaacugcacccugaucgacgcccugcucggggacccccacugcgacggcuuccagaacgagaagugggaccuguucguggagcgguccaaggccuucagcaacugcuaccccuacgacgugccggacuacgcgucccugcgcagccucgucgccuccagcggcacgcuggaguucaucaacgagggguucaacuggaccggcgugacccagaacgggggcuccagcgccugcaagcgggggcccgacaacggcuucuucucccgccugaacuggcucuacaagagcggcuccaccuaccccgugcagaacgucacgaugaccaacaacgacaacagcgacaagcuguacaucuggggcgugcaccaccccuccaccgacaaggagcagaccgaccuguacgugcaggccagcggcaaggucacgguguccaccaagcggagccagcagaccaucaucccgaacguggggagccgccccuggguccggggccucuccagccgcguguccaucuacuggaccaucgugaagcccggcgacauccuggucaucaacagcaacgggaaccugaucgcgccccggggcuacuucaagaugcgcacggggaaguccagcaucaugcgguccgacgccccgaucgggaccugcagcuccgagugcaucacccccaacgggagcauccccaacgacaagcccuuccagaacgugaacaagaucaccuacggcgccugcccgaaguacgugaagcagaacacgcucaagcuggccaccggcaugcgcaacguccccgagaagcagacccgggggaucuucggcgccaucgcgggguucaucgagaacggcugggaggggaugaucgacggcugguacggcuuccgccaccagaacuccgaggggaccggccaggccgccgaccucaagagcacgcaggccgccaucgaccagaucaacgggaagcugaaccgggugaucgagaagaccaacgagaaguuccaccagaucgagaaggaguucuccgagguggagggccgcauccaggaccuggagaaguacgucgaggacaccaagaucgaccuguggagcuacaacgcggagcuccugguggcccuggagaaccagcacaccaucgaccucacggacuccgagaugaacaagcuguucgagaagacccggcgccagcugcgggagaacgccgaggacauggggaacggcugcuucaagaucuaccacaagugcgacaacgccugcaucggcagcauccgcaacgggaccuacgaccacgacgucuaccgggacgaggcccucaacaaccgcuuccagaucaagggcguggagcugaaguccggguacaaggacuggauccuguggaucagcuucgcgaucuccugcuuccuccugugcgugguccugcucggcuucaucaugugggccugccagaagggcaacauccgcugcaacaucugcaucuga

SEQ ID NO: 65692 - RNA, 1701 nt, Artificial Sequence; identical to SEQ ID NO: 65457
  derived and/or modified CDS sequence (opt1) from hemagglutinin__InfluenzaA__ABQ44383

SEQ ID NO: 65693 - RNA, 1701 nt, Artificial Sequence; identical to SEQ ID NO: 64657
  derived and/or modified CDS sequence (opt1) from hemagglutinin__InfluenzaA__ABQ44405

SEQ ID NO: 65694 - RNA, 1701 nt, Artificial Sequence
  derived and/or modified CDS sequence (opt1) from hemagglutinin__InfluenzaA__ABQ44416
augaaggccaagcugcucgugcugcugugcgccuucaccgcgaccgacgccgacacgaucugcaucggcuaccacgccaacaacagcaccgacaccgucgacaccgugcucgagaagaacgugacggucacccacuccgugaaccugcuggaggacagccacaacgggaagcucugccgccugaagggcaucgcgccccugcagcucgggaacugcuccaucgccggcuggauccuggggaacccggagugcgagagccuguucuccaagaaguccuggagcuacaucgccgagacccccaacagcgagaacgggaccugcuaccccggcuacuucgccgacuacgaggagcuccgggagcagcuguccagcguguccagcuucgagcgcuucgagaucuuccccaaggaguccagcuggccgaaccacacggucaccaagggggugaccgccuccugcagccacaagggcaaguccagcuucuaccggaaccugcucuggcugaccgagaagaacggguccuaccccaaccugagcaagagcuacgugaacaacaaggagaaggagguccucgugcuguggggcgugcaccaccccuccaacaucggggaccagcgcgccaucuaccacacggagaacgcguacgucagcgugguguccagccacuacaaccggcgcuucacccccgagaucgccaagcggccgaagguccgcgaccaggagggccggaucaacuacuacuggacccugcucgagcccgaggacaccaucaucuucgaggccaacggcaaccugaucgcccccugguacgccuucgcgcugucccgcggguucggcagcgggaucaucacguccaacgccagcauggacgagugcgacgccaagugccagacgccccagggcgccaucaacuccagccucccguuccagaacgugcaccccgugaccaucggcgagugccccaaguacguccgguccaccaagcugcgcauggugaccgggcugcggaacauccccagcauccagucccgcggccucuucggggccaucgcgggcuucaucgagggcggcuggaccggcaugaucgacgggugguacggcuaccaccaccagaacgagcaggggagcggcuacgccgccgaccagaaguccacccagaacgccaucaacgggaucaccaacaaggugaacagcgucaucgagaagaugaacacgcaguucaccgccgugggcaaggaguucaacaagcuggagcggcgcauggagaaccugaacaagaagguggacgacggcuuccucgacaucuggaccuacaacgcggagcugcugguccuccuggagaacgagcggacccuggacuuccacgacuccaacgugaagaaccucuacgagaaggucaagagccagcugaagaacaacgccaaggagaucgggaacggcugcuucgaguucuaccacaagugcaacaacgagugcauggaguccgugaagaacgggacguacgacuacccgaaguacagcgaggagagcaagcugaaccgcgagaagaucgacggcgugaagcucgaguccaugggggucuaccagauccuggccaucuacagcaccguggccuccagccuggugcuccuggucucccugggcgccaucagcuucuggaugugcuccaacggcagccuccagugccggaucugcaucuga

SEQ ID NO: 65695 - RNA, 1701 nt, Artificial Sequence; identical to SEQ ID NO: 64280
  derived and/or modified CDS sequence (opt1) from hemagglutinin__InfluenzaA__ABQ44427

SEQ ID NO: 65696 - RNA, 1689 nt, Artificial Sequence
  derived and/or modified CDS sequence (opt1) from hemagglutinin__InfluenzaA__ABQ44438
auggccaucaucuacuucauccugcuguucaccgccgugcgcggcgaccagaucugcaucggguaccacgcgaacaacagcaccgagaaggucgacacgauccuggagcggaacgugaccgugacccacgccaaggacauccuggagaagacccacaacggcaagcucugcaagcugaacgggaucccgccccuggagcucggcgacugcuccaucacgggguggcugcugggcaaccccgagugcgaccgccuccugcggguccccgaguggagcuacaucauggagaaggagaacccccgcuacucccugugcuacccgggcagcuucaacgacuacgaggagcucaagcaccuccuguccagcgugaagcacuucgagaaggugcggauccuccccaaggacggguggacccagcacaccaccuccggcgggagcaaggccugcgccgucuccggcaagagcuccuucuuccgcaacaugguguggcugacgaagaaggggcccaacuaccccguggccaagcggagcuacaacaacaccuccggcgagcagaugcugaucaucuggggcguccaccacccgaacgacgaggcggagcagagcgcccucuaccagaagguggggaccuacguguccgccagcaccuccacgcugaacaagcgcagcacccccgagaucgccgcgcggcccgaggucaacggccuggggucccgcauggaguucagcuggacccuccuggacgugugggacaccaucaacuucgagagcacgggcaaccugguggcccccgaguacggcuucaagaucuccaagcgggggagcuccggcaucaugaagaccgaggggacccucggcaacugcgagaccaagugccagacgccgcugggggccaucaacaccacccugcccuuccacaacguccacccccucaccaucggcgagugccccaaguacgucaagagcgagaagcuggugcuggccacgggccuccgcaacgugccgcagaucgagucccgggggcuguucggcgccaucgcgggguucaucgagggcggguggcagggcaugguggacggcugguacggguaccaccacagcaacgaccagggcuccggguacgccgccgacaaggagagcacccagaaggccuucgaccgcaucaccaacaaggugaacuccgucaucgagaagaugaacacccaguucgaggccgugggcaaggaguucagcaaccuggagaagcggcucgagaaccugaacaagaagauggaggacggguuccuggacguguggacguacaacgcggagcuccugguccugauggagaacgagcgcacccucgacuuccacgacuccaacgugaagaaccuguacaacaagguccggaugcagcugcgcgacaacgugaaggagcucggcaacggcugcuucgaguucuaccacaagugcgacgacgagugcaugagcuccgugaagaacgggaccuacgacuaccccaaguacgaggaggagagcaagcugaagcggaacgagaucaagggcgucaagcuguccagcauggggguguaccagauccucgccaucuacgccaccguggccggcucccugagccuggccaucaugaucgcgggcaucucccucuggaugugcagcaacgggagccugcagugccgcaucugcaucuga

SEQ ID NO: 65697 - RNA, 1689 nt, Artificial Sequence
  derived and/or modified CDS sequence (opt1) from hemagglutinin__InfluenzaA__ABQ44460
auggccaucaucuaccugauccuccuguucaccgccgugcgcggcgaccagaucugcaucggguaccacgcgaacaacagcaccgagaaggucgacacgauccuggagcggaacgugaccgugacccacgccaaggacauccucgagaagacccacaacggcaagcugugcaagcugaacgggaucccgccccucgagcugggcgacugcuccaucgccggguggcugcucggcaaccccgagugcgaccgccugcugagcguccccgagugguccuacaucauggagaaggagaacccccgggacggccucugcuacccggggagcuucaacgacuacgaggagcugaagcaccuccuguccagcgugaagcacuucgagaaggugaagauccugcccaaggaccgcuggacgcagcacaccaccaccggcgggucccgggccugcgccgucagcggcaaccccuccuucuuccgcaacaugaucuggcugacgaagaaggggagcaacuaccccguggcgaagggcuccuacaacaacaccagcggcgagcagaugcucaucaucuggggcgugcaccacccgaacgacgagaccgagcagcggacccuguaccagaacgucgggacguacguguccguggggaccagcacccugaacaagcgcuccacccccgacaucgccacgcggcccaaggucaacggccucggcagccgcauggaguucuccuggacccugcuggacaugugggacaccaucaacuucgagagcaccgggaaccucaucgcccccgaguacggcuucaagaucuccaagcgggggagcagcggcaucaugaagacggaggggacccugggcaacugcgagaccaagugccagaccccgcugggcgccaucaacacgacccuccccuuccacaacgugcacccccugaccaucggggagugccccaaguacgugaaguccgagaagcugguccucgcgaccggccugcgcaacgugccgcagaucgagagccgggggcuguucggcgccaucgccggguucaucgagggcggcuggcaggggaugguggacggcugguacggguaccaccacuccaacgaccagggcagcggguacgccgccgacaaggaguccacgcagaaggcguucgacggcaucaccaacaaggucaacagcgugaucgagaagaugaacacccaguucgaggccgugggcaaggaguucuccaaccucgagcgccggcuggagaaccugaacaagaagauggaggacggguuccucgacgucuggaccuacaacgccgagcugcuggugcucauggagaacgagcgcacgcuggacuuccacgacagcaacgugaagaaccuguacgacaagguccggaugcagcuccgcgacaacgugaaggagcugggcaacgggugcuucgaguucuaccacaagugcgacgacgagugcaugaacuccgucaagaacggcaccuacgacuaccccaaguacgaggaggagagcaagcugaaccggaacgagaucaagggcgugaagcucuccagcauggggguguaccagauccuggccaucuacgccaccgucgcgggcucccugagccucgccaucaugauggccgggaucuccuucuggaugugcagcaacggcucccugcagugccgcaucugcaucuga

SEQ ID NO: 65698 - RNA, 1701 nt, Artificial Sequence
  derived and/or modified CDS sequence (opt1) from hemagglutinin__InfluenzaA__ABQ44471
augaaggcccgccugcucauccugcugugcgcccucagcgcgaccgacgccgacaccaucugcaucggcuaccacgccaacaacuccacggacaccguggacaccguccuggagaagaacgugaccgugacgcacagcgucaaccugcucgaggacucccacaacgggaagcugugccggcugaagggcaucgcgccccuccagcuggggaagugcaacaucgccggcuggauccuggggaacccggagugcgagagccuccuguccaaccgcagcugguccuacaucgccgagacccccaacagcgagaacgggaccugcuaccccggcgacuucgccgacuacgaggagcugcgggagcagcucuccagcguguccagcuucgagcgcuucgagaucuuccccaaggagcgguccuggccgaagcacaacaucacccgcggggugacggccgccugcagccacgcgaagaaguccagcuucuacaagaaccugcuguggcucaccgaggccaacggcuccuaccccaaccugagcaaguccuacgucaacaacaaggagaaggaggugcuggugcucuggggcguccaccaccccagcaacaucgaggaccagcggacccuguaccgcaaggagaacgccuacgugagcguggucuccagcaacuacaaccggcgcuucacccccgagaucgccgagcggccgaaggugcgcggccaggccgggcggaugaacuacuacuggacgcugcucgagcccggcgacaagaucaucuucgaggcgaacggcaaccugaucgcccccugguacgccuucgcccugucccgcgggcucggcagcgggaucaucaccuccaacgccagcauggacgagugcgacaccaagugccagacgccccagggcgcgaucaacaacucccugccguuccagaacauccaccccgugaccaucggcgagugccccaaguacguccggagcaccaagcugcgcauggugaccgggcuccggaacauccccuccauccagagccgcggccuguucggggccaucgccggcuucaucgagggcggguggaccggcaugguggacgggugguacggcuaccaccaccagaacgagcagggguccggcuacgccgccgaccagaaguccacgcagaacgcgaucaacgggaucaccaacaaggucaacagcgugaucgagaagaugaacacccaguucaccgccgugggcaaggaguucaacaagcuggagaagcggauggagaaccucaacaagaaggucgacgacggcuuccuggacaucuggacguacaacgccgagcugcucgugcugcuggagaacgagcgcacccucgacuuccacgacagcaacgugaagaaccuguacgagaaggucaagaaccagcugcggaacaacgccaaggagaucgggaacggcugcuucgaguucuaccacaagugcgacaacgagugcauggaguccgugaagaacgggaccuacgacuacccgaaguacagcgaggaguccaagcucaaccgcgagaagaucgacggcgucaagcuggagagcauggggguguaccagauccuggccaucuacuccaccguggcgagcagccucguccugcuggugucccucggcgccaucagcuucuggaugugcuccaacggcagccugcagugccgcaucugcaucuga

SEQ ID NO: 65699 - RNA, 1701 nt, Artificial Sequence
  derived and/or modified CDS sequence (opt1) from hemagglutinin__InfluenzaA__ABR15797
augaagaccaucaucgcccugagcuacaucuucugccucgcccugggccaggaccugcccgggaacgacaacuccaccgcgacgcucugccugggccaccacgccgugccgaacgggacccuggucaagaccaucaccaacgaccagaucgaggugacgaacgccaccgagcucgugcagagcuccagcaccggcaagaucugcaacaacccccaccgcauccuggacgggaucgacugcacccugaucgacgcccuccugggcgacccccacugcgacgucuuccagaacgagacgugggaccuguucguggagcgguccaaggccuucagcaacugcuaccccuacgacgugccggacuacgcgucccuccgcagccuggucgccuccagcggcacccuggaguucaucaccgagggguucaccuggacgggcgugacccagaacgggggcuccaacgccugcaagcgggggcccggcagcggcuucuucucccgccucaacuggcugaccaagagcggguccaccuaccccgugcugaacgucacgaugcccaacaacgacaacuucgacaagcucuacaucuggggcgugcaccacccgagcaccaaccaggagcagaccucccuguacgugcaggccagcgggcgggucaccguguccacgcgccggagccagcagaccaucauccccaacaucggcagccgccccugggugcggggccuguccagccgcaucuccaucuacuggaccaucgucaagcccggggacgugcucgugaucaacagcaacggcaaccugaucgcgccgcggggguacuucaagaugcgcaccggcaaguccagcaucaugcgguccgacgcccccaucgacacgugcaucagcgagugcaucacccccaacggguccauccccaacgacaagccguuccagaacgucaacaagaucaccuacggcgccugccccaaguacgugaagcagaacacccugaagcucgccacgggcaugcgcaacgugcccgagaagcagacccgggggcuguucggcgccaucgcgggguucaucgagaacggcugggaggggaugaucgacggcugguacggcuuccgccaccagaacagcgaggggaccggccaggccgccgaccugaaguccacccaggccgccaucgaccagaucaacgggaagcucaaccgggucaucgagaagacgaacgagaaguuccaccagaucgagaaggaguucagcgagguggagggccgcauccaggaccuggagaaguacguggaggacaccaagaucgaccugugguccuacaacgcggagcuccuggucgcccuggagaaccagcacaccaucgaccucaccgacagcgagaugaacaagcuguucgagaagacgcggcgccagcugcgggagaacgccgaggacauggggaacggcugcuucaagaucuaccacaagugcgacaacgccugcaucgaguccauccgcaacggcaccuacgaccacgacguguaccgcgacgaggcccucaacaaccgguuccagaucaagggggucgagcucaagagcggcuacaaggacuggauccuguggaucuccuucgcgaucagcugcuuccugcugugcguggugcugcucggguucaucaugugggccugccagcgcggcaacauccggugcaacaucugcaucuga

SEQ ID NO: 65700 - RNA, 1701 nt, Artificial Sequence
  derived and/or modified CDS sequence (opt1) from hemagglutinin__InfluenzaA__ABR15808
augaaggcccgccugcucauccugcugugcgcccucagcgcgaccgacgccgacaccaucugcaucggcuaccacgccaacaacuccacggacaccguggacaccguccuggagaagaacgugaccgugacgcacagcgucaaccugcucgaggacucccacaacgggaagcugugccggcugaagggcaucgcgccccuccagcuggggaagugcaacaucgccggcuggauccuggggaacccggagugcgagagccuccuguccaaccgcagcugguccuacaucgccgagacccccaacagcgagaacgggaccugcuaccccggcgacuucgccgacuacgaggagcugcgggagcagcucuccagcguguccagcuucgagcgcuucgagaucuuccccaaggagcgguccuggccgaagcacaacaucacccgcggggugacggccgccugcagccacgcgaagaaguccagcuucuacaagaaccugcuguggcucaccgaggccaacggcuccuaccccaaccugagcaaguccuacgucaacaacaaggagaaggaggugcuggugcucuggggcguccaccaccccagcaacaucgaggaccagcggacccuguaccgcaaggagaacgccuacgugagcguggucuccagcaacuacaaccggcgcuucacccccgagaucgccgagcggccgaaggugcgcggccaggccgggcggaugaacuacuacuggacgcugcucgagcccggcgacaagaucaucuucgaggcgaacggcaaccugaucgcccccugguacgccuucgcccugucccgcgggcucggcagcgggaucaucaccuccaacgccagcauggacgagugcgacaccaagugccagacgccccagggcgcgaucaacuccagccugccguuccagaacauccaccccgugaccaucggcgagugccccaaguacguccgguccaccaagcugcgcauggugaccgggcuccggaacauccccagcauccagucccgcggccuguucggggccaucgccggcuucaucgagggcggguggaccggcaugguggacgggugguacggcuaccaccaccagaacgagcaggggagcggcuacgccgccgaccagaaguccacgcagaacgcgaucaacgggaucaccaacaaggucaacagcgugaucgagaagaugaacacccaguucaccgccgugggcaaggaguucaacaagcuggagaagcggauggagaaccucaacaagaaggucgacgacggcuuccuggacaucuggacguacaacgccgagcugcucgugcugcuggagaacgagcgcacccucgacuuccacgacuccaacgugaagaaccuguacgagaaggucaagaaccagcugcggaacaacgccaaggagaucgggaacggcugcuucgaguucuaccacaagugcgacaacgagugcauggagagcgugaagaacgggaccuacgacuacccgaaguacuccgaggagagcaagcucaaccgcgagaagaucgacggcgucaagcuggaguccauggggguguaccagauccuggccaucuacagcaccguggcgagcucccucguccugcuggugagccucggcgccaucuccuucuggaugugcagcaacggcucccugcagugccgcaucugcaucuga

SEQ ID NO: 65701 - RNA, 1698 nt, Artificial Sequence; identical to SEQ ID NO: 64766
  derived and/or modified CDS sequence (opt1) from hemagglutinin__InfluenzaA__ABR15885

SEQ ID NO: 65702 - RNA, 1698 nt, Artificial Sequence
  derived and/or modified CDS sequence (opt1) from hemagglutinin__InfluenzaA__ABR15896
augaaggccaagcugcucgugcugcugugcaccuucaccgccacguacgcggacaccaucugcaucggcuaccacgccaacaacagcaccgacaccgucgacacggugcucgagaagaacgugaccgucacccacuccgugaaccugcuggaggacagccacaacgggaagcucugccugcugaagggcaucgcgccccuccagcuggggaacugcuccguggccggcuggauccuggggaacccggagugcgagcuccugaucagcaaggaguccuggagcuacaucgucgaggcccccaaccccgagaacgggaccugcuaccccggcuacuucgccgacuacgaggagcugcgcgagcagcucuccagcguguccagcuucgagcgguucgagaucuucccgaaggaguccagcuggcccaaccacacggugaccggggucuccgccagcugcucccacaacggcaagagcuccuucuaccgcaaccugcuguggcucaccgggaagaacggccuguaccccaaccugagcauguccuacgugaacaacaaggagaaggaggugcucguccuguggggcgugcaccacccgcccaacaucggcgaccagcgggcccuguaccacaccgagaacgccuacgugagcgucgugagcucccacuacagccgccgguucacgcccgagaucgcgaagcgccccaaggugcgggaccaggagggccgcaucaacuacuacuggacccuccuggagcccggggacaccaucaucuucgaggccaacggcaaccugaucgccccgugguacgccuucgcccucucccggggguucggcagcggcaucaucaccuccaacgcgcccauggacgagugcgacgccaagugccagacgccccagggggccaucaacagcucccugcccuuccagaacguccacccggugaccaucggcgagugccccaaguacgugcgcagcgccaagcugcggauggucaccgggcuccgcaacauccccuccauccagagccggggccuguucggggccaucgcgggcuucaucgagggcggguggaccggcaugguggacgggugguacggcuaccaccaccagaacgagcagggguccggcuacgccgccgaccagaaguccacgcagaacgccaucaacggcaucaccaacaaggugaacagcgucaucgagaagaugaacacccaguucaccgccguggggaaggaguucaacaagcuggagcgccggauggagaaccucaacaagaaggucgacgacggcuuccuggacaucuggacguacaacgcggagcugcucgugcugcuggagaacgagcgcacccucgacuuccacgacagcaacgugaagaaccuguacgagaaggucaagucccagcugaagaacaacgccaaggagaucgggaacggcugcuucgaguucuaccacaagugcaacaacgagugcauggagagcgugaagaacgggaccuacgacuaccccaaguacuccgaggagagcaagcucaaccgggagaagaucgacggcgugaagcuggaguccaugggcgucuaccagauccuggccaucuacagcaccguggccagcucccucgugcugcuggucagccucggggccaucuccuucuggaugugcagcaacggcucccugcagugccgcaucugcaucuga

SEQ ID NO: 65703 - RNA, 1698 nt, Artificial Sequence; identical to SEQ ID NO: 64765
  derived and/or modified CDS sequence (opt1) from hemagglutinin__InfluenzaA__ABR15907

SEQ ID NO: 65704 - RNA, 1698 nt, Artificial Sequence; identical to SEQ ID NO: 64766
  derived and/or modified CDS sequence (opt1) from hemagglutinin__InfluenzaA__ABR15918

SEQ ID NO: 65705 - RNA, 1701 nt, Artificial Sequence
  derived and/or modified CDS sequence (opt1) from hemagglutinin__InfluenzaA__ABR15929
augaagaccaucaucgcccugagcuacauccucugccugguguucgcccagaagcugcccggcaacgacaacuccaccgcgacgcucugccuggggcaccacgccgucccgaacggcacccuggugaagaccaucaccaacgaccagaucgaggugacgaacgccaccgagcucguccagagcuccagcaccgggcgcaucugcgacagcccccaccagauccuggacggcgagaacugcacccugaucgacgcccuccugggggacccccacugcgacggcuuccagaacaaggagugggaccuguucguggagcggagcaaggccuacuccaacugcuaccccuacgacgugccggacuacgucagccuccgcucccugguggcgagcuccggcacgcuggaguucaacaacgagagcuucaacuggaccgggguggcccagaacggcaccuccagcgccugcaagcggcgcuccgacaagagcuucuucucccggcucaacuggcugcaccagcugaaguacaaguaccccgcccucaacgucaccaugcccaacaacgagaaguucgacaagcuguacaucuggggcgugcaccaccccgggacggacagcgaccagaucucccuguacgcgcaggccagcgggcgcgugaccgucagcaccaagcggucccagcagaccgugaucccgaacaucggcagccgccccugggugcggggcaucuccagccgcaucuccaucuacuggacgaucgucaagcccggggacauccuccugaucaacagcaccggcaaccugaucgcgccccggggguacuucaagauccgcuccggcaagagcuccaucaugcggagcgacgccccgaucggcaagugcaacuccgagugcaucacccccaacgggagcauccccaacgacaagcccuuccagaacgugaaccgcaucaccuacggcccgugcccccgguacgugaagcagaacacgcucaagcuggccaccgggaugcgcaacguccccgagaagcagacccggggcaucuucggggccaucgccggcuucaucgagaacggcugggaggggaugauggacggcugguacggguuccgccaccagaacuccgagggcaccgggcaggccgccgaccugaaguccacgcaggccgcgaucaaccagaucaacggcaagcucaaccggcugaucgagaagaccaacgagaaguuccaccagaucgagaaggaguucuccgagguggagggccgcauccaggaccuggagaaguacguggaggacaccaagaucgaccucuggagcuacaacgccgagcugcuggucgcccucgagaaccagcacaccaucgaccugacggacuccgagaugaacaagcuguucgagcggaccaagaagcagcuccgcgagaacgccgaggacauggggaacggcugcuucaagaucuaccacaagugcaacaacgccugcaucgggagcauccgcaacggcaccuacgaccacgacguguaccgggacgaggcgcugaacaaccgcuuccagaucaaggggguggagcugaaguccggcuacaaggacuggauccucuggaucagcuucgccaucagcugcuuccugcugugcaucguccuccugggcuucaucaugugggccugccagaaggggaacauccggugcaacaucugcaucuga

SEQ ID NO: 65706 - RNA, 1701 nt, Artificial Sequence
  derived and/or modified CDS sequence (opt1) from hemagglutinin__InfluenzaA__ABR15940
augaagaccaucaucgcccugagcuacauccucugccugguguucgcccagaagcugcccggcaacgacaacuccaccgcgacgcucugccuggggcaccacgccgucccgaacggcacccuggugaagaccaucaccaacgaccagaucgaggugacgaacgccaccgagcucguccagagcuccagcaccgggcgcaucugcgacagcccccaccagauccuggacggcgagaacugcacccugaucgacgcccuccugggggacccccacugcgacggcuuccagaacaaggagugggaccuguucguggagcggagcaaggccuacuccaacugcuaccccuacgacgugccggacuacgucagccuccgcucccugguggcgagcuccggcacgcuggaguucaacaacgagagcuucaacuggaccgggguggcccagaacggcaccuccagcgccugcaagcggcgcuccgacaagagcuucuucucccggcucaacuggcugcaccagcugaaguacaaguaccccgcccucaacgucaccaugcccaacaacgagaaguucgacaagcuguacaucuggggcgugcaccaccccgggacggacagcgaccagaucucccuguacgcgcaggccagcgggcgcgugaccgucagcaccaagcggucccagcagaccgugaucccgaacaucggcagccgccccugggugcggggcgucuccagccgcaucuccaucuacuggacgaucgugaagcccggggacauccuccugaucaacagcaccggcaaccugaucgcgccccggggguacuucaagauccgcuccggcaagagcuccaucaugcggagcgacgccccgaucggcaagugcaacuccgagugcaucacccccaacgggagcaucuccaacgacaagcccuuccagaacgugaaccgcaucaccuacggcgccugcccccgguacgucaagcagaacacgcucaagcuggccaccgggaugcgcaacgugccggagaagcagacccggggcaucuucggggccaucgccggcuucaucgagaacggcugggaggggaugauggacggcugguacggguuccgccaccagaacagcgagggcaccgggcaggccgccgaccugaaguccacgcaggcggccaucaaccagaucaacggcaagcucaaccggcugaucgagaagaccaacgagaaguuccaccagaucgagaaggaguucagcgagguggagggccgcauccaggaccuggagaaguacgucgaggacaccaagaucgaccucugguccuacaacgccgagcugcugguggcccucgagaaccagcacaccaucgaccugacggacagcgagaugaacaagcuguucgagcggaccaagaagcagcuccgcgagaacgccgaggacauggggaacggcugcuucaagaucuaccacaagugcgacaacgcgugcaucggguccauccgcaacggcaccuacgaccacgacguguaccgggacgaggcccugaacaaccgcuuccagaucaagggggucgagcugaaguccggcuacaaggacugggugcucuggaucagcuucgccaucuccugcuuccugcugugcaucguccuccugggcuucaucaugugggccugccagaaggggaacauccggugcaacaucugcaucuga

SEQ ID NO: 65707 - RNA, 1701 nt, Artificial Sequence; identical to SEQ ID NO: 64586
  derived and/or modified CDS sequence (opt1) from hemagglutinin__InfluenzaA__ABR15951

SEQ ID NO: 65708 - RNA, 1701 nt, Artificial Sequence
  derived and/or modified CDS sequence (opt1) from hemagglutinin__InfluenzaA__ABR15962
augaagaccaucaucgcccugagcuacauccucugccugguguucgcccagaagcugcccggcaacgacaacuccaccgcgacgcucugccuggggcaccacgccgucccgaacggcacccuggugaagaccaucaccaacgaccagaucgaggugacgaacgccaccgagcucguccagagcuccagcaccgggcgcaucugcgacagcccccaccagauccuggacggcgagaacugcacccugaucgacgcccuccugggggacccccacugcgacggcuuccagaacaaggagugggaccuguucguggagcggagccgcgccuacuccaacugcuaccccuacgacgugccggacuacgucagccuccggucccugguggcgagcuccggcacgcuggaguucaacaacgagagcuucaacuggaccgggguggcccagaacggcaccuccagcgccugcaagcgccgguccgacaagagcuucuucucccgccucaacuggcugcaccagcugaaguacaaguaccccgcccucaacgucaccaugcccaacaacgagaaguucgacaagcuguacaucuggggcgugcaccaccccgggacggacagcgaccagaucucccuguacgcgcaggccagcgggcgggugaccgucagcaccaagcgcucccagcagaccgugaucccgaacaucggcagccggcccugggugcgcggcgucuccagcaucaucuccaucuacuggacgaucgugaagcccggggacauccuccugaucaacagcaccggcaaccugaucgcgccccggggguacuucaagauccgcuccggcaagagcuccaucaugcggagcgacgccccgaucggcaagugcaacuccgagugcaucacccccaacgggagcauccccaacgacaagcccuuccagaacgugaaccgcaucaccuacggcccgugcccccgguacgucaagcagaacacgcucaagcuggccaccgggaugcgcaacgugcccgagaagcagacccggggcaucuucggggccaucgccggcuucaucgagaacggcugggaggggaugauggacggcugguacggguuccgccaccagaacuccgagggcaccgggcaggccgccgaccugaaguccacgcaggccgcgaucaaccagaucaacggcaagcucaaccggcugaucgagaagaccaacgagaaguuccaccagaucgagaaggaguucuccgagguggagggccgcauccaggaccuggagaaguacgucgaggacaccaagaucgaccucuggagcuacaacgccgagcugcugguggcccucgagaaccagcacaccaucgaccugacggacuccgagaugaacaagcuguucgagcggaccaagaagcagcuccgcgagaacgccgaggacauggggaacggcugcuucaagaucuaccacaagugcgacaacgccugcaucgggagcauccgcaacggcaccuacgaccacgacguguaccgggacgaggcgcugaacaaccgcuuccagaucaagggggucgagcugaaguccggcuacaaggacuggauccucuggaucagcuucgccaucagcugcuuccugcugugcaucgugcuccugggcuucaucaugugggccugccagaaggggaacauccggugcaacaucugcaucuga

SEQ ID NO: 65709 - RNA, 1701 nt, Artificial Sequence
  derived and/or modified CDS sequence (opt1) from hemagglutinin__InfluenzaA__ABR22241
augaagaccaucaucgcccugagcuacauccucugccuggccuucgcgcagaagcugcccggcaacgacaacuccaccgccacgcucugccuggggcaccacgccgugccgaacggcacccuggucaagaccaucaccaacgaccagaucgaggugacgaacgccaccgagcucgugcagagcuccagcaccgggcgcaucugcgacagcccccaccagauccuggacggcgagaacugcacccugaucgacgcccuccugggggacccccacugcgacggcuuccagaacaaggagugggaccuguucgucgagcggagcaaggcguacuccaacugcuaccccuacgacgugccggacuacgccagccuccgcucccugguggccagcuccggcacgcuggaguucaacaacgagagcuucaacuggaccggggucgcccagaacggcaccuccagcgcgugcaagcggcgcuccaucaagagcuucuucucccggcucaacuggcugcaccagcuggaguaccgcuaccccgcccucaacgugaccaugcccaacaacgacaaguucgacaagcuguacaucuggggcgugcaccaccccagcacggacuccgaccagaucagcgucuacgcccaggccagcgggcgggugaccguguccaccaagcgcagccagcagaccgucaucccgaacaucgggucccggcccugggugcgcggcaucagcucccggaucagcaucuacuggacgaucgugaagcccggcgacauccugcucaucaacuccaccgggaaccugaucgcgccccgcggcuacuucaagauccggagcgggaaguccagcaucaugcgcuccgacgccccgaucggcaagugcaacagcgagugcaucacccccaacggcuccauccccaacgacaagcccuuccagaacgucaaccggaucaccuacggggccugcccgcgcuacgugaagcagaacacgcugaagcucgccaccggcaugcggaacgugcccgagaagcagacccgcgggaucuucggcgccaucgccggguucaucgagaacggcugggagggcaugauggacgggugguacggcuuccggcaccagaacagcgaggggaccggccaggcggccgaccugaaguccacgcaggccgccaucaaccagaucaacgggaagcugaacaagcucaucgagaagaccaacgagaaguuccaccagaucgagaaggaguucagcgaggucgagggccgcauccaggaccuggagaaguacguggaggacaccaagaucgaccugugguccuacaacgccgagcuccugguggcgcuggagaaccagaacaccaucgaccucacggacagcgagaugaacaagcuguucgagcggacccgcaagcagcugcgcgagaacgccgaggacaugggcaacgggugcuucaagaucuaccacaagugcgacaacgccugcaucggcuccauccggaacgggaccuacgaccacgacgucuaccgcgacgaggcccucaacaaccgguuccagaucaagggcguggagcugaaguccggguacaaggacuggauccuguggaucagcuucgccaucuccugcuuccuccugugcgugguccugcucggcuucaucaugugggcgugccagaagggcaacauccgcugcaacaucugcaucuga

SEQ ID NO: 65710 - RNA, 1701 nt, Artificial Sequence; identical to SEQ ID NO: 64674
  derived and/or modified CDS sequence (opt1) from hemagglutinin__InfluenzaA__ABR28515

SEQ ID NO: 65711 - RNA, 1701 nt, Artificial Sequence
  derived and/or modified CDS sequence (opt1) from hemagglutinin__InfluenzaA__ABR28592
augaagaccaucaucgcccugagcuacguguucugccucgucuucgcccaggaccugcccggcaacgacaacuccaccgcgacgcugugccucgggcaccacgccgugccgaacggcacccuggugaagaccaucaccaacgaccagaucgaggucacgaacgccaccgagcuggugcagagcuccagcaccgggaagaucugcgacaacccccaccgcauccucgacggcaucaacugcacccugaucgacgcccugcucggggacccccacugcgacggcuuccagaacgagaagugggaccuguucguggagcgguccaaggccuucagcaacugcuaccccuacgacgucccggacuacgcgucccugcgcagccucguggccuccagcggcacgcuggaguucaucaacgagggguucaacuggaccggcgugacccagaacgggggcuccagcgccugcaagcgggggcccgacaacggcuucuucucccgccugaacuggcucuacaagagcggcuccaccuaccccguccagaacgugacgaugcccaacaacgacaacagcgacaagcuguacaucuggggcgugcaccacccguccaccgacaaggagcagaccgaccuguacguccaggccagcgggaaggugaccguguccacgaagcggagccagcagaccgucauccccaacguggggagccgccccugggugcggggccucuccagccgcgucuccaucuacuggaccaucgugaagcccggcgacauccuggugaucaacagcaacgggaaccugaucgcgccgcggggcuacuucaagaugcgcaccgggaaguccagcaucaugcgguccgacgcccccaucggcacgugcagcuccgagugcaucacccccaacgggagcauccccaacgacaagccguuccagaacgucaacaagaucaccuacggcgccugccccaaguacgugaagcagaacacccucaagcuggccacgggcaugcgcaacgugcccgagaagcagacccgggggaucuucggcgccaucgcgggguucaucgagaacggcugggaggggaugaucgacggcugguacggcuuccgccaccagaacuccgaggggaccggccaggccgccgaccucaagagcacccaggccgccaucgaccagaucaacgggaagcugaaccgggucaucgagaagacgaacgagaaguuccaccagaucgagaaggaguucuccgagguggagggccgcauccaggaccuggagaaguacgucgaggacaccaagaucgaccuguggagcuacaacgcggagcuccugguggcccuggagaaccagcacaccaucgaccucaccgacuccgagaugaacaagcuguucgagaagacgcggcgccagcugcgggagaacgccgaggacauggggaacggcugcuucaagaucuaccacaagugcgacaacgccugcaucggcagcauccgcaacgggaccuacgaccacgacguguaccgggacgaggcccucaacaaccgcuuccagaucaagggcgucgagcugaaguccggguacaaggacuggauccuguggaucagcuucgcgaucuccugcuuccuccugugcguggugcugcucggcuucaucaugugggccugccagaagggcaacauccgcugcaacaucugcaucuga

SEQ ID NO: 65712 - RNA, 1698 nt, Artificial Sequence; identical to SEQ ID NO: 64766
  derived and/or modified CDS sequence (opt1) from hemagglutinin__InfluenzaA__ABR28768

SEQ ID NO: 65713 - RNA, 1698 nt, Artificial Sequence; identical to SEQ ID NO: 64766
  derived and/or modified CDS sequence (opt1) from hemagglutinin__InfluenzaA__ABR28779

SEQ ID NO: 65714 - RNA, 1701 nt, Artificial Sequence; identical to SEQ ID NO: 65457
  derived and/or modified CDS sequence (opt1) from hemagglutinin__InfluenzaA__ABR28790

SEQ ID NO: 65715 - RNA, 1698 nt, Artificial Sequence; identical to SEQ ID NO: 64766
  derived and/or modified CDS sequence (opt1) from hemagglutinin__InfluenzaA__ABR28801

SEQ ID NO: 65716 - RNA, 1701 nt, Artificial Sequence; identical to SEQ ID NO: 64674
  derived and/or modified CDS sequence (opt1) from hemagglutinin__InfluenzaA__ABR28812

SEQ ID NO: 65717 - RNA, 1701 nt, Artificial Sequence
  derived and/or modified CDS sequence (opt1) from hemagglutinin__InfluenzaA__ABR28823
augaagaccaucaucgcccugagcuacauccucugccugguguucgcccagaagcugcccggcaacgacaacuccaccgcgacgcucugccuggggcaccacgccgucccgaacggcacccuggugaagaccaucaccaacgaccagaucgaggugacgaacgccaccgagcucguccagagcuccagcaccgggcgcaucugcgacagcccccaccagauccuggacggcgagaacugcacccugaucgacgcccuccugggggacccccacugcgacggcuuccagaacaaggagugggaccuguucguggagcggagcaaggccuacuccaacugcuaccccuacgacgugccggacuacgucagccuccgcucccugguggcgagcuccggcacgcuggaguucaacaacgagagcuucaacuggaccgggguggcccagaacggcaccuccagcgccugcaagcggcgcuccgacaagagcuucuucucccggcucaacuggcugcaccagcugaaguacaaguaccccgcccucaacgucaccaugcccaacaacgagaaguucgacaagcuguacaucuggggcgugcaccaccccgggacggacagcgaccagaucucccuguacgcgcaggccagcgggcgcgugaccgucagcaccaagcggucccagcagaccgugaucccgaacaucggcagccgccccugggugcggggcaucuccagccgcaucuccaucuacuggacgaucgucaagcccggggacauccuccugaucaacagcaccggcaaccugaucgcgccccggggguacuucaagauccgcuccggcaagagcuccaucaugcggagcgacgccccgaucggcaagugcaacuccgagugcaucacccccaacgggagcauccccaacgacaagcccuuccagaacgugaaccgcaucaccuacggcccgugcccccgguacgugaagcagaacacgcucaagcuggccaccgggaugcgcaacguccccgagaagcagacccggggcaucuucggggccaucgccggcuucaucgagaacggcugggaggggaugauggacggcugguacggguuccgccaccagaacuccgagggcaccgggcaggccgccgaccugaaguccacgcaggccgcgaucaaccagaucaacggcaagcucaaccggcugaucgagaagaccaacgagaaguuccaccagaucgagaaggaguucuccgagguggagggccgcauccaggaccuggagaaguacguggaggacaccaagaucgaccucuggagcuacaacgccgagcugcuggucgcccucgagaaccagcacaccaucgaccugacggacuccgagaugaacaagcuguucgagcggaccaagaagcagcuccgcgagaacgccgaggacauggggaacggcugcuucaagaucuaccacaagugcgacaacgccugcaucgggagcauccgcaacggcaccuacgaccacgacguguaccgggacgaggcgcugaacaaccgcuuccagaucaaggggguggagcugaaguccggcuacaaggacuggauccucuggaucagcuucgccaucagcugcuuccugcugugcaucguccuccugggcuucaucaugugggccugccagaaggggaacauccggugcaacaucugcaucuga

SEQ ID NO: 65718 - RNA, 1698 nt, Artificial Sequence; identical to SEQ ID NO: 64894
  derived and/or modified CDS sequence (opt1) from hemagglutinin__InfluenzaA__ABR28834

SEQ ID NO: 65719 - RNA, 1698 nt, Artificial Sequence; identical to SEQ ID NO: 64865
  derived and/or modified CDS sequence (opt1) from hemagglutinin__InfluenzaA__ABR28845

SEQ ID NO: 65720 - RNA, 1701 nt, Artificial Sequence
  derived and/or modified CDS sequence (opt1) from hemagglutinin__InfluenzaA__ABR28856
augaagaccaucaucgcccugagcuacauccucugccugguguucgcccagaagcugcccggcaacgacaacuccaccgcgacgcucugccuggggcaccacgccgucccgaacggcacccuggugaagaccaucaccaacgaccagaucgaggugacgaacgccaccgagcucguccagagcuccagcaccgggcgcaucugcgacagcccccaccagauccuggacggcgagaacugcacccugaucgacgcccuccugggggacccccacugcgacggcuuccagaacaaggagugggaccuguucguggagcggagcaaggccuacuccaacugcuaccccuacgacgugccggacuacgucagccuccgcucccugguggcgagcuccggcacgcuggaguucaacaacgagagcuucaacuggaccgggguggcccagaacggcaccuccagcgccugcaagcggcgcuccgacaagagcuucuucucccggcucaacuggcugcaccagcugaaguacaaguaccccgcccucaacgucaucaugcccaacaacgagaaguucgacaagcuguacaucuggggcgugcaccaccccgggaccgacagcgaccagaucucccuguacgcgcaggccagcgggcgcgugacggucagcaccaagcggucccagcagaccgugaucccgaacaucggcagccgccccugggugcggggcgucuccagccgcaucuccaucuacuggaccaucgugaagcccggggacauccuccugaucaacagcacgggcaaccugaucgcgccccggggguacuucaagauccgcuccggcaagagcuccaucaugcggagcgacgccccgaucggcaagugcaacuccgagugcaucacccccaacgggagcauccccaacgacaagcccuuccagaacgugaaccgcaucaccuacggcgccugcccgcgguacgucaagcagaagacccucaagcuggccacggggaugcgcaacgugcccgagaagcagacccggggcaucuucggggccaucgccggcuucaucgagaacggcugggaggggaugauggacggcugguacggguuccgccaccagaacuccgagggcaccgggcaggccgccgaccugaaguccacccaggcggccaucaaccagaucaacggcaagcucaaccggcugaucgagaagacgaacgagaaguuccaccagaucgagaaggaguucuccgagguggagggccgcauccaggaccuggagaaguacgucgaggacaccaagaucgaccucuggagcuacaacgccgagcugcugguggcccucgagaaccagcacaccaucgaccugaccgacuccgagaugaacaagcuguucgagcggacgaagaagcagcuccgcgagaacgccgaggacauggggaacggcugcuucaagaucuaccacaagugcgacaacgcgugcaucgggagcauccgcaacggcaccuacgaccacgacguguaccgggacgaggcccugaacaaccgcuuccagaucaagggggucgagcugaaguccggcuacaaggacuggauccucuggaucagcuucgccaucagcugcuuccugcugugcaucgugcuccugggcuucaucaugugggccugccagaaggggaacauccggugcaacaucugcaucuga

SEQ ID NO: 65721 - RNA, 1701 nt, Artificial Sequence; identical to SEQ ID NO: 64631
  derived and/or modified CDS sequence (opt1) from hemagglutinin__InfluenzaA__ABR28867

SEQ ID NO: 65722 - RNA, 1701 nt, Artificial Sequence; identical to SEQ ID NO: 64586
  derived and/or modified CDS sequence (opt1) from hemagglutinin__InfluenzaA__ABR28878

SEQ ID NO: 65723 - RNA, 1698 nt, Artificial Sequence; identical to SEQ ID NO: 65228
  derived and/or modified CDS sequence (opt1) from hemagglutinin__InfluenzaA__ABR28900

SEQ ID NO: 65724 - RNA, 1701 nt, Artificial Sequence
  derived and/or modified CDS sequence (opt1) from hemagglutinin__InfluenzaA__ABR28922
augaagaccaucaucgcccugagcuacauccucugccugguguucgcccagaagcugcccggcaacgacaacuccaccgcgacgcucugccuggggcaccacgccgucccgaacggcaccaucgugaagaccaucaccaacgaccagaucgaggugacgaacgccaccgagcugguccagagcuccagcaccgggggcaucugcgacagcccccaccagauccucgacggggagaacugcacccugaucgacgcccugcucggcgacccccagugcgacggcuuccagaacaagaagugggaccuguucguggagcgcagcaaggccuacuccaacugcuaccccuacgacgugccggacuacgcgagccugcggucccucgucgccagcuccgggacgcuggaguucaacaacgagagcuucaacuggaccggcgugacccagaacgggaccuccagcgccugcaagcgccgguccaacaacagcuucuucucccgccugaacuggcucacgcaccugaaguucaaguaccccgcccugaacgugaccaugcccaacaacgagaaguucgacaagcucuacaucuggggcguccaccaccccgggaccgacaacgaccagaucagccuguacgcgcaggccuccggccggaucaccgugagcacgaagcgcagccagcagaccgugaucccgaacaucggcucccggccccgcguccgggacauccccagccgcguguccaucuacuggaccaucgugaagcccggggacauccugcucaucaacagcaccggcaaccugaucgccccgcggggguacuucaagauccgcuccggcaagagcuccaucaugcggagcgacgcccccaucggcaagugcaacuccgagugcaucacgcccaacgggagcauccccaacgacaagccguuccagaacgucaaccgcaucaccuacggcgccugcccccgguacgugaagcagaacacccugaagcucgcgaccgggaugcgcaacgugcccgagaagcagacgcggggcaucuucggggccaucgccggcuucaucgagaacggcugggaggggauggucgacggcugguacggguuccgccaccagaacuccgagggcaucgggcaggccgccgaccugaaguccacccaggcggccaucaaccagaucaacggcaagcugaaccggcucaucggcaagaccaacgagaaguuccaccagaucgagaaggaguucuccgagguggaggggcgcauccaggaccuggagaaguacguggaggacaccaagaucgaccuguggagcuacaacgccgagcuccuggucgcccuggagaaccagcacacgaucgaccucaccgacuccgagaugaacaagcuguucgagcggaccaagaagcagcugcgcgagaacgccgaggacaugggcaacgggugcuucaagaucuaccacaagugcgacaacgcgugcaucggcagcauccgcaacgggaccuacgaccacgacguguaccgggacgaggcccucaacaaccgcuuccagaucaagggcguggagcugaaguccggcuacaaggacuggauccuguggaucagcuucgccaucuccugcuuccuccugugcgucgcccugcucggguucaucaugugggccugccagaagggcaacauccggugcaacaucugcaucuga

SEQ ID NO: 65725 - RNA, 1701 nt, Artificial Sequence; identical to SEQ ID NO: 65605
  derived and/or modified CDS sequence (opt1) from hemagglutinin__InfluenzaA__ABR88080

SEQ ID NO: 65726 - RNA, 1701 nt, Artificial Sequence
  derived and/or modified CDS sequence (opt1) from hemagglutinin__InfluenzaA__ABS00315
augaaggccaagcugcucgugcugcugugcgccuucaccgcgaccgacgccgacacgaucugcaucggcuaccacgccaacaacagcaccgacaccgucgacaccgugcucgagaagaacgugacggucacccacuccgugaaccugcuggaggacagccacaacgggaagcucugccgccugaagggcaucgcgccccugcagcucgggaacugcuccguggccggcuggauccuggggaacccggagugcgagagccuguucuccaagaaguccuggagcuacaucgccgagacccccaacagcgagaacgggaccugcuaccccggcuacuucgccgacuacgaggagcuccgggagcagcuguccagcgucuccagcuucgagcgcuucgagaucuuccccaaggaguccagcuggccgaaccacacggugaccaagggcguguccgccagcugcucccacaagggccggagcuccuucuaccgcaaccugcucuggcugaccgagaagaacgggagcuaccccaaccugagcaaguccuacgucaacaacaaggagcgggaggugcucgugcuguggggcguccaccaccccagcaacaucggggagcagcgcgccaucuaccacaccgagaacgcguacguguccguggucagcucccacuacaaccggcgcuucacgcccgagaucgccaagcggccgaaggugcgcggccaggagggccggaucaacuacuacuggacccugcucgagcccggggacaccaucaucuucgaggccaacggcaaccugaucgcccccugguacgccuucgcgcugagccgcggguucggcuccggcaucaucaccagcaacgccuccauggacgagugcgacgccaagugccagacgccccagggggccaucaacagcucccucccguuccagaacgugcaccccgucaccaucggcgagugccccaaguacgugcggagcaccaagcugcgcauggugaccgggcugcggaacauccccuccauccagagccgcggccucuucggggccaucgcgggcuucaucgagggcggguggacgggcaugaucgacgggugguacggcuaccaccaccagaacgagcagggguccggcuacgccgccgaccagaaguccacccagaacgccaucaacggcaucaccaacaaggucaacagcgugaucgagaagaugaacacccaguucacggccguggggaaggaguucaacaagcuggagcggcgcauggagaaccugaacaagaaggucgacgacggcuuccucgacaucuggaccuacaacgcggagcugcuggugcuccuggagaacgagcggacccuggacuuccacgacagcaacgucaagaaccucuacgagaaggugaagucccagcugaagaacaacgccaaggagaucgggaacggcugcuucgaguucuaccacaagugcaacaacgagugcauggagagcgugaagaacgggaccuacgacuacccgaaguacagcgaggaguccaagcugaaccgcgagaagaucgacggcgucaagcucgagagcaugggcguguaccagauccuggccaucuacuccacgguggccagcucccugguccuccuggugagccugggggccaucuccuucuggaugugcagcaacggcucccuccagugccggaucugcaucuga

SEQ ID NO: 65727 - RNA, 1701 nt, Artificial Sequence
  derived and/or modified CDS sequence (opt1) from hemagglutinin__InfluenzaA__ABS00326
augaaggccaagcugcucgugcugcugugcgccuucaccgcgaccgacgccgacacgaucugcaucggcuaccacgccaacaacagcaccgacaccgucgacaccgugcucgagaagaacgugacggucacccacuccgugaaccugcuggaggacagccacaacgggaagcucugccgccugaagggcaucgcgccccugcagcucgggaacugcuccguggccggcuggauccuggggaacccggagugcgagagccuguucuccaagaaguccuggagcuacaucgccgagacccccaacagcgagaacgggaccugcuaccccggcuacuucgccgacuacgaggagcuccgggagcagcuguccagcgucuccagcuucgagcgcuucgagaucuuccccaaggaguccagcuggccgaaccacacggugaccaagggcguguccgccagcugcucccacaagggccggagcuccuucuaccgcaaccugcucuggcugaccgagaagaacgggagcuaccccaaccugagcaaguccuacgucaacaacaaggagaaggaggugcucgugcuguggggcguccaccaccccagcaacaucggggagcagcgggccaucuaccacaccgagaacgcguacguguccguggucagcucccacuacaaccgccgguucacgcccgagaucgccaagcgcccgaaggugcggggccaggagggccgcaucaacuacuacuggacccugcucgagcccggggacaccaucaucuucgaggccaacggcaaccugaucgcccccugguacgccuucgcgcugagccggggguucggcuccggcaucaucaccagcaacgccuccauggacgagugcgacgccaagugccagacgccccagggggccaucaacagcucccucccguuccagaacgugcaccccgucaccaucggcgagugccccaaguacgugcgcagcaccaagcugcggauggugaccgggcugcgcaacauccccuccauccagagccggggccucuucggggccaucgcgggcuucaucgagggcggguggacgggcaugaucgacgggugguacggcuaccaccaccagaacgagcagggguccggcuacgccgccgaccagaaguccacccagaacgccaucaacggcaucaccaacaaggucaacagcgugaucgagaagaugaacacccaguucacggccguggggaaggaguucaacaagcuggagcgccggauggagaaccugaacaagaaggucgacgacggcuuccucgacaucuggaccuacaacgcggagcugcuggugcuccuggagaacgagcgcacccuggacuuccacgacagcaacgucaagaaccucuacgagaaggugaagucccagcugaagaacaacgccaaggagaucgggaacggcugcuucgaguucuaccacaagugcaacaacgagugcauggagagcgugaagaacgggaccuacgacuacccgaaguacagcgaggaguccaagcugaaccgggagaagaucgacggcgucaagcucgagagcaugggcguguaccagauccuggccaucuacuccacgguggccagcucccugguccuccuggugagccugggggccaucuccuucuggaugugcagcaacggcucccuccagugccgcaucugcaucuga

SEQ ID NO: 65728 - RNA, 1701 nt, Artificial Sequence; identical to SEQ ID NO: 65664
  derived and/or modified CDS sequence (opt1) from hemagglutinin__InfluenzaA__ABS49899

SEQ ID NO: 65729 - RNA, 1701 nt, Artificial Sequence
  derived and/or modified CDS sequence (opt1) from hemagglutinin__InfluenzaA__ABS49910
augaagaccaucaucgcccugagcuacaucuucugccucgcccugggccaggaccugcccgggaacgacaacuccaccgcgacgcucugccugggccaccacgccgugccgaacgggacccuggucaagaccaucaccaacgaccagaucgaggugacgaacgccaccgagcucgugcagagcuccagcaccggcaagaucugcaacaacccccaccgcauccuggacgggaucaacugcacccugaucgacgcccuccugggcgacccccacugcgacgucuuccaggacgagacgugggaccuguucguggagcgguccaaggccuucagcaacugcuaccccuacgacgugccggacuacgcgucccuccgcagccuggucgccuccagcggcacccuggaguucaucaccgagggguucaccuggacgggcgugacccagaacgggggcuccaacgccugcaagcgggggcccggcagcggcuucuucucccgccucaacuggcugaccaagagcggguccaccuaccccgugcugaacgucacgaugcccaacaacgacaacuucgacaagcucuacaucuggggcgugcaccacccgagcaccaaccaggagcagaccucccuguacgugcaggccagcgggcgggucaccguguccacgcgccggagccagcagaccaucauccccaacaucggcagccgccccugggugcggggccuguccagccgcaucuccaucuacuggaccaucgucaagcccggggacgugcucgugaucaacagcaacggcaaccugaucgcgccgcggggguacuucaagaugcgcaccggcaaguccagcaucaugcgguccgacgcccccaucgacacgugcaucagcgagugcaucacccccaacggguccauccccaacgacaagccguuccagaacgucaacaagaucaccuacggcgccugccccaaguacgugaagcagaacacccugaagcucgccacgggcaugcgcaacgugcccgagaagcagacccgggggcuguucggcgccaucgcgggguucaucgagaacggcugggaggggaugaucgacggcugguacggcuuccgccaccagaacagcgaggggaccggccaggccgccgaccugaaguccacccaggccgccaucgaccagaucaacgggaagcucaaccgggucaucgagaagacgaacgagaaguuccaccagaucgagaaggaguucagcgagguggagggccgcauccaggaccuggagaaguacguggaggacaccaagaucgaccugugguccuacaacgcggagcuccuggucgcccuggagaaccagcacaccaucgaccucaccgacagcgagaugaacaagcuguucgagaagacgcggcgccagaugcgggagaacgccgaggacauggggaacggcugcuucaagaucuaccacaagugcgacaacgccugcaucgaguccauccgcaacggcaccuacgaccacgacguguaccgcgacgaggcccugaacaaccgguuccagaucaagggggucgagcucaagagcggcuacaaggacuggauccuguggaucuccuucgcgaucagcugcuuccugcucugcguggugcugcugggguucaucaugugggccugccagcgcggcaacauccggugcaacaucugcaucuga

SEQ ID NO: 65730 - RNA, 1701 nt, Artificial Sequence; identical to SEQ ID NO: 64674
  derived and/or modified CDS sequence (opt1) from hemagglutinin__InfluenzaA__ABS49965

SEQ ID NO: 65731 - RNA, 1698 nt, Artificial Sequence
  derived and/or modified CDS sequence (opt1) from hemagglutinin__InfluenzaA__ABS49976
augaaggugaagcugcucguccugcugugcaccuucaccgccacguacgccgacaccaucugcaucggcuaccacgcgaacaacagcaccgacaccguggacacggugcucgagaagaacgucaccgugacccacuccgugaaccugcuggaggacagccacaacgggaagcucugccugcugaagggcaucgcgccccuccagcuggggaacugcuccgucgccggcuggauccuggggaacccggagugcgagcuccugaucagcaaggaguccuggagcuacaucguggagacccccaaccccgagaacggcacgugcuaccccggcuacuucgccgacuacgaggagcugcgcgagcagcucuccagcguguccagcuucgagcgguucgagaucuucccgaaggaguccagcuggcccaaccacaccgucaccgggguguccgccagcugcucccacaacggcaagagcuccuucuaccgcaaccugcuguggcucaccgggaagaacggccuguaccccaaccugagcaaguccuacgccaacaacaaggagaaggaggugcucguccuguggggcgugcaccacccgcccaacaucgggaaccagcgggcccuguaccacacggagaacgccuacgugagcgucgugagcucccacuacagccgccgguucacccccgagaucgccaagcgccccaaggugcgggaccaggagggccgcaucaacuacuacuggacccuccuggagcccggggacaccaucaucuucgaggcgaacggcaaccugaucgccccgcgguacgccuucgcccucucccgcggguucggcagcggcaucaucacguccaacgcccccauggacgagugcgacgcgaagugccagacgccccagggggccaucaacagcucccugcccuuccagaacguccacccggugaccaucggcgagugccccaaguacgugcggagcgccaagcugcgcauggucaccgggcuccggaacauccccuccauccagagccgcggccuguucggggccaucgccggcuucaucgagggcggguggaccggcaugguggacgggugguacggcuaccaccaccagaacgagcagggguccggcuacgcggccgaccagaaguccacccagaacgccaucaacggcaucaccaacaaggugaacagcgucaucgagaagaugaacacccaguucacggccguggggaaggaguucaacaagcuggagcggcgcauggagaaccucaacaagaaggucgacgacggcuuccuggacaucuggaccuacaacgccgagcugcucgugcugcuggagaacgagcggacccucgacuuccacaacagcaacgugaagaaccuguacgagaaggucaagucccagcugaagaacaacgcgaaggagaucgggaacggcugcuucgaguucuaccacaagugcaacaacgagugcauggagagcgugaagaacgggaccuacgacuaccccaaguacuccgaggagagcaagcucaaccgcgagaagaucgacggcgugaagcuggaguccaugggcgucuaccagauccuggccaucuacagcacgguggccagcucccucgugcugcuggucagccucggggccaucuccuucuggaugugcagcaacggcucccugcagugccggaucugcaucuga

SEQ ID NO: 65732 - RNA, 1698 nt, Artificial Sequence
  derived and/or modified CDS sequence (opt1) from hemagglutinin__InfluenzaA__ABS49987
augaaggugaagcugcucguccugcugugcaccuucaccgccacguacgccgacaccaucugcaucggcuaccacgcgaacaacagcaccgacaccguggacacggugcucgagaagaacgucaccgugacccacuccgugaaccugcuggaggacagccacaacgggaagcucugccugcugaagggcaucgcgccccuccagcuggggaacugcuccgucgccggcuggauccuggggaacccggagugcgagcuccugaucagcaaggaguccuggagcuacaucguggagacccccaaccccgagaacggcacgugcuaccccggcuacuucgccgacuacgaggagcugcgcgagcagcucuccagcguguccagcuucgagcgguucgagaucuucccgaaggaguccagcuggcccaaccacaccgucaccgggguguccgccagcugcucccacaacggcaagagcuccuucuaccgcaaccugcuguggcucaccgggaagaacggccuguaccccaaccugagcaaguccuacgccaacaacaaggagaaggaggugcucguccuguggggcgugcaccacccgcccaacaucggggaccagcgggcccuguaccacacggagaacgccuacgugagcgucgugagcucccacuacagccgccgguucacccccgagaucgccaagcgccccaaggugcgggaccaggagggccgcaucaacuacuacuggacccuccuggagcccggggacaccaucaucuucgaggcgaacggcaaccugaucgccccgcgguacgccuucgcccucucccgcggguucggcagcggcaucaucacguccaacgcccccauggacgagugcgacgcgaagugccagacgccccagggggccaucaacagcucccugcccuuccagaacguccacccggugaccaucggcgagugccccaaguacgugcggagcgccaagcugcgcauggucaccgggcuccggaacauccccuccauccagagccgcggccuguucggggccaucgccggcuucaucgagggcggguggaccggcaugguggacgggugguacggcuaccaccaccagaacgagcagggguccggcuacgcggccgaccagaaguccacccagaacgccaucaacggcaucaccaacaaggugaacagcgucaucgagaagaugaacacccaguucacggccguggggaaggaguucaacaagcuggagcggcgcauggagaaccucaacaagaaggucgacgacggcuuccuggacaucuggaccuacaacgccgagcugcucgugcugcuggagaacgagcggacccucgacuuccacgacagcaacaugaagaaccuguacgagaaggugaagucccagcugaagaacaacgcgaaggagaucgggaacggcugcuucgaguucuaccacaagugcaacaacgagugcauggagagcgucaagaacgggaccuacgacuaccccaaguacuccgaggagagcaagcucaaccgcgagaagaucgacggcgugaagcuggaguccaugggcguguaccagauccuggccaucuacagcacggucgccagcucccucgugcugcuggugagccucggggccaucuccuucuggaugugcagcaacggcucccugcagugccggaucugcaucuga

SEQ ID NO: 65733 - RNA, 1701 nt, Artificial Sequence
  derived and/or modified CDS sequence (opt1) from hemagglutinin__InfluenzaA__ABS49998
augaagaccaucaucgcccugagcuacauccucugccugguguucgcccagaagcugcccggcaacgacaacuccaccgcgacgcucugccuggggcaccacgccgucccgaacggcacccuggugaagaccaucaccaacgaccagaucgaggugacgaacgccaccgagcucguccagagcuccagcaccgggggcaucugcgacagcccccaccagauccuggacggggagaacugcacccugaucgacgcccuccugggcgacccccacugcgacggcuuccagaacaaggagugggaccuguucguggagcgcagcaaggccuacuccaacugcuaccccuacgacgugccggacuacgcgagccuccggucccuggucgccagcuccgggacgcuggaguucaacaacgagagcuucaacuggaccggcguggcccagaacgggaccuccagcgccugcaagcgccgguccaacaagagcuucuucucccgccucaacuggcugcaccagcugaaguacaaguaccccgcgcucaacgugaucaugcccaacaacgagaaguucgacaagcuguacaucuggggcguccaccaccccagcaccgacuccgaccagaucagccuguacgcccaggccccggggcgggugacggugagcaccaagcgcucccagcagaccgucauccccaacaucggcagccggcccugggugcgcggcguguccagccggaucuccaucuacuggaccaucgucaagcccggggacauccuccugaucaacugcacgggcaaccugaucgccccgcgcggguacuucaagauccggagcggcaaguccagcaucaugcgcuccgacgccagcaucggcaagugcaacuccgagugcaucacccccaacgggagcauccccaacgacaagcccuuccagaacgugaaccggaucaccuacggcgcgugcccgcgcuacgugaagcagaacacccucaagcuggccacggggaugcggaacguccccgagaagcagacccgcggcaucuucggggccaucgccggcuucaucgagaacggcugggaggggaugguggacggcugguacggguuccggcaccagaacuccgagggcaccgggcaggccgcggaccugaaguccacccaggccgccaucaaccagaucaacggcaagcucaaccgccugaucgagaagacgaacgagaaguuccaccagaucgagaaggaguucuccgagguggagggccggauccaggaccuggagaaguacgucgaggacaccaagaucgaccucuggagcuacaacgccgagcugcugguggcccucgagaaccagcacaccaucgaccugaccgacuccgagaugaacaagcuguucgagcgcacgaagaagcagcuccgggagaacgcggaggacauggggaacggcugcuucaagaucuaccacaagugcgacaacgccugcaucgggagcauccgcaacggcaccuacgaccacgacguguaccgcgacgaggcccugaacaaccgguuccagaucaagggggucgagcugaaguccggcuacaaggacuggauccucuggaucagcuucgccaucagcugcuuccugcugugcgugguccuccugggcuucaucaugugggccugccagaaggggaacauccgcugcaacaucugcaucuga

SEQ ID NO: 65734 - RNA, 1701 nt, Artificial Sequence
  derived and/or modified CDS sequence (opt1) from hemagglutinin__InfluenzaA__ABS50009
augaagaccaucaucgcccugagcuacauccucugccugguguucgcccagaagcugcccggcaacgacaacuccaccgcgacgcucugccuggggcaccacgccgucccgaacggcacccuggugaagaccaucaccaacgaccagaucgaggugacgaacgccaccgagcucguccagagcuccagcaccgggggcaucugcgacagcccccaccagauccuggacggggagaacugcacccugaucgacgcccuccugggcgacccccacugcgacggcuuccagaacaaggagugggaccuguucguggagcgcagcaaggccuacuccaacugcuaccccuacgacgugccggacuacgcgagccuccggucccuggucgccagcuccgggacgcuggaguucaacaacgagagcuucaacuggaccggcguggcccagaacgggaccuccagcgccugcaagcgccgguccaacaagagcuucuucucccgccucaacuggcugcaccagcugaaguacaaguaccccgcgcucaacgugaccaugcccaacaacgagaaguucgacaagcuguacaucuggggcguccaccaccccagcacggacuccgaccagaucagccuguacgcccaggccccggggcgggugaccgugagcaccaagcgcucccagcagaccgucauccccaacaucggcagccggcccugggugcgcggcguguccagcaagaucuccaucuacuggacgaucgucaagcccggggacauccuccugaucaacugcaccggcaaccugaucgccccgcggggguacuucaagauccgcagcggcaaguccagcaucaugcgguccgacgccagcaucggcaagugcaacuccgagugcaucacccccaacgggagcauccccaacgacaagcccuuccagaacgugaaccgcaucaccuacggcgcgugcccgcgguacgugaagcagaacacgcucaagcuggccaccgggaugcgcaacguccccgagaagcagacccggggcaucuucggggccaucgccggcuucaucgagaacggcugggaggggaugguggacggcugguacggguuccgccaccagaacuccgagggcaccgggcaggccgcggaccugaaguccacgcaggccgccaucaaccagaucaacggcaagcucaaccggcugaucgagaagaccaacgagaaguuccaccagaucgagaaggaguucuccgagguggagggccgcauccaggaccuggagaaguacgucgaggacaccaagaucgaccucuggagcuacaacgccgagcugcugguggcccucgagaaccagcacaccaucgaccugacggacuccgagaugaacaagcuguucgagcggaccaagaagcagcuccgcgagaacgcggaggacauggggaacggcugcuucaagaucuaccacaagugcgacaacgccugcaucgggagcauccggaacggcaccuacgaccacgacguguaccgcgacgaggcccugaacaaccgcuuccagaucaagggggucgagcugaaguccggcuacaaggacuggauccucuggaucagcuucgccaucagcugcuuccugcugugcgugguccuccugggcuucaucaugugggccugccagaaggggaacauccggugcaacaucugcaucuga

SEQ ID NO: 65735 - RNA, 1701 nt, Artificial Sequence; identical to SEQ ID NO: 64734
  derived and/or modified CDS sequence (opt1) from hemagglutinin__InfluenzaA__ABS50020

SEQ ID NO: 65736 - RNA, 1701 nt, Artificial Sequence
  derived and/or modified CDS sequence (opt1) from hemagglutinin__InfluenzaA__ABS50031
augaagaccaucaucgcccugagcuacaugcucugccugguguucgcccagaagcugcccggcaacgacaacuccaccgcgaugcucugccuggggcaccacgccgucccgaacggcacgcuggugaagaccaucaccaacgaccagaucgaggugaccaacgccacggagcucguccagagcuccagcaccgggggcaucugcgacagcccccaccagauccuggacggggagaacugcacccugaucgacgcccuccugggcgacccccacugcgacggcuuccagaacaaggagugggaccuguucguggagcgcagcaaggccuacuccaacugcuaccccuacgacgugccggacuacgcgagccuccggucccuggucgccagcuccgggacccuggaguucaacaacgagagcuucaacuggacgggcguggcccagaacgggaccuccagcgccugcaagcgccgguccaacaagagcuucuucucccgccucaacuggcugcaccagcugaaguacaaguaccccgcgcucaacgugaccaugcccaacaacgagaaguucgacaagcuguacaucuggggcguccaccaccccagcaccgacuccgaccagaucagccuguacgcccaggccccggggcgggugacggugagcaccaagcgcucccagcagaccgucauccccaacaucggcagcggccccugggugcgcgggguguccagccggaucuccaucuacuggaccaucgucaagcccggcgacauccuccugaucaacugcacggggaaccugaucgccccgcggggcuacuucaagauccgcagcggcaaguccagcaucaugcgguccgacgccagcaucgggaagugcaacuccgagugcaucacccccaacggcagcauccccaacgacaagcccuuccagaacgugaaccgcaucaccuacggggcgugcccgcgguacgugaagcagaacacccucaagcuggccacgggcaugcgcaacguccccgagaagcagacccgggggaucuucggcgccaucgccggcuucaucgagaacgggugggagggcaugguggacgggugguacggcuuccgccaccagaacuccgaggggaccggccaggccgcggaccugaaguccacccaggccgccaucaaccagaucaacggcaagcucaaccggcugaucgagaagacgaacgagaaguuccaccagaucgagaaggaguucuccgagguggaggggcgcauccaggaccuggagaaguacgucgaggacaccaagaucgaccucuggagcuacaacgccgagcugcugguggcccucgagaaccagcacaccaucgaccugaccgacuccgagaugaacaagcuguucgagcggacgaagaagcagcuccgcgagaacgcggaggacaugggcaacgggugcuucaagaucuaccacaagugcgacaacgccugcaucggcagcauccggaacgggaccuacgaccacgacguguaccgcgacgaggcccugaacaaccgcuuccagaucaagggcgucgagcugaaguccggcuacaaggacuggauccucuggaucagcuucgccaucagcugcuuccugcugugcgugguccuccugggguucaucaugugggccugccagaagggcaacauccggugcaacaucugcaucuga

SEQ ID NO: 65737 - RNA, 1701 nt, Artificial Sequence; identical to SEQ ID NO: 64075
  derived and/or modified CDS sequence (opt1) from hemagglutinin__InfluenzaA__ABS50042

SEQ ID NO: 65738 - RNA, 1701 nt, Artificial Sequence; identical to SEQ ID NO: 65717
  derived and/or modified CDS sequence (opt1) from hemagglutinin__InfluenzaA__ABS50053

SEQ ID NO: 65739 - RNA, 1701 nt, Artificial Sequence
  derived and/or modified CDS sequence (opt1) from hemagglutinin__InfluenzaA__ABS50064
augaagaccaucaucgcccugagcuacauccucugccugguguucgcccagaagcugcccggcaacgacaacuccaccgcgacgcucugccuggggcaccacgccgucccgaacggcacccuggugaagaccaucaccaacgaccagaucgaggugacgaacgccaccgagcucguccagagcuccagcaccgggcgcaucugcgacagcccccaccagauccuggacggcgagaacugcacccugaucgacgcccuccugggggacccccacugcgacggcuuccagaacaaggagugggaccuguucguggagcggagcaaggccuacuccaacugcuaccccuacgacgugccggacuacgucagccuccgcucccugguggcgagcuccggcacgcuggaguucaacaacgagagcuucaacuggaccgggguggcccagaacggcaccuccagcgccugcaagcggcgcuccgacaagagcuucuucucccggcucaacuggcugcaccagcugaaguacaaguaccccgcccucaacgucaccaugcccaacaacgagaaguucgacaagcuguacaucuggggcgugcaccaccccgggacggacagcgaccagaucucccuguacgcgcaggccagcgggcgcgugaccgucagcaccaagcggucccagcagaccgugaucccgaacaucggcagccgccccugggugcggggcgucuccagccgcaucuccaucuacuggacgaucgugaagcccggggacauccuccugaucaacagcaccggcaaccugaucgcgccccggggguacuucaagauccgcuccggcaagagcuccaucaugcggagcgacgccccgaucggcaagugcaacuccgagugcaucacccccaacgggagcauccccaacgacaagcccuuccagaacgugaaccgcaucaccuacggcccgugcccccgguacgucaagcagacgacccucaagcuggccaccgggaugcgcaacgugcccgagaagcagacccggggcaucuucggggccaucgccggcuucaucgagaacggcugggaggggaugauggacggcugguacggguuccgccaccagaacuccgagggcacggggcaggccgccgaccugaaguccacccaggccgcgaucaaccagaucaacggcaagcucaaccggcugaucgagaagaccaacgagaaguuccaccagaucgagaaggaguucuccgagguggagggccgcauccaggaccuggagaaguacgucgaggacaccaagaucgaccucuggagcuacaacgccgagcugcuggugucccucgagaaccagcacacgaucgaccugaccgacagcgagaugaacaagcuguucgagcggaccaagaagcagcuccgcgagaacgccgaggacauggggaacggcugcuucaagaucuaccacaagugcgacaacgccugcaucggguccauccgcaacggcaccuacgaccacgacguguaccgggacgaggcccugaacaaccgcuuccagaucaagggggucgagcucaagagcggcuacaaggacuggauccuguggaucagcuucgcgaucuccugcuuccugcugugcaucgugcuccugggcuucaucaugugggccugccagaaggggaacauccggugcaacaucugcaucuga

SEQ ID NO: 65740 - RNA, 1701 nt, Artificial Sequence
  derived and/or modified CDS sequence (opt1) from hemagglutinin__InfluenzaA__ABS50075
augaagaccaucaucgcccugagcuacauccucugccugguguucgcccagaagcugcccggcaacgacaacuccaccgcgacgcucugccuggggcaccacgccgucccgaacggcaccaucgugaagaccaucaccaacgaccagaucgaggugacgaacgccaccgagcugguccagagcuccagcaccgggggcaucugcgacagcccccacaagauccucgacggggagaacugcacccugaucgacgcccugcucggcgacccccagugcgacggcuuccagaacaagaagugggaccuguucguggagcgcagcaaggccuacuccaacugcuaccccuacgacgugccggacuacgcgagccugcggucccucaucgccagcuccgggacgcuggaguucaacaacgagagcuucaacuggaccggcgucacccagaacgggaccuccagcgccugcaagcgccgguccaacagcuccuucuucagccgccugaacuggcucacgcaccugaaguucaaguaccccgcccugaacgugaccaugcccaacaacgaggaguucgacaagcucuacaucuggggcgugcaccaccccgggaccuacaacgaccagaucucccuguacgcgcaggccagcggccggaucaccgucagcacgaagcgcucccagcagaccgugaucccgaacaucggcagccggccccgcgugcgggacauccccucccgcaucagcaucuacuggaccaucgucaagcccggggacauccugcucaucaacuccaccggcaaccugaucgccccgcggggguacuucaagauccgcagcggcaaguccagcaucaugcgguccgacgcccccaucggcaagugcaacagcgagugcaucacgcccaacggguccauccccaacgacaagccguuccagaacgugaaccgcaucaccuacggcgccugcccccgguacgugaagcagaacacccugaagcucgcgaccgggaugcgcaacguccccgagaagcagacgcggggcaucuucggggccaucgccggcuucaucgagaacggcugggaggggaugguggacggcugguacggguuccgccaccagaacagcgagggcaucgggcaggccgccgaccugaaguccacccaggcggccaucgaccagaucaacggcaagcugaaccggcucaucggcaagaccaacgagaaguuccaccagaucgagaaggaguucagcgagguggaggggcgcauccaggaccuggagaaguacgucgaggacaccaagaucgaccugugguccuacaacgccgagcuccugguggcccuggagaaccagcacacgaucgaccucaccgacagcgagaugaacaagcuguucgagcggaccaagaagcagcugcgcgagaacgccgaggacaugggcaacgggugcuucaagaucuaccacaagugcgacaacgcgugcaucggcuccauccgcaacgggaccuacgaccacgacguguaccgggacgaggcccucaacaaccgcuuccagaucaagggcgucgagcugaaguccggcuacaaggacuggauccuguggaucuccuucgccaucagcugcuuccuccugugcguggcccugcucggguucaucaugugggccugccagaagggcaacauccggugcaacaucugcaucuga

SEQ ID NO: 65741 - RNA, 1698 nt, Artificial Sequence
  derived and/or modified CDS sequence (opt1) from hemagglutinin__InfluenzaA__ABS71665
augaaggugaagcugcucguccugcugugcaccuucaccgccacguacgccgacaccaucugcaucggcuaccacgcgaacaacagcaccgacaccguggacacggugcucgagaagaacgucaccgugacccacuccgugaaccugcuggaggacagccacaacgggaagcucugccugcugaagggcaucgcgccccuccagcuggggaacugcuccgucgccggcuggauccuggggaacccggagugcgagagccucaucucccgcgagagcugguccuacaucguggagaagcccagccccgagaacgggaccugcuaccccggccacuucgccgacuacgaggagcugcgggagcagcuguccagcguguccagcuucgagcgcuucgagaucuucccgaaggaguccagcuggcccaaccacacggccaccggggucuccgccagcugcucccacaacggcgagagcuccuucuacaagaaccuccuguggcugaccgggaagaacggccucuaccccaaccugagcaagagcuacgccaacaacaaggagaaggaggugcuggugcucuggggcguccaccacccgcccaacaucggcgaccagcgggcccuguaccacaccgagaacgccuacguguccguggucagcucccacuacagccgcaaguucacgcccgagaucgcgaagcggcccaaggugcgcgaccaggagggccggaucuccuacuacuggacccugcucgagcccggggacaccaucaucuucgaggccaacggcaaccugaucgccccgcgcuacgccuucgcccugagccggggguucggcuccggcaucaucaacagcaacgcgcccauggacgagugcgacgccaagugccagacgccccagggggccaucaacuccagccuccccuuccagaacgugcacccggucaccaucggcgagugccccaaguacgugcgcuccgccaagcugcggauggugaccgggcugcgcaacauccccagcauccagucccggggccucuucggggccaucgcgggcuucaucgagggcggguggaccggcauggucgacgggugguacggcuaccaccaccagaacgagcaggggagcggcuacgccgccgaccagaaguccacccagaacgccaucaacggcaucacgaacaaggugaacagcgugaucgagaagaugaacacccaguucaccgccgucgggaaggaguucaacaagcuggagcgccggauggagaaccugaacaagaagguggacgacggcuucaucgacaucuggaccuacaacgcggagcuccugguccugcucgagaacgagcgcacgcuggacuuccacgacuccaacgugaagaaccuguacgagaaggucaagagccagcucaagaacaacgccaaggagaucgggaacggcugcuucgaguucuaccacaagugcaacgacgagugcauggaguccgugaagaacgggaccuacgacuaccccaaguacagcgaggagagcaagcugaaccgggagaagaucgacggcgugaagcuggaguccaugggcguguaccagauccucgccaucuacagcaccgucgccuccagccuggugcugcucgugucccugggggccaucagcuucuggaugugcuccaacggcagccugcagugccgcaucugcaucuga

SEQ ID NO: 65742 - RNA, 1698 nt, Artificial Sequence
  derived and/or modified CDS sequence (opt1) from hemagglutinin__InfluenzaA__ABS71666
augaaggugaagcugcucguccugcugugcaccuucaccgccacguacgccgacaccaucugcaucggcuaccacgcgaacaacagcaccgacaccguggacacggugcucgagaagaacgucaccgugacccacuccgugaaccugcuggaggacagccacaacgggaagcucugccugcugaagggcaucgcgccccuccagcuggggaacugcuccgucgccggcuggauccuggggaacccggagugcgagagccucaucucccgcgagagcugguccuacaucguggagaagcccagccccgagaacgggaccugcuaccccggccacuucgccgacuacgaggagcugcgggagcagcuguccagcguguccagcuucgagcgcuucgagaucuucccgaaggaguccagcuggcccaaccacacggccaccggggucuccgccagcugcucccacaacggcaagagcuccuucuacaagaaccuccuguggcugaccgggaagaacggccucuaccccaaccugagcaagagcuacgccaacaacaaggagaaggaggugcuggugcucuggggcguccaccacccgcccaacaucggcgaccagcgggcccuguaccacaccgagaacgccuacguguccguggucagcucccacuacagccgcaaguucacgcccgagaucgcgaagcggcccaaggugcgcgaccaggagggccggaucuccuacuacuggacccugcucgagcccggggacaccaucaucuucgaggccaacggcaaccugaucgccccgcgcuacgccuucgcccugagccggggguucggcuccggcaucaucaacagcaacgcgcccauggacgagugcgacgccaagugccagacgccccagggggccaucaacuccagccuccccuuccagaacgugcacccggucaccaucggcgagugccccaaguacgugcgcuccgccaagcugcggauggugaccgggcugcgcaacauccccagcauccagucccggggccucuucggggccaucgcgggcuucaucgagggcggguggaccggcauggucgacgggugguacggcuaccaccaccagaacgagcaggggagcggcuacgccgccgaccagaaguccacccagaacgccaucaacggcaucacgaacaaggugaacagcgugaucgagaagaugaacacccaguucaccgccgucgggaaggaguucaacaagcuggagcgccggauggagaaccugaacaagaagguggacgacggcuucaucgacaucuggaccuacaacgcggagcuccugguccugcucgagaacgagcgcacgcuggacuuccacgacuccaacgugaagaaccuguacgagaaggucaagagccagcucaagaacaacgccaaggagaucgggaacggcugcuucgaguucuaccacaagugcaacgacgagugcauggaguccgugaagaacgggaccuacgacuaccccaaguacagcgaggagagcaagcugaaccgggagaagaucgacggcgugaagcuggaguccaugggcguguaccagauccucgccaucuacagcaccgucgccuccagccuggugcugcucgugucccugggggccaucagcuucuggaugugcuccaacggcagccugcagugccgcaucugcaucuga

SEQ ID NO: 65743 - RNA, 1698 nt, Artificial Sequence
  derived and/or modified CDS sequence (opt1) from hemagglutinin__InfluenzaA__ABS71667
augaaggugaagcugcucguccugcugugcaccuucaccgccacguacgccgacaccaucugcaucggcuaccacgcgaacaacagcaccgacaccguggacacggugcucgagaagaacgucaccgugacccacuccgugaaccugcuggaggacagccacaacgggaagcucugccugcugaagggcaucgcgccccuccagcuggggaacugcuccgucgccggcuggauccuggggaacccggagugcgagagccucaucucccgcgagagcugguccuacaucguggagaagcccagccccgagaacgggaccugcuaccccggccacuucgccgacuacgaggagcugcgggagcagcuguccagcguguccagcuucgagcgcuucgagaucuucccgaaggaguccagcuggcccaaccacacggccaccggggucuccgccagcugcucccacaacggcaagagcuccuucuacaagaaccuccuguggcugaccgggaagaacggccucuaccccaaccugagcaagagcuacgccaacaacaaggagaaggaggugcuggugcucuggggcguccaccacccgcccaacaucggcgaccagcgggcccuguaccacaccgagaacgccuacaucuccguggugagcucccacuacagccgcaaguucacgcccgagaucgcgaagcggcccaagguccgcgaccaggagggccggaucuccuacuacuggacccugcucgagcccggggacaccaucaucuucgaggccaacggcaaccugaucgccccgcgcuacgccuucgcccugagccggggguucggcuccggcaucaucaacagcaacgcgcccauggacgagugcgacgccaagugccagacgccccagggggccaucaacuccagccuccccuuccagaacgugcacccggugaccaucggcgagugccccaaguacguccgcuccgccaagcugcggauggugaccgggcugcgcaacauccccagcauccagucccggggccucuucggggccaucgcgggcuucaucgagggcggguggaccggcaugguggacgggugguacggcuaccaccaccagaacgagcaggggagcggcuacgccgccgaccagaaguccacccagaacgccaucaacggcaucacgaacaaggucaacagcgugaucgagaagaugaacacccaguucaccgccguggggaaggaguucaacaagcuggagcgccggauggagaaccugaacaagaaggucgacgacggcuucaucgacaucuggaccuacaacgcggagcuccuggugcugcucgagaacgagcgcacgcuggacuuccacgacuccaacgucaagaaccuguacgagaaggucaagagccagcucaagaacaacgccaaggagaucgggaacggcugcuucgaguucuaccacaagugcaacgacgagugcauggaguccgugaagaacgggaccuacgacuaccccaaguacagcgaggagagcaagcugaaccgggagaagaucgacggcgugaagcuggaguccaugggcguguaccagauccucgccaucuacagcaccguggccuccagccugguccugcucgugucccugggggccaucagcuucuggaugugcuccaacggcagccugcagugccgcaucugcaucuga

SEQ ID NO: 65744 - RNA, 1698 nt, Artificial Sequence
  derived and/or modified CDS sequence (opt1) from hemagglutinin__InfluenzaA__ABS71668
augaaggugaagcugcucguccugcugugcaccuucaccgccacguacgccgacaccaucugcaucggcuaccacgcgaacaacagcaccgacaccguggacacggugcucgagaagaacgucaccgugacccacuccgugaaccugcuggaggacagccacaacgggaagcucugccugcugaagggcaucgcgccccuccagcuggggaacugcuccgucgccggcuggauccuggggaacccggagugcgagagccucaucucccgcgagagcugguccuacaucguggagaagcccagccccgagaacgggaccugcuaccccggccacuucgccgacuacgaggagcugcgggagcagcuguccagcguguccagcuucgagcgcuucgagaucuucccgaaggaguccagcuggcccaaccacacggccuccggggucagcgccuccugcagccacaacggcaaguccagcuucuacaagaaccuccuguggcugaccgggaagaacggccucuaccccaaccugagcaaguccuacgccaacaacaaggagaaggaggugcuggugcucuggggcguccaccacccgcccaacaucggcgaccagcgggcccuguaccacaccgagaacgccuacgugagcguggucuccagccacuacucccgcaaguucacccccgagaucgcgaagcggcccaaggugcgcgaccaggagggccggaucaacuacuacuggacgcugcucgagcccggggacaccaucaucuucgaggccaacggcaaccugaucgccccgcgcuacgccuucgcccugagccggggguucggcuccggcaucaucaacagcaacgcgcccauggacgagugcgacgccaagugccagacgccccagggggccaucaacuccagccuccccuuccagaacgugcacccggucaccaucggcgagugccccaaguacgugcgcuccgccaagcugcggauggugaccgggcugcgcaacauccccagcauccagucccggggccucuucggggccaucgcgggcuucaucgagggcggguggaccggcauggucgacgggugguacggcuaccaccaccagaacgagcaggggagcggcuacgccgccgaccagaaguccacccagaacgccaucaacggcaucaccaacaaggugaacagcgugaucgagaagaugaacacgcaguucaccgccgucgggaaggaguucaacaagcuggagcgccggauggagaaccugaacaagaagguggacgacggcuucaucgacaucuggaccuacaacgcggagcuccugguccugcucgagaacgagcgcacccuggacuuccacgacuccaacgugaagaaccuguacgagaaggucaagagccagcucaagaacaacgccaaggagaucgggaacggcugcuucgaguucuaccacaagugcaacgacgagugcauggaguccgugaagaacgggacguacgacuaccccaaguacagcgaggagagcaagcugaaccgggagaagaucgacggcgugaagcuggaguccaugggcguguaccagauccucgccaucuacagcaccgucgccuccagccuggugcugcucgugucccugggggccaucagcuucuggaugugcuccaacggcagccugcagugccgcaucugcaucuga

SEQ ID NO: 65745 - RNA, 1698 nt, Artificial Sequence
  derived and/or modified CDS sequence (opt1) from hemagglutinin__InfluenzaA__ABS71669
augaaggugaagcugcucguccugcugugcaccuucaccgccacguacgccgacaccaucugcaucggcuaccacgcgaacaacagcaccgacaccguggacacggugcucgagaagaacgucaccgugacccacuccgugaaccugcuggaggacagccacaacgggaagcucugccugcugaagggcaucgcgccccuccagcuggggaacugcuccgucgccggcuggauccuggggaacccggagugcgagcuccugaucagcaaggaguccuggagcuacaucguggagaagcccaaccccgagaacgggaccugcuaccccggccacuucgccgacuacgaggagcugcgcgagcagcucuccagcguguccagcuucgagcgguucgagaucuucccgaaggaguccagcuggcccaaccacacggucaccgggguguccgccagcugcucccacaacggcgagagcuccuucuacaagaaccugcuguggcucaccgggaagaacggccuguaccccaaccugagcaaguccuacgccaacaacaaggagaaggaggugcucguccuguggggcgugcaccacccgcccaacaucggcgaccagaaggcccuguaccacaccgagaacgccuacgugagcgucgugagcucccacuacagccgcaaguucacgcccgagaucgccaagcggcccaaggugcgcgaccaggagggccggaucaacuacuacuggacccuccuggagcccggggacaccaucaucuucgaggcgaacggcaaccugaucgccccgcgcuacgccuucgcccucucccggggguucggcagcggcaucaucaacuccaacgcccccauggacaagugcgacgcgaagugccagacgccccagggggccaucaacagcucccugcccuuccagaacguccacccggugaccaucggcgagugccccaaguacgugcgcagcgccaagcugcggauggucaccgggcuccgcaacauccccuccauccagagccggggccuguucggggccaucgccggcuucaucgagggcggguggaccggcaugguggacgggugguacggcuaccaccaccagaacgagcagggguccggcuacgcggccgaccagaaguccacccagaacgccaucaacggcaucacgaacaaggugaacagcgucaucgagaagaugaacacccaguucaccgccguggggaaggaguucaacaagcuggagcgccggauggagaaccucaacaagaaggucgacgacggcuucaucgacaucuggaccuacaacgccgagcugcuggugcuccuggagaacgagcgcacgcuggacuuccacgacagcaacgugaagaaccucuacgagaaggucaagucccagcugaagaacaacgcgaaggagaucgggaacggcugcuucgaguucuaccacaagugcaacgacgagugcauggagagcgugaagaacgggaccuacgacuaccccaaguacuccgaggagagcaagcugaaccgggagaagaucgacggcgugaagcucgaguccaugggcgucuaccagauccuggccaucuacagcaccguggccagcucccuggugcuccuggucagccugggggccaucuccuucuggaugugcagcaacggcucccuccagugccgcaucugcaucuga

SEQ ID NO: 65746 - RNA, 1698 nt, Artificial Sequence
  derived and/or modified CDS sequence (opt1) from hemagglutinin__InfluenzaA__ABS71671
augaaggugaagcugcucguccugcugugcaccuucaccgccacguacgccgacaccaucugcaucggcuaccacgcgaacaacagcaccgacaccguggacacggugcucgagaagaacgucaccgugacccacuccgugaaccugcuggaggacagccacaacgggaagcucugccugcugaagggcaucgcgccccuccagcuggggaacugcuccgucgccggcuggauccuggggaacccggagugcgagcuccugaucagcaaggaguccuggagcuacaucguggagaagcccaaccccgagaacgggaccugcuaccccggccacuucgccgacuacgaggagcugcgcgagcagcucuccagcguguccagcuucgagcgguucgagauguucccgaaggaguccagcuggcccaaccacacggucaccgggguguccgccagcugcucccacaacggcaagagcuccuucuacaagaaccugcuguggcucaccgggaagaacggccuguaccccaaccugagcaaguccuacgccaacaacaaggagaaggaggugcucguccuguggggcgugcaccacccgcccaacaucggcgaccagcgcgcccuguaccacaccgagaacgccuacgugagcgucgugagcucccacuacagccggaaguucacgcccgagaucgccaagcgccccaaggugcgggaccaggagggccgcaucaacuacuacuggacccuccuggagcccggggacaccaucaucuucgaggcgaacggcaaccugaucgccccgcgguacgccuucgcccucucccgcggguucggcagcggcaucaucaacuccaacgcccccauggacgagugcgacgcgaagugccagacgccccagggggccaucaacagcucccugcccuuccagaacguccacccggugaccaucggcgagugccccaaguacgugcggagcgccaagcugcgcauggucaccgggcuccggaacauccccuccauccagagccgcggccuguucggggccaucgccggcuucaucgagggcggguggaccggcaugguggacgggugguacggcuaccaccaccagaacgagcagggguccggcuacgcggccgaccagaaguccacccagaacgccaucaacggcaucacgaacaaggugaacagcgucaucgagaagaugaacacccaguucaccgccguggggaaggaguucaacaagcuggagcggcgcauggagaaccucaacaagaaggucgacgacggcuucaucgacaucuggaccuacaacgccgagcugcuggugcuccuggagaacgagcggacgcuggacuuccacgacagcaacgugaagaaccucuacgagaaggucaagucccagcugaagaacaacgcgaaggagaucgggaacggcugcuucgaguucuaccacaagugcaacgacgagugcauggagagcgugaagaacgggaccuacgacuaccccaaguacuccgaggagagcaagcugaaccgcgagaagaucgacggcgugaagcucgaguccaugggcgucuaccagauccuggccaucuacagcaccguggccagcucccuggugcuccuggucagccugggggccaucuccuucuggaugugcagcaacggcucccuccagugccggaucugcaucuga

SEQ ID NO: 65747 - RNA, 1698 nt, Artificial Sequence
  derived and/or modified CDS sequence (opt1) from hemagglutinin__InfluenzaA__ABS71672
augaaggugaagcugcucguccugcugugcaccuucaccgccacguacgccgacaccaucugcaucggcuaccacgcgaacaacagcaccgacaccguggacacggugcucgagaagaacgucaccgugacccacuccgugaaccugcuggaggacagccacaacgggaagcucugccugcugaagggcaucgcgccccuccagcuggggaacugcuccgucgccggcuggauccuggggaacccggagugcgagcuccugaucagcaaggaguccuggagcuacaucguggagaagcccaaccccgagaacgggaccugcuaccccggccacuucgccgacuacgaggagcugcgcgagcggcucuccagcguguccagcuucgagcgcuucgagauguucccgaaggaguccagcuggcccaaccacacggucaccgggguguccgccagcugcucccacaacggcaagagcuccuucuacaagaaccugcuguggcucaccgggaagaacggccuguaccccaaccugagcaaguccuacgccaacaacaaggagaaggaggugcucguccuguggggcgugcaccacccgcccaacaucggcgcccagcgggcccuguaccacaccgagaacgccuacgugagcgucgugagcucccacuacagccgcaaguucacgcccgagaucgcgaagcggcccaaggugcgcgaccaggagggccggaucaacuacuacuggacccuccuggagcccggggacaccaucaucuucgaggccaacggcaaccugaucgccccgcgcuacgccuucgcccucucccggggguucggcagcggcaucaucaacuccaacgcgcccauggacgagugcgacgccaagugccagacgccccagggggccaucaacagcucccugcccuuccagaacguccacccggugaccaucggcgagugccccaaguacgugcgcagcgccaagcugcggauggucaccgggcuccgcaacauccccuccauccagagccggggccuguucggggccaucgcgggcuucaucgagggcggguggaccggcaugguggacgggugguacggcuaccaccaccagaacgagcagggguccggcuacgccgccgaccagaaguccacccagaacgccaucaacggcaucacgaacaaggugaacagcgucaucgagaagaugaacacccaguucaccgccguggggaaggaguucaacaagcuggagcgccggauggagaaccucaacaagaaggucgacgacggcuucaucgacaucuggaccuacaacgcggagcugcuggugcuccuggagaacgagcgcacgcuggacuuccacgacagcaacgugaagaaccucuacgagaaggucaagucccagcugaagaacaacgccaaggagaucgggaacggcugcuucgaguucuaccacaagugcaacgacgagugcauggagagcgugaagaacgggaccuacgacuaccccaaguacuccgaggagagcaagcugucccgggagaagaucgacggcgugaagcucgagagcaugggcgucuaccagauccuggccaucuacagcaccguggccuccagccuggugcuccuggucucccugggggccaucagcuucuggaugugcuccaacggcagccuccagugccgcaucugcaucuga

SEQ ID NO: 65748 - RNA, 1698 nt, Artificial Sequence
  derived and/or modified CDS sequence (opt1) from hemagglutinin__InfluenzaA__ABS71673
augaaggugaagcugcucguccugcugugcaccuucaccgccacguacgccgacaccaucugcaucggcuaccacgcgaacaacagcaccgacaccguggacacggugcucgagaagaacgucaccgugacccacuccgugaaccugcuggaggacagccacaacgggaagcucugccugcugaagggcaucgcgccccuccagcuggggaacugcuccgucgccggcuggauccuggggaacccggagugcgagcuccugaucagcaaggaguccuggagcuacaucguggagacccccaaccccgagaacggcacgugcuaccccggcuacuucgccgacuacgaggagcugcgcgagcagcucuccagcguguccagcuucgagcgguucgagaucuucccgaaggaguccagcuggcccaaccacaccgucaccgggguguccgccagcugcucccacaacggccgcagcuccuucuaccggaaccugcuguggcucaccgggaagaacggccuguaccccaaccugagcaaguccuacgccaacaacaaggagaaggaggugcucguccuguggggcgugcaccacccgcccaacaucggggaccagcgcgcccuguaccacacggagaacaccuacgugagcgucgugagcucccacuacagccggcgcuucacccccgagaucgccaagcggcccaaggugcgcgaccaggagggccggaucaacuacuacuggacccuccuggagcccggggacacgaucaucuucgaggccaacggcaaccugaucgcgccgcgcuucgccuucgcccucucccggggguucggcagcggcaucaucaccuccaacgcccccauggacgagugcgacgccaagugccagacgccccagggggcgaucaacagcucccugcccuuccagaacguccacccggugaccaucggcgagugccccaaguacgugcgcagcgccaagcugcggauggccaccgggcuccgcaacauccccuccauccagagccggggccuguucggggccaucgccggcuucaucgagggcggguggaccggcauggucgacgggugguacggcuaccaccaccagaacgagcagggguccggcuacgcggccgaccagaaguccacccagaacgccaucaacggcaucaccaacaaggugaacagcgugaucgagaagaugaacacgcaguucaccgccgucgggaaggaguucagcaagcuggagcgccggauggagaaccucaacaagaagguggacgacggcuuccuggacaucuggaccuacaacgccgagcugcucguccugcuggagaacgagcgcacccucgacuuccacgacuccaacgugaagaaccuguacgagaaggucaagagccagcugaagaacaacgcgaaggagaucgggaacggcugcuucgaguucuaccacaagugcaacgacgagugcauggaguccgugaagaacgggacguacgacuaccccaaguacagcgaggaguccaagcucaaccgggagaagaucgacggcgugaagcuggagagcaugggcguguaccagauccuggccaucuacagcaccgucgccuccagccucgugcugcuggugucccucggggccaucagcuucuggaugugcuccaacggcagccugcagugccgcaucugcaucuga

SEQ ID NO: 65749 - RNA, 1701 nt, Artificial Sequence; identical to SEQ ID NO: 64654
  derived and/or modified CDS sequence (opt1) from hemagglutinin__InfluenzaA__ABS71674

SEQ ID NO: 65750 - RNA, 1701 nt, Artificial Sequence
  derived and/or modified CDS sequence (opt1) from hemagglutinin__InfluenzaA__ABS71675
augaagaccaucaucgcccugagcuacauccucugccugguguucgcccagaagcugcccggcaacgacaacuccaccgcgacgcucugccuggggcaccacgccgucccgaacggcaccaucgugaagaccaucaccaacgaccagaucgaggugacgaacgccaccgagcugguccagagcuccagcaccgggggcaucugcgacagcccccaccagauccucgacggggagaacugcacccugaucgacgcccugcucggcgacccccagugcgacggcuuccagaacaagaagugggaccuguucguggagcgcagcaaggcccacuccaacugcuaccccuacgacgugccggacuacgcgagccugcggucccucgucgccagcuccgggacgcuggaguucaacaacgagagcuucaacuggaccggcgugacccagaacgggaccuccagcgccugcaagcgccgguccaacaacagcuucuucucccgccugaacuggcucacgcaccugaaguucaaguaccccgcccugaacgugaccaugcccaacaacgagaaguucgacaagcucuacaucuggggcguccaccaccccgggaccgacaacgaccagaucuuccuguacgcgcaggccagcggccggaucaccguguccacgaagcgcagccagcagaccgugaucccgaacaucggcagccggccccgcguccggaacauccccucccgcaucagcaucuacuggaccaucgugaagcccggggacauccugcucaucaacuccaccggcaaccugaucgccccgcggggguacuucaagauccgcagcggcaaguccagcaucaugcgguccgacgcccccaucggcaagugcaacagcgagugcaucacgcccaacggguccauccccaacgacaagccguuccagaacgugaaccgcaucaccuacggcgccugcccccgguacgucaagcagaacacccugaagcucgcgaccgggaugcgcaacgugcccgagaagcagacgcggggcaucuucggggccaucgccggcuucaucgagaacggcugggaggggaugguggacggcugguacggguuccgccaccagaacagcgagggcaucgggcaggccgccgaccugaaguccacccaggcggccaucaaccagaucaacggcaagcugaaccggcucaucggcaagaccaacgagaaguuccaccagaucgagaaggaguucagcgaggucgaggggcgcauccaggaccuggagaaguacguggaggacaccaagaucgaccugugguccuacaacgccgagcuccugguggcccuggagaaccagcacacgaucgaccucaccgacagcgagaugaacaagcuguucgagcggaccaagaagcagcugcgcgagaacgccgaggacaugggcaacgggugcuucaagaucuaccacaagugcgacaacgcgugcaucggcuccauccgcaacgggaccuacgaccacgacgucuaccgggacgaggcccucaacaaccgcuuccagaucaagggcguggagcugaaguccggcuacaaggacuggauccuguggaucuccuucgccaucagcugcuuccuccugugcguggcccugcucggguucaucaugugggccugccagaagggcaacauccggugcaacaucugcaucuga

SEQ ID NO: 65751 - RNA, 1701 nt, Artificial Sequence
  derived and/or modified CDS sequence (opt1) from hemagglutinin__InfluenzaA__ABS71676
augaagaccaucaucgcccugagcuacauccucugccugguguucgcccagaagcugcccggcaucgacaacuccaccgcgacgcucugccuggggcaccacgccgucccgaacggcaccaucgugaagaccaucaccaacgaccagaucgaggugacgaacgccaccgagcugguccagaacagcuccaccgggggcaucugcgacagcccccaccagauccucgacggggagaacugcacccugaucgacgcccugcucggcgacccccagugcgacggcuuccagaacaagaagugggaccuguucguggagcgcuccaaggccuacagcaacugcuaccccuacgacgugccggacuacgcgucccugcggagccucgucgccuccagcgggacgcuggaguucaacaacgaguccuucaacuggaccggcgugacccagaacgggaccagcuccgccugcaagcgcggcagcaacaacuccuucuucagccggcugaacuggcucacgcacuccaaguucaaguaccccgcccugaacgugaccaugcccaacaacgaggaguucgacaagcuguacaucuggggcguccaccaccccgggaccgacaacgaccagaucuuccucuacgcgcaggccagcggccgcaucaccguguccacgaagcggagccagcagaccgugaucccgaacaucgggagccgcccccggguccgcaacauccccucccggaucagcaucuacuggaccaucgugaagcccggcgacauccugcugaucaacuccaccgggaaccucaucgccccgcgcggcuacuucaucauccggagcggcaaguccagcaucaugcgcuccgacgcccccaucgggaagugcaacagcgagugcaucacgcccaacggcuccauccccaacgacaagccguuccagaacgugaaccggaucaccuacggggccugcccccgcuacgucaagcagaacacccugaagcuggcgaccggcaugcggaacgugcccgagaagcagacgcgcgggaucuucggcgccaucgccggcuucaucgagaacgggugggagggcaugguggacgggugguacggcuuccggcaccagaacagcgaggggaucggccaggccgccgaccucaaguccacccaggcggccaucgaccagaucaacggcaagcugaaccgccugaucgggaagaccaacgagaaguuccaccagaucgagaaggaguucagcgaggucgagggccggauccaggaccucgagaaguacguggaggacaccaagaucgaccugugguccuacaacgccgagcugcucguggcccuggagaaccagcacacgaucgaccugaccgacagcgagaugaacaagcuguucgagaagaccaagaagcagcuccgcgagaacgccgaggacauggggaacggcugcuucaagaucuaccacaagugcgacaacgcgugcaucggguccauccggaacggcaccuacgaccacgacgucuaccgcgacgaggcccugaacaaccgcuuccagaucaagggcguggagcucaagagcggguacaaggacuggauccuguggaucuccuucgccaucagcugcuuccugcucugcguggcccugcugggcuucaucaugugggccugccagaaggggaacauccggugcaacaucugcaucuga

SEQ ID NO: 65752 - RNA, 1701 nt, Artificial Sequence
  derived and/or modified CDS sequence (opt1) from hemagglutinin__InfluenzaA__ABS71677
augaagaccaucaucgcccugagcuacauccucugccugguguucgcccagaagcugcccggcaucgacaacuccaccgcgacgcucugccuggggcaccacgccgucccgaacggcaccaucgugaagaccaucaccgacgaccagaucgaggugacgaacgccaccgagcugguccagaacagcuccaccgggggcaucugcgacagcccccaccagauccucgacggggagaacugcacccugaucgacgcccugcucggcgacccccagugcgacggcuuccagaacaagaagugggaccuguucguggagcgcuccaaggccuacagcaacugcuaccccuacgacgugccggacuacgcgucccugcggagccucgucgccuccagcgggacgcuggaguucaacaacgaguccuucaacuggaccggcgugacccagaacgggaccagcuccgccugcaagcgcggcagcaacaacuccuucuucagccggcugaacuggcucacgcacuccaaguucaaguaccccgcccugaacgugaccaugcccaacaacgaggaguucgacaagcuguacaucuggggcguccaccaccccgggaccgacaacgaccagaucuuccucuacgcgcaggccagcggccgcaucaccguguccacgaagcggagccagcagaccgugaucccgaacaucgggagccgcccccggguccgcaacauccccucccggaucagcaucuacuggaccaucgugaagcccggcgacauccugcugaucaacuccaccgggaaccucaucgccccgcgcggcuacuucaagauccggagcggcaaguccagcaucaugcgcuccgacgcccccaucgacaagugcaacagcgagugcaucacgcccaacggguccauccccaacgacaagccguuccagaacgugaaccggaucaccuacggcgccugcccccgcuacgucaagcagaacacccugaagcuggcgaccgggaugcggaacgugcccgagaagcagacgcgcggcaucuucggggccaucgccggcuucaucgagaacggcugggaggggaugguggacggcugguacggguuccggcaccagaacagcgagggcaucgggcaggccgccgaccucaaguccacccaggcggccaucgaccagaucaacggcaagcugaaccgccugaucggcaagaccaacgagaaguuccaccagaucgagaaggaguucagcgaggucgaggggcggauccaggaccucgagaaguacguggaggacaccaagaucgaccugugguccuacaacgccgagcugcucguggcccuggagaaccagcacacgaucgaccugaccgacagcgagaugaacaagcuguucgagaagaccaagaagcagcuccgcgagaacgccgaggacaugggcaacgggugcuucaagaucuaccacaagugcgacaacgcgugcaucggcuccauccggaacgggaccuacgaccacgacgucuaccgcgacgaggcccugaacaaccgcuuccagaucaagggcguggagcucaagagcggcuacaaggacuggauccuguggaucuccuucgccaucagcugcuuccugcucugcguggcccugcugggguucaucaugugggccugccagaagggcaacauccggugcaacaucugcaucuga

SEQ ID NO: 65753 - RNA, 1701 nt, Artificial Sequence
  derived and/or modified CDS sequence (opt1) from hemagglutinin__InfluenzaA__ABS71679
augaagaccaucaucgcccugagcuacauccucugccugguguucgcccagaagcugcccggcaucgacaacuccaccgcgacgcucugccuggggcaccacgccgucccgaacggcaccaucgugaagaccaucaccaacgaccagaucgaggugacgaacgccaccgagcugguccagagcuccagcaccgggggcaucugcgacagcccccaccagauccucgacggggagaacugcacccugaucgacgcccugcucggcgacccccagugcgacggcuuccagaacaagaagugggaccuguucguggagcgcuccaaggccuacuccaacugcuaccccuacgacgugccggacuacgcgagccugcggucccucgucgccagcuccgggacgcuggaguucaacaacgagagcuucaacuggaccggcgugacccagaacgggaccuccagcgccugcaagcgcggcuccaacaacagcuucuucucccggcugaacuggcucacgcacagcaaguucaaguaccccgcccugaacgugaccaugcccaacaacgaggaguucgacaagcuguacaucuggggcguccaccaccccgggaccgacaacgaccagaucuuccucuacgcgcaggccuccggccgcaucaccgugagcacgaagcggagccagcagaccgugaucccgaacaucgggucccgcccccggguccgcaacauccccagccggaucuccaucuacuggaccaucgugaagcccggcgacauccugcugaucaacagcaccgggaaccucaucgccccgcgcggcuacuucaagauccgguccggcaagagcuccaucaugcgcagcgacgcccccaucgggaagugcaacuccgagugcaucacgcccaacggcagcauccccaacgacaagccguuccagaacgugaaccggaucaccuacggggccugcccccgcuacgucaagcagaacacccugaagcuggcgaccggcaugcggaacgugcccgagaagcagacgcgcgggaucuucggcgccaucgccggcuucaucgagaacgggugggagggcaugguggacgggugguacggcuuccggcaccagaacuccgaggggaucggccaggccgccgaccucaagagcacccaggcggccaucgaccagaucaacggcaagcugaaccgccugaucgggaagaccaacgagaaguuccaccagaucgagaaggaguucuccgaggucgagggccggauccaggaccucgagaaguacguggaggacaccaagaucgaccuguggagcuacaacgccgagcugcucguggcccuggagaaccagcacacgaucgaccugaccgacuccgagaugaacaagcuguucgagaagaccaagaagcagcuccgcgagaacgccgaggacauggggaacggcugcuucaagaucuaccacaagugcgacaacgcgugcaucgggagcauccggaacggcaccuacgaccacgacgucuaccgcgacgaggcccugaacaaccgcuuccagaucaagggcguggagcucaaguccggguacaaggacuggauccuguggaucagcuucgccaucuccugcuuccugcucugcguggcccugcugggcuucaucaugugggccugccagaaggggaacauccggugcaacaucugcaucuga

SEQ ID NO: 65754 - RNA, 1701 nt, Artificial Sequence; identical to SEQ ID NO: 65753
  derived and/or modified CDS sequence (opt1) from hemagglutinin__InfluenzaA__ABS71680

SEQ ID NO: 65755 - RNA, 1701 nt, Artificial Sequence
  derived and/or modified CDS sequence (opt1) from hemagglutinin__InfluenzaA__ABS71682
augaagaccaucaucgcccugagcuacauccucugccugguguucgcccagaagcugcccggcaacgacaacuccaccgcgacgcucugccuggggcaccacgccgucccgaacggcaccaucgugaagaccaucaccaacgaccagaucgaggugacgaacgccaccgagcugguccagagcuccagcaccgggggcaucugcgacagcccccaccagauccucgacggggagaacugcacccugaucgacgcccugcucggcgacccccagugcgacggcuuccagaacaagaagugggaccuguucguggagcgcagcaaggccuacuccaacugcuaccccuacgacgugccggacuacgcgagccugcggucccucaucgccagcuccgggacgcuggaguucaacaacgagagcuucaacuggaccggcgucacccagaacgggaccuccagcgccugcaagcgccgguccaacaacagcuucuucucccgccugaacuggcucacgcaccugaaguucaaguaccccgcccugaacgugaccaugcccaacaacgagaaguucgacaagcucuacaucuggggcgugcaccaccccgggaccgacaacgaccagaucuuccuguacgcgcaggccagcggccggaucaccgucuccacgaagcgcagccagcagaccgugaucccgaacaucggcagccggccccgcgugcggaacauccccucccgcaucagcaucuacuggaccaucgucaagcccggggacauccugcucaucaacuccaccggcaaccugaucgccccgcggggguacuucaagauccgcagcggcaaguccagcaucaugcgguccgacgcccccaucggcaagugcaacagcgagugcaucacgcccaacggguccauccccaacgacaagccguuccagaacgugaaccgcaucaccuacggcgccugcccccgguacgugaagcagaacacccugaagcucgcgaccgggaugcgcaacguccccgagaagcagacgcggggcaucuucggggccaucgccggcuucaucgagaacggcugggaggggaugguggacggcugguacggguuccgccaccagaacagcgagggcaucgggcaggccgccgaccugaaguccacccaggcggccaucgaccagaucaacggcaagcugaaccggcucaucggcaagaccaacgagaaguuccaccagaucgagaaggaguucagcgagguggaggggcgcauccaggaccuggagaaguacgucgaggacaccaagaucgaccugugguccuacaacgccgagcuccugguggcccuggagaaccagcacacgaucgaccucaccgacagcgagaugaacaagcuguucgagaagaccaagaagcagcugcgggagaacgccgaggacaugggcaacgggugcuucaagaucuaccacaagugcgacaacgcgugcaucggcuccauccgcaacgggaccuacgaccacgacguguaccgcgacgaggcccucaacaaccgguuccagaucaagggcgucgagcugaaguccggcuacaaggacuggauccuguggaucuccuucgccaucagcugcuuccuccugugcguggugcugcucggguucaucaugugggccugccagaagggcaacauccgcugcaacaucugcaucuga

SEQ ID NO: 65756 - RNA, 1701 nt, Artificial Sequence
  derived and/or modified CDS sequence (opt1) from hemagglutinin__InfluenzaA__ABU80177
augaagaccaucaucgcccugagcuacauccucugccugguguucgcccagaagcugcccgucaacgacaacuccaccgcgacgcucugccugggccaccacgccgugccgaacgggacccuggugaagaccaucaccaacgaccacaucgaggucacgaacgccaccgagcucgugcagagcuccagcaccggccgcaucugcgacagcccccaccagauccuggacggggagaacugcacccugaucgacgcccuccugggcgacccccacugcgacggguuccagaacaaggagugggaccuguucguggagcggagcacggccuacuccaacugcuaccccuacgacgucccggacuacgcgagccuccgcucccugguggccagcuccggcacccuggaguucaacaacgagagcuucaacuggaccggcguggcccagaacgggaccuccagcuccugcaagcggcgcagcaucaaguccuucuucagccggcucaacuggcugcaccagcugaaguacaaguaccccgcccucaacgucacgaugcccaacaacgagaaguucgacaagcuguacaucuggggcgugcaccaccccuccaccgacagcgaccagaucagccuguacgcgcaggccuccgggcgcgugaccgucagcaccaagcggucccagcagacggugaucccgaacaucggcagccgccccugggugcgcggggucuccagccggaucuccaucuacuggaccaucgugaagcccggcgacauccuccugaucaacagcaccggcaaccugaucgcgccccggggguacuucaagauccgcuccggcaagagcuccaucaugcggagcaacgccccgaucgggaagugcaacuccgagugcaucacccccaacggcagcauccccaacgacaagcccuuccagaacgugaaccgcaucacguacggcgccugcccgcgguacgucaagcagaacacccucaagcuggccaccgggaugcgcaacgugcccgagaagcagacccggggcaucuucggggccaucgccggcuucaucgagaacgggugggagggcaugguggacggcugguacggguuccgccaccagaacuccgagggcacggggcaggccgccgaccugaaguccacccaggcggccaucaaccagaucaacggcaagcucaaccggcugaucgagaagaccaacgagaaguuccaccagaucgagaaggaguucuccgaggucgaggggcgcauccaggaccuggagaaguacguggaggacaccaagaucgaccucuggagcuacaacgccgagcugcugguggcccucgagaaccagcacacgaucgaccugaccgacuccgagaugaacaagcuguucgagcggacccgcaagcagcuccgcgagaacgccgaggacaugggcaacggcugcuucaagaucuaccacaagugcgacaacgcgugcaucgggagcauccggaacggcaccuacgaccacgacgucuaccgcgacgaggcccugaacaaccgguuccagaucaaggggguggagcucaagagcggcuacaaggacuggauccuguggaucuccuucgccaucagcugcuuccugcugugcgucgugcuccugggguucaucaugugggccugccagaagggcaacauccgcugcaacaucugcaucuga

SEQ ID NO: 65757 - RNA, 1698 nt, Artificial Sequence
  derived and/or modified CDS sequence (opt1) from hemagglutinin__InfluenzaA__ABU80298
augaaggugaagcugcucguccugcugugcaccuucaccgccacguacgccgacaccaucugcaucggcuaccacgcgaacaacagcaccgacaccguggacacggugcucgagaagaacgucaccgugacccacuccgugaaccugcuggaggacagccacaacgggaagcucugccugcugaagggcaucgcgccccuccagcuggggaacugcuccgucgccggcuggauccuggggaacccggagugcgagcuccugaucagcaaggaguccuggagcuacaucguggagacccccaaccccgagaacggcacgugcuaccccggcuacuucgccgacuacgaggagcugcgcgagcagcucuccagcguguccagcuucgagcgguucgagaucuucccgaaggaguccagcuggcccaaccacaccgucaccgggguguccgccagcugcucccacaacggcaagagcuccuucuaccgcaaccugcuguggcucaccgggaagaacggccuguaccccaaccugagcaaguccuacgccaacaacaaggagaaggaggugcucguccuguggggcgugcaccacccgcccaacaucggggaccagcgggcccuguaccacacggagaacgccuacgugagcgucgugagcucccacuacagccgccgguucacccccgagaucgccaagcgccccaaggugcgggaccaggagggccgcaucaacuacuacuggacccuccuggagcccggggacaccaucaucuucgaggcgaacggcaaccugaucgccccgcgguacgccuucgcccucucccgcggguucggcagcggcaucaucacguccaacgcccccauggacgagugcgacgcgaagugccagacgccccagggggccaucaacagcucccugcccuuccagaacguccacccggugaccaucggcgagugccccaaguacgugcggagcgccaagcugcgcauggccaccgggcuccggaacauccccuccauccagagccgcggccuguucggggccaucgcgggcuucaucgagggcggguggaccggcauggucgacgggugguacggcuaccaccaccagaacgagcagggguccggcuacgccgccgaccagaaguccacccagaacgccaucaacggcaucaccaacaaggugaacagcgugaucgagaagaugaacacccaguucacggccgucgggaaggaguucaacaagcuggagcggcgcauggagaaccucaacaagaagguggacgacggcuuccuggacaucuggaccuacaacgcggagcugcucguccugcuggagaacgagcggacccucgacuuccacgacagcaacgugaagaaccuguacaagaaggugaagucccagcugaagaacaacgccaaggagaucgggaacggcugcuucgaguucuaccacaagugcaacaacgagugcauggagagcgucaagaacgggaccuacgacuaccccaaguacuccgaggagagcaagcucaaccgcgagaagaucgacggcgugaagcuggaguccaugggcguguaccagauccuggccaucuacagcacggucgccagcucccucgugcugcuggugagccucggggccaucuccuucuggaugugcagcaacggcucccugcagugccggaucugcaucuga

SEQ ID NO: 65758 - RNA, 1701 nt, Artificial Sequence
  derived and/or modified CDS sequence (opt1) from hemagglutinin__InfluenzaA__ABU80320
augaagaccaucaucgcccugagcuacauccucugccugguguucgcccagaagcugcccggcaacgacaacuccaccgcgacgcucugccuggggcaccacgccgucccgaacggcacccuggugaagaccaucaccaacgaccagaucgaggugacgaacgccaccgagcucguccagagcuccagcaccgggggcaucugcgacagcccccaccagauccuggacggggagaacugcacccugaucgacgcccuccugggcgacccccacugcgacagcuuccagaacaaggagugggaccuguucguggagcgcuccaaggccuacagcaacugcuaccccuacgacgugccggacuacgcgucccuccggagccuggucgccuccagcggcacgcuggaguucaacaacgaguccuucaacuggaccgggguggcccagaacggcaccagcuccgccugcaagcgccggagcaacaaguccuucuucagccgccucaacuggcugcaccagcugaaguacaaguaccccgcgcucaacgugaccaugcccaacaacgagaaguucgacaagcuguacaucuggggcguccaccaccccuccacggacagcgaccagaucagccuguacgcccaggccccggggcgggugaccguguccaccaagcgcagccagcagaccgucauccccaacaucgggucccggcccugggugcgcggcgugagcuccaucaucagcaucuacuggacgaucgucaagcccggcgacauccuccugaucaacugcaccgggaaccugaucgccccgcggggcuacuucaagauccgcuccgggaaguccuccaucaugcggagcgacgccuccaucggcaagugcaacagcgagugcaucacccccaacggcuccauccccaacgacaagcccuuccagaacgugaaccgcaucaccuacggggcgugcccgcgguacgugaagcagaacacgcucaagcuggccaccggcaugcgcaacguccccgagaagcagacccgggggaucuucggcgccaucgccggguucaucgagaacggcugggagggcaugguggacgggugguacggcuuccgccaccagaacagcgaggggaccggccaggccgcggaccugaaguccacgcaggccgccaucaaccagaucaacgggaagcucaaccggcugaucgagaagaccaacgagaaguuccaccagaucgagaaggaguucagcgagguggagggccgcauccaggaccuggagaaguacgucgaggacaccaagaucgaccucugguccuacaacgccgagcugcugguggcccucgagaaccagcacaccaucgaccugacggacagcgagaugaacaagcuguucgagcggaccaagaagcagcuccgcgagaacgcggaggacaugggcaacgggugcuucaagaucuaccacaagugcgacaacgccugcaucggcuccauccggaacgggaccuacgaccacgacguguaccgcgacgaggcccugaacaaccgcuuccagaucaagggcgucgagcucaagagcggguacaaggacuggauccuguggaucagcuucgccaucuccugcuuccugcugugcgugguccuccugggcuucaucaugugggccugccagaagggcaacauccggugcaacaucugcaucuga

SEQ ID NO: 65759 - RNA, 1701 nt, Artificial Sequence; identical to SEQ ID NO: 65063
  derived and/or modified CDS sequence (opt1) from hemagglutinin__InfluenzaA__ABU80331

SEQ ID NO: 65760 - RNA, 1701 nt, Artificial Sequence
  derived and/or modified CDS sequence (opt1) from hemagglutinin__InfluenzaA__ABU80400
augaaggccauccugcucgugcugcuguacaccuucaccgccgcgaacgccgacacgcucugcaucggcuaccacgccaacaacagcaccgacaccgucgacaccgugcuggagaagaacgugacggucacccacuccgugaaccugcucgaggaccgccacaacgggaagcugugcaagcugcggggcguggcgccccuccaccuggggaagugcaacaucgccggcuggcugcucgggaacccggagugcgagcugcuguucaccgccagcuccuggagcuacaucgucgagaccuccaacagcgacaacggcacgugcuaccccggcgacuucaucaacuacgaggagcuccgcgagcagcuguccagcguguccagcuucgagcgguucgagaucuuccccaaggccuccagcuggcccaaccacgagaccaaccgcggggugaccgccgccugcccguacgcgggcgccaacuccuucuaccggaaccugaucuggcucgucaagaaggggaacagcuaccccaagcuguccaagagcuacgugaacaacaaggagaaggaggugcugguccucuggggcauccaccacccgcccaccuccacggaccagcagagccuguaccagaacgccgacgccuacguguucgugggguccagcaaguacaacaagaaguucaagcccgagaucgccacccgccccaagguccggggccaggcgggccgcaugaacuacuacuggacccugguggagcccggggacaccaucacguucgaggccaccggcaaccucguggucccccgguacgccuucgccaugaagcgcgggagcggcuccggcaucaucaucagcgacaccccggugcacgacugcaacaccacgugccagacccccaagggggccaucaacaccucccugcccuuccagaacauccaccccgugaccaucggcgagugcccgaaguacgucaagagcacgaagcugcggauggcgaccgggcuccgcaacauccccuccauccagagccggggccuguucggggccaucgccggcuucaucgagggcggguggaccggcaugaucgacgggugguacggcuaccaccaccagaacgagcagggguccggcuacgccgccgaccgcaagagcacccagaacgcgaucgacggcaucacgaacaaggugaacuccgugaucgagaagaugaacacccaguucaccgccgucgggaaggaguucaaccaccuggagaagcggaucgagaaccucaaccgcaagguggacgacggcuuccuggacaucuggaccuacaacgccgagcugcucguccugcuggagaacgagcggacgcucgacuaccacgacagcaacgugaagaaccuguacgagaaggugcgcucccagcugaagaacaacgccaaggagaucgggaacggcugcuucgaguucuaccacaagugcgacgacacgugcauggagagcgucaagaacgggaccuacgacuaccccaaguacuccgaggagagcaagcucaaccgggaggagaucgacggcgugaagcuggaguccacccgcaucuaccagauccuggccaucuacagcaccguggcguccagccucguccugcuggugucccucggcgccaucagcuucuggaugugcagcaacgggucccugcagugccggaucugcaucuga

SEQ ID NO: 65761 - RNA, 1701 nt, Artificial Sequence
  derived and/or modified CDS sequence (opt1) from hemagglutinin__InfluenzaA__ABU92572
augaagaccaucaucgcccugagcuacauccucugccugguguucacccagaagcugcccggcaacgacaacuccacggccacccucugccuggggcaccacgcggucccgaacggcacccuggugaagaccaucacgaacgaccagaucgaggugaccaacgccaccgagcucguccagagcuccagcaccgggcgcaucugcgacagcccccaccagauccuggacggcgagaacugcacgcugaucgacgcccuccugggggacccccacugcgacggcuuccagaacaaggagugggaccuguucguggagcggagcaaggccuacuccaacugcuaccccuacgacgugccggacuacgucagccuccgcucccugguggccagcuccggcacccuggaguucaacaacgagagcuucaacuggaccgggguggcgcagaacggcaccuccagcgccugcaagcggcgcuccgacaagagcuucuucucccggcucaacuggcugcaccagcugaaguacaaguaccccgcccucaacgucacgaugcccaacaacgagaaguucgacaagcuguacaucuggggcgugcaccaccccgggaccgacagcgaccagaucucccuguacgcccaggcgagcgggcgcgugaccgucagcaccaagcggucccagcagacggugaucccgaacaucggcagccgccccugggugcggggcgucuccagccgcaucuccaucuacuggaccaucgugaagcccggggacauccuccugaucaacagcaccggcaaccugaucgcgccccggggguacuucaagauccgcuccggcaagagcuccaucaugcggagcgacgccccgaucggcaagugcaacuccgagugcaucacccccaacgggagcauccccaacgacaagcccuuccagaacgugaaccgcaucacguacggcccgugcccccgguacgucaagcagaacacccucaagcuggccaccgggaugcgcaacgugcccgagaagcagacccggggcaucuucggggccaucgccggcuucaucgagaacggcugggaggggaugauggacggcugguacggguuccgccaccagaacuccgagggcacggggcaggccgccgaccugaaguccacccaggccgccaucaaccagaucaacggcaagcucaaccggcugaucgagaagaccaacgagaaguuccaccagaucgagaaggaguucuccgagguggagggccgcauccaggaccuggagaaguacgucgaggacaccaagaucgaccucuggagcuacaacgcggagcugcugguggcccucgagaaccagcacacgaucgaccugaccgacuccgagaugaacaagcuguucgagcggaccaagaagcagcuccgcgagaacgccgaggacauggggaacggcugcuucaagaucuaccacaagugcgacaacgccugcaucgggagcauccgcaacggcaccuacgaccacgacguguaccgggacgaggcccugaacaaccgcuuccagaucaagggggucgagcugaaguccggcuacaaggacuggauccucuggaucagcuucgcgaucagcugcuuccugcugugcaucgugcuccugggcuucaucaugugggccugccagaaggggaacauccggugcaacaucugcaucuga

SEQ ID NO: 65762 - RNA, 1701 nt, Artificial Sequence
  derived and/or modified CDS sequence (opt1) from hemagglutinin__InfluenzaA__ABU92573
augaagaccaucaucgcccugagcuacauccucugccugguguucgcccagaagcugcccggcaacgacaacuccaccgcgacgcucugccuggggcaccacgccgucccgaacggcacccuggugaagaccaucaccaacgaccagaucgaggugacgaacgccaccgagcucguccagagcuccagcaccgggcgcaucugcgacagcccccaccagauccuggacggcgagaacugcacccugaucgacgcccuccugggggacccccacugcgacggcuuccagaacaaggagugggaccuguucguggagcggagcaaggccuacuccaacugcuaccccuacgacgugccggacuacgucagccuccgcucccugguggcgagcuccggcacgcuggaguucaacaacgagagcuucaacuggaccgggguggcccagaacggcaccuccagcgccugcaagcggcgcuccgacaagagcuucuucucccggcucaacuggcugcaccagcugaaguacaaguaccccgcccucaacgucaccaugcccaacaacgagaaguucgacaagcuguacaucuggggcgugcaccaccccgggacggacagcgaccagaucucccuguacgcgcaggccagcgggcgcgugaccgucagcaccaagcggucccagcagaccgugaucccgaacaucggcagccgccccugggugcggggcgucuccagccgcaucuccaucuacuggacgaucgugaagcccggggacauccuccugaucaacagcaccggcaaccugaucgcgccccggggguacuucaagauccgcuccggcaagagcuccaucaugcggagcgacgccccgaucggcaagugcaacuccgagugcaucacccccaacgggagcauccccaacggcaagcccuuccagaacgugaaccgcaucaccuacggggccugcccgcgguacgucaagcagaacacgcucaagcuggccaccggcaugcgcaacgugcccgagaagcagacccgggggaucuucggcgccaucgccggcuucaucgagaacgggugggagggcaugauggacgggugguacggcuuccgccaccagaacuccgaggggaccggccaggccgccgaccugaaguccacgcaggcggccaucaaccagaucaacggcaagcucaaccggcugaucaagaagaccaacgagaaguuccaccagaucgagaaggaguucuccgagguggaggggcgcauccaggaccuggagaaguacgucgaggacaccaagaucgaccucuggagcuacaacgccgagcugcugguggcccucgagaaccagcacaccaucgaccugacggacuccgagaugaacaagcuguucgagcggaccaagaagcagcuccgcgagaacgccgaggacaugggcaacgggugcuucaagaucuaccacaagugcgacaacgcgugcaucggcagcauccgcaacgggaccuacgaccacgacguguaccgggacgaggcccugaacaaccgcuuccagaucaagggcgucgagcugaaguccggcuacaaggacuggauccucuggaucagcuucgccaucagcugcuuccugcugugcaucgugcuccugggguucaucaugugggccugccagaagggcaacauccggugcaacaucugcaucuga

SEQ ID NO: 65763 - RNA, 1701 nt, Artificial Sequence
  derived and/or modified CDS sequence (opt1) from hemagglutinin__InfluenzaA__ABU92575
augaagaccaucaucgcccugagcuacauccucugccugguguucgcccagaagcugcccggcaacgacaacuccaccgcgacgcucugccuggggcaccacgccgucccgaacggcacccuggugaagaccaucaccaacgaccagaucgaggugacgaacgccaccgagcucguccagagcuccagcaccgggcgcaucugcgacagcccccaccagauccuggacggcgagaacugcacccugaucgacgcccuccugggggacccccacugcgacggcuuccagaacaaggagugggaccuguucguggagcggagcaaggccuacuccaacugcuaccccuacgacgugccggacuacgucagccuccgcucccugguggcgagcuccggcacgcuggaguucaacaacgagagcuucaacuggaccgggguggcccagaacggcaccuccagcgccugcaagcggcgcuccgacaagagcuucuucucccggcucaacuggcugcaccagcugaaguacaaguaccccgcccucaacgucaccaugcccaacaacgagaaguucgacaagcuguacaucuggggcgugcaccaccccgggacggacagcgaccagaucucccuguacgcgcaggccagcgggcgcgugaccgucagcaccaagcggucccagcagaccgugaucccgaacaucggcagcaagcccugggugcgcggcgucuccagccggaucuccaucuacuggacgaucgugaagcccggggacauccuccugaucaacagcaccggcaaccugaucgcgccccgcggguacuucaagauccgguccggcaagagcuccaucaugcgcagcgacgccccgaucggcaagugcaacuccgagugcaucacccccaacgggagcauccccaacgacaagcccuuccagaacgugaaccggaucaccuacggcccgugcccccgcuacgucaagcagaacacgcucaagcuggccaccgggaugcggaacgugcccgagaagcagacccgcggcaucuucggggccaucgccggcuucaucgagaacggcugggaggggaugauggacggcugguacggguuccggcaccagaacuccgagggcaccgggcaggccgccgaccugaaguccacgcaggccgcgaucaaccagaucaacggcaagcucaaccgccugaucgagaagaccaacgagaaguuccaccagaucgagaaggaguucuccgagguggagggccggauccaggaccuggagaaguacgucgaggacaccaagaucgaccucuggagcuacaacgccgagcugcugguggcccucgagaaccagcacaccaucgaccugacggacuccgagaugaacaagcuguucgagcgcaccaagaagcagcuccgggagaacgccgaggacauggggaacggcugcuucaagaucuaccacaagugcgacaacgccugcaucgggagcauccgcaacggcaccuacgaccacgacguguaccgcgacgaggcgcugaacaaccgguuccagaucaagggggucgagcugaaguccggcuacaaggacuggauccucuggaucagcuucgccaucagcugcuuccugcugugcaucgugcuccugggcuucaucaugugggccugccagaaggggaacauccgcugcaacaucugcaucuga

SEQ ID NO: 65764 - RNA, 1701 nt, Artificial Sequence; identical to SEQ ID NO: 64075
  derived and/or modified CDS sequence (opt1) from hemagglutinin__InfluenzaA__ABU92576

SEQ ID NO: 65765 - RNA, 1701 nt, Artificial Sequence; identical to SEQ ID NO: 64075
  derived and/or modified CDS sequence (opt1) from hemagglutinin__InfluenzaA__ABU92577

SEQ ID NO: 65766 - RNA, 1701 nt, Artificial Sequence; identical to SEQ ID NO: 64096
  derived and/or modified CDS sequence (opt1) from hemagglutinin__InfluenzaA__ABU92578

SEQ ID NO: 65767 - RNA, 1701 nt, Artificial Sequence; identical to SEQ ID NO: 64096
  derived and/or modified CDS sequence (opt1) from hemagglutinin__InfluenzaA__ABU92579

SEQ ID NO: 65768 - RNA, 1701 nt, Artificial Sequence; identical to SEQ ID NO: 64096
  derived and/or modified CDS sequence (opt1) from hemagglutinin__InfluenzaA__ABU92580

SEQ ID NO: 65769 - RNA, 1701 nt, Artificial Sequence; identical to SEQ ID NO: 65761
  derived and/or modified CDS sequence (opt1) from hemagglutinin__InfluenzaA__ABU92581

SEQ ID NO: 65770 - RNA, 1701 nt, Artificial Sequence
  derived and/or modified CDS sequence (opt1) from hemagglutinin__InfluenzaA__ABU92582
augaagaccaucaucgcccugagcuacauccucugccugguguucgcccagaagcugcccggcaacgacaacuccaccgcgacgcucugccuggggcaccacgccgucccgaacggcacccuggugaagaccaucaccaacgaccagaucgaggugacgaacgccaccgagcucguccagagcuccagcaccgggcgcaucugcgacagcccccaccagauccuggacggcgagaacugcacccugaucgacgcccuccugggggacccccacugcgacggcuuccagaacaaggagugggaccuguucguggagcggagcaaggccuacuccaacugcuaccccuacgacgugccggacuacgucagccuccgcucccugguggcgagcuccggcacgcuggaguucaacaacgagagcuucaacuggaccgggguggcccagaacggcaccuccagcgccugcaagcggcgcuccgacaagagcuucuucucccggcucaacuggcugcaccagcugaaguacaaguaccccgcccagaacgucaccaugcccaacaacgagaaguucgacaagcucuacaucuggggcgugcaccaccccgggacggacagcgaccagaucucccuguacgcgcaggccagcgggcgcgugaccgucagcaccaagcggucccagcagaccgugaucccgaacaucggcagccgccccugggugcggggcgucuccagccgcaucuccaucuacuggacgaucgugaagcccggggacauccugcucaucaacagcaccggcaaccugaucgcgccccggggguacuucaagauccgcuccggcaagagcuccaucaugcggagcgacgccccgaucggcaagugcaacuccgagugcaucacccccaacgggagcauccccaacgacaagcccuuccagaacgugaaccgcaucaccuacggcgccugcccgcgguacgucaagcagaacacgcugaagcucgccaccgggaugcgcaacgugcccgagaagcagacccggggcaucuucggggccaucgccggcuucaucgagaacggcugggaggggaugauggacggcugguacggguuccgccaccagaacuccgagggcaccgggcaggccgccgaccugaaguccacgcaggcggccaucaaccagaucaacggcaagcugaaccggcucaucgagaagaccaacgagaaguuccaccagaucgagaaggaguucuccgagguggagggccgcauccaggaccuggagaaguacgucgaggacaccaagaucgaccuguggagcuacaacgccgagcuccugguggcccuggagaaccagcacaccaucgaccucacggacuccgagaugaacaagcuguucgagcggaccaagaagcagcugcgcgagaacgccgaggacauggggaacggcugcuucaagaucuaccacaagugcgacaacgcgugcaucgggagcauccgcaacggcaccuacgaccacgacguguaccgggacgaggcccucaacaaccgcuuccagaucaagggggucgagcugaaguccggcuacaaggacuggauccuguggaucagcuucgccaucagcugcuuccuccugugcaucgugcugcucggcuucaucaugugggccugccagaaggggaacauccggugcaacaucugcaucuga

SEQ ID NO: 65771 - RNA, 1701 nt, Artificial Sequence; identical to SEQ ID NO: 65770
  derived and/or modified CDS sequence (opt1) from hemagglutinin__InfluenzaA__ABU92583

SEQ ID NO: 65772 - RNA, 1701 nt, Artificial Sequence
  derived and/or modified CDS sequence (opt1) from hemagglutinin__InfluenzaA__ABU92584
augaagaccaucaucgcccugagcuacauccucugccugguguucgcccagaagcugcccggcaacgacaacuccaccgcgacgcucugccuggggcaccacgccgucccgaacggcacccuggugaagaccaucaccaacgaccagaucgaggugacgaacgccaccgagcucguccagagcuccagcaccgggcgcaucugcgacagcccccaccagauccuggacggcgagaacugcacccugaucgacgcccuccugggggacccccacugcgacggcuuccagaacaaggagugggaccuguucguggagcggagcaaggccuacuccaacugcuaccccuacgacgugccggacuacgucagccuccgcucccugguggcgagcuccggcacgcuggaguucaacaacgagagcuucaacuggaccgggguggcccagaacggcaccuccagcgccugcaagcggcgcuccgacaagagcuucuucucccggcucaacuggcugcaccagcugcgcuacaaguaccccgcccucaacgucaccaugcccaacaacgagaaguucgacaagcuguacaucuggggcgugcaccaccccgggacggacagcgaccagaucucccuguacgcgcaggccagcgggcgggugaccgucagcaccaagcgcucccagcagaccgugaucccgaacaucggcagccggcccugggugcgcggcgucuccagccggaucuccaucuacuggacgaucgugaagcccggggacauccuccugaucaacagcaccggcaaccugaucgcgccccgcggguacuucaagauccgguccggcaagagcuccaucaugcgcagcgacgccccgaucggcaagugcaacuccgagugcaucacccccaacgggagcauccccaacgacaagcccuuccagaacgugaaccggaucaccuacggcgccugcccgcgcuacgucaagcagaagacgcucaagcuggccaccgggaugcggaacgugcccgagaagcagacccgcggcaucuucggggccaucgccggcuucaucgagaacggcugggaggggaugauggacggcugguacggguuccggcaccagaacuccgagggcaccgggcaggccgccgaccugaaguccacgcaggcggccaucaaccagaucaacggcaagcucaaccgccugaucgagaagaccaacgagaaguuccaccagaucgagaaggaguucuccgagguggagggccggauccaggaccuggagaaguacgucgaggacaccaagaucgaccucuggagcuacaacgccgagcugcugguggcccucgagaaccagcacaccaucgaccugacggacuccgagaugaacaagcuguucgagcgcaccaagaagcagcuccgcgagaacgccgaggacauggggaacggcugcuucaagaucuaccacaagugcgacaacgcgugcaucgggagcauccggaacggcaccuacgaccacgacguguaccgcgacgaggcccugaacaaccgguuccagaucaagggggucgagcugaaguccggcuacaaggacuggauccucuggaucagcuucgccaucagcugcuuccugcugugcaucgugcuccugggcuucaucaugugggccugccagaaggggaacauccgcugcaacaucugcaucuga

SEQ ID NO: 65773 - RNA, 1701 nt, Artificial Sequence
  derived and/or modified CDS sequence (opt1) from hemagglutinin__InfluenzaA__ABU92586
augaagaccaucaucgcccugagcuacauccucugccugguguucgcccagaagcugcccggcaacgacaacuccaccgcgacgcucugccuggggcaccacgccgucccgaacggcaccaucgugaagaccaucaccaacgaccagaucgaggugacgaacgccaccgagcugguccagagcuccagcaccgggggcaucugcgacagcccccaccagauccucgacggggagaacugcacccugaucgacgcccugcucggcgacccccagugcgacggcuuccagaacaagaagugggaccuguucguggagcgcagcaaggccuacuccaacugcuaccccuacgacgugccggacuacgcgagccugcggucccucaucgccagcuccgggacgcuggaguucaacaacgagagcuucaacuggaccggcgucacccagaacgggaccuccagcgccugcaagcgccgguccaacagcuccuucuucagccgccugaacuggcucacgcaccugaaguucaaguaccccgcccugaacgugaccaugcccaacaacgaggaguucgacaagcucuacaucuggggcgugcaccaccccgggaccgacaacgaccagaucucccuguacgcgcaggccagcggccggaucaccgucagcacgaagcgcucccagcagaccgugaucccgaacaucggcagccggccccgcgugcgggacauccccucccgcaucagcaucuacuggaccaucgucaagcccggggacauccugcucaucaacuccaccggcaaccugaucgccccgcggggguacuucaagauccgcagcggcaaguccagcaucaugcgguccgacgcccccaucggcaagugcaacagcgagugcaucacgcccaacggguccauccccaacgacaagccguuccagaacgugaaccgcaucaccuacggcgccugcccccgguacgugaagcagaacacccugaagcucgcgaccgggaugcgcaacguccccgagaagcagacgcggggcaucuucggggccaucgccggcuucaucgagaacggcugggaggggaugguggacggcugguacggguuccgccaccagaacagcgagggcaucgggcaggccgccgaccugaaguccacccaggcggccaucgaccagaucaacggcaagcugaaccggcucaucggcaagaccaacgagaaguuccaccagaucgagaaggaguucagcgagguggaggggcgcauccaggaccuggagaaguacgucgaggacaccaagaucgaccugugguccuacaacgccgagcuccugguggcccuggagaaccagcacacgaucgaccucaccgacagcgagaugaacaagcuguucgagcggaccaagaagcagcugcgcgagaacgccgaggacaugggcaacgggugcuucaagaucuaccacaagugcgacaacgcgugcaucggcuccauccgcaacgggaccuacgaccacgacguguaccgggacgaggcccucaacaaccgcuuccagaucaagggcgucgagcugaaguccggcuacaagaacuggauccuguggaucuccuucgccaucagcugcuuccuccugugcguggcccugcucggguucaucaugugggccugccagaagggcaacauccggugcaacaucugcaucuga

SEQ ID NO: 65774 - RNA, 1701 nt, Artificial Sequence
  derived and/or modified CDS sequence (opt1) from hemagglutinin__InfluenzaA__ABU92587
augaagaccaucaucgcccugagcuacauccucugccugguguucgcccagaagcugcccggcaacgacaacuccaccgcgacgcucugccuggggcaccacgccgucccgaacggcaccaucgugaagaccaucaccaacgaccagaucgaggugacgaacgccaccgagcugguccagagcuccagcaccgggggcaucugcgacagcccccaccagauccucgacggggagaacugcacccugaucgacgcccugcucggcgacccccagugcgacggcuuccagaacaagaagugggaccuguucguggagcgcagcaaggccuacuccaacugcuaccccuacgacgugccggacuacgcgagccugcggucccucaucgccagcuccgggacgcuggaguucaacaacgagagcuucaacuggaccggcgucacccagaacgggaccuccagcgccugcaagcgccgguccaacagcuccuucuucagccgccugaacuggcucacgcaccugaaguucaaguaccccgcccugaacgugaccaugcccaacaacgaggaguucgacaagcucuacaucuggggcgugcaccaccccgggaccuacaacgaccagaucucccuguacgcgcaggccagcggccggaucaccgucagcacgaagcgcucccagcagaccgccaucccgaacaucggcagccggccccgcgugcgggacauccccucccgcaucagcaucuacuggaccaucgugaagcccggggacauccugcucaucaacuccaccggcaaccugaucgccccgcggggguacuucaagauccgcagcggcaaguccagcaucaugcgguccgacgcccccaucggcaagugcaacagcgagugcaucacgcccaacggguccauccccaacgacaagccguuccagaacgucaaccgcaucaccuacggcgcgugcccccgguacgugaagcagaacacccugaagcucgccaccgggaugcgcaacgugcccgagaagcagacgcggggcaucuucggggccaucgccggcuucaucgagaacggcugggaggggauggucgacggcugguacggguuccgccaccagaacagcgagggcaucgggcaggccgcggaccugaaguccacccaggccgccaucgaccagaucaacggcaagcugaaccggcucaucggcaagaccaacgagaaguuccaccagaucgagaaggaguucagcgagguggaggggcgcauccaggaccuggagaaguacguggaggacaccaagaucgaccugugguccuacaacgccgagcuccuggucgcccuggagaaccagcacacgaucgaccucaccgacagcgagaugaacaagcuguucgagcggaccaagaagcagcugcgcgagaacgcggaggacaugggcaacgggugcuucaagaucuaccacaagugcgacaacgccugcaucggcuccauccgcaacgggaccuacgaccacgacguguaccgggacgaggcccucaacaaccgcuuccagaucaagggcguggagcugaaguccggcuacaaggacuggauccuguggaucuccuucgccaucagcugcuuccuccugugcgucgcccugcucggguucaucaugugggcgugccagaagggcaacauccggugcaacaucugcaucuga

SEQ ID NO: 65775 - RNA, 1701 nt, Artificial Sequence
  derived and/or modified CDS sequence (opt1) from hemagglutinin__InfluenzaA__ABU92588
augaagaccaucaucgcccugagcuacauccucugccugguguucgcccagaagcugcccggcaacgacaacuccaccgcgacgcucugccuggggcaccacgccgucccgaacggcaccaucgugaagaccaucaccaacgaccagaucgaggugacgaacgccaccgagcugguccagagcuccagcaccgggggcaucugcgacagcccccaccagauccucgacggggagaacugcacccugaucgacgcccugcucggcgacccccagugcgacggcuuccagaacaagaagugggaccuguucguggagcgcuccaaggccuacuccaacugcuaccccuacgacgugccggacuacgcgagccugcggucccucgucgccagcuccgggacgcuggaguucaacaacgagagcuucaacuggaccggcgugacccagaacgggaccuccagcgccugcaagcgcaaguccaacaacagcuucuucucccggcugaacuggcucacgcaccugaaguucaaguaccccgcccugaacgugaccaugcccaacaacgagaaguucgacaagcucuacaucuggggcguccaccaccccgggaccgacaacgaccagaucagccuguacgcgcaggccuccggccgcaucaccgugagcacgaagcggagccagcagaccgugaucccgaacaucggcucccgcccccggguccgcgacauccccagccggaucuccaucuacuggaccaucgugaagcccggggacauccugcucaucaacagcaccggcaaccugaucgccccgcgcggguacuucaagauccgguccggcaagagcuccaucaugcgcagcgacgcccccaucggcaagugcaacuccgagugcaucacgcccaacgggagcauccccaacgacaagccguuccagaacgugaaccggaucaccuacggcgccugcccccgcuacgucaagcagaacacccugaagcucgcgaccgggaugcggaacgugcccgagaagcagacgcgcggcaucuucggggccaucgccggcuucaucgagaacggcugggaggggaugguggacggcugguacggguuccggcaccagaacuccgagggcaucgggcaggccgccgaccucaagagcacccaggcggccaucaaccagaucaacggcaagcugaaccgccucaucggcaagaccaacgagaaguuccaccagaucgagaaggaguucuccgaggucgaggggcggauccaggaccuggagaaguacguggaggacaccaagaucgaccuguggagcuacaacgccgaguuccucguggcccuggagaaccagcacacgaucgaccugaccgacuccgagaugaacaagcuguucgagcgcaccaagaagcagcugcgggagaacgccgaggacaugggcaacgggugcuucaagaucuaccacaagugcgacaacgcgugcaucggcagcauccgcaacgggaccuacgaccacgacgucuaccgcgacgaggcccugaacaaccgguuccagaucaagggcguggagcucaaguccggcuacaaggacuggauccuguggaucagcuucgccaucuccugcuuccugcucugcguggcccugcugggguucaucaugugggccugccagaagggcaacauccgcugcaacaucugcaucuga

SEQ ID NO: 65776 - RNA, 1701 nt, Artificial Sequence; identical to SEQ ID NO: 64657
  derived and/or modified CDS sequence (opt1) from hemagglutinin__InfluenzaA__ABU92590

SEQ ID NO: 65777 - RNA, 1701 nt, Artificial Sequence
  derived and/or modified CDS sequence (opt1) from hemagglutinin__InfluenzaA__ABU92591
augaagaccaucaucgcccugagcuacauccucugccugguguucgcccagaagcugcccggcaacgacaacuccaccgcgacgcucugccuggggcaccacgccgucccgaacggcaccaucgugaagaccaucaccaacgaccagaucgaggugacgaacgccaccgagcugguccagagcuccagcaccgggggcaucugcgacagcccccaccagauccucgacggggagaacugcacccugaucgacgcccugcucggcgacccccagugcgacggcuuccagaacaagaagugggaccuguucguggagcgcagcaaggccuacuccaacugcuaccccuacgacgugccggacuacgcgagccugcggucccucaucgccagcuccgggacgcuggaguucaacaacgagagcuucaacuggaccggcgucacccagaacgggaccuccagcgccugcaagcgccgguccaacagcuccuucuucagccgccugaacuggcucacgcaccugaaguucaaguaccccgcccugaacgugaccaugcccaacaacgaggaguucgacaagcucuacaucuggggcgugcaccaccccgggaccgacaacgaccagaucucccuguacgcgcaggccagcggccggaucaccgucagcacgaagcgcucccagcagaccgugaucccgaacaucggcagccggccccgcgugcgggacauccccucccgcaucagcaucuacuggaccaucgucaagcccggggacauccugcucaucaacuccaccggcaaccugaucgccccgcggggguacuucaagauccgcagcggcaaguccagcaucaugcgguccgacgcccccaucggcaagugcaacagcgagugcaucacgcccaacggguccauccccaacgacaagccguuccagaacgugaaccgcaucaccuacggcgccugcccccgguacgugaagcagaacacccugaagcucgcgaccgggaugcgcaacguccccgagaagcagacgcggggcaucuucggggccaucgccggcuucaucgagaacggcugggaggggaugguggacggcugguacggguuccgccaccagaacagcgagggcaucgggcaggccgccgaccugaaguccacccaggcggccaucgaccagaucaacggcaagcugaaccggcucaucggcaagaccaacgagaaguuccaccagaucgagaaggaguucagcgagguggaggggcgcauccaggaccuggagaaguacgucgaggacaccaagaucgaccugugguccuacaacgccgagcuccugguggcccuggagaaccagcacacgaucgaccucaccgacagcgagaugaacaagcuguucgagcggaccaagaagcagcugcgcgagaacgccgaggacaugggcaacgggugcuucaagaucuaccacaagugcgacaacgcgugcaucggcuccauccgcaacgggaccuacgaccacgacguguaccgggacgaggcccucaacaaccgcuuccagaucaagggcgucgagcugaaguccggcuacaaggacuggauccuguggaucuccuucgccaucagcugcuuccuccugugcguggcccugcucggguucaucaugugggccugccagaagggcaacauccggugcaacaucugcaucuga

SEQ ID NO: 65778 - RNA, 1701 nt, Artificial Sequence; identical to SEQ ID NO: 65777
  derived and/or modified CDS sequence (opt1) from hemagglutinin__InfluenzaA__ABU92592

SEQ ID NO: 65779 - RNA, 1701 nt, Artificial Sequence
  derived and/or modified CDS sequence (opt1) from hemagglutinin__InfluenzaA__ABU92593
augaagaccaucaucgcccugagcuacauccucugccugguguucgcccagaagcugcccggcaacgacaacuccaccgcgacgcucugccuggggcaccacgccgucccgaacggcaccaucgugaagaccaucaccaacgaccagaucgaggugacgaacgccaccgagcugguccagagcuccagcaccgggggcaucugcgacagcccccaccagauccucgacggggagaacugcacccugaucgacgcccugcucggcgacccccagugcgacggcuuccagaacaagaagugggaccuguucguggagcgcagcaaggccuacuccaacugcuaccccuacgacgugccggacuacgcgagccugcggucccucgucgccagcuccgggacgcuggaguucaacaacgagagcuucaacuggaccggcgugacccagaacgggaccuccagcgccugcaagcgccgguccaacaacagcuucuucucccgccugaacuggcucacgcaccugaaguucaaguaccccgcccugaacgugaccaugcccaacaacgagaaguucgacaagcucuacaucuggggcguccaccaccccgggaccgacaacgaccagaucuuccuguacgcgcaggccagcggccggaucaccguguccacgaagcgcagccagcagaccgugaucccgaacaucggcagccggccccgcguccggaacauccccucccgcaucagcaucuacuggaccaucgugaagcccggggacauccugcucaucaacuccaccggcaaccugaucgccccgcggggguacuucaagauccgcagcggcaaguccagcaucaugcgguccgacgcccccaucggcaagugcaacagcgagugcaucacgcccaacggguccauccccaacgacaagccguuccagaacgugaaccgcaucaccuacggcgccugcccccgguacgucaagcagaacacccugaagcucgcgaccgggaugcgcaacgugcccgagaagcagacgcggggcaucuucggggccaucgccggcuucaucgagaacggcugggaggggaugguggacggcugguacggguuccgccaccagaacagcgagggcaucgggcaggccgccgaccugaaguccacccaggcggccaucgaccagaucaacggcaagcugaaccggcucaucggcaagaccaacgagaaguuccaccagaucgagaaggaguucagcgaggucgaggggcgcauccaggaccuggagaaguacguggaggacaccaagaucgaccugugguccuacaacgccgagcuccugguggcccuggagaaccagcacacgaucgaccucaccgacagcgagaugaacaagcuguucgagaagaccaagaagcagcugcgggagaacgccgaggacaugggcaacgggugcuucaagaucuaccacaagugcgacaacgcgugcaucggcuccauccgcaacgggaccuacgaccacgacgucuaccgcgacgaggcccucaacaaccgguuccagaucaagggcguggagcugaaguccggcuacaaggacuggauccuguggaucuccuucgccaucagcugcuuccuccugugcguggcccugcucggguucaucaugugggccggccagaaggggaacaagcgcugcaacaucugcaucuga

SEQ ID NO: 65780 - RNA, 1701 nt, Artificial Sequence
  derived and/or modified CDS sequence (opt1) from hemagglutinin__InfluenzaA__ABU92594
augaagaccaucaucgcccugagcuacauccucugccugguguucgcccagaagcugcccggcaacgacaacuccaccgcgacgcucugccuggggcaccacgccgucccgaacggcaccaucgugaagaccaucaccaacgaccagaucgaggugacgaacgccaccgagcugguccagagcuccagcaccggggagaucugcaacagcccccaccagauccucgacggcgagagcugcacccugaucgacgcccugcucggggacccccagugcgacggcuuccagaacaagaagugggaccuguucguggagcgcuccaaggccuacagcaacugcuaccccuacgacgugccggacuacgcgucccugcggagccucgucgccuccagcggcacgcuggaguucaacaacgaguccuucaacuggaccggggugacccagaacggcaccagcuccgccugcaagcgccggagcaacaacuccuucuucagccgccugaacuggcucacgcaccugaaguucaaguaccccgcccugaacgugaccaugcccaacaacgagaaguucgacaagcucuacaucuggggcguccaccaccccgggaccgacaacgaccagaucuuccuguacgcgcaggccuccgggcggaucaccgugagcacgaagcgcagccagcagaccgugaucccgaacaucggcucccggccccgcguccggaacauccccagccgcaucuccaucuacuggaccaucgugaagcccggcgacauccugcucaucaacagcaccgggaaccugaucgccccgcggggcuacuucaagauccgcuccgggaaguccuccaucaugcggagcgacgcccccaucggcaagugcaacuccgagugcaucacgcccaacggcagcauccccaacgacaagccguuccagaacgugaaccgcaucaccuacggggccugcccccgguacgucaagcagaacacccugaagcucgcgaccggcaugcgcaacgugcccgagaagcagacgcgggggaucuucggcgccaucgccggguucaucgagaacggcugggagggcaugguggacgggugguacggcuuccgccaccagaacuccgaggggaucggccaggccgccgaccucaagagcacccaggcggccaucaaccagaucaacgggaagcugaaccggcugaucggcaagaccaacgagaaguuccaccagaucgagaaggaguucuccgaggucgagggccgcauccaggaccuggagaaguacguggaggacaccaagaucgaccuguggagcuacaacgccgagcuccugguggcccuggagaaccagcacacgaucgaccucaccgacuccgagaugaacaagcuguucgagcggaccaagaagcagcugcgcgagaacgccgaggacauggggaacggcugcuucaagaucuaccacaagugcgacaacgcgugcaucgggagcauccgcaacggcaccuacgaccacgacgucuaccgggacgaggcccucaacaaccgcuuccagaucaaggggguggagcugaaguccggcuacaaggacuggauccuguggaucagcuucgccaucuccugcuuccuccugugcguggcccugagcggcuucaucaugugggccugccagaaggggaacauccggugcaacaucugcaucuga

SEQ ID NO: 65781 - RNA, 1701 nt, Artificial Sequence
  derived and/or modified CDS sequence (opt1) from hemagglutinin__InfluenzaA__ABU92595
augaagaccaucaucgcccugagcuacauccucugccugguguucgcccagaagcugcccgagaacgacaacuccaccgcgacgcucugccugggccaccacgccgucccgaacgggaccaucgugaagaccaucaccaacgaccagaucgaggugacgaacgccaccgagcugguccagagcuccagcaccggcgggaucugcgacagcccccaccagauccucgacggcgagaacugcacccugaucgacgcccugcucggggacccccagugcgacggcuuccagaacaagaagugggaccuguucguggagcgcagcaaggccuacuccaacugcuaccccuacgacgugccggacuacgcgagccugcggucccucgucgccagcuccggcacgcuggaguucaacaacgagagcuucaacuggaccggggugacccagaacggcaccuccagcgccugcaagcgccgguccaacaacagcuucuucucccgccugaacuggcucacgcaccugaaguucaaguaccccgcccugaacgugaccaugcccaacaacgagaaguucgacaagcucuacaucuggggcguccaccaccccgggaccgacaacgaccagaucuuccuguacgcgcaggccagcgggcggaucaccguguccacgaagcgcagccagcagaccgugaucccgaacaucggcagccggccccgcguccggaacauccccucccgcaucagcaucuacuggaccaucgugaagcccggcgacauccugcucaucaacuccaccgggaaccugaucgccccgcggggcuacuucaagauccgcagcgggaaguccagcaucaugcgguccgacgcccccaucggcaagugcaacagcgagugcaucacgcccaacggcuccauccccaacgacaagccguuccagaacgugaaccgcaucaccuacggggccugcccccgguacgucaagcagaacacccugaagcucgcgaccggcaugcgcaacgugcccgagaagcagacgcgggggaucuucggcgccaucgccggguucaucgagaacggcugggagggcaugguggacgggugguacggcuuccgccaccagaacagcgaggggaucggccaggccgccgaccugaaguccacccaggcggccaucgaccagaucaacgggaagcugaaccggcucaucggcaagaccaacgagaaguuccaccagaucgagaaggaguucagcgaggucgagggccgcauccaggaccuggagaaguacguggaggacaccaagaucgaccugugguccuacaacgccgagcuccugguggcccuggagaaccagcacacgaucgaccucaccgacagcgagaugaacaagcuguucgagaagaccaagaagcagcugcgggagaacgccgaggacauggggaacggcugcuucaagaucuaccacaagugcgacaacgcgugcaucggguccauccgcaacggcaccuacgaccacgacgucuaccgcgacgaggcccucaacaaccgguuccagaucaaggggguggagcugaaguccggcuacaaggacuggauccuguggaucuccuucgccaucagcugcuuccuccugugcguggcccugcucggcuucaucaugugggccugccagaaggggaacauccgcugcaacaucugcaucuga

SEQ ID NO: 65782 - RNA, 1701 nt, Artificial Sequence
  derived and/or modified CDS sequence (opt1) from hemagglutinin__InfluenzaA__ABU92596
augaagaccaucaucgcccugagcuacauccucugccugguguucgcccagaagcugcccggcaacgacaacuccaccgcgacgcucugccuggggcaccacgccgucccgaacggcaccauggugaagaccaucaccaacgaccagaucgaggugacgaacgccaccgagcugguccagagcuccagcaccggggagaucugcgacagcccccaccagauccucgacggcgagaacugcacccugaucgacgcccugcucggggacccccagugcgacggcuuccagaacaagaagugggaccuguucguggagcgcagcaaggcccacuccaacugcuaccccuacgacgugccggacuacgcgagccugcggucccucaucgccagcuccggcacgcuggaguucaacaacgagagcuucaacuggaccggggucacccagaacggcaccuccagcgccugcaagcgccgguccgacaacagcuucuucucccgccugaacuggcucacgcaccugaaguucaaguaccccgcccugaacgugaccaugcccaacaacgaggaguucgacaagcucuacaucuggggcgugcaccaccccgggaccgacaacgaccagaucagccuguacgcgcaggccuccgggcggaucaccgucagcacgaagcgcagccagcagaccgugaucccgaacaucggcucccggccccgcgugcgggacauccccagccgcaucuccaucuacuggaccaucgucaagcccggcgacauccugcucaucaacagcaccgggaaccugaucgccccgcggggcuacuucaagauccgcuccgggaaguccuccaucaugcggagcgacgcccccaucggcaagugcaacuccggcugcaucacgcccaacgggagcauccccaacgacaagccguuccagaacgugaaccgcaucaccuacggcgccugcccccgguacgugaagcagaacacccugaagcucgcgaccgggaugcgcaacguccccgagaagcagacgcggggcaucuucggggccaucgccggcuucaucgagaacggcugggaggggaugguggacggcugguacggguuccgccaccagaacuccgagggcaucgggcaggccgccgaccucaagagcacccaggcggccaucgaccagaucaacggcaagcugaaccggcugaucggcaagaccaacgagaaguuccaccagaucgagaaggaguucuccgagguggaggggcgcauccaggaccuggagaaguacgucgaggacaccaagaucgaccuguggagcuacaacgccgagcuccugguggcccuggagaaccagcacacgaucgaccucaccgacuccgagaugaacaagcuguucgagcggaccaagaagcagcugcgcgagaacgccgaggacaugggcaacgggugcuucaagaucuaccacaagugcgacaacgcgugcaucggcagcauccgcaacgggaccuacgaccacgacguguaccgggacgaggcccucaacaaccgcuuccagaucaagggcgucgagcugaaguccggcuacaaggacuggauccuguggaucagcuucgccaucuccugcuuccuccugugcguggcccugcucggguucaucaugugggccugccagaagggcaacauccggugcaacaucugcaucuga

SEQ ID NO: 65783 - RNA, 1701 nt, Artificial Sequence; identical to SEQ ID NO: 64654
  derived and/or modified CDS sequence (opt1) from hemagglutinin__InfluenzaA__ABU92597

SEQ ID NO: 65784 - RNA, 1701 nt, Artificial Sequence; identical to SEQ ID NO: 64097
  derived and/or modified CDS sequence (opt1) from hemagglutinin__InfluenzaA__ABU92601

SEQ ID NO: 65785 - RNA, 1701 nt, Artificial Sequence; identical to SEQ ID NO: 64097
  derived and/or modified CDS sequence (opt1) from hemagglutinin__InfluenzaA__ABU92602

SEQ ID NO: 65786 - RNA, 1701 nt, Artificial Sequence
  derived and/or modified CDS sequence (opt1) from hemagglutinin__InfluenzaA__ABU92603
augaagaccaucaucgcccugagcuacauccucugccugguguucgcccagaagcugcccggcaacgacaacuccaccgcgacgcucugccuggggcaccacgccgucccgaacggcaccaucgugaagaccaucaccaacgaccagaucgaggugacgaacgccaccgagcugguccagaucagcuccaccggggagaucugcgacagcccccaccagauccucgacggcgagaacugcacccugaucgacgcccugcucggggacccccagugcgacggcuuccagaacaagaagugggaccuguucguggagcgcuccaaggccuacagcaacugcuaccccuacgacgugccggacuacgcgucccugcggagccucgucgccuccagcggcacgcuggaguucaacaacgaguccuucgacuggaccggggugacccagaacggcaccagcuccgccugcaagcgccggagcgacaaguccuucuucagccgccugaacuggcucacgcaccugaaguacaaguaccccgcccugaacgugaccaugcccaacaacgagaaguucgacaagcucuacaucuggggcguccaccaccccgggaccgacuccgaccagaucagccuguacgcgcaggccuccgggcggaucaccgugagcacgaagcgcagccagcagaccgugaucccgaacaucggcucccggccccgcguccgggacgugagcucccgcaucagcaucuacuggaccaucgugaagcccggcgacauccugcucaucaacuccaccgggaaccugaucgcgccccggggcuacuucaagauccgcagcgggaaguccagcaucaugcgguccgacgccccgaucggcaagugcaacagcgagugcaucacgcccaacggcuccauccccaacgacaagcccuuccagaacgucaaccgcaucaccuacggggccugcccgcgguacgugaagcagaacacccugaagcucgccaccggcaugcgcaacgugcccgagaagcagacgcgggggaucuucggcgccaucgccggguucaucgagaacggcugggagggcauggucgacgggugguacggcuuccgccaccagaacagcgaggggaccggccaggccgccgaccugaaguccacccaggcggccaucaaccagaucaacgggaagcugaaccggcucaucggcaagaccaacgagaaguuccaccagaucgagaaggaguucagcgagguggagggccgcauccaggaccuggagaaguacguggaggacacgaagaucgaccugugguccuacaacgccgagcuccuggucgcccuggagaaccagcacaccaucgaccucaccgacagcgagaugaacaagcuguucgagcggaccaagaagcagcugcgcgagaacgccgaggacauggggaacggcugcuucaagaucuaccacaagugcgacaacgcgugcaucggguccauccgcaacggcacguacgaccacgacguguaccgggacgaggcccucaacaaccgcuuccagaucaaggggguggagcucaagagcggcuacaaggacuggauccuguggaucuccuucgccaucagcugcuuccugcugugcgucgcccugcucggcuucaucaugugggccugccagaaggggaacauccggugcaacaucugcaucuga

SEQ ID NO: 65787 - RNA, 1701 nt, Artificial Sequence; identical to SEQ ID NO: 64097
  derived and/or modified CDS sequence (opt1) from hemagglutinin__InfluenzaA__ABU92604

SEQ ID NO: 65788 - RNA, 1701 nt, Artificial Sequence; identical to SEQ ID NO: 65786
  derived and/or modified CDS sequence (opt1) from hemagglutinin__InfluenzaA__ABU92605

SEQ ID NO: 65789 - RNA, 1701 nt, Artificial Sequence; identical to SEQ ID NO: 65786
  derived and/or modified CDS sequence (opt1) from hemagglutinin__InfluenzaA__ABU92606

SEQ ID NO: 65790 - RNA, 1701 nt, Artificial Sequence; identical to SEQ ID NO: 64636
  derived and/or modified CDS sequence (opt1) from hemagglutinin__InfluenzaA__ABU92608

SEQ ID NO: 65791 - RNA, 1701 nt, Artificial Sequence; identical to SEQ ID NO: 64636
  derived and/or modified CDS sequence (opt1) from hemagglutinin__InfluenzaA__ABU92609

SEQ ID NO: 65792 - RNA, 1701 nt, Artificial Sequence
  derived and/or modified CDS sequence (opt1) from hemagglutinin__InfluenzaA__ABU92610
augaagaccaucaucgcccugagcuacauccucugccugguguucgcccagaagcugcccggcaacgacaacuccaccgcgacgcucugccuggggcaccacgccgucccgaacggcaccaucgugaagaccaucaccaacgaccagaucgaggugacgaacgccaccgagcugguccagagcuccagcaccggggagaucugcgacagcccccaccagauccucgacggcgagaacugcacccugaucgacgcccugcucggggacccccagugcgacggcuuccagaacaagaagugggaccuguucguggagcgcagcaaggccuacuccaacugcuaccccuacgacgugccggacuacgcgagccugcggucccucgucgccagcuccggcacgcuggaguucaacaacgagagcuucaacuggaccggggugacccagaacggcaccuccagcgccugcaagcgccgguccaacaacagcuucuucucccgccugaacuggcucacgcacagcaaguucaaguaccccgcccugaacgugaccaugcccaacaacgagaaguucgacaagcuguacaucuggggcguccaccaccccgggaccgacaacgaccagaucuuccucuacgcgcaggccuccgggcggaucaccgugagcacgaagcgcagccagcagaccgugaucccgaacaucggcucccggccccgcguccggaacauccccagccgcaucuccaucuacuggaccaucgugaagcccggcgacauccugcugaucaacagcaccgggaaccucaucgccccgcggggcuacuucaagauccgcuccgggaaguccuccaucaugcggagcgacgcccccaucggcaagugcaacuccgagugcaucacgcccaacggcagcauccccaacgacaagccguuccagaacgugaaccgcaucgccuacggggcgugcccccgguacgucaagcagaacacccugaagcuggccaccggcaugcgcaacgugcccgagaagcagacccgggggaucuucggcgccaucgccggguucaucgagaacggcugggagggcaugguggacgggugguacggcuuccgccaccagaacuccgaggggaucggccaggccgcggaccucaagagcacgcaggccgccaucaaccagaucaacgggaagcugaaccggcugaucggcaagaccaacgagaaguuccaccagaucgagaaggaguucuccgaggucgagggccgcauccaggaccucgagaaguacguggaggacaccaagaucgaccuguggagcuacaacgccgagcugcucguggcccuggagaaccagcacaccaucgaccugacggacuccgagaugaacaagcuguucgagcggaccaagaagcagcuccgcgagaacgcggaggacaugagcaacgggugcuucaagaucuaccacaagugcgacaacgccugcaucggcuccauccgcaacgggaccuacgaccacgacgucuaccgggacgaggcccugaacaaccgcuuccagaucaagggcguggagcucaagagcggguacaaggacuggauccuguggaucuccuucgccaucagcugcuuccugcucugcgugguccugcugggcuucaucaugugggccugccagaagggcaacauccggugcaacaucugcaucuga

SEQ ID NO: 65793 - RNA, 1701 nt, Artificial Sequence
  derived and/or modified CDS sequence (opt1) from hemagglutinin__InfluenzaA__ABU92611
augaagaccaucaucgcccugagcuacauccucugccugguguucgcccagaagcugcccggcaacgacaacuccaccgcgacgcucugccuggggcaccacgccgucccgaacggcaccaucgugaagaccaucaccaacgaccagaucgaggugacgaacgccaccgagcugguccagagcuccagcaccgggggcaucugcgacagcccccaccagauccucgacggggagaacugcacccugaucgacgcccugcucggcgacccccagugcgacggcuuccagaacaagaagugggaccuguucguggagcgcagcaaggccuacuccaacugcuaccccuacgacgugccggacuacgcgagccugcggucccucaucgccagcuccgggacgcuggaguucaacaacgagagcuucaacuggaccggcgucacccagaacgggaccuccagcgccugcaagcgccgguccaacaacagcuucuucucccgccugaacuggcucacgcaccugaaguucaaguaccccgcccugaacgugaccaugcccaacaacgaggaguucgacaagcucuacaucuggggcgugcaccaccccgggaccgacaacgaccagaucagccuguacgcgcaggccuccggcaagaucaccgucagcacgaagcggagccagcagaccgugaucccgaacaucggcucccgcccccgggugcgcgacauccccagccggaucuccaucuacuggaccaucgucaagcccggggacauccugcucaucaacagcaccggcaaccugaucgccccgcgcggguacuucaagauccgguccggcaagagcuccaucaugcgcagcgacgcccccaucggcaagugcaacuccgagugcaucacgcccaacgggagcauccccaacgacaagccguuccagaacgugaaccggaucaccuacggcgccugcccccgcuacgugaagcagaacacccugaagcucgcgaccgggaugcggaacguccccgagaagcagacgcgcggcaucuucggggccaucgccggcuucaucgagaacggcugggaggggaugguggacggcugguacggguuccggcaccagaacuccgagggcaucgggcaggccgccgaccugaaguccacccaggcggccaucgaccagaucaacggcaagcugaaccgccucaucggcaagaccaacgagaaguuccaccagaucgagaaggaguucuccgagguggaggggcggauccaggaccuggagaaguacgucgaggacaccaagaucgaccuguggagcuacaacgccgagcuccugguggcccuggagaaccagcacacgaucgaccucaccgacuccgagaugaacaagcuguucgagcgcaccaagaagcagcugcgggagaacgccgaggacaugggcaacgggugcuucaagaucuaccacaagugcgacaacgcgugcaucggcagcauccgcaacgggaccuacgaccacgacguguaccgcgacgaggcccucaacaaccgguuccagaucaagggcgucgagcugaaguccggcuacaaggacuggauccuguggaucagcuucgccaucuccugcuuccuccugugcguggcccugcucggguucaucaucugggccugccugaagggcaacauccgcugcaacaucugcaucuga

SEQ ID NO: 65794 - RNA, 1701 nt, Artificial Sequence
  derived and/or modified CDS sequence (opt1) from hemagglutinin__InfluenzaA__ABU92612
augaagaccaucaucgcccugagcuacauccucugccugguguucgcccagaagcugcccggcaacgacaacuccaccgcgacgcucugccuggggcaccacgccgucccgaacggcaccauggugaagaccaucaccaacgaccagaucgaggugacgaacgccaccgagcugguccagagcuccagcaccgggggcaucugcgacagcccccaccagauccucgacggggagaacugcacccugaucgacgcccugcucggcgacccccagugcgacggcuuccagaacaagaagugggaccuguucguggagcgcagcaaggcccacuccaacugcuaccccuacgacgugccggacuacgcgagccugcggucccucgucgccagcuccgggacgcuggaguucaacaacgagagcuucaacuggaccggcgugacccagaacgggaccuccagcgccugcaagcgccgguccaacaacagcuucuucucccgccugaacuggcucacgcaccugaaguucaaguaccccgcccugaacgugaccaugcccaacaacgagaaguucgacaagcucuacaucuggggcguccaccaccccgggaccgacaacgaccagaucagccuguacgcgcaggccuccggccggaucaccgugagcacgaagcgcagccagcagaccgugaucccgaacaucggcucccggccccgcguccgggacauccccagccgcaucuccaucuacuggaccaucgugaagcccggggacauccugcucaucaacagcaccggcaaccugaucgccccgcggggguacuucaagauccgcuccggcaagagcuccaucaugcggagcgacgcccccaucggcaagugcaacuccgagugcaucacgcccaacgggagcauccccaacaacaagccguuccagaacgugaaccgcaucaccuacggcgccugcccccgguacgucaagcagaacacccugaagcucgcgaccgggaugcgcaacgugcccgagaagcagacgcggggcaucuucggggccaucgccggcuucaucgagaacggcugggaggggaugguggacggcugguacggguuccgccaccagaacuccgagggcaucgggcaggccgccgaccugaaguccacccaggcggccaucaaccagaucaacggcaagcugaaccggcucaucggcaagaccaacgagaaguuccaccagaucgagaaggaguucuccgaggucgaggggcgcauccaggaccuggagaaguacguggaggacaccaagaucgaccuguggagcuacaacgccgagcuccugguggcccuggagaaccagcacacgaucgaccucaccgacuccgagaugaacaagcuguucgagcggaccaagaagcagcugcgcgagaacgccgaggacaugggcaacgggugcuucaagaucuaccacaagugcgacaacgcgugcaucggcagcauccgcaacgggaccuacgaccacgacgucuaccgggacgaggcccucaacaaccgcuuccagaucaagggcguggagcugaaguccggcuacaaggacuggauccuguggaucagcuucgccaucuccugcuuccuccugugcguggcccugcucggguucaucaugugggccugccagaagggcaacauccggugcaacaucugcaucuga

SEQ ID NO: 65795 - RNA, 1701 nt, Artificial Sequence; identical to SEQ ID NO: 65282
  derived and/or modified CDS sequence (opt1) from hemagglutinin__InfluenzaA__ABU92613

SEQ ID NO: 65796 - RNA, 1701 nt, Artificial Sequence; identical to SEQ ID NO: 65781
  derived and/or modified CDS sequence (opt1) from hemagglutinin__InfluenzaA__ABU92614

SEQ ID NO: 65797 - RNA, 1701 nt, Artificial Sequence
  derived and/or modified CDS sequence (opt1) from hemagglutinin__InfluenzaA__ABU92615
augaagaccaucaucgcccugagcuacauccucugccugguguucgcccagaagcugcccggcaacgacaacuccaccgcgacgcucugccuggggcaccacgccgucccgaacggcaccaucgugcgcaccaucaccaacgaccagaucgaggugacgaacgccaccgagcugguccagagcuccagcaccgggggcaucugcgacagcccccaccagauccucgacggggagaacugcacccugaucgacgcccugcucggcgacccccagugcgacggcuuccagaacaagaagugggaccuguucguggagcggagcaaggccuacuccaacugcuaccccuacgacgugccggacuacgcgagccugcgcucccucgucgccagcuccgggacgcuggaguucaacaacgagagcuucaacuggaccggcgugacccagaacgggaccuccagcgccugcaagcggcgcuccaacaacagcuucuucucccggcugaacuggcucacgcaccugaaguucaaguaccccgcccugaacgugaccaugcccaacaacgagaaguucgacaagcucuacaucuggggcguccaccaccccgggaccgacaacgaccagaucagccuguacgcgcaggccuccggccgcaucaccgugagcacgaagcggagccagcagaccgugaucccgaacgucggcucccgcccccgggugcgcgacauccccagccggaucuccaucuacuggaccaucgugaagcccggggacauccugcucaucaacagcaccggcaaccugaucgccccgcgcggguacuucaagauccgguccggcaagagcuccaucaugcgcagcgacgcccccaucggcaagugcaacuccgagugcaucacgcccaacgggagcauccccaacgacaagccguuccagaacgucaaccggaucaccuacggcgccugcccccgcuacgugaagcagaacacccugaagcucgcgaccgggaugcggaacgugcccgagaagcagacgcgcggcaucuucggggccaucgccggcuucaucgagaacggcugggaggggauggucgacggcugguacggguuccggcaccagaacuccgagggcaucgggcaggccgccgaccugaaguccacccaggcggccaucaaccagaucaacggcaagcugaaccgccucaucggcaagaccaacgagaaguuccaccagaucgagaaggaguucuccgagguggaggggcggauccaggaccuggagaaguacguggaggacaccaagaucgaccuguggagcuacaacgccgagcuccuggucgcccuggagaaccagcacacgaucgaccucaccgacuccgagaugaacaagcuguucgagcgcaccaagaagcagcugcgcgagaacgccgaggacaugggcaacgggugcuucaagaucuaccacaagugcgacaacgcgugcaucggcagcauccggaacgggaccuacgaccacgacguguaccgcgacgaggcccucaacaaccgguuccagaucaagggcguggagcugaaguccggcuacaaggacuggauccuguggaucagcuucgccaucuccugcuuccuccugugcgucgcccugcucggguucaucaugugggccugccagaagggcaacauccgcugcaacaucugcaucuga

SEQ ID NO: 65798 - RNA, 1701 nt, Artificial Sequence
  derived and/or modified CDS sequence (opt1) from hemagglutinin__InfluenzaA__ABU92617
augaagaccaucaucgcccugagcuacauccucugccugguguucgcccagaagcugcccggcaacgacaacuccaccgcgacgcucugccuggggcaccacagcgucccgaacggcaccaucgugaagaccaucaccaacgaccagaucgaggugacgaacgccaccgagcugguccaguccagcuccaccgggggcaucugcgacagcccccaccagauccucgacggggagaacugcacccugaucgacgcccugcucggcgacccccagugcgacggcuuccagaacaagaagugggaccuguucguggagcgcuccaaggccuacagcaacugcuaccccuacgacgugccggacuacgccucccugcggagccucaucgcguccagcgggacgcuggaguucaacaacgaguccuucaacuggaccggcgucacccagaacgggaccagcuccgccugcaagcgccggagcaacuccagcuucuucucccgccugaacuggcucacgcaccugaaguucaaguaccccgcccugaacgugaccaugcccaacaacgaggaguucgacaagcucuacaucuggggcgugcaccaccccgggaccgacaacgaccagaucagccuguacgcccaggcgagcggccggaucaccgucuccacgaagcgcagccagcagaccgugaucccgaacaucggcucccggccccgcgugcgggacauccccagccgcaucuccaucuacuggaccaucgucaagcccggggacauccugcucaucaacagcaccggcaaccugaucgccccgcggggguacuucaagauccgcuccggcaagagcuccaucaugcggagcgacgcccccaucggcaagugcaacuccgagugcaucacgcccaacgggagcauccccaacgacaagccguuccagaacgugaaccgcaucaccuacggcgccugcccccgguacgugaagcagaacacccugaagcucgccaccgggaugcgcaacguccccgagaagcagacgcggggcaucuucggggcgaucgccggcuucaucgagaacggcugggaggggaugguggacggcugguacggguuccgccaccagaacuccgagggcaucgggcaggccgccgaccucaagagcacccaggccgcgaucgaccagaucaacggcaagcugaaccggcugaucggcaagaccaacgagaaguuccaccagaucgagaaggaguucuccgagguggaggggcgcauccaggaccuggagaaguacgucgaggacaccaagaucgaccuguggagcuacaacgccgagcuccugguggcccuggagaaccagcacacgaucgaccucaccgacuccgagaugaacaagcuguucgagcggaccaagaagcagcugcgcgagaacgccgaggacaugggcaacgggugcuucaagaucuaccacaagugcgacaacgccugcaucggcagcauccgcaacgggaccuacgaccacgacguguaccgggacgaggcgcucaacaaccgcuuccagaucaagggcgucgagcugaaguccggcuacaaggacuggauccuguggaucagcuucgccaucagcugcuuccuccugugcguggcccugcucggguucaucaugugggccugccagaagggcaacauccggugcaacaucugcaucuga

SEQ ID NO: 65799 - RNA, 1701 nt, Artificial Sequence; identical to SEQ ID NO: 65282
  derived and/or modified CDS sequence (opt1) from hemagglutinin__InfluenzaA__ABU92619

SEQ ID NO: 65800 - RNA, 1701 nt, Artificial Sequence; identical to SEQ ID NO: 65781
  derived and/or modified CDS sequence (opt1) from hemagglutinin__InfluenzaA__ABU92620

SEQ ID NO: 65801 - RNA, 1701 nt, Artificial Sequence
  derived and/or modified CDS sequence (opt1) from hemagglutinin__InfluenzaA__ABU92622
augaagaccaucaucgcccugagcuacauccucugccugguguucgcccagaagcugcccggcaacgacaacuccaccgcgacgcucugccuggggcaccacgccgucccgaacggcaccaucgugaagaccaucaccaacgaccagaucgaggugacgaacgccaccgagcugguccagagcuccagcaccgggggcaucugcgacagcccccaccagauccucgacggggagaacugcacccugaucgacgcccugcucggcgacccccagugcgacggcuuccagaacaagaagugggaccuguucguggagcgcagcaaggccuacuccaacugcuaccccuacgacgugccggacuacgcgagccugcggucccucaucgccagcuccgggacgcuggaguucaacaacgagagcuucaacuggaccggcgucacccagaacgggaccuccagcgccugcaagcgccgguccaacagcuccuucuucagccgccugaacuggcucacgcaccugaaguucaaguaccccgcccugaacgugaccaugcccaacaacgaggaguucgacaagcucuacaucuggggcgugcaccaccccgggaccgacaacgaccagaucucccuguacgcgcaggccagcggccggaucaccgucagcacgaagcgcucccagcagaccgugaucccgaacaucggcagccggccccgcgugcgggacauccccucccgcaucagcaucuacuggaccaucgucaagcccggggacauccugcucaucaacuccaccggcaaccugaucgccccgcggggguacuucaagauccgcagcggcaaguccagcaucaugcgguccgacgcccccaucggcaagugcaacagcgagugcaucacgcccaacggguccauccccaacgacaagccguuccagaacgugaaccgcaucaccuacggcgccugcccccggagcgugaagcagaacacccugaagcucgcgaccgggaugcgcaacguccccgagaagcagacgcggggcaucuucggggccaucgccggcuucaucgagaacggcugggaggggaugguggacggcugguacggguuccgccaccagaacuccgagggcaucgggcaggccgccgaccugaaguccacccaggcggccaucgaccagaucaacggcaagcugaaccggcucaucggcaagaccaacgagaaguuccaccagaucgagaaggaguucuccgagguggaggggcgcauccaggaccuggagaaguacgucgaggacaccaagaucgaccuguggagcuacaacgccgagcuccugguggcccuggagaaccagcacacgaucgaccucaccgacuccgagaugaacaagcuguucgagcggaccaagaagcagcugcgcgagaacgccgaggacaugggcaacgggugcuucaagaucuaccacaagugcgacaacgcgugcaucggcagcauccgcaacgggaccuacgaccacgacguguaccgggacgaggcccucaacaaccgcuuccagaucaagggcgucgagcugaaguccggcuacaaggacuggauccuguggaucagcuucgccaucagcugcuuccuccugugcguggcccugcucggguucaucaugugggccugccagaagggcaacauccggugcaacaucugcaucuga

SEQ ID NO: 65802 - RNA, 1701 nt, Artificial Sequence; identical to SEQ ID NO: 64097
  derived and/or modified CDS sequence (opt1) from hemagglutinin__InfluenzaA__ABU92623

SEQ ID NO: 65803 - RNA, 1701 nt, Artificial Sequence
  derived and/or modified CDS sequence (opt1) from hemagglutinin__InfluenzaA__ABU92624
augaagaccaucaucgcccugagcuacauccucugccugguguucgcccagaagcugcccggcaacgacaacuccaccgcgacgcucugccuggggcaccacgccgucccgaacggcaccaucgugaagaccaucaccaacgaccagaucgaggugacgaacgccaccgagcugguccagaucagcuccaccggggagaucugcgacagcccccaccagauccucgacggcgagaacugcacccugaucgacgcccugcucggggacccccagugcgacggcuuccagaacaagaagugggaccuguucguggagcgcuccaaggccuacagcaacugcuaccccuacgacgugccggacuacgcgucccugcggagccucgucgccuccagcggcacgcuggaguucaacaacgaguccuucgacuggaccggggugacccagaacggcaccagcuccgccugcaagcgccggagcgacaaguccuucuucagccgccugaacuggcucacgcaccugaaguacaaguaccccgcccugaacgugaccaugcccaacaacgagaaguucgacaagcucuacaucuggggcguccaccaccccgggaccgacuccgaccagaucagccuguacgcgcaggcccuggggcggaucaccguguccacgaagcgcagccagcagaccgugaucccgaacaucggcagccggccccgcguccgggacguguccagccgcaucuccaucuacuggaccaucgugaagcccggcgacauccuccugaucaacagcaccgggaaccugaucgcgccccggggcuacuucaagauccgcuccggcaagagcuccaucaugcggagcgacgccccgaucgggaagugcaacuccgagugcaucacgcccaacggcagcauccccaacgacaagcccuuccagaacgucaaccgcaucaccuacggggccugcccgcgguacgugaagcagaacacccucaagcuggccaccggcaugcgcaacgugcccgagaagcagacgcgggggaucuucggcgccaucgccggguucaucgagaacggcugggagggcauggucgacgggugguacggcuuccgccaccagaacuccgaggggaccggccaggccgccgaccucaagagcacccaggcggccaucaaccagaucaacgggaagcugaaccggcugaucggcaagaccaacgagaaguuccaccagaucgagaaggaguucuccgagguggagggccgcauccaggaccuggagaaguacguggaggacacgaagaucgaccucuggagcuacaacgccgagcugcuggucgcccucgagaaccagcacaccaucgaccugaccgacuccgagaugaacaagcuguucgagcggaccaagaagcagcuccgcgagaacgccgaggacauggggaacggcugcuucaagaucuaccacaagugcgacaacgcgugcaucgggagcauccgcaacggcacguacgaccacgacguguaccgggacgaggcccugaacaaccgcuuccagaucaaggggguggagcugaaguccggcuacaaggacuggauccucuggaucagcuucgccaucuccugcuuccugcugugcgucgcccuccugggcuucaucaugugggccugccagaaggggaacauccggugcaacaucugcaucuga

SEQ ID NO: 65804 - RNA, 1701 nt, Artificial Sequence; identical to SEQ ID NO: 65786
  derived and/or modified CDS sequence (opt1) from hemagglutinin__InfluenzaA__ABU92625

SEQ ID NO: 65805 - RNA, 1701 nt, Artificial Sequence; identical to SEQ ID NO: 64097
  derived and/or modified CDS sequence (opt1) from hemagglutinin__InfluenzaA__ABU92626

SEQ ID NO: 65806 - RNA, 1701 nt, Artificial Sequence
  derived and/or modified CDS sequence (opt1) from hemagglutinin__InfluenzaA__ABU92627
augaagaccaucaucgcccugagcuacauccucugcaugguguucgcccagaagcugcccggcaacgacaacuccaccgcgacgcugugccucgggcaccacgccgucccgaacggcaccaucgugaagaccaucaccaacgaccagaucgaggugacgaacgccaccgagcugguccagaucagcuccaccggggagaucugcgacagcccccaccagauccuggacggcgagaacugcacccucaucgacgcccugcugggggacccccagugcgacggcuuccagaacaagaagugggaccucuucguggagcgcuccaaggccuacagcaacugcuaccccuacgacgugccggacuacgcgucccugcggagccuggucgccuccagcggcacgcucgaguucaacaacgaguccuucgacuggaccggggugacccagaacggcaccagcuccgccugcaagcgccggagcgacaaguccuucuucagccgccugaacuggcugacgcaccucaaguacaaguaccccgcccugaacgugaccaugcccaacaacgagaaguucgacaagcuguacaucuggggcguccaccaccccgggaccgacuccgaccagaucagccucuacgcgcaggccuccgggcggaucaccgugagcacgaagcgcagccagcagaccgugaucccgaacaucggcucccggccccgcguccgggacgugagcucccgcaucagcaucuacuggaccaucgugaagcccggcgacauccugcugaucaaccggcccgggaaccucaucgccccgcgcggcuacuucaagauccgguccggcaagagcuccaucaugcgcagcgacgcccccaucgggaagugcaacuccgagugcaucacccccaacggcagcauccccaacgacaagccguuccagaacgucaaccggaucacguacggggccugcccccgcuacgugaagcagaacacccugaagcuggcgaccggcaugcggaacgugcccgagaagcagacccgcgggaucuucggcgccaucgccggguucaucgagaacggcugggagggcauggucgacgggugguacggcuuccggcaccagaacuccgaggggacgggccaggccgccgaccucaagagcacccaggcggccaucaaccagaucaacgggaagcugaaccgccugaucggcaagaccaacgagaaguuccaccagaucgagaaggaguucuccgagguggagggccggauccaggaccucgagaaguacguggaggacaccaagaucgaccuguggagcuacaacgccgagcugcucgucgcccuggagaaccagcacacgaucgaccugaccgacuccgagaugaacaagcuguucgagcgcaccaagaagcagcuccgcgagaacgccgaggacauggggaacggcugcuucaagaucuaccacaagugcgacaacgcgugcaucgggagcauccggaacggcaccuacgaccacgacguguaccgcgacgaggcccugaacaaccgguuccagaucaaggggguggagcucaaguccggcuacaaggacuggauccuguggaucagcuucgccaucuccugcuuccugcucugcgucgcccugcugggcuucaucaugugggccugccagaaggggaacauccgcugcaacaucugcaucuga

SEQ ID NO: 65807 - RNA, 1701 nt, Artificial Sequence; identical to SEQ ID NO: 65786
  derived and/or modified CDS sequence (opt1) from hemagglutinin__InfluenzaA__ABU92628

SEQ ID NO: 65808 - RNA, 1701 nt, Artificial Sequence; identical to SEQ ID NO: 65786
  derived and/or modified CDS sequence (opt1) from hemagglutinin__InfluenzaA__ABU92631

SEQ ID NO: 65809 - RNA, 1701 nt, Artificial Sequence
  derived and/or modified CDS sequence (opt1) from hemagglutinin__InfluenzaA__ABU92632
augaagaccaucaucgcccugagcuacauccucugccugguguucgcccagaagcugcccggcaacgacaacuccaccgcgacgcucugccuggggcaccacgccgucccgaacggcaccaucgugaagaccaucaccaacgaccagaucgaggugacgaacgccaccgagcugguccagagcuccagcaccgggggcaucugcgacagcccccaccagauccucgacggggagaacugcacccugaucgacgcccugcucggcgacccccagugcgacggcuuccagaacaagaagugggaccuguucguggagcgcagcaaggccuacuccaacugcuaccccuacgacgugccggacuacgcgagccugcggucccucaucgccagcuccgggacgcuggaguucaacaacgagagcuucaacuggaccggcgucacccagaacgggaccuccagcgccugcaagcgccgguccaacaagagcuucuucucccgccugaacuggcucacgcaccugaaguacaaguaccccgcccugaacgugaccaugcccaacaacgagaaguucgacaagcucuacaucuggggcgugcaccaccccgggaccgacagcgaccagaucucccuguacgcgcaggccagcggccggaucaccgucagcacgaagcgcucccagcagaccgugaucccgaacaucggcagccggccccgcgugcgggacgucuccagccgcaucuccaucuacuggaccaucgugaagcccggggacauccugcucaucaacagcaccggcaaccugaucgcgccccggggguacuucaagauccgcuccggcaagagcuccaucaugcggagcgacgccccgaucggcaagugcaacuccgagugcaucacgcccaacgggagcauccccaacgacaagcccuuccagaacgugaaccgcaucaccuacggcgccugcccgcgguacgucaagcagaacacccugaagcucgccaccgggaugcgcaacgugcccgagaagcagacgcggggcaucuucggggccaucgccggcuucaucgagaacggcugggaggggaugguggacggcugguacggguuccgccaccugaacuccgagggcaccgggcaggccgccgaccugaaguccacccaggcggccaucaaccagaucaacggcaagcucaaccggcugaucggcaagaccaacgagaaguuccaccagaucgagaaggaguucuccgaggucgaggggcgcauccaggaccuggagaaguacguggaggacacgaagaucgaccucuggagcuacaacgccgagcugcugguggcccucgagaaccagcacaccaucgaccugaccgacuccgagaugaacaagcuguucgagcggaccaagaagcagcuccgcgagaacgccgaggacaugggcaacgggugcuucaagaucuaccacaagugcgacaacgcgugcaucggcagcauccgcaacgggacguacgaccacgacgucuaccgggacgaggcccugaacaaccgcuuccagaucaagggcguggagcugaaguccggcuacaaggacuggauccucuggaucagcuucgccaucagcugcuuccugcugugcguggcccuccugggguucaucaugugggccugccagaagggcaacauccggugcaacaucugcaucuga

SEQ ID NO: 65810 - RNA, 1701 nt, Artificial Sequence
  derived and/or modified CDS sequence (opt1) from hemagglutinin__InfluenzaA__ABU92635
augaagaccaucaucgcccugagcuacauccucugccugguguucgcccagaagcugcccggcaacgacaacuccaccgcgacgcucugccuggggcaccacgccgucccgaacggcaccaucgugaagaccaucaccaacgaccagaucgaggugacgaacgccaccgagcugguccagagcuccagcaccgggggcaucugcgacagcccccaccagauccucgacggggagaacugcacccugaucgacgcccugcucggcgacccccagugcgacggcuuccagaacaagaagugggaccuguucguggagcgcuccaaggccuacuccaacugcuaccccuacgacgugccggacuacgcgagccugcgguccaucgucgccagcuccgggacgcucgaguucaacaacgagagcuucaacuggaccggcgugacccagaacgggaccuccagcgccugcaagcgcaaguccaacaagagcuucuucucccggcugaacuggcugacgcaccucaaguacaaguaccccgcccugaacgugaccaugcccaacaacgagaaguucgacaagcuguacaucuggggcguccaccaccccgggaccgacaacgaccagaucagccucuacgcgcaggccuccggccgcaucaccgugagcacgaagcggagccagcagaccgugaucccgaacaucggcucccgcccccggguccgcgacgugagcucccggaucagcaucuacuggaccaucgugaagcccggggacauccugcugaucaacuccaccggcaaccucaucgcgccccgcggguacuucaagauccggagcggcaaguccagcaucaugcgcuccgacgccccgaucggcaagugcaacagcgagugcaucacgcccaacggguccauccccaacgacaagcccuuccagaacgucaaccggaucaccuacggcgccugcccgcgcuacgugaagcagaacacccugaagcuggccaccgggaugcggaacgugcccgagaagcagacgcgcggcaucuucggggccaucgccggcuucaucgagaacggcugggaggggauggucgacggcugguacggguuccggcaccagaacagcgagggcaccgggcaggccgccgaccucaaguccacccaggcggccaucaaccagaucaacggcaagcugaaccgccugaucggcaagaccaacgagaaguuccaccagaucgagaaggaguucagcgagguggaggggcggauccaggaccucgagaaguacguggaggacacgaagaucgaccugugguccuacaacgccgagcugcucgucgcccuggagaaccagcacaccaucgaccugaccgacagcgagaugaacaagcuguucgagcgcaccaagaagcagcuccgggagaacgccgaggacaugggcaacgggugcuucaagaucuaccacaagugcgacaacgcgugcaucggcuccauccgcaacgggacguacgaccacgacguguaccgcgacgaggcccugaacaaccgguuccagaucaagggcguggagcucaagagcggcuacaaggacuggauccuguggaucuccuucgccaucagcugcuuccugcucugcgucgcccugcugggguucaucaugugggccugccagaagggcaacauccgcugcaacaucugcaucuga

SEQ ID NO: 65811 - RNA, 1701 nt, Artificial Sequence; identical to SEQ ID NO: 64654
  derived and/or modified CDS sequence (opt1) from hemagglutinin__InfluenzaA__ABU92636

SEQ ID NO: 65812 - RNA, 1701 nt, Artificial Sequence
  derived and/or modified CDS sequence (opt1) from hemagglutinin__InfluenzaA__ABU92637
augaagaccaucaucgcccugagcuacauccucugccugguguucgcccagaagcugcccggcaacgacaacuccaccgcgacgcucugccuggggcaccacgccgucccgaacggcaccaccgugaagaccaucacgaacgaccagaucgaggugaccaacgccaccgagcugguccagagcuccagcaccgggggcaucugcgacagcccccaccagauccucgacggggagaacugcacgcugaucgacgcccugcucggcgacccccagugcgacggcuuccagaacaagaagugggaccuguucguggagcgcagcaaggccuacuccaacugcuaccccuacgacgugccggacuacgucagccugcggucccucguggcgagcuccgggacccuggaguucaacaacgagagcuucaacuggaccggcgugacccagaacgggacguccagcgccugcaagcgccgguccaacaacagcuucuucucccgccugaacuggcucacccaccugaaguucaaguaccccgcccugaacgucaccaugcccaacaacgagaaguucgacaagcucuacaucuggggcgugcaccaccccgggaccgacaacgaccagaucagccuguacgcccaggcguccggccggaucacggugagcaccaagcgcagccagcagaccgucaucccgaacaucggcucccggccccgcgugcgggacauccccagccgcaucuccaucuacuggaccaucgugaagcccggggacauccugcucaucaacagcacgggcaaccugaucgccccgcggggguacuucaagauccgcuccggcaagagcuccaucaugcggagcgacgcccccaucggcaagugcaacuccgagugcaucacccccaacgggagcauccccaacgacaagccguuccagaacgucaaccgcaucaccuacggcgccugcccccgguacgugaagcagaacacccugaagcucgccacggggaugcgcaacgugcccgagaagcagacccggggcaucuucggggcgaucgccggcuucaucgagaacggcugggaggggauggucgacggcugguacggguuccgccaccagaacuccgagggcaucgggcaggccgccgaccugaaguccacccaggccgcgaucaaccagaucaacggcaagcugaaccggcucaucggcaagaccaacgagaaguuccaccagaucgagaaggaguucuccgagguggaggggcgcauccaggaccuggagaaguacguggaggacacgaagaucgaccuguggagcuacaacgccgagcuccuggucgcccuggagaaccagcacaccaucgaccucaccgacuccgagaugaacaagcuguucgagcggaccaagaagcagcugcgcgagaacgccgaggacaugggcaacgggugcuucaagaucuaccacaagugcgacaacgccugcaucggcagcauccgcaacgggacguacgaccacgacguguaccgggacgaggcgcucaacaaccgcuuccagaucaagggcguggagcugaaguccggcuacaaggacuggauccuguggaucagcuucgccaucuccugcuuccuccugugcgucgcccugcucggguucaucaugugggccugccagaagggcaacauccggugcaacaucugcaucuga

SEQ ID NO: 65813 - RNA, 1701 nt, Artificial Sequence
  derived and/or modified CDS sequence (opt1) from hemagglutinin__InfluenzaA__ABU92639
augaagaccaucaucgcccugagcuacauccucugccugguguucgcccagaagcugcccggcaacgacaacuccaccgcgacgcucugccuggggcaccacgccgucccgaacggcaccaucgugaagaccaucaccaacgaccagaucgaggugacgaacgccaccgagcugguccagaucagcuccaccggggagaucugcgacagcccccaccagauccucgacggcgagaacugcacccugaucgacgcccugcucggggacccccagugcgacggcuuccagaacacgaagugggaccuguucguggagcgcuccaaggccuacagcaacugcuaccccuacgacgugccggacuacgcgucccugcggagccucgucgccuccagcggcacccuggaguucaacaacgaguccuucgacuggaccggggugacccagaacggcacgagcuccgccugcaagcgccggagcgacaaguccuucuucagccgccugaacuggcucacccaccugaaguacaaguaccccgcccugaacgugaccaugcccaacaacgagaaguucgacaagcucuacaucuggggcguccaccaccccgggaccgacuccgaccagaucagccuguacgcgcaggccuccgggcggaucacggugagcaccaagcgcagccagcagaccgugaucccgaacaucggcucccggccccgcguccgggacgugagcucccgcaucagcaucuacuggaccaucgugaagcccggcgacauccugcucaucaacuccacggggaaccugaucgcgccccggggcuacuucaagauccgcagcgggaaguccagcaucaugcgguccgacgccccgaucggcaagugcaacagcgagugcaucacccccaacggcuccauccccaacgacaagcccuuccagaacgucaaccgcaucaccuacggggccugcccgcgguacgugaagcagaacacccugaagcucgccacgggcaugcgcaacgugcccgagaagcagacccgggggaucuucggcgccaucgccggguucaucgagaacggcugggagggcauggucgacgggugguacggcuuccgccaccagaacagcgaggggaccggccaggccgccgaccugaaguccacccaggcggccaucaaccagaucaacgggaagcugaaccggcucaucggcaagacgaacgagaaguuccaccagaucgagaaggaguucagcgagguggagggccgcauccaggaccuggagaaguacaucgaggacaccaagaucgaccugugguccuacaacgccgagcuccugguggcccuggagaaccagcacaccaucgaccucaccgacagcgagaugaacaagcuguucgagcggacgaagaagcagcugcgcgagaacgccgaggacauggggaacggcugcuucaagaucuaccacaagugcgacaacgcgugcaucggguccauccgcaacggcaccuacgaccacgacgucuaccgggacgaggcccucaacaaccgcuuccagaucaaggggguggagcucaagagcggcuacaaggacuggauccuguggaucuccuucgccaucagcugcuuccugcugugcguggcccugcucggcuucaucaugugggccugccagaaggggaacauccggugcaacaucugcaucuga

SEQ ID NO: 65814 - RNA, 1701 nt, Artificial Sequence
  derived and/or modified CDS sequence (opt1) from hemagglutinin__InfluenzaA__ABU92640
augaagaccaucaucgcccugagcuacauccucugccugguguucgcccagaagcugcccggcaacgacaacuccaccgcgacgcucugccuggggcaccacgccgucccgaacggcaccaucgugaagaccaucaccaacgaccagaucgaggugacgaacgccaccgagcugguccagagcuccagcaccggggagaucugcgacagcccccaccagauccucgacggcgagaacugcacccugaucgacgcccugcucggggacccccagugcgacggcuuccagaacaagaagugggaccuguucguggagcgcagcaaggccuacuccaacugcuaccccuacgacgugccggacuacgcgagccugcggucccucgucgccagcuccggcacgcuggaguucaacaacgagagcuucaacuggaccggggugacccagaacggcaccuccagcgccugcaagcgccgguccaacaacagcuucuucucccgccugaacuggcucacgcaccugaaguucaaguaccccgcccugaacgugaccaugcccaacaacgagaaguucgacaagcucuacaucuggggcguccaccaccccgggaccgacaacgaccagaucuuccuguacgcgcaggccagcgggcggaucaccguguccacgaagcgcagccagcagaccgugaucccgaacaucggcagccggccccgcguccggaacauccccucccgcaucagcaucuacuggaccaucgugaagcccggcgacauccugcucaucaacuccaccgggaaccugaucgccccgcggggcuacuucaagauccgcagcgggaaguccagcaucaugcgguccgacgcccccaucggcaagugcaacagcgagugcaucacgcccaacggcuccauccccaacgacaagccguuccagaacgugaaccgcaucaccuacggggccugcccccgguacgucaagcagaacacccugaagcucgcgaccggcaugcgcaacgugcccgagaagcagacgcgggggaucuucggcgccaucgccggguucaucgagaacggcugggagggcaugguggacgggugguacggcuuccgccaccagaacagcgaggggaucggccaggccgccgaccugaaguccacccaggcggccaucaaccagaucaacgggaagcugaaccggcucaucggcaagaccaacgagaaguuccaccagaucgagaaggaguucagcgaggucgagggccgcauccaggaccuggagaaguacguggaggacaccaagaucgaccugugguccuacaacgccgagcuccugguggcccuggagaaccagcacacgaucgaccucaccgacagcgagaugaacaagcuguucgagcggaccaagaagcagcugcgcgagaacgccgaggacauggggaacggcugcuucaagaucuaccacaagugcgacaacgcgugcaucggguccauccgcaacggcaccuacgaccacgacgucuaccgggacgaggcccucaacaaccgcuuccagaucaaggggguggagcugaaguccggcuacaaggacuggauccuguggaucuccuucgccaucagcugcuuccuccugugcgccgcccugcucggcuucaucaugugggcgugccagaaggggaacauccggugcaacaucugcaucuga

SEQ ID NO: 65815 - RNA, 1701 nt, Artificial Sequence
  derived and/or modified CDS sequence (opt1) from hemagglutinin__InfluenzaA__ABU92641
augaagaccaucaucgcccugagcuacauccucugccugguguucgcccagaagcugcccggcaacgacaacuccaccgcgacgcucugccuggggcaccacgccgucccgaacggcaccaucgugaagaccaucaccaacgaccagaucgaggugacgaacgccaccgagcugguccagagcuccagcaccgggggcaucugcgacagcccccaccagauccucgacggggagaacugcacccugaucgacgcccugcucggcgacccccagugcgacggcuuccagaacaagaagugggaccuguucguggagcgcagcaaggccuacuccaacugcuaccccuacgacgugccggacuacgcgagccugcggucccucgucgccagcuccgggacgcuggaguucaacaacgagagcuucaacuggaccggcgugacccagaacgggaccuccagcgccugcaagcgcaaguccaacaacagcuucuucucccggcugaacuggcucacgcaccugaaguucaaguaccccgcccugaacgugaccaugcccaacaacgagaaguucgacaagcucuacaucuggggcguccaccaccccgggaccgacaacgaccagaucagccuguacgcgcaggccuccggccgcaucaccgugagcacgaagcggagccagcagaccgugaucccgaacaucggcucccgcccccggguccgcgacauccccagccggaucuccaucuacuggaccaucgugaagcccggggacauccugcucaucaacagcaccggcaaccugaucgccccgcgcggguacuucaagauccgguccggcaagagcuccaucaugcgcagcgacgcccccaucggcaagugcaacuccgagugcaucacgcccaacgggagcauccccaacgacaagccguuccagaacgugaaccggaucaccuacggcgccugcccccgcuacgucaagcagaacacccugaagcucgcgaccgggaugcggaacgugcccgagaagcagacgcgcggcaucuucggggccaucgccggcuucaucgagaacggcugggaggggaugguggacggcugguacggguuccggcaccagaacuccgagggcaucgggcaggccgccgaccugaaguccacccaggcggccaucaaccagaucaacggcaagcugaaccgccucaucggcaagaccaacgagaaguuccaccagaucgagaaggaguucuccgaggucgaggggcggauccaggaccuggagaaguacguggaggacaccaagaucgaccuguggagcuacaacgccgagcuccugguggcccuggagaaccagcacacgaucgaccucaccgacuccgagaugaacaagcuguucgagcgcaccaagaagcagcugcgggagaacgccgaggacaugggcaacgggugcuucaagaucuaccacaagugcgacaacgcgugcaucggcagcauccgcaacgggaccuacgaccacgacgucuaccgcgacgaggcccucaacaaccgguuccagaucaagggcguggagcugaaguccggcuacaaggacuggauccuguggaucagcuucgccaucuccugcuuccuccugugcguggcccugcucggguucaucaugugggccugccagaagggcaacauccgcugcaacaucugcaucuga

SEQ ID NO: 65816 - RNA, 1701 nt, Artificial Sequence
  derived and/or modified CDS sequence (opt1) from hemagglutinin__InfluenzaA__ABU92642
augaagaccaucaucgcccugagcuacauccucugccugguguucgcccagaagcugcccggcaacgacaacuccaccgcgacgcucugccuggggcaccacgccgucccgaacggcaccaucgugaagaccaucaccaacgaccagaucgaggugacgaacgccaccgagcugguccagagcuccagcaccgggggcaucugcgacagcccccaccagauccucgacggggagaacugcacccugaucgacgcccugcucggcgacccccagugcgacggcuuccagaacaagaagugggaccuguucguggagcgcagcaaggccuacuccaacugcuaccccuacgacgugccggacuacgcgagccugcggucccucgucgccagcuccgggacgcuggaguucaacaacgagagcuucaacuggaccggcgugacccagaacgggaccuccagcgccugcaagcgccgguccaacaacagcuucuucucccgccugaacuggcucacgcaccugaaguucaaguaccccgcccugaacgugaccaugcccaacaacgagaaguucgacaagcucuacaucuggggcguccaccaccccgggaccgacaacgaccagaucuuccuguacgcgcaggccagcggccggaucaucguguccaccaagcgcagccagcagacggugaucccgaacaucggcagccggccccgcguccggaacauccccucccgcaucagcaucuacuggaccaucgugaagcccggggacauccugcucaucaacuccaccggcaaccugaucgccccgcggggguacuucaagauccgcagcggcaaguccagcaucaugcgguccgacgcccccaucggcaagugcaacagcgagugcaucacccccaacggguccauccccaacgacaagccguuccagaacgugaaccgcaucacguacggcgccugcccccgguacgucaagcagaacacccugaagcucgcgaccgggaugcgcaacgugcccgagaagcagacccggggcaucuucggggccaucgccggcuucaucgagaacggcugggaggggaugguggacggcugguacggguuccgccaccagaacagcgagggcaucgggcaggccgccgaccugaaguccacgcaggcggccaucgaccagaucaacggcaagcugaaccggcucaucggcaagaccaacgagaaguuccaccagaucgagaaggaguucagcgaggucgaggggcgcauccaggaccuggagaaguacguggaggacaccaagaucgaccugugguccuacaacgccgagcuccugguggcccuggagaaccagcacaccaucgaccucacggacagcgagaugaacaagcuguucgagaagaccaagaagcagcugcgggagaacgccgaggacaugggcaacgggugcuucaagaucuaccacaagugcgacaacgcgugcaucggcuccauccgcaacgggaccuacgaccacgacgucuaccgcgacgaggcccucaacaaccgguuccagaucaagggcguggagcugaaguccggcuacaaggacuggauccuguggaucuccuucgccaucagcugcuuccuccugugcguggcccugcucggguucaucaugugggccugccagaagggcaacauccgcugcaacaucugcaucuga

SEQ ID NO: 65817 - RNA, 1701 nt, Artificial Sequence
  derived and/or modified CDS sequence (opt1) from hemagglutinin__InfluenzaA__ABU92643
augaagaccaucaucgcccugagcuacauccucugccugguguucgcccagaagcugcccggcaacgacaacuccaccgcgacgcucugccuggggcaccacgccgucccgaacggcaccaucgugaagaccaucaccaacgaccagaucgaggugacgaacgccaccgagcugguccagaucagcuccaccggggagaucugcgacagcccccaccagauccucgacggcgagaacugcacccugaucgacgcccugcucggggacccccagugcgacggcuuccagaacaagaagugggaccuguucguggagcgcuccaaggccuacagcaacugcuaccccuacgacgugccggacuacgcgucccugcggagccucgucgccuccagcggcacgcuggaguucaacaacgaguccuucgacuggaccggggugacccagaacggcaccagcuccgccugcaagcgccggagcgacaaguccuucuucagccgccugaacuggcucacgcaccugaaguacaaguaccccgcccugaacgugaccaugcccaacaacgagaaguucgacaagcucuacaucuggggcguccaccaccccgggaccgacuccgaccagaucagccuguacgcgcaggccuccgggcggaucaccgugagcacgaagcgcagccagcagaccgugaucccgaacaucggcucccggccccgcguccgggacgugagcucccgcaucagcaucuacuggaccaucgugaagcccggcgacauccugcucaucaacuccaccgggaaccugaucgcgccccggggcuacuucaagauccgcagcgggaaguccagcaucaugcgguccgacgccccgaucggcaagugcaacagcgagugcaucacgcccaacggcuccauccccaacgacaagcccuuccagaacgucaaccgcaucaccuacggggccugcccgcgguacgugaagcagaacacccugaagcucgccaccggcaugcgcaacgugcccgagaagcagacgcgggggaucuucggcgccaucgccggguucaucgagaacggcugggagggcauggucgacgggugguacggcuuccgccaccagaacagcgaggggaccggccaggccgccgaccugaaguccacccaggcggccaucaaccagaucaacgggaagcugaaccggcucaucggcaagaccaacgagaaguuccaccagaucgagaaggaguucagcgagguggagggccgcauccaggaccuggagaaguacguggaggacacgaagaucgaccugugguccuacaacgccgagcuccuggucgcccuggagaaccagcacaccaucgaccucaccgacagcgagaugaacaagcuguucgagcggaccaagaagcagcugcgcgagaacgccgaggacauggggaacggcugcuucaagaucuaccacaagugcgacaacgcgugcaucggguccauccgcaacggcacguacgaccacaacguguaccgggacgaggcccucaacaaccgcuuccagaucaaggggguggagcucaagagcggcuacaaggacuggauccuguggaucuccuucgccaucagcugcuuccugcugugcgucgcccugcucggcuucaucaugugggccugccagaaggggaacauccggugcaacaucugcaucuga

SEQ ID NO: 65818 - RNA, 1701 nt, Artificial Sequence
  derived and/or modified CDS sequence (opt1) from hemagglutinin__InfluenzaA__ABU92645
augaagaccaucaucgcccugagcuacauccucugccugguguucgcccagaagcugcccggcaacgacaacuccaccgcgacgcucugccuggggcaccacgccgucccgaacggcaccaucgugaagaccaucaccaacgaccagaucgaggugacgaacgccaccgagcugguccagagcuccagcaccggggagaucugcgacagcccccaccagauccucgacggcgagaacugcacccugaucgacgcccugcucggggacccccagugcgacggcuuccagaacaagaagugggaccuguucguggagcgcagcaaggccuacuccaacugcuaccccuacgacgugccggacuacgcgagccugcggucccucgucgccagcuccggcacgcuggaguucaacaacgagagcuucaacuggaccggggugacccagaacggcaccuccagcgccugcaagcgccgguccaacaacagcuucuucucccgccugaacuggcucacgcaccugaaguucaaguaccccgcccugaacgugaccaugcccaacaacgagaaguucgacaagcucuacaucuggggcguccaccaccccgggaccgacaacgaccagaucuuccuguacgcgcaggccagcgggcggaucaccguguccacgaagcgcagccagcagaccgugaucccgaacaucggcagccggccccgcguccggaacauccccucccgcaucagcaucuacuggaccaucgugaagcccggcgacauccugcucaucaacuccaccgggaaccugaucgccccgcggggcuacuucaagauccgcagcgggaaguccagcaucaugcgguccgacgcccccaucggcaagugcaacagcgagugcaucacgcccaacggcuccauccccaacgacaagccguuccagaacgugaaccgcaucgccuacggggcgugcccccgguacgucaagcagaacacccugaagcucgccaccggcaugcgcaacgugcccgagaagcagacccgggggaucuucggcgccaucgccggguucaucgagaacggcugggagggcaugguggacgggugguacggcuuccgccaccagaacagcgaggggaucggccaggccgcggaccugaaguccacgcaggccgccaucaaccagaucaacgggaagcugaaccggcucaucggcaagaccaacgagaaguuccaccagaucgagaaggaguucagcgaggucgagggccgcauccaggaccuggagaaguacguggaggacaccaagaucgaccugugguccuacaacgccgagcuccugguggcccuggagaaccagcacaccaucgaccucacggacagcgagaugaacaagcuguucgagcggaccaagaagcagcugcgcgagaacgcggaggacauggggaacggcugcuucaagaucuaccacaagugcgacaacgccugcaucggguccauccgcaacggcaccuacgaccacgacgucuaccgggacgaggcccucaacaaccgcuuccagaucaaggggaucgagcugaaguccggcuacaaggacuggauccuguggaucuccuucgccaucagcugcuuccuccugugcguggugcugcucggcuucaucaugugggccugccagaaggggaacauccggugcaacaucugcaucuga

SEQ ID NO: 65819 - RNA, 1701 nt, Artificial Sequence
  derived and/or modified CDS sequence (opt1) from hemagglutinin__InfluenzaA__ABU92646
augaagaccaucaucgcccugagcuacauccucugccugguguucgcccagaagcugcccggcaacgacaacuccaccgcgacgcucugccuggggcaccacgccgucccgaacggcaccaucgugaagaccaucaccaacgaccagaucgaggugacgaacgccaccgagcugguccagagcuccagcaccgggggcaucugcgacagcccccaccagauccucgacggggagaacugcacccugaucgacgcccugcucggcgacccccagugcgacggcuuccagaacaagaagugggaccuguucguggagcgcagcaaggccuacuccaacugcuaccccuacgacgugccggacuacgcgagccugcggucccucgucgccagcuccgggacgcuggaguucaacaacgagagcuucaacuggaccggcgugacccagaacgggaccuccagcgccugcaagcgccgguccaacaagagcuucuucucccgccugaacuggcucacgcaccugaaguucaaguaccccgcccugaacgugaccaugcccaacaacgagaaguucgacaagcucuacaucuggggcguccaccaccccgggaccgacaacgaccagaucagccuguacgcgcaggccuccggccggaucaccgugagcacgaagcgcagccagcagaccgugaucccgaacaucggcucccggccccgcguccgggacgugcccagccgcaucuccaucuacuggaccaucgugaagcccggggacauccugcucaucaacagcaccggcaaccugaucgccccgcggggguacuucaagauccgcuccggcaagagcuccaucaugcggagcgacgcccccaucggcaagugcaacuccgagugcaucacgcccaacgggagcauccccaacgacaagccguuccagaacgucaaccgcaucaccuacggcgccugcccccgguacgugaagcagaacacccugaagcucgcgaccgggaugcgcaacgugcccgagaagcagacgcggggcaucuucggggccaucgccggcuucaucgagaacggcugggaggggauggucgacggcugguacggguuccgccaccagaacuccgagggcaccgggcaggccgccgaccugaaguccacccaggcggccaucaaccagaucaacggcaagcugaaccggcucaucggcaagaccaacgagaaguuccaccagaucgagaaggaguucuccgagguggaggggcgcauccaggaccuggagaaguacguggaggacacgaagaucgaccuguggagcuacaacgccgagcuccuggucgcccuggagaaccagcacaccaucgaccucaccgacuccgagaugaacaagcuguucgagcggaccaagaagcagcugcgcgagaacgccgaggacaugggcaacgggugcuucaagaucuaccacaagugcgacaacgcgugcaucggcagcauccgcaacgggacguacgaccacgacguguaccgggacgaggcccucaacaaccgcuuccagaucaagggcguggagcugaaguccggcuacaaggacuggauccuguggaucagcuucgccaucuccugcuuccuccugugcgucgcccugcucggguucaucaugugggccugccagaagggcaacauccggugcaacaucugcaucuga

SEQ ID NO: 65820 - RNA, 1701 nt, Artificial Sequence; identical to SEQ ID NO: 64097
  derived and/or modified CDS sequence (opt1) from hemagglutinin__InfluenzaA__ABU92647

SEQ ID NO: 65821 - RNA, 1701 nt, Artificial Sequence
  derived and/or modified CDS sequence (opt1) from hemagglutinin__InfluenzaA__ABU92648
augaagaccaucaucgcccugagcuacauccucugccugguguucgcccagaagcugcccggcaacgacaacuccaccgcgacgcucugccuggggcaccacgccgucccgaacggcaccaucgugaagaccaucaccaacgaccagaucgaggugacgaacgccaccgagcugguccagaucagcuccaccggggagaucugcgacagcccccaccagauccucgacggcgagaacugcacccugaucgacgcccugcucggggacccccagugcgacggcuuccagaacaagaagugggaccuguucguggagcgcuccaaggccuacagcaacugcuaccccuacgacgugccggacuacgcgucccugcggagccucgucgccuccagcggcacgcuggaguucaacaacgaguccuucaacuggaccggggugacccagaacggcaccagcuccgccugcaagcgccggagcgacaaguccuucuucagccgccugaacuggcucacgcaccugaaguacaaguaccccgcccugaacgugaccaugcccaacaacgagaaguucgacaagcucuacaucuggggcguccaccaccccgggaccgacuccgaccagaucagccuguacgcgcaggccuccgggcggaucaccgugagcacgaagcgcagccagcagaccgugaucccgaacaucggcucccggccccgcguccgggacgugagcucccgcaucagcaucuacuggaccaucgugaagcccggcgacauccugcucaucaacuccaccgggaaccugaucgcgccccggggcuacuucaagauccgcagcgggaaguccagcaucaugcgguccgacgccccgaucggcaagugcaacagcgagugcaucacgcccaacggcuccauccccaacgacaagcccuuccagaacgucaaccgcaucaccuacggggccugcccgcgguacgugaagcagaacacccugaagcucgccaccggcaugcgcaacgugcccgagaagcagacgcgggggaucuucggcgccaucgccggguucaucgagaacggcugggagggcauggucgacgggugguacggcuuccgccaccagaacagcgaggggaccggccaggccgccgaccugaaguccacccaggcggccaucaaccagaucaacgggaagcugaaccggcucaucggcaagaccaacgagaaguuccaccagaucgagaaggaguucagcgagguggagggccgcauccaggaccuggagaaguacguggaggacacgaagaucgaccugugguccuacaacgccgagcuccuggucgcccuggagaaccagcacaccaucgaccucaccgacagcgagaugaacaagcuguucgagcggaccaagaagcagcugcgcgagaacgccgaggacauggggaacggcugcuucaagaucuaccacaagugcgacaacgcgugcaucggguccauccgcaacggcacguacgaccacgacguguaccgggacgaggcccucaacaaccgcuuccagaucaaggggguggagcucaagagcggcuacaaggacuggauccuguggaucuccuucgccaucagcugcuuccugcugugcgucgcccugcucggcuucaucaugugggccugccagaaggggaacauccggugcaacaucugcaucuga

SEQ ID NO: 65822 - RNA, 1701 nt, Artificial Sequence; identical to SEQ ID NO: 64097
  derived and/or modified CDS sequence (opt1) from hemagglutinin__InfluenzaA__ABU92649

SEQ ID NO: 65823 - RNA, 1701 nt, Artificial Sequence; identical to SEQ ID NO: 65786
  derived and/or modified CDS sequence (opt1) from hemagglutinin__InfluenzaA__ABU92650

SEQ ID NO: 65824 - RNA, 1701 nt, Artificial Sequence
  derived and/or modified CDS sequence (opt1) from hemagglutinin__InfluenzaA__ABU92651
augaagaccaucaucgcccugagcuacauccucugccugguguucgcccagaagcugcccggcaacgacaacuccaccgcgacgcucugccuggggcaccacgccgucccgaacggcaccaucgugaagaccaucaccaacgaccagaucgaggugacgaacgccaccgagcugguccagaucagcuccaccggggagaucugcgacagcccccaccagauccucgacggcgagaacugcacccugaucgacgcccugcucggggacccccagugcgacggcuuccagaacaagaagugggaccuguucguggagcgcuccaaggccuacagcaacugcuaccccuacgacgugccggacuacgcgucccugcggagccucgucgccuccagcggcacgcuggaguucuacaacgaguccuucgacuggaccggggugacccagaacggcaccagcuccgccugcaagcgccggagcgacaaguccuucuucagccgccugaacuggcucacgcaccugaaguacaaguaccccgcccugaacgugaccaugcccaacaacgagaaguucgacaagcucuacaucuggggcguccaccaccccgggaccgacuccgaccagaucagccuguacgcgcaggccuccgggcggaucaccgugagcacgaagcgcagccagcagaccgugaucccgaacaucggcucccggccccgcguccgggacgugagcucccgcaucagcaucuacuggaccaucgugaagcccggcgacauccugcucaucaacuccaccgggaaccugaucgcgccccggggcuacuucaagauccgcagcgggaaguccagcaucaugcgguccgacgccccgaucggcaagugcaacagcgagugcaucacgcccaacggcuccauccccaacgacaagcccuuccagaacgucaaccgcaucaccuacggggccugcccgcgguacgugaagcagaacacccugaagcucgccaccggcaugcgcaacgugcccgagaagcagacgcgggggaucuucggcgccaucgccggguucaucgagaacggcugggagggcauggucgacgggugguacggcuuccgccaccagaacagcgaggggaccggccaggccgccgaccugaaguccacccaggcggccaucaaccagaucaacgggaagcugaaccggcucaucggcaagaccaacgagaaguuccaccagaucgagaaggaguucagcgagguggagggccgcauccaggaccuggagaaguacguggaggacacgaagaucgaccugugguccuacaacgccgagcuccuggucgcccuggagaaccagcacaccaucgaccucaccgacagcgagaugaacaagcuguucgagcggaccaagaagcagcugcgcgagaacgccgaggacauggggaacggcugcuucaagaucuaccacaagugcgacaacgcgugcaucggguccauccgcaacggcacguacgaccacgacguguaccgggacgaggcccucaacaaccgcuuccagaucaaggggguggagcucaagagcggcuacaaggacuggauccuguggaucuccuucgccaucagcugcuuccugcugugcgucgcccugcucggcuucaucaugugggccugccagaaggggaacauccggugcaacaucugcaucuga

SEQ ID NO: 65825 - RNA, 1701 nt, Artificial Sequence
  derived and/or modified CDS sequence (opt1) from hemagglutinin__InfluenzaA__ABU92652
augaagaccaucaucgcccugagcuacauccucugccugguguucgcccagaagcugcccggcaacgacaacuccaccgcgacgcucugccuggggcaccacgccgucccgaacggcaccaucgugaagaccaucaccaacgaccagaucgaggugacgaacgccaccgagcugguccagagcuccagcaccgggggcaucugcgacagcccccaccagauccucgacggggagaacugcacccugaucgacgcccugcucggcgacccccagugcgacggcuuccagaacaagaagugggaccuguucguggagcgcagcaaggccuacuccaacugcuaccccuacgacgugccggacuacgcgagccugcggucccucgucgccagcuccgggacgcuggaguucaacaacgagagcuucgacuggaccggcgugacccagaacgggaccuccagcgccugcaagcgccgguccaacaagagcuucuucucccgccugaacuggcucacgcaccugaaguacaaguaccccgcccugaacgugaccaugcccaacaacgagaaguucgacaagcucuacaucuggggcguccaccaccccgggaccgacagcgaccagaucucccuguacgcgcaggccagcggccggaucaccgugagcacgaagcgcucccagcagaccgugaucccgaacaucggcagccggccccgcguccgggacguguccagccgcaucuccaucuacuggaccaucgugaagcccggggacauccugcucaucaacagcaccggcaaccugaucgcgccccggggguacuucaagauccgcuccggcaagagcuccaucaugcggagcgacgccccgaucggcaagugcaacuccgagugcaucacgcccaacgggagcauccccaacgacaagcccuuccagaacgucaaccgcaucaccuacggcgccugcccgcgguacgugaagcagaacacccugaagcucgccaccgggaugcgcaacgugcccgagaagcagacgcggggcaucuucggggccaucgccggcuucaucgagaacggcugggaggggauggucgacggcugguacggguuccgccaccagaacuccgagggcaccgggcaggccgccgaccugaaguccacccaggcggccaucaaccagaucaacggcaagcugaaccggcucaucggcaagaccaacgagaaguuccaccagaucgagaaggaguucuccgagguggaggggcgcauccaggaccuggagaaguacguggaggacacgaagaucgaccuguggagcuacaacgccgagcuccuggucgcccuggagaaccagcacaccaucgaccucaccgacuccgagaugaacaagcuguucgagcggaccaagaagcagcugcgcgagaacgccgaggacaucggcaacgggugcuucaagaucuaccacaagugcgacaacgcgugcaucggcagcauccgcaacgggacguacgaccacgacguguaccgggacgaggcccucaacaaccgcuuccagaucaagggcguggagcugaaguccggcuacaaggacuggauccuguggaucagcuucgccaucagcugcuuccuccugugcgucgcccugcucggguucaucaugugggccugccagaagggcaacauccggugcaacaucugcaucuga

SEQ ID NO: 65826 - RNA, 1701 nt, Artificial Sequence; identical to SEQ ID NO: 65786
  derived and/or modified CDS sequence (opt1) from hemagglutinin__InfluenzaA__ABU92653

SEQ ID NO: 65827 - RNA, 1701 nt, Artificial Sequence
  derived and/or modified CDS sequence (opt1) from hemagglutinin__InfluenzaA__ABU92654
augaagaccaucaucgcccugagcuacauccucugccugguguucgcccagaagcugcccggcaacgacaacuccaccgcgacgcucugccuggggcaccacgccgucccgaacggcaccaucgugaagaccaucaccaacgaccagaucgaggugacgaacgccaccgagcugguccagagcuccagcaccgggggcaucugcgacagcccccaccagauccucgacggggagaacugcacccugaucgacgcccugcucggcgacccccagugcgacggcuuccagaacaagaagugggaccuguucguggagcgcagcaaggccuacuccaacugcuaccccuacgacgugccggacuacgcgagccugcggucccucgucgccagcuccgggacgcuggaguucaacaacgagagcuucaacuggaccggcgugacccagaacgggaccuccagcgccugcaagcgccgguccaacaagagcuucuucucccgccugaacuggcucacgcaccugaaguucaaguaccccgcccugaacgugaccaugcccaacaacgagaaguucgacaagcucuacaucuggggcguccaccaccccgggaccgacaacgaccagaucagccuguacgcgcaggccuccggcaagaucaccgugagcacgaagcggagccagcagaccgugaucccgaacaucggcucccgcccccggguccgcgacgugcccagccggaucuccaucuacuggaccaucgugaagcccggggacauccugcucaucaacagcaccggcaaccugaucgccccgcgcggguacuucaagauccgguccggcaagagcuccaucaugcgcagcgacgcccccaucggcaagugcaacuccgagugcaucacgcccaacgggagcauccugaacgacaagcccuuccagaacgucaaccggaucaccuacggcgccugcccgcgcuacgugaagcagaacacccucaagcuggcgaccgggaugcggaacgugcccgagaagcagacgcgcggcaucuucggggccaucgccggcuucaucgagaacggcugggaggggauggucgacggcugguacggguuccggcaccagaacgccgagggcaccgggcaggccgcggaccugaaguccacccaggccgccaucaaccagaucaacggcaagcucaaccgccugaucggcaagaccaacgagaaguuccaccagaucgagaaggaguucagcgagguggaggggcggauccaggaccuggagaaguacguggaggacacgaagaucgaccucugguccuacaacgccgagcugcuggucgcccucgagaaccagcacaccaucgaccugaccgacagcgagaugaacaagcuguucgagcgcaccaagaagcagcuccgggagaacgcggaggacaugggcaacgggugcuucaagaucuaccacaagugcgacaacgccugcaucggcuccauccgcaacgggacguacgaccacgacguguaccgcgacgaggcccugaacaaccgguuccagaucaagggcguggagcugaaguccggcuacaaggacuggauccucuggaucuccuucgccaucagcugcuuccugcugugcgucgcccuccugggguucaucaugugggcgugccagaagggcaacauccgcugcaacaucugcaucuga

SEQ ID NO: 65828 - RNA, 1701 nt, Artificial Sequence
  derived and/or modified CDS sequence (opt1) from hemagglutinin__InfluenzaA__ABU92655
augaagaccaucaucgcccugagcuacauccucugccugguguucgcccagaagcugcccggcaacgacaacuccaccgcgacgcucugccuggggcaccacgccgucccgaacggcaccaucgugaagaccaucaccaacgaccagaucgaggugacgaacgccaccgagcugguccagagcuccagcaccgggggcaucugcgacagcccccaccagauccucgacggggagaacugcacccugaucgacgcccugcucggcgacccccagugcgacggcuuccagaacaagaagugggaccuguucguggagcgcagcaaggccuacuccaacugcuaccccuacgacgugccggacuacgcgagccugcggucccucgucgccagcuccgggacgcuggaguucaacaacgagagcuucaacuggaccggcgugacccagaacgggaccuccagcgccugcaagcgccgguccaacaagagcuucuucucccgccugaacuggcucacgcaccugaaguucaaguaccccgcccugaacgugaccaugcccaacaacgagaaguucgacaagcucuacaucuggggcguccaccaccccgggaccgacaacgaccagaucagccuguacgcgcaggccuccggccggaucaccgugagcacgaagcgcagccagcagaccgugaucccgaacaucggcucccggccccgcguccgggacgugcccagccgcaucuccaucuacuggaccaucgugaagcccggggacauccugcucaucaacagcaccggcaaccugaucgccccgcggggguacuucaagauccgcuccggcaagagcuccaucaugcggagcgacgcccccaucggcaagugcaacuccgagugcaucacgcccaacgggagcauccccaacgacaagccguuccagaacgucaaccgcaucaccuacggcgccugcccccgguacgugaagcagaacacccugaagcucgcgaccgggaugcgcaacgugcccgagaagcagacgcggggcaucuucggggccaucgccggcuucaucgagaacggcugggaggggauggucgacggcugguacggguuccgccaccagaacgccgagggcaccgggcaggccgcggaccugaaguccacccaggccgccaucaaccagaucaacggcaagcugaaccggcucaucggcaagaccaacgagaaguuccaccagaucgagaaggaguucagcgagguggaggggcgcauccaggaccuggagaaguacguggaggacacgaagaucgaccugugguccuacaacgccgagcuccuggucgcccuggagaaccagcacaccaucgaccucaccgacagcgagaugaacaagcuguucgagcggaccaagaagcagcugcgcgagaacgcggaggacaugggcaacgggugcuucaagaucuaccacaagugcgacaacgccugcaucggcuccauccgcaacgggacguacgaccacgacguguaccgggacgaggcccucaacaaccgcuuccagaucaagggcguggagcugaaguccggcuacaaggacuggauccuguggaucuccuucgccaucagcugcuuccuccugugcgucgcccugcucggguucaucaugugggcgugccagaagggcaacauccggugcaacaucugcaucuga

SEQ ID NO: 65829 - RNA, 1701 nt, Artificial Sequence; identical to SEQ ID NO: 65786
  derived and/or modified CDS sequence (opt1) from hemagglutinin__InfluenzaA__ABU92656

SEQ ID NO: 65830 - RNA, 1701 nt, Artificial Sequence; identical to SEQ ID NO: 64657
  derived and/or modified CDS sequence (opt1) from hemagglutinin__InfluenzaA__ABU92657

SEQ ID NO: 65831 - RNA, 1701 nt, Artificial Sequence; identical to SEQ ID NO: 65786
  derived and/or modified CDS sequence (opt1) from hemagglutinin__InfluenzaA__ABU92658

SEQ ID NO: 65832 - RNA, 1701 nt, Artificial Sequence; identical to SEQ ID NO: 64657
  derived and/or modified CDS sequence (opt1) from hemagglutinin__InfluenzaA__ABU92659

SEQ ID NO: 65833 - RNA, 1701 nt, Artificial Sequence; identical to SEQ ID NO: 65786
  derived and/or modified CDS sequence (opt1) from hemagglutinin__InfluenzaA__ABU92660

SEQ ID NO: 65834 - RNA, 1701 nt, Artificial Sequence
  derived and/or modified CDS sequence (opt1) from hemagglutinin__InfluenzaA__ABU92661
augaagaccaucaucgcccugagcuacauccucugccugguguucgcccagaagcugcccggcaacgacaacuccaccgcgacgcucugccuggggcaccacgccgucccgaacggcaccaucgugaagaccaucaccaacgaccagaucgaggugacgaacgccaccgagcugguccagaucagcuccaccggggagaucugcgacagcccccaccagauccucgacggcgagaacugcacccugaucgacgcccugcucggggacccccagugcgacggcuuccagaacaagaagugggaccuguucguggagcgcuccaaggccuacagcaacugcuaccccuacgacgugccggacuacgcgucccugcggagccucgucgccuccagcggcacgcuggaguucaacaacgaguccuucgacuggaccggggugacccagaacggcaccagcuccgccugcaagcgccggagcgacaaguccuucuucagccgccugaacuggcucacgcaccugaaguacaaguaccccgcccugaacgugaccaugcccaacaacgagaaguucgacaagcucuacaucuggggcguccaccaccccgggaccgacuccgaccagaucagccuguacgcgcaggccuccgggcggaucaccgugagcacgaagcgcagccagcagaccgugaucccgaacaucggcucccggccccgcguccgggacgugagcucccgcaucagcaucuacuggaccaucgugaagcccggcgacauccugcucaucaacuccaccgggaaccugaucgcgccccggggcuacuucaagauccgcagcgggaaguccagcaucaugcgguccgacgccccgaucggcaagugcaacagcgagugcaucacgcccaacggcuccauccccaacgacaagcccuuccagaacgucaaccgcaucaccuacggggccugcccgcgguacgugaagcagaacacccugaagcucgccaccggcaugcgcaacgugcccgagaagcagacgcgggggaucuucggcgccaucgccggguucaucgagaacggcugggagggcauggucgacgggugguacggcuuccgccaccagaacagcgaggggaccggccaggccgccgaccugaaguccacccaggcggccaucaaccagaucaacgggaagcugaaccggcucaucggcaagaccaacgagaaguuccaccagaucgagaaggaguucagcgagguggagggccgcauccaggaccuggagaaguacguggaggacacgaagaucgaccugugguccuacaacgccgagcuccuggucgcccuggagaaccagcacaccaucgaccucaccgacagcgagaugaacaagcuguucgagcggaccaagaagcagcugcgcgagaacgccgaggacauggggaacggcugcuucaagaucuaccacaagugcgacaacgcgugcaucggguccauccgcaacggcacguacgaccacgacguguaccgggacgaggcccucaacaaccgcuuccagaucaaggggguggagcuggagagcggcuacaaggacuggauccuguggaucuccuucgccaucagcugcuuccuccugugcgucgcccugcucggcuucaucaugugggccugccagaaggggaacauccggugcaacaucugcaucuga

SEQ ID NO: 65835 - RNA, 1701 nt, Artificial Sequence; identical to SEQ ID NO: 64097
  derived and/or modified CDS sequence (opt1) from hemagglutinin__InfluenzaA__ABU92662

SEQ ID NO: 65836 - RNA, 1701 nt, Artificial Sequence; identical to SEQ ID NO: 65786
  derived and/or modified CDS sequence (opt1) from hemagglutinin__InfluenzaA__ABU92663

SEQ ID NO: 65837 - RNA, 1701 nt, Artificial Sequence; identical to SEQ ID NO: 65786
  derived and/or modified CDS sequence (opt1) from hemagglutinin__InfluenzaA__ABU92664

SEQ ID NO: 65838 - RNA, 1701 nt, Artificial Sequence
  derived and/or modified CDS sequence (opt1) from hemagglutinin__InfluenzaA__ABU92665
augaagaccaucaucgcccugagcuacauccucugccugguguucgcccagaagcugcccggcaacgacaacuccaccgcgacgcucugccuggggcaccacgccgucccgaacggcaccaucgugaagaccaucaccaacgaccagaucgaggugacgaacgccaccgagcugguccagagcuccagcaccgggggcaucugcgacagcccccaccagauccucgacggggagaacugcacccugaucgacgcccugcucggcgacccccagugcgacggcuuccagaacaagaagugggaccuguucguggagcgcagcaaggccuacuccaacugcuaccccuacgacgugccggacuacgcgagccugcggucccucgucgccagcuccgggacgcuggaguucaacaacgagagcuucaacuggaccggcgugacccagaacgggaccuccagcgccugcaagcgccgguccaacaagagcuucuucucccgccugaacuggcucacgcaccugaaguucaaguaccccgcccugaacgugaccaugcccaacaacgagaaguucgacaagcucuacaucuggggcguccaccaccccgggaccgacaacgaccagaucagccuguacgcgcaggccuccggccggaucaccgugagcacgaagcgcagccagcagaccgugaucccgaacaucggcucccggccccgcguccgggacgugcccagccgcaucuccaucuacuggaccaucgugaagcccggggacauccugcucaucaacagcaccggcaaccugaucgccccgcggggguacuucaagauccgcuccggcaagagcuccaucaugcggagcgacgcccccaucggcaagugcaacuccgagugcaucacgcccaacgggagcauccccaacgacaagccguuccagaacgucaaccgcaucaccuacggcgccugcccccgguacgugacccagaacacccugaagcucgcgacggggaugcgcaacgugcccgagaagcagacccggggcaucuucggggccaucgccggcuucaucgagaacggcugggaggggauggucgacggcugguacggguuccgccaccagaacuccgagggcaccgggcaggccgccgaccugaaguccacccaggcggccaucaaccagaucaacggcaagcugaaccggcucaucggcaagacgaacgagaaguuccaccagaucgagaaggaguucuccgagguggaggggcgcauccaggaccuggagaaguacguggaggacaccaagaucgaccuguggagcuacaacgccgagcuccuggucgcccuggagaaccagcacaccaucgaccucaccgacuccgagaugaacaagcuguucgagcggacgaagaagcagcugcgcgagaacgccgaggacaugggcaacgggugcuucaagaucuaccacaagugcgacaacgcgugcaucggcagcauccgcaacgggaccuacgaccacgacguguaccgggacgaggcccucaacaaccgcuuccagaucaagggcguggagcugaaguccggcuacaaggacuggauccuguggaucagcuucgccaucuccugcuuccuccugugcgucgcccugcucggguucaucaugugggccugccagaagggcaacauccggugcaacaucugcaucuga

SEQ ID NO: 65839 - RNA, 1701 nt, Artificial Sequence; identical to SEQ ID NO: 65786
  derived and/or modified CDS sequence (opt1) from hemagglutinin__InfluenzaA__ABU92666

SEQ ID NO: 65840 - RNA, 1701 nt, Artificial Sequence; identical to SEQ ID NO: 64096
  derived and/or modified CDS sequence (opt1) from hemagglutinin__InfluenzaA__ABU92667

SEQ ID NO: 65841 - RNA, 1701 nt, Artificial Sequence; identical to SEQ ID NO: 64096
  derived and/or modified CDS sequence (opt1) from hemagglutinin__InfluenzaA__ABU92668

SEQ ID NO: 65842 - RNA, 1701 nt, Artificial Sequence
  derived and/or modified CDS sequence (opt1) from hemagglutinin__InfluenzaA__ABU92669
augaagaccaucaucgcccugagcuacauccucugccugguguucgcccagaagcugcccgucaacgacaacuccaccgcgacgcucugccugggccaccacgccgugccgaacgggacccuggugaagaccaucaccaacgaccacaucgaggucacgaacgccaccgagcucgugcagagcuccagcaccggccgcaucugcgacagcccccaccagauccuggacggggagaacugcacccugaucgacgcccuccugggcgacccccacugcgacggguuccagaacaaggagugggaccuguucguggagcggagcacggccuacuccaacugcuaccccuacgacgucccggacuacgcgagccuccgcucccugguggccagcuccggcacccuggaguucaacaacgagagcuucaacuggaccggcguggcccagaacgggaccuccagcgccugcaagcggcgcuccaucaagagcuucuucucccggcucaacuggcugcaccagcugaaguacaaguaccccgcgcucaacgucacgaugcccaacaacgagaaguucgacaagcuguacaucuggggcgugcaccaccccagcaccgacuccgaccagaucagccuguacgcccaggccagcgggcgcgugaccgucuccaccaagcggagccagcagacggugaucccgaacaucggcucccgccccugggugcgcggggucagcucccggaucagcaucuacuggaccaucgugaagcccggcgacauccuccugaucaacuccaccggcaaccugaucgcgccccggggguacuucaagauccgcaacggcaagagcuccaucaugcggagcaacgccccgaucgggaagugcaacuccgagugcaucacccccaacggcagcauccccaacgacaagcccuuccagaacgugaaccgcaucacguacggcgccugcccgcgguacgucaagcagaacacccucaagcuggccaccgggaugcgcaacgugcccgagaagcagacccggggcaucuucggggccaucgccggcuucaucgagaacgggugggagggcaugguggacggcugguacggguuccgccaccagaacuccgagggcacggggcaggccgcggaccugaaguccacccaggccgccaucaaccagaucaacggcaagcucaaccggcugaucgagaagaccaacgagaaguuccaccagaucgagaaggaguucuccgaggucgaggggcgcauccaggaccuggagaaguacguggaggacaccaagaucgaccucuggagcuacaacgccgagcugcugguggcccucgagaaccagcacacgaucgaccugaccgacuccgagaugaacaagcuguucgagcggacccgcaagcagcuccgcgagaacgcggaggacaugggcaacggcugcuucaagaucuaccacaagugcgacaacgccugcaucgggagcauccggaacggcaccuacgaccacgacgucuaccgcgacgaggcccugaacaaccgguuccagaucaaggggguggagcugaaguccggcuacaaggacuggauccucuggaucagcuucgccaucagcugcuuccugcugugcgucgugcuccugggguucaucaugugggccugccagaagggcaacauccgcugcaacaucugcaucuga

SEQ ID NO: 65843 - RNA, 1701 nt, Artificial Sequence; identical to SEQ ID NO: 64096
  derived and/or modified CDS sequence (opt1) from hemagglutinin__InfluenzaA__ABU92670

SEQ ID NO: 65844 - RNA, 1701 nt, Artificial Sequence
  derived and/or modified CDS sequence (opt1) from hemagglutinin__InfluenzaA__ABU92671
augaagaccaucaucgcccugagccacauccucugccugguguucgcccagaagcugcccgucaacgacaacuccaccgcgacgcucugccugggccaccacgccgugccgaacgggacccuggugaagaccaucaccaacgaccacaucgaggucacgaacgccaccgagcucgugcagagcuccagcaccggccgcaucugcgacaucccccaccagauccuggacggggagaacugcacccugaucgacgcccuccugggcgacccccacugcgacggguuccagaacaaggagugggaccuguucguggagcgguccacggccuacagcaacugcuaccccuacgacgucccggacuacgcgucccuccgcagccugguggccuccagcggcacccuggaguucaacaacgaguccuucaacuggaccggcguggcccagaacgggaccagcuccgccugcaagcggcgcagcaucaaguccuucuucagccggcucaacuggcugcaccagcugaaguacaaguaccccgcgcucaacgucacgaugcccaacaacgagaaguucgacaagcuguacaucuggggcgugcaccaccccuccaccgacagcgaccagaucucccuguacgcccaggccccggggcgcgugaccgucagcaccaagcggagccagcagacggugauccccaacaucggcucccgccccugggugcgcggggucagcucccggaucagcaucuacuggaccaucgugaagcccggcgacauccuccugaucaacuccaccggcaaccugaucgccccgcggggguacuucaagauccgcagcggcaaguccagcaucaugcgguccaacgcccccaucgggaagugcaacagcgagugcaucacccccaacggcuccauccccaacgacaagccguuccagaacgugaaccgcaucacguacggcgcgugcccccgguacgucaagcagaacacccucaagcuggccaccgggaugcgcaacgugcccgagaagcagacccggggcaucuucggggccaucgccggcuucaucgagaacgggugggagggcaugguggacggcugguacggguuccgccaccagaacagcgagggcacggggcaggccgcggaccugaaguccacccaggccgccaucaaccagaucaacggcaagcucaaccggcugaucgagaagaccaacgagaaguuccaccagaucgagaaggaguucagcgaggccgaggggcgcauccaggaccuggagaaguacgucgaggacaccaagaucgaccucugguccuacaacgccgagcugcugguggcgcucgagaaccagcacacgaucgaccugaccgacagcgagaugaacaagcuguucgagcggacccgcaagcagcuccgcgagaacgccgaggacaugggcaacggcugcuucaagaucuaccacaagugcgacaacgccugcaucggguccauccggaacggcaccuacgaccacgacguguaccgcgacgaggcccugaacaaccgguuccagaucaagggggucgagcucaagagcggcuacaaggacuggauccuguggaucuccuucgccaucagcugcuuccugcugugcgugguccuccugggguucaucaugugggcgugccagaagggcaacauccgcugcaacaucugcaucuga

SEQ ID NO: 65845 - RNA, 1701 nt, Artificial Sequence; identical to SEQ ID NO: 64096
  derived and/or modified CDS sequence (opt1) from hemagglutinin__InfluenzaA__ABU92672

SEQ ID NO: 65846 - RNA, 1701 nt, Artificial Sequence; identical to SEQ ID NO: 64096
  derived and/or modified CDS sequence (opt1) from hemagglutinin__InfluenzaA__ABU92673

SEQ ID NO: 65847 - RNA, 1701 nt, Artificial Sequence
  derived and/or modified CDS sequence (opt1) from hemagglutinin__InfluenzaA__ABU92674
augaagaccaucaucgcccugagcuacauccucugccugguguucgcccagaagcugcccgucaacgacaacuccaccgcgacgcucugccugggccaccacgccgugccgaacgggacccuggugaagaccaucaccaacgaccacaucgaggucacgaacgccaccgagcucgugcagagcuccagcaccggccgcaucugcgacagcccccaccagauccuggacggggagaacugcacccugaucgacgcccuccugggcgacccccacugcgacggguuccagaacaaggagugggaccuguucguggagcggcgcacggccuacagcaacugcuaccccuacgacgucccggacuacgcgucccuccggagccugguggccuccagcggcacccuggaguucaacaacgaguccuucaacuggaccggcguggcccagaacgggaccagcuccgccugcaagcgccggagcaucaaguccuucuucagccgccucaacuggcugcaccagcugaaguacaaguaccccgcgcucaacgucacgaugcccaacaacgagaaguucgacaagcuguacaucuggggcgugcaccaccccuccaccgacagcgaccagaucucccuguacgcccaggccagcgggcgggugaccgucagcaccaagcgcucccagcagacggugaucccgaacaucggcagccggcccugggugcgcggggucuccagccggaucuccaucuacuggaccaucgugaagcccggcgacauccuccugaucaacagcaccggcaaccugaucgcgccccgcggguacuucaagauccgguccggcaagagcuccaucaugcgcagcaacgccccgaucgggaagugcaacuccgagugcaucacccccaacggcagcauccccaacgacaagcccuuccagaacgugaaccggaucacguacggcgccugcccgcgcuacgucaagcagaacacccucaagcuggccaccgggaugcggaacgugcccgagaagcagacccgcggcaucuucggggccaucgccggcuucaucgagaacgggugggagggcaugguggacggcugguacggguuccggcaccagaacuccgagggcacggggcaggccgcggaccugaaguccacccaggccgccaucaaccagaucaacggcaagcucaaccgccugaucgagaagaccaacgagaaguuccaccagaucgagaaggaguucuccgaggucgaggggcggauccaggaccuggagaaguacguggaggacaccaagaucgaccucuggagcuacaacgccgagcugcugguggcccucgagaaccagcacacgaucgaccugaccgacuccgagaugaacaagcuguucgagcgcacccgcaagcagcuccgggagaacgcggaggacaugggcaacggcugcuucaagaucuaccacaagugcgacaacgccugcaucgggagcauccgcaacggcaccuacgaccacgacgucuaccgggacgaggcccugaacaaccgcuuccagaucaaggggguggagcugaaguccggcuacaaggacuggauccucuggaucagcuucgccaucagcugcuuccugcugugcgucgugcuccugggguucaucaugugggccugccagaagggcaacauccggugcaacaucugcaucuga

SEQ ID NO: 65848 - RNA, 1701 nt, Artificial Sequence
  derived and/or modified CDS sequence (opt1) from hemagglutinin__InfluenzaA__ABU92675
augaagaccaucaucgcccugagcuacauccucugccugguguucgcccagaagcugcccggcaacgacaacuccaccgcgacgcucugccuggggcaccacgccgucccgaacggcaccaucgugaagaccaucaccaacgaccagaucgaggugacgaacgccaccgagcugguccagagcuccagcaccgggggcaucugcgacagcccccaccagauccucgacggggagaacugcacccugaucgacgcccugcucggcgacccccagugcgacggcuuccagaacaagaagugggaccuguucguggagcgcagcaaggccuacuccaacugcuaccccuacgacgugccggacuacgcgagccugcggucccucaucgccagcuccgggacgcuggaguucaacaacgagagcuucaacuggaccggcgucacccagaacgggaccuccagcgccugcaagcgccgguccaacagcuccuucuucagccgccugaacuggcucacgcaccugaaguucaaguaccccgcccugaacgugaccaugcccaacaacgaggaguucgacaagcucuacaucuggggcgugcaccaccccgggaccgacaacgaccagaucucccuguacgcgcaggccagcggccggaucaccgucagcacgaagcgcucccagcagaccgugaucccgaacaucggcagccggccccgcgugcgggacauccccucccgcaucagcaucuacuggaccaucgucaagcccggggacauccugcucaucaacuccaccggcaaccugaucgccccgcggggguacuucaagauccgcagcggcaaguccagcaucaugcgguccgacgcccccaucggcaagugcaacagcgagugcaucacgcccaacggguccauccccaacgacaagccguuccagaacgugaaccgcaucaccuacggcgccugcccccgguacgugaagcagaacacccugaagcucgcgaccgggaugcgcaacguccccgagaagcagacgcggggcaucuucggggccaucgccggcuucaucgagaacggcugggaggggaugguggacggcugguacggguuccgccaccagaacagcgagggcaucgggcaggccgccgaccugaaguccacccaggcggccaucgaccagaucaacggcaagcugaaccggcucaucggcaagaccaacgagaaguuccaccagaucgagaaggaguucagcgagguggaggggcgcauccaggaccuggagaaguacgucgaggacaccaagaucgaccugugguccuacaacgccgagcuccugguggcccuggagaaccagcacacgaucgaccucaccgacagcgagaugaacaagcuguucgagcggaccaagaagcagcugcgcgagaacgccgaggacaugggcaacgggugcuucaagaucuaccacaagugcgacaacgcgugcaugggcuccauccgcaacgggaccuacgaccacgacguguaccgggacgaggcccucaacaaccgcuuccagaucaagggcgucgagcugaaguccggcuacaaggacuggauccuguggaucuccuucgccaucagcugcuuccuccugugcguggcccugcucggguucaucaugugggccugccagaagggcaacauccggugcaacaucugcaucuga

SEQ ID NO: 65849 - RNA, 1701 nt, Artificial Sequence; identical to SEQ ID NO: 64657
  derived and/or modified CDS sequence (opt1) from hemagglutinin__InfluenzaA__ABU92676

SEQ ID NO: 65850 - RNA, 1701 nt, Artificial Sequence; identical to SEQ ID NO: 65777
  derived and/or modified CDS sequence (opt1) from hemagglutinin__InfluenzaA__ABU92677

SEQ ID NO: 65851 - RNA, 1701 nt, Artificial Sequence
  derived and/or modified CDS sequence (opt1) from hemagglutinin__InfluenzaA__ABU92678
augaagaccaucaucgcccugagcuacauccucugccugguguucgcccagaagcugcccggcaacgacaacuccaccgcgacgcucugccuggggcaccacgccgucccgaacggcaccaucgugaagaccaucaccaacgaccagaucgaggugacgaacgccaccgagcugguccagagcuccagcaccgggggcaucugcgacagcccccaccagauccucgacggggagaacugcacccugaucgacgcccugcucggcgacccccagugcgacggccugcagaacaagaagugggaccuguucguggagcgcagcaaggccuacuccaacugcuaccccuacgacgugccggacuacgcgagccuccggucccugaucgccagcuccgggacgcuggaguucaacaacgagagcuucaacuggaccggcgucacccagaacgggaccuccagcgccugcaagcgccgguccaacaacagcuucuucucccgccucaacuggcugacgcaccugaaguucaaguaccccgcccucaacgugaccaugcccaacaacgaggaguucgacaagcuguacaucuggggcgugcaccaccccgggaccgacaacgaccagaucagccuguacgcgcaggccuccggccggaucaccgucagcacgaagcgcagccagcagaccgugaucccgaacaucggcucccggccccgcgugcgggacauccccagccgcaucuccaucuacuggaccaucgucaagcccggggacauccuccugaucaacagcaccggcaaccugaucgccccgcggggguacuucaagauccgcuccggcaagagcuccaucaugcggagcgacgcccccaucggcaacugcaacuccgagugcaucacgcccaacgggagcauccccaacgacaagccguuccagaacgugaaccgcaucaccuacggcgccugcccccgguacgugaagcagaacacccucaagcuggcgaccgggaugcgcaacguccccgagaagcagacgcggggcaucuucggggccaucgccggcuucaucgagaacggcugggaggggaugguggacggcugguacggguuccgccaccagaacuccgagggcaucgggcaggccgccgaccugaaguccacccaggcggccaucgaccagaucaacggcaagcucaaccggcugaucggcaagaccaacgagaaguuccaccagaucgagaaggaguucuccgagguggaggggcgcauccaggaccuggagaaguacgucgaggacaccaagaucgaccucuggagcuacaacgccgagcugcugguggcccucgagaaccagcacacgaucgaccugaccgacuccgagaugaacaagcuguucgagcggaccaagaagcagcuccgcgagaacgccgaggacaugggcaacgggugcuucaagaucuaccacaagugcgacaacgcgugcaucggcagcauccgcaacgggaccuacgaccacgacguguaccgggacgaggcccugaacaaccgcuuccagaucaagggcgucgagcugaaguccggcuacaaggacuggauccucuggaucagcuucgccaucuccugcuuccugcugugcguggcccuccugggguucaucaugugggccugccagaagggcaacauccggugcaacaucugcaucuga

SEQ ID NO: 65852 - RNA, 1701 nt, Artificial Sequence
  derived and/or modified CDS sequence (opt1) from hemagglutinin__InfluenzaA__ABU92680
augaagaccaucaucgcccugagcuacauccucugccugguguucgcccagaagcugcccggcaacgacaacuccaccgcgacgcucugccuggggcaccacgccgucccgaacggcaccaucgugaagaccaucaccaacgaccagaucgaggugacgaacgccaccgagcugguccagagcuccagcaccgggggcaucugcgacagcccccaccagauccucgacggggagaacugcacccugaucgacgcccugcucggcgacccccagugcgacggcuuccagaacaagaagugggaccuguucguggagcgcagcaaggccuacuccaacugcuaccccuacgacgugccggacuacgcgagccugcggucccucgucgccagcuccgggacgcuggaguucaacaacgagagcuucaacuggaccggcgugacccagaacgggaccuccagcgccugcaagcgccgguccaacaacagcuucuucucccgccugaacuggcucacgcaccugaaguucaaguaccccgcccugaacgugaccaugcccaacaacgagaaguucgacaagcucuacaucuggggcguccaccaccccgggaccgacaacgaccagaucuuccuguacgcgcaggccagcggccggaucaccguguccacgaagcgcagccagcagaccgugaucccgaacaucggcagccggccccgcguccggaacauccccucccgcaucagcaucuacuggaccaucgugaagcccggggacauccugcucaucaacuccaccggcaaccugaucgccccgcggggguacuucaagauccgcagcggcaaguccagcaucaugcgguccgacgcccccaucggcaagugcaacagcgagugcaucacgcccaacggguccauccccaacgacaagccguuccagaacgugaaccgcaucaccuacggcgccugcccccgguacgucaagcagaacacccugaagcucgcgaccgggaugcgcaacgugcccgagaagcagacgcggggcaucuucggggccaucgccggcuucaucgagaacggcugggaggggaugguggacggcugguacggguuccgccaccagaacagcgagggcaucgggcaggccgccgaccugaaguccacccaggcggccaucgaccagaucaacggcaagcugaaccggcucaucggcaagaccaacgagaaguuccaccagaucgagaaggaguucagcgaggucgaggggcgcauccaggaccuggagaaguacguggaggacaccaagaucgaccugugguccuacaacgccgagcuccugguggcccuggagaaccagcacacgaucgaccucaccgacagcgagaugaacaagcuguucgagaagaccaagaagcagcugcgggagaacgccgaggacaugggcaacgggugcuucaagaucuaccacaagugcgacaacgcgugcaucggcuccauccgcaacgggaccuacgaccacgacgucuaccgcgacgaggcccucaacaaccgguuccagaucaagggcguggagcugaaguccggcuacaaggacuggauccuguggaucuccuucgccaucagcugcuuccuccugugcguggcccugcucggguucaucaugugggccugccagaagggcaacauccgcugcaacaucugcaucuga

SEQ ID NO: 65853 - RNA, 1701 nt, Artificial Sequence; identical to SEQ ID NO: 65781
  derived and/or modified CDS sequence (opt1) from hemagglutinin__InfluenzaA__ABU92681

SEQ ID NO: 65854 - RNA, 1701 nt, Artificial Sequence; identical to SEQ ID NO: 64097
  derived and/or modified CDS sequence (opt1) from hemagglutinin__InfluenzaA__ABU92682

SEQ ID NO: 65855 - RNA, 1701 nt, Artificial Sequence; identical to SEQ ID NO: 65786
  derived and/or modified CDS sequence (opt1) from hemagglutinin__InfluenzaA__ABU92683

SEQ ID NO: 65856 - RNA, 1701 nt, Artificial Sequence
  derived and/or modified CDS sequence (opt1) from hemagglutinin__InfluenzaA__ABU92684
augaagaccaucaucgcccugagcuacauccucugccugguguucgcccagaagcugcccggcaacgacaacuccaccgcgacgcucugccuggggcaccacgccgucccgaacggcaccaucgugaagaccaucaccaacgaccagaucgaggugacgaacgccaccgagcugguccagaucagcuccaccgggggcaucugcgacagcccccaccagauccucgacggggagaacugcacccugaucgacgcccugcucggcgacccccagugcgacggcuuccagaacaagaagugggaccuguucaucgagcgcuccaaggccuacagcaacugcuaccccuacgacgugccggacuacgcgucccugcggagccucguggccuccagcgggacgcuggaguucaacaacgaguccuucgacuggaccggcgucacccagaacgggaccagcuccgccugcaagcgccggagcaacaaguccuucuucagccgccugaacuggcucacgcaccugaaguacaaguaccccgcccugaacgugaccaugcccaacaacgagaaguucgacaagcucuacaucuggggcgugcaccaccccgggaccgacuccgaccagaucagccuguacgcgcaggccccgggccggaucaccgucuccacgaagcgcagccagcagaccgugauccccaacaucggcagccggccccgcgugcgggacgucuccagccgcaucuccaucuacuggaccaucgugaagcccggggacauccugcucaucaacagcaccggcaaccugaucgccccgcggggguacuucaagauccgcuccggcaagagcuccaucaugcggagcgacgcccccaucggcaagugcaacuccgagugcaucacgcccaacgggagcauccccaacgacaagccguuccagaacgugaaccgcaucaccuacggcgccugcccccgguacgucaagcagaacacccugaagcucgcgaccgggaugcgcaacgugcccgagaagcagacgcggggcaucuucggggccaucgccggcuucaucgagaacggcugggaggggaugguggacggcugguacggguuccgccaccagaacuccgagggcaccgggcaggccgccgaccucaagagcacccaggcggccaucaaccagaucaacggcaagcugaaccggcugaucggcaagaccaacgagaaguuccaccagaucgagaaggaguucuccgaggucgaggggcgcauccaggaccuggagaaguacguggaggacacgaagaucgaccuguggagcuacaacgccgagcuccugguggcccuggagaaccagcacaccaucgaccucaccgacuccgagaugaacaagcuguucgagcggaccaagaagcagcugcgcgagaacgccgaggacaugggcaacgggugcuucaagaucuaccacaagugcgacaacgcgugcaucggcagcauccgcaacgggacguacgaccacgacgucuaccgggacgaggcccucaacaaccgcuuccagaucaagggcguggagcugaaguccggcuacaaggacuggauccuguggaucagcuucgccaucuccugcuuccuccugugcguggcccugcucggguucaucaugugggccugccagaagggcaacauccggugcaacaucugcaucuga

SEQ ID NO: 65857 - RNA, 1701 nt, Artificial Sequence
  derived and/or modified CDS sequence (opt1) from hemagglutinin__InfluenzaA__ABU92685
augaagaccaucaucgcccugagcuacauccucugccugguguucgcccagaagcugcccggcaacgacaacuccaccgcgacgcucugccuggggcaccacgccgucccgaacggcaccaucgugaagaccaucaccaacgaccagaucgaggugacgaacgccaccgagcugguccagaucagcuccaccgggggcaucugcgacagcccccaccagauccucgacggggagaacugcacccugaucgacgcccugcucggcgacccccagugcgacggcuuccagaacaagaagugggaccuguucguggagcgcuccaaggccuacagcaacugcuaccccuacgacgugccggacuacgcgucccugcggagccucgucgccuccagcgggacgcuggaguucaacaacgaguccuucgacuggaccggcgugacccagaacgggaccagcuccgccugcaagcgccggagcaacaaguccuucuucagccgccugaacuggcucacgcaccugaaguacaaguaccccgcccugaacgugaccaugcccaacaacgagaaguucgacaagcucuacaucuggggcguccaccaccccgggaccgacuccgaccagaucagccuguacgcgcaggccuccggccggaucaccgugagcacgaagcgcagccagcagaccgugaucccgaacaucggcucccggccccgcguccgggacgugagcucccgcaucagcaucuacuggaccaucgugaagcccggggacauccugcucaucaacuccaccggcaaccugaucgcgccccggggguacuucaagauccgcagcggcaaguccagcaucaugaaguccgacgccccgaucggcaagugcaacagcgagugcaucacgcccaacggguccauccccaacgacaagcccuuccagaacgucaaccggaucaccuacggcgccugcccgcgcuacgugaagcagaacacccugaagcucgccaccgggaugcggaacgugcccgagaagcagacgcgcggcaucuucggggccaucgccggcuucaucgagaacggcugggaggggauggucgacggcugguacggguuccggcaccagaacagcgagggcaccgggcaggccgccgaccugaaguccacccaggcggccaucaaccagaucaacggcaagcugaaccgccucaucggcaagaccaacgagaaguuccaccagaucgagaaggaguucagcgagguggaggggcggauccaggaccuggagaaguacguggaggacacgaagaucgaccugugguccuacaacgccgagcuccuggucgcccuggagaaccagcacaccaucgaccucaccgacagcgagaugaacaagcuguucgagcgcaccaagaagcagcugcgggagaacgccgaggacaugggcaacgggugcuucaagaucuaccacaagugcgacaacgcgugcaucggcuccauccgcaacgggacguacgaccacgacguguaccgcgacgaggcccucaacaaccgguuccagaucaagggcguggagcucaagagcggcuacaaggacuggauccuguggaucuccuucgccaucagcugcuuccugcugugcgucgcccugcucggguucaucaugugggccugccagaagggcaacauccgcugcaacaucugcaucuga

SEQ ID NO: 65858 - RNA, 1701 nt, Artificial Sequence; identical to SEQ ID NO: 65786
  derived and/or modified CDS sequence (opt1) from hemagglutinin__InfluenzaA__ABU92686

SEQ ID NO: 65859 - RNA, 1701 nt, Artificial Sequence; identical to SEQ ID NO: 65786
  derived and/or modified CDS sequence (opt1) from hemagglutinin__InfluenzaA__ABU92687

SEQ ID NO: 65860 - RNA, 1701 nt, Artificial Sequence; identical to SEQ ID NO: 65819
  derived and/or modified CDS sequence (opt1) from hemagglutinin__InfluenzaA__ABU92688

SEQ ID NO: 65861 - RNA, 1701 nt, Artificial Sequence; identical to SEQ ID NO: 65786
  derived and/or modified CDS sequence (opt1) from hemagglutinin__InfluenzaA__ABU92689

SEQ ID NO: 65862 - RNA, 1701 nt, Artificial Sequence
  derived and/or modified CDS sequence (opt1) from hemagglutinin__InfluenzaA__ABU92691
augaagaccaucaucgcccugagcuacauccucugccugguguucgcccagaagcugcccggcaacgacaacuccaccgcgacgcucugccuggggcaccacgccgucccgaacggcaccaucgugaagaccaucaccaacgaccagaucgaggugacgaacgccaccgagcugguccagaucagcuccaccgggggcaucugcgacagcccccaccagauccucgacggggagaacugcacccugaucgacgcccugcucggcgacccccagugcgacggcuuccagaacaagaagugggaccuguucguggagcgcuccaaggccuacagcaacugcuaccccuacgacgugccggacuacgcgucccugcggagccucgucgccuccagcgggacgcuggaguucaacaacgaguccuucgacuggaccggcgugacccagaacgggaccagcuccgccugcaagcgccggagcaacaaguccuucuucagccgccugaacuggcucacgcaccugaaguacaaguaccccgcccugaacgugaccaugcccaacaacgagaaguucgacaagcucuacaucuggggcguccaccaccccgggaccgacuccgaccagaucagccuguacgcgcaggccuccggccggaucaccgugagcacgaagcgcagccagcagaccgugaucccgaacaucggcucccggccccgcguccgggacgugagcucccgcaucagcaucuacuggaccaucgugaagcccggggacauccugcucaucaacuccaccggcaaccugaucgcgccccggggguacuucaagauccgcagcggcaaguccagcgucaugcgguccgacgccccgaucggcaagugcaacagcgagugcaucacgcccaacggguccauccccaacgacaagcccuuccagaacgugaaccgcaucaccuacggcgccugcccgcgguacgugaagcagaacacccugaagcucgccaccgggaugcgcaacguccccgagaagcagacgcggggcaucuucggggccaucgccggcuucaucgagaacggcugggaggggaugguggacggcugguacggguuccgccaccagaacagcgagggcaccgggcaggccgccgaccugaaguccacccaggcggccaucaaccagaucaacggcaagcugaaccggcucaucggcaagaccaacgagaaguuccaccagaucgagaaggaguucagcgagguggaggggcgcauccaggaccuggagaaguacgucgaggacacgaagaucgaccugugguccuacaacgccgagcuccugguggcccuggagaaccagcacaccaucgaccucaccgacagcgagaugaacaagcuguucgagcggaccaagaagcagcugcgcgagaacgccgaggacaucggcaacgggugcuucaagaucuaccacaagugcgacaacgcgugcaucggcuccauccgcaacgggacguacgaccacaacguguaccgggacgaggcccucaacaaccgcuuccagaucaagggcgucgagcucaagagcggcuacaaggacuggauccuguggaucuccuucgccaucagcugcuuccugcugugcguggcccugcucggguucaucaugugggccugccagaagggcaacauccggugcaacaucugcaucuga

SEQ ID NO: 65863 - RNA, 1701 nt, Artificial Sequence; identical to SEQ ID NO: 64714
  derived and/or modified CDS sequence (opt1) from hemagglutinin__InfluenzaA__ABU92692

SEQ ID NO: 65864 - RNA, 1701 nt, Artificial Sequence
  derived and/or modified CDS sequence (opt1) from hemagglutinin__InfluenzaA__ABU92693
augaaggccaucaucgcccugagcuacauccucugccugguguucgcgcagaagcugcccggcaacgacaacuccaccgccacccucugccuggggcaccacgccgucccgaacggcacgaucgugaagaccaucaccaacgaccagaucgaggugaccaacgccacggagcugguccagaucagcuccaccggggagaucugcgacagcccccaccagauccucgacggcgagaacugcacccugaucgacgcccugcucggggacccccagugcgacggcuuccagaacaagaagugggaccuguucguggagcgcuccaaggcguacagcaacugcuaccccuacgacgugccggacuacgccucccugcggagccucgucgccuccagcggcacccuggaguucaacaacgaguccuucgacuggacgggggugacccagaacggcaccagcuccgccugcaagcgccggagcgacaaguccuucuucagccgccugaacuggcucacccaccugaaguacaaguaccccgcgcugaacgugacgaugcccaacaacgagaaguucgacaagcucuacaucuggggcguccaccaccccgggaccgacuccgaccagaucagccuguacgcccaggccuccgggcggaucaccgugagcaccaagcgcagccagcagacggugaucccgaacaucggcucccggccccgcguccgggacgugagcucccgcaucagcaucuacuggaccaucgugaagcccggcgacauccugcucaucaacuccaccgggaaccugaucgcgccccggggcuacuucaagauccgcagcgggaaguccagcaucaugcgguccgacgccccgaucggcaagugcaacagcgagugcaucacccccaacggcuccauccccaacgacaagcccuuccagaacgucaaccgcaucacguacggggccugcccgcgguacgugaagcagaacacccugaagcucgccaccggcaugcgcaacgugcccgagaagcagacccgggggaucuucggcgccaucgccggguucaucgagaacggcugggagggcauggucgacgggugguacggcuuccgccaccagaacagcgaggggacgggccaggccgcggaccugaaguccacccaggccgccaucaaccagaucaacgggaagcugaaccggcucaucggcaagaccaacgagaaguuccaccagaucgagaaggaguucagcgagguggagggccgcauccaggaccuggagaaguacguggaggacaccaagaucgaccugugguccuacaacgccgagcuccuggucgcccuggagaaccagcacacgaucgaccucaccgacagcgagaugaacaagcuguucgagcggaccaagaagcagcugcgcgagaacgcggaggacauggggaacggcugcuucaagaucuaccacaagugcgacaacgccugcaucggguccauccgcaacggcaccuacgaccacgacguguaccgggacgaggcccucaacaaccgcuuccagaucaaggggguggagcucaagagcggcuacaaggacuggauccuguggaucuccuucgccaucagcugcuuccugcugugcgucgcccugcucggcuucaucaugugggcgugccagaaggggaacauccggugcaacaucugcaucuga

SEQ ID NO: 65865 - RNA, 1701 nt, Artificial Sequence
  derived and/or modified CDS sequence (opt1) from hemagglutinin__InfluenzaA__ABU92694
augaagaccaucaucgcccugagcuacauccucugccugguguucgcccagaagcugcccggcaacgacaacuccaccgcgacgcucugccuggggcaccacgccgucccgaacggcaccaucgugaagaccaucaccaacgaccagaucgaggugacgaacgccaccgagcugguccagagcuccagcaccgggggcaucugcgacagcccccaccagauccucgacggggagaacugcacccugaucgacgcccugcucggcgacccccagugcgacggcuuccagaacaagaagugggaccuguucguggagcgcagcaaggccuacuccaacugcuaccccuacgacgugccggacuacgcgagccugcggucccucgucgccagcuccgggacgcuggaguucaacaacgagagcuucaacuggaccggcgugacccagaacgggaccuccagcgccugcaagcgccgguccaacaacagcuucuucucccgccugaacuggcucacgcaccugaaguucaaguaccccgcccugaacgugaccaugcccaacaacgagaaguucgacaagcucuacaucuggggcguccaccaccccgggaccgacaacgaccagaucagccuguacgcgcaggccuccggccggaucaccgugagcacgaagcgcagccagcagaccgugaucccgaacaucggcucccggccccgcguccgggacauccccagccgcaucuccaucuacuggaccaucgugaagcccggggacauccugcucaucaacagcaccggcaaccugaucgccccgcggggguacuucaagauccgcuccggcaagagcuccaucaugcggagcgacgcccccaucggcaagugcaacuccgagugcaucacgcccaacgggagcauccccaacgacaagccguuccagaacgugaaccgcaucaccuacggcgccugcccccgguacgucaagcagaacacccugaagcucgcgaccgggaugcgcaacgugcccgagaagcagacgcggggcaucuucggggccaucgccggcuucaucgagaacggcugggaggggaugguggacggcugguacggguuccgccaccagaacuccgagggcaucgggcaggccgccgaccugaaguccacccaggcggccaucaaccagaucaacggcaagcugaaccggcucaucggcaagaccaacgagaaguuccaccagaucgagaaggaguucuccgaggucgaggggcgcauccaggaccuggagaaguacguggaggacaccaagguggaccuguggagcuacaacgccgagcuccuggucgcccuggagaaccagcacacgaucgaccucaccgacuccgagaugaacaagcuguucgagcggaccaagaagcagcugcgcgagaacgccgaggacaugggcaacgggugcuucaagaucuaccacaagugcgacaacgcgugcaucggcagcauccgcaacgggaccuacgaccacgacguguaccgggacgaggcccucaacaaccgcuuccagaucaagggcguggagcugaaguccggcuacaaggacuggauccuguggaucagcuucgccaucuccugcuuccuccugugcgucgcccugcucggguucaucaugugggccugccagaagggcaacauccggugcaacaucugcaucuga

SEQ ID NO: 65866 - RNA, 1701 nt, Artificial Sequence; identical to SEQ ID NO: 65777
  derived and/or modified CDS sequence (opt1) from hemagglutinin__InfluenzaA__ABU92695

SEQ ID NO: 65867 - RNA, 1701 nt, Artificial Sequence
  derived and/or modified CDS sequence (opt1) from hemagglutinin__InfluenzaA__ABU92696
augaagaccaucaucgcccugggcuacauccucugccugguguucgcccagaagcugcccgggaacgacaacagcaccgcgacgcucugccugggccaccacgccgucccgaacgggaccaucgugaagaccaucaccaacgaccagaucgaggugacgaacgccaccgagcugguccaguccagcuccaccggcgggaucugcgacagcccccaccagauccucgacggcgagaacugcacccugaucgacgcccugcucggcgacccccagugcgacggguuccagaacaagaagugggaccuguucguggagcgcuccaaggccuacagcaacugcuaccccuacgacgugccggacuacgcgucccugcggagccucaucgccuccagcggcacgcuggaguucaacaacgaguccuucaacuggaccggggucacccagaacggcaccagcuccgccugcaagcgccggagcaacuccagcuucuucucccgccugaacuggcucacgcaccugaaguucaaguaccccgcccugaacgugaccaugcccaacaacgaggaguucgacaagcucuacaucuggggcgugcaccaccccgggaccgacaacgaccagaucagccuguacgcgcaggccuccggccggaucaccgucagcacgaagcgcagccagcagaccgugaucccgaacaucgggucccggccccgcgugcgggacauccccagccgcaucuccaucuacuggaccaucgucaagcccggcgacauccugcucaucaacagcaccgggaaccugaucgccccgcggggcuacuucaagauccgcuccggcaagagcuccaucaugcggagcgacgcccccaucgggaagugcaacuccgagugcaucacgcccaacggcagcauccccaacgacaagccguuccagaacgugaaccgcaucaccuacggggccugcccccgguacgugaagcagaacacccugaagcucgcgaccggcaugcgcaacguccccgagaagcagacgcgggggaucuucggcgccaucgccggcuucaucgagaacgggugggagggcaugguggacgggugguacggcuuccgccaccagaacuccgaggggaucggccaggccgccgaccucaagagcacccaggcggccaucgaccagaucaacggcaagcugaaccggcugaucgggaagaccaacgagaaguuccaccagaucgagaaggaguucuccgagguggagggccgcauccaggaccuggagaaguacgucgaggacaccaagaucgaccuguggagcuacaacgccgagcuccugguggcccuggagaaccagcacacgaucgaccucaccgacuccgagaugaacaagcuguucgagcggaccaagaagcagcugcgcgagaacgccgaggacauggggaacggcugcuucaagaucuaccacaagugcgacaacgcgugcaucgggagcauccgcaacggcaccuacgaccacgacguguaccgggacgaggcccucaacaaccgcuuccagaucaagggcgucgagcugaaguccggguacaaggacuggauccuguggaucagcuucgccaucuccugcuuccuccugugcguggcccugcucggcuucaucaugugggccugccagaaggggaacauccggugcaacaucugcaucuga

SEQ ID NO: 65868 - RNA, 1701 nt, Artificial Sequence; identical to SEQ ID NO: 64657
  derived and/or modified CDS sequence (opt1) from hemagglutinin__InfluenzaA__ABU92697

SEQ ID NO: 65869 - RNA, 1701 nt, Artificial Sequence; identical to SEQ ID NO: 64267
  derived and/or modified CDS sequence (opt1) from hemagglutinin__InfluenzaA__ABU92698

SEQ ID NO: 65870 - RNA, 1701 nt, Artificial Sequence
  derived and/or modified CDS sequence (opt1) from hemagglutinin__InfluenzaA__ABU92699
augaagaccaucaucgcccugagcuacauccucugccugguguucgcccagaagcugcccggcaacgacaacuccaccgcgacgcucugccuggggcaccacgccgucccgaacggcaccaucgugaagaccaucaccaacgaccagaucgaggugacgaacgccaccgagcugguccagagcuccagcaccgggggcaucugcgacagcccccaccagauccucgacggggagaacugcacccugaucgacgcccugcucggcgacccccagugcgacggcuuccagaacaagaagugggaccuguucguggagcgcagcaaggccuacuccaacugcuaccccuacgacgugccggacuacgcgagccugcggucccucgucgccagcuccgggacgcuggaguucaacaacgagagcuucaacugggccggcgugacccagaacgggaccuccagcgccugcaagcgccgguccaacaacagcuucuucucccgccugaacuggcucacccaccugaaguucaaguaccccgcgcugaacgugacgaugcccaacaacgagaaguucgacaagcucuacaucuggggcguccaccaccccgggaccgacaacgaccagaucuuccuguacgcccaggccagcggccggaucaccguguccaccaagcgcagccagcagacggugaucccgaacaucggcagccggccccgcguccggaacauccccucccgcaucagcaucuacuggaccaucgugaagcccggggacauccugcucaucaacuccaccggcaaccugaucgccccgcggggguacuucaagauccgcagcggcaaguccagcaucaugcgguccgacgcccccaucggcaagugcaacagcgagugcaucacccccaacggguccauccccaacgacaagccguuccagaacgugaaccgcaucacguacggcgcgugcccccgguacgucaagcagaacacccugaagcucgccaccgggaugcgcaacgugcccgagaagcagacccggggcaucuucggggccaucgccggcuucaucgagaacggcugggaggggaugguggacggcugguacggguuccgccaccagaacagcgagggcaucgggcaggccgcggaccugaaguccacgcaggccgccaucgaccagaucaacggcaagcugaaccggcucaucggcaagaccaacgagaaguuccaccagaucgagaaggaguucagcgaggucgaggggcgcauccaggaccuggagaaguacguggaggacaccaagaucgaccugugguccuacaacgccgagcuccugguggcccuggagaaccagcacaccaucgaccucacggacagcgagaugaacaagcuguucgagaagaccaagaagcagcugcgggagaacgcggaggacaugggcaacgggugcuucaagaucuaccacaagugcgacaacgccugcaucggcuccauccgcaacgggaccuacgaccacgacgucuaccgcgacgaggcccucaacaaccgguuccagaucaagggcguggagcugaaguccggcuacaaggacuggauccuguggaucuccuucgccaucagcugcuuccuccugugcguggcccugcucggguucaucaugugggcgugccagaagggcaacauccgcugcaacaucugcaucuga

SEQ ID NO: 65871 - RNA, 1701 nt, Artificial Sequence
  derived and/or modified CDS sequence (opt1) from hemagglutinin__InfluenzaA__ABU92700
augaagaccaucaucgcccugagcuacauccucugccugguguucgcccagaagcugcccgagaacgacaacuccaccgcgacgcucugccugggccaccacgccgucccgaacgggaccaucgugaagaccaucaccaacgaccagaucgaggugacgaacgccaccgagcugguccagagcuccagcaccggcgggaucugcgacagcccccaccagauccucgacggcgagaacugcacccugaucgacgcccugcucggggacccccagugcgacggcuuccagaacaagaagugggaccuguucguggagcgcagcaaggccuacuccaacugcuaccccuacgacgugccggacuacgcgagccugcggucccucgucgccagcuccggcacgcuggaguucaacaacgagagcuucaacuggaccggggugacccagaacggcaccuccagcgccugcaagcgccgguccaacaacagcuucuucucccgccugaacuggcucacgcaccugaaguucaaguaccccgcccugaacgugaccaugcccaacaacgagcgguucgacaagcucuacaucuggggcguccaccaccccgggaccgacaacgaccagaucuuccuguacgcgcaggccagcgggcgcaucaccguguccacgaagcggagccagcagaccgugaucccgaacaucggcagccgcccccggguccgcaacauccccucccggaucagcaucuacuggaccaucgugaagcccggcgacauccugcucaucaacuccaccgggaaccugaucgccccgcgcggcuacuucaagauccggagcgggaaguccagcaucaugcgcuccgacgcccccaucggcaagugcaacagcgagugcaucacgcccaacggcuccauccccaacgacaagccguuccagaacgugaaccggaucaccuacggggccugcccccgcuacgucaagcagaacacccugaagcucgcgaccggcaugcggaacgugcccgagaagcagacgcgcgggaucuucggcgccaucgccggguucaucgagaacggcugggagggcaugguggacgggugguacggcuuccggcaccagaacagcgaggggaucggccaggccgccgaccugaaguccacccaggcggccaucgaccagaucaacgggaagcugaaccgccucaucggcaagaccaacgagaaguuccaccagaucgagaaggaguucagcgaggucgagggccggauccaggaccuggagaaguacguggaggacaccaagaucgaccugugguccuacaacgccgagcuccugguggcccuggagaaccagcacacgaucgaccucaccgacagcgagaugaacaagcuguucgagaagaccaagaagcagcugcgcgagaacgccgaggacauggggaacggcugcuucaagaucuaccacaagugcgacaacgcgugcaucggguccauccgcaacggcaccuacgaccacgacgucuaccgggacgaggcccucaacaaccgcuuccagaucaaggggguggagcugaaguccggcuacaaggacuggauccuguggaucuccuucgccaucagcugcuuccuccugugcguggcccugcucggcuucaucaugugggccugccagaaggggaacauccggugcaacaucugcaucuga

SEQ ID NO: 65872 - RNA, 1701 nt, Artificial Sequence
  derived and/or modified CDS sequence (opt1) from hemagglutinin__InfluenzaA__ABU92701
augaagaccaucaucgcccugagcuacauccucugccugguguucgcccagaagcugcccgagaacgacaacuccaccgcgacgcucugccugggccaccacgccgucccgaacgggaccaucgugaagaccaucaccaacgaccagaucgaggugacgaacgccaccgagcugguccagagcuccagcaccggcgggaucugcgacagcccccaccagauccucgacggcgagaacugcacccugaucgacgcccugcucggggacccccagugcgacggcuuccagaacaagaagugggaccuguucguggagcgcagcaaggccuacuccaacugcuaccccuacgacgugccggacuacgcgagccugcggucccucgucgccagcuccggcacgcuggaguucaacaacgagagcuucaacuggaccggggugacccagaacggcaccuccagcgccugcaagcgccgguccaacaacagcuucuucucccgccugaacuggcucacgcaccugaaguucaaguaccccgcccugaacgugaccaugcccaacaacgagcgguucgacaagcucuacaucuggggcguccaccaccccgggaccgacaacgaccagaucuuccuguacgcgcaggccagcgggcgcaucaccguguccacgaagcggagccagcagaccgugaucccgaacaucggcagccgcccccggguccgcaacauccccucccggaucagcaucuacuggaccaucgugaagcccggcgacauccugcucaucaacuccaccgggaaccugaucgccccgcgcggcuacuucaagauccggagcgggaaguccagcaucaugcgcuccgacgcccccaucggcaagugcaacagcgagugcaucacgcccaacggcuccauccccaacgacaagccguuccagaacgugaaccggaucaccuacggggccugcccccgcuacgucaagcagaacacccugaagcucgcgaccggcaugcggaacgugcccgagaagcagacgcgcgggaucuucggcgccaucgccggguucaucgagaacggcugggagggcaugguggacgggugguacggcuuccggcaccagaacagcgaggggaucggccaggccgccgaccugaaguccacccaggcggccaucgaccagaucaacgggaagcugaaccgccucaucggcaagaccaacgagaaguuccaccagaucgagaaggaguucagcgaggucgagggccggauccaggaccuggagaaguacguggaggacaccaagaucgaccugugguccuacaacgccgagcuccugguggcccuggagaaccagcacacgaucgaccucaccgacagcgagaugaacaagcuguucgagaagaccaagaagcagcugcgcgagaacgccgaggacauggggaacggcugcuucaagaucuaccacaagugcgacaacgcgugcaucggguccauccgcaacggcaccuacgaccacgacgucuaccgggacgaggcccucaacaaccgccugcagaucaaggggguggagcugaaguccggcuacaaggacuggauccucuggaucuccuucgccaucagcugcuuccugcugugcguggcccuccugggcuucaucaugugggccugccagaaggggaacauccggugcaacaucugcaucuga

SEQ ID NO: 65873 - RNA, 1701 nt, Artificial Sequence; identical to SEQ ID NO: 64636
  derived and/or modified CDS sequence (opt1) from hemagglutinin__InfluenzaA__ABU92702

SEQ ID NO: 65874 - RNA, 1701 nt, Artificial Sequence; identical to SEQ ID NO: 65852
  derived and/or modified CDS sequence (opt1) from hemagglutinin__InfluenzaA__ABU92703

SEQ ID NO: 65875 - RNA, 1701 nt, Artificial Sequence
  derived and/or modified CDS sequence (opt1) from hemagglutinin__InfluenzaA__ABU92704
augaagaccaucaucgcccugagcuacauccucugccugguguucgcccagaagcugcccggcaacgacaacuccaccgcgacgcucugccuggggcaccacgccgucccgaacggcaccaucgugaagaccaucaccaacgaccagaucgaggugacgaacgccaccgagcugguccagagcuccagcaccgggggcaucugcgacagcccccaccagauccucgacggggagaacugcacccugaucgacgcccugcucggcgacccccagugcgacggcuuccagaacaagaagugggaccuguucguggagcgcaacaaggccuacagcaacugcuaccccuacgacgugccggacuacgcgucccugcggagccucgucgccuccagcgggacgcuggaguucaacaacgaguccuucaacuggaccggcgugacccagaacgggaccagcuccgccugcaagcgccggagcaacaacuccuucuucagccgccugaacuggcucacgcaccugaaguucaaguaccccgcccugaacgugaccaugcccaacaacgagaaguucgacaagcucuacaucuggggcguccaccaccccgggaccgacaacgaccagaucuuccuguacgcgcaggccuccggccggaucaccgugagcacgaagcgcucccagcagaccgugaucccgaacaucggcagccggccccgcguccggaacauccccagccgcaucuccaucuacuggaccaucgugaagcccggggacauccugcucaucaacagcaccggcaaccugaucgccccgcggggguacuucaagauccgcuccggcaagagcuccaucaugcggagcgacgcccccaucggcaagugcaacuccgagugcaucacgcccaacgggagcauccccaacgacaagccguuccagaacgugaaccgcaucaccuacggcgccugcccccgguacgucaagcagaacacccugaagcucgcgaccgggaugcgcaacgugcccgagaagcagacgcggggcaucuucggggccaucgccggcuucaucgagaacggcugggaggggaugguggacggcugguacggguuccgccaccagaacuccgagggcaucgggcaggccgccgaccugaaguccacccaggcggccaucgaccagaucaacggcaagcugaaccggcucaucggcaagaccaacgagaaguuccaccagaucgagaaggaguucuccgaggucgaggggcgcauccaggaccuggagaaguacguggaggacaccaagaucgaccuguggagcuacaacgccgagcuccugguggcccuggagaaccagcacacgaucgaccucaccgacuccgagaugaacaagcuguucgagaagaccaagaagcagcugcgggagaacgccgaggacaugggcaacgggugcuucaagaucuaccacaagugcgacaacgcgugcaucggcagcauccgcaacgggaccuacgaccacgacgucuaccgcgacgaggcccucaacaaccgguuccagaucaagggcguggagcugaaguccggcuacaaggacuggauccuguggaucagcuucgccaucuccugcuuccuccugugcguggcccugcucggguucaucaugugggccugccagaagggcaacauccgcugcaacaucugcaucuga

SEQ ID NO: 65876 - RNA, 1701 nt, Artificial Sequence
  derived and/or modified CDS sequence (opt1) from hemagglutinin__InfluenzaA__ABU92705
augaagaccaucaucgcccugagcuacauccucugccugguguucgcccagaagcugcccggcaacgacaacuccaccgcgacgcucugccuggggcaccacgccgucccgaacggcaccaucgugaagaccaucaccaacgaccagaucgaggugacgaacgccaccgagcugguccagagcuccagcaccgggggcaucugcgacagcccccaccagauccucgacggggagaacugcacccugaucgacgcccugcucggcgacccccagugcgacggcuuccagaacaagaagugggaccuguucguggagcgcuccaaggccuacuccaacugcuaccccuacgacgugccggacuacgcgagccugcggucccucaucgccagcuccgggacgcuggaguucaacaacgagagcuucaacuggaccggcgucacccagaacgggaccuccagcgccugcaagcgccgguccaacaacagcuucuucucccgccugaacuggcucacgcaccugaaguucaaguaccccgcccugaacgugaccaugcccaacaacgaggaguucgacaagcucuacaucuggggcgugcaccaccccgggaccgacaacgaccagaucagccuguacgcgcaggccccgggccggaucaccgucuccacgaagcgcagccagcagaccgugauccccaacaucggcagccggccccgcgugcgggacauccccucccgcaucagcaucuacuggaccaucgucaagccgggggacauccugcucaucaacuccaccggcaaccugaucgcgccccggggguacuucaagauccgcagcggcaaguccagcaucaugcgguccgacgcccccaucggcaagugcaagagcgagugcaucacgcccaacggguccaucccgaacgacaagcccuuccagaacgugaaccgcaucaccuacggcgccugcccccgguacgugaagcagaacacccugaagcucgccaccgggaugcgcaacguccccgagaagcagacgcggggcaucuucggggccaucgccggcuucaucgagaacggcugggaggggaugguggacggcugguacggguuccgccaccagaacagcgagggcaucgggcaggccgccgaccugaaguccacccaggcggccaucgaccagaucaacggcaagcugaaccggcucaucggcaagaccaacgagaaguuccaccagaucgagaaggaguucagcgagguggaggggcgcauccaggaccuggagaaguacgucgaggacaccaagaucgaccugugguccuacaacgccgagcuccugguggcccuggagaaccagcacacgaucgaccucaccgacagcgagaugaacaagcuguucgagcggaccaagaagcagcugcgcgagaacgccgaggacaugggcaacgggugcuucaagaucuaccacaagugcgacaacgcgugcaucggcuccauccgcaacgggaccuacgaccacgacguguaccgggacgaggcccucaacaaccgcuuccggaucaagagcgucgagcugaaguccggcuacaaggacuggauccuguggaucagcuucgccaucuccugcuuccuccugugcguggcccugcucggcuucaucaugugggccugccagaaggggaacauccgcugcaacaucugcaucuga

SEQ ID NO: 65877 - RNA, 1701 nt, Artificial Sequence; identical to SEQ ID NO: 64097
  derived and/or modified CDS sequence (opt1) from hemagglutinin__InfluenzaA__ABU92706

SEQ ID NO: 65878 - RNA, 1701 nt, Artificial Sequence; identical to SEQ ID NO: 65786
  derived and/or modified CDS sequence (opt1) from hemagglutinin__InfluenzaA__ABU92707

SEQ ID NO: 65879 - RNA, 1701 nt, Artificial Sequence; identical to SEQ ID NO: 65786
  derived and/or modified CDS sequence (opt1) from hemagglutinin__InfluenzaA__ABU92708

SEQ ID NO: 65880 - RNA, 1701 nt, Artificial Sequence
  derived and/or modified CDS sequence (opt1) from hemagglutinin__InfluenzaA__ABU92709
augaagaccaucaucgcccugagcuacauccucugccugguguucgcccagaagcugcccggcaacgacaacuccaccgcgacgcucugccuggggcaccacgccgucccgaacggcaccaucgugaagaccaucaccaacgaccagaucgaggugacgaacgccaccgagcugguccagagcuccagcaccgggggcaucugcgacagcccccaccagauccucgacggggagaacugcacccugaucgacgcccugcucggcgacccccagugcgacggcuuccagaacaagaagugggaccuguucguggagcgcagcaaggccuacuccaacugcuaccccuacgacgugccggacuacgcgagccugcggucccucgucgccagcuccgggacgcuggaguucaacaacgagagcuucaacugggccggcgugacccagaacgggaccuccagcgccugcaagcgccgguccaacaagagcuucuucucccgccugaacuggcucacccaccugaaguacaaguaccccgcgcugaacgugacgaugcccaacaacgagaaguucgacaagcucuacaucuggggcguccaccaccccgggaccgacagcgaccagaucucccuguacgcccaggccagcggccggaucaccgugagcaccaagcgcucccagcagacggugaucccgaacaucggcagccggccccgcguccgggacguguccagccgcaucuccaucuacuggaccaucgugaagcccggggacauccugcucaucaacagcaccggcaaccugaucgcgccccggggguacuucaagauccgcuccggcaagagcuccaucaugcggagcgacgccccgaucggcaagugcaacuccgagugcaucacccccaacgggagcauccccaacgacaagcccuuccagaacgucaaccgcaucacguacggcgccugcccgcgguacgugaagcagaacacccugaagcucgccaccgggaugcgcaacgugcccgagaagcagacccggggcaucuucggggccaucgccggcuucaucgagaacggcugggaggggauggucgacggcugguacggguuccgccaccagaacuccgagggcacggggcaggccgcggaccugaaguccacccaggccgccaucaaccagaucaacggcaagcugaaccggcucaucggcaagaccaacgagaaguuccaccagaucgagaaggaguucuccgagguggaggggcgcauccaggaccuggagaaguacguggaggacaccaagaucgaccuguggagcuacaacgccgagcuccuggucgcccuggagaaccagcacacgaucgaccucaccgacuccgagaugaacaagcuguucgagcggaccaagaagcagcugcgcgagaacgcggaggacaugggcaacgggugcuucaagaucuaccacaagugcgacaacgccugcaucgagagcauccgcaacggcaccuacgaccacgacguguaccgggacgaggcccucaacaaccgcuuccagaucaaggggguggagcugaaguccggcuacaaggacuggauccuguggaucagcuucgccaucagcugcuuccuccugugcgucgcccugcucggcuucaucaugugggcgugccagaaggggaacauccggugcaacaucugcaucuga

SEQ ID NO: 65881 - RNA, 1701 nt, Artificial Sequence; identical to SEQ ID NO: 64075
  derived and/or modified CDS sequence (opt1) from hemagglutinin__InfluenzaA__ABU92710

SEQ ID NO: 65882 - RNA, 1701 nt, Artificial Sequence; identical to SEQ ID NO: 64097
  derived and/or modified CDS sequence (opt1) from hemagglutinin__InfluenzaA__ABU92711

SEQ ID NO: 65883 - RNA, 1701 nt, Artificial Sequence; identical to SEQ ID NO: 64097
  derived and/or modified CDS sequence (opt1) from hemagglutinin__InfluenzaA__ABU92712

SEQ ID NO: 65884 - RNA, 1701 nt, Artificial Sequence; identical to SEQ ID NO: 65786
  derived and/or modified CDS sequence (opt1) from hemagglutinin__InfluenzaA__ABU92713

SEQ ID NO: 65885 - RNA, 1701 nt, Artificial Sequence; identical to SEQ ID NO: 65786
  derived and/or modified CDS sequence (opt1) from hemagglutinin__InfluenzaA__ABU92714

SEQ ID NO: 65886 - RNA, 1701 nt, Artificial Sequence
  derived and/or modified CDS sequence (opt1) from hemagglutinin__InfluenzaA__ABU92715
augaagaccaucaucgcccugagcuacauccucugccugguguucgcccagaagcugcccggcaacgacaacuccaccgcgacgcucugccuggggcaccacgccgucccgaacggcaccaucgugaagaccaucaccaacgaccagaucgaggugacgaacgccaccgagcugguccagaucagcuccaccggggagaucugcgacagcccccaccagauccucgacggcgagaacugcacccugaucgacgcccugcucggggacccccagugcgacggcuuccagaacaagaagugggaccuguucguggagcgcuccaaggccuacagcaacugcuaccccuacgacgugccggacuacgcgucccugcggagccucgucgccuccagcggcacgcuggaguucaacaacgaguccuucgacuggaccggggugacccagaacggcaccagcuccgccugcaagcgccggagcaacaaguccuucuucagccgccugaacuggcucacgcaccugaaguacaaguaccccgcccugaacgugaccaugcccaacaacgagaaguucgagaagcucuacaucuggggcguccaccaccccgggaccgacuccgaccagaucaaccuguacgcgcaggccagcgggcggaucaccguguccacgaagcgcagccagcagaccgugaucccgaacaucggcagccggccccgcguccgggacguguccagccgcaucuccaucuacuggaccaucgugaagcccggcgacauccugcucaucaacagcaccgggaaccugaucgcgccccggggcuacuucaagauccgcuccggcaagagcuccaucaugcggagcgacgccccgaucgggaagugcaacuccgagugcaucacgcccaacggcagcauccccaacgacaagcccuuccagaacgucaaccgcaucaccuacggggccugcccgcgguacgugaagcagaacacccugaagcucgccaccggcaugcgcaacgugcccgagaagcagacgcgggggaucuucggcgccaucgccggguucaucgagaacggcugggagggcauggucgacgggugguacggcuuccgccaccagaacuccgaggggaccggccaggccgccgaccucaagagcacccaggcggccaucaaccagaucaacgggaagcugaaccggcugaucggcaagaccaacgagaaguuccaccagaucgagaaggaguucuccgagguggagggccgcauccaggaccuggagaaguacguggaggacacgaagaucgaccuguggagcuacaacgccgagcuccuggucgcccuggagaaccagcacaccaucgaccucaccgacuccgagaugaacaagcuguucgagcggaccaagaagcagcugcgcgagaacgccgaggacauggggaacggcugcuucaagaucuaccacaagugcgacaacgcgugcaucgggagcauccgcaacggcacguacgaccacgacguguaccgggacgaggcccucaacaaccgcuuccagaucaaggggguggagcugaaguccggcuacaaggacuggauccuguggaucagcuucgccaucuccugcuuccuccugugcgucgcccugcucggcuucaucaugugggccugccagaaggggaacauccggugcaacaucugcaucuga

SEQ ID NO: 65887 - RNA, 1701 nt, Artificial Sequence; identical to SEQ ID NO: 65786
  derived and/or modified CDS sequence (opt1) from hemagglutinin__InfluenzaA__ABU92716

SEQ ID NO: 65888 - RNA, 1701 nt, Artificial Sequence; identical to SEQ ID NO: 65786
  derived and/or modified CDS sequence (opt1) from hemagglutinin__InfluenzaA__ABU92717

SEQ ID NO: 65889 - RNA, 1701 nt, Artificial Sequence; identical to SEQ ID NO: 64097
  derived and/or modified CDS sequence (opt1) from hemagglutinin__InfluenzaA__ABU92718

SEQ ID NO: 65890 - RNA, 1701 nt, Artificial Sequence; identical to SEQ ID NO: 64097
  derived and/or modified CDS sequence (opt1) from hemagglutinin__InfluenzaA__ABU92719

SEQ ID NO: 65891 - RNA, 1701 nt, Artificial Sequence
  derived and/or modified CDS sequence (opt1) from hemagglutinin__InfluenzaA__ABU92720
augaagaccaucaucgcccugagcuacauccucugccugguguucgcccagaagcugcccggcaacgacaacuccaccgcgacgcucugccuggggcaccacgccgucccgaacggcaccaucgugaagaccaucaccaacgaccagaucgaggugacgaacgccaccgagcugguccagaucagcuccaccggggagaucugcgacagcccccaccagauccucgacggcgagaacugcacccugaucgacgcccugcucggggacccccagugcgacggcuuccagaacaagaagugggaccuguucguggagcgcuccaaggccuacagcaacugcuaccccuacgacgugccggacuacuccagccugcggucccucgucgcgagcuccggcacgcuggaguucaacaacgagagcuucgacuggaccggggugacccagaacggcaccuccagcgccugcaagcgccgguccgacaagagcuucuucucccgccugaacuggcucacgcaccugaaguacaaguaccccgcccugaacgugaccaugcccaacaacgagaaguucgacaagcucuacaucuggggcguccaccaccccgggaccgacagcgaccagaucucccuguacgcccaggcgagcgggcggaucaccgugagcacgaagcgcucccagcagaccgugaucccgaacaucggcagccggccccgcguccgggacguguccagccgcaucuccaucuacuggaccaucgugaagcccggcgacauccugcucaucaacagcaccgggaaccugaucgcgccccggggcuacuucaagauccgcuccggcaagagcuccaucaugcggagcgacgccccgaucgggaagugcaacuccgagugcaucacgcccaacggcagcauccccaacgacaagcccuuccagaacgucaaccgcaucaccuacggggccugcccgcgguacgugaagcagaacacccugaagcucgccaccggcaugcgcaacgugcccgagaagcagacgcgggggaucuucggcgccaucgccggguucaucgagaacggcugggagggcauggucgacgggugguacggcuuccgccaccagaacuccgaggggaccggccaggccgccgaccucaagagcacccaggccgcgaucaaccagaucaacgggaagcugaaccggcugaucggcaagaccaacgagaaguuccaccagaucgagaaggaguucuccgagguggagggccgcauccaggaccuggagaaguacguggaggacacgaagaucgaccuguggagcuacaacgccgagcuccuggucgcccuggagaaccagcacaccaucgaccucaccgacuccgagaugaacaagcuguucgagcggaccaagaagcagcugcgcgagaacgccgaggacauggggaacggcugcuucaagaucuaccacaagugcgacaacgccugcaucgggagcauccgcaacggcacguacgaccacgacguguaccgggacgaggcgcucaacaaccgcuuccagaucaaggggguggagcugaaguccggcuacaaggacuggauccuguggaucagcuucgccaucagcugcuuccuccugugcgucgcccugcucggcuucaucaugugggccugccagaaggggaacauccggugcaacaucugcaucuga

SEQ ID NO: 65892 - RNA, 1701 nt, Artificial Sequence
  derived and/or modified CDS sequence (opt1) from hemagglutinin__InfluenzaA__ABU92721
augaagaccaucaucgcccugagcuacauccucugccugguguucgcccagaagcugcccggcaacgacaacuccaccgcgacgcucugccuggggcaccacgccgucccgaacggcaccaucgugaagaccaucaccaacgaccagaucgaggugacgaacgccaccgagcugguccagaucagcuccaccggggagaucugcgacagcccccaccagauccucgacggcgagaacugcacccugaucgacgcccugcucggggacccccagugcgacggcuuccagaacaagaagugggaccuguucguggagcgcuccaaggccuacagcaacugcuaccccuacgacgugccggacuacgcgucccugcggagccucgucgccuccagcggcacgcuggaguucaacaacgaguccuucgacuggaccggggugacccagaacggcaccagcuccgccugcaagcgccggagcgacaaguccuucuucagccgccugaacuggcucacgcaccugaaguacaaguaccccgcccugaacgugaccaugcccaacaacgagaaguucgacaagcucuacaucuggggcguccaccaccccgggaccgacuccgaccagaucagccuguacgcgcaggccuccgggcggaucaccgugagcacgaagcgcagccagcagaccgugaccccgaacaucggcucccggccccgcguccgggacgugagcucccgcaucagcaucuacuggaccaucgugaagcccggcgacauccugcucaucaacuccacggggaaccugaucgcgccccggggcuacuucaagauccgcagcgggaaguccagcaucaugcgguccgacgccccgaucggcaagugcaacagcgagugcaucacccccaacggcuccauccccaacgacaagcccuuccagaacgucaaccgcaucaccuacggggccugcccgcgguacgugaagcagaacacccugaagcucgccacgggcaugcgcaacgugcccgagaagcagacccgggggaucuucggcgccaucgccggguucaucgagaacggcugggagggcauggucgacgggugguacggcuuccgccaccagaacagcgaggggaccggccaggccgccgaccugaaguccacccaggcggccaucaaccagaucaacgggaagcugaaccggcucaucggcaagacgaacgagaaguuccaccagaucgagaaggaguucagcgagguggagggccgcauccaggaccuggagaaguacguggaggacaccaagaucgaccugugguccuacaacgccgagcuccuggucgcccuggagaaccagcacaccaucgaccucaccgacagcgagaugaacaagcuguucgagcggacgaagaagcagcugcgcgagaacgccgaggacauggggaacggcugcuucaagaucuaccacaagugcgacaacgcgugcaucggguccauccgcaacggcaccuacgaccacgacguguaccgggacgaggcccucaacaaccgcuuccagaucaaggggguggagcucaagagcggcuacaaggacuggauccuguggaucuccuucgccaucagcugcuuccugcugugcgucgcccugcucggcuucaucaugugggccugccagaaggggaacauccggugcaacaucugcaucuga

SEQ ID NO: 65893 - RNA, 1701 nt, Artificial Sequence; identical to SEQ ID NO: 65777
  derived and/or modified CDS sequence (opt1) from hemagglutinin__InfluenzaA__ABU92722

SEQ ID NO: 65894 - RNA, 1701 nt, Artificial Sequence; identical to SEQ ID NO: 64097
  derived and/or modified CDS sequence (opt1) from hemagglutinin__InfluenzaA__ABU92723

SEQ ID NO: 65895 - RNA, 1701 nt, Artificial Sequence; identical to SEQ ID NO: 65880
  derived and/or modified CDS sequence (opt1) from hemagglutinin__InfluenzaA__ABU92724

SEQ ID NO: 65896 - RNA, 1701 nt, Artificial Sequence
  derived and/or modified CDS sequence (opt1) from hemagglutinin__InfluenzaA__ABU92725
augaagaccaucaucgcccugagcuacauccucugccugguguucgcccagaagcugcccggcaacgacaacuccaccgcgacgcucugccuggggcaccacgccgucccgaacggcaccaucgugaagaccaucaccaacgaccagaucgaggugacgaacgccaccgagcugguccagagcuccagcaccgggggcaucugcgacagcccccaccagauccucgacggggagaacugcacccugaucgacgcccugcucggcgacccccagugcgacggcuuccagaacaagaagugggaccuguucguggagcgcagcaaggccuacuccaacugcuaccccuacgacgugccggacuacgcgagccugcggucccucgucgccagcuccgggacgcuggaguucaacaacgagagcuucaacuggaccggcgugacccagaacgggaccuccagcgccugcaagcgccgguccaacaagagcuucuucucccgccugaacuggcucacgcaccugaaguacaaguaccccgcccugaacgugaccaugcccaacaacgagaaguucgacaagcucuacaucuggggcguccaccaccccgggaccgacagcgaccagaucaaccuguacgcgcaggccuccggccggaucaccgugagcacgaagcgcagccagcagaccgugaucccgaacaucggcucccggccccgcguccgggacgugcccagccgcaucuccaucuacuggaccaucgugaagcccggggaccugcuccugaucaacagcaccggcaaccugaucgccccgcggggguacuucaagauccgcuccggcaagagcuccaucaugcggagcgacgcccccaucggcaagugcaacuccgagugcaucacgcccaacgggagcauccccaacgacaagccguuccagaacgucaaccgcaucaccuacggcgccugcccccgguacgugaagcagaacacccucaagcuggcgaccgggaugcgcaacgugcccgagaagcagacgcggggcaucuucggggccaucgccggcuucaucgagaacggcugggaggggauggucgacggcugguacggguuccgccaccagaacuccgagggcaccgggcaggccgccgaccugaaguccacccaggcggccaucaaccagaucaacggcaagcucaaccggcugaucggcaagaccaacgagaaguuccaccagaucgagaaggaguucuccgagguggaggggcgcauccaggaccuggagaaguacguggaggacacgaagaucgaccucuggagcuacaacgccgagcugcuggucgcccucgagaaccagcacaccaucgaccugaccgacuccgagaugaacaagcuguucgagcggaccaagaagcagcuccgcgagaacgccgaggacaugggcaacgggugcuucaagaucuaccacaagugcgacaacgcgugcaucggcagcauccgcaacgggacguacgaccacgacguguaccgggacgaggcccugaacaaccgcuuccagaucaagggcguggagcugaaguccggcuacaaggacuggauccucuggaucagcuucgccaucuccugcuuccugcugugcgucgcccuccugggguucaucaugugggccugccagaagggcaacauccggugcaacaucugcaucuga

SEQ ID NO: 65897 - RNA, 1701 nt, Artificial Sequence; identical to SEQ ID NO: 65880
  derived and/or modified CDS sequence (opt1) from hemagglutinin__InfluenzaA__ABU92726

SEQ ID NO: 65898 - RNA, 1701 nt, Artificial Sequence
  derived and/or modified CDS sequence (opt1) from hemagglutinin__InfluenzaA__ABU92727
augaagaccaucaucgcccugagcuacauccucugccugguguucgcccagaagcugcccggcaacgacaacuccaccgcgacgcucugccuggggcaccacgccgucccgaacggcaccaucgugaagaccaucaccaacgaccagaucgaggugacgaacgccaccgagcugguccagagcuccagcaccgggggcaucugcgacagcccccaccagauccucgacggggagaacugcacccugaucgacgcccugcucggcgacccccagugcgacggcuuccagaacaagaagugggaccuguucguggagcgcagcaaggccuacuccaacugcuaccccuacgacgugccggacuacgcgagccugcggucccucaucgccagcuccgggacgcuggaguucaacaacgagagcuucaacuggaccggcgucacccagaacgggaccuccagcgccugcaagcgccgguccaacagcuccuucuucagccgccugaacuggcucacgcaccugaaguucaaguaccccgcccugaacgugaccaugcccaacaacgaggacuucgacaagcucuacaucuggggcgugcaccaccccgggaccgacaacgaccagaucucccuguacgcgcaggccagcggccggaucaccgucagcacgaagcgcucccagcagaccgugaucccgaacaucggcagccggccccgcgugcgggacauccccucccgcaucagcaucuacuggaccaucgucaagcccggggacauccugcucaucaacuccaccggcaaccugaucgccccgcggggguacuucaagauccgcagcggcaaguccagcaucaugcgguccgacgcccccaucggcaagugcaacagcgagugcaucacgcccaacggguccauccccaacgacaagccguuccagaacgugaaccgcaucaccuacggcgccugcccccgguacgugaagcagaacacccugaagcucgcgaccgggaugcgcaacguccccgagaagcagacgcggggcaucuucggggccaucgccggcuucaucgagaacggcugggaggggaugguggacggcugguacggguuccgccaccagaacagcgagggcaucgggcaggccgccgaccugaaguccacccaggcggccaucgaccagaucaacggcaagcugaaccggcucaucggcaagaccaacgagaaguuccaccagaucgagaaggaguucagcgagguggaggggcgcauccaggaccuggagaaguacgucgaggacaccaagaucgaccugugguccuacaacgccgagcuccugguggcccuggagaaccagcacacgaucgaccucaccgacagcgagaugaacaagcuguucgagcggaccaagaagcagcugcgcgagaacgccgaggacaugggcaacgggugcuucaagaucuaccacaagugcgacaacgcgugcaucggcuccauccgcaacgggaccuacgaccacgacguguaccgggacgaggcccucaacaaccgcuuccagaucaagggcgucgagcugaaguccggcuacaaggacuggauccuguggaucuccuucgccaucagcugcuuccuccugugcguggcccugcucggguucaucaugugggccugccagaagggcaacauccggugcaacaucugcaucuga

SEQ ID NO: 65899 - RNA, 1701 nt, Artificial Sequence
  derived and/or modified CDS sequence (opt1) from hemagglutinin__InfluenzaA__ABU92728
augaagaccaucaucgcccugagcuacauccucugccagguguucgcccagaagcugcccggcaacgacaacuccaccgcgacgcugugccucgggcaccacgccgucccgaacggcaccaucgugaagaccaucaccaacgaccagaucgaggugacgaacgccaccgagcugguccagaucagcuccaccggggagaucugcgacagcccccaccagauccuggacggcgagaacugcacccucaucgacgcccugcugggggacccccagugcgacggcuuccagaacaagaagugggaccucuucguggagcgcuccaaggccuacagcaacugcuaccccuacgacgugccggacuacgcgucccugcggagccuggucgccuccagcggcacgcucgaguucaacaacgaguccuucgacuggaccggggugacccagaacggcaccagcuccgccugcaagcgccggagcgacaaguccuucuucagccgccugaacuggcugacgcaccucaaguacaaguaccccgcccugaacgugaccaugcccaacaacgagaaguucgacaagcuguacaucuggggcguccaccaccccgggaccgacaacgaccagaucucccucuacgcgcaggccagcgggcggaucaccguguccacgaagcgcagccagcagaccgugaucccgaacaucggcagccggccccgcguccgggacguguccagccgcaucuccaucuacuggaccaucgugaagcccggcgacauccugcugaucaacagcaccgggaaccucaucgcgccccggggcuacuucaagauccgcuccggcaagagcuccaucaugcggagcgacgccccgaucgggaagugcaacuccgagugcaucacgcccaacggcagcauccccaacgacaagcccuuccagaacgucaaccgcaucaccuacggggccugcccgcgguacgugaagcagaacacccugaagcuggccaccggcaugcgcaacgugcccgagaagcagacgcgggggaucuucggcgccaucgccggguucaucgagaacggcugggagggcauggucgacgggugguacggcuuccgccaccagaacuccgaggggaccggccaggccgccgaccucaagagcacccaggcggccaucaaccagaucaacgggaagcugaaccggcugaucggcaagaccaacgagaaguuccaccagaucgagaaggaguucuccgagguggagggccgcauccaggaccucgagaaguacguggaggacacgaagaucgaccuguggagcuacaacgccgagcugcucgucgcccuggagaaccagcacaccaucgaccugaccgacuccgagaugaacaagcuguucgagcggaccaagaagcagcuccgcgagaacgccgaggacauggggaacggcugcuucaagaucuaccacaagugcgacaacgcgugcaucgggagcauccgcaacggcacguacgaccacgacguguaccgggacgaggcccugaacaaccgcuuccagaucaaggggguggagcucaaguccggcuacaaggacuggauccuguggaucagcuucgccaucuccugcuuccugcucugcgucgcccugcugggcuucaucaugugggccugccagaaggggaacauccggugcaacaucugcaucuga

SEQ ID NO: 65900 - RNA, 1701 nt, Artificial Sequence; identical to SEQ ID NO: 65899
  derived and/or modified CDS sequence (opt1) from hemagglutinin__InfluenzaA__ABU92729

SEQ ID NO: 65901 - RNA, 1701 nt, Artificial Sequence; identical to SEQ ID NO: 65777
  derived and/or modified CDS sequence (opt1) from hemagglutinin__InfluenzaA__ABU92730

SEQ ID NO: 65902 - RNA, 1701 nt, Artificial Sequence
  derived and/or modified CDS sequence (opt1) from hemagglutinin__InfluenzaA__ABU92731
augaagaccaucaucgcccugagcuacauccucugccugguguucgcccagaagcugcccggcaacgacaacuccaccgcgacgcucugccuggggcaccacgccgucccgaacggcaccaucgugaagaccaucaccaacgaccagaucgaggugacgaacgccaccgagcugguccagagcuccagcaccgggggcaucugcgacagcccccaccagauccucgacggggagaacugcacccugaucgacgcccugcucggcgacccccagugcgacggcuuccagaacaagaagugggaccuguucguggagcgcagcaaggccuacuccaacugcuaccccuacgacgugccggacuacgcgagccugcggucccucaucgccagcuccgggacgcuggaguucaacaacgagagcuucaacuggaccggcgucacccagaacgggaccuccagcgccugcaagcgccgguccaacagcuccuucuucagccgccugaacuggcucacgcaccugaaguucaaguaccccgcccugaacgugaccaugcccaacaacgaggaguucgacaagcucuacguguggggcguccaccaccccgggaccuacaacgaccagaucucccuguacgcgcaggccagcggccggaucaccgugagcacgaagcgcucccagcagaccgugaucccgaacaucggcagccggccccgcguccgggacauccccucccgcaucagcaucuacuggaccaucgugaagcccggggacauccugcucaucaacuccaccggcaaccugaucgccccgcggggguacuucaagauccgcagcggcaaguccagcaucaugcgguccgacgcccccaucggcaagugcaacagcgagugcaucacgcccaacggguccauccccaacgacaagccguuccagaacgugaaccgcaucaccuacggcgccugcccccgguacgucaagcagaacacccugaagcucgcgaccgggaugcgcaacgugcccgagaagcagacgcggggcaucuucggggccaucgccggcuucaucgagaacggcugggaggggaugguggacggcugguacggguuccgccaccagaacagcgagggcaucgggcaggccgccgaccugaaguccacccaggcggccaucgaccagaucaacggcaagcugaaccggcucaucggcaagaccaacgagaaguuccaccagaucgagaaggaguucagcgaggucgaggggcgcauccaggaccuggagaaguacguggaggacaccaagaucgaccugugguccuacaacgccgagcuccugguggcccuggagaaccagcacacgaucgaccucaccgacagcgagaugaacaagcuguucgagcggaccaagaagcagcugcgcgagaacgccgaggacaugggcaacgggugcuucaagaucuaccacaagugcgacaacgcgugcaucggcuccauccgcaacgggaccuacgaccacgacgucuaccgggacgaggcccucaacaaccgcuuccagaucaagggcguggagcugaaguccggcuacaaggacuggauccuguggaucuccuucgccaucagcugcuuccuccugugcguggcccugcucggguucaucaugugggccugccagaagggcaacauccggugcaacaucugcaucuga

SEQ ID NO: 65903 - RNA, 1701 nt, Artificial Sequence
  derived and/or modified CDS sequence (opt1) from hemagglutinin__InfluenzaA__ABU92732
augaagaccaucaucgcccugagcuacauccucugccugguguucgcccagaagcugcccggcaacgacaacuccaccgcgacgcucugccuggggcaccacgccgucccgaacggcaccaucgugaagaccaucaccaacgaccagaucgaggugacgaacgccaccgagcugguccagagcuccagcaccgggggcaucugcgacagcccccaccagauccucgacggggagaacugcacccugaucgacgcccugcucggcgacccccagugcgacggcuuccagaacaagaagugggaccuguucguggagcgcagcaaggccuacuccaacugcuaccccuacgacgugccggacuacgcgagccugcggucccucaucgccagcuccgggacgcuggaguucaacaacgagagcuucaacuggaccggcgucacccagaacgggaccuccagcgccugcaagcgccgguccaacagcuccuucuucagccgccugaacuggcucacgcaccugaaguucaaguaccccgcccugaacgugaccaugcccaacaacgaggaguucgacaagcucuacaucuggggcgugcaccaccccgggaccuacaacgaccagaucucccuguacgcgcaggccagcggccggaucaccgucagcacgaagcgcucccagcagaccgugaucccgaacaucggcagccggccccgcgugcgggacauccccucccgcaucagcaucuacuggaccaucgucaagcccggggacauccugcucaucaacuccaccggcaaccugaucgccccgcggggguacuucaagauccgcagcggcaaguccagcaucaugcgguccgacgcccccaucggcaagugcaacagcgagugcaucacgcccaacggguccauccccaacgacaagccguuccagaacgugaaccgcaucaccuacggcgccugcccccgguacgugaagcagaacacccugaagcucgcgaccgggaugcgcaacguccccgagaagcagacgcggggcaucuucggggccaucgccggcuucaucgagaacggcugggaggggaugguggacggcugguacggguuccgccaccagaacagcgagggcaucgggcaggccgccgaccugaaguccacccaggcggccaucgaccagaucaacggcaagcugaaccggcucaucggcaagaccaacgagaaguuccaccagaucgagaaggaguucagcgagguggaggggcgcauccaggaccuggagaaguacgucgaggacaccaagaucgaccugugguccuacaacgccgagcuccugguggcccuggagaaccagcacacgaucgaccucaccgacagcgagaugaacaagcuguucgagcggaccaagaagcagcugcgcgagaacgccgaggacaugggcaacgggugcuucaagaucuaccacaagugcgacaacgcgugcaucggcuccauccgcaacgggaccuacgaccacgacguguaccgggacgaggcccucaacaaccgcuuccagaucaagggcgucgagcugaaguccggcuacaaggacuggauccuguggaucuccuucgccaucagcugcuuccuccugugcguggugcugcucggguucaucaugugggccugccagaagggcaacauccggugcaacaucugcaucuga

SEQ ID NO: 65904 - RNA, 1701 nt, Artificial Sequence
  derived and/or modified CDS sequence (opt1) from hemagglutinin__InfluenzaA__ABU92733
augaagaccaucaucgcccugagcuacauccucugccugguguucgcccagaagcugcccggcaacgacaacuccaccgcgacgcucugccuggggcaccacgccgucccgaacggcaccaucgugaagaccaucaccaacgaccagaucgaggugacgaacgccaccgagcugguccagagcuccagcaccgggggcaucugcgacagcccccaccagauccucgacggggagaacugcacccugaucgacgcccugcucggcgacccccagugcgacggcuuccagaacaagaagugggaccuguucaucgagcgcagcaaggccuacuccaacugcuaccccuacgacgugccggacuacgcgagccugcggucccucguggccagcuccgggacgcuggaguucaacaacgagagcuucaacuggaccggcgucacccagaacgggaccuccagcgccugcaagcgccgguccaacaacagcuucuucucccgccugaacuggcucacgcaccugaaguucaaguaccccgcccugaacgugaccaugcccaacaacgagaaguucgacaagcucuacaucuggggcgugcaccaccccgggaccgacaacgaccagaucagccuguacgcgcaggccuccggccggaucaccgucagcacgaagcgcagccagcagaccgugaucccgaacaucggcucccggccccgcgugcgggacauccccagccgcaucuccaucuacuggaccaucgucaagcccggggacauccugcucaucaacagcaccggcaaccugaucgccccgcggggguacuucaagauccgcuccggcaagagcuccaucaugcggagcgacgcccccaucggcaagugcaacuccgagugcaucacgcccaacgggagcauccccaacgacaagccguuccagaacgugaaccgcaucaccuacggcgccugcccccgguacgugaagcagaacacccugaagcucgcgaccgggaugcgcaacguccccgagaagcagacgcggggcaucuucggggccaucgccggcuucaucgagaacggcugggaggggaugguggacggcugguacggguuccgccaccagaacuccgagggcaucgggcaggccgccgaccugaaguccacccaggcggccaucaaccagaucaacggcaagcugaaccggcucaucggcaagaccaacgagaaguuccaccagaucgagaaggaguucuccgagguggaggggcgcauccaggaccuggagaaguacgucgaggacaccaagguggaccuguggagcuacaacgccgagcuccugguggcccuggagaaccagcacacgaucgaccucaccgacuccgagaugaacaagcuguucgagcggaccaagaagcagcugcgcgagaacgccgaggacaugggcaacgggugcuucaagaucuaccacaagugcgacaacgcgugcaucggcagcauccgcaacgggaccuacaaccacgacgucuaccgggacgaggcccucaacaaccgcuuccagaucaagggcguggagcugaaguccggcuacaaggacuggauccuguggaucagcuucgccaucuccugcuuccuccugugcguggcccugcucggguucaucaugugggccugccagaagggcaacauccggugcaacaucugcaucuga

SEQ ID NO: 65905 - RNA, 1701 nt, Artificial Sequence; identical to SEQ ID NO: 65777
  derived and/or modified CDS sequence (opt1) from hemagglutinin__InfluenzaA__ABU92734

SEQ ID NO: 65906 - RNA, 1701 nt, Artificial Sequence
  derived and/or modified CDS sequence (opt1) from hemagglutinin__InfluenzaA__ABU92735
augaagaccaucaucgcccugagcuacauccucugccugguguucgcccagaagcugcccggcaacgacaacuccaccgcgacgcucugccuggggcaccacgccgucccgaacggcaccaucgugaagaccaucaccaacgaccagaucgaggugacgaacgccaccgagcugguccagagcuccagcaccgggggcaucugcgggagcccccaccagauccucgacggcgagaacugcacccugaucgacgcccugcucggcgacccccagugcgacggguuccagaacaagaagugggaccuguucguggagcgcagcaaggccuacuccaacugcuaccccuacgacgugccggacuacgcgagccugcggucccucgucgccagcuccggcacgcuggaguucaacaacgagagcuucaacuggaccggggugacccagaacggcaccuccagcgccugcaagcgccgguccaacaacagcuucuucucccgccugaacuggcucacgcaccugaaguucaaguaccccgcccugaacgugaccaugcccaacaacgagaaguucgacaagcucuacaucuggggcguccaccaccccgggaccgacaacgaccagaucagccuguacgcgcaggccccggcccggaucaccguguccacgaagcgcagccagcagaccgugauccccaacaucggcagccggccccgcguccgggacauccccucccgcaucagcaucuacuggaccaucgugaagccgggggacauccugcucaucaacuccaccggcaaccugaucgcgccccggggguacuucaagauccugagcggcaaguccagcaucaugcgcuccgacgcccccaucggcaagugcaacagcgagugcaucacgcccaacggguccaucccgaacgacaagcccuuccagaacgugaaccggaucaccuacggcgccugcccccgcuacgucaagcagaacacccucaagcuggccaccgggaugcggaacgugcccgagaagcagacgcgcggcaucuucggggccaucgccggcuucaucgagaacggcugggaggggaugguggacggcugguacggguuccggcaccagaacagcgagggcaucgggcaggccgcggaccugaaguccacccaggccgccaucaaccagaucaacggcaagcucaaccgccugaucggcaagaccaacgagaaguuccaccagaucgagaaggaguucagcgaggucgaggggcggauccaggaccuggagaaguacguggaggacaccaagaucgaccucugguccuacaacgccgagcugcugguggcccucgagaaccagcacacgaucgaccugaccgacagcgagaugaacaagcuguucgagcgcaccaagaagcagcuccgggagaacgcggaggacaugggcaacgggugcuucaagaucuaccacaagugcgacaacgccugcaucggcuccauccgcaacgggaccuacgaccacgacgucuaccgcgacgaggcccugaacaaccgguuccagaucaagggcguggagcugaaguccggcuacaaggacuggauccucuggaucuccuucgccaugagcugcuuccugcugugcguggcccuccugggguucaucaugugggcgugccagaagggcaacauccgcugcaacaucugcaucuga

SEQ ID NO: 65907 - RNA, 1701 nt, Artificial Sequence; identical to SEQ ID NO: 65852
  derived and/or modified CDS sequence (opt1) from hemagglutinin__InfluenzaA__ABU92737

SEQ ID NO: 65908 - RNA, 1701 nt, Artificial Sequence
  derived and/or modified CDS sequence (opt1) from hemagglutinin__InfluenzaA__ABU92738
augaagaccaucaucgcccugagcuacauccucugccugguguucgcccagaagcugcccggcaacgacaacuccaccgcgacgcucugccuggggcaccacgccgucccgaacggcaccaucgugaagaccaucaccaacgaccagaucgaggugacgaacgccaccgagcugguccagagcuccagcaccgggggcaucugcgacagcccccaccagauccucgacggggagaacugcacccugaucgacgcccugcucggcgacccccagugcgacggcuuccagaacaagaagugggaccuguucguggagcgcagcaaggccuacuccaacugcuaccccuacgacgugccggacuacgcgagccugcggucccucaucgccagcuccgggacgcuggaguucaacaacgagagcuucaacuggaccggcgucacccagaacgggaccuccagcgccugcaagcgccgguccaacaacagcuucuucucccgccugaacuggcucacgcaccugaaguucaaguaccccgcccugaacgugaccaugcccaacaacgagaaguucgacaagcucuacaucuggggcgugcaccaccccgggaccgacaacgaccagaucagccuguacgcgcaggccccgggccggaucaccgucuccacgaagcgcagccagcagaccgugauccccaacaucggcagccggccccgcgugcgggacauccccucccgcaucagcaucuacuggaccaucgucaagccgggggacauccugcucaucaacuccaccggcaaccugaucgcgccccggggguacuucaagauccgcagcggcaaguccagcaucaugcgguccgacgcccccaucggcaagugcaacagcgagugcaucacgcccaacggguccaucccgaacgacaagcccuuccagaacgugaaccgcaucaccuacggcgccugcccccgguacgugaagcagaacacccugaagcucgccaccgggaugcgcaacguccccgagaagcagacgcggggcaucuucggggccaucgccggcuucaucgagaacggcugggaggggaugguggacggcugguacggguuccgccaccagaacagcgagggcaucgggcaggccgccgaccugaaguccacccaggcggccaucgaccagaucaacggcaagcugaaccggcucaucggcaagaccaacgagaaguuccaccagaucgagaaggaguucagcgagguggaggggcgcauccaggaccuggagaaguacgucgaggacaccaagaucgaccugugguccuacaacgccgagcuccugguggcccuggagaaccagcacacgaucgaccucaccgacagcgagaugaacaagcuguucgagcggaccaagaagcagcugcgcgagaacgccgaggacaugggcaacgggugcuucaagaucuaccacaagugcgacaacgcgugcaucggcuccauccgcaacgggaccuacgaccacgacguguaccgggacgaggcccucaacaaccgcuuccagaucaagggcgucgagcugaaguccggcuacaaggacuggauccuguggaucuccuucgccaucagcugcuuccuccugugcguggugcugcucggguucaucaugugggccugccagaagggcaacauccggugcaacaucugcaucuga

SEQ ID NO: 65909 - RNA, 1701 nt, Artificial Sequence; identical to SEQ ID NO: 65786
  derived and/or modified CDS sequence (opt1) from hemagglutinin__InfluenzaA__ABU92739

SEQ ID NO: 65910 - RNA, 1701 nt, Artificial Sequence
  derived and/or modified CDS sequence (opt1) from hemagglutinin__InfluenzaA__ABU92740
augaagaccaucaucgcccugagcuacauccucugccugguguucgcccagaagcugcccggcaacgacaacuccaccgcgacgcucugccuggggcaccacgccgucccgaacggcaccaucgugaagaccaucaccaacgaccagaucgaggugacgaacgccaccgagcugguccagagcuccagcaccggggagaucugcgacagcccccaccagauccucgacggcgagaacugcacccugaucgacacgcugcucggggacccccagugcgacggcuuccagaacaagaagugggaccuguucguggagcgcagcaaggccuacuccaacugcuaccccuacgacgugccggacuacgccagccugcggucccucgucgcgagcuccggcacccuggaguucaacaacgagagcuucaacuggaccggggugacccagaacggcacguccagcgccugcaagcgccgguccaacaacagcuucuucucccgccugaacuggcucacccaccugaaguucaaguaccccgcccugaacgugaccaugcccaacaacgagaaguucgacaagcucuacaucuggggcguccaccaccccgggaccgacaacgaccagaucuuccuguacgcccaggcgagcgggcggaucacgguguccaccaagcgcagccagcagaccgugaucccgaacaucggcagccggccccgcguccggaacauccccucccgcaucagcaucuacuggaccaucgugaagcccggcgacauccugcucaucaacuccacggggaaccugaucgccccgcggggcuacuucaagauccgcagcgggaaguccagcaucaugcgguccgacgcccccaucggcaagugcaacagcgagugcaucacccccaacggcuccauccccaacgacaagccguuccagaacgugaaccgcaucaccuacggggccugcccccgguacgucaagcagaacacccugaagcucgccacgggcaugcgcaacgugcccgagaagcagacccgggggaucuucggcgcgaucgccggguucaucgagaacggcugggagggcaugguggacgggugguacggcuuccgccaccagaacagcgaggggaucggccaggccgccgaccugaaguccacccaggccgcgaucaaccagaucaacgggaagcugaaccggcucaucggcaagaccaacgagaaguuccaccagaucgagaaggaguucagcgaggucgagggccgcauccaggaccuggagaaguacguggaggacacgaagaucgaccugugguccuacaacgccgagcuccugguggcccuggagaaccagcacaccaucgaccucaccgacagcgagaugaacaagcuguucgagcggaccaagaagcagcugcgcgagaacgccgaggacauggggaacggcugcuucaagaucuaccacaagugcgacaacgccugcaucggguccauccgcaacggcacguacgaccacgacgucuaccgggacgaggcgcucaacaaccgcuuccagaucaaggggguggagcugaaguccggcuacaaggacuggauccuguggaucuccuucgccaucagcugcuuccuccugugcguggcccugcucggcuucaucaugugggccugccagaaggggaacauccggugcaacaucugcaucuga

SEQ ID NO: 65911 - RNA, 1701 nt, Artificial Sequence
  derived and/or modified CDS sequence (opt1) from hemagglutinin__InfluenzaA__ABU92741
augaagaccaucaucgcccugagcuacauccucugccugguguucgcccagaagcugcccggcaacgacaacuccaccgcgacgcucugccuggggcaccacgccgucccgaacggcaccaucgugaagaccaucaccaacgaccagaucgaggugacgaacgccaccgagcugguccagagcuccagcaccgggggcaucugcgacagcccccaccagauccucgacggggagaacugcacccugaucgacgcccugcucggcgacccccagugcgacggcuuccagaacaagaagugggaccuguucguggagcgcagcaaggccuacuccaacugcuaccccuacgacgugccggacuacgcgagccugcggucccucaucgccagcuccgggacgcuggaguucaacaacgagagcuucaacuggaccggcgucacccagaacgggaccuccagcgccugcaagcgccgguccaacaacagcuucuucucccgccugaacuggcucacgcaccugaaguucaaguaccccgcccugaacgugaccaugcccaacaacgaggaguucgacaagcucuacaucuggggcgugcaccaccccgggaccgacaacgaccagaucagccuguacgcgcaggccccgggccggaucaccgucuccacgaagcgcagccagcagaccgugauccccaacaucggcagccggccccgcgugcgggacauccccucccgcaucagcaucuacuggaccaucgucaagccgggggacauccugcucaucaacuccaccggcaaccugaucgcgccccggggguacuucaagauccgcagcggcaaguccagcaucaugcgguccgacgcccccaucggcaagugcaacagcgagugcaucacgcccaacggguccaucccgaacgacaagcccuuccagaacgugaaccgcaucaccuacggcgccugcccccgguacgugaagcagaacacccugaagcucgccaccgggaugcgcaacguccccgagaagcagacgcggggcaucuucggggccaucgccggcuucaucgagaacggcugggaggggaugguggacggcugguacggguuccgccaccagaacagcgagggcaucgggcaggccgccgaccugaaguccacccaggcggccaucgaccagaucaacggcaagcugaaccggcucaucggcaagaccaacgagaaguuccaccagaucgagaaggaguucagcgagguggaggggcgcauccaggaccuggagaaguacgucgaggacaccaagaucgaccugugguccuacaacgccgagcuccugguggcccuggagaaccagcacacgaucgaccucaccgacagcgagaugaacaagcuguucgagcggaccaagaagcagcugcgcgagaacgccgaggacaugggcaacgggugcuucaagaucuaccacaagugcgacaacgcgugcaucggcuccauccgcaacgggaccuacgaccacgacaucuaccgggacgaggcccucaacaaccgcuuccagaucaagggcguggagcugaaguccggcuacaaggacuggauccuguggaucuccuucgccaucagcugcuuccuccugugcgucgugcugcucggguucaucaugugggccugccagaagggcaacauccggugcaacaucugcaucuga

SEQ ID NO: 65912 - RNA, 1701 nt, Artificial Sequence; identical to SEQ ID NO: 65852
  derived and/or modified CDS sequence (opt1) from hemagglutinin__InfluenzaA__ABU92742

SEQ ID NO: 65913 - RNA, 1701 nt, Artificial Sequence
  derived and/or modified CDS sequence (opt1) from hemagglutinin__InfluenzaA__ABU92743
augaagaccaucaucgcccugagcuacauccucuaccugguguucgcccagaagcugcccgagaacgacaacuccaccgcgacgcucugccugggccaccacgccgucccgaacgggaccaucgugaagaccaucaccaacgaccagaucgaggugacgaacgccaccgagcugguccagagcuccagcaccggcgggaucugcgacagcccccaccagauccucgacggcgagaacugcacccugaucgacgcccugcucggggacccccagugcgacggcuuccagaacaagaagugggaccuguucguggagcgcagcaaggccuacuccaacugcuaccccuacgacgugccggacuacgcgagccugcggucccucgucgccagcuccggcacgcuggaguucaacaacgagagcuucaacuggaccggggugacccagaacggcaccuccagcgccugcaagcgccgguccaacaacagcuucuucucccgccugaacuggcucacgcaccugaaguucaaguaccccgcccugaacgugaccaugcccaacaacgagaaguucgacaagcucuacaucuggggcguccaccaccccgggaccgacaacgaccagaucuuccuguacgcgcaggccagcgggcggaucaccguguccacgaagcgcagccagcagaccgugaucccgaacaucggcagccggccccgcguccggaacauccccucccgcaucagcaucuacuggaccaucgugaagcccggcgacauccugcucaucaacuccaccgggaaccugaucgccccgcggggcuacuucaagauccgcagcgggaaguccagcaucaugcgguccgacgcccccaucggcaagugcaacagcgagugcaucacgcccaacggcuccauccccaacgacaagccguuccagaacgugaaccgcaucaccuacggggccugcccccgguacgucaagcagaacacccugaagcucgcgaccggcaugcgcaacgugcccgagaagcagacgcgggggaucuucggcgccaucgccggguucaucgagaacggcugggagggcaugguggacgggugguacggcuuccgccaccagaacagcgaggggaucggccaggccgccgaccugaaguccacccaggcggccaucgaccagaucaacgggaagcugaaccggcucaucggcaagaccaacgagaaguuccaccagaucgagaaggaguucagcgaggucgagggccgcauccaggaccuggagaaguacguggaggacaccaagaucgaccugugguccuacaacgccgagcuccugguggcccuggagaaccagcacacgaucgaccucaccgacagcgagaugaacaagcuguucgagaagaccaagaagcagcugcgggagaacgccgaggacauggggaacggcugcuucaagaucuaccacaagugcgacaacgcgugcaucggguccauccgcaacggcaccuacgaccacgacgucuaccgcgacgaggcccucaacaaccgguuccagaucaaggggguggagcugaaguccggcuacaaggacuggauccuguggaucuccuucgccaucagcugcuuccuccugugcguggcccugcucggcuucaucaugugggccugccagaaggggaacauccgcugcaacaucugcaucuga

SEQ ID NO: 65914 - RNA, 1701 nt, Artificial Sequence; identical to SEQ ID NO: 65852
  derived and/or modified CDS sequence (opt1) from hemagglutinin__InfluenzaA__ABU92744

SEQ ID NO: 65915 - RNA, 1701 nt, Artificial Sequence
  derived and/or modified CDS sequence (opt1) from hemagglutinin__InfluenzaA__ABU92745
augaagaccaucaucgcccugagcuacauccucugccugguguucgcccagaagcugcccggcaacgacaacuccaccgcgacgcucugccuggggcaccacgccgucccgaacggcaccaucgugaagaccaucaccaacgaccagaucgaggugacgaacgccaccgagcugguccagagcuccagcaccgggggcaucugcgacagcccccaccagauccucgacggggagaacugcacccugaucgacgcccugcucggcgacccccagugcgacggcuuccagaacaagaagugggaccuguucguggagcgcagcaaggccuacuccaacugcuaccccuacgacgugccggacuacgcgagccugcggucccucaucgccagcuccgggacgcuggaguucaacaacgagagcuucaacuggaccggcgucacccagaacgggaccuccagcgccugcaagcgccgguccaacaacagcuucuucucccgccugaacuggcucacgcaccugaaguucaaguaccccgcccugaacgugaccaugcccaacaacgaggaguucgacaagcucuacaucuggggcgugcaccaccccgggaccgacaacgaccagaucagccuguacgcgcaggccccgggccggaucaccgucuccacgaagcgcagccagcagaccgugauccccaacaucggcagccggccccgcgugcgggacauccccucccgcaucagcaucuacuggaccaucgucaagccgggggacauccugcucaucaacuccaccggcaaccugaucgcgccccggggguacuucaagauccgcaucggcaagagcuccaucaugcggagcgacgcccccaucggcaagugcaacuccgagugcaucacgcccaacgggagcaucccgaacgacaagcccuuccagaacgugaaccgcaucaccuacggcgccugcccccgguacgugaagcagaacacccugaagcucgccaccgggaugcgcaacguccccgagaagcagacgcggggcaucuucggggccaucgccggcuucaucgagaacggcugggaggggaugguggacggcugguacggguuccgccaccagaacuccgagggcaucgggcaggccgccgaccugaaguccacccaggcggccaucgaccagaucaacggcaagcugaaccggcucaucggcaagaccaacgagaaguuccaccagaucgagaaggaguucuccgagguggaggggcgcauccaggaccuggagaaguacgucgaggacaccaagaucgaccuguggagcuacaacgccgagcuccugguggcccuggagaaccagcacacgaucgaccucaccgacuccgagaugaacaagcuguucgagcggaccaagaagcagcugcgcgagaacgccgaggacaugggcaacgggugcuucaagaucuaccacaagugcgacaacgcgugcaucggcagcauccgcaacgggaccuacgaccacgacguguaccgggacgaggcccucaacaaccgcuuccagaucaagggcgucgagcugaaguccggcuacaaggacuggauccuguggaucagcuucgccaucuccugcuuccuccugugcguggugcugcucggguucaucaugugggccugccagaagggcaacauccggugcaacaucugcaucuga

SEQ ID NO: 65916 - RNA, 1701 nt, Artificial Sequence; identical to SEQ ID NO: 65852
  derived and/or modified CDS sequence (opt1) from hemagglutinin__InfluenzaA__ABU92746

SEQ ID NO: 65917 - RNA, 1701 nt, Artificial Sequence; identical to SEQ ID NO: 64097
  derived and/or modified CDS sequence (opt1) from hemagglutinin__InfluenzaA__ABU92747

SEQ ID NO: 65918 - RNA, 1701 nt, Artificial Sequence
  derived and/or modified CDS sequence (opt1) from hemagglutinin__InfluenzaA__ABU92748
augaagaccaucaucgcccugagcuacauccucugccugguguucgcccagaagcugcccggcaacgacaacuccaccgcgacgcucugccuggggcaccacgccgucccgaacggcaccaucgugaagaccaucaccaacgaccagaucgaggugacgaacgccaccgagcugguccagagcuccagcaccggggagaucugcgacagcccccaccagauccucgacggcgagaacugcacccugaucgacgcccugcucggggacccccagugcgacggcuuccagaacaagaagugggaccuguucguggagcgcagcaaggccuacuccaacugcuaccccuacgacgugccggacuacgcgagccugcggucccucgucgccagcuccggcacgcuggaguucaacaacgagagcuucaacuggaccggggugacccagaacggcaccuccagcgccugcaagcgccgguccaacaacagcuucuucucccgccugaacuggcucacgcacagcaaguucaaguaccccgcccugaacgugaccaugcccaacaacgagaaguucgacaagcuguacaucuggggcguccaccaccccgggaccgacaacgaccagaccuuccucuacgcgcaggccuccgggcggaucacggugagcaccaagcgcagccagcagaccgugaucccgaacaucggcucccggccccgcguccggaacauccccagccgcaucuccaucuacuggaccaucgugaagcccggcgacauccugcugaucaacagcacggggaaccucaucgccccgcggggcuacuucaagauccgcuccgggaaguccuccaucaugcggagcgacgcccccaucggcaagugcaacuccgagugcaucacccccaacggcagcauccccaacgacaagccguuccagaacgugaaccgcaucaccuacggggccugcccccgguacgucaagcagaacacccugaagcuggcgacgggcaugcgcaacgugcccgagaagcagacccgggggaucuucggcgccaucgccggguucaucgagaacggcugggagggcaugguggacgggugguacggcuuccgccaccagaacuccgaggggaucggccaggccgccgaccucaagagcacccaggcggccaucaaccagaucaacgggaagcugaaccggcugaucggcaagaccaacgagaaguuccaccagaucgagaaggaguucuccgaggucgagggccgcauccaggaccucgagaaguacguggaggacacgaagaucgaccuguggagcuacaacgccgagcugcucguggcccuggagaaccagcacaccaucgaccugaccgacuccgagaugaacaagcuguucgagcggaccaagaagcagcuccgcgagaacgccgaggacauggggaacggcugcuucaagaucuaccacaagugcgacaacgcgugcaucgggagcauccgcaacggcacguacgaccacgacgucuaccgggacgaggcccugaacaaccgcuuccagaucaaggggguggagcucaaguccggcuacaaggacuggauccuguggaucagcuucgccaucuccugcuuccugcucugcgugguccugcugggcuucaucaugugggccugccagaaggggaacauccggugcaacaucugcaucuga

SEQ ID NO: 65919 - RNA, 1701 nt, Artificial Sequence; identical to SEQ ID NO: 64097
  derived and/or modified CDS sequence (opt1) from hemagglutinin__InfluenzaA__ABU92749

SEQ ID NO: 65920 - RNA, 1701 nt, Artificial Sequence
  derived and/or modified CDS sequence (opt1) from hemagglutinin__InfluenzaA__ABU92750
augaagaccaucaucgcccugagcuacauccucugccugguguucgcccagaagcugcccggcaacgacaaccgcaccgcgacgcucugccuggggcaccacgccgucccgaacggcaccaucgugaagaccaucaccaacgaccagaucgaggugacgaacgccaccgagcugguccagaucuccagcaccgggggcaucugcgacagcccccaccagauccucgacggggagaacugcacccugaucgacgcccugcucggcgacccccagugcgacggcuuccagaacaagaagugggaccuguucguggagcggagcaaggccuacuccaacugcuaccccuacgacgugccggacuacgcgagccugcgcucccucgucgccagcuccgggacgcuggaguucaacaacgagagcuucgacuggaccggcgugacccagaacgggaccuccagcgccugcaagcggcgcuccaacaagagcuucuucucccggcugaacuggcucacgcaccugaaguacaaguaccccgcccugaacgugaccaugcccaacaacgagaaguucgacaagcucuacaucuggggcguccaccaccccgggaccgacagcgaccagaucucccuguacgcgcaggccagcggccgcaucaccguguccacgaagcggagccagcagaccgugaucccgaacaucggcagccgcccccggguccgcgacguguccagccggaucuccaucuacuggaccaucgugaagcccggggacauccugcucaucaacagcaccggcaaccugaucgcgccccgcggguacuucaagauccgguccggcaagagcuccaucaugcgcagcgacgccccgaucggcaagugcaacuccgagugcaucacgcccaacgggagcauccccaacgacaagcccuuccagaacgucaaccggaucaccuacggcgccugcccgcgcuacgugaagcagaacacccugaagcucgccaccgggaugcggaacgugcccgagaagcagacgcgcggcaucuucggggccaucgccggcuucaucgagaacggcugggaggggauggucgacggcugguacggguuccggcaccagaacuccgagggcaccgggcaggccgccgaccugaaguccacccaggcggccaucaaccagaucaacggcaagcugaaccgccucaucggcaagaccaacgagaaguuccaccagaucgagaaggaguucuccgagguggaggggcggauccaggaccuggagaaguacguggaggacacgaagaucgaccuguggagcuacaacgccgagcuccuggucgcccuggagaaccagcacaccaucgaccucaccgacuccgagaugaacaagcuguucgagcgcaccaagaagcagcugcgcgagaacgccgaggacaugggcaacgggugcuucaagaucuaccacaagugcgacaacgcgugcaucggcagcauccggaacgggacguacgaccacgacguguaccgcgacgaggcccucaacaaccgguuccagaucaagggcguggagcugaaguccggcuacaaggacuggauccuguggaucagcuucgccaucuccugcuuccuccugugcgucgcccugcucggguucaucaugugggccugccagaagggcaacauccgcugcaacaucugcaucuga

SEQ ID NO: 65921 - RNA, 1701 nt, Artificial Sequence
  derived and/or modified CDS sequence (opt1) from hemagglutinin__InfluenzaA__ABU92751
augaagaccaucaucgcccugagcuacauccucugccugguguucgcccagaagcugcccggcaacgacaacuccaccgcgacgcucugccuggggcaccacgccgucccgaacggcaccaucgugaagaccaucaccaacgaccagaucgaggugacgaacgccaccgagcugguccagagcuccagcaccgggggcaucugcgacagcccccaccagauccucgacggggagaacugcacccugaucgacgcccugcucggcgacccccagugcgacggcuuccagaacaagaagugggaccuguucguggagcgcagcaaggccuacuccaacugcuaccccuacgacgugccggacuacgcgagccugcggucccucgucgccagcuccgggacgcuggaguucaacaacgagagcuucaacuggaccggcgugacccagaacgggaccuccagcgccugcaagcgccgguccaacaagagcuucuucucccgccugaacuggcucacgcaccugaaguacaaguaccccgcccugaacgugaccaugcccaacaacgagaaguucgacaagcucuacaucuggggcguccaccaccccgggaccgacagcgaccagaucucccuguacgcgcaggccagcggccggaucaccgugagcacgaagcgcucccagcagaccgugaucccgaacaucggcagccggccccgcguccgggacguguccagccgcaucuccaucuacuggaccaucgugaagcccggggacauccugcucaucaacagcaccggcaaccugaucgcgccccggggguacuucaagauccgcuccggcaagagcuccaucaugcggagcgacgccccgaucggcaagugcaacuccgagugcaucacgcccaacgggagcauccccaacgacaagcccuuccagaacgucaaccgcaucaccuacggcgccugcccgcgguacgugaagcagaacacccugaagcucgccaccgggaugcgcaacgugcccgagaagcagacgcggggcaucuucggggccaucgccggcuucaucgagaacggcugggaggggauggucgacggcugguacggguuccgccaccagaacuccgagggcaccgggcaggccgccgaccugaaguccacccaggcggccaucaaccagaucaacggcaagcugaaccggcucaucggcaagaccaacgagaaguuccaccagaucgagaaggaguucuccgagguggaggggcgcauccaggaccuggagaaguacguggaggacacgaagaucgaccuguggagcuacaacgccgagcuccuggucgcccuggagaaccagcacaccaucgaccucaccgacuccgagaugaacaagcuguucgagcggaccaagaagcagcugcgcgagaacgccgaggacaugggcaacgggugcuucaagaucuaccacaagugcgacaacgcgugcaucggcagcauccgcaacgggacguacgaccacgacguguaccgggacgaggcccucaacaaccgcuuccagaucaagggcguggagcugaaguccggcuacaaggacuggauccuguggaucagcuucgccaucagcugcuuccuccugugcgucgcccugcucggguucaucaugugggccugccagaagggcaacauccggugcaacaucugcaucuga

SEQ ID NO: 65922 - RNA, 1701 nt, Artificial Sequence; identical to SEQ ID NO: 65786
  derived and/or modified CDS sequence (opt1) from hemagglutinin__InfluenzaA__ABU92752

SEQ ID NO: 65923 - RNA, 1701 nt, Artificial Sequence; identical to SEQ ID NO: 64097
  derived and/or modified CDS sequence (opt1) from hemagglutinin__InfluenzaA__ABU92753

SEQ ID NO: 65924 - RNA, 1701 nt, Artificial Sequence; identical to SEQ ID NO: 65786
  derived and/or modified CDS sequence (opt1) from hemagglutinin__InfluenzaA__ABU92754

SEQ ID NO: 65925 - RNA, 1701 nt, Artificial Sequence
  derived and/or modified CDS sequence (opt1) from hemagglutinin__InfluenzaA__ABU92755
augaagaccaucaucgcccugagcuacauccucugccugguguucgcccagaagcugcccggcaacgacaacgggaccgcgacgcucugccugggccaccacgccgucccgaacgggaccaucgugaagaccaucaccaacgaccagaucgaggugacgaacgccaccgagcugguccaguccagcuccaccggcgggaucugcgacagcccccaccagauccucgacggcgagaacugcacccugaucgacgcccugcucggcgacccccagugcgacggguuccagaacaagaagugggaccuguucguggagcgcuccaaggccuacagcaacugcuaccccuacgacgugccggacuacgcgucccugcggagccucgucgccuccagcggcacgcuggaguucaacaacgaguccuucaacuggaccggggugacccagaacggcaccagcuccgccugcaagcgccggagcaacaaguccuucuucagccgccugaacuggcucacgcaccugaaguucaaguaccccgcccugaacgugaccaugcccaacaacgagaaguucgacaagcucuacaucuggggcguccaccaccccgggaccgacaacgaccagaucucccuguacgcgcaggccagcggccggaucaccguguccacgaagcgcagccagcagaccgugaucccgaacaucgggagccggccccgcguccgggacgugcccucccgcaucagcaucuacuggaccaucgugaagcccggcgacauccugcucaucaacuccaccgggaaccugaucgccccgcggggcuacuucaagauccgcagcggcaaguccagcaucaugcgguccgacgcccccaucgggaagugcaacagcgagugcaucacgcccaacggcuccauccccaacgacaagccguuccagaacgucaaccgcaucaccuacggggccugcccccgguacgugaagcagaacacccugaagcucgcgaccggcaugcgcaacgugcccgagaagcagacgcgggggaucuucggcgccaucgccggcuucaucgagaacgggugggagggcauggucgacgggugguacggcuuccgccaccagaacgccgaggggaccggccaggccgcggaccucaagagcacccaggccgccaucaaccagaucaacggcaagcugaaccggcugaucgggaagaccaacgagaaguuccaccagaucgagaaggaguucuccgagguggagggccgcauccaggaccuggagaaguacguggaggacacgaagaucgaccuguggagcuacaacgccgagcuccuggucgcccuggagaaccagcacaccaucgaccucaccgacuccgagaugaacaagcuguucgagcggaccaagaagcagcugcgcgagaacgcggaggacauggggaacggcugcuucaagaucuaccacaagugcgacaacgccugcaucgggagcauccgcaacggcacguacgaccacaacguguaccgggacgaggcccucaacaaccgcuuccagaucaagggcguggagcugaaguccggguacaaggacuggauccuguggaucagcuucgccaucuccugcuuccuccugugcgucgugcugcucggcuucaucaugugggccugccagaaggggaacauccggugcaacaucugcaucuga

SEQ ID NO: 65926 - RNA, 1701 nt, Artificial Sequence
  derived and/or modified CDS sequence (opt1) from hemagglutinin__InfluenzaA__ABU92756
augaagaccaucaucgcccugagcuacauccucugccugguguucgcccagaagcugcccggcaacgacaacuccaccgcgacgcucugccuggggcaccacgccgucccgaacggcaccaucgugaagaccaucaccaacgaccagaucgaggugacgaacgccaccgagcugguccagaucagcuccaccgggggcaucugcgacagcccccaccagauccucgacggggagaacugcacccugaucgacgcccugcucggcgacccccagugcgacggcuuccagaacaagaagugggaccuguucguggagcgcuccaaggcccacagcaacugcuaccccuacgacgugccggacuacgcgucccugcggagccucgucgccuccagcgggacgcuggaguucaacaacgaguccuucgacuggaccggcgugacccagaacgggaccagcuccgccugcaagcgccggagcaacaaguccuucuucagccgccugaacuggcucacgcaccugaaguacaaguaccccgcccugaacgugaccaugcccaacaacgagaaguucgacaagcucuacaucuggggcguccaccaccccgggaccgacuccgaccagaucagccuguacgcgcaggccuccggccggaucaccgugagcacgaagcgcagccagcagaccgugaucccgaacaucggcucccggccccgcguccgggacgugagcucccgcaucagcaucuacuggaccaucgugaagcccggggacauccugcucaucaacuccaccggcaaccugaucgcgccccggggguacuucaagauccgcagcggcaaguccagcaucaugcgguccgacgccccgaucggcaagugcaacagcgagugcaucacgcccaacggguccauccccaacgacaagcccuuccagaacgucaaccgcaucaccuacggcgccugcccgcgguacgugaagcagaacacccugaagcucgccaccgggaugcgcaacgugcccgagaagcagacgcggggcaucuucggggccaucgccggcuucaucgagaacggcugggaggggauggucgacggcugguacggguuccgccaccagaacagcgagggcaccgggcaggccgccgaccugaaguccacccaggcggccaucaaccagaucaacggcaagcugaaccggcucaucggcaagaccaacgagaaguuccaccagaucgagaaggaguucagcgagguggaggggcgcauccaggaccuggagaaguacguggaggacacgaagaucgaccugugguccuacaacgccgagcuccuggucgcccuggagaaccagcacaccaucgaccucaccgacagcgagaugaacaagcuguucgagcggaccaagaagcagcugcgcgagaacgccgaggacaugggcaacgggugcuucaagaucuaccacaagugcgacaacgcgugcaucggcuccauccgcaacgggacguacgaccacgacguguaccgggacgaggcccucaacaaccgcuuccagaucaagggcguggagcucaagagcggcuacaaggacuggauccuguggaucuccuucgccaucagcugcuuccugcugugcgucgcccugcucggguucaucaugugggccugccagaagggcaacauccggugcaacaucugcaucuga

SEQ ID NO: 65927 - RNA, 1701 nt, Artificial Sequence
  derived and/or modified CDS sequence (opt1) from hemagglutinin__InfluenzaA__ABU92757
augaagaccaucaucgcccugagcuacauccucugccugguguucgcccagaagcugcccggcaacgacaacuccaccgcgacgcucugccuggggcaccacgccgucccgaacggcaccaucgugaagaccaucaccaacgaccagaucgaggugacgaacgccaccgagcugguccagaucagcuccaccggggagaucugcgacagcccccaccagauccucgacggcgagaacugcacccugaucgacgcccugcucggggacccccagugcgacggcuuccagaacaagaagugggaccuguucguggagcgcuccaaggccuacagcaacugcuaccccuacgacgugccggacuacgcgucccugcggagccucgucgccuccagcggcacgcuggaguucaacaacgaguccuucgacuggaccggggugacccagaacggcaccagcuccgccugcaagcgccggagcgacaaguccuucuucagccgccugaacuggcucacgcaccugaaguacaaguaccccgcccugaacgugaccaugcccaacaacgagaaguucgacaagcucuacaucuggggcguccaccaccccgggaccgacuccgaccagaucagccuguacgcgcaggccuccgggcggaucaccgugagcacgaagcgcagccagcagaccgugaucccgaacaucggcucccggccccgcguccgggacgugagcucccgcaucagcaucuacuggaccaucgugaagcccggcgacauccugcucaucaacuccaccgggaaccugaucgcgccccggggcuacuucaagauccgccggggcaagagcuccaucaugcgcagcgacgccccgaucgggaagugcaacuccgagugcaucacgcccaacggcagcauccccaacgacaagcccuuccagaacgucaaccggaucaccuacggggccugcccgcgcuacgugaagcagaacacccugaagcucgccaccggcaugcggaacgugcccgagaagcagacgcgcgggaucuucggcgccaucgccggguucaucgagaacggcugggagggcauggucgacgggugguacggcuuccggcaccagaacuccgaggggaccggccaggccgccgaccucaagagcacccaggcggccaucaaccagaucaacgggaagcugaaccgccugaucggcaagaccaacgagaaguuccaccagaucgagaaggaguucuccgagguggagggccggauccaggaccuggagaaguacguggaggacacgaagaucgaccuguggagcuacaacgccgagcuccuggucgcccuggagaaccagcacaccaucgaccucaccgacuccgagaugaacaagcuguucgagcgcaccaagaagcagcugcgcgagaacgccgaggacauggggaacggcugcuucaagaucuaccacaagugcgacaacgcgugcaucgggagcauccggaacggcacguacgaccacgacguguaccgcgacgaggcccucaacaaccgguuccagaucaaggggguggagcugaaguccggcuacaaggacuggauccuguggaucagcuucgccaucuccugcuuccuccugugcgucgcccugcucggcuucaucaugugggccugccagaaggggaacauccgcugcaacaucugcaucuga

SEQ ID NO: 65928 - RNA, 1701 nt, Artificial Sequence; identical to SEQ ID NO: 65786
  derived and/or modified CDS sequence (opt1) from hemagglutinin__InfluenzaA__ABU92758

SEQ ID NO: 65929 - RNA, 1701 nt, Artificial Sequence; identical to SEQ ID NO: 65786
  derived and/or modified CDS sequence (opt1) from hemagglutinin__InfluenzaA__ABU92759

SEQ ID NO: 65930 - RNA, 1701 nt, Artificial Sequence
  derived and/or modified CDS sequence (opt1) from hemagglutinin__InfluenzaA__ABU92760
augaagaccaucaucgcccugagcuacauccucugccugguguucgcccagaagcugcccggcaacgacaacuccaccgcgacgcucugccuggggcaccacgccgucccgaacggcaccaucgugaagaccaucaccaacgaccagaucgaggugacgaacgccaccgagcugguccagaucagcuccaccggggagaucugcaacagcccccaccagauccucgacggcgagaacugcacccugaucgacgcccugcucggggacccccagugcgacggcuuccagaacaagaagugggaccuguucguggagcgcuccaaggccuacagcaacugcuaccccuacgacgugccggacuacgcgucccugcggagccucgucgccuccagcggcacgcuggaguucaacaacgaguccuucgacuggaccggggugacccagaacggcaccagcuccgccugcaagcgccggagcgacaaguccuucuucagccgccugaacuggcucacgcaccugaaguacaaguaccccgcccugaacgugaccaugcccaacaacgagaaguucgacaagcucuacaucuggggcguccaccaccccgggaccgacuccgaccagaucagccuguacgcgcaggccuccgggcggaucaccgugagcacgaagcgcagccagcagaccgugaucccgaacaucggcucccggccccgcguccgggacgugagcucccgcaucagcaucuacuggaccaucgugaagcccggcgacauccugcucaucaacuccaccgggaaccugaucgcgccccggggcuacuucaagauccgcagcgggaaguccagcaucaugcgguccgacgccccgaucggcaagugcaacagcgagugcaucacgcccaacggcuccauccccaacgacaagcccuuccagaacgucaaccgcaucaccuacggggccugcccgcgguacgugaagcagaacacccugaagcucgccaccggcaugcgcaacgugcccgagaagcagacgcgggggaucuucggcgccaucgccggguucaucgagaacggcugggagggcauggucgacgggugguacggcuuccgccaccagaacagcgaggggaccggccaggccgccgaccugaaguccacccaggcggccaucaaccagaucaacgggaagcugaaccggcucaucggcaagaccaacgagaaguuccaccagaucgagaaggaguucagcgagguggagggccgcauccaggaccuggagaaguacguggaggacacgaagaucgaccugugguccuacaacgccgagcuccuggucgcccuggagaaccagcacaccaucgaccucaccgacagcgagaugaacaagcuguucgagcggaccaagaagcagcugcgcgagaacgccgaggacauggggaacggcugcuucaagaucuaccacaagugcgacaacgcgugcaucggguccauccgcaacggcacguacgaccacgacguguaccgggacgaggcccucaacaaccgcuuccagaucaaggggguggagcucaagagcggcuacaaggacuggauccuguggaucuccuucgccaucagcugcuuccugcugugcgucgcccugcucggcuucaucaugugggccugccagaaggggaacauccggugcaacaucugcaucuga

SEQ ID NO: 65931 - RNA, 1698 nt, Artificial Sequence
  derived and/or modified CDS sequence (opt1) from hemagglutinin__InfluenzaA__ABV29579
augaaggugaagcugcucguccugcugugcaccuucaccgccacguacgccgacaccaucugcaucggcuaccacgcgaacaacagcaccgacaccguggacacggugcucgagaagaacgucaccgugacccacuccgugaaccugcuggaggacagccacaacgggaagcucugccugcugaagggcaucgcgccccuccagcuggggaacugcuccgucgccggcuggauccuggggaacccggagugcgagcuccugaucagcaaggaguccuggagcuacaucguggagacccccaaccccgagaacggcacgugcuaccccggcuacuucgccgacuacgaggagcugcgcgagcagcucuccagcguguccagcuucgagcgguucgagaucuucccgaaggaguccagcuggcccaaccacaccgucaccgggguguccgccagcugcucccacaacggcaagagcuccuucuaccgcaaccugcuguggcucaccgggaagaacggccuguaccccaaccugagcaaguccuacgccaacaacaaggagaaggaggugcucguccuguggggcgugcaccacccgcccaacaucggggaccagcgggcccuguaccacacggagaacgccuacgugagcgucgugagcucccacuacagccgccgguucacccccgagaucgccaagcgccccaaggugcgggaccaggagggccgcaucaacuacuacuggacccuccuggagcccggggacaccaucaucuucgaggcgaacggcaaccugaucgccccgcgguucgccuucgcccucucccgcggguucggcagcggcaucaucacguccaacgcccccauggacgagugcgacgcgaagugccagacgccccagggggccaucaacagcucccugcccuuccagaacguccacccggugaccaucggcgagugccccaaguacgugcggagcaccaagcugcgcauggucaccgggcuccggaacauccccuccauccagagccgcggccuguucggggccaucgccggcuucaucgagggcggguggaccggcaugguggacgggugguacggcuaccaccaccagaacgagcagggguccggcuacgccgcggaccagaaguccacccagaacgccaucaacggcaucaccaacaaggugaacagcgucaucgagaagaugaacacgcaguucaccgccguggggaaggaguucaacaagcuggagaagcggauggagaaccucaacaagaaggucgacgacggcuuccuggacaucuggaccuacaacgccgagcugcucgugcugcuggagaacgagcgcacccucgacuuccacgacagcaacgugaagaaccuguacgagaaggucaagucccagcugaagaacaacgccaaggagaucgggaacggcugcuucgaguucuaccacaagugcaacgacgagugcauggagagcgugaagaacgggacguacgacuaccccaaguacuccgaggagagcaagcucaaccgggagaagaucgacggcgugaagcuggaguccaugggcgucuaccagauccuggcgaucuacagcaccguggccagcucccucgugcugcuggucagccucggggccaucuccuucuggaugugcagcaacggcucccugcagugccgcaucugcaucuga

SEQ ID NO: 65932 - RNA, 1698 nt, Artificial Sequence
  derived and/or modified CDS sequence (opt1) from hemagglutinin__InfluenzaA__ABV29612
augaaggugaagcugcucauccugcugugcaccuucaccgccacguacgccgacaccaucugcaucggcuaccacgcgaacaacagcaccgacaccgucgacacggugcucgagaagaacgugaccgucacccacuccgugaaccugcuggaggacagccacaacgggaagcucugccugcugaagggcaucgcgccccuccagcuggggaacugcuccguggccggcuggauccuggggaacccggagugcgagcuccugaucagcaaggaguccuggagcuacaucgucgagacccccaaccccgagaacggcacgugcuaccccggcuacuucgccgacuacgaggagcugcgcgagcagcucuccagcguguccagcuucgagcgguucgagaucuucccgaaggaguccagcuggcccaaccacaccgugaccggggucuccgccagcugcucccacaacggcaagagcuccuucuaccgcaaccugcuguggcucaccgggaagaacggccuguaccccaaccugagcaaguccuacgccaacaacaaggagaaggaggugcucgugcuguggggcguccaccacccgcccaacaucggggaccagcgggcccuguaccacacggagaacgccuacgugagcguggucagcucccacuacagccgccgguucacccccgagguggccaagcgccccaaggugcgggaccaggagggccgcaucaacuacuacuggacccuccuggagcccggggacaccaucaucuucgaggcgaacggcaaccugaucgccccgcgguucgccuucgcccucucccgcggguucggcagcggcaucaucacguccaacgcccccauggacgagugcgacgcgaagugccagacgccccagggggccaucaacagcucccugcccuuccagaacguccacccggugaccaucggcgagugccccaaguacgugcggagcaccaagcugcgcauggucaccgggcuccggaacauccccuccauccagagccgcggccuguucggggccaucgccggcuucaucgagggcggguggaccggcaugguggacgggugguacggcuaccaccaccagaacgagcagggguccggcuacgccgcggaccagaaguccacccagaacgccaucaacggcaucaccaacaaggugaacagcgucaucgagaagaugaacacgcaguucaccgccguggggaaggaguucaacaagcuggagcggcgcauggagaaccucaacaagaaggucgacgacggcuuccuggacaucuggaccuacaacgccgagcugcucgugcugcuggagaacgagcggacccucgacuuccacgacagcaacgugaagaaccuguacgagaaggucaagucccagcugaagaacaacgccaaggagaucgggaacggcugcuucgaguucuaccacaagugcaacgacgagugcauggagagcgugaagaacgggacguacgacuaccccaaguacuccgaggagagcaagcucaaccgcgagaagaucgacggcgugaagcuggaguccaugggcgucuaccagauccuggcgaucuacagcaccguggccagcucccucgugcugcuggucagccucggggccaucuccuucuggaugugcagcaacggcucccugcagugccggaucugcaucuga

SEQ ID NO: 65933 - RNA, 1698 nt, Artificial Sequence
  derived and/or modified CDS sequence (opt1) from hemagglutinin__InfluenzaA__ABV29634
augaaggugaagcugcucguccugcugugcaccuucaccgccacguacgccgacaccaucugcaucggcuaccacgcgaacaacagcaccgacaccguggacacggugcucgagaagaacgucaccgugacccacuccgugaaccugcuggaggacagccacaacgggaagcucugccugcugaagggcaucgcgccccuccagcuggggaacugcuccgucgccggcuggauccuggggaacccggagugcgagcuccugaucagcaaggaguccuggagcuacaucguggaggcccccucccccgagaacgggaccugcuaccccggcuacuucgccgacuacgaggagcugcgcgagcagcucagcuccgugagcuccuucgagcgguucgagaucuucccgaaggagagcuccuggcccaaccacacggucaccggggugagcgccuccugcagccacaacggcaaguccagcuucuaccgcaaccugcuguggcucaccgggaagaacggccuguaccccaaccuguccaagagcuacgccaacaacaaggagaaggaggugcucguccuguggggcgugcaccacccgcccaacaucggcgaccagcgggcccuguaccacaccgagaacgccuacgugagcgucguguccagccacuacucccgccgguucacgcccgagaucgcgaagcgccccaaggugcgggaccaggagggccgcaucaacuacuacuggacccuccuggagcccggggacaccaucaucuucgaggccaacggcaaccugaucgccccgcgguucgccuucgcccucagccgcggguucggcuccggcaucaucaccagcaacgcgcccaugggggagugcgacgccaagugccagacgccccagggcgccaucaacuccagccugcccuuccagaacguccacccggugaccaucggggagugccccaaguacgugcgguccgccaagcugcgcauggucaccggccuccggaacauccccagcauccagucccgcgggcuguucggcgccaucgcgggcuucaucgagggcggguggaccgggaugguggacggcugguacggguaccaccaccagaacgagcagggcagcggcuacgccgccgaccagaaguccacgcagaacgccaucaacgggaucaccaacaaggugaacagcgucaucgagaagaugaacacccaguucaccgccgugggcaaggaguucaacaagcuggagcggcgcauggagaaccucaacaagaaggucgacgacggguuccuggacaucuggacguacaacgcggagcugcucgugcugcuggagaacgagcggacccucgacuuccacgacuccaacgugaagaaccuguacgagaaggucaagagccagcugaagaacaacgccaaggagaucggcaacgggugcuucgaguucuaccacaagugcaacgacgagugcauggaguccgugaagaacggcaccuacgacuaccccaaguacagcgaggaguccaagcucaaccgcgagaagaucgacggcgugaagcuggagagcaugggggucuaccagauccuggccaucuacagcaccguggccuccagccucgugcugcuggucucccucggcgccaucagcuucuggaugugcuccaacgggagccugcagugccggaucugcaucuga

SEQ ID NO: 65934 - RNA, 1698 nt, Artificial Sequence
  derived and/or modified CDS sequence (opt1) from hemagglutinin__InfluenzaA__ABV29645
augaaggugaagcugcucauccugcugugcaccuucaccgccacguacgccgacaccaucugcaucggcuaccacgcgaacaacagcaccgacaccgucgacacggugcucgagaagaacgugaccgucacccacuccgugaaccugcuggaggacagccacaacgggaagcucugccugcugaagggcaucgcgccccuccagcuggggaacugcuccguggccggcuggauccuggggaacccggagugcgagcuccugaucagcaaggaguccuggagcuacaucgucgagacccccaaccccgagaacggcacgugcuaccccggcuacuucgccgacuacgaggagcugcgcgagcagcucuccagcguguccagcuucgagcgguucgagaucuucccgaaggaguccagcuggcccaaccacaccgugaccggggucuccgccagcugcucccacaacggcaagagcuccuucuaccgcaaccugcuguggcucaccgggaagaacggccuguaccccaaccugagcaaguccuacgccaacaacaaggagaaggaggugcucgugcuguggggcguccaccacccgcccaacaucggggaccagcgggcccuguaccacacggagaacgccuacgugagcguggucagcucccacuacagccgccgguucacccccgagaucgccaagcgccccaaggugcgggaccaggagggccgcaucaacuacuacuggacccuccuggagcccggggacaccaucaucuucgaggcgaacggcaaccugaucgccccgcgguucgccuucgcccucucccgcggguucggcagcggcaucaucacguccaacgcccccauggacgagugcgacgcgaagugccagacgccccagggggccaucaacagcucccugcccuuccagaacgugcacccggucaccaucggcgagugccccaaguacgugcggagcaccaagcugcgcauggugaccgggcuccggaacauccccuccauccagagccgcggccuguucggggccaucgccggcuucaucgagggcggguggaccggcauggucgacgggugguacggcuaccaccaccagaacgagcagggguccggcuacgccgcggaccagaaguccacccagaacgccaucaacggcaucaccaacaaggugaacagcgugaucgagaagaugaacacgcaguucaccgccgucgggaaggaguucaacaagcuggagcggcgcauggagaaccucaacaagaagguggacgacggcuuccuggacaucuggaccuacaacgccgagcugcucguccugcuggagaacgagcggacccucgacuuccacgacagcaacgugaagaaccuguacgagaaggugaagucccagcugaagaacaacgccaaggagaucgggaacggcugcuucgaguucuaccacaagugcaacgacgagugcauggagagcgucaagaacgggacguacgacuaccccaaguacuccgaggagagcaagcucaaccgcgagaagaucgacggcgugaagcuggaguccaugggcguguaccagauccuggcgaucuacagcaccgucgccagcucccucgugcugcuggugagccucggggccaucuccuucuggaugugcagcaacggcucccugcagugccggaucugcaucuga

SEQ ID NO: 65935 - RNA, 1698 nt, Artificial Sequence; identical to SEQ ID NO: 65934
  derived and/or modified CDS sequence (opt1) from hemagglutinin__InfluenzaA__ABV29667

SEQ ID NO: 65936 - RNA, 1698 nt, Artificial Sequence
  derived and/or modified CDS sequence (opt1) from hemagglutinin__InfluenzaA__ABV29678
augaaggugaagcugcucauccugcugugcaccuucaccgccacguacgccgacaccaucugcaucggcuaccacgcgaacaacagcaccgacaccgucgacacggugcucgagaagaacgugaccgucacccacuccgugaaccugcuggaggacagccacaacgggaagcucugccugcugaagggcaucgcgccccuccagcuggggaacugcuccguggccggcuggauccuggggaacccggagugcgagcuccugaucagcaaggaguccuggagcuacaucgucgagacccccaaccccgagaacggcacgugcuaccccggcuacuucgccgacuacgaggagcugcgcgagcagcucuccagcguguccagcuucgagcgguucgagaucuucccgaaggaguccagcuggcccaaccacaccgugaccggggucuccgccagcugcucccacaacggcaagagcuccuucuaccgcaaccugcuguggcucaccgggaagaacggccuguaccccaaccugagcaaguccuacgccaacaacaaggagaaggaggugcucgugcuguggggcguccaccacccgcccaacaucggggaccagcgggcccuguaccacacggagaacgccuacgugagcguggucagcucccacuacagccgccgguucacccccgagaucgccaagcgccccaaggugcgggaccaggagggccgcaucaacuacuacuggacccuccuggagcccggggacaccaucaucuucgaggcgaacggcaaccugaucgccccgcgguucgccuucgcccucucccgcggguucggcagcggcaucaucacguccaacgcccccguggacgagugcgacgcgaagugccagacgccccagggggccaucaacagcucccugcccuuccagaacguccacccggugaccaucggcgagugccccaaguacgugcggagcaccaagcugcgcauggucaccgggcuccggaacauccccuccauccagagccgcggccuguucggggccaucgccggcuucaucgagggcggguggaccggcaugguggacgggugguacggcuaccaccaccagaacgagcagggguccggcuacgccgcggaccagaaguccacccagaacgccaucaacggcaucaccaacaaggugaacagcgucaucgagaagaugaacacgcaguucaccgccguggggaaggaguucaacaagcuggagcggcgcauggagaaccucaacaagaaggucgacgacggcuuccuggacaucuggaccuacaacgccgagcugcucgugcugcuggagaacgagcggacccucgacuuccacgacagcaacgugaagaaccuguacgagaaggucaagucccagcugaagaacaacgccaaggagaucgggaacggcugcuucgaguucuaccacaagugcaacgacgagugcauggagagcgugaagaacgggacguacgacuaccccaaguacuccgaggagagcaagcucaaccgcgagaagaucgacggcgugaagcuggaguccaugggcgucuaccagauccuggcgaucuacagcaccguggccagcucccucgugcugcuggucagccucggggccaucuccuucuggaugugcagcaacggcucccugcagugccggaucugcaucuga

SEQ ID NO: 65937 - RNA, 1698 nt, Artificial Sequence
  derived and/or modified CDS sequence (opt1) from hemagglutinin__InfluenzaA__ABV29689
augaaggugaagcugcucguccugcugugcaccuucaccgccacguacgccgacaccaucugcaucggcuaccacgcgaacaacagcaccgacaccguggacacggugcucgagaagaacgucaccgugacccacuccgugaaccugcuggaggacagccacaacgggaagcucugccugcugaagggcaucgcgccccuccagcuggggaacugcuccgucgccggcuggauccuggggaacccggagugcgagcuccugaucagcaaggaguccuggagcuacaucguggagacccccaaccccgagaacggcacgugcuaccccggcuacuucgccgacuacgaggagcugcgcgagcagcucuccagcguguccagcuucgagcgguucgagaucuucccgaaggaguccagcuggcccaaccacaccgucaccgggguguccgccagcugcucccacaacggcaagagcuccuucuaccgcaaccugcuguggcucaccgggaagaacggccuguaccccaaccugagcaaguccuacgccaacaacaaggagaaggaggugcucguccuguggggcgugcaccacccgcccaacaucggggaccagcgggcccuguaccacacggagaacgccuacgugagcgucgugagcucccacuacagccgccgguucacccccgagaucgccaagcgccccaaggugcgggaccaggagggccgcaucaacuacuacuggacccuccuggagcccggggacaccaucaucuucgaggcgaacggcaaccugaucgccccgcgguucgccuucgcccucucccgcggguucggcagcggcaucaucacguccaacgcccccauggacgagugcgacgcgaagugccagacgccccagggggccaucaacagcucccugcccuuccagaacguccacccggugaccaucggcgagugccccaaguacgugcggagcaccaagcugcgcauggucaccgggcuccggaacauccccuccauccagagccgcggccuguucggggccaucgccggcuucaucgagggcggguggaucggcaugguggacgggugguacggcuaccaccaccagaacgagcagggguccggcuacgccgcggaccagaaguccacccagaacgccaucaacggcaucaccaacaaggugaacagcgucaucgagaagaugaacacccaguucacggccguggggaaggaguucaacaagcuggagcggcgcauggagaaccucaacaagaaggucgacgacggcuuccuggacaucuggaccuacaacgccgagcugcucgugcugcuggagaacgagcggacccucgacuuccacgacagcaacgugaagaaccuguacgagaaggucaagucccagcugaagaacaacgccaaggagaucgggaacggcugcuucgaguucuaccacaagugcaacgacgagugcauggagagcgugaagaacgggaccuacgacuaccccaaguacuccgaggagagcaagcucaaccgcgagaagaucgacggcgugaagcuggaguccaugggcgucuaccagauccuggcgaucuacagcacgguggccagcucccucgugcugcuggucagccucggggccaucuccuucuggaugugcagcaacggcucccugcagugccggaucugcaucuga

SEQ ID NO: 65938 - RNA, 1698 nt, Artificial Sequence
  derived and/or modified CDS sequence (opt1) from hemagglutinin__InfluenzaA__ABV29700
augaaggugaagcugcucguccugcugugcaccuucaccgccacguacgccgacaccaucugcaucggcuaccacgcgaacaacagcaccgacaccguggacacggugcucgagaagaacgucaccgugacccacuccgugaaccugcuggaggacagccacaacgggaagcucugccugcugaagggcaucgcgccccuccagcuggggaacugcuccgucgccggcuggauccuggggaacccggagugcgagcuccugaucagcaaggaguccuggagcuacaucguggagacccccaaccccgagaacggcacgugcuaccccggcuacuucgccgacuacgaggagcugcgcgagcagcucuccagcguguccagcuucgagcgguucgagaucuucccgaaggaguccagcuggcccaaccacaccgucaccgggguguccgccagcugcucccacaacggcaagagcuccuucuaccgcaaccugcuguggcucaccgggaagaacggccuguaccccaaccugagcaaguccuacgccaacaacaaggagaaggaggugcucguccuguggggcgugcaccacccgcccaacaucggggaccagcgggcccuguaccacacggagaacgccuacgugagcgucgugagcucccacuacagccgccgguucacccccgagaucgccaagcgccccaaggugcgggaccaggagggccgcaucaacuacuacuggacccuccuggagcccggggacaccaucaucuucgaggcgaacggcaaccugaucgccccgcgguucgccuucgcccucucccgcggguucggcagcggcaucaucacguccaacgcccccauggacgagugcgacgcgaagugccagacgccccagggggccaucaacagcucccugcccuuccagaacguccacccggugaccaucggcgagugccccaaguacgugcggagcaccaagcugcgcauggucaccgggcuccggaacauccccuccauccagagccgcggccuguucggggccaucgccggcuucaucgagggcggguggaccggcaugguggacgggugguacggcuaccaccaccagaacgagcagggguccggcuacgccgcggaccagaaguccacccagaacgccaucaacggcaucaccaacaaggugaacagcgucaucgagaagaugaacacgcaguucaccgccguggggaaggaguucaacaagcuggagcggcgcauggagaaccucaacaagaaggucgacgacggcuuccuggacaucuggaccuacaacgccgagcugcucgugcugcuggagaacgagcggacccucgacuuccacgacagcaacgugaagaaccuguacgagaaggucaagucccagcugaagaacaacgccaaggagaucgggaacggcugcuucgaguucuaccacaagugcaacgacgagugcauggagagcgugaagaacgggacguacgacuaccccaaguacuccgaggagagcaagcucaaccgcgagaagaucgacggcgugaagcuggaguccaugggcgucuaccagauccuggcgaucuacagcaccguggccagcucccucgugcugcuggucagccucggggccaucuccuucuggaugugcagcaacggcucccugcagugccggaucugcaucuga

SEQ ID NO: 65939 - RNA, 1701 nt, Artificial Sequence
  derived and/or modified CDS sequence (opt1) from hemagglutinin__InfluenzaA__ABV29711
augaagaccaucaucgcccugagcuacauccucugccugguguucgcccagaagcugcccggcaacgacaacuccaccgcgacgcucugccuggggcaccacgccgucccgaacggcaccaucgugaagaccaucaccaacgaccagaucgaggugacgaacgccaccgagcugguccagagcuccagcaccggggagaucugcgacagcccccaccagauccucgacggcgagaacugcacccugaucgacgcccugcucggggacccccagugcgacggcuuccagaacaagaagugggaccuguucguggagcgcagcaaggccuacuccaacugcuaccccuacgacgugccggacuacgcgagccugcggucccucgucgccagcuccggcacgcuggaguucaacaacgagagcuucaacuggaccggggugacccagaacggcaccuccagcgccugcauccgccgguccaacaacagcuucuucucccgccugaacuggcucacgcaccugaaguucaaguaccccgcccugaacgugaccaugcccaacaacgagaaguucgacaagcucuacaucuggggcguccaccaccccgggaccgacaacgaccagaucuuccuguacgcgcaggccagcgggcggaucaccguguccacgaagcgcagccagcagaccgugaucccgaacaucggcagccggccccgcguccggaacauccccucccgcaucagcaucuacuggaccaucgugaagcccggcgacauccugcucaucaacuccaccgggaaccugaucgccccgcggggcuacuucaagauccagagcgggaaguccagcaucaugcgcuccgacgcccccaucggcaagugcaacagcgagugcaucacgcccaacggcuccauccccaacgacaagccguuccagaacgugaaccggaucaccuacggggccugcccccgcuacgucaagcagaacacccugaagcucgcgaccggcaugcggaacgugcccgagaagcagacgcgcgggaucuucggcgccaucgccggguucaucgagaacggcugggagggcaugguggacgggugguacggcuuccggcaccagaacagcgaggggaucggccaggccgccgaccugaaguccacccaggcggccaucgaccagaucaacgggaagcugaaccgccucaucggcaagaccaacgagaaguuccaccagaucgagaaggaguucagcgaggucgagggccggauccaggaccuggagaaguacguggaggacaccaagaucgaccugugguccuacaacgccgagcuccugguggcccuggagaaccagcacacgaucgaccucaccgacagcgagaugaacaagcuguucgagaagaccaagaagcagcugcgcgagaacgccgaggacauggggaacggcugcuucaagaucuaccacaagugcgacaacgcgugcaucggguccauccggaacggcaccuacgaccacgacgucuaccgcgacgaggcccucaacaaccgcuuccagaucaaggggguggagcugaaguccggcuacaaggacuggauccuguggaucuccuucgccaucagcugcuuccuccugugcguggcccugcucggcuucaucaugugggccugccagaaggggaacauccggugcaacaucugcaucuga

SEQ ID NO: 65940 - RNA, 1701 nt, Artificial Sequence
  derived and/or modified CDS sequence (opt1) from hemagglutinin__InfluenzaA__ABV29722
augaagaccaucaucgcccugagcuacauccucugccugguguucgcccagaagcugcccggcaacgacaacuccaccgcgacgcucugccuggggcaccacgccgucccgaacggcaccaucgugaagaccaucaccaacgaccagaucgaggugacgaacgccaccgagcugguccagagcuccagcaccggggagaucugcgacagcccccaccagauccucgacggcgagaacugcacccugaucgacgcccugcucggggacccccagugcgacggcuuccagaacaagaagugggaccuguucguggagcgcuccaaggccuacuccaacugcuaccccuacgacgugccggacuacgcgagccugcggucccucgucgccagcuccggcacgcuggaguucaacaacgagagcuucaacuggaccggggugacccagaacggcaccuccagcgccugcauccgccgguccaacaacagcuucuucucccgccugaacuggcucacgcaccugaaguucaaguaccccgcccugaacgugaccaugcccaacaacgagaaguucgacaagcucuacaucuggggcguccaccaccccgggaccgacaacgaccagaucuuccuguacgcgcaggccagcgggcggaucaccguguccacgaagcgcagccagcagaccgugaucccgaacaucggcagccggccccgcguccggaacauccccucccgcaucagcaucuacuggaccaucgugaagcccggcgacauccugcucaucaacuccaccgggaaccugaucgccccgcggggcuacuucaagauccgcagcgggaaguccagcaucaugcgguccgacgcccccaucggcaagugcaacagcgagugcaucacgcccaacggcuccauccccaacgacaagccguuccagaacgugaaccgcaucaccuacggggccugcccccgguacgucaagcagaacacccugaagcucgcgaccggcaugcgcaacgugcccgagaagcagacgcgggggaucuucggcgccaucgccggguucaucgagaacggcugggagggcaugguggacgggugguacggcuuccgccaccagaacagcgaggggaucggccaggccgccgaccugaaguccacccaggcggccaucgaccagaucaacgggaagcugaaccggcucaucggcaagaccaacgagaaguuccaccagaucgagaaggaguuccuggaggucgagggccgcauccaggaccuggagaaguacguggaggacaccaagaucgaccucuggagcuacaacgccgagcugcugguggcccucgagaaccagcacacgaucgaccugaccgacuccgagaugaacaagcuguucgagaagaccaagaagcagcuccgggagaacgccgaggacauggggaacggcugcuucaagaucuaccacaagugcgacaacgcgugcaucgggagcauccgcaacggcaccuacgaccacgacgucuaccgcgacgaggcccugaacaaccgguuccagaucaaggggguggagcugaaguccggcuacaaggacuggauccucuggaucagcuucgccaucuccugcuuccugcugugcguggcccuccugggcuucaucaugugggccugccagaaggggaacauccgcugcaacaucugcaucuga

SEQ ID NO: 65941 - RNA, 1698 nt, Artificial Sequence
  derived and/or modified CDS sequence (opt1) from hemagglutinin__InfluenzaA__ABV29733
augaaggugaagcugcucguccugcugugcaccuucaccgccacguacgccgacaccaucugcaucggcuaccacgcgaacaacagcaccgacaccguggacacggugcucgagaagaacgucaccgugacccacuccgugaaccugcuggaggacagccacaacgggaagcucugccugcugaagggcaucgcgccccuccagcuggggaacugcuccgucgccggcuggauccuggggaacccggagugcgagcuccugaucagcaaggaguccuggagcuacaucguggagacccccaaccccgagaacggcacgugcuaccccggcuacuucgccgacuacgaggagcugcgcgagcagcucuccagcguguccagcuucgagcgguucgagaucuucccgaaggaguccagcuggcccaaccacaccgucaccgggguguccgccagcugcucccacaacggcgagagcuccuucuaccgcaaccugcuguggcucaccgggaagaacggccuguaccccaaccugagcaaguccuacgccaacaacaaggagaaggaggugcucguccuguggggcgugcaccacccgcccaacaucggggaccagcgggcccuguaccacacggagaacgccuacgugagcgucgugagcucccacuacagccgccgguucacccccgagaucgccaagcgccccaaggugcgggaccaggagggccgcaucaacuacuacuggacccuccuggagcccggggacaccaucaucuucgaggcgaacggcaaccugaucgccccgcgguucgccuucgcccucucccgcggguucggcagcggcaucaucacguccaacgcccccauggacaagugcgacgcgaagugccagacgccccagggggccaucaacagcucccugcccuuccagaacguccacccggugaccaucggcgagugccccaaguacgugcggagcaccaagcugcgcauggucaccgggcuccggaacauccccuccauccagagccgcggccuguucggggccaucgccggcuucaucgagggcggguggaccggcaugguggacgggugguacggcuaccaccaccagaacgagcagggguccggcuacgccgcggaccagaaguccacccagaacgccaucaacggcaucaccaacaaggugaacagcgucaucgagaagaugaacacgcaguucaccgccguggggaaggaguucaacaagcuggagcggcgcauggagaaccucaacaagaaggucgacgacggcuuccuggacaucuggaccuacaacgccgagcugcucgugcugcuggagaacgagcggacccucgacuuccacgacagcaacgugaagaaccuguacgagaaggucaagucccagcugaagaacaacgccaaggagaucgggaacggcugcuucgaguucuaccacaagugcgacgacgagugcauggagagcgugaagaacgggacguacgacuaccccaaguacuccgaggagagcaagcucaaccgcgagaagaucgacggcgugaagcuggaguccaugggcgucuaccagauccuggcgaucuacagcaccguggccagcucccucgugcugcuggucagccucggggccaucuccuucuggaugugcagcaacggcucccugcagugccggaucugcaucuga

SEQ ID NO: 65942 - RNA, 1698 nt, Artificial Sequence; identical to SEQ ID NO: 65934
  derived and/or modified CDS sequence (opt1) from hemagglutinin__InfluenzaA__ABV29744

SEQ ID NO: 65943 - RNA, 1698 nt, Artificial Sequence
  derived and/or modified CDS sequence (opt1) from hemagglutinin__InfluenzaA__ABV29755
augaaggugaagcugcucguccugcugugcaccuucaccgccacguacgccgacaccaucugcaucggcuaccacgcgaacaacagcaccgacaccguggacacggugcucgagaagaacgucaccgugacccacuccgugaaccugcuggaggacagccacaacgggaagcucugccugcugaagggcaucgcgccccuccagcuggggaacugcuccgucgccggcuggauccuggggaacccggagugcgagcuccugaucagcaaggaguccuggagcuacaucguggagacccccucccccgagaacggcacgugcuaccccggcuacuucgccgacuacgaggagcugcgcgagcagcucagcuccgugagcuccuucgagcgguucgagaucuucccgaaggagagcuccuggcccaaccacaccgucaccggggugagcgccuccugcagccacaacggcaaguccagcuucuaccgcaaccugcuguggcucaccgggaagaacggccuguaccccaaccuguccaagagcuacgccaacaacaaggagaaggaggugcucguccuguggggcgugcaccacccgcccaacaucggggaccagcgggcccuguaccacacggagaacgccuacgugagcgucguguccagccacuacucccgccgguucacccccgagaucgccaagcgccccaaggugcgggaccaggagggccgcaucaacuacuacuggacccuccuggagcccggggacaccaucaucuucgaggcgaacggcaaccugaucgccccgcgguucgccuucgcccucagccgcggguucggcuccggcaucaucacgagcaacgcccccauggggaagugcgacgcgaagugccagacgccccagggcgccaucaacuccagccugcccuuccagaacguccacccggugaccaucggggagugccccaaguacgugcgguccgccaagcugcgcauggucaccggccuccggaacauccccagcauccagucccgcgggcuguucggcgccaucgccggcuucaucgagggcggguggaccgggaugguggacggcugguacggguaccaccaccagaacgagcagggcagcggcuacgcggccgaccagaaguccacccagaacgccaucaacgggaucaccaacaaggugaacagcgucaucgagaagaugaacacccaguucacggccgugggcaaggaguucaacaagcuggagcggcgcauggagaaccucaacaagaaggucgacgacggguuccuggacaucuggaccuacaacgccgagcugcucgugcugcuggagaacgagcggacccucgacuuccacgacuccaacgugaagaaccuguacgagaaggucaagagccagcugaagaacaacgcgaaggagaucggcaacgggugcuucgaguucuaccacaagugcaacgacgagugcauggaguccgugaagaacggcaccuacgacuaccccaaguacagcgaggaguccaagcucaaccgcgagaagaucgacggcgugaagcuggagagcaugggggucuaccagauccuggccaucuacagcacgguggccuccagccucgugcugcuggucucccucggcgccaucagcuucuggaugugcuccaacgggagccugcagugccggaucugcaucuga

SEQ ID NO: 65944 - RNA, 1698 nt, Artificial Sequence; identical to SEQ ID NO: 65934
  derived and/or modified CDS sequence (opt1) from hemagglutinin__InfluenzaA__ABV29766

SEQ ID NO: 65945 - RNA, 1698 nt, Artificial Sequence
  derived and/or modified CDS sequence (opt1) from hemagglutinin__InfluenzaA__ABV29777
augaaggugaagcugcucguccugcugugcaccuucaccgccacguacgccgacaccaucugcaucggcuaccacgcgaacaacagcaccgacaccguggacacggugcucgagaagaacgucaccgugacccacuccgugaaccugcuggaggacagccacaacgggaagcucugccugcugaagggcaucgcgccccuccagcuggggaacugcuccgucgccggcuggauccuggggaacccggagugcgagcuccugaucagcaaggaguccuggagcuacaucguggagacccccaaccccgagaacggcacgugcuaccccggcuacuucgccgacuacgaggagcugcgcgagcagcucuccagcguguccagcuucgagcgguucgagaucuucccgaaggaguccagcuggcccaaccacaccgucaccgggguguccgccagcugcucccacaacggcgagagcuccuucuaccgcaaccugcuguggcucaccgggaagaacggccuguaccccaaccugagcaaguccuacgccaacaacaaggagaaggaggugcucguccuguggggcgugcaccacccgcccaacaucggggaccagcgggcccuguaccacacggagaacgccuacgugagcgucgugagcucccacuacagccgccgguucacccccgagaucgccaagcgccccaaggugcgggaccaggagggccgcaucaacuacuacuggacccuccuggagcccggggacaccaucaucuucgaggcgaacggcaaccugaucgccccgcgguucgccuucgcccucucccgcggguucggcagcggcaucaucacguccaacgcccccauggacaagugcgacgcgaagugccagacgccccagggggccaucaacagcucccugcccuuccagaacguccacccggugaccaucggcgagugccccaaguacgugcggagcaccaagcugcgcauggucaccgggcuccggaacauccccuccauccagagccgcggccuguucggggccaucgccggcuucaucgagggcggguggaccggcaugguggacgggugguacggcuaccaccaccagaacgagcagggguccggcuacgccgcggaccagaaguccacccagaacgccaucaacggcaucaccaacaaggugaacagcgucaucgagaagaugaacacgcaguucaccgccguggggaaggaguucaacaagcuggagcggcgcauggagaaccucaacaagaaggucgacgacggcuuccuggacaucuggaccuacaacgccgagcugcucgugcugcuggagaacgagcggacccucgacuuccacgacagcaacgugaagaaccuguacgagaaggucaagucccagcugaagaacaacgccaaggagaucgggaacggcugcuucgaguucuaccacaagugcaacgacgagugcauggagagcgugaagaacgggacguacgacuaccccaaguacuccgaggagagcaagcucaaccgcgagaagaucgacggcgugaagcuggaguccaugggcgucuaccagauccuggcgaucuacagcaccguggccagcucccucgugcugcuggucagccucggggccaucuccuucuggaugugcagcaacggcucccugcagugccggaucugcaucuga

SEQ ID NO: 65946 - RNA, 1698 nt, Artificial Sequence; identical to SEQ ID NO: 65934
  derived and/or modified CDS sequence (opt1) from hemagglutinin__InfluenzaA__ABV29788

SEQ ID NO: 65947 - RNA, 1698 nt, Artificial Sequence; identical to SEQ ID NO: 65938
  derived and/or modified CDS sequence (opt1) from hemagglutinin__InfluenzaA__ABV29799

SEQ ID NO: 65948 - RNA, 1701 nt, Artificial Sequence
  derived and/or modified CDS sequence (opt1) from hemagglutinin__InfluenzaA__ABV29821
augaagaccaucaucgcccugagcuacauccucugccugguguucgcccagaagcugcccggcaacgacaacuccaccgcgacgcucugccuggggcaccacgccgucccgaacggcaccaucgugaagaccaucaccaacgaccagaucgaggugacgaacgccaccgagcugguccagagcuccagcaccggggagaucugcgacagcccccaccagauccucgacggcgagaacugcacccugaucgacgcccugcucggggacccccagugcgacggcuuccagaacaagaagugggaccuguucguggagcgcagcaaggccuacuccaacugcuaccccuacgacgugccggacuacgcgagccugcggucccucgucgccagcuccggcacgcuggaguucaacaacgagagcuucaacuggaccggggugacccagaacggcaccuccagcgccugcauccgccgguccaacaacagcuucuucucccgccugaacuggcucacgcaccugaaguucaaguaccccgcccugaacgugaccaugcccaacaacgagaaguucgacaagcucuacaucuggggcguccaccaccccgggaccgacaacgaccagguguuccuguacgcgcaggccagcgggcggaucaccguguccacgaagcgcagccagcagaccgucaucccgaacaucggcagccggccccgcgugcggaacauccccucccgcaucagcaucuacuggaccaucgugaagcccggcgacauccugcucaucaacuccaccgggaaccugaucgccccgcggggcuacuucaagauccgcagcgggaaguccagcaucaugcgguccgacgcccccaucggcaagugcaacagcgagugcaucacgcccaacggcuccauccccaacgacaagccguuccagaacgucaaccgcaucaccuacggggccugcccccgguacgugaagcagaacacccugaagcucgcgaccggcaugcgcaacgugcccgagaagcagacgcgggggaucuucggcgccaucgccggguucaucgagaacggcugggagggcauggucgacgggugguacggcuuccgccaccagaacagcgaggggaucggccaggccgccgaccugaaguccacccaggcggccaucgaccagaucaacgggaagcugaaccggcucaucggcaagaccaacgagaaguuccaccagaucgagaaggaguucagcgagguggagggccgcauccaggaccuggagaaguacguggaggacaccaagaucgaccugugguccuacaacgccgagcuccuggucgcccuggagaaccagcacacgaucgaccucaccgacagcgagaugaacaagcuguucgagaagaccaagaagcagcugcgggagaacgccgaggacauggggaacggcugcuucaagaucuaccacaagugcgacaacgcgugcaucggguccauccgcaacggcaccuacgaccacgacguguaccgcgacgaggcccucaacaaccgguuccagaucaaggggguggagcugaaguccggcuacaaggacuggauccuguggaucuccuucgccaucagcugcuuccuccugugcgucgcccugcucggcuucaucaugugggccugccagaaggggaacaucaagugcaacaucugcaucuga

SEQ ID NO: 65949 - RNA, 1698 nt, Artificial Sequence; identical to SEQ ID NO: 65938
  derived and/or modified CDS sequence (opt1) from hemagglutinin__InfluenzaA__ABV29832

SEQ ID NO: 65950 - RNA, 1698 nt, Artificial Sequence; identical to SEQ ID NO: 65934
  derived and/or modified CDS sequence (opt1) from hemagglutinin__InfluenzaA__ABV29865

SEQ ID NO: 65951 - RNA, 1698 nt, Artificial Sequence; identical to SEQ ID NO: 65934
  derived and/or modified CDS sequence (opt1) from hemagglutinin__InfluenzaA__ABV29876

SEQ ID NO: 65952 - RNA, 1701 nt, Artificial Sequence
  derived and/or modified CDS sequence (opt1) from hemagglutinin__InfluenzaA__ABV29898
augaagaccaucaucgcccugagcuacauccucugccugguguucgcccagaagcugcccggcaacgacaacuccaccgcgacgcucugccuggggcaccacgccgucccgaacggcaccaucgugaagaccaucaccaacgaccagaucgaggugacgaacgccaccgagcugguccagagcuccagcaccggggagaucugcgacagcccccaccagauccucgacggcgagaacugcacccugaucgacgcccugcucggggacccccagugcgacggcuuccagaacaagaagugggaccuguucguggagcgcagcaaggccuacuccaacugcuaccccuacgacgugccggacuacgcgagccugcggucccucgucgccagcuccggcacgcuggaguucaacaacgagagcuucaacuggaccggggugacccagaacggcaccuccagcgccugcauccgccgguccaacaacagcuucuucucccgccugaacuggcucacgcaccugaaguucaaguaccccgcccugaacgugaccaugcccaacaacgagaaguucgacaagcucuacaucuggggcguccaccaccccgggaccgacaacgaccagaucuuccuguacgcgcaggccagcgggcggaucaccguguccacgaagcgcagccagcagaccgugaucccgaacaucggcagccggccccgcguccggaacauccccucccgcaucagcaucuacuggaccaucgugaagcccggcgacauccugcucaucaacuccaccgggaaccugaucgccccgcggggcuacuucaagauccgcagcgggaaguccagcaucaugcgguccgacgcccccaucggcaagugcaacagcgagugcaucacgcccaacggcuccauccccaacgacaagccguuccagaacgugaaccgcaucaccuacggggccugcccccgguacgucaagcagaacacccugaagcucgcgaccggcaugcgcaacgugcccgagaagcagacgcgggggaucuucggcgccaucgccggguucaucgagaacggcugggagggcaugguggacgggugguacggcuuccgccaccagaacagcgaggggaucggccaggccgccgaccugaaguccacccaggcggccaucgaccagaucaacgggaagcugaaccggcucaucggcaagaccaacgagaaguuccaccagaucgagaaggaguucagcgaggucgagggccgcauccaggaccuggagaaguacguggaggacaccaagaucgaccugugguccuacaacgccgagcuccugguggcccuggagaaccagcacacgaucgaccucaccgacagcgagaugaacaagcuguucgagaagaccaagaagcagcugcgggagaacgccgaggacauggggaacggcugcuucaagaucuaccacaagugcgacaacgcgugcaucggguccauccgcaacggcaccuacgaccacgacgucuaccgcgacgaggcccucaacaaccgguuccagaucaaggggguggagcugaaguccggcuacaaggacuggauccuguggaucuccuucgccaucagcugcuuccuccugugcguggcccugcucggcuucaucaugugggccugccagaaggggaacauccgcugcaacaucugcaucuga

SEQ ID NO: 65953 - RNA, 1701 nt, Artificial Sequence
  derived and/or modified CDS sequence (opt1) from hemagglutinin__InfluenzaA__ABV29909
augaagaccaucaucgcccugagcuacauccucugccugguguucgcccagaagcugcccggcaacgacaacuccaccgcgacgcucugccuggggcaccacgccgucccgaacggcaccaucgugaagaccaucaccagcgaccagaucgaggugacgaacgccaccgagcugguccagaacuccagcaucgggggcaucugcaacagcccccaccagauccucgacggggagaacugcacccugaucgacgcccugcucggcgacccccagugcgacggcuuccagaacaagaagugggaccuguucguggagcgcagcaaggccuacuccaacugcuaccccuacgacgugccggacuacgcgagccugcggucccucaucgccagcuccgggacccuggaguucaacaacgagagcuucaacuggacgggcgucacccagaacgggaccuccagcgccugcaagcgccgguccaacaacagcuucuucucccgccugaacuggcucacccaccugaaguucaaguaccccgcccugaacgugacgaugcccaacaacgaggaguucgacaagcucuacaucuggggcgugcaccaccccgggaccgacaacgaccagaucagccuguacgcgcaggccccgggccggaucaccgucuccaccaagcgcagccagcagacggugauccccaacaucggcagccggccccgcgugcgggacauccccucccgcaucagcaucuacuggaccaucgucaagccgggggacauccugcucaucaacuccaccggcaaccugaucgcgccccggggguacuucaagauccgcagcggcaaguccagcaucaugcgguccgacgcccccaucgacaagugcaacagcgagugcaucacccccaacggcuccaucccgaacgacaagcccuuccagaacgugaaccgcaucacguacggggccugcccccgguacgugaagcagaacacccugaagcucgccaccggcaugcgcaacguccccgagaagcagacccgggggaucuucggcgccaucgccggguucaucgagaacggcugggagggcaugguggacgggugguacggcuuccgccaccagaacagcgaggggaucggccaggccgccgaccugaaguccacgcaggcggccaucgaccagaucaacgggaagcugaaccggcucaucggcaagaccaacgagaaguuccaccagaucgagaaggaguucagcgagguggagggccgcauccaggaccuggagaaguacgucgaggacaccaagaucgaccugugguccuacaacgccgagcuccugguggcccuggagaaccagcacaccaucgaccucacggacagcgagaugaacaagcuguucgagcggaccaagaagcagcugcgcgagaacgccgaggacauggggaacggcugcuucaagaucuaccacaagugcgacaacgcgugcaucggguccauccgcaacggcaccuacgaccacgacguguaccgggacgaggcccucaacaaccgcuuccagaucaagggggucgagcugaaguccggcuacaaggacuggauccuguggaucuccuucgccaucagcugcuuccuccugugcguggcccugcucggcuucaucaugugggccugccagaaggggaacauccggugcaacaucugcaucuga

SEQ ID NO: 65954 - RNA, 1698 nt, Artificial Sequence
  derived and/or modified CDS sequence (opt1) from hemagglutinin__InfluenzaA__ABV29920
augaaggugaagcugcucguccugcugugcaccuucaccgccacguacgccgacaccaucugcaucggcuaccacgcgaacaacagcaccgacaccguggacacggugcucgagaagaacgucaccgugacccacuccgugaaccugcuggaggacagccacaacgggaagcucugccugcugaagggcaucgcgccccuccagcuggggaacugcuccgucgccggcuggauccuggggaacccggagugcgagcuccugaucagcaaggaguccuggagcuacaucguggagacccccaaccccgagaacggcacgugcuaccccggcuacuucgccgacuacgaggagcugcgcgagcagcucuccagcguguccagcuucgagcgguucgagaucuucccgaaggaguccagcuggcccaaccacaccgucaccgggguguccgccagcugcucccacaacggcaagagcuccuucuaccgcaaccugcuguggcucaccgggaagaacggccuguaccccaaccugagcaaguccuacgccaacaacaaggagaaggaggugcucguccuguggggcgugcaccacccgcccaacaucggggaccagcgggcccuguaccacacggagaacgccuacgugagcgucgugagcucccacuacagccgccgguucacccccgagaucgccaagcgccccaaggugcgggaccaggagggccgcaucaacuacuacuggacccuccuggagcccggggacaccaucaucuucgaggcgaacggcaaccugaucgccccgcgguucgccuucgcccucucccgcggguucggcagcggcaucaucacguccaacgcccccaugggggagugcgacgcgaagugccagacgccccagggcgccaucaacagcucccugcccuuccagaacguccacccggugaccaucggggagugccccaaguacgugcggagcgccaagcugcgcauggucaccggccuccggaacauccccuccauccagagccgcgggcuguucggcgccaucgccggcuucaucgagggcggguggaccgggaugguggacggcugguacggguaccaccaccagaacgagcagggcuccggcuacgcggccgaccagaaguccacccagaacgccaucaacgggaucaccaacaaggugaacagcgucaucgagaagaugaacacccaguucacggccgugggcaaggaguucaacaagcuggagcggcgcauggagaaccucaacaagaaggucgacgacggguuccuggacaucuggaccuacaacgccgagcugcucgugcugcuggagaacgagcggacccucgacuuccacgacagcaacgugaagaaccuguacgagaaggucaagucccagcugaagaacaacgcgaaggagaucggcaacgggugcuucgaguucuaccacaagugcaacgacgagugcauggagagcgugaagaacggcaccuacgacuaccccaaguacuccgaggagagcaagcucaaccgcgagaagaucgacggcgugaagcuggaguccaugggggucuaccagauccuggccaucuacagcacgguggccagcucccucgugcugcuggucagccucggcgccaucuccuucuggaugugcagcaacgggucccugcagugccggaucugcaucuga

SEQ ID NO: 65955 - RNA, 1698 nt, Artificial Sequence; identical to SEQ ID NO: 65945
  derived and/or modified CDS sequence (opt1) from hemagglutinin__InfluenzaA__ABV29942

SEQ ID NO: 65956 - RNA, 1698 nt, Artificial Sequence; identical to SEQ ID NO: 65938
  derived and/or modified CDS sequence (opt1) from hemagglutinin__InfluenzaA__ABV29953

SEQ ID NO: 65957 - RNA, 1698 nt, Artificial Sequence; identical to SEQ ID NO: 65938
  derived and/or modified CDS sequence (opt1) from hemagglutinin__InfluenzaA__ABV29964

SEQ ID NO: 65958 - RNA, 1698 nt, Artificial Sequence; identical to SEQ ID NO: 65934
  derived and/or modified CDS sequence (opt1) from hemagglutinin__InfluenzaA__ABV29986

SEQ ID NO: 65959 - RNA, 1698 nt, Artificial Sequence; identical to SEQ ID NO: 65938
  derived and/or modified CDS sequence (opt1) from hemagglutinin__InfluenzaA__ABV29997

SEQ ID NO: 65960 - RNA, 1698 nt, Artificial Sequence; identical to SEQ ID NO: 65934
  derived and/or modified CDS sequence (opt1) from hemagglutinin__InfluenzaA__ABV30008

SEQ ID NO: 65961 - RNA, 1698 nt, Artificial Sequence; identical to SEQ ID NO: 65938
  derived and/or modified CDS sequence (opt1) from hemagglutinin__InfluenzaA__ABV30019

SEQ ID NO: 65962 - RNA, 1698 nt, Artificial Sequence; identical to SEQ ID NO: 65938
  derived and/or modified CDS sequence (opt1) from hemagglutinin__InfluenzaA__ABV30030

SEQ ID NO: 65963 - RNA, 1698 nt, Artificial Sequence
  derived and/or modified CDS sequence (opt1) from hemagglutinin__InfluenzaA__ABV30041
augaaggugaagcugcucguccugcugugcaccuucaccgccacguacgccgacaccaucugcaucggcuaccacgcgaacaacagcaccgacaccguggacacggugcucgagaagaacgucaccgugacccacuccgugaaccugcuggaggacagccacaacgggaagcucugccugcugaagggcaccgcgccccuccagcuggggaacugcuccgucgccggcuggauccuggggaacccggagugcgagcuccugaucagcaaggaguccuggagcuacaucguggagacgcccaaccccgagaacgggaccugcuaccccggcuacuucgccgacuacgaggagcugcgcgagcagcucuccagcguguccagcuucgagcgguucgagaucuucccgaaggaguccagcuggcccaaccacaccgucaccgggguguccgccagcugcucccacaacggcaagagcuccuucuaccgcaaccugcuguggcucacggggaagaacggccuguaccccaaccugagcaaguccuacgccaacaacaaggagaaggaggugcucguccuguggggcgugcaccacccgcccaacaucggcgaccagcgggcccuguaccacaccgagaacgccuacgugagcgucgugagcucccacuacagccgccgguucacccccgagaucgccaagcgccccaaggugcgggaccaggagggccgcaucaacuacuacuggacccuccuggagcccggggacacgaucaucuucgaggcgaacggcaaccugaucgccccgcgguucgccuucgcccucucccgcggguucggcagcggcaucaucaccuccaacgcccccaugggggagugcgacgcgaagugccagacgccccagggcgccaucaacagcucccugcccuuccagaacguccacccggugaccaucggggagugccccaaguacgugcggagcgccaagcugcgcauggucaccggccuccggaacauccccuccauccagagccgcgggcuguucggcgccaucgccggcuucaucgagggcggguggaccgggaugguggacggcugguacggguaccaccaccagaacgagcagggcuccggcuacgcggccgaccagaaguccacccagaacgccaucaacgggaucaccaacaaggugaacagcgucaucgagaagaugaacacgcaguucaccgccgugggcaaggaguucaacaagcuggagcggcgcauggagaaccucaacaagaaggucgacgacggguuccuggacaucuggaccuacaacgccgagcugcucgugcugcuggagaacgagcggacccucgacuuccacgacagcaacgugaagaaccuguacgagaaggucaagaaccagcugaagaacaacgcgaaggagaucggcaacgggugcuucgaguucuaccacaagugcaacgacgagugcauggaguccgugaagaacggcacguacgacuaccccaaguacagcgaggaguccaagcucaaccgcgagaagaucgacggcgugaagcuggagagcaugggggucuaccagauccuggccaucuacuccaccguggccagcagccucgugcugcugaucucccucggcgccaucagcuucuggaugugcuccaacgggagccugcagugccggaucugcaucuga

SEQ ID NO: 65964 - RNA, 1701 nt, Artificial Sequence; identical to SEQ ID NO: 65952
  derived and/or modified CDS sequence (opt1) from hemagglutinin__InfluenzaA__ABV30063

SEQ ID NO: 65965 - RNA, 1701 nt, Artificial Sequence; identical to SEQ ID NO: 65952
  derived and/or modified CDS sequence (opt1) from hemagglutinin__InfluenzaA__ABV30074

SEQ ID NO: 65966 - RNA, 1698 nt, Artificial Sequence; identical to SEQ ID NO: 65938
  derived and/or modified CDS sequence (opt1) from hemagglutinin__InfluenzaA__ABV30085

SEQ ID NO: 65967 - RNA, 1698 nt, Artificial Sequence; identical to SEQ ID NO: 65938
  derived and/or modified CDS sequence (opt1) from hemagglutinin__InfluenzaA__ABV30096

SEQ ID NO: 65968 - RNA, 1698 nt, Artificial Sequence; identical to SEQ ID NO: 65934
  derived and/or modified CDS sequence (opt1) from hemagglutinin__InfluenzaA__ABV30107

SEQ ID NO: 65969 - RNA, 1698 nt, Artificial Sequence
  derived and/or modified CDS sequence (opt1) from hemagglutinin__InfluenzaA__ABV30129
augaaggugaagcugcucguccugcugugcaccuucaccgccacguacgccgacaccaucugcaucggcuaccacgcgaacaacagcaccgacaccguggacacggugcucgagaagaacgucaccgugacccacuccgugaaccugcuggaggacagccacaacgggaagcucugccugcugaagggcaucgcgccccuccagcuggggaacugcuccgucgccggcuggauccuggggaacccggagugcgagcuccugaucagcaaggaguccuggagcuacaucguggagacccccaaccccgagaacggcacgugcuaccccggcaacuucgccgacuacgaggagcugcgcgagcagcucuccagcguguccagcuucgagcgguucgagaucuucccgaaggaguccagcuggcccaaccacaccgucaccgggguguccgccagcugcucccacaacggcaagagcuccuucuaccgcaaccugcuguggcucaccgggaagaacggccuguaccccaaccugagcaaguccuacgccaacaacaaggagaaggaggugcucguccuguggggcgugcaccacccgcccaacaucggggaccagcgggcccuguaccacacggagaacgccuacgugagcgucgugagcucccacuacagccgccgguucacccccgagaucgccaagcgccccaaggugcgggaccaggagggccgcaucaacuacuacuggacccuccuggagcccggggacaccaucaucuucgaggcgaacggcaaccugaucgccccgcgguucgccuucgcccucucccgcggguucggcagcggcaucaucacguccaacgcccccauggacgagugcgacgcgaagugccagacgccccagggggccaucaacagcucccugcccuuccagaacguccacccggugaccaucggcgagugccccaaguacgugcggagcgccaagcugcgcauggucaccgggcuccggaacauccccuccauccagagccgcggccuguucggggccaucgccggcuucaucgagggcggguggaccggcaugguggacgggugguacggcuaccaccaccagaacgagcagggguccggcuacgcggccgaccagaaguccacccagaacgccaucaacggcaucaccaacaaggugaacagcgucaucgagaagaugaacacccaguucacggccguggggaaggaguucaacaagcuggagcggcgcauggagaaccucaacaagaaggucgacgacggcuuccuggacaucuggaccuacaacgccgagcugcucgugcugcuggagaacgagcggacccucgacuuccacgacagcaacgugaagaaccuguacgagaaggucaagucccagcugaagaacaacgcgaaggagaucgggaacggcugcuucgaguucuaccacaagugcaacgacgagugcauggagagcgugaagaacgggaccuacgacuaccccaaguacuccgaggagagcaagcucaaccgcgagaagaucgacggcgugaagcuggaguccaugggcgucuaccagauccuggccaucuacagcacgguggccagcucccucgugcugcuggucagccucggggccaucuccuucuggaugugcagcaacggcucccugcagugccggaucugcaucuga

SEQ ID NO: 65970 - RNA, 1698 nt, Artificial Sequence
  derived and/or modified CDS sequence (opt1) from hemagglutinin__InfluenzaA__ABV30140
augaaggugaagcugcucguccugcugugcaccuucaccgccacguacgccgacaccaucugcaucggcuaccacgcgaacaacagcaccgacaccguggacacggugcucgagaagaacgucaccgugacccacuccgugaaccugcuggaggaccgccacaacgggaagcucugccugcugaagggcaucgcgccccucaagcuggggaacugcagcgucgccggcuggauccuggggaacccggagugcgagcuccugaucuccaaggagagcugguccuacaucguggagacccccaaccccgagaacggcacgugcuaccccggcuacuucgccgacuacgaggagcugcgggagcagcucagcuccgugagcuccuucgagcgcuucgagaucuucccgaaggagagcuccuggcccaaccacaccgucaccggggugagcgccuccugcagccacaacggcaaguccagcuucuaccggaaccugcuguggcucaccgggaagaacggccuguaccccaaccugucccgcagcuacgccaacaacaaggagaaggaggugcucguccuguggggcgugcaccacccgcccaacaucggggaccagcgggcccuguaccacacggagaacgccuacguguccgucgugagcagccacuacucccgccgguucacccccgagaucgccaagcgccccaaggugcgggaccaggagggccgcaucaacuacuacuggacccuccuggagcccggggacaccaucaucuucgaggcgaacggcaaccugaucgccccgcgguucgccuucgcccucagccgcggguucggcuccggcaucaucacgagcaacgcccccauggacgagugcgacgcgaagugccagacgccccagggggccaucaacuccagccugcccuuccagaacguccacccggugaccaucggcgagugccccaaguacgugcgguccgccaagcugcgcauggucaccgggcuccggaacauccccagcauccagucccgcggccuguucggggccaucgccggcuucaucgagggcggguggaccggcaugguggacgggugguacggcuaccaccaccagaacgagcaggggagcggcuacgcggccgaccagaaguccacccagaacgccaucaacggcaucaccaacaaggugaacagcgucaucgagaagaugaacacccaguucacggccguggggaaggaguucaacaagcuggagcggcgcauggagaaccucaacaagaaggucgacgacggcuuccuggacaucuggaccuacaacgccgagcugcucgugcugcuggagaacgagcggacccucgacuuccacgacuccaacgugaagaaccuguacgagaaggucaagagccagcugaagaacaacgcgaaggagaucgggaacggcugcuucgaguucuaccacaagugcaacgacgagugcauggaguccgugaagaacgggaccuacgacuaccccaaguacagcgaggaguccaagcucaaccgcgagaagaucgacggcgugaagcuggagagcaugggcgucuaccagauccuggccaucuacuccacgguggccagcagccucgugcugcuggucucccucggggccaucagcuucuggaugugcuccaacggcagccugcagugccggaucugcaucuga

SEQ ID NO: 65971 - RNA, 1698 nt, Artificial Sequence
  derived and/or modified CDS sequence (opt1) from hemagglutinin__InfluenzaA__ABV30151
augaaggugaagcugcucguccugcugugcaccuucaccgccacguacgccgacaccaucugcaucggcuaccacgcgaacaacagcaccgacaccguggacacggugcucgagaagaacgucaccgugacccacuccgugaaccugcuggaggacagccacaacgggaagcucugccugcugaagggcaucgcgccccuccagcuggggaacugcuccgucgccggcuggauccuggggaacccggagugcgagcuccugaucagcaaggaguccuggagcuacaucguggagacccccaaccccgagaacggcacgugcuaccccggcuacuucgccgacuacgaggagcugcgcgagcagcucuccagcguguccagcuucgagcgguucgagaucuucccgaaggaguccagcuggcccaaccacaccgucaccgggguguccgccagcugcucccacagcggcaaguccagcuucuaccgcaaccugcuguggcucaccgggaagaacggccuguaccccaaccuguccaagagcuacgccaacaacaaggagaaggaggugcucguccuguggggcgugcaccacccgcccaacaucggggaccagcgggcccuguaccacacggagaacgccuacgugagcgucguguccagccacuacucccgccgguucacccccgagaucgccaagcgccccaaggugcgggaccaggagggccgcaucaacuacuacuggacccuccuggagcccggggacaccaucaucuucgaggcgaacggcaaccugaucgccccgcgguucgccuucgcccucagccgcggguucggcuccggcaucaucacgagcaacgcccccaugggggagugcgacgcgaagugccagacgccccagggcgccaucaacuccagccugcccuuccagaacguccacccggugaccaucggggagugccccaaguacgugcgguccgccaagcugcgcauggucaccggccuccggaacauccccagcauccagucccgcgggcuguucggcgccaucgccggcuucaucgagggcggguggaccgggaugguggacggcugguacggguaccaccaccagaacgagcagggcagcggcuacgcggccgaccagaaguccacccagaacgccaucaacgggaucaccaacaaggugaacagcgucaucgagaagaugaacacccaguucacggccgugggcaaggaguucaacaagcuggagcggcgcauggagaaccucaacaagaaggucgacgacggguuccuggacaucuggaccuacaacgccgagcugcucgugcugcuggagaacgagcggacccucgacuuccacgacuccaacgugaagaaccuguacgagaaggucaagagccagcugaagaacaacgcgaaggagaucggcaacgggugcuucgaguucuaccacaagugcaacgacgagugcauggaguccgugaagaacggcaccuacgacuaccccaaguacagcgaggaguccaagcucaaccgcgagaagaucgacggcgugaagcuggagagcaugggggucuaccagauccuggccaucuacagcacgguggccuccagccucgugcugcuggucucccucggcgccaucagcuucuggaugugcuccaacgggagccugcagugccggaucugcaucuga

SEQ ID NO: 65972 - RNA, 1698 nt, Artificial Sequence
  derived and/or modified CDS sequence (opt1) from hemagglutinin__InfluenzaA__ABV30162
augaaggugaagcugcucguccugcugugcaccuucaccgccacguacgccgacaccaucugcaucggcuaccacgcgaacaacagcaccgacaccguggacacggugcucgagaagaacgucaccgugacccacuccgugaaccugcuggaggacagccacaacgggaagcucugccugcugaagggcaucgcgccccuccagcuggggaacugcuccgucgccggcuggauccuggggaacccggagugcgagcuccugaucagccgcgaguccuggagcuacaucguggagacccccaaccccgagaacggcacgugcuaccccggcuacuucgccgacuacgaggagcugcgggagcagcucuccagcguguccagcuucgagcgcuucgagaucuucccgaaggaguccagcuggcccaaccacaccgucaccgggguguccgccagcugcucccacaacggcaagagcuccuucuaccggaaccugcuguggcucaccgggaagaacggccuguaccccaaccugagcaaguccuacgccaacaacaaggagaaggaggugcucguccuguggggcgugcaccacccgcccaacaucggggaccagcgcgcccuguaccacacggagaacgccuacgugagcgucgugagcucccacuacagccggcgcuucacccccgagaucgccaagcggcccaaggugcgcgaccaggagggccggaucaacuacuacuggacccuccuggagcccggggacaccaucaucuucgaggcgaacggcaaccugaucgccccgcgcuucgccuucgcccucucccggggguucggcagcggcaucaucacguccaacgcccccauggacgagugcgacgcgaagugccagacgccccagggggccaucaacagcucccugcccuuccagaacguccacccggugaccaucggcgagugccccaaguacgugcgcagcaccaagcugcggauggucaccgggcuccgcaacauccccuccauccagagccggggccuguucggggccaucgccggcuucaucgagggcggguggaccggcaugguggacgggugguacggcuaccaccaccagaacgagcagggguccggcuacgccgcggaccagaaguccacccagaacgccaucaacggcaucaccaacaaggugaacagcgucaucgagaagaugaacacgcaguucaccgccguggggaaggaguucaacaagcuggagcgccggauggagaaccucaacaagaaggucgacgacggcuuccuggacaucuggaccuacaacgccgagcugcucgugcugcuggagaacgagcgcacccucgacuuccacgacagcaacgugaagaaccuguacgagaaggucaagucccagcugaagaacaacgccaaggagaucgggaacggcugcuucgaguucuaccacaagugcaacgacgagugcauggagagcgugaagaacgggacguacgacuaccccaaguacuccgaggagagcaagcucaaccgggagaagaucgacggcgugaagcuggaguccaugggcgucuaccagauccuggcgaucuacagcaccguggccagcucccucgugcugcuggucagccucggggccaucuccuucuggaugugcagcaacggcucccugcagugccgcaucugcaucuga

SEQ ID NO: 65973 - RNA, 1698 nt, Artificial Sequence; identical to SEQ ID NO: 65938
  derived and/or modified CDS sequence (opt1) from hemagglutinin__InfluenzaA__ABV30173

SEQ ID NO: 65974 - RNA, 1698 nt, Artificial Sequence; identical to SEQ ID NO: 65938
  derived and/or modified CDS sequence (opt1) from hemagglutinin__InfluenzaA__ABV30184

SEQ ID NO: 65975 - RNA, 1701 nt, Artificial Sequence; identical to SEQ ID NO: 65952
  derived and/or modified CDS sequence (opt1) from hemagglutinin__InfluenzaA__ABV30217

SEQ ID NO: 65976 - RNA, 1701 nt, Artificial Sequence; identical to SEQ ID NO: 65952
  derived and/or modified CDS sequence (opt1) from hemagglutinin__InfluenzaA__ABV30228

SEQ ID NO: 65977 - RNA, 1701 nt, Artificial Sequence
  derived and/or modified CDS sequence (opt1) from hemagglutinin__InfluenzaA__ABV30261
augaagaccaucaucgcccugagcuacauccucugccugguguucgcccagaagcugcccggcaucgacaacuccaccgcgacgcucugccuggggcaccacgccgucccgaacggcaccaucgugaagaccaucaccaacgaccagguggaggucacgaacgccaccgagcuggugcagagcuccagcaccgggggcaucugcgacagcccccaccagauccucgacggggagaacugcacccugaucgacgcccugcucggcgacccccagugcgacggcuuccagaacaagaagugggaccuguucguggagcgcuccaaggccuacuccaacugcuaccccuacgacgucccggacuacgcgagccugcggucccucguggccagcuccgggacgcuggaguucaacaacgagagcuucaacugggccggcgugacccagaacgggaccuccagcgccugcaagcgcggcuccaacaacagcuucuucucccggcugaacuggcucacccacagcaaguucaaguaccccgcgcugaacgucacgaugcccaacaacgaggaguucgacaagcuguacaucuggggcgugcaccaccccgggaccgacaacgaccagaucuuccucuacgcccaggccuccggccgcaucaccgugagcaccaagcggagccagcagacggucaucccgaacaucgggucccgcccccgggugcgcaacauccccagccggaucuccaucuacuggaccaucgugaagcccggcgacauccugcugaucaacagcaccgggaaccucaucgccccgcgcggcuacuucaagauccgguccggcaagagcuccaucaugcgcagcgacgcccccaucgggaagugcaacuccgagugcaucacccccaacggcagcauccccaacgacaagccguuccagaacgucaaccggaucacguacggggcgugcccccgcuacgugaagcagaacacccugaagcuggccaccggcaugcggaacgugcccgagaagcagacccgcgggaucuucggcgccaucgccggcuucaucgagaacgggugggagggcauggucgacgggugguacggcuuccggcaccagaacuccgaggggaugggccaggccgcggaccucaagagcacgcaggccgccaucgaccagaucaacggcaagcugaaccgccugaucgggaagaccaacgagaaguuccaccagaucgagaaggaguucuccgagguggagggccggauccaggaccucgagaaguacguggaggacaccaagaucgaccuguggagcuacaacgccgagcugcucgucgcccuggagaaccagcacaccaucgaccugacggacuccgagaugaacaagcuguucgagaagaccaagaagcagcuccgcgagaacgcggaggacauggggaacggcugcuucaagaucuaccacaagugcgacaacgccugcaucgggagcauccggaacggcaccuacgaccacgacguguaccgcgccgaggcccugaacaaccgcuuccagaucaagggcguggagcucaaguccggguacaaggacuggauccuguggaucagcuucgccaucuccugcuuccugcucugcgucgcgcugcugggcuucaucaugugggccugccagaaggggaacauccggugcaacaucugcaucuga

SEQ ID NO: 65978 - RNA, 1701 nt, Artificial Sequence
  derived and/or modified CDS sequence (opt1) from hemagglutinin__InfluenzaA__ABV30272
augaagaccaucaucgcccugagcuacauccucugccugguguucgcccagaagcugcccggcaacgacaacuccaccgcgacgcucugccuggggcaccacgccgucccgaacggcaccaucgugaagaccaucaccaacgaccagaucgaggugacgaacgccaccgagcugguccagagcuccagcaccggggagaucugcgacagcccccaccagauccucgacggcgagaacugcacccugaucgacgcccugcucggggacccccagugcgacggcuuccagaacaagaagugggaccuguucguggagcgcagcaaggccuacuccaacugcuaccccuacgacgugccggacuacgcgagccugcggucccucgucgccagcuccggcacgcuggaguucaacaacgagagcuucaacuggaccggggugacccagaacggcaccuccagcgccugcauccgccgguccaacaacagcuucuucuccaagcugaacuggcucacgcaccugaaguucaaguaccccgcccugaacgugaccaugcccaacaacgagaaguucgacaagcucuacaucuggggcguccaccaccccgggaccgacaacgaccagaucuuccuguacgcgcaggccagcgggcgcaucaccguguccacgaagcggagccagcagaccgugaucccgaacaucggcagccgcccccggguccgcaacauccccucccggaucagcaucuacuggaccaucgugaagcccggcgacauccugcucaucaacuccaccgggaaccugaucgccccgcgcggcuacuucaagauccggagcgggaaguccagcaucaugcgcuccgacgcccccaucggcaagugcaacagcgagugcaucacgcccaacggcuccauccccaacgacaagccguuccagaacgugaaccggaucaccuacggggccugcccccgcuacgucaagcagaacacccugaagcucgcgaccggcaugcggaacgugcccgagaagcagacgcgcgggaucuucggcgccaucgccggguucaucgagaacggcugggagggcaugguggacgggugguacggcuuccggcaccagaacagcgaggggaucggccaggccgccgaccugaaguccacccaggcggccaucgaccagaucaacgggaagcugaaccgccucaucggcaagaccaacgagaaguuccaccagaucgagaaggaguucagcgaggucgagggccggauccaggaccuggagaaguacguggaggacaccaagaucgaccugugguccuacaacgccgagcuccugguggcccuggagaaccagcacacgaucgaccucaccgacagcgagaugaacaagcuguucgagaagaccaagaagcagcugcgcgagaacgccgaggacauggggaacggcugcuucaagaucuaccacaagugcgacaacgcgugcaucggguccauccggaacggcaccuacgaccacgacgucuaccgcgacgaggcccucaacaaccgcuuccagaucaaggggguggagcugaaguccggcuacaaggacuggauccuguggaucuccuucgccaucagcugcuuccuccugugcguggcccugcucggcuucaucaugugggccugccagaaggggaacauccggugcaacaucugcaucuga

SEQ ID NO: 65979 - RNA, 1698 nt, Artificial Sequence
  derived and/or modified CDS sequence (opt1) from hemagglutinin__InfluenzaA__ABV30283
augaaggugaagcugcucguccugcugugcaccuucaccgccacguacgccgacaccaucugcaucggcuaccacgcgaacaacagcaccgacaccguggacacggugcucgagaagaacgucaccgugacccacuccgugaaccugcuggaggacagccacaacgggaagcucugccugcugaagggcaucgcgccccuccagcuggggaacugcuccgucgccggcuggauccuggggaacccggagugcgagcuccugaucagcaaggaguccuggagcuacaucguggagacccccaaccccgagaacggcacgugcuaccccggcaacuucgccgacuacgaggagcugcgcgagcagcucuccagcguguccagcuucgagcgguucgagaucuucccgaaggaguccagcuggcccaaccacaccgucaccgggguguccgccagcugcucccacaacggcaagagcuccuucuaccgcaaccugcuguggcucaccgggaagaacggccuguaccccaaccugagcaaguccuacgccaacaacaaggagaaggaggugcucguccuguggggcgugcaccacccgcccaacaucggggaccagcgggcccuguaccacacggagaacgccuacgugagcgucgugagcucccacuacagccgccgguucacccccgagaucgccaagcgccccaaggugcgggaccaggagggccgcaucaacuacuacuggacccuccuggagcccggggacaccaucaucuucgaggcgaacggcaaccugaucgccccgcgguucgccuucgcccucucccgcggguucggcagcggcaucaucacguccaacgcccccauggacgagugcgacgcgaagugccagacgccccagggggccaucaacagcucccugcccuuccagaacguccacccggugaccaucggcgagugccccaaguacgugcggagcgccaagcugcgcauggucaccgggcuccggaacauccccuccauccagagccgcggccuguucggggccaucgccggcuucaucgagggcggguggaccggcaugguggacgggugguacggcuaccaccaccagaacgagcagggguccggcuacgcggccgaccagaaguccacccagaacgccaucgacggcaucaccaacaaggugaacagcgucaucgagaagaugaacacccaguucacggccguggggaaggaguucaacaagcuggagcggcgcauggagaaccucaacaagaaggucgacgacggcuuccuggacaucuggaccuacaacgccgagcugcucgugcugcuggagaacgagcggacccucgacuuccacgacagcaacgugaagaaccuguacgagaaggucaagucccagcugaagaacaacgcgaaggagaucgggaacggcugcuucgaguucuaccacaagugcaacgacgagugcauggagagcgugaagaacgggaccuacgacuaccccaaguacuccgaggagagcaagcucaaccgcgagaagaucgacggcgugaagcuggaguccaugggcgucuaccagauccuggccaucuacagcacgguggccagcucccucgugcugcuggucagccucggggccaucuccuucuggaugugcagcaacggcucccugcagugccggaucugcaucuga

SEQ ID NO: 65980 - RNA, 1698 nt, Artificial Sequence
  derived and/or modified CDS sequence (opt1) from hemagglutinin__InfluenzaA__ABV30294
augaaggugaagcugcucguccugcugugcaccuucaccgccacguacgccgacaccaucugcaucggcuaccacgcgaacaacagcaccgacaccguggacacggugcucgagaagaacgucaccgugacccacuccgugaaccugcuggaggaccgccacaacgggaagcucugccugcugaagggcaucgcgccccuccagcuggggaacugcagcgucgccggcuggauccuggggaacccggagugcgagcuccugaucuccaaggagagcugguccuacaucguggagacccccaaccccgagaacggcacgugcuaccccggcuacuucgccgacuacgaggagcugcgggagcagcucagcuccgugagcuccuucgagcgcuucgagaucuucccgaaggagagcuccuggcccaaccacaccgucaccggggugagcgccuccugcagccacaacggcaaguccagcuucuaccggaaccugcuguggcucaccgggaagaacggccuguaccccaaccugucccgcagcuacgccaacaacaaggagaaggaggugcucguccuguggggcgugcaccacccgcccaacaucggggaccagcgggcccuguaccacacggagaacgccuacguguccgucgugagcagccacuacucccgccgguucacccccgagaucgccaagcgccccaaggugcgggaccaggagggccgcaucaacuacuacuggacccuccuggagcccggggacaccaucaucuucgaggcgaacggcaaccugaucgccccgcgguucgccuucgcccucagccgcggguucggcuccggcaucaucacgagcaacgcccccauggacgagugcgacgcgaagugccagacgccccagggggccaucaacuccagccugcccuuccagaacguccacccggugaccaucggcgagugccccaaguacgugcgguccgccaagcugcgcauggucaccgggcuccggaacauccccagcauccagucccgcggccuguucggggccaucgccggcuucaucgagggcggguggaccggcaugguggacgggugguacggcuaccaccaccagaacgagcaggggagcggcuacgcggccgaccagaaguccacccagaacgccaucaacggcaucaccaacaaggugaacagcgucaucgagaagaugaacacccaguucacggccguggggaaggaguucaacaagcuggagcggcgcauggagaaccucaacaagaaggucgacgacggcuuccuggacaucuggaccuacaacgccgagcugcucgugcugcuggagaacgagcggacccucgacuuccacgacuccaacgugaagaaccuguacgagaaggucaagagccagcugaagaacaacgcgaaggagaucgggaacggcugcuucgaguucuaccacaagugcaacgacgagugcauggaguccgugaagaacgggaccuacgacuaccccaaguacagcgaggaguccaagcucaaccgcgagaagaucgacggcgugaagcuggagagcaugggcgucuaccagauccuggccaucuacuccacgguggccagcagccucgugcugcuggucucccucggggccaucagcuucuggaugugcuccaacggcagccugcagugccggaucugcaucuga

SEQ ID NO: 65981 - RNA, 1698 nt, Artificial Sequence
  derived and/or modified CDS sequence (opt1) from hemagglutinin__InfluenzaA__ABV30305
augaaggugaagcugcucguccugcugugcaccuucaccgccacguacgccgacaccaucugcaucggcuaccacgcgaacaacagcaccgacaccguggacacggugcucgagaagaacgucaccgugacccacuccgugaaccugcuggaggacagccacaacgggaagcucugccugcugaagggcaucgcgccccuccagcuggggaacugcuccgucgccggcuggauccuggggaacccggagugcgagcuccugaucagcaaggaguccuggagcuacaucguggagacccccaaccccgagaacggcacgugcuaccccggcuacuucgccgacuacgaggagcugcgcgagcagcucuccagcguguccagcuucgagcgguucgagaucuucccgaaggaguccagcuggcccaaccacaccgucaccgggggcuccgccagcugcucccacaacggcaagagcuccuucuaccgcaaccugcuguggcucaccgggaagaacgggcuguaccccaaccugagcaaguccuacgccaacaacaaggagaaggaggugcucgugcuguggggcguccaccacccgcccaacaucggcgaccagcgggcccuguaccacacggagaacgccuacgugagcguggucagcucccacuacagccgccgguucacccccgagaucgccaagcgccccaaggugcgggaccaggaggggcgcaucaacuacuacuggacccuccuggagcccggcgacaccaucaucuucgaggcgaacgggaaccugaucgccccgcgguucgccuucgcccucucccgcggcuucggcagcgggaucaucacguccaacgcccccauggacgagugcgacgcgaagugccagacgccccagggcgccaucaacagcucccugcccuuccagaacgugcacccggucaccaucggggagugccccaaguacgugcggagcaccaagcugcgcauggugaccggccuccggaacauccccuccauccagagccgcgggcuguucggcgccaucgccggcuucaucgagggcggguggaccgggauggucgacggcugguacggguaccaccaccagaacgagcagggcuccggcuacgccgcggaccagaaguccacccagaacgccaucaacgggaucaccaacaaggugaacagcgugaucgagaagaugaacacgcaguucaccgccgucggcaaggaguucaacaagcuggagcggcgcauggagaaccucaacaagaagguggacgacggguuccuggacaucuggaccuacaacgccgagcugcucguccugcuggagaacgagcggacccucgacuuccacgacagcaacgugaagaaccuguacgagaaggugaagucccagcugaagaacaacgccaaggagaucggcaacgggugcuucgaguucuaccacaagugcaacaacgagugcauggagagcgucaagaacggcacguacgacuaccccaaguacuccgaggagagcaagcucaaccgcgagaagaucgacggcgugaagcuggaguccauggggguguaccagauccuggcgaucuacagcaccgucgccagcucccucgugcugcuggugagccucggcgccaucuccuucuggaugugcagcaacgggucccugcagugccggaucugcaucuga

SEQ ID NO: 65982 - RNA, 1698 nt, Artificial Sequence; identical to SEQ ID NO: 65934
  derived and/or modified CDS sequence (opt1) from hemagglutinin__InfluenzaA__ABV30316

SEQ ID NO: 65983 - RNA, 1698 nt, Artificial Sequence; identical to SEQ ID NO: 65980
  derived and/or modified CDS sequence (opt1) from hemagglutinin__InfluenzaA__ABV30327

SEQ ID NO: 65984 - RNA, 1698 nt, Artificial Sequence; identical to SEQ ID NO: 65934
  derived and/or modified CDS sequence (opt1) from hemagglutinin__InfluenzaA__ABV30338

SEQ ID NO: 65985 - RNA, 1698 nt, Artificial Sequence; identical to SEQ ID NO: 65938
  derived and/or modified CDS sequence (opt1) from hemagglutinin__InfluenzaA__ABV30349

SEQ ID NO: 65986 - RNA, 1698 nt, Artificial Sequence
  derived and/or modified CDS sequence (opt1) from hemagglutinin__InfluenzaA__ABV30360
augaaggugaagcugcucguccugcugugcaccuucaccgccacguacgccgacaccaucugcaucggcuaccacgcgaacaacagcaccgacaccguggacacggugcucgagaagaacgucaccgugacccacuccgugaaccugcuggaggacagccacaacgggaagcucugccugcugaagggcaucgcgccccuccagcuggggaacugcuccgucgccggcuggauccuggggaacccggagugcgagcuccugaucagcaaggaguccuggagcuacaucguggagacccccaaccccgagaacggcacgugcuaccccggcaacuucgccgacuacgaggagcugcgcgagcagcucuccagcguguccagcuucgagcgguucgagaucuucccgaaggaguccagcuggcccaaccacaccgucaccgggguguccgccagcugcucccacaacggcaagagcuccuucuaccgcaaccugcuguggcucaccgggaagaacggccuguaccccaaccugagcaaguccuacgccaacaacaaggagaaggaggugcucguccuguggggcgugcaccacccgcccaacaucggggaccagcgggcccuguaccacacggagaacgccuacgugagcgucgugagcucccacuacagccgccgguucacccccgagaucgccaagcgccccaaggugcgggaccaggagggccgcaucaacuacuacuggacccuccuggagcccggggacaccaucaucuucgaggcgaacggcaaccugaucgccccgcgguucgccuucgcccucucccgcggguucggcagcggcaucaucacguccaacgcccccauggacgagugcgacgcgaagugccagacgccccagggggccaucaacagcucccugcccuuccagaacguccacccggugaccaucggcgagugccccaaguacgugcggagcgccaagcugcgcauggucaccgggcuccggaacauccccuccauccagagccgcggccuguucggggccaucgccggcuucaucgagggcggguggaccggcaugguggacgggugguacggcuaccaccaccagaacgagcagggguccggcuacgcggccgaccagaaguccacccagaacgccaucgacggcaucaccaacaaggugaacagcgucaucgagaagaugaacacccaguucacggccguggggaaggaguucaacaagcuggagcggcgcauggagaaccucaacaagaaggucgacgacggcuuccuggacaucuggaccuacaacgccgagcugcucgugcugcuggagaacgagcggacccucgacuuccacgacagcaacgugaagaaccuguacgagaaggucaagucccagcugaagaacaacgcgaaggagaucgggaacggcugcuucgaguucuaccacaagugcaacgacgagugcauggagagcgugaagaacgggaccuacgacuaccccaaguacuccgaggagagcaagcucaaccgcgagaagaucgacggcaucaagcuggaguccaugggcguguaccagauccuggccaucuacagcacggucgccagcucccucgugcugcuggugagccucggggccaucuccuucuggaugugcagcaacggcucccugcagugccggaucugcaucuga

SEQ ID NO: 65987 - RNA, 1698 nt, Artificial Sequence; identical to SEQ ID NO: 65938
  derived and/or modified CDS sequence (opt1) from hemagglutinin__InfluenzaA__ABV30371

SEQ ID NO: 65988 - RNA, 1701 nt, Artificial Sequence; identical to SEQ ID NO: 65753
  derived and/or modified CDS sequence (opt1) from hemagglutinin__InfluenzaA__ABV30382

SEQ ID NO: 65989 - RNA, 1701 nt, Artificial Sequence; identical to SEQ ID NO: 64654
  derived and/or modified CDS sequence (opt1) from hemagglutinin__InfluenzaA__ABV30393

SEQ ID NO: 65990 - RNA, 1701 nt, Artificial Sequence
  derived and/or modified CDS sequence (opt1) from hemagglutinin__InfluenzaA__ABV30404
augaagaccaucaucgcccugagcuacauccucugccugguguucgcccagaagcugcccggcaacgacaacuccaccgcgacgcucugccuggggcaccacgccgucccgaacggcaccaucgugaagaccaucaccaacgaccagaucgaggugacgaacgccaccgagcugguccagagcuccagcaccggggagaucugcgacagcccccaccagauccucgacggcgagaacugcacccugaucgacgcccugcucggggacccccagugcgacggcuuccagaacaagaagugggaccuguucguggagcgcagcaaggccuacuccaagugcuaccccuacgacgugccggacuacgcgagccugcggucccucgucgccagcuccggcacgcuggaguucaacaacgagagcuucaacuggaccggggugacccagaacggcaccuccagcgccugcauccgccgguccaacaacagcuucuucucccgccugaacuggcucacgcaccugaaguucaaguaccccgcccugaacgugaccaugcccaacaacgagaaguucgacaagcucuacaucuggggcguccaccaccccgggaccgacaacgaccagaucuuccuguacgcgcaggccagcgggcggaucaccguguccacgaagcgcagccagcagaccgugaucccgaacaucggcagccggccccgcguccggaacauccccucccgcaucagcaucuacuggaccaucgugaagcccggcgacauccugcucaucaacuccaccgggaaccugaucgccccgcggggcuacuucaagauccgcagcgggaaguccagcaucaugcgguccgacgcccccaucggcaagugcaacagcgagugcaucacgcccaacggcuccauccccaacgacaagccguuccagaacgugaaccgcaucaccuacggggccugcccccgguacgucaagcagaacacccugaagcucgcgaccggcaugcgcaacgugcccgagaagcagacgcgggggaucuucggcgccaucgccggguucaucgagaacggcugggagggcaugguggacgggugguacggcuuccgccaccagaacagcgaggggaucggccaggccgccgaccugaaguccacccaggcggccaucgaccagaucaacgggaagcugaaccggcucaucggcaagaccaacgagaaguuccaccagaucgagaaggaguucagcgaggucgagggccgcauccaggaccuggagaaguacguggaggacaccaagaucgaccugugguccuacaacgccgaccuccugguggcccuggagaaccagcacacgaucgaccucaccgacagcgagaugaacaagcuguucgagaagaccaagaagcagcugcgggagaacgccgaggacauggggaacggcugcuucaagaucuaccacaagugcgacaacgcgugcaucggguccauccgcaacggcaccuacgaccacgacgucuaccgcgacgaggcccucaacaaccgguuccagaucaaggggguggagcugaaguccggcuacaaggacuggauccuguggaucuccuucgccaucagcugcuuccuccugugcguggcccugcucggcuucaucaugugggccugccagaaggggaacauccgcugcaacaucugcaucuga

SEQ ID NO: 65991 - RNA, 1701 nt, Artificial Sequence
  derived and/or modified CDS sequence (opt1) from hemagglutinin__InfluenzaA__ABV30415
augaagaccaucaucgcccugagcuacauccucugccugguguucgcccagaagcugcccggcaucgacaacuccaccgcgacgcucugccuggggcaccacgccgucccgaacggcaccaucgugaagaccaucaccaacgaccagaucgaggugacgaacgccaccgagcugguccagagcuccagcaccgggggcaucugcgacagcccccaccagauccucgacggggagaacugcacccugaucgacgcccugcucggcgacccccagugcgacggcuuccagaacaagaagugggaccuguucguggagcgcuccaaggccuacuccaacugcuaccccuacgacgugccggacuacgcgagccugcggucccucgucgccagcuccgggacgcuggaguucaacaacgagagcuucaacugggccggcgugacccagaacgggaccuccagcgccugcaagcgcggcuccaacaacagcuucuucucccggcugaacuggcucacccacagcaaguucaaguaccccgcgcugaacgugacgaugcccaacaacgaggaguucgacaagcuguacaucuggggcguccaccaccccgggaccgacaacgaccagaucuuccucuacgcccaggccuccggccgcaucaccgugagcaccaagcggagccagcagacggugaucccgaacaucgggucccgcccccggguccgcaacauccccagccggaucuccaucuacuggaccaucgugaagcccggcgacauccugcugaucaacagcaccgggaaccucaucgccccgcgcggcuacuucaagauccgguccggcaagagcuccaucaugcgcagcgacgcccccaucgggaagugcaacuccgagugcaucacccccaacggcagcauccccaacgacaagccguuccagaacgugaaccggaucacguacggggcgugcccccgcuacgucaagcagaacacccugaagcuggccaccggcaugcggaacgugcccgagaagcagacccgcgggaucuucggcgccaucgccggcuucaucgagaacgggugggagggcaugguggacgggugguacggcuuccggcaccagaacuccgaggggaucggccaggccgcggaccucaagagcacgcaggccgccaucgaccagaucaacggcaagcugaaccgccugaucgggaagaccaacgagaaguuccaccagaucgagaaggaguucuccgaggucgagggccggauccaggaccucgagaaguacguggaggacaccaagaucgaccuguggagcuacaacgccgagcugcucguggcccuggagaaccagcacaccaucgaccugacggacuccgagaugaacaagcuguucgagaagaccaagaagcagcuccgcgagaacgcggaggacauggggaacggcugcuucaagaucuaccacaagugcgacaacgccugcaucgggagcauccggaacggcaccuacgaccacgacgucuaccgcgacgaggcccugaacaaccgcuuccagaucaaguccguggagcucaagagcggcuacaaggacuggauccuguggaucuccuucgccaucagcugcuuccugcucugcguggcccugcugggguucaucaugugggcgugccagaagggcaacauccggugcaacaucugcaucuga

SEQ ID NO: 65992 - RNA, 1701 nt, Artificial Sequence; identical to SEQ ID NO: 65952
  derived and/or modified CDS sequence (opt1) from hemagglutinin__InfluenzaA__ABV30426

SEQ ID NO: 65993 - RNA, 1701 nt, Artificial Sequence
  derived and/or modified CDS sequence (opt1) from hemagglutinin__InfluenzaA__ABV30437
augaagaccaucaucgcccugagcuacauccucugccugguguucgcccagaagcugcccggcaacgacaacuccaccgcgacgcucugccuggggcaccacgccgucccgaacggcaccaucgugaagaccaucaccaacgaccagaucgaggugacgaacgccaccgagcugguccagagcuccagcaccggggagaucugcgacagcccccaccagauccucgacggcgagaacugcacccugaucgacgcccugcucggggacccccagugcgacggcuuccagaacaagaagugggaccuguucguggagcgcagcaaggccuacuccaacugcuaccccuacgacgugccggacuacgcgagccugcggucccucgucgccagcuccggcacgcuggaguucaacaacgagagcuucaacuggaccggggugacccagaacggcaccuccagcgccugcauccgccgguccaaccacagcuucuucucccgccugaacuggcucacgcaccugaaguucaaguaccccgcccugaacgugaccaugcccaacaacgagaaguucgacaagcucuacaucuggggcguccaccaccccgggaccgacaacgaccagaucuuccuguacgcgcaggccagcgggcggaucaccguguccacgaagcgcagccagcagaccgugaucccgaacaucggcagccggccccgcguccggaacauccccucccgcaucagcaucuacuggaccaucgugaagcccggcgacauccugcucaucaacuccaccgggaaccugaucgccccgcggggcuacuucaagauccgcagcgggaaguccagcaucaugcgguccgacgcccccaucggcaagugcaacagcgagugcaucacgcccaacggcuccauccccaacgacaagccguuccagaacgugaaccgcaucaccuacggggccugcccccgguacgucaagcagaacacccugaagcucgcgaccggcaugcgcaacgugcccgagaagcagacgcgggggaucuucggcgccaucgccggguucaucgagaacggcugggagggcaugguggacgggugguacggcuuccgccaccagaacagcgaggggaucggccaggccgccgaccugaaguccacccaggcggccaucgaccagaucaacgggaagcugaaccggcucaucggcaagaccaacgagaaguuccaccagaucgagaaggaguucagcgaggucgagggccgcauccaggaccuggagaaguacguggaggacaccaagaucgaccugugguccuacaacgccgagcuccugguggcccuggagaaccagcacacgaucgaccucaccgacagcgagaugaacaagcuguucgagaagaccaagaagcagcugcgggagaacgccgaggacauggggaacggcugcuucaagaucuaccacaagugcgacaacgcgugcaucggguccauccgcaacggcaccuacgaccacgacgucuaccgcgacgaggcccucaacaaccgguuccagaucaaggggguggagcugaaguccggcuacaaggacuggauccuguggaucuccuucgccaucagcugcuuccuccugugcguggcccugcucggcuucaucaugugggccugccagaaggggaacauccgcugcaacaucugcaucuga

SEQ ID NO: 65994 - RNA, 1701 nt, Artificial Sequence; identical to SEQ ID NO: 65952
  derived and/or modified CDS sequence (opt1) from hemagglutinin__InfluenzaA__ABV30448

SEQ ID NO: 65995 - RNA, 1698 nt, Artificial Sequence
  derived and/or modified CDS sequence (opt1) from hemagglutinin__InfluenzaA__ABV30459
augaaggugaagcugcucauccugcugugcaccuucaccgccacguacgccgacaccaucugcaucggcuaccacgcgaacaacagcaccgacaccgucgacacggugcucgagaagaacgugaccgucacccacuccgugaaccugcuggaggacagccacaacgggaagcucugccugcugaagggcaucgcgccccuccagcuggggaacugcuccguggccggcuggauccuggggaacccggagugcgagcuccugaucagcaaggaguccuggagcuacaucgucgaggcccccaaccccgagaacgggaccugcuaccccggcuacuucgccgacuacgaggagcugcgcgagcagcucuccagcguguccagcuucgagcgguucgagaucuucccgaaggaguccagcuggcccaaccacacggugaccggggucuccgccagcugcucccacaacggcaagagcuccuucuaccgcaaccugcuguggcucaccgggaagaacggccuguaccccaaccugagcaaguccuacgccaacaacaaggagaaggaggugcucgugcuguggggcguccaccacccgcccaacaucggcgaccagcgggcccuguaccacaccgagaacgccuacgugagcguggucagcucccacuacagccgccgguucacgcccgagaucgcgaagcgccccaaggugcgggaccaggagggccgcaucaacuacuacuggacccuccuggagcccggggacaccaucaucuucgaggccaacggcaaccugaucgccccgcgguucgccuucgcccucucccgcggguucggcagcggcaucaucaccuccaacgcgcccauggacgagugcgacgccaagugccagacgccccagggggccaucaacagcucccugcccuuccagaacgugcacccggucaccaucggcgagugccccaaguacgugcggagcaccaagcugcgcauggugaccgggcuccggaacauccccuccauccagagccgcggccuguucggggccaucgccggcuucaucgagggcggguggacgggcauggucgacgggugguacggcuaccaccaccagaacgagcagggguccggcuacgcggccgaccagaaguccacccagaacgccaucaacggcaucaccaacaaggugaacagcgugaucgagaagaugaacacccaguucacggccgucgggaaggaguucaacaagcuggagcggcgcauggagaaccucaacaagaagguggacgacggcuuccuggacaucuggaccuacaacgccgagcugcucguccugcuggagaacgagcggacccucgacuuccacgacagcaacgugaagaaccuguacgagaaggugaagucccagcugaagaacaacgcgaaggagaucgggaacggcugcuucgaguucuaccacaagugcaacgacgagugcauggagagcgucaagaacgggaccuacgacuaccccaaguacuccgaggagagcaagcucaaccgcgagaagaucgacggcgugaagcuggaguccaugggcguguaccagauccuggccaucuacagcacggucgccagcucccucgugcugcuggugagccucggggccaucuccuucuggaugugcagcaacggcucccugcagugccggaucugcaucuga

SEQ ID NO: 65996 - RNA, 1701 nt, Artificial Sequence; identical to SEQ ID NO: 65952
  derived and/or modified CDS sequence (opt1) from hemagglutinin__InfluenzaA__ABV30470

SEQ ID NO: 65997 - RNA, 1698 nt, Artificial Sequence; identical to SEQ ID NO: 65934
  derived and/or modified CDS sequence (opt1) from hemagglutinin__InfluenzaA__ABV30492

SEQ ID NO: 65998 - RNA, 1698 nt, Artificial Sequence
  derived and/or modified CDS sequence (opt1) from hemagglutinin__InfluenzaA__ABV30503
augaaggugaagcugcucauccugcugugcaccuucaccgccacguacgccgacaccaucugcaucggcuaccacgcgaacaacagcaccgacaccgucgacacggugcucgagaagaacgugaccgucacccacuccgugaaccugcuggaggacagccacaacgggaagcucugccugcugaagggcaucgcgccccuccagcuggggaacugcuccguggccggcuggauccuggggaacccggagugcgagcuccugaucagcaaggaguccuggagcuacaucgucgagacccccaaccccgagaacggcacgugcuaccccggcuacuucgccgacuacgaggagcugcgcgagcagcucuccagcguguccagcuucgagcgguucgagaucuucccgaaggaguccagcuggcccaaccacaccaucaccgggguguccgccagcugcucccacaacggcaagagcuccuucuaccgcaaccugcuguggcucaccgggaagaacggccuguaccccaaccugagcaaguccuacgccaacaacaaggagaaggagguccucgugcuguggggcgugcaccacccgcccaacaucggggaccagcgggcccuguaccacacggagaacgccuacgucagcguggugagcucccacuacagccgccgguucacccccgagaucgccaagcgccccaagguccgggaccaggagggccgcaucaacuacuacuggacccuccuggagcccggggacaccaucaucuucgaggcgaacggcaaccugaucgccccgcgguucgccuucgcccucucccgcggguucggcagcggcaucaucacguccaacgcccccauggacgagugcgacgcgaagugccagacgccccagggggccaucaacagcucccugcccuuccagaacgugcacccggugaccaucggcgagugccccaaguacguccggagcaccaagcugcgcauggugaccgggcuccggaacauccccuccauccagagccgcggccuguucggggccaucgccggcuucaucgagggcggguggaccggcaugguggacgggugguacggcuaccaccaccagaacgagcagggguccggcuacgccgcggaccagaaguccacccagaacgccaucaacggcaucaccaacaaggucaacagcgugaucgagaagaugaacacgcaguucaccgccguggggaaggaguucaacaagcuggagcggcgcauggagaaccucaacaagaaggucgacgacggcuuccuggacaucuggaccuacaacgccgagcugcucgugcugcuggagaacgagcggacccucgacuuccacgacagcaacgucaagaaccuguacgagaaggugaagucccagcugaagaacaacgccaaggagaucgggaacggcugcuucgaguucuaccacaagugcaacgacgagugcauggagagcgugaagaacgggacguacgacuaccccaaguacuccgaggagagcaagcucaaccgcgagaagaucgacggcgucaagcuggaguccaugggcguguaccagauccuggcgaucuacagcaccguggccagcucccucguccugcuggugagccucggggccaucuccuucuggaugugcagcaacggcucccugcagugccggaucugcaucuga

SEQ ID NO: 65999 - RNA, 1701 nt, Artificial Sequence; identical to SEQ ID NO: 65952
  derived and/or modified CDS sequence (opt1) from hemagglutinin__InfluenzaA__ABV30514

SEQ ID NO: 66000 - RNA, 1698 nt, Artificial Sequence
  derived and/or modified CDS sequence (opt1) from hemagglutinin__InfluenzaA__ABV30525
augaaggugaagcugcucguccugcugugcaccuucaccgccacguacgccgacaccaucugcaucggcuaccacgcgaacaacagcaccgacaccguggacacggugcucgagaagaacgucaccgugacccacuccgugaaccugcuggaggacagccacaacgggaagcucugccugcugaagggcaucgcgccccuccagcuggggaacugcuccgucgccggcuggauccuggggaacccggagugcgagcuccugaucagcaaggaguccuggagcuacaucguggagacccccaaccccgagaacggcacgugcuaccccggcuacuucgccgacuacgaggagcugcgcgagcagcucuccagcguguccagcuucgagcgguucgagaucuucccgaaggaguccagcuggcccaaccacaccgucaccgggguguccgccagcugcucccacagcggcaaguccagcuucuaccgcaaccugcuguggcucaccgggaagaacggccuguaccccaaccuguccaagagcuacgccaacaacaaggagaaggaggugcucguccuguggggcgugcaccacccgcccaacaucggggaccagcgggcccuguaccacacggagaacgccuacgugagcgucguguccagccacuacucccgccgguucacccccgagaucgccaagcgccccaaggugcgggaccaggagggccgcaucaacuacuacuggacccuccuggagcccggggacaccaucaucuucgaggcgaacggcaaccugaucgccccgcgguucgccuucgcccucagccgcggguucggcuccggcaucaucacgagcaacacccccaugggggagugcgacgccaagugccagacgccccagggcgcgaucaacuccagccugcccuuccagaacguccacccggugaccaucggggagugccccaaguacgugcgguccgccaagcugcgcauggucaccggccuccggaacauccccagcauccagucccgcgggcuguucggcgccaucgccggcuucaucgagggcggguggaccgggaugguggacggcugguacggguaccaccaccagaacgagcagggcagcggcuacgccgcggaccagaaguccacccagaacgccaucaacgggaucaccaacaaggugaacagcgucaucgagaagaugaacacgcaguucaccgccgugggcaaggaguucaacaagcuggagcggcgcauggagaaccucaacaagaaggucgacgacggguuccuggacaucuggaccuacaacgccgagcugcucgugcugcuggagaacgagcggacccucgacuuccacgacuccaacgugaagaaccuguacgagaaggucaagagccagcugaagaacaacgccaaggagaucggcaacgggugcuucgaguucuaccacaagugcaacgacgagugcauggaguccgugaagaacggcacguacgacuaccccaaguacagcgaggaguccaagcucaaccgcgagaagaucgacggcgugaagcuggagagcaugggggucuaccagauccuggcgaucuacagcaccguggccuccagccucgugcugcuggucucccucggcgccaucagcuucuggaugugcuccaacgggagccugcagugccggaucugcaucuga

SEQ ID NO: 66001 - RNA, 1698 nt, Artificial Sequence; identical to SEQ ID NO: 65938
  derived and/or modified CDS sequence (opt1) from hemagglutinin__InfluenzaA__ABV30536

SEQ ID NO: 66002 - RNA, 1698 nt, Artificial Sequence; identical to SEQ ID NO: 65945
  derived and/or modified CDS sequence (opt1) from hemagglutinin__InfluenzaA__ABV30547

SEQ ID NO: 66003 - RNA, 1698 nt, Artificial Sequence; identical to SEQ ID NO: 65938
  derived and/or modified CDS sequence (opt1) from hemagglutinin__InfluenzaA__ABV30558

SEQ ID NO: 66004 - RNA, 1698 nt, Artificial Sequence
  derived and/or modified CDS sequence (opt1) from hemagglutinin__InfluenzaA__ABV30569
augaaggugaagcugcucauccugcugugcaccuucaccgccacguacgccgacaccaucugcaucggcuaccacgcgaacaacagcaccgacaccgucgacacggugcucgagaagaacgugaccgucacccacuccgugaaccugcuggaggacaaccacaacgggaagcucugccugcugaagggcaucgcgccccuccagcuggggaacugcagcguggccggcuggauccuggggaacccggagugcgagcuccugaucuccaaggagagcugguccuacaucgucgagacccccaaccccgagaacggcacgugcuaccccggcuacuucgccgacuacgaggagcugcgcgagcagcucagcuccgugagcuccuucgagcgguucgagaucuucccgaaggagagcuccuggcccaaccacaccgugaccggggucagcgccuccugcagccacaacggcaaguccagcuucuaccgcaaccugcuguggcucaccgggaagaacggccuguaccccaaccuguccaagagcuacgccaacaacaaggagaaggaggugcucgugcuguggggcguccaccacccgcccaacaucggggaccagcgggcccuguaccacacggagaacgccuacguguccguggucagcagccacuacucccgccgguucacccccgagaucgccaagcgccccaaggugcgggaccaggagggccgcaucaacuacuacuggacccuccuggagcccggggacaccaucaucuucgaggcgaacggcaaccugaucgccccgcgguucgccuucgcccucagccgcggguucggcuccggcaucaucacgagcaacgcccccauggacgagugcgacgcgaagugccagacgccccagggggccaucaacuccagccugcccuuccagaacgugcacccggucaccaucggcgagugccccaaguacgugcgguccaccaagcugcgcauggugaccgggcuccggaacauccccagcauccagucccgcggccuguucggggccaucgccggcuucaucgagggcggguggaccggcauggucgacgggugguacggcuaccaccaccagaacgagcaggggagcggcuacgccgcggaccagaaguccacccagaacgccaucaacggcaucaccaacaaggugaacagcgugaucgagaagaugaacacgcaguucaccgccgucgggaaggaguucaacaagcuggagcggcgcauggagaaccucaacaagaagguggacgacggcuuccuggacaucuggaccuacaacgccgagcugcucguccugcuggagaacgagcggacccucgacuuccacgacuccaacgugaagaaccuguacgagaaggucaagagccagcugaagaacaacgccaaggagaucgggaacggcugcuucgaguucuaccacaagugcaacgacgagugcauggaguccgugaagaacgggacguacgacuaccccaaguacagcgaggaguccaagcucaaccgcgagaagaucgacggcgugaagcuggagagcaugggcguguaccagauccuggcgaucuacuccaccgucgccagcagccucgugcugcuggugucccucggggccaucagcuucuggaugugcuccaacggcagccugcagugccggaucugcaucuga

SEQ ID NO: 66005 - RNA, 1698 nt, Artificial Sequence; identical to SEQ ID NO: 65938
  derived and/or modified CDS sequence (opt1) from hemagglutinin__InfluenzaA__ABV30580

SEQ ID NO: 66006 - RNA, 1698 nt, Artificial Sequence; identical to SEQ ID NO: 65934
  derived and/or modified CDS sequence (opt1) from hemagglutinin__InfluenzaA__ABV30591

SEQ ID NO: 66007 - RNA, 1698 nt, Artificial Sequence; identical to SEQ ID NO: 65934
  derived and/or modified CDS sequence (opt1) from hemagglutinin__InfluenzaA__ABV30602

SEQ ID NO: 66008 - RNA, 1698 nt, Artificial Sequence
  derived and/or modified CDS sequence (opt1) from hemagglutinin__InfluenzaA__ABV30613
augaaggugaagcugcucauccugcugugcaccuucaccgccacguacgccgacaccaucugcaucggcuaccacgcgaacaacagcaccgacaccgucgacacggugcucgagaagaacgugaccgucacccacuccgugaaccugcuggaggacagccacaacgggaagcucugccugcugaagggcaucgcgccccuccagcuggggaacugcuccguggccggcuggauccuggggaacccggagugcgagcuccugaucagcaaggaguccuggagcuacaucgucgagacccccaaccccgagaacggcacgugcuaccccggcuacuucgccgacuacgaggagcugcgcgagcagcucuccagcguguccagcuucgagcgguucgagaucuucccgaaggaguccagcuggcccaaccacaccgugaccggggucuccgccagcugcucccacaacggcaagagcuccuucuaccgcaaccugcuguggcucaccgggaagaacggccuguaccccaaccugagcaaguccuacgccaacaacaaggagaaggaggugcucgugcuguggggcguccaccacccgcccaacaucggggaccagcgggcccuguaccacacggagaacgccuacgugagcguggucagcucccacuacagccgccgguucacccccgagaucgccaagcgccccaaggugcgggaccaggagggccgcaucaacuacuacuggacccuccuggagcccggggacaccaucaucuucgaggcgaacggcaaccugaucgccccgcgguucgccuucgcccucucccgcggguucggcagcggcaucaucacguccaacgcccccauggacgagugcgacgcgaagugccagacgccccagggggccaucaacagcucccugcccuuccagaacgugcacccggucaccaucggcgagugccccaaguacgugcggagcaccaagcugcgcauggugaccgggcuccggaacauccccuccauccagagccgcggccuguucggggccaucgccggcuucaucgagggcggguggaccggcauggucgacgggugguacggcuaccaccaccagaacgagcagggguccggcuacgccgcggaccagaaguccacccagaacgccaucaacggcaucaccaacaaggugaacagcgugaucgagaagaugaacacgcaguucaccgccgucgggaaggaguucaacaagcuggagcggcgcaugaagaaccucaacaagaagguggacgacggcuuccuggacaucuggaccuacaacgccgagcugcucguccugcuggagaacgagcggacccucgacuuccacgacagcaacgugaagaaccuguacgagaaggugaagucccagcugaagaacaacgccaaggagaucgggaacggcugcuucgaguucuaccacaagugcaacgacgagugcauggagagcgucaagaacgggacguacgacuaccccaaguacuccgaggagagcaagcucaaccgcgagaagaucgacggcgugaagcuggaguccaugggcguguaccagauccuggcgaucuacagcaccgucgccagcucccucgugcugcuggugagccucggggccaucuccuucuggaugugcagcaacggcucccugcagugccggaucugcaucuga

SEQ ID NO: 66009 - RNA, 1698 nt, Artificial Sequence; identical to SEQ ID NO: 65934
  derived and/or modified CDS sequence (opt1) from hemagglutinin__InfluenzaA__ABV30624

SEQ ID NO: 66010 - RNA, 1701 nt, Artificial Sequence
  derived and/or modified CDS sequence (opt1) from hemagglutinin__InfluenzaA__ABV30646
augaagaccaucaucgcccugagcuacauccucugccugguguucgcccagaagcugcccggcaacgacaacuccaccgcgacgcucugccuggggcaccacgccgucccgaacggcaccaucgugaagaccaucaccaacgaccagaucgaggugacgaacgccaccgagcugguccagagcuccagcaccggggagaucugcgacagcccccaccagauccucgacggcgagaacugcacccugaucgacgcccugcucggggacccccagugcgacggcuuccagaacaagaagugggaccuguucguggagcgcagcaaggccuacuccaacugcuaccccuacgacgugccggacuacgcgagccugcggucccucgucgccagcuccggcacgcuggaguucaacaacgagagcuucaacuggaccggggugacccagaacggcaccuccagcgccugcauccgccgguccaacaacagcuucuucucccgccugaacuggcucacgcaccugaaguucaaguaccccgcccugaacgugaccaugcccaacaacgagaaguucgacaagcucuacaucuggggcguccaccaccccgggaccuacaacgaccagaucuuccuguacgcgcaggccagcgggcggaucaccguguccacgaagcgcagccagcagaccgugaucccgaacaucggcagccggccccgcguccggaacauccccucccgcaucagcaucuacuggaccaucgugaagcccggcgacauccugcucaucaacuccaccgggaaccugaucgccccgcggggcuacuucaagauccgcagcgggaaguccagcaucaugcgguccgacgcccccaucggcaagugcaacagcgagugcaucacgcccaacggcuccauccccaacgacaagccguuccagaacgugaaccgcaucaccuacggggccugcccccgguacgucaagcagaacacccugaagcucgcgaccggcaugcgcaacgugcccgagaagcagacgcgggggaucuucggcgccaucgccggguucaucgagaacggcugggagggcaugguggacgggugguacggcuuccgccaccagaacagcgaggggaucggccaggccgccgaccugaaguccacccaggcggccaucgaccagaucaacgggaagcugaaccggcucaucggcaagaccaacgagaaguuccaccagaucgagaaggaguucagcgaggucgagggccgcauccaggaccuggagaaguacguggaggacaccaagaucgaccugugguccuacaacgccgagcuccugguggcccuggagaaccagcacacgaucgaccucaccgacagcgagaugaacaagcuguucgagaagaccaagaagcagcugcgggagaacgccgaggacauggggaacggcugcuucaagaucuaccacaagugcgacaacgcgugcaucggguccauccgcaacggcaccuacgaccacgacgucuaccgcgacgaggcccucaacaaccgguuccagaucaaggggguggagcugaaguccggcuacaaggacuggauccuguggaucuccuucgccaucagcugcuuccuccugugcguggcccugcucggcuucaucaugugggccugccagaaggggaacauccgcugcaacaucugcaucuga

SEQ ID NO: 66011 - RNA, 1701 nt, Artificial Sequence
  derived and/or modified CDS sequence (opt1) from hemagglutinin__InfluenzaA__ABV30657
augaagaccaucaucgcccugagcuacauccucugccugguguucgcccagaagcugcccggcaacgacaacuccaccgcgacgcucugccuggggcaccacgccgucccgaacggcaccaucgugaagaccaucaccaacgaccagaucgaggugacgaacgccaccgagcugguccagagcuccagcaccggggagaucugcgacagcccccaccagauccucgacggcgagaacugcacccugaucgacgcccugcucggggacccccagugcgacggcuuccagaacaagaagugggaccuguucguggagcgcagcaaggccuacuccaacugcuaccccuacgacgugccggacuacgcgagccugcggucccucgucgccagcuccggcacgcuggaguucaacaacgagagcuucaacuggaccggggugacccagaacggcaccuccagcgccugcauccgccgguccaacaacagcuucuucucccgccugaacuggcucacgcaccugaaguucaaguaccccgcccugaacgugaccaugcccaacaacgagaaguucgacaagcucuacaucuggggcguccaccaccccgggaccgacaacgaccagguguuccuguacgcgcaggccagcgggcggaucaccguguccacgaagcgcagccagcagaccgucaucccgaacaucggcagccggccccgcgugcggaacauccccucccgcaucagcaucuacuggaccaucgugaagcccggcgacauccugcucaucaacuccaccgggaaccugaucgccccgcggggcuacuucaagauccgcagcgggaaguccagcaucaugcgguccgacgcccccaucggcaagugcaacagcgagugcaucacgcccaacggcuccauccccaacgacaagccguuccagaacgucaaccgcaucaccuacggggccugcccccgguacgugaagcagaacacccugaagcucgcgaccggcaugcgcaacgugcccgagaagcagacgcgggggaucuucggcgccaucgccggguucaucgagaacggcugggagggcauggucgacgggugguacggcuuccgccaccagaacagcgaggggaucggccaggccgccgaccugaaguccacccaggcggccaucgaccagaucaacgggaagcugaaccggcucaucggcaagaccaacgagaaguuccaccagaucgagaaggaguucagcgagguggagggccgcauccaggaccuggagaaguacguggaggacaccaagaucgaccugugguccuacaacgccgagcuccuggucgcccuggagaaccagcacacgaucgaccucaccgacagcgagaugaacaagcuguucgagaagaccaagaagcagcugcgggagaacgccgaggacauggggaacggcugcuucaagaucuaccacaagugcgacaacgcgugcaucggguccauccgcaacggcaccuacgaccacgacguguaccgcgacgaggcccucaacaaccgguuccagaucaaggggguggagcugaaguccggcuacaaggacuggauccuguggaucuccuucgccaucagcugcuuccuccugugcgucgcccugcucggcuucaucaugugggccugccagaaggggaacauccgcugcaacaucugcaucuga

SEQ ID NO: 66012 - RNA, 1701 nt, Artificial Sequence; identical to SEQ ID NO: 66011
  derived and/or modified CDS sequence (opt1) from hemagglutinin__InfluenzaA__ABV45860

SEQ ID NO: 66013 - RNA, 1698 nt, Artificial Sequence; identical to SEQ ID NO: 65979
  derived and/or modified CDS sequence (opt1) from hemagglutinin__InfluenzaA__ABV45871

SEQ ID NO: 66014 - RNA, 1698 nt, Artificial Sequence; identical to SEQ ID NO: 65938
  derived and/or modified CDS sequence (opt1) from hemagglutinin__InfluenzaA__ABV45882

SEQ ID NO: 66015 - RNA, 1698 nt, Artificial Sequence; identical to SEQ ID NO: 65945
  derived and/or modified CDS sequence (opt1) from hemagglutinin__InfluenzaA__ABV45893

SEQ ID NO: 66016 - RNA, 1701 nt, Artificial Sequence; identical to SEQ ID NO: 65753
  derived and/or modified CDS sequence (opt1) from hemagglutinin__InfluenzaA__ABV45904

SEQ ID NO: 66017 - RNA, 1698 nt, Artificial Sequence; identical to SEQ ID NO: 65945
  derived and/or modified CDS sequence (opt1) from hemagglutinin__InfluenzaA__ABV45926

SEQ ID NO: 66018 - RNA, 1698 nt, Artificial Sequence
  derived and/or modified CDS sequence (opt1) from hemagglutinin__InfluenzaA__ABV45937
augaaggugaagcugcucguccugcugugcaccuucaccgccacguacgccgacaccaucugcaucggcuaccacgcgaacaacagcaccgacaccguggacacggugcucgagaagaacgucaccgugacccacuccgugaaccugcuggaggacagccacaacgggaagcucugccugcugaagggcaucgcgccccuccagcuggggaacugcuccgucgccggcuggauccuggggaacccggagugcgagcuccugaucagcaaggaguccuggagcuacaucguggagacccccaaccccgagaacggcacgugcuaccccggcuacuucgccgacuacgaggagcugcgcgagcagcucuccagcguguccagcuucgagcgguucgagaucuucccgaaggaguccagcuggcccaaccacaccgucaccgggguguccgccagcugcucccacaacggcaagagcuccuucuaccgcaaccugcuguggcucaccgggaagaacggccuguaccccaaccugagcaaguccuacgccaacaacaaggagaaggaggugcucguccuguggggcgugcaccacccgcccaacaucggggaccagcgggcccuguaccacacggagaacgccuacgugagcgucgugagcucccacuacagccgccgguucacccccgagaucgccaagcgccccaaggugcgggaccaggagggccgcaucaacuacuacuggacccuccuggagcccggggacaccaucaucuucgagacgaacggcaaccugaucgcgccgcgguucgccuucgcccucucccgcggguucggcagcggcaucaucaccuccaacgcccccaugggggagugcgacgccaagugccagacgccccagggcgcgaucaacagcucccugcccuuccagaacguccacccggugaccaucggggagugccccaaguacgugcggagcgccaagcugcgcauggucaccggccuccggaacauccccuccauccagagccgcgggcuguucggcgccaucgccggcuucaucgagggcggguggaccgggaugguggacggcugguacggguaccaccaccagaacgagcagggcuccggcuacgccgcggaccagaaguccacccagaacgccaucaacgggaucaccaacaaggugaacagcgucaucgagaagaugaacacgcaguucaccgccgugggcaaggaguucaacaagcuggagcggcgcauggagaaccucaacaagaaggucgacgacggguuccuggacaucuggaccuacaacgccgagcugcucgugcugcuggagaacgagcggacccucgacuuccacgacagcaacgugaagaaccuguacgagaaggucaagucccagcugaagaacaacgccaaggagaucggcaacgggugcuucgaguucuaccacaagugcaacgacgagugcauggagagcgugaagaacggcacguacgacuaccccaaguacuccgaggagagcaagcucaaccgcgagaagaucgacggcgugaagcuggaguccaugggggucuaccagauccuggcgaucuacagcaccguggccagcucccucgugcugcuggucagccucggcgccaucuccuucuggaugugcagcaacgggucccugcagugccggaucugcaucuga

SEQ ID NO: 66019 - RNA, 1698 nt, Artificial Sequence; identical to SEQ ID NO: 65971
  derived and/or modified CDS sequence (opt1) from hemagglutinin__InfluenzaA__ABV45948

SEQ ID NO: 66020 - RNA, 1698 nt, Artificial Sequence; identical to SEQ ID NO: 65938
  derived and/or modified CDS sequence (opt1) from hemagglutinin__InfluenzaA__ABV45959

SEQ ID NO: 66021 - RNA, 1701 nt, Artificial Sequence
  derived and/or modified CDS sequence (opt1) from hemagglutinin__InfluenzaA__ABV45970
augaagaccaucaucgcccugagcuacauccucugccugguguucgcccagaagcugcccggcaacgacaacuccaccgcgacgcucugccuggggcaccacgccgucccgaacggcaccaucgugaagaccaucaccaacgaccagaucgaggugacgaacgccaccgagcugguccagagcuccagcaccggggagaucugcgacagcccccaccagauccucgacggcgagaacugcacccugaucgacgcccugcucggggacccccagugcgacggcuuccagaacaagaagugggaccuguucguggagcgcagcaaggccuacuccaacugcuaccccuacgacgugccggaccacgcgagccugcggucccucgucgccagcuccggcacgcuggaguucaacaacgagagcuucaacuggaccggggugacccagaacggcaccuccagcgccugcauccgccgguccaacaacagcuucuucucccgccugaacuggcucacgcaccugaaguucaaguaccccgcccugaacgugaccaugcccaacaacgagaaguucgacaagcucuacaucuggggcguccaccaccccgggaccgacaacgaccagaucuuccuguacgcgcaggccagcgggcggaucaccguguccacgaagcgcagccagcagaccgugaucccgaacaucggcagccggccccgcguccggaacauccccucccgcaucagcaucuacuggaccaucgugaagcccggcgacauccugcucaucaacuccaccgggaaccugaucgccccgcggggcuacuucaagauccagagcgggaaguccagcaucaugcgcuccgacgcccccaucggcaagugcaacagcgagugcaucacgcccaacggcuccauccccaacgacaagccguuccagaacgugaaccggaucaccuacggggccugcccccgcuacgucaagcagaacacccugaagcucgcgaccggcaugcggaacgugcccgagaagcagacgcgcgggaucuucggcgccaucgccggguucaucgagaacggcugggagggcaugguggacgggugguacggcuuccggcaccagaacagcgaggggaucggccaggccgccgaccugaaguccacccaggcggccaucgaccagaucaacgggaagcugaaccgccucaucggcaagaccaacgagaaguuccaccagaucgagaaggaguucagcgaggucgagggccggauccaggaccuggagaaguacguggaggacaccaagaucgaccugugguccuacaacgccgagcuccugguggcccuggagaaccagcacacgaucgaccucaccgacagcgagaugaacaagcuguucgagaagaccaagaagcagcugcgcgagaacgccgaggacauggggaacggcugcuucaagaucuaccacaagugcgacaacgcgugcaucggguccauccggaacggcaccuacgaccacgacgucuaccgcgacgaggcccucaacaaccgcuuccagaucaaggggguggagcugaaguccggcuacaaggacuggauccuguggaucuccuucgccaucagcugcuuccuccugugcguggcccugcucggcuucaucaugugggccugccagaaggggaacauccggugcaacaucugcaucuga

SEQ ID NO: 66022 - RNA, 1701 nt, Artificial Sequence
  derived and/or modified CDS sequence (opt1) from hemagglutinin__InfluenzaA__ABV45981
augaagaccaucaucgcccugagcuacauccucugccugguguucgcccagaagcugcccggcaacgacaacuccaccgcgacgcucugccuggggcaccacgccgucccgaacggcaccaucgugaagaccaucaccaacgaccagaucgaggugacgaacgccaccgagcugguccagagcuccagcaccggggagaucugcgacagcccccaccagauccucgacggcgagaacugcacccugaucgacgcccugcucggggacccccagugcgacggcuuccagaacaagaagugggaccuguucguggagcgcagcaaggccuacuccaacugcuaccccuacgacgugccggacuacgcgagccugcggucccucgucgccagcuccggcacgcuggaguucaacaacgagagcuucaacuggaccggggugacccagaacggcaccuccagcgccugcauccgccgguccaacaacagcuucuucucccgccugaacuggcucacgcaccugaaguucaaguaccccgcccugaacgugaccaugcccaacaacgagaaguucgacaagcucuacaucuggggcguccaccaccccgggaccgacaacgaccagaucuuccuguacgcgcaggccagcgggcggaucaccguguccacgaagcgcagccagcagaccgugaucccgaacaucggcagccggccccgcguccggaacauccccucccgcaucagcaucuacuggaccaucgugaagcccggcgacauccugcucaucaacuccaccgggaaccugaucgccccgcggggcuacuucaagauccgcagcgggaaguccagcaucaugcgguccgacgcccccaucggcaagugcaacagcgagugcaucacgcccaacggcuccauccccaacgacaagccguuccagaacgugaaccgcaucaccuacggggccugcccccgguacgucaagcagaacacccugaagcucgcgaccggcaugcgcaacgugcccgagaagcagacgcgggggaucuucggcgccaucgccggguucaucgagaacggcugggagggcaugguggacgggugguacggcuuccgccaccagaacagcgaggggaucggccaggccgccgaccugaaguccacccaggcggccaucgaccagaucaacgggaagcugaaccggcucaucggcaagaccaacgagaaguuccaccagaucgagaaggaguucagcgaggucgagggccgcauccaggaccuggagaaguacguggaggacaccaagaucgaccugugguccuacaacgccgagcuccugguggcccuggagaaccagcacacgaucgaccucaccgacagcgagaugaacaagcuguucgagaagaccaagaagcagcugcgggagaacgccgaggacauggggaacggcugcuucaagaucuaccacaagugcgacaacgcgugcaucggguccauccgcaacggcaccuacgaccacgacgucuaccgcgacgaggcccucaacaaccgguuccagaucaaggggguggagcugaaguccggcuacaaggacuggaucaucuggaucuccuucgccaucagcugcuuccugcucugcguggcccugcugggcuucaucaugugggccugccagaaggggaacauccgcugcaacaucugcaucuga

SEQ ID NO: 66023 - RNA, 1698 nt, Artificial Sequence
  derived and/or modified CDS sequence (opt1) from hemagglutinin__InfluenzaA__ABV82551
augaaggugaagcugcucguccugcugugcaccuucaccgccacguacgccgacaccaucugcaucggcuaccacgcgaacaacagcaccgacaccguggacacggugcucgagaagaacgucaccgugacccacuccgugaaccugcuggaggacagccacaacgggaagcucugccugcugaagggcaucgcgccccuccagcuggggaacugcuccgucgccggcuggauccuggggaacccggagugcgagcuccugaucagcaaggaguccuggagcuacaucguggagacccccaaccccgagaacggcacgugcuaccccggcuacuucgccgacuacgaggagcugcgcgagcagcucuccagcguguccagcuucgagcgguucgagaucuucccgaaggaguccagcuggcccaaccacaccgucaccgggguguccgccagcugcucccacaacggcgagagcuccuucuaccgcaaccugcuguggcucaccgagaagaacgggcuguaccccaaccugagcaaguccuacgccaacaacaaggagaaggaggugcucguccuguggggcgugcaccacccgcccaacaucggggaccagcgggcccuguaccacacggagaacgccuacgugagcgucgugagcucccacuacagccgccgguucacccccgagaucgccaagcgccccaaggugcgggaccaggagggccgcaucaacuacuacuggacccuccuggagcccggcgacaccaucaucuucgaggcgaacgggaaccugaucgccccgcgguucgccuucgcccucucccgcggcuucgggagcggcaucaucacguccaacgcccccauggacaagugcgacgcgaagugccagacgccccagggcgccaucaacagcucccugcccuuccagaacguccacccggugaccaucggggagugccccaaguacgugcggagcaccaagcugcgcauggucaccggccuccggaacauccccuccauccagagccgcgggcuguucggcgccaucgccggguucaucgagggcggcuggaccgggaugguggacggcugguacggguaccaccaccagaacgagcagggcuccggguacgccgcggaccagaaguccacccagaacgccaucaacggcaucaccaacaaggugaacagcgucaucgagaagaugaacacgcaguucaccgccgugggcaaggaguucaacaagcuggagcggcgcauggagaaccucaacaagaaggucgacgacggguuccuggacaucuggaccuacaacgccgagcugcucgugcugcuggagaacgagcggacccucgacuuccacgacagcaacgugaagaaccuguacgagaaggucaagucccagcugaagaacaacgccaaggagaucggcaacgggugcuucgaguucuaccacaagugcaacgacgagugcauggagagcgugaagaacggcacguacgacuaccccaaguacuccgaggagagcaagcucaaccgcgagaagaucgacggggugaagcuggaguccaugggcgucuaccagauccuggcgaucuacagcaccguggccagcucccucgugcugcuggucagccucggcgccaucuccuucuggaugugcagcaacgggucccugcagugccggaucugcaucuga

SEQ ID NO: 66024 - RNA, 1701 nt, Artificial Sequence; identical to SEQ ID NO: 65952
  derived and/or modified CDS sequence (opt1) from hemagglutinin__InfluenzaA__ABV82562

SEQ ID NO: 66025 - RNA, 1701 nt, Artificial Sequence; identical to SEQ ID NO: 65952
  derived and/or modified CDS sequence (opt1) from hemagglutinin__InfluenzaA__ABW36168

SEQ ID NO: 66026 - RNA, 1698 nt, Artificial Sequence; identical to SEQ ID NO: 65938
  derived and/or modified CDS sequence (opt1) from hemagglutinin__InfluenzaA__ABW36179

SEQ ID NO: 66027 - RNA, 1698 nt, Artificial Sequence; identical to SEQ ID NO: 65981
  derived and/or modified CDS sequence (opt1) from hemagglutinin__InfluenzaA__ABW36190

SEQ ID NO: 66028 - RNA, 1698 nt, Artificial Sequence; identical to SEQ ID NO: 65938
  derived and/or modified CDS sequence (opt1) from hemagglutinin__InfluenzaA__ABW36201

SEQ ID NO: 66029 - RNA, 1698 nt, Artificial Sequence
  derived and/or modified CDS sequence (opt1) from hemagglutinin__InfluenzaA__ABW36212
augaaggugaagcugcucguccugcugugcaccuucaccgccacguacgccgacaccaucugcaucggcuaccacgcgaacaacagcaccgacaccguggacacggugcucgagaagaacgucaccgugacccacuccgugaaccugcuggaggacagccacaacgggaagcucugccugcugaagggcaucgcgccccuccagcuggggaacugcuccgucgccggcuggauccuggggaacccggagugcgagcuccugaucagcaaggaguccuggagcuacaucguggagacccccaaccccgagaacggcacgugcuaccccggcuacuucgccgacuacgaggagcugcgcgagcagcucuccagcguguccagcuucgagcgguucgagaucuucccgaaggagaacuccuggcccaaccacaccgucaccggggugagcgccuccugcagccacaacggcaaguccagcuucuaccgcaaccugcuguggcucaccgggaagaacggccuguaccccaaccuguccaagagcuacgccaacaacaaggagaaggaggugcucguccuguggggcgugcaccacccgcccaacaucggggaccagcgggcccuguaccacacggagaacgccuacguguccgucgugagcagccacuacucccgccgguucacccccgagaucgccaagcgccccaaggugcgggaccaggagggccgcaucaacuacuacuggacccuccuggagcccggggacaccaucaucuucgaggcgaacggcaaccugaucgccccgcgguucgccuucgcccucagccgcgggcugggcuccggcaucaucacgagcaacgcccccauggacgagugcgacgcgaagugccagacgccccagggggccaucaacuccagccugcccuuccagaacguccacccggugaccaucggcgagugccccaaguacgugcgguccgccaagcuccgcauggucaccgggcugcggaacauccccagcauccagucccgcggccuguucggggccaucgccggcuucaucgagggcggguggaccggcaugguggacgggugguacggcuaccaccaccagaacgagcaggggagcggcuacgcggccgaccagaaguccacccagaacgccaucaacggcaucaccaacaaggugaacagcgucaucgagaagaugaacacccaguucacggccguggggaaggaguucaacaagcucgagcggcgcauggagaaccugaacaagaaggucgacgacggcuuccuggacaucuggaccuacaacgccgagcuccuggugcugcucgagaacgagcggacccuggacuuccacgacuccaacgugaagaaccuguacgagaaggucaaggggcagcucaagaacaacgcgaaggagaucggcaacgggugcuucgaguucuaccacaagugcaacgacgagugcauggagagcgugaagaacggcaccuacgacuaccccaaguacuccgaggagagcaagcugaaccgcgagaagaucgacggcgugaagcuggaguccaugggggucuaccagauccucgccaucuacagcacgguggccuccagccuggugcugcucgucagccugggcgccaucuccuucuggaugugcagcaacgggucccugcagugccggaucugcaucuga

SEQ ID NO: 66030 - RNA, 1698 nt, Artificial Sequence; identical to SEQ ID NO: 65934
  derived and/or modified CDS sequence (opt1) from hemagglutinin__InfluenzaA__ABW36223

SEQ ID NO: 66031 - RNA, 1698 nt, Artificial Sequence; identical to SEQ ID NO: 65934
  derived and/or modified CDS sequence (opt1) from hemagglutinin__InfluenzaA__ABW36245

SEQ ID NO: 66032 - RNA, 1698 nt, Artificial Sequence; identical to SEQ ID NO: 65934
  derived and/or modified CDS sequence (opt1) from hemagglutinin__InfluenzaA__ABW36267

SEQ ID NO: 66033 - RNA, 1698 nt, Artificial Sequence; identical to SEQ ID NO: 65938
  derived and/or modified CDS sequence (opt1) from hemagglutinin__InfluenzaA__ABW36278

SEQ ID NO: 66034 - RNA, 1698 nt, Artificial Sequence
  derived and/or modified CDS sequence (opt1) from hemagglutinin__InfluenzaA__ABW36289
augaagcugaagcuccuggugcugcucugcaccuucaccgccacguacgccgacaccaucugcaucggcuaccacgcgaacaacagcaccgacaccgucgacacggugcuggagaagaacgugaccgucacccacuccgugaaccugcucgaggacagccacaacgggaagcugugccugcucaagggcaucgcgccccugcagcuggggaacugcuccguggccggcuggauccucgggaacccggagugcgagcugcugaucagcaaggaguccuggagcuacaucgucgagacccccaaccccgagaacggcacgugcuaccccggcuacuucgccgacuacgaggagcuccgcgagcagcuguccagcguguccagcuucgagcgguucgagaucuucccgaaggaguccagcuggcccaaccacaccgugaccggggucuccgccagcugcucccacaacggcaagagcuccuucuaccgcaaccugcucuggcugaccgggaagaacggccuguaccccaaccucagcaaguccuacgccaacaacaaggagaaggaggugcuggugcuguggggcguccaccacccgcccaacaucggggaccagcgggcccucuaccacacggagaacgccuacgugagcguggucagcucccacuacagccgccgguucacccccgagaucgccaagcgccccaaggugcgggaccaggagggccgcaucaacuacuacuggacccugcuggagcccggggacaccaucaucuucgaggcgaacggcaaccucaucgccccgcgguucgccuucgcccugucccgcggguucggcagcggcaucaucacguccaacgcccccauggacgagugcgacgcgaagugccagacgccccagggggccaucaacagcucccugcccuuccagaacgugcacccggucaccaucggcgagugccccaaguacgugcggagcaccaagcuccgcauggugaccgggcugcggaacauccccuccauccagagccgcggccuguucggggccaucgccggcuucaucgagggcggguggaccggcauggucgacgggugguacggcuaccaccaccagaacgagcagggguccggcuacgccgcggaccagaaguccacccagaacgccaucaacggcaucaccaacaaggugaacagcgugaucgagaagaugaacacgcaguucaccgccgucgggaaggaguucaacaagcucgagcggcgcauggagaaccugaacaagaagguggacgacggcuuccuggacaucuggaccuacaacgccgagcuccugguccugcucgagaacgagcggacccuggacuuccacgacagcaacgugaagaaccuguacgagaaggugaagucccagcucaagaacaacgccaaggagaucgggaacggcugcuucgaguucuaccacaagugcaacgacgagugcauggagagcgucaagaacgggacguacgacuaccccaaguacuccgaggagagcaagcugaaccgcgagaagaucgacggcgugaagcuggaguccaugggcguguaccagauccucgcgaucuacagcaccgucgccagcucccuggugcugcucgugagccugggggccaucuccuucuggaugugcagcaacggcucccugcagugccggaucugcaucuga

SEQ ID NO: 66035 - RNA, 1698 nt, Artificial Sequence; identical to SEQ ID NO: 65945
  derived and/or modified CDS sequence (opt1) from hemagglutinin__InfluenzaA__ABW36300

SEQ ID NO: 66036 - RNA, 1701 nt, Artificial Sequence
  derived and/or modified CDS sequence (opt1) from hemagglutinin__InfluenzaA__ABW36311
augaaggccaagcugcucgugcugcugugcgcccucagcgcgaccgacgccgacaccaucugcaucggcuaccacgccaacaacuccacggacaccgucgacaccgugcuggagaagaacgugaccgucacgcacagcgugaaccugcucgaggacucccacaacgggaagcugugccgccugaagggcaucgcgccccuccagcuggggaagugcagcaucgccggcuggauccuggggaacccggagugcgagucccucuucagcaagaaguccuggagcuacaucgccgagacccccaacuccgagaacgggaccugcuaccccggcuacuucgccgacuacgaggagcugcgggagcagcugagcuccgugagcuccuucgagcgcuucgagaucuuccccaaggagcggagcuggccgaagcacaacgucacccgcggggugacggccuccugcagccacaagggcaaguccagcuucuaccggaaccuccuguggcugaccgagaagaacggguccuaccccaaccucagcaagagcuacgugaacaacaaggagaaggagguccuggugcuguggggcgugcaccaccccuccaacaucgaggaccagaagaccaucuaccgcaaggagaacgccuacgucagcgugguguccagcaacuacaaccggcgcuucacccccgagaucgcgaagcggccgaagguccgcgaccaggaggggcggaucaacuacuacuggacgcuccuggagcccggcgacaccaucaucuucgaggccaacggcaaccugaucgcccccugguacgccuucgcccucucccgcggguucggcagcgggaucaucaccuccaacgcgagcauggacgagugcgacaccaagugccagacgccccagggcgccaucaacuccagccugccguuccagaacgugcaccccgugaccaucggcgagugccccaaguacguccgguccaccaagcugcgcauggugaccgggcuccggaacauccccagcauccagucccgcggccuguucggggccaucgccggcuucaucgagggcggcuggacgggcaugaucgacgggugguacggcuaccaccaccagaacgagcaggggagcggcuacgccgcggaccagaaguccacccagaacgccaucaacgggaucaccaacaaggugaacagcgucaucgagaagaugaacacccaguucacggccgugggcaaggaguucaacaagcuggagaagcggauggagaaccucaacaagaagguggacgacggcuuccuggacaucuggaccuacaacgccgagcugcucguccugcuggagaacgagcgcacccucgacucccacgacagcaacgugaagaaccuguacgagaaggucaagucccagcugaagaacaacgccaaggagaucgggaacggcugcuucgaguucuaccacaagugcaacaacgagugcauggagagcgugaagaacgggaccuacgacuacccgaaguacagcgaggaguccaagcucaaccgggagaagaucgacggcgugaagcuggagagcaugggggucuaccagauccuggcgaucuacuccacgguggccagcucccucgugcugcuggucagccucggcgccaucuccuucuggaugugcagcaacggcucccugcagugccgcaucugcaucuga

SEQ ID NO: 66037 - RNA, 1701 nt, Artificial Sequence
  derived and/or modified CDS sequence (opt1) from hemagglutinin__InfluenzaA__ABW38363
augaagaccaucaucgcccugagcuacauccucugccugguguucgcccagaagcugcccggcaacgacaacuccaccgcgacgcucugccuggggcaccacgccgucccgaacggcaccaucgugaagaccaucaccaacgaccagaucgaggugacgaacgccaccgagcugguccagagcuccagcaccggggagaucugcgacagcccccaccagauccucgacggcgagaacugcacccugaucgacgcccugcucggggacccccagugcgacggcuuccagaacaagaagugggaccuguucguggagcgcuccaaggccuacuccaacugcuaccccuacgacgugccggacuacgcgagccugcggucccucgucgccagcuccggcacgcuggaguucaacaacgagagcuucaacuggaccggggugacccagaacggcaccuccagcgccugcaagcgccgguccaacaacagcuucuucucccgccugaacuggcucacgcaccugaaguucaaguaccccgcccugaacgugaccaugcccaacaacgagaaguucgacaagcucuacaucuggggcguccaccaccccgggaccgacaacgaccagaucuuccuguacgcgcaggccagcgggcggaucaccguguccacgaagcgcagccagcagaccgugaucccgaacaucggcagccggccccgcguccggaacauccccucccgcaucagcaucuacuggaccaucgugaagcccggcgacauccugcucaucaacuccaccgggaaccugaucgccccgcggggcuacuucaagauccgcagcgggaaguccagcaucaugcgguccgacgcccccaucggcaagugcaacagcgagugcaucacgcccaacggcuccauccccaacgacaagccguuccagaacgugaaccgcaucaccuacggggccugcccccgguacgucaagcagaacacccugaagcucgcgaccggcaugcgcaacgugcccgagaagcagacgcgggggaucuucggcgccaucgccggguucaucgagaacggcugggagggcaugguggacgggugguacggcuuccgccaccagaacagcgaggggaucggccaggccgccgaccugaaguccacccaggcggccaucgaccagaucaacgggaagcugaaccggcucaucggcaagaccaacgagaaguuccaccagaucgagaaggaguucagcgaggucgagggccgcauccaggaccuggagaaguacguggaggacaccaagaucgaccugugguccuacaacgccgagcucaucguggcccuggagaaccagcacacgaucgaccugaccgacagcgagaugaacaagcuguucgagcggaccaagaagcagcuccgcgagaacgccgaggacauggggaacggcugcuucaagaucuaccacaagugcgacaacgcgugcaucggguccauccgcaacggcaccuacgaccacgacgucuaccgggacgaggcccugaacaaccgcuuccagaucaaggggguggagcucaagagcggcuacaaggacuggauccuguggaucuccuucgccaucagcugcuuccugcucugcguggcccugcugggcuucaucaugugggccugccagaaggggaacauccggugcaacaucugcaucuga

SEQ ID NO: 66038 - RNA, 1698 nt, Artificial Sequence
  derived and/or modified CDS sequence (opt1) from hemagglutinin__InfluenzaA__ABW39777
augaaggugaagcugcucguccugcugugcaccuucaccgccacguacgccgacaccaucugcaucggcuaccacgcgaacaacagcaccgacaccguggacacggugcucgagaagaacgucaccgugacccacuccgugaaccugcuggaggacagccacaacgggaagcucugccugcugaagggcaucgcgccccuccagcuggggaacugcuccgucgccggcuggauccuggggaacccggagugcgagcuccugaucagcaaggaguccuggagcuacaucguggagacccccaaccccgagaacggcacgugcuaccccggcuacuucgccgacuacgaggagcugcgcgagcagcucuccagcguguccagcuucgagcgguucgagaucuucccgaaggagaacuccuggcccaaccacaccgucaccggggugagcgccuccugcagccacaacggcaaguccagcuucuaccgcaaccugcuguggcucaccgggaagaacggccuguaccccaaccuguccaagagcuacgccaacaacaaggagaaggaggugcucguccuguggggcgugcaccacccgcccaacaucggggaccagcgggcccuguaccacacggagaacgccuacguguccgucgugagcagccacuacucccgccgguucacccccgagaucgccaagcgccccaaggugcgggaccaggagggccgcaucaacuacuacuggacccuccuggagcccggggacaccaucaucuucgaggcgaacggcaaccugaucgccccgcgguucgccuucgcccucagccgcgggcugggcuccggcaucaucacgagcaacgcccccauggacgagugcgacgcgaagugccagacgccccagggggccaucaacuccagccugcccuuccagaacguccacccggugaccaucggcgagugccccaaguacgugcgguccgccaagcuccgcauggucaccgggcugcggaacauccccagcauccagucccgcggccuguucggggccaucgccggcuucaucgagggcggguggaccggcaugguggacgggugguacggcuaccaccaccagaacgagcaggggagcggcuacgcggccgaccagaaguccacccagaacgccaucaacggcaucaccaacaaggugaacagcgucaucgagaagaugaacacccaguucacggccguggggaaggaguucaacaagcucgagcggcgcauggagaaccugaacaagaaggucgacgacggcuuccuggacaucuggaccuacaacgccgagcuccuggugcugcucgagaacgagcggacccuggacuuccacgacuccaacgugaagaaccuguacgagaaggucaagagccagcucaagaacaacgcgaaggagaucgggaacggcugcuucgaguucuaccacaagugcaacgacgagugcauggaguccgugaagaacgggaccuacgacuaccccaaguacagcgaggaguccaagcugaaccgcgagaagaucgacggcgugaagcuggagagcaugggcgucuaccagauccucgccaucuacuccacgguggccagcagccuggugcugcucgucucccugggggccaucagcuucuggaugugcuccaacggcagccugcagugccggaucugcaucuga

SEQ ID NO: 66039 - RNA, 1698 nt, Artificial Sequence; identical to SEQ ID NO: 65938
  derived and/or modified CDS sequence (opt1) from hemagglutinin__InfluenzaA__ABW39806

SEQ ID NO: 66040 - RNA, 1698 nt, Artificial Sequence; identical to SEQ ID NO: 65945
  derived and/or modified CDS sequence (opt1) from hemagglutinin__InfluenzaA__ABW39817

SEQ ID NO: 66041 - RNA, 1698 nt, Artificial Sequence
  derived and/or modified CDS sequence (opt1) from hemagglutinin__InfluenzaA__ABW39828
augaaggugaagcugcucguccugcugugcaccuucaccgccacguacgccgacaccaucugcaucggcuaccacgcgaacaacagcaccgacaccguggacacggugcucgagaagaacgucaccgugacccacuccgugaaccugcuggaggacaaccacaacgggaagcucugccugcugaagggcaucgcgccccuccagcuggggaacugcagcgucgccggcuggauccuggggaacccggagugcgagcuccugaucuccaaggagagcugguccuacaucguggagaagcccaaccccgagaacgggaccugcuaccccggccacuucgccgacuacgaggagcugcgcgagcagcucagcuccgugagcuccuucgagcgguucgagaucuucccgaaggagagcuccuggcccaaccacacggucaccggggugagcgccuccugcagccacaacggcgaguccagcuucuacaagaaccugcuguggcucaccgggaagaacggccuguaccccaaccuguccaagagcuacgccaacaacaaggagaaggaggugcucguccuguggggcgugcaccacccgcccaacaucggcgaccagaugacccuguaccacaaggagaacgccuacguguccgucgugagcagccacuacucccgcaaguucacgcccgagaucgccaagcggcccaaggugcgcgaccaggagggccggaucaacuacuacuggacccuccuggagcccggggacaccaucaucuucgaggccaacggcaaccugaucgcgccgcgcuacgccuucgcccucagccggggguucggcuccggcaucaucaacagcaacgcccccauggacgagugcgacgccaagugccagacgccccagggggcgaucaacuccagccugcccuuccagaacguccacccggugaccaucggcgagugccccaaguacgugcgcuccgccaagcugcggauggucaccgggcuccgcaacauccccagcauccagucccggggccuguucggggccaucgccggcuucaucgagggcggguggaccggcaugguggacgggugguacggcuaccaccaccagaacgagcaggggagcggcuacgccgcggaccagaaguccacccagaacgccaucaacggcaucacgaacaaggugaacagcgucaucgagaagaugaacacccaguucaccgccguggggaaggaguucaacaagcuggagcgccggauggagaaccucaacaagaaggucgacgacggcuucaucgacguguggaccuacaacgccgagcugcuggugcuccuggagaacgagcgcacgcuggacuuccacgacuccaacgucaagaaccucuacgagaaggugaagaaccagcugaagaacaacgccaaggagaucgggaacggcugcuucgaguucuaccacaagugcaacgacgagugcauggagagcgugaagaacgggaccuacgacuaccccaaguacuccgaggagagcaagcugucccgggagaagaucgacggcgucaagcucgagagcaugggcguguaccagauccuggcgaucuacuccaccguggccagcagccugguccuccuggugucccugggggccaucagcuucuggaugugcuccaacggcagccuccagugccgcaucugcaucuga

SEQ ID NO: 66042 - RNA, 1698 nt, Artificial Sequence
  derived and/or modified CDS sequence (opt1) from hemagglutinin__InfluenzaA__ABW39839
augaaggugaagcugcucguccugcugugcaccuucaccgccacguacgccgacaccaucugcaucggcuaccacgcgaacaacagcaccgacaccguggacacggugcucgagaagaacgucaccgugacccacuccgugaaccugcuggaggacagccacaacgggaagcucugccugcugaagggcaucgcgccccuccagcuggggaacugcuccgucgccggcuggauccuggggaacccggagugcgagcuccugaucagcaaggaguccuggagcuacaucguggagacccccaaccccgagaacggcacgugcuaccccggcuacuucgccgacuacgaggagcugcgcgagcagcucuccagcguguccagcuucgagcgguucgagaucuucccgaaggaguccagcuggcccaaccacaccgucaccgggguguccgccagcugcucccacaacggcaagagcuccuucuaccgcaaccugcuguggcucaccgggaagaacggccuguaccccaaccugagcaaguccuacagcaacaacaaggagaaggaggugcucguccuguggggcgugcaccacccgcccaacaucggggaccagcgggcccuguaccacacggagaacgccuacgugagcgucguguccagccacuacucccgccgguucacccccgagaucgccaagcgccccaaggugcgggaccaggagggccgcaucaacuacuacuggacccuccuggagcccggggacaccaucaucuucgaggccaacggcaaccugaucgcgccgcgguucgccuucgcccucagccgcggguucggcuccggcaucaucacgagcaacgcccccaugggggagugcgacgccaagugccagacgccccagggcgcgaucaacuccagccugcccuuccagaacguccacccggugaccaucggggagugccccaaguacgugcgguccgccaagcugcgcauggucaccggccuccggaacauccccagcauccagucccgcgggcuguucggcgccaucgccggcuucaucgagggcggguggaccgggaugguggacggcugguacggguaccaccaccagaacgagcagggcagcggcuacgccgcggaccagaaguccacccagaacgccaucaacgggaucaccaacaaggugaacagcgucaucgagaagaugaacacccaguucacggccgugggcaaggaguucaacaagcuggagcggcgcauggagaaccucaacaagaaggucgacgacggguuccuggacaucuggaccuacaacgccgagcugcucgugcugcuggagaacgagcggacccucgacuuccacgacuccaacgugaagaaccuguacgagaaggucaagagccagcugaagaacaacgccaaggagaucggcaacgggugcuucgaguucuaccacaagugcaacgacgagugcauggaguccgugcgcaacggcaccuacgacuaccccaaguacagcgaggaguccaagcucaaccgggagaagaucgacggcgugaagcuggagagcaugggggucuaccagauccuggcgaucuacagcacgguggccuccagccucgugcugcuggucucccucggcgccaucagcuucuggaugugcuccaacgggagccugcagugccgcaucugcaucuga

SEQ ID NO: 66043 - RNA, 1698 nt, Artificial Sequence
  derived and/or modified CDS sequence (opt1) from hemagglutinin__InfluenzaA__ABW39850
augaaggugaagcugcucguccugcugugcaccuucaccgccacgaacgccgacaccaucugcaucggcuaccacgcgaacaacagcaccgacaccguggacacggugcucgagaagaacgucaccgugacccacuccgugaaccugcuggagaacagccacaacgggaagcucugccugcugaagggcaucgcgccccuccagcuggggaacugcuccgucgccggcuggauccuggggaacccggagugcgagcuccugaucagcaaggaguccuggagcuacaucguggagaagcccaaccccgagaacgggaccugcuaccccggccacuucgccgacuacgaggagcugcgcgagcagcucuccagcguguccagcuucgagcgguucgagaucuucccgaaggaguccagcuggcccaaccacacggucaccgggguguccgccagcugcucccacaacggcgagagcuccuucuaccgcaaccugcuguggcucaccgggaagaacggccuguaccccaaccugagcaaguccuacgccaacaacaaggagaaggaggugcucguccuguggggcgugcaccacccgcccaacaucggcgaccagaaggcccuguaccacaccgagaacgccuacgugagcgucgugagcucccacuacagccggaaguucacgcccgagaucgccaagcgccccaaggugcgggaccaggagggccgcaucaacuacuacuggacccuccuggagcccggggacaccaucaucuucgaggcgaacggcaaccugaucgccccgcgguacgccuucgcccucucccgcggguucggcagcggcaucaucaacuccaacgcccccauggacaagugcgacgcgaagugccagacgccccagggggccaucaacagcucccugcccuuccagaacguccacccggugaccaucggcgagugccccaaguacgugcggagcgccaagcugcgcauggucaccgggcuccggaacauccccuccauccagagccgcggccuguucggggccaucgccggcuucaucgagggcggguggaccggcaugguggacgggugguacggcuaccaccaccagaacgagcagggguccggcuacgcggccgaccagaaguccacccagaacgccaucaacggcaucacgaacaaggugaacagcgucaucgagaagaugaacacccaguucaccgccguggggaaggaguucaacaagcuggagcggcgcauggagaaccucaacaagaaggucgacgacggcuucaucgacaucuggaccuacaacgccgagcugcuggugcuccuggagaacgagcggacgcuggacuuccacgacagcaacgugaagaaccucuacgagaaggucaaggggcagcugaagaacaacgcgaaggagaucggcaacgggugcuucgaguucuaccacaagugcaacgacgagugcauggaguccgugaagaacggcaccuacgacuaccccaaguacagcgaggaguccaagcugaaccgcgagaagaucgacggcgugaagcucgagagcaugggggucuaccagauccuggccaucuacuccaccguggccagcagccuggugcuccuggucucccugggcgccaucagcuucuggaugugcuccaacgggagccuccagugccggaucugcaucuga

SEQ ID NO: 66044 - RNA, 1698 nt, Artificial Sequence; identical to SEQ ID NO: 65969
  derived and/or modified CDS sequence (opt1) from hemagglutinin__InfluenzaA__ABW39861

SEQ ID NO: 66045 - RNA, 1701 nt, Artificial Sequence; identical to SEQ ID NO: 65952
  derived and/or modified CDS sequence (opt1) from hemagglutinin__InfluenzaA__ABW39872

SEQ ID NO: 66046 - RNA, 1698 nt, Artificial Sequence
  derived and/or modified CDS sequence (opt1) from hemagglutinin__InfluenzaA__ABW39883
augaaggugaagcugcucguccugcugugcaccuucaccgccacguacgccgacaccaucugcaucggcuaccacgcgaacaacagcaccgacaccguggacacggugcucgagaagaacgucaccgugacccacuccgugaaccugcuggaggacagccacaacgggaagcucugccugcugaagggcaucgcgccccuccagcuggggaacugcuccgucgccggcuggauccuggggaacccggagugcgagcuccugaucagcaaggaguccuggagcuacaucguggagacccccaaccccgagaacggcacgugcuaccccggcuacuucgccgacuacgaggagcugcgcgagcagcucuccagcguguccagcuucgagcgguucgagaucuucccgaaggaguccagcuggcccaaccacaccgucaccgggguguccgccagcugcucccacaacggcaagagcuccuucuaccgcaaccugcuguggcucaccgggaagaacggccuguaccccaaccugagcaaguccuacgccaacaacaaggagaaggaggugcucguccuguggggcgugcaccacccccacaacaucggggaccagcgggcccuguaccacacggagaacgccuacgugagcgucgugagcucccacuacagccgccgguucaccccggagaucgccaagcgccccaaggugcgggaccaggagggccgcaucaacuacuacuggacccuccuggagcccggggacaccaucaucuucgaggcgaacggcaaccugaucgcgccccgguucgccuucgcccucucccgcggguucggcagcggcaucaucacguccaacgccccgauggacgagugcgacgccaagugccagacgccccagggggccaucaacagcucccugcccuuccagaacguccaccccgugaccaucggcgagugcccgaaguacgugcggagcaccaagcugcgcauggucaccgggcuccggaacauccccuccauccagagccgcggccuguucggggccaucgccggcuucaucgagggcggguggaccggcaugguggacgggugguacggcuaccaccaccagaacgagcagggguccggcuacgccgcggaccagaaguccacccagaacgccaucaacggcaucaccaacaaggugaacagcgucaucgagaagaugaacacgcaguucaccgccguggggaaggaguucaacaagcuggagcggcgcauggagaaccucaacaagaaggucgacgacggcuuccuggacaucuggaccuacaacgccgagcugcucgugcugcuggagaacgagcggacccucgacuuccacgacagcaacgugaagaaccuguacgagaaggucaagucccagcugaagaacaacgccaaggagaucgggaacggcugcuucgaguucuaccacaagugcaacgacgagugcauggagagcgugaagaacgggacguacgacuaccccaaguacuccgaggagagcaagcucaaccgcgagaagaucgacggcgugaagcuggaguccaugggcgucuaccagauccuggcgaucuacagcaccguggccagcucccucgugcugcuggucagccucggggccaucuccuucuggaugugcagcaacggcucccugcagugccggaucugcaucuga

SEQ ID NO: 66047 - RNA, 1698 nt, Artificial Sequence; identical to SEQ ID NO: 65979
  derived and/or modified CDS sequence (opt1) from hemagglutinin__InfluenzaA__ABW39894

SEQ ID NO: 66048 - RNA, 1698 nt, Artificial Sequence; identical to SEQ ID NO: 65934
  derived and/or modified CDS sequence (opt1) from hemagglutinin__InfluenzaA__ABW39905

SEQ ID NO: 66049 - RNA, 1698 nt, Artificial Sequence; identical to SEQ ID NO: 65938
  derived and/or modified CDS sequence (opt1) from hemagglutinin__InfluenzaA__ABW39927

SEQ ID NO: 66050 - RNA, 1701 nt, Artificial Sequence
  derived and/or modified CDS sequence (opt1) from hemagglutinin__InfluenzaA__ABW39938
augaagaccaucaucgcccugagcuacauccucugccugguguucgcccagaagauccccggcaacgacaacuccaccgcgacgcugugccucgggcaccacgccgucccgaacggcaccaucgugaagaccaucaccaacgaccagaucgaggugacgaacgccaccgagcugguccagagcuccagcaccggggagaucugcgacagcccccaccagauccuggacggcgagaacugcacccucaucgacgcccugcugggggacccccagugcgacggcuuccagaacaagaagugggaccucuucguggagcgcuccaaggccuacuccaacugcuaccccuacgacgugccggacuacgcgagccugcggucccuggucgccagcuccggcacgcucgaguucaacaacgagagcuucaacuggaccggggugacccagaacggcaccuccagcgccugcauccgccgguccaacaacagcuucuucucccgccugaacuggcugacgcaccucaaguucaaguaccccgcccugaacgugaccaugcccaacaacgagaaguucgacaagcuguacaucuggggcguccaccaccccgggaccgacaacgaccagaucuuccucuacgcgcaggccagcgggcggaucaccguguccacgaagcgcagccagcagaccgugaucccgaacaucggcagccggccccgcguccggaacauccccucccgcaucagcaucuacuggaccaucgugaagcccggcgacauccugcugaucaacuccaccgggaaccucaucgccccgcggggcuacuucaagauccgcagcgggaaguccagcaucaugcgguccgacgcccccaucggcaagugcaacagcgagugcaucacgcccaacggcuccauccccaacgacaagccguuccagaacgugaaccgcaucaccuacggggccugcccccgguacgucaagcagaacacccugaagcuggcgaccggcaugcgcaacgugcccgagaagcagacgcgggggaucuucggcgccaucgccggguucaucgagaacggcugggagggcaugguggacgggugguacggcuuccgccaccagaacagcgaggggaucggccaggccgccgaccucaaguccacccaggcggccaucgaccagaucaacgggaagcugaaccggcugaucggcaagaccaacgagaaguuccaccagaucgagaaggaguucagcgaggucgagggccgcauccaggaccucgagaaguacguggaggacaccaagaucgaccugugguccuacaacgccgagcugcucguggcccuggagaaccagcacacgaucgaccugaccgacagcgagaugaacaagcuguucgagaagaccaagaagcagcuccgggagaacgccgaggacauggggaacggcugcuucaagaucuaccacaagugcgacaacgcgugcaucggguccauccgcaacggcaccuacgaccacgacgccuaccgcgacgaggcccugaacaaccgguuccagaucaagggggucgagcucaagagcggcuacaaggacuggauccuguggaucuccuucgccaucagcugcuuccugcucugcguggcccugcugggcuucaucaugugggcgugccagaaggggaacauccgcugcaacaucugcaucuga

SEQ ID NO: 66051 - RNA, 1698 nt, Artificial Sequence; identical to SEQ ID NO: 65938
  derived and/or modified CDS sequence (opt1) from hemagglutinin__InfluenzaA__ABW39949

SEQ ID NO: 66052 - RNA, 1698 nt, Artificial Sequence; identical to SEQ ID NO: 65979
  derived and/or modified CDS sequence (opt1) from hemagglutinin__InfluenzaA__ABW39960

SEQ ID NO: 66053 - RNA, 1698 nt, Artificial Sequence; identical to SEQ ID NO: 65934
  derived and/or modified CDS sequence (opt1) from hemagglutinin__InfluenzaA__ABW39982

SEQ ID NO: 66054 - RNA, 1698 nt, Artificial Sequence; identical to SEQ ID NO: 65954
  derived and/or modified CDS sequence (opt1) from hemagglutinin__InfluenzaA__ABW39993

SEQ ID NO: 66055 - RNA, 1698 nt, Artificial Sequence; identical to SEQ ID NO: 65934
  derived and/or modified CDS sequence (opt1) from hemagglutinin__InfluenzaA__ABW40004

SEQ ID NO: 66056 - RNA, 1698 nt, Artificial Sequence; identical to SEQ ID NO: 65980
  derived and/or modified CDS sequence (opt1) from hemagglutinin__InfluenzaA__ABW40015

SEQ ID NO: 66057 - RNA, 1701 nt, Artificial Sequence; identical to SEQ ID NO: 66011
  derived and/or modified CDS sequence (opt1) from hemagglutinin__InfluenzaA__ABW40026

SEQ ID NO: 66058 - RNA, 1698 nt, Artificial Sequence; identical to SEQ ID NO: 65934
  derived and/or modified CDS sequence (opt1) from hemagglutinin__InfluenzaA__ABW40037

SEQ ID NO: 66059 - RNA, 1698 nt, Artificial Sequence
  derived and/or modified CDS sequence (opt1) from hemagglutinin__InfluenzaA__ABW40048
augaaggugaagcugcucguccugcugugcaccuucaccgccacguacgccgacaccaucugcaucggcuaccacgcgaacaacagcaccgacaccguggacacggugcucgagaagaacgucaccgugacccacuccgugaaccugcuggaggacagccacaacgggaagcucugccugcugaagggcaucgcgccccuccagcuggggaacugcuccgucgccggcuggauccuggggaacccggagugcgagcuccugaucagcaaggaguccuggagcuacaucguggagacccccaaccccgagaacggcacgugcuaccccggcuacuucgccgacuacgaggagcugcgcgagcagcucuccagcguguccagcuucgagcgguucgagaucuucccgaaggaguccagcuggcccaaccacaccgucaccgggguguccgccagcugcucccacaacggcaagagcuccuucuaccgcaaccugcuguggcucaccgggaagaacggccuguaccccaaccugagcaaguccuacgccaacaacaaggagaaggaggugcucguccuguggggcgugcaccacccgcccaacaucggggaccagaaggcccuguaccacacggagaacgccuacgugagcgucgugagcucccacuacagccggcgcuucacccccgagaucgccaagcggcccaaggugcgcgaccaggagggccggaucaacuacuacuggacccuccuggagcccggggacaccaucaucuucgaggcgaacggcaaccugaucgccccgcgcuucgccuucgcccucucccggggguucggcagcggcaucaucacguccaacgcccccauggacgagugcgacgcgaagugccagacgccccagggggccaucaacagcucccugcccuuccagaacguccacccggugaccaucggcgagugccccaaguacgugcgcagcaccaagcugcggauggucaccgggcuccgcaacauccccuccauccagagccggggccuguucggggccaucgccggcuucaucgagggcggguggaccggcaugguggacgggugguacggcuaccaccaccagaacgagaagggguccggcuacgccgcggaccagaaguccacccagaacgccaucaacggcaucaccaacaaggugaacagcgucaucgagaagaugaacacgcaguucaccgccguggggaaggaguucaacaagcuggagcgccggauggagaaccucaacaagaaggucgacgacggcuuccuggacaucuggaccuacaacgccgagcugcucgugcugcuggagaacgagcgcacccucgacuuccacgacagcaacgugaagaaccuguacgagaaggucaagucccagcugaagaacaacgccaaggagaucgggaacggcugcuucgaguucuaccacaagugcaacgacgagugcauggagagcgugaagaacgggacguacgacuaccccaaguacuccgaggagagcaagcucaaccgggagaagaucgacggcgugaagcuggaguccaugggcgucuaccagauccuggcgaucuacagcaccguggccagcucccucgugcugcuggucagccucggggccaucuccuucuggaugugcagcaacggcucccugcagugccgcaucugcaucuga

SEQ ID NO: 66060 - RNA, 1698 nt, Artificial Sequence; identical to SEQ ID NO: 65938
  derived and/or modified CDS sequence (opt1) from hemagglutinin__InfluenzaA__ABW40059

SEQ ID NO: 66061 - RNA, 1698 nt, Artificial Sequence
  derived and/or modified CDS sequence (opt1) from hemagglutinin__InfluenzaA__ABW40070
augaaggugaagcugcucguccugcugugcaccuucaccgccacguacgccgacaccaucugcaucggcuaccacgcgaacaacagcaccgacaccguggacacggugcucgagaagaacgucaccgugacccacuccgugaaccugcuggagaacagccacaacgggaagcucugccugcugaagggcaucgcgccccuccagcuggggaacugcuccgucgccggcuggauccuggggaacccggagugcgagcuccugaucagcaaggaguccuggagcuacaucguggagaagcccaaccccgagaacgggaccugcuaccccggccacuucgccgacuacgaggagcugcgcgagcagcucuccagcguguccagcuucaagcgguucgagaucuucccgaaggaguccagcuggcccaaccacacggucaccgggguguccgccagcugcucccacaacggcgagagcuccuucuaccgcaaccugcuguggcucaccgggaagaacggccuguaccccaaccugagcaaguccuacgccaacaacaaggagaaggaggugcucguccuguggggcgugcaccacccgcccaacaucggcgaccagaaggcccuguaccacaccgagaacgccuacgugagcgucgugagcucccacuacagccggaaguucacgcccgagaucgccaagcgccccaaggugcgggaccaggagggccgcaucaacuacuacuggacccuccuggagcccggggacaccaucaucuucgaggcgaacggcaaccugaucgccccgcgguacgccuucgcccucucccgcggguucggcagcggcaucaucaacuccaacgcccccauggacaagugcgacagcaagugccagacgccccagggggcgaucaacuccagccugcccuuccagaacguccacccggugaccaucggcgagugccccaaguacgugcgguccgccaagcugcgcauggucaccgggcuccggaacauccccagcauccagucccgcggccuguucggggccaucgccggcuucaucgagggcggguggaccggcaugguggacgggugguacggcuaccaccaccagaacgagcaggggagcggcuacgccgcggaccagaaguccacccagaacgccaucaacggcaucacgaacaaggugaacagcgucaucgagaagaugaacacccaguucaccgccguggggaaggaguucaacaagcuggagcggcgcauggagaaccucaacaagaaggucgacgacggcuucaucgacaucuggaccuacaacgccgagcugcuggugcuccuggagaacgagcggacgcuggacuuccacgacuccaacgugaagaaccucuacgagaaggucaagagccagcugaagaacaacgccaaggagaucgggaacggcugcuucgaguucuaccacaagugcaacgacgagugcauggaguccgugaagaacgggaccuacgacuaccccaaguacagcgaggaguccaagcugaaccgcgagaagaucgacggcgugaagcucgagagcaugggcgucuaccagauccuggcgaucuacagcaccguggccuccagccuggugcuccuggucucccugggggccaucagcuucuggaugugcuccaacggcagccuccagugccggaucugcaucuga

SEQ ID NO: 66062 - RNA, 1701 nt, Artificial Sequence; identical to SEQ ID NO: 65952
  derived and/or modified CDS sequence (opt1) from hemagglutinin__InfluenzaA__ABW40081

SEQ ID NO: 66063 - RNA, 1698 nt, Artificial Sequence
  derived and/or modified CDS sequence (opt1) from hemagglutinin__InfluenzaA__ABW40092
augaaggugaagcugcucauccugcugugcaccuucaccgccacguacgccgacaccaucugcaucggcuaccacgcgaacaacagcaccgacaccgucgacacggugcucgagaagaacgugaccgucacccacuccgugaaccugcuggaggacagccacaacgggaagcucugccugcugaagggcaucgcgccccuccagcuggggaacugcuccguggccggcuggauccuggggaacccggagugcgagcuccugaucagcaaggaguccuggagcuacaucgucgagacccccaaccccgagaacggcacgugcuaccccggcuacuucgccgacuacgaggagcugcgcgagcagcucuccagcguguccagcuucaagcgguucgagaucuucccgaaggaguccagcuggcccaaccacaccgugaccggggucuccgccagcugcucccacaacggcaagagcuccuucuaccgcaaccugcuguggcucaccgggaagaacggccuguaccccaaccugagcaaguccuacgccaacaacaaggagaaggaggugcucgugcuguggggcguccaccacccgcccaacaucggggaccagcgggcccuguaccacacggagaacgccuacgugagcguggucagcucccacuacagccgccgguucacccccgagaucgccaagcgccccaaggugcgggaccaggagggccgcaucaacuacuacuggacccuccuggagcccggggacaccaucaucuucgaggcgaacggcaaccugaucgccccgcgguucgccuucgcccucucccgcggguucggcagcggcaucaucacguccaacgcccccauggacgagugcgacgcgaagugccagacgccccagggggccaucaacagcucccugcccuuccagaacgugcacccggucaccaucggcgagugccccaaguacgugcggagcaccaagcugcgcauggugaccgggcuccggaacauccccuccauccagagccgcggccuguucggggccaucgccggcuucaucgagggcggguggaccggcauggucgacgggugguacggcuaccaccaccagaacgagcagggguccggcuacgccgcggaccagaaguccacccagaacgccaucaacggcaucaccaacaaggugaacagcgugaucgagaagaugaacacgcaguucaccgccgucgggaaggaguucaacaagcuggagcggcgcauggagaaccucaacaagaagguggacgacggcuuccuggacaucuggaccuacaacgccgagcugcucguccugcuggagaacgagcggacccucgacuuccacgacagcaacgugaagaaccuguacgagaaggugaagucccagcugaagaacaacgccaaggagaucgggaacggcugcuucgaguucuaccacaagugcaacgacgagugcauggagagcgucaagaacgggacguacgacuaccccaaguacuccgaggagagcaagcucaaccgcgagaagaucgacggcgugaagcuggaguccaugggcguguaccagauccuggcgaucuacagcaccgucgccagcucccucgugcugcuggugagccucggggccaucuccuucuggaugugcagcaacggcucccugcagugccggaucugcaucuga

SEQ ID NO: 66064 - RNA, 1698 nt, Artificial Sequence; identical to SEQ ID NO: 65981
  derived and/or modified CDS sequence (opt1) from hemagglutinin__InfluenzaA__ABW40103

SEQ ID NO: 66065 - RNA, 1698 nt, Artificial Sequence
  derived and/or modified CDS sequence (opt1) from hemagglutinin__InfluenzaA__ABW40114
augaaggugaagcugcucauccugcugugcaccuucaccgccacguacgccgacaccaucugcaucggcuaccacgcgaacaacagcaccgacaccgucgacacggugcucgagaagaacgugaccgucacccacuccgugaaccugcuggaggacagccacaacgggaagcucugccugcugaagggcaucgcgccccuccagcuggggaacugcuccguggccggcuggauccuggggaacccggagugcgagcuccugaucagcaaggaguccuggagcuacaucgucgagacccccaaccccgagaacggcacgugcuaccccggcuacuucgccgacuacgaggagcugcgcgagcagcucuccagcguguccagcuucgagcgguucgagaucuucccgaaggaguccagcuggcccaaccacaccgugaccggggucuccaccagcugcucccacaacggcaagagcuccuucuaccgcaaccugcuguggcucacggggaagaacggccuguaccccaaccugagcaaguccuacgccaacaacaaggagaaggaggugcucgugcuguggggcguccaccacccgcccaacaucgggaaccagcgggcccuguaccacaccgagaacgccuacgugagcguggucagcucccacuacagccgccgguucacccccgagaucgccaagcgccccaaggugcgggaccaggagggccgcaucaacuacuacuggacccuccuggagcccggggacacgaucaucuucgaggccaacggcaaccugaucgcgccgcgguucgccuucgcccucucccgcggguucggcagcggcaucaucaccuccaacgcccccauggacgagugcgacgccaagugccagacgccccagggggcgaucaacagcucccugcccuuccagaacgugcacccggucaccaucggcgagugccccaaguacgugcggagcaccaagcugcgcauggugaccgggcuccggaacauccccuccauccagagccgcggccuguucggggccaucgccggcuucaucgagggcggguggaccggcauggucgacgggugguacggcuaccaccaccagaacgagcagggguccggcuacgccgccgaccagaaguccacccagaacgcgaucaacggcaucacgaacaaggugaacagcgugaucgagaagaugaacacccaguucaccgccgucgggaaggaguucaacaagcuggagcggcgcauggagaaccucaacaagaagguggacgacggcuuccuggacaucuggaccuacaacgccgagcugcucguccugcuggagaacgagcggacgcucgacuuccacgacagcaacgugaagaaccuguacgagaaggugaagucccagcugaagaacaacgccaaggagaucgggaacggcugcuucgaguucuaccacaagugcaacgacgagugcauggagagcgucaagaacgggaccuacgacuaccccaaguacuccgaggagagcaagcucaaccgcgagaagaucgacggcgugaagcuggaguccaugggcguguaccagauccuggccaucuacagcaccgucgcgagcucccucgugcugcuggugagccucggggccaucuccuucuggaugugcagcaacggcucccugcagugccggaucugcaucuga

SEQ ID NO: 66066 - RNA, 1698 nt, Artificial Sequence; identical to SEQ ID NO: 65934
  derived and/or modified CDS sequence (opt1) from hemagglutinin__InfluenzaA__ABW40125

SEQ ID NO: 66067 - RNA, 1701 nt, Artificial Sequence; identical to SEQ ID NO: 65952
  derived and/or modified CDS sequence (opt1) from hemagglutinin__InfluenzaA__ABW40136

SEQ ID NO: 66068 - RNA, 1698 nt, Artificial Sequence; identical to SEQ ID NO: 65969
  derived and/or modified CDS sequence (opt1) from hemagglutinin__InfluenzaA__ABW40147

SEQ ID NO: 66069 - RNA, 1698 nt, Artificial Sequence; identical to SEQ ID NO: 65938
  derived and/or modified CDS sequence (opt1) from hemagglutinin__InfluenzaA__ABW40158

SEQ ID NO: 66070 - RNA, 1698 nt, Artificial Sequence; identical to SEQ ID NO: 65938
  derived and/or modified CDS sequence (opt1) from hemagglutinin__InfluenzaA__ABW40180

SEQ ID NO: 66071 - RNA, 1701 nt, Artificial Sequence; identical to SEQ ID NO: 65952
  derived and/or modified CDS sequence (opt1) from hemagglutinin__InfluenzaA__ABW40191

SEQ ID NO: 66072 - RNA, 1698 nt, Artificial Sequence; identical to SEQ ID NO: 65954
  derived and/or modified CDS sequence (opt1) from hemagglutinin__InfluenzaA__ABW40202

SEQ ID NO: 66073 - RNA, 1698 nt, Artificial Sequence; identical to SEQ ID NO: 65934
  derived and/or modified CDS sequence (opt1) from hemagglutinin__InfluenzaA__ABW40213

SEQ ID NO: 66074 - RNA, 1698 nt, Artificial Sequence; identical to SEQ ID NO: 65934
  derived and/or modified CDS sequence (opt1) from hemagglutinin__InfluenzaA__ABW40224

SEQ ID NO: 66075 - RNA, 1698 nt, Artificial Sequence; identical to SEQ ID NO: 65938
  derived and/or modified CDS sequence (opt1) from hemagglutinin__InfluenzaA__ABW40235

SEQ ID NO: 66076 - RNA, 1701 nt, Artificial Sequence
  derived and/or modified CDS sequence (opt1) from hemagglutinin__InfluenzaA__ABW40246
augaagaccaucaucgcccugagcuacauccucugccugguguucgcccagaagcugcccggcaacgacaacuccaccgcgacgcucugccuggggcaccacgccgucccgaacggcaccaucgugaagaccaucaccaacgaccagaucgaggugacgaacgccaccgagcugguccagagcuccagcaccggggagaucugcgacagcccccaccagauccucgacggcgagaacugcacccugaucgacgcccugcucggggacccccagugcgacggcuuccagaacaagaagugggaccuguucguggagcgcagcaaggccuacuccaacugcuaccccuacgacgugccggacuacgcgagccugcggucccucgucgccagcuccggcacgcuggaguucaacaacgagagcuucaacuggaccggggugacccagaacggcaccuccagcgccugcauccgccgguccaacaacagcuucuucucccgccugaacuggcucacgcaccugaaguucaaguaccccgcccugaacgugaccaugcccaacaacgagaaguucgacaagcucuacaucuggggcguccaccaccccgggaccgacaacgaccagguguuccuguacgcgcaggccagcgggcggaucaccguguccacgaagcgcagccagcagaccgucaucccgaacaucggcagccggccccgcgugcggaacauccccucccgcaucagcaucuacuggaccaucgugaagcccggcgacauccugcucaucaacuccaccgggaaccugaucgccccgcggggcuacuuccgcauccggagcgggaaguccagcaucaugcgcuccgacgcccccaucggcaagugcaacagcgagugcaucacgcccaacggcuccauccccaacgacaagccguuccagaacgucaaccggaucaccuacggggccugcccccgcuacgugaagcagaacacccugaagcucgcgaccggcaugcggaacgugcccgagaagcagacgcgcgggaucuucggcgccaucgccggguucaucgagaacggcugggagggcauggucgacgggugguacggcuuccggcaccagaacagcgaggggaucggccaggccgccgaccugaaguccacccaggcggccaucgaccagaucaacgggaagcugaaccgccucaucggcaagaccaacgagaaguuccaccagaucgagaaggaguucagcgagguggagggccggauccaggaccuggagaaguacguggaggacaccaagaucgaccugugguccuacaacgccgagcuccuggucgcccuggagaaccagcacacgaucgaccucaccgacagcgagaugaacaagcuguucgagaagaccaagaagcagcugcgcgagaacgccgaggacauggggaacggcugcuucaagaucuaccacaagugcgacaacgcgugcaucggguccauccgcaacggcaccuacgaccacgacguguaccgggacgaggcccucaacaaccgcuuccagaucaaggggguggagcugaaguccggcuacaaggacuggauccuguggaucuccuucgccaucagcugcuuccuccugugcgucgcccugcucggcuucaucaugugggccugccagaaggggaacauccggugcaacaucugcaucuga

SEQ ID NO: 66077 - RNA, 1698 nt, Artificial Sequence
  derived and/or modified CDS sequence (opt1) from hemagglutinin__InfluenzaA__ABW40257
augaaggugaagcugcucauccugcugugcaccuucaccgccacguacgccgacaccaucugcaucggcuaccacgcgaacaacagcaccgacaccgucgacacggugcucgagaagaacgugaccgucacccacuccgugaaccugcuggaggacagccacaacgggaagcucugccugcugaagggcaucgcgccccuccagcuggggaacugcuccguggccggcuggauccuggggaacccggagugcgagcuccugaucagcaaggaguccuggagcuacaucgucgagacccccaaccccgagaacggcacgugcuaccccggcuacuucgccgacuacgaggagcugcgcgagcagcucuccagcguguccagcuucgagcgguucgagaucuucccgaaggaguccagcuggcccaaccacaccgugaccggggucuccgccagcugcucccacaacggcaagagcuccuucuaccgcaaccugcuguggcucaccgggaagaacggccuguaccccaaccugagcaaguccuacgccaacaacaaggagaaggaggugcucgugcuguggggcguccaccacccgcccaacaucggggaccagcgggcccuguaccacacggagaacgccuacgugagcguggucagcucccacuacagccgccgguucacccccgagaucgccaagcgccccaaggugcgggaccaggagggccgcaucaacuacuacuggacccuccuggagcccggggacaccaucaucuucgaggcgaacggcaaccugaucgccccgcgguucgccuucgcccucucccgcggguucggcagcggcaucaucacguccaacgcccccauggacgagugcgacgcgaagugccagacgccccagggggccaucaacagcucccugcccuuccagaacgugcacccggucaccaucggcgagugccccaaguacgugcggagcaccaagcugcgcauggugaccgggcuccggaacauccccuccauccagagccgcggccuguucggggccaucgccggcuucaucgagggcggguggaccggcauggucgacgggugguacggcuaccaccaccagaacgagcagggguccggcuacgccgcggaccagaaguccacccagaacgccaucaacggcaucaccaacaaggugaacagcaucaucgagaagaugaacacgcaguucaccgccguggggaaggaguucaacaagcuggagcggcgcauggagaaccucaacaagaaggucgacgacggcuuccuggacaucuggaccuacaacgccgagcugcucgugcugcuggagaacgagcggacccucgacuuccacgacagcaacgucaagaaccuguacgagaaggugaagucccagcugaagaacaacgccaaggagaucgggaacggcugcuucgaguucuaccacaagugcaacgacgagugcauggagagcgugaagaacgggacguacgacuaccccaaguacuccgaggagagcaagcucaaccgcgagaagaucgacggcgucaagcuggaguccaugggcguguaccagauccuggcgaucuacagcaccguggccagcucccucguccugcuggugagccucggggccaucuccuucuggaugugcagcaacggcucccugcagugccggaucugcaucuga

SEQ ID NO: 66078 - RNA, 1701 nt, Artificial Sequence; identical to SEQ ID NO: 66011
  derived and/or modified CDS sequence (opt1) from hemagglutinin__InfluenzaA__ABW40268

SEQ ID NO: 66079 - RNA, 1698 nt, Artificial Sequence
  derived and/or modified CDS sequence (opt1) from hemagglutinin__InfluenzaA__ABW40312
augaaggugaagcugcucguccugcugugcaccuucaccgccacguacgccgacaccaucugcaucggcuaccacgcgaacaacagcaccgacaccguggacacggugcucgagaagaacgucaccgugacccacuccgugaaccugcuggaggacagccacaacgggaagcucugccugcugaagggcaucgcgccccuccagcuggggaacugcuccgucgccggcuggauccuggggaacccggagugcgagcuccugaucagcaaggaguccuggagcuacaucguggagacccccaaccccgagaacggcacgugcuaccccggcuacuucgccgacuacgaggagcugcgcgagcagcucuccagcguguccagcuucgagcgguucgagaucuucccgaaggaguccagcuggcccaaccacaccgucaccgggguguccgccagcugcucccacaacggccgcagcuccuucuaccggaaccugcuguggcucaccgggaagaacggccuguaccccaaccugagcaaguccuacgccaacaacaaggagaaggaggugcucguccuguggggcgugcaccacccgcccaacaucggggaccagcgcgcccuguaccacacggagaacgccuacgugagcgucgugagcucccacuacagccggcgcuucacccccgagaucgccaagcggcccaaggugcgcgaccaggagggccggaucaacuacuacuggacccuccuggagcccggggacaccaucaucuucgaggcgaacggcaaccugaucgccccgcgcuucgccuucgcccucucccggggguucggcagcggcaucaucacguccaacgcccccauggacgagugcgacgcgaagugccagacgccccagggggccaucaacagcucccugcccuuccagaacguccacccggugaccaucggcgagugccccaaguacgugcgcagcaccaagcugcggauggucaccgggcuccgcaacauccccuccauccagagccggggccuguucggggccaucgccggcuucaucgagggcggguggaccggcaugguggacgggugguacggcuaccaccaccagaacgagcagggguccggcuacgccgcggaccagaaguccacccagaacgccaucaacggcaucaccaacaaggugaacagcgucaucgagaagaugaacacgcaguucaccgccguggggaaggaguucaacaagcuggagcgccggauggagaaccucaacaagaaggucgacgacggcuuccuggacaucuggaccuacaacgccgagcugcucgugcugcuggagaacgagcgcacccucgacuuccacgacagcaacgugaagaaccuguacgagaaggucaagucccagcugaagaacaacgccaaggagaucgggaacggcugcuucgaguucuaccacaagugcaacgacgagugcauggagagcgugaagaacgggacguacgacuaccccaaguacuccgaggagagcaagcucaaccgggagaagaucgacggcgugaagcuggaguccaugggcgucuaccagauccuggcgaucuacagcaccguggccagcucccucgugcugcuggucagccucggggccaucuccuucuggaugugcagcaacggcucccugcagugccgcaucugcaucuga

SEQ ID NO: 66080 - RNA, 1701 nt, Artificial Sequence; identical to SEQ ID NO: 65952
  derived and/or modified CDS sequence (opt1) from hemagglutinin__InfluenzaA__ABW40323

SEQ ID NO: 66081 - RNA, 1698 nt, Artificial Sequence; identical to SEQ ID NO: 65980
  derived and/or modified CDS sequence (opt1) from hemagglutinin__InfluenzaA__ABW40334

SEQ ID NO: 66082 - RNA, 1698 nt, Artificial Sequence; identical to SEQ ID NO: 65980
  derived and/or modified CDS sequence (opt1) from hemagglutinin__InfluenzaA__ABW40345

SEQ ID NO: 66083 - RNA, 1698 nt, Artificial Sequence
  derived and/or modified CDS sequence (opt1) from hemagglutinin__InfluenzaA__ABW40356
augaaggugaagcugcucguccugcugugcaccuucaccgccacguacgccgacaccaucugcaucggcuaccacgcgaacaacagcaccgacaccguggacacggugcucgagaagaacgucaccgugacccacuccgugaaccugcuggaggacagccacaacgggaagcucugccugcugaagggcaucgcgccccuccagcuggggaacugcuccgucgccggcuggauccuggggaacccggagugcgagcuccugaucagcaaggaguccuggagcuacaucguggagacccccaaccccgagaacggcacgugcuaccccggcuacuucgccgacuacgaggagcugcgcgagcagcucuccagcguguccagcuucgagcgguucgagaucuucccgaaggaguccagcuggcccaaccacaccgucaccgggguguccgccagcugcucccacaacggcaagagcuccuucuaccgcaaccugcuguggcucaccgggaagaacggccuguaccccaaccugagcaaguccuacgccaacaacaaggagaaggaggugcucgucauguggggcgugcaccacccgcccaacaucggggaccagcgggcccuguaccacacggagaacgccuacgugagcgucgugagcucccacuacagccgccgguucacccccgagaucgccaagcgccccaaggugcgggaccaggagggccgcaucaacuacuacuggacccugcucgagcccggggacaccaucaucuucgaggcgaacggcaaccugaucgccccgcgguucgccuucgcccugucccgcggguucggcagcggcaucaucacguccaacgcccccaugggggagugcgacgcgaagugccagacgccccagggcgccaucaacagcucccuccccuuccagaacguccacccggugaccaucggggagugccccaaguacgugcggagcgccaagcugcgcauggucaccggccugcggaacauccccuccauccagagccgcggccucuucggggccaucgccggcuucaucgagggcggguggaccgggaugguggacggcugguacggguaccaccaccagaacgagcagggcuccggcuacgcggccgaccagaaguccacccagaacgccaucaacgggaucaccaacaaggugaacagcgucaucgagaagaugaacacccaguucacggccgugggcaaggaguucaacaagcuggagcggcgcauggagaaccugaacaagaaggucgacgacggguuccucgacaucuggaccuacaacgccgagcugcuggugcuccuggagaacgagcggacccuggacuuccacgacagcaacgugaagaaccucuacgagaaggucaagucccagcugaagaacaacgcgaaggagaucggcaacgggugcuucgaguucuaccacaagugcaacgacgagugcauggagagcgugaagaacggcaccuacgacuaccccaaguacuccgaggagagcaagcugaaccgcgagaagaucgacggcgugaagcucgaguccaugggggucuaccagauccuggccaucuacagcacgguggccagcucccuggugcuccuggucagccugggcgccaucuccuucuggaugugcagcaacgggucccuccagugccggaucugcaucuga

SEQ ID NO: 66084 - RNA, 1698 nt, Artificial Sequence; identical to SEQ ID NO: 65938
  derived and/or modified CDS sequence (opt1) from hemagglutinin__InfluenzaA__ABW40367

SEQ ID NO: 66085 - RNA, 1701 nt, Artificial Sequence; identical to SEQ ID NO: 65952
  derived and/or modified CDS sequence (opt1) from hemagglutinin__InfluenzaA__ABW40378

SEQ ID NO: 66086 - RNA, 1698 nt, Artificial Sequence; identical to SEQ ID NO: 65938
  derived and/or modified CDS sequence (opt1) from hemagglutinin__InfluenzaA__ABW40389

SEQ ID NO: 66087 - RNA, 1698 nt, Artificial Sequence; identical to SEQ ID NO: 65934
  derived and/or modified CDS sequence (opt1) from hemagglutinin__InfluenzaA__ABW40400

SEQ ID NO: 66088 - RNA, 1698 nt, Artificial Sequence; identical to SEQ ID NO: 65934
  derived and/or modified CDS sequence (opt1) from hemagglutinin__InfluenzaA__ABW40411

SEQ ID NO: 66089 - RNA, 1698 nt, Artificial Sequence; identical to SEQ ID NO: 65934
  derived and/or modified CDS sequence (opt1) from hemagglutinin__InfluenzaA__ABW40422

SEQ ID NO: 66090 - RNA, 1698 nt, Artificial Sequence; identical to SEQ ID NO: 65980
  derived and/or modified CDS sequence (opt1) from hemagglutinin__InfluenzaA__ABW40433

SEQ ID NO: 66091 - RNA, 1698 nt, Artificial Sequence; identical to SEQ ID NO: 65954
  derived and/or modified CDS sequence (opt1) from hemagglutinin__InfluenzaA__ABW40444

SEQ ID NO: 66092 - RNA, 1698 nt, Artificial Sequence; identical to SEQ ID NO: 65971
  derived and/or modified CDS sequence (opt1) from hemagglutinin__InfluenzaA__ABW40455

SEQ ID NO: 66093 - RNA, 1698 nt, Artificial Sequence; identical to SEQ ID NO: 65938
  derived and/or modified CDS sequence (opt1) from hemagglutinin__InfluenzaA__ABW40466

SEQ ID NO: 66094 - RNA, 1698 nt, Artificial Sequence; identical to SEQ ID NO: 65938
  derived and/or modified CDS sequence (opt1) from hemagglutinin__InfluenzaA__ABW40477

SEQ ID NO: 66095 - RNA, 1698 nt, Artificial Sequence; identical to SEQ ID NO: 65934
  derived and/or modified CDS sequence (opt1) from hemagglutinin__InfluenzaA__ABW40488

SEQ ID NO: 66096 - RNA, 1698 nt, Artificial Sequence; identical to SEQ ID NO: 65938
  derived and/or modified CDS sequence (opt1) from hemagglutinin__InfluenzaA__ABW40499

SEQ ID NO: 66097 - RNA, 1698 nt, Artificial Sequence; identical to SEQ ID NO: 65980
  derived and/or modified CDS sequence (opt1) from hemagglutinin__InfluenzaA__ABW40510

SEQ ID NO: 66098 - RNA, 1698 nt, Artificial Sequence; identical to SEQ ID NO: 65934
  derived and/or modified CDS sequence (opt1) from hemagglutinin__InfluenzaA__ABW40521

SEQ ID NO: 66099 - RNA, 1698 nt, Artificial Sequence; identical to SEQ ID NO: 65938
  derived and/or modified CDS sequence (opt1) from hemagglutinin__InfluenzaA__ABW40532

SEQ ID NO: 66100 - RNA, 1698 nt, Artificial Sequence
  derived and/or modified CDS sequence (opt1) from hemagglutinin__InfluenzaA__ABW40543
augaaggugaagcugcucguccugcugugcaccuucaccgccacguacgccgacaccaucugcaucggcuaccacgcgaacaacagcaccgacaccguggacacggugcucgagaagaacgucaccgugacccacuccgugaaccugcuggaggaccgccacaacgggaagcucugccugcugaagggcaucgcgccccuccagcuggggaacugcagcgucgccggcuggauccuggggaacccggagugcgagcuccugaccuccaaggagagcugguccuacaucguggagacgcccaaccccgagaacgggaccugcuaccccggcuacuucgccgacuacgaggagcugcgggagcagcucagcuccgugagcuccuucgagcgcuucgagaucuucccgaaggagagcuccuggcccaaccacaccgucaccggggugagcgccuccugcagccacaacggcaaguccagcuucuaccggaaccugcuguggcucacggggaagaacggccuguaccccaaccuguccaagagcuacgccaacaacaaggagaaggaggugcucguccuguggggcgugcaccacccgcccaacaucggcgaccagcgcgcccuguaccacaccgagaacgccuacguguccgucgugagcagccacuacucccggcgcuucacccccgagaucgccaagcggcccaaggugcgcgaccaggagggccggaucaacuacuacuggacccuccuggagcccggggacacgaucaucuucgaggcgaacggcaaccugaucgccccgcgcuucgccuucgcccucagccggggguucggcuccggcaucaucaccagcaacgcccccauggacgagugcgacgcgaagugccagacgccccagggggccaucaacuccagccugcccuuccagaacguccacccggugaccaucggcgagugccccaaguacgugcgcuccgccaagcugcggauggucaccgggcuccgcaacauccccagcauccagucccggggccuguucggggccaucgccggcuucaucgagggcggguggaccggcaugguggacgggugguacggcuaccaccaccagaacgagcaggggagcggcuacgcggccgaccagaaguccacccagaacgccaucaacggcaucaccaacaaggugaacagcgucaucgagaagaugaacacgcaguucaccgccguggggaaggaguucaacaagcuggagcgccggauggagaaccucaacaagaaggucgacgacggcuuccuggacaucuggaccuacaacgccgagcugcucgugcugcuggagaacgagcgcacccucgacuuccacgacuccaacgugaagaaccuguacgagaaggucaagagccagcugaagaacaacgcgaaggagaucgggaacggcugcuucgaguucuaccacaagugcaacgacgagugcauggaguccgugaagaacgggacguacgacuaccccaaguacagcgaggaguccaagcucaaccgggagaagaucgacggcgugaagcuggagagcaugggcgucuaccagauccuggccaucuacuccaccguggccagcagccucgugcugcuggucucccucggggccaucagcuucuggaugugcuccaacggcagccugcagugccgcaucugcaucuga

SEQ ID NO: 66101 - RNA, 1698 nt, Artificial Sequence; identical to SEQ ID NO: 66079
  derived and/or modified CDS sequence (opt1) from hemagglutinin__InfluenzaA__ABW40554

SEQ ID NO: 66102 - RNA, 1698 nt, Artificial Sequence; identical to SEQ ID NO: 65938
  derived and/or modified CDS sequence (opt1) from hemagglutinin__InfluenzaA__ABW40565

SEQ ID NO: 66103 - RNA, 1698 nt, Artificial Sequence
  derived and/or modified CDS sequence (opt1) from hemagglutinin__InfluenzaA__ABW40576
augaaggugaagcugcucauccugcugugcaccuucaccgccacguacgccgacaccaucugcaucggcuaccacgcgaacaacagcaccgacaccgucgacacggugcucgagaagaacgugaccgucacccacuccgugaaccugcuggaggacagccacaacgggaagcucugccugcugaagggcaucgcgccccuccagcuggggaacugcuccguggccggcuggauccuggggaacccggagugcgagcuccugaucagcaaggaguccuggagcuacaucgucgagacccccaaccccgagaacggcacgugcuaccccggcuacuucgccgacuacgaggagcugcgcgagcagcucuccagcguguccagcuucgagcgguucgagaucuucccgaaggaguccagcuggcccaaccacaccgugaccggggucuccgccagcugcucccacaacggcaagagcuccuucuaccgcaaccugcuguggcucaccgggaagaacggccuguaccccaaccugagcaaguccuacgccaacaacaaggagaaggaggugcucgugcuguggggcguccaccacccgcccaacaucggggaccagcgggcccuguaccacacggagaacaccuacgugagcguggucagcucccacuacagccgccgguucacccccgagaucgccaagcgccccaaggugcgggaccaggagggccgcaucaacuacuacuggacccuccuggagcccggggacacgaucauccuggaggccaacggcaaccucaucgcgccgcgguucgccuucgcccugucccgcggguucggcagcggcaucaucaccuccaacgcccccauggacgagugcgacgccaagugccagacgccccagggggcgaucaacagcucccugcccuuccagaacgugcacccggucaccaucggcgagugccccaaguacgugcggagcaccaagcuccgcauggugaccgggcugcggaacauccccuccauccagagccgcggccuguucggggccaucgccggcuucaucgagggcggguggaccggcauggucgacgggugguacggcuaccaccaccagaacgagcagggguccggcuacgccgccgaccagaaguccacccagaacgcgaucaacggcaucacgaacaaggugaacagcgugaucgagaagaugaacacccaguucaccgccgucgggaaggaguucaacaagcucgagcggcgcauggagaaccugaacaagaagguggacgacggcuuccuggacaucuggaccuacaacgccgagcuccugguccugcucgagaacgagcggacgcuggacuuccacgacagcaacgugaagaaccuguacgagaaggugaagucccagcucaagaacaacgccaaggagaucgggaacggcugcuucgaguucuaccacaagugcaacgacgagugcauggagagcgucaagaacgggaccuacgacuaccccaaguacuccgaggagagcaagcugaaccgcgagaagaucgacggcgugaagcuggaguccaugggcguguaccagauccucgccaucuacagcaccgucgcgagcucccuggugcugcucgugagccugggggccaucuccuucuggaugugcagcaacggcucccugcagugccggaucugcaucuga

SEQ ID NO: 66104 - RNA, 1701 nt, Artificial Sequence; identical to SEQ ID NO: 66011
  derived and/or modified CDS sequence (opt1) from hemagglutinin__InfluenzaA__ABW40587

SEQ ID NO: 66105 - RNA, 1698 nt, Artificial Sequence; identical to SEQ ID NO: 65980
  derived and/or modified CDS sequence (opt1) from hemagglutinin__InfluenzaA__ABW40598

SEQ ID NO: 66106 - RNA, 1698 nt, Artificial Sequence; identical to SEQ ID NO: 65954
  derived and/or modified CDS sequence (opt1) from hemagglutinin__InfluenzaA__ABW40609

SEQ ID NO: 66107 - RNA, 1698 nt, Artificial Sequence; identical to SEQ ID NO: 65969
  derived and/or modified CDS sequence (opt1) from hemagglutinin__InfluenzaA__ABW40620

SEQ ID NO: 66108 - RNA, 1701 nt, Artificial Sequence; identical to SEQ ID NO: 66011
  derived and/or modified CDS sequence (opt1) from hemagglutinin__InfluenzaA__ABW40631

SEQ ID NO: 66109 - RNA, 1698 nt, Artificial Sequence; identical to SEQ ID NO: 65934
  derived and/or modified CDS sequence (opt1) from hemagglutinin__InfluenzaA__ABW40642

SEQ ID NO: 66110 - RNA, 1701 nt, Artificial Sequence; identical to SEQ ID NO: 66011
  derived and/or modified CDS sequence (opt1) from hemagglutinin__InfluenzaA__ABW40653

SEQ ID NO: 66111 - RNA, 1698 nt, Artificial Sequence; identical to SEQ ID NO: 65980
  derived and/or modified CDS sequence (opt1) from hemagglutinin__InfluenzaA__ABW40664

SEQ ID NO: 66112 - RNA, 1698 nt, Artificial Sequence; identical to SEQ ID NO: 65954
  derived and/or modified CDS sequence (opt1) from hemagglutinin__InfluenzaA__ABW40675

SEQ ID NO: 66113 - RNA, 1698 nt, Artificial Sequence; identical to SEQ ID NO: 66083
  derived and/or modified CDS sequence (opt1) from hemagglutinin__InfluenzaA__ABW71294

SEQ ID NO: 66114 - RNA, 1698 nt, Artificial Sequence; identical to SEQ ID NO: 65980
  derived and/or modified CDS sequence (opt1) from hemagglutinin__InfluenzaA__ABW71305

SEQ ID NO: 66115 - RNA, 1698 nt, Artificial Sequence
  derived and/or modified CDS sequence (opt1) from hemagglutinin__InfluenzaA__ABW71316
augaaggugaagcugcucauccugcugugcaccuucaccgccacguacgccgacaccaucugcaucggcuaccacgcgaacaacagcaccgacaccgucgacacggugcucgagaagaacgugaccgucacccacuccgugaaccugcuggaggacagccacaacgggaagcucugccugcugaagggcaucgcgccccuccagcuggggaacugcuccguggccggcuggauccuggggaacccggagugcgagcuccugaucagcaaggaguccuggagcuacaucgucgagacccccaaccccgagaacggcacgugcuaccccggcuacuucgccgacuacgaggagcugcgcgagcagcucuccagcguguccagcuucgagcgguucgagaucuucccgaaggaguccagcuggcccaaccacaccgugaccggggucuccgccagcugcucccacaacggcaagagcuccuucuaccgcaaccugcuguggcucaccgggaagaacggccuguaccccaaccugagcaaguccuacgccaacaacaaggagaaggaggugcucgugcuguggggcguccaccacccgcccaacaucggggaccagcgggcccuguaccacacggagaacgccuacgugagcguggucagcucccacuacagccgccgguucacccccgagaucgccaagcgccccaaggugcgggaccaggagggccgcaucaacuacuacuggacccuccuggagccccgggacaccaucaucuucgaggcgaacgggaaccugaucgccccgcgcuucgccuucgcccucucccggggcuucgggagcggcaucaucacguccaacgcccccauggacgagugcgacgcgaagugccagacgccccagggcgccaucaacagcucccugcccuuccagaacgugcacccggucaccaucggggagugccccaaguacgugcgcagcaccaagcugcggauggugaccggccuccgcaacauccccuccauccagagccgggggcuguucggcgccaucgccggguucaucgagggcggcuggaccgggauggucgacggcugguacggguaccaccaccagaacgagcagggcuccggguacgccgcggaccagaaguccacccagaacgccaucaacggcaucaccaacaaggugaacagcgugaucgagaagaugaacacgcaguucaccgccgucggcaaggaguucaacaagcuggagcgccggauggagaaccucaacaagaagguggacgacggguuccuggacaucuggaccuacaacgccgagcugcucguccugcuggagaacgagcgcacccucgacuuccacgacagcaacgugaagaaccuguacgagaaggugaagucccagcugaagaacaacgccaaggagaucggcaacgggugcuucgaguucuaccacaagugcaacgacgagugcauggagagcgucaagaacggcacguacgacuaccccaaguacuccgaggagagcaagcucaaccgggagaagaucgacggggugaagcuggaguccaugggcguguaccagauccuggcgaucuacagcaccgucgccagcucccucgugcugcuggugagccucggcgccaucuccuucuggaugugcagcaacgggucccugcagugccgcaucugcaucuga

SEQ ID NO: 66116 - RNA, 1698 nt, Artificial Sequence; identical to SEQ ID NO: 65934
  derived and/or modified CDS sequence (opt1) from hemagglutinin__InfluenzaA__ABW71327

SEQ ID NO: 66117 - RNA, 1698 nt, Artificial Sequence; identical to SEQ ID NO: 65938
  derived and/or modified CDS sequence (opt1) from hemagglutinin__InfluenzaA__ABW71338

SEQ ID NO: 66118 - RNA, 1701 nt, Artificial Sequence; identical to SEQ ID NO: 65952
  derived and/or modified CDS sequence (opt1) from hemagglutinin__InfluenzaA__ABW71349

SEQ ID NO: 66119 - RNA, 1698 nt, Artificial Sequence
  derived and/or modified CDS sequence (opt1) from hemagglutinin__InfluenzaA__ABW71360
augaaggugaagcugcucguccugcugugcaccuucaccgccacguacgccgacaccaucugcaucggcuaccacgcgaacaacagcaccgacaccguggacacggugcucgagaagaacgucaccgugacccacuccgugaaccugcuggaggaccgccacaacgggaagcucugccugcugaagggcaucgcgccccuccagcuggggaacugcagcgucgccggcuggauccuggggaacccggagugcgagcuccugaucuccaaggagagcugguccuacaucguggagacccccaaccccgagaacggcacgugcuaccccggcuacuucgccgacuacgaggagcugcgggagcagcucagcuccgugagcuccuucgagcgcuucgagaucuucccgaaggagagcuccuggcccaaccacaccgucaccggggugagcgccuccugcagccacaacggcaaguccagcuucuaccggaaccugcuguggcucaccgggaagaacggccuguaccccaaccugucccgcagcuacgccaacaacaaggagaaggaggugcucguccuguggggcgugcaccacccgcccaacaucggggaccagcgggcccuguaccacacggagaacgccuacguguccgucgugagcagccacuacucccgccgguucacccccgagaucgccaagcgccccaaggugcgggaccaggagggccgcaucaacuacuacuggacccuccuggagcccggggacaccaucaucuucgaggcgaacggcaaccugaucgccccgcgguucgccuucgcccucagccgcggguucggcuccggcaucaucacgagcaacgcccccauggacgagugcgacgcgaagugccagacgccccagggggccaucaacuccagccugcccuuccagaacguccacccggugaccaucggcgagugccccaaguacgugcgguccgccaagcugcgcauggucaccgggcuccggaacauccccagcauccagucccgcggccuguucggggccaucgccggcuucaucgagggcggguggaccggcaugguggacgggugguacggcuaccaccaccagaacgagcaggggagcggcuacgcggccgaccagaaguccacccagaacgccaucaacggcaucaccaacaaggugaacagcgucaucgagaagaugaacacccaguucacggccguggggaaggaguucaacaagcuggagcggcgcauggagaaccucaacaagaaggucgacgacggcuuccuggacaucuggaccuacaacgccgagcugcucgugcugcuggagaacgagcggacccucgacuuccacgacuccaacgugaagaaccuguacgagaaggucaagagccagcugaagaacaacgcgaaggagaucgggaacggcugcuucgaguucuaccacaagugcgacgacgagugcauggaguccgugaagaacgggaccuacgacuaccccaaguacagcgaggaguccaagcucaaccgcgagaagaucgacggcgugaagcuggagagcaugggcgucuaccagauccuggccaucuacuccacgguggccagcagccucgugcugcuggucucccucggggccaucagcuucuggaugugcuccaacggcagccugcagugccggaucugcaucuga

SEQ ID NO: 66120 - RNA, 1698 nt, Artificial Sequence; identical to SEQ ID NO: 65954
  derived and/or modified CDS sequence (opt1) from hemagglutinin__InfluenzaA__ABW71371

SEQ ID NO: 66121 - RNA, 1698 nt, Artificial Sequence
  derived and/or modified CDS sequence (opt1) from hemagglutinin__InfluenzaA__ABW71382
augaaggugaagcugcucauccugcugugcaccuucaccgccacguacgccgacaccaucugcaucggcuaccacgcgaacaacagcaccgacaccgucgacacggugcucgagaagaacgugaccgucacccacuccgugaaccugcuggaggacagccacaacgggaagcucugccugcugaagggcaucgcgccccuccagcuggggaacugcuccguggccggcuggauccuggggaacccggagugcgagcuccugaucagcaaggaguccuggagcuacaucgucgagacccccaaccccgagaacggcacgugcuaccccggcuacuucgccgacuacgaggagcugcgcgagcagcucuccagcguguccagcuucgagcgguucgagaucuucccgaaggaguccagcugguccaaccacaccaucaccggggugagcgccuccugcagccacaacggcaaguccagcuucuaccgcaaccugcuguggcucaccgggaagaacggccuguaccccaaccuguccaagagcuacgccaacaacaaggagaaggagguccucgugcuguggggcgugcaccacccgcccaacaucggggaccagcgggcccuguaccacacggagaacgccuacgucagcgugguguccagccacuacucccgccgguucacccccgagaucgccaagcgccccaagguccgggaccaggagggccgcaucaacuacuacuggacccuccuggagcccggggacaccaucaucuucgaggcgaacggcaaccugaucgcgccccgguucgccuucgcccucagccgcggguucggcuccggcaucaucacgagcaacgccccgauggacgagugcgacgccaagugccagacgccccagggggccaucaacuccagccugcccuuccagaacgugcaccccgugaccaucggcgagugcccgaaguacguccgguccaccaagcugcgcauggugaccgggcuccggaacauccccagcauccagucccgcggccuguucggggccaucgccggcuucaucgagggcggguggaccggcaugguggacgggugguacggcuaccaccaccagaacgagcaggggagcggcuacgccgcggaccagaaguccacccagaacgccaucaacggcaucaccaacaaggucaacagcgugaucgagaagaugaacacgcaguucaccgccguggggaaggaguucaacaagcuggagcggcgcauggagaaccucaacaagaaggucgacgacggcuuccuggacaucuggaccuacaacgccgagcugcucgugcugcuggagaacgagcggacccucgacuuccacgacuccaacgucaagaaccuguacgagaaggucaagagccagcugaagaacaacgccaaggagaucgggaacggcugcuucgaguucuaccacaagugcaacgacgagugcauggaguccgugaagaacgggacguacgacuaccccaaguacagcgaggaguccaagcucaaccgcgagaagaucgacggcgugaagcuggagagcaugggcguguaccagauccuggcgaucuacagcaccguggccuccagccucguccugcuggugucccucggggccaucagcuucuggaugugcuccaacggcagccugcagugccggaucugcaucuga

SEQ ID NO: 66122 - RNA, 1698 nt, Artificial Sequence
  derived and/or modified CDS sequence (opt1) from hemagglutinin__InfluenzaA__ABW71393
augaaggugaagcugcucguccugcugugcaccuucaccgccacguacgccgacaccaucugcaucggcuaccacgcgaacaacagcaccgacaccguggacacggugcucgagaagaacgucaccgugacccacuccgugaaccugcuggaggacagccacaacgggaagcucugccugcugaagggcaucgcgccccuccagcuggggaacugcuccgucgccggcuggauccuggggaacccggagugcgagcuccugaucagcaaggaguccuggagcuacaucguggagacccccaaccccgagaacggcacgugcuaccccggcuacuucaccgacuacgaggagcugcgcgagcagcucuccagcguguccagcuucgagcgguucgagaucuucccgaaggaguccagcuggcccaaccacaccgucaccgggguguccgccagcugcucccacaacggcaagagcuccuucuaccgcaaccugcuguggcucacggggaagaacggccuguaccccaaccugagcaaguccuacgccaacaacaaggagaaggaggugcucguccuguggggcgugcaccacccgcccaacaucggggaccagcgggcccuguaccacaccgagaacgccuacgugagcgucgugagcucccacuacagccgccgguucacccccgagaucgccaagcgccccaaggugcgggaccaggagggccgcaucaacuacuacuggacccuccuggagcccggggacacgaucaucuucgaggccaacggcaaccugaucgcgccgcgguucgccuucgcccucucccgcggguucggcagcggcaucaucaccuccaacgcccccaugggggagugcgacgccaagugccagacgccccagggcgcgaucaacagcucccugcccuuccagaacguccacccggugaccaucggggagugccccaaguacgugcggagcgccaagcugcgcauggucaccggccuccggaacauccccuccauccagagccgcgggcuguucggcgccaucgccggcuucaucgagggcggguggaccgggaugguggacggcugguacggguaccaccaccagaacgagcagggcuccggcuacgccgcggaccagaaguccacccagaacgccaucaacgggaucaccaacaaggugaacagcgucaucgagaagaugaacacgcaguucaccgccgugggcaaggaguucaacaagcuggagcggcgcauggagaaccucaacaagaaggucgacgacggguuccuggacaucuggaccuacaacgccgagcugcucgugcugcuggagaacgagcggacccucgacuuccacgacagcaacgugaagaaccuguacgagaaggucaagucccagcugaagaacaacgccaaggagaucggcaacgggugcuucgaguucuaccacaagugcaacgacgagugcauggagagcgugaagaacggcacguacgacuaccccaaguacuccgaggagagcaagcucaaccgcgagaagaucgacggcgugaagcuggaguccaugggggucuaccagauccuggcgaucuacagcaccguggccagcucccucgugcugcuggucagccucggcgccaucuccuucuggaugugcagcaacgggucccugcagugccggaucugcaucuga

SEQ ID NO: 66123 - RNA, 1698 nt, Artificial Sequence; identical to SEQ ID NO: 66083
  derived and/or modified CDS sequence (opt1) from hemagglutinin__InfluenzaA__ABW71404

SEQ ID NO: 66124 - RNA, 1698 nt, Artificial Sequence; identical to SEQ ID NO: 65971
  derived and/or modified CDS sequence (opt1) from hemagglutinin__InfluenzaA__ABW71415

SEQ ID NO: 66125 - RNA, 1698 nt, Artificial Sequence
  derived and/or modified CDS sequence (opt1) from hemagglutinin__InfluenzaA__ABW71426
augaaggccaagcugcucauccugcugugcaccuucaccgccacguacgcggacaccaucugcaucggcuaccacgccaacaacagcaccgacaccguggacacgguccucgagaagaacgugaccgugacccacuccgucaaccugcuggaggacagccacaacgggaagcucugccugcugaagggcaucgcgccccuccagcuggggaacugcuccguggccggcuggauccuggggaacccggagugcgagcuccugaucagcaaggaguccuggagcuacaucguggagacccccaaccccgagaacggcacgugcuaccccggcuacuucgccgacuacgaggagcugcgcgagcagcucuccagcgucuccagcuucgagcgguucgagaucuucccgaaggaguccagcuggcccaaccacaccgugaccgggguguccgccagcugcucccacaacggcaagagcuccuucuaccgcaaccugcuguggcucaccgggaagaacggccuguaccccaaccugagcaaguccuacgccaacaacaaggagaaggagguccucgugcuguggggcgugcaccacccgcccaacaucggggaccagcgggcccuguaccacacggagaacgccuacgucagcguggugagcucccacuacagccgccgguucacccccgagaucgcgaagcgccccaagguccgggaccaggagggccgcaucaacuacuacuggacccuccuggagcccggggacaccaucaucuucgaggccaacggcaaccugaucgccccgcgguucgccuucgcccucucccgcggguucggcagcggcaucaucacguccaacgcgcccauggacgagugcgacgccaagugccagacgccccagggggccaucaacagcucccugcccuuccagaacgugcacccggugaccaucggcgagugccccaaguacguccggagcaccaagcugcgcauggugaccgggcuccggaacauccccuccauccagagccgcggccuguucggggccaucgccggcuucaucgagggcggguggaccggcaugguggacgggugguacggcuaccaccaccagaacgagcagggguccggcuacgcggccgaccagaaguccacccagaacgccaucaacggcaucaccaacaaggucaacagcgugaucgagaagaugaacacgcaguucaccgccguggggaaggaguucaacaagcuggagcggcgcauggagaaccucaacaagaaggucgacgacggcuuccuggacaucuggaccuacaacgccgagcugcucgugcugcuggagaacgagcggacccucgacuuccacgacagcaacgucaagaaccuguacgagaaggugaagucccagcugaagaacaacgcgaaggagaucgggaacggcugcuucgaguucuaccacaagugcaacgacgagugcauggagagcgugaagaacgggacguacgacuaccccaaguacuccgaggagagcaagcucaaccgcgagaagaucgacggcgucaagcuggaguccaugggcguguaccagauccuggccaucuacagcaccguggccagcucccucguccugcuggugagccucggggccaucuccuucuggaugugcagcaacggcucccugcagugccggaucugcaucuga

SEQ ID NO: 66126 - RNA, 1698 nt, Artificial Sequence
  derived and/or modified CDS sequence (opt1) from hemagglutinin__InfluenzaA__ABW71448
augaaggugaagcugcucguccugcugugcaccuucaccgccacguacgccgacaccaucugcaucggcuaccacgcgaacaacagcaccgacaccguggacacggugcucgagaagaacgucaccgugacccacuccgugaaccugcuggaggacagccacaacgggaagcucugccugcugaagggcaucgcgccccuccagcuggggaacugcuccgucgccggcuggauccuggggaacccggagugcgagcuccugaucagcaaggaguccuggagcuacaucguggagacccccaaccccgagaacggcacgugcuaccccggcuacuucgccgacuacgaggagcugcgcgagcagcucuccagcguguccagcuucgagcgguucgagaucuucccgaaggaguccagcuggcccaaccacaccgucaccgggguguccgccagcugcucccacaacggcaagagcuccuucuaccgcaaccugcuguggcucaccgggaagaacggccuguaccccaaccugagcaaguccuacgccaacaacaaggagaaggaggugcucguccuguggggcgugcaccacccgcccaacaucggggaccagcgggcccuguaccacacggagaacgccuacgugagcgucgugagcucccacuacagccgccgguucacccccgagaucgccaagcgccccaaggugcgggaccaggagggccgcaucaacuacuacuggacccuccuggagcccggggacaccaucaucuucgaggcgaacggcaaccugaucgccccgcgguucgccuucgcccucucccgcggguucggcagcggcaucaucacguccaacgcccccauggacgagugcgacgcgaagugccagacgccccagggggccaucaacagcucccugcccuuccagaacguccacccggugaccaucggcgagugccccaaguacgugcggagcaccaagcugcgcauggucaccgggcuccggaacauccccuccauccagagccgcggccuguucggggccaucgccggcuucaucgagggcggguggaccggcaugguggacgggugguacggcuaccaccaccagaacgagcagggguccggcuacgccgcggaccagaaguccacccagaacgccaucaacggcaucaccaacaaggugaacagcgucaucgagaagaugaacacgcaguucaccgccguggggaaggaguucaacaagcuggagcggcgcauggagaaccucaacaagaaggucgacgacggcuuccuggacaucuggaccuacaacgccgagcugcucgugcugcuggagaacgagcggacccucgacuuccacgacagcaacgugaagaaccuguacgagaaggucaagucccagcugaagaacaacgccaaggagaucgggaacggcugcuucgaguucuaccacaagugcaacgacgagugcauggagagcgugaagaacgggacguacgacuaccccaaguacuccgaggagagcaagcucaaccgcgagaagaucgacggcgugaagcuggaguccaugggcgucuaccagauccuggcgaucuacagcaccaucgccagcucccucgugcugcuggugagccucggggccaucuccuucuggaugugcagcaacggcucccugcagugccggaucugcaucuga

SEQ ID NO: 66127 - RNA, 1698 nt, Artificial Sequence; identical to SEQ ID NO: 65954
  derived and/or modified CDS sequence (opt1) from hemagglutinin__InfluenzaA__ABW71459

SEQ ID NO: 66128 - RNA, 1698 nt, Artificial Sequence; identical to SEQ ID NO: 65938
  derived and/or modified CDS sequence (opt1) from hemagglutinin__InfluenzaA__ABW71470

SEQ ID NO: 66129 - RNA, 1707 nt, Artificial Sequence
  derived and/or modified CDS sequence (opt1) from hemagglutinin__InfluenzaA__ABW74702
auggagaagaucgugcugcuccuggccaucgucagccuggugaaguccgaccagaucugcaucggcuaccacgccaacaacagcaccgagcaggucgacaccaucauggagaagaacgugacggugacccacgcgcaggacauccucgagaagacccacaacgggaagcugugcgaccuggacggcgugaagccccucauccugcgcgacugcuccgucgccggguggcugcucggcaacccgaugugcgacgaguucaucaacgugcccgaguggagcuacaucguggagaaggccaaccccaccaacgaccugugcuaccccggguccuucaacgacuacgaggagcugaagcaccuccugagccggaucaaccacuucgagaagauccagaucaucccgaaguccagcugguccgaccacgaggccagcuccggcgucagcuccgccugccccuaccugggcagcuccagcuucuuccgcaacgugguguggcucaucaagaagaacuccacguaccccaccaucaagaaguccuacaacaacaccaaccaggaggaccugcugguccucugggggauccaccaccccaacgacgcggccgagcagacccggcuguaccagaacccgacgaccuacaucagcaucggcaccagcacccugaaccagcgccucgugcccaagaucgccacgcggagcaaggugaacgggcaguccggccgcauggaguucuucuggaccauccugaagcccaacgacgccaucaacuucgagagcaacgggaacuucaucgcgcccgaguacgccuacaagaucgucaagaagggcgacuccgccaucaugaaguccgagcuggaguacggcaacugcaacaccaagugccagaccccgaugggggccaucaacagcagcaugcccuuccacaacauccacccccucacgaucggcgagugccccaaguacgugaaguccaaccggcuggugcuggccaccgggcuccgcaacagcccgcagcgggagucccgccggaagaagcgcggccuguucggcgcgaucgccggguucaucgagggcggguggcagggcauggucgacgggugguacggcuaccaccacagcaacgagcagggcuccggguacgccgccgacaaggagagcacccagaaggccaucgacggcgugaccaacaaggugaacuccaucaucgacaagaugaacacgcaguucgaggcggucgggcgggaguucaacaaccuggagcgccggaucgagaaccucaacaagaagauggaggacggcuuccuggacguguggaccuacaacgccgagcugcucgugcugauggagaacgagcgcacccuggacuuccacgacagcaacgucaagaaccucuacgacaaggugcggcugcagcugcgcgacaacgccaaggagcucgggaacggcugcuucgaguucuaccacaagugcgacaacgagugcaucgaguccauccggaacggcaccuacaacuacccccaguacagcgaggaggcccgccugaagcgggaggagaucuccggggucaagcuggagagcaucggcacguaccagauccucuccaucuacagcaccguggccagcucccuggcgcuggccaucaugauggccgggcucagccuguggaugugcuccaacggcagccugcagugccgcaucugcaucuga

SEQ ID NO: 66130 - RNA, 1707 nt, Artificial Sequence
  derived and/or modified CDS sequence (opt1) from hemagglutinin__InfluenzaA__ABW74703
auggagaagaucgugcugcuccuggccaucgucagccuggugaaguccgaccagaucugcaucggcuaccacgccaacaacagcaccgagcaggucgacaccaucauggagaagaacgugacggugacccacgcgcaggacauccucgagaagacccacaacgggaagcugugcgaccuggacggcgugaagccccucauccugaaggacugcuccgucgccggguggcugcucggcaacccgaugugcgacgaguucaucaacgugcccgaguggagcuacaucguggagaaggccaaccccaccaacgaccugugcuaccccggguccuucaacgacuacgaggagcugaagcaccuccugagccgcaucaaccacuucgagaagauccagaucaucccgaaguccagcugguccgaccacgaggccagcuccggcgucagcuccgccugccccuaccugggcagccccuccuucuuccggaacgugguguggcucaucaagaagaacagcacguaccccaccaucaagaaguccuacaacaacaccaaccaggaggaccugcugguccucugggggauccaccacccgaacgacgcggccgagcagacccgccuguaccagaaccccacgaccuacaucagcaucggcaccuccacccugaaccagcggcucgugcccaagaucgccacgcgcagcaaggugaacgggcagagcggccggauggaguucuucuggaccauccugaagcccaacgacgccgucaacuucgaguccaacgggaacuucaucgcgccggaguacgccuacaagaucgugaagaagggcgacagcgccaucaugaaguccgagcuggaguacggcaacugcaacaccaagugccagacccccaugggggccaucaacagcuccaugcccuuccacaacauccacccccucacgaucggcgagugcccgaaguacgugaaguccaaccgccugguccuggccaccgggcuccggaacagcccccagcgcgagagccggcgcaagaagcggggccuguucggcgcgaucgccggguucaucgagggcggguggcagggcaugguggacgggugguacggcuaccaccacuccaacgagcagggcagcggguacgccgccgacaaggaguccacccagaaggccaucgacggcgugaccaacaaggucaacagcaucaucgacaagaugaacacgcaguucgaggcgguggggcgcgaguucaacucccuggagcggcgcaucgagaaccucaacaagaagauggaggacggcuuccuggacguguggaccuacaacgccgagcugcucguccugauggagaacgagcggacccuggacuuccacgacagcaacgugaagaaccucuacgacaagguccgccugcagcugcgggacaacgccaaggagcucgggaacggcugcuucgaguucuaccacaagugcgacaacgagugcauggaguccauccgcaacggcaccuacaacuacccccaguacagcgaggaggcccggcugaagcgcgaggagaucuccggggugaagcuggagagcaucggcacguaccagauccucuccaucuacagcaccguggccagcucccuggcgcuggccaucaugaucgccgggcucagccuguggaugugcuccaacggcagccugcagugccggaucugcaucuga

SEQ ID NO: 66131 - RNA, 1707 nt, Artificial Sequence
  derived and/or modified CDS sequence (opt1) from hemagglutinin__InfluenzaA__ABW74705
auggagaagaucgugcugcuccuggccaucgucagccuggugaaguccgaccagaucugcaucggcuaccacgccaacaacagcaccgagcaggucgacaccaucauggagaagaacgugacggugacccacgcgcaggacauccucgagaagacccacaacgggaagcugugcgaccuggacggcgugaagccccucauccugcgcgacugcuccgucgccggguggcugcucggcaacccgaugugcgacgaguucaucaacgugcccgaguggagcuacaucguggagaaggccaaccccaccaacgaccugugcuaccccggguccuucaacgacuacgaggagcugaagcaccuccugagccggaucaaccacuucgagaagauccagaucaucccgaaguccagcugguccgaccacgaggccagcuccggcgucagcuccgccugccccuaccugggcagccccuccuucuuccgcaacgugguguggcucaucaagaagaacagcacguaccccaccaucaagaaguccuacaacaacaccaaccaggaggaccugcugguccucugggggauccaccacccgaacgacgcggccgagcagacccggcuguaccagaaccccacgaccuacaucagcaucggcaccuccacccugaaccagcgccucgugcccaagaucgccacgcggagcaaggugaacgggcagagcggccgcauggaguucuucuggaccauccugaagcccaacgacgccaucaacuucgaguccaacgggaacuucaucgcgccggaguacgccuacaagaucgucaagaagggcgacagcgccaucaugaaguccgagcuggaguacggcaacugcaacaccaagugccagacccccaugggggccaucaacagcuccaugcccuuccacaacauccacccccucacgaucggcgagugcccgaaguacgugaaguccaaccggcuggugcuggccaccgggcuccgcaacagcccccagcgggagagccgccggaagaagcgcggccuguucggcgcgaucgccggguucaucgagggcggguggcagggcauggucgacgggugguacggcuaccaccacuccaacgagcagggcagcggguacgccgccgacaaggaguccacccagaaggccaucgacggcgugaccaacaaggugaacagcaucaucgacaagaugaacacgcaguucgaggcggucgggcgggaguucaacaaccuggagcgccggaucgagaaccucaacaagaagauggaggacggcuuccuggacguguggaccuacaacgccgagcugcucgugcugauggagaacgagcgcacccuggacuuccacgacuccaacgucaagaaccucuacgacaaggugcggcugcagcugcgcgacaacgccaaggagcucgggaacggcugcuucgaguucuaccacaagugcgacaacgagugcauggagagcauccggaacggcaccuacaacuacccccaguacuccgaggaggcccgccugaagcgggaggagaucagcggggucaagcuggaguccaucggcacguaccagauccucagcaucuacuccaccguggccagcagccuggcgcuggccaucaugaucgccgggcucucccuguggaugugcagcaacggcucccugcagugccgcaucugcaucuga

SEQ ID NO: 66132 - RNA, 1707 nt, Artificial Sequence
  derived and/or modified CDS sequence (opt1) from hemagglutinin__InfluenzaA__ABW74707
auggagaagaucgugcugcuccuggccaucgucagccuggugaaguccgaccagaucugcaucggcuaccacgccaacaacagcaccgagcaggucgacaccaucauggagaagaacgugacggugacccacgcgcaggacauccucgagaagacccacaacgggaagcugugcgaccuggacggcgugaagccccucauccugcgcgacugcuccgucgccggguggcugcucggcaacccgaugugcgacgaguucaucaacgugcccgaguggagcuacaucguggagaaggccaaccccaccaacgaccugugcuaccccggguccuucaacgacuacgaggagcugaagcaccuccugagccggaucaaccacuucgagaagauccagaucaucccgaaguccagcugguccgaccacgaggccagcuccggcgucagcuccgccugccccuaccugggcagccccuccuucuuccgcaacgugguguggcucaucaagaagaacagcacguaccccaccaucaagaaguccuacaacaacaccaaccaggaggaccugcugguccucugggggauccaccacccgaacgacgcggccgagcagacccggcuguaccagaaccccacgaccuacaucagcaucggcaccuccacccugaaccagcgccucgugcccaagauggccacgcggagcaaggugaacgggcagagcggccgcauggaguucuucuggaccauccugaagcccaacgacgccaucaacuucgaguccaacgggaacuucaucgcgccggaguacgccuacaagaucgucaagaagggcgacagcgccaucaugaaguccgagcuggaguacggcaacugcaacaccaagugccagacccccaugggggccaucaacagcuccaugcccuuccacaacauccacccccucacgaucggcgagugcccgaaguacgugaaguccaaccggcuggugcuggccaccgggcuccgcaacagcccccagcgggagagccgccggaagaagcgcggccuguucggcgcgaucgccggguucaucgagggcggguggcagggcauggucgacgggugguacggcuaccaccacuccaacgagcagggcagcggguacgccgccgacaaggaguccacccagaaggccaucgacggcgugaccaacaaggugaacagcaucaucgacaagaugaacacgcaguucgaggcggucgggcgggaguucaacaaccuggagcgccggaucgagaaccucaacaagaagauggaggacggcuuccuggacguguggaccuacaacgccgagcugcucgugcugauggagaacgagcgcacccuggacuuccacgacuccaacgucaagaaccucuacgacaaggugcggcugcagcugcgcgacaacgccaaggagcucgggaacggcugcuucgaguucuaccacaagugcgacaacgagugcauggagagcauccggaacggcaccuacaacuacccccaguacuccgaggaggcccgccugaagcgggaggagaucagcggggucaagcuggaguccaucggcacguaccagauccucagcaucuacuccaccguggccagcagccuggcgcuggccaucaugaucgccgggcucucccuguggaugugcagcaacggcucccugcagugccgcaucugcaucuga

SEQ ID NO: 66133 - RNA, 1707 nt, Artificial Sequence
  derived and/or modified CDS sequence (opt1) from hemagglutinin__InfluenzaA__ABW74708
auggagaagaucgugcugcuccuggccaucgucagccuggugaaguccgaccagaucugcaucggcuaccacgccaacaacagcaccgagcaggucgacaccaucauggagaagaacgugacggugacccacgcgcaggacauccucgagaagacccacaacgggaagcugugcgaccuggacggcgugaagccccucauccugcgcgacugcuccgucgccggguggcugcucggcaacccgaugugcgacgaguucaucaacgugcccgaguggagcuacaucguggagaaggccaaccccaccaacgaccugugcuaccccggguccuucaacgacuacgaggagcugaagcaccuccugagccggaucaaccacuucgagaagauccagaucaucccgaaguccagcugguccgaccacgaggccagcuccggcgucagcuccgccugccccuaccugggcagccccuccuucuuccgcaacgugguguggcucaucaagaagaacagcacguaccccaccaucaagaaguccuacaacaacaccaaccaggaggaccugcugguccucugggggauccaccacccgaacgacgcggccgagcagacccggcuguaccagaaccccacgaccuacaucagcaucggcaccuccacccugaaccagcgccucgugcccaagaucgccacgcggagcaaggugaacgggcagagcggccgcauggaguucuucuggaccauccugaagcccaacgacgccaucaacuucgaguccaacgggaacuucaucgcgccggaguacgccuacaagaucgucaagaagggcgacagcgccaucaugaaguccgagcuggaguacggcaacugcaacaccaagugccagacccccaugggggccaucaacagcuccaugcccuuccacaacauccacccccucacgaucggcgagugcccgaaguacgucaagagcaaccgguccgugcuggccaccgggcugcgcaacagcccccagcgggagucccgccggaagaagcgcggccucuucggcgcgaucgccggguucaucgagggcggguggcagggcaugguggacgggugguacggcuaccaccacagcaacgagcagggcuccggguacgccgccgacaaggagagcacccagaaggccaucgacggcgugaccaacaaggugaacuccaucaucgacaagaugaacacgcaguucgaggcggucgggcgggaguucaacaaccuggagcgccggaucgagaaccugaacaagaagauggaggacggcuuccucgacguguggaccuacaacgccgagcugcuggugcucauggagaacgagcgcacccuggacuuccacgacagcaacgucaagaaccuguacgacaaggugcggcuccagcugcgcgacaacgccaaggagcuggggaacggcugcuucgaguucuaccacaagugcgacaacgagugcauggaguccauccggaacggcaccuacaacuacccccaguacagcgaggaggcccgccucaagcgggaggagaucuccggggucaagcuggagagcaucggcacguaccagauccuguccaucuacagcaccguggccagcucccucgcgcuggccaucaugauggccgggcugagccucuggaugugcuccaacggcagccugcagugccgcaucugcaucuga

SEQ ID NO: 66134 - RNA, 1707 nt, Artificial Sequence; identical to SEQ ID NO: 66131
  derived and/or modified CDS sequence (opt1) from hemagglutinin__InfluenzaA__ABW74710

SEQ ID NO: 66135 - RNA, 1707 nt, Artificial Sequence; identical to SEQ ID NO: 66131
  derived and/or modified CDS sequence (opt1) from hemagglutinin__InfluenzaA__ABW74711

SEQ ID NO: 66136 - RNA, 1707 nt, Artificial Sequence
  derived and/or modified CDS sequence (opt1) from hemagglutinin__InfluenzaA__ABW74712
auggagaagaucgugcugcuccugagcaucgucucccuggucaagagcgaccagaucugcaucggcuaccacgccaacaacuccaccgagcaggucgacaccaucauggagaagaacgugacggugacccacgcccaggacauccucgagaagacccacaacgggaagcugugcgaccuggacggcgugaagccccucauccugcgcgacugcagcguggcgggguggcugcucggcaacccgaugugcgacgaguucaucaacgugcccgagugguccuacaucguggagaaggccaaccccaccaacgaccugugcuaccccgggagcuucaacgacuacgaggagcugaagcaccuccugucccggaucaaccacuucgagaagauccagaucauccccaagagcuccuggagcgaccacgaggccuccagcggcgucuccagcgccugcccguaccugggcucccccagcuucuuccgcaacgugguguggcucaucaagaagaacuccacguaccccaccaucaagaaguccuacaacaacaccaaccaggaggaccugcugguccucugggggauccaccacccgaacaacgaggaggagcagacccggcuguaccagaaccccacgaccuacaucagcaucggcaccagcacccugaaccagcgccucgugcccaagaucgccacgcggagcaaggugaacgggcaguccggccgcauggaguucuucuggaccauccugaagcccaacgacgcgaucaacuucgagagcaacgggaacuucaucgccccggaguacgccuacaagaucgucaagaagggcgacuccgccaucaugaaguccgagcuggaguacagcaacugcaacaccaagugccagacccccaugggcgcgaucaacagcuccaugcccuuccacaacauccacccccucacgaucggggagugcccgaaguacgucaagagcucccggcuggugcuggccaccggccuccgcaacagcccccagcgggagucccgccggaagaagcgcgggcuguucggcgccaucgccggcuucaucgagggcggguggcaggggaugguggacggcugguacggguaccaccacagcaacgagcagggcuccggcuacgccgcggacaaggagagcacccagaaggccaucgacggggugaccaacaaggugaacuccaucaucgacaagaugaacacgcaguucgaggccgucggccgggaguucaacaaccuggagcgccggaucgagaaccucaacaagaagauggaggacggguuccuggacguguggaccuacaacgccgagcugcucgugcugauggagaacgagcgcacccuggacuuccacgacagcaacgucaagaaccucuacgacaaggugcggcugcagcugcgcgacaacgccaaggagcucggcaacgggugcuucgaguucuaccacaagugcgacaacgagugcauggaguccauccggaacggcaccuacaacuacccccaguacagcgaggaggcgcgccugaagcgggaggagaucuccggcgucaagcuggagagcaucgggacguaccagauccucagcaucuacuccaccguggccagcucccuggcccuggccaucaugaucgccggccucagccuguggaugugcuccaacgggagccugcagugccgcaucugcaucuga

SEQ ID NO: 66137 - RNA, 1701 nt, Artificial Sequence
  derived and/or modified CDS sequence (opt1) from hemagglutinin__InfluenzaA__ABW80976
augaagaccaucaucgcccugagcuacauccucugccugguguucgcccagaagcugcccggcaacgacaacuccaccgcgacgcucugccuggggcaccacgccgucccgaacggcacccuggugaagaccaucaccaacgaccagaucgaggugacgaacgccaccgagcucguccagagcuccagcaccucccgcaucugcgacagcccccaccagauccuggacggggagaacugcacccugaucgacgcccuccugggcgacccccacugcgacggguuccagaacaaggagugggaccuguucguggagcgguccaaggccuacagcaacugcuaccccuacgacgugccggacuacgucucccuccgcagccugguggcguccagcggcacgcuggaguucaacaacgaguccuucaacuggaccggcguggcccagaacgggaccagcuccgccugcaagcggcgcagcgacaaguccuucuucagccggcucaacuggcugcaccagcugaaguacaaguaccccgcccucaacgucaccaugcccaacaacgagaaguucgacaagcuguacaucuggggcgugcaccaccccgggacggacuccgaccagaucagcaucuacgcgcaggccagcggccgcgugaccgucuccaccaagcggagccagcagaccgugaucccgaacaucgggucccgccccugggugcggggcgucagcuccggcaucagcaucuacuggacgaucgugaagcccggggacauccugcucaucaacuccaccggcaaccugaucgcgccccgcggguacuucaagauccggagcggcaaguccagcaucaugcgcuccgacgccccgaucggcaagugcaacagcgagugcaucacccccaacggguccauccccaacgacaagcccuuccagaacgugaaccggaucaccuacggcgccugcccgcgcuacgucaagcagaacacgcugaagcucgccaccgggaugcggaacgugcccgagaagcagacccgcggcaucuucggggccaucgccggcuucaucgagaacggcugggaggggaugauggacggcugguacggguuccggcaccagaacagcgagggcaccgggcaggccgccgaccugaaguccacgcaggcggccaucaaccagaucaacggcaagcugaaccgccucaucgagaagaccaacgagaaguuccaccagaucgagaaggaguucagcgagguggagggccggauccaggaccuggagaaguacgucgaggacaccaagaucgaccugugguccuacaacgccgagcuccugguggcccuggagaaccagcacaccaucgaccucacggacagcgagaugaacaagcuguucgagcgcaccaagaagcagcugcgggagaacgccgaggacauggggaacggcugcuucaagaucuaccacaagugcgacaacgcgugcaucggguccauccgcaacggcaccuacgaccacgacguguaccgcgacgaggcccucaacaaccgguuccagaucaagggggucgagcucaagagcggcuacaaggacuggauccuguggaucagcuucgccaucuccugcuuccugcugugcaucgugcugcucggcuucaucaugugggccugccagaaggggaacauccgcugcaacaucugcaucuga

SEQ ID NO: 66138 - RNA, 1701 nt, Artificial Sequence
  derived and/or modified CDS sequence (opt1) from hemagglutinin__InfluenzaA__ABW80977
augaagaccaucaucgcccugagcuacauccucugccugguguucgcccagaagcugcccggcaacgacaacuccaccgcgacgcucugccuggggcaccacgccgucccgaacggcaccaucgugaagaccaucaccaacgaccagaucgaggugacgaacgccaccgagcugguccagagcuccagcaccgggggcaucugcgacagcccccaccagauccucgacggggagaacugcacccugaucgacgcccugcucggcgacccccagugcgacggcuuccagaacaagaagugggaccuguucguggagcgcagcaaggccuacuccaacugcuaccccuacgacgugccggacuacgcgagccugcggucccucgucgccagcuccgggacgcuggaguucaacaacgagagcuucaacuggaccggcgugacccagaacgggaccuccagcgccugcaagcgccgguccaacaagagcuucuucucccgccugaacuggcucacgcaccugaaguucaaguaccccgcccugaacgugaccaugcccaacaacgagaaguucgacaagcucuacaucuggggcguccaccaccccgggaccgacaacgaccagaucaaccuguacgcgcaggccagcggccggaucaccguguccacgaagcgcagccagcagaccgugaucccgaacaucggcagccggccccgcguccgggacgugcccucccgcaucagcaucuacuggaccaucgugaagcccggggacauccugcucaucuccagcaccggcaaccugaucgccccgcggggguacuucaagauccgcuccggcaagagcuccaucaugcggagcgacgcccccaucggcaagugcaacuccgagugcaucacgcccaacgggagcauccccaacgacaagccguuccagaacgucaaccgcaucaccuacggcgccugcccccgguacgugaagcagaacacccugaagcucgcgaccgggaugcgcaacgugcccgagaagcagacgcggggcaucuucggggccaucgccggcuucaucgagaacggcugggaggggauggucgacggcugguacggguuccgccaccagaacuccgagggcaccgggcaggccgccgaccugaaguccacccaggcggccaucaaccagaucaacggcaagcugaaccggcucaucggcaagaccaacgagaaguuccaccagaucgagaaggaguucuccgagguggaggggcgcauccaggaccuggagaaguacguggaggacacgaagaucgaccuguggagcuacaacgccgagcuccuggucgcccuggagaaccagcacaccaucgaccucaccgacuccgagaugaacaagcuguucgagcggaccaagaagcagcugcgcgagaacgccgaggacaugggcaacgggugcuucaagaucuaccacaagugcgacaacgcgugcaucggcagcauccgcaacgggacguacgaccacgacguguaccgggacgaggcccucaacaaccgcuuccagaucaagggcguggagcugaaguccggcuacaaggacuggauccuguggaucagcuucgccaucuccugcuuccuccugugcgucgcccugcucggguucaucaugugggccugccagaagggcaacauccggugcaacaucugcaucuga

SEQ ID NO: 66139 - RNA, 1698 nt, Artificial Sequence
  derived and/or modified CDS sequence (opt1) from hemagglutinin__InfluenzaA__ABW80979
augaaggccaagcugcucgugcugcugugcaccuucaccgccacguacgcggacaccaucugcaucggcuaccacgccaacaacagcaccgacaccgucgacacggugcucgagaagaacgugaccgucacccacuccgugaaccugcuggaggacagccacaacgggaagcucugccugcugaagggcaucgcgccccuccagcuggggaacugcuccguggccggcuggauccuggggaacccggagugcgagcuccugaucagcaaggaguccuggagcuacaucgucgagacccccaaccccgagaacggcacgugcuaccccggcuacuucgccgacuacgaggagcugcgcgagcagcucuccagcguguccagcuucgagcgguucgagaucuucccgaaggaguccagcuggcccaaccacaccgugaccggggucuccgccagcugcucccacaacggcaagagcuccuucuaccgcaaccugcuguggcucaccgggaagaacggccuguaccccaaccugagcaaguccuacgugaacaacaaggagaaggaggugcucguccuguggggcgugcaccacccgcccaacaucgggaaccagcgggcccuguaccacacggagaacgccuacgugagcgucgugagcucccacuacagccgccgguucacccccgagaucgccaagcgccccaaggugcgggaccaggagggccgcaucaacuacuacuggacccuccuggagcccggggacaccaucaucuucgaggcgaacggcaaccugaucgccccgugguacgccuucgcccucucccggggguucggcagcggcaucaucacguccaacgcccccauggacgagugcgacgcgaagugccagacgccccagggggccaucaacagcucccugcccuuccagaacguccacccggugaccaucggcgagugccccaaguacgugcgcagcgccaagcugcggauggucaccgggcuccgcaacauccccuccauccagagccggggccuguucggggccaucgccggcuucaucgagggcggguggaccggcaugguggacgggugguacggcuaccaccaccagaacgagcagggguccggcuacgcggccgaccagaaguccacccagaacgccaucaacggcaucaccaacaaggugaacagcgucaucgagaagaugaacacccaguucacggccguggggaaggaguucaacaagcuggagcgccggauggagaaccucaacaagaaggucgacgacggcuuccuggacaucuggaccuacaacgccgagcugcucgugcugcuggagaacgagcgcacccucgacuuccacgacagcaacgugaagaaccuguacgagaaggucaagucccagcugaagaacaacgcgaaggagaucgggaacggcugcuucgaguucuaccacaagugcaacaacgagugcauggagagcgugaagaacgggaccuacgacuaccccaaguacuccgaggagagcaagcucaaccgggagaagaucgacggcgugaagcuggaguccaugggcgucuaccagauccuggccaucuacagcacgguggccagcucccucgugcugcuggucagccucggggccaucuccuucuggaugugcagcaacggcucccugcagugccgcaucugcaucuga

SEQ ID NO: 66140 - RNA, 1701 nt, Artificial Sequence
  derived and/or modified CDS sequence (opt1) from hemagglutinin__InfluenzaA__ABW81505
augaaggccaagcugcucgugcugcugugcaccuucaccgccacguacgcggacaccaucugcaucggcuaccacgccaacaacagcaccgacaccgucgacacggugcucgagaagaacgugaccgucacccacuccgugaaccugcuggaggacagccacaacgggaagcucugccgccugaagggcaccgcgccccugcagcucgggaacugcuccaucgccggcuggauccuggggaacccggagugcgagagccuguucuccaaggagagcugguccuacaucgccgagacgcccaaccccaagaacgggaccugcuaccccggcuacuucgccgacuacgaggagcuccgggagcagcugagcuccgugagcuccuucgagcgcuucgagaucuucccgaaggacagcuccuggcccaaccacaccgucaccaagggggugacggccagcugcucccacaacggcaagagcuccuucuacaagaaccugcucuggcugaccgagaagaacgggcuguaccccaaccucagcaaguccuacgugaacaagaagggcaaggagguccuggugcuguggggcgugcaccaccccagcaacaugggcgaccagcgggccaucuaccacaaggagaacgccuacgucagcgugcucuccagccacuacucccgccgguucaccccggagaucgcgaagcgccccaaggugcgggaccaggagggccgcaucaacuacuacuggacccugcuggagcccggggacacgaucaucuucgaggccaacggcaaccucaucgcccccugguacgccuucgcccugagccggggguucggcuccggcaucaucaucagcaacgcguccaugggggagugcgacgccaagugccagaccccgcagggcgccaucaacagcucccugcccuuccagaacguccaccccgugaccaucggggagugccccaaguacgugcgcagcaccaagcuccggauggucacgggccugcgcaacgugccguccauccagagccgggggcuguucggcgccaucgccggcuucaucgagggcggguggaccgggaugaucgacggcugguacggguaccaccaccagaacgagcagggcuccggcuacgcggccgaccagaaguccacccagaacgccaucaacgggaucaccaacaaggugaacagcaucaucgagaagaugaacacgcaguucaccgccgucggcaaggaguucaacaagcucgagcgccggauggagaaccugaacaagaagguggacgacggguuccuggacaucuggaccuacaacgccgagcuccuggugcugcucgagaacgagcgcacccuggacuuccacgacagcaacgucaagaaccuguacgagaaggugaagacgcagcucaagaacaacgcgaaggagaucggcaacgggugcuucgaguucuaccacaagugcaacaacgagugcauggaguccgucaagaacggcaccuacgacuaccccaaguacagcaaggaguccaagcugaaccgggagaagaucgacggcgugaagcuggagagcauggggguguaccagauccucgccaucuacagcaccgucgccuccagccuggugcugcucgugucccugggcgccaucagcuucuggaugugcuccaacgggagccugcagugccgcaucugcaucuga

SEQ ID NO: 66141 - RNA, 1698 nt, Artificial Sequence
  derived and/or modified CDS sequence (opt1) from hemagglutinin__InfluenzaA__ABW81506
augaaggugaagcugcucguccugcugugcaccuucaccgccacguacgccgacaccaucugcaucggcuaccacgcgaacaacagcaccgacaccguggacacggugcucgagaagaacgucaccgugacccacuccgugaaccugcuggaggacagccacaacgggaagcucugccugcugaagggcaucgcgccccuccagcuggggaacugcuccgucgccggcuggauccuggggaacccggagugcgagcuccugaucagcaaggaguccuggagcuacaucguggagacccccaaccccgagaacggcacgugcuaccccggcuacuucgccgacuacgaggagcugcgcgagcagcucuccagcguguccagcuucgagcgguucgagaucuucccgaaggaguccagcuggcccaaccacaccgucaccgggguguccgccagcugcucccacaacggcaagagcuccuucuaccgcaaccugcuguggcucaccgggaagaacggccuguaccccaaccugagcaaguccuacgccaacaacaaggagaaggaggugcucguccuguggggcgugcaccacccgcccaacaucgggaaccagcgggcccuguaccacacggagaacgccuacgugagcgucgugagcucccacuacagccgccgguucacccccgagaucgccaagcgccccaaggugcgggaccaggagggccgcaucaacuacuacuggacccuccuggagcccggggacaccaucaucuucgaggcgaacggcaaccugaucgccccgugguacgccuucgcccucucccggggguucggcagcggcaucaucacguccaacgcccccauggacgagugcgacgcgaagugccagacgccccagggggccaucaacagcucccugcccuuccagaacguccacccggugaccaucggcgagugccccaaguacgugcgcagcgccaagcugcggauggucaccgggcuccgcaacauccccuccauccagagccggggccuguucggggccaucgccggcuucaucgagggcggguggaccggcaugguggacgggugguacggcuaccaccaccagaacgagcagggguccggcuacgcggccgaccagaaguccacccagaacgccaucaacggcaucaccaacaaggugaacagcgucaucgagaagaugaacacccaguucacggccguggggaaggaguucaacaagcuggagcgccggauggagaaccucaacaagaaggucgacgacggcuuccuggacaucuggaccuacaacgccgagcugcucgugcugcuggagaacgagcgcacccucgacuuccacgacagcaacgugaagaaccuguacgagaaggucaagucccagcugaagaacaacgcgaaggagaucgggaacggcugcuucgaguucuaccacaagugcaacaacgagugcauggagagcgugaagaacgggaccuacgacuaccccaaguacuccgaggagagcaagcucaaccgggagaagaucgacggcgugaagcuggaguccaugggcaucuaccagauccuggccaucuacagcacggucgccagcucccucgugcugcuggugagccucggggccaucuccuucuggaugugcagcaacggcucccugcagugccgcaucugcaucuga

SEQ ID NO: 66142 - RNA, 1701 nt, Artificial Sequence
  derived and/or modified CDS sequence (opt1) from hemagglutinin__InfluenzaA__ABW81507
augaaggccaagcugcucgugcugcugugcaccuucaccgccacguacgcggacaccaucugcaucggcuaccacgccaacaacagcaccgacaccgucgacacggugcucgagaagaacgugaccgucacccacuccgugaaccugcuggaggacagccacaacgggaagcucugccgccugaagggcaccgugccccugcagcucgggaacugcuccaucgccggcuggauccuggggaacccggagugcgagagccuguucuccaaggagagcugguccuacaucgccgagacgcccaaccccaagaacgggaccugcuaccccggcuacuucgccgacuacgaggagcuccgggagcagcugagcuccgucagcuccuucgagcgcuucgagaucuucccgaaggacagcuccuggcccaaccacaccgugaccaagggggugacggcgagcugcucccacaacggcaagagcuccuucuacaagaaccugcucuggcugaccgagaagaacgggcuguaccccaaccucagcaaguccuacgucaacaagaagggcaaggaggugcuggugcuguggggcguccaccaccccagcaacaugggcgaccagcgggccaucuaccacaaggagaacgccuacgugagcgugcucuccagccacuacucccgccgguucaccccggagaucgccaagcgccccaagguccgggaccaggagggccgcaucaacuacuacuggacccugcuggagcccggggacacgaucaucuucgaggcgaacggcaaccucaucgcccccugguacgccuucgcccugagccggggguucggcuccggcaucaucaucagcaacgccuccaugggggagugcgacgcgaagugccagaccccgcagggcgccaucaacagcucccugcccuuccagaacgugcaccccgugaccaucggggagugccccaaguacguccgcagcaccaagcuccggauggugacgggccugcgcaacgugccguccauccagagccgggggcuguucggcgccaucgccggcuucaucgagggcggguggaccgggaugaucgacggcugguacggguaccaccaccagaacgagcagggcuccggcuacgccgcggaccagaaguccacccagaacgccaucaacgggaucaccaacaaggucaacagcaucaucgagaagaugaacacgcaguucaccgccgugggcaaggaguucaacaagcucgagcgccggauggagaaccugaacaagaagguggacgacggguuccuggacaucuggaccuacaacgccgagcuccugguccugcucgagaacgagcgcacccuggacuuccacgacagcaacgugaagaaccuguacgagaaggucaagacgcagcucaagaacaacgccaaggagaucggcaacgggugcuucgaguucuaccacaagugcaacaacgagugcauggaguccgugaagaacggcaccuacgacuaccccaaguacagcaaggaguccaagcugaaccgggagaagaucgacggcgugaagcuggagagcaugggggucuaccagauccucgcgaucuacagcaccguggccuccagccuggugcugcucgucucccugggcgccaucagcuucuggaugugcuccaacgggagccugcagugccgcaucugcaucuga

SEQ ID NO: 66143 - RNA, 1698 nt, Artificial Sequence
  derived and/or modified CDS sequence (opt1) from hemagglutinin__InfluenzaA__ABW81508
augaaggugaagcugcucguccugcugugcaccuucaccgccacguacgccgacaccaucugcaucggcuaccacgcgaacaacagcaccgacaccguggacacggugcucgagaagaacgucaccgugacccacuccgugaaccugcuggaggacagccacaacgggaagcucugccugcugaagggcaucgcgccccuccagcuggggaacugcuccgucgccggcuggauccuggggaacccggagugcgagcuccugaucagcaaggaguccuggagcuacaucguggagacccccaaccccgagaacggcacgugcuaccccggcuacuucgccgacuacgaggagcugcgcgagcagcucuccagcguguccagcuucgagcgguucgagaucuucccgaaggaguccagcuggcccaaccacaccgucaccgggguguccgccagcugcucccacaacggcaagagcuccuucuaccgcaaccugcuguggcucacccggaagaacgggcuguaccccaaccugagcaaguccuacgccaacaacaaggagaaggaggugcucguccuguggggcgugcaccacccgcccaacaucggggaccagcgcgcccuguaccacacggagaacgccuacgugagcgucgugagcucccacuacagccggcgcuucacccccgagaucgccaagcggcccaaggugcgcgaccaggagggccggaucaacuacuacuggacccuccuggagcccggcgacaccaucaucuucgaggcgaacgggaaccugaucgccccgcgcuacgccuucgcccucucccggggcuucgggagcggcaucaucacguccaacgcccccauggacgagugcgacgcgaagugccagacgccccagggcgccaucaacagcucccugcccuuccagaacguccacccggugaccaucggggagugccccaaguacgugcgcagcgccaagcugcggauggucaccggccuccgcaacauccccuccauccagagccgggggcuguucggcgccaucgccggguucaucgagggcggcuggaccgggaugguggacggcugguacggguaccaccaccagaacgagcagggcuccggguacgcggccgaccagaaguccacccagaacgccaucaacggcaucaccaacaaggugaacagcgucaucgagaagaugaacacccaguucacggccgugggcaaggaguucaacaagcuggagcgccggauggagaaccucaacaagaaggucgacgacggguuccuggacaucuggaccuacaacgccgagcugcucgugcugcuggagaacgagcgcacccucgacuuccacgacagcaacgugaagaaccuguacgagaaggucaagucccagcugaagaacaacgcgaaggagaucggcaacgggugcuucgaguucuaccacaagugcaacgacgagugcauggagagcgugaagaacggcaccuacgacuaccccaaguacuccgaggagagcaagcucaaccgggagaagaucgacggggugaagcuggaguccaugggcgucuaccagauccuggccaucuacagcacgguggccagcucccucgugcugcuggucagccucggcgccaucuccuucuggaugugcagcaacgggucccugcagugccgcaucugcaucuga

SEQ ID NO: 66144 - RNA, 1701 nt, Artificial Sequence; identical to SEQ ID NO: 66140
  derived and/or modified CDS sequence (opt1) from hemagglutinin__InfluenzaA__ABW81509

SEQ ID NO: 66145 - RNA, 1698 nt, Artificial Sequence
  derived and/or modified CDS sequence (opt1) from hemagglutinin__InfluenzaA__ABW81511
augaaggccaagcugcucgugcugcugugcaccuucaccgccacguacgcggacaccaucugcaucggcuaccacgccaacaacagcaccgacaccgucgacacggugcucgagaagaacgugaccgucacccacuccgugaaccugcuggaggacagccacaacgggaagcucugccugcugaagggcaucgcgccccuccagcuggggaacugcuccguggccggcuggauccuggggaacccggagugcgagcuccugaucagcaaggaguccuggagcuacaucgucgagacccccaaccccgagaacggcacgugcuaccccggcuacuucgccgacuacgaggagcugcgcgagcagcucuccagcguguccagcuucgagcgguucgagaucuucccgaagggguccagcuggcccaaccacaccgugaccggcgucuccgccagcugcucccacaacggcaagagcuccuucuaccgcaaccugcuguggcucaccgggaagaacgggcuguaccccaaccugagcauguccuacgugaacaacaaggagaaggaggugcucguccuguggggcgugcaccacccgcccaacaucggcaaccagcgggcccuguaccacacggagaacgccuacgugagcgucgugagcucccacuacagccgccgguucacccccgagaucgccaagcgccccaaggugcgggaccaggaggggcgcaucaacuacuacuggacccuccuggagcccggcgacuccaucaucuucgaggcgaacgggaaccugaucgccccgugguacgccuucgcccucagccggggcuucggcuccgggaucaucaccagcaacgcccccauggacgagugcgacgcgaagugccagacgccccagggcgccaucaacuccagccugcccuuccagaacguccacccggugaccaucggggagugccccaaguacgugcgcuccgccaagcugcggauggucaccggccuccgcaacauccccagcauccagucccgggggcuguucggcgccaucgccggcuucaucgagggcggguggaccgggaugguggacggcugguacggguaccaccaccagaacgagcagggcagcggcuacgcggccgaccagaaguccacgcagaacgccaucaacgggaucaccaacaaggugaacagcgucaucgagaagaugaacacccaguucaccgccgugggcaaggaguucaacaagcuggagcgccggauggagaaccucaacaagaaggucgacgacggguuccuggacaucuggacguacaacgccgagcugcucgugcugcuggagaacgagcgcacccucgacuuccacgacuccaacgugaagaaccuguacgagaaggucaagagccagcugaagaacaacgcgaaggagaucggcaacgggugcuucgaguucuaccacaagugcaacaacgagugcauggaguccgugaagaacggcaccuacgacuaccccaaguacagcgaggaguccaagcucaaccgggagaagaucgacggcgugaagcuggagagcaugggggucuaccagauccuggccaucuacagcaccguggccuccagccucgugcugcuggucucccucggcgccaucagcuucuggaugugcuccaacgggagccugcagugccgcaucugcaucuga

SEQ ID NO: 66146 - RNA, 1698 nt, Artificial Sequence; identical to SEQ ID NO: 64320
  derived and/or modified CDS sequence (opt1) from hemagglutinin__InfluenzaA__ABW81512

SEQ ID NO: 66147 - RNA, 1698 nt, Artificial Sequence; identical to SEQ ID NO: 65409
  derived and/or modified CDS sequence (opt1) from hemagglutinin__InfluenzaA__ABW81513

SEQ ID NO: 66148 - RNA, 1698 nt, Artificial Sequence
  derived and/or modified CDS sequence (opt1) from hemagglutinin__InfluenzaA__ABW81514
augaaggugaagcugcucguccugcugugcaccuucaccgccacguacgccgacaccaucugcaucagcuaccacgcgaacaacuccaccgacaccguggacacggugcucgagaagaacgucaccgugacccacagcgugaaccugcuggaggacucccacaacggcaagcucugccugcugaaggggaucgcgccccuccagcugggcaacugcagcgucgccggguggauccugggcaacccggagugcgagcuccugaucuccaaggagagcugguccuacaucguggagacccccaaccccgagaacgggacgugcuaccccggcuacuucgccgacuacgaggagcugcgcgagcagcucagcuccgugagcuccuucgagcgguucgagaucuucccgaaggagagcuccuggcccaaccacaccgucaccggcgugagcgccuccugcagccacaacgggaaguccagcuucuaccgcaaccugcuguggcucaccggcaagaacgggcuguaccccaaccuguccaagagcuacgccaacaacaaggagaaggaggugcucguccuguggggcgugcaccacccgcccaacaucggggaccagcgggcccuguaccacacggagaacgccuacgugagcgucguguccagccacuacucccgccgguucacccccgagaucgccaagcgccccaaggugcgggaccaggagggccgcaucaacuacuacuggacccuccuggagcccggcgacaccaucaucuucgaggcgaacgggaaccugaucgccccgcgguucgccuucgcccucagccgcggcuucggguccggcaucaucacgagcaacgcccccauggacgagugcgacgcgaagugccagacgccccagggcgccaucaacuccagccugcccuuccagaacguccacccggugaccaucggggagugccccaaguacgugcgguccgccaagcugcgcauggccaccggccuccggaacauccccagcauccagucccgcgggcuguucggcgccaucgcgggguucaucgagggcggcuggaccgggauggucgacggcugguacggguaccaccaccagaacgagcagggcagcggguacgccgccgaccagaaguccacccagaacgccaucaacggcaucaccaacaaggugaacagcgugaucgagaagaugaacacccaguucacggccgucggcaaggaguucuccaagcuggagcggcgcauggagaaccucaacaagaagguggacgacggguuccuggacaucuggaccuacaacgcggagcugcucguccugcuggagaacgagcggacccucgacuuccacgacagcaacgugaagaaccuguacgagaaggugaagucccagcugaagaacaacgccaaggagaucggcaacgggugcuucgaguucuaccacaagugcaacgacgagugcauggagagcgucaagaacggcaccuacgacuaccccaaguacuccgaggagagcaagcucaaccgcgagaagaucgacggggugaagcuggagagcaugggcguguaccagauccuggccaucuacuccacggucgccagcucccucgugcugcuggugagccucggcgccaucuccuucuggaugugcagcaacgggucccugcagugccggaucugcaucuga

SEQ ID NO: 66149 - RNA, 1698 nt, Artificial Sequence; identical to SEQ ID NO: 65409
  derived and/or modified CDS sequence (opt1) from hemagglutinin__InfluenzaA__ABW81515

SEQ ID NO: 66150 - RNA, 1698 nt, Artificial Sequence; identical to SEQ ID NO: 65409
  derived and/or modified CDS sequence (opt1) from hemagglutinin__InfluenzaA__ABW81516

SEQ ID NO: 66151 - RNA, 1698 nt, Artificial Sequence
  derived and/or modified CDS sequence (opt1) from hemagglutinin__InfluenzaA__ABW81517
augaaggugaagcugcucguccugcugugcaccuucaccgccacguacgccgacaccaucugcaucggcuaccacgcgaacaacagcaccgacaccguggacacggugcucgagaagaacgucaccgugacccacuccgugaaccugcuggaggacagccacaacgggaagcucugccugcugaagggcaucgcgccccuccagcuggggaacugcuccgucgccggcuggauccuggggaacccggagugcgagcuccugaucagcaaggaguccuggagcuacaucguggagacccccaaccccgagaacggcacgugcuaccccggcuacuucgccgacuacgaggagcugcgcgagcagcucuccagcaucuccagcuucgagcgguucgagaucuucccgaaggaguccagcuggcccaaccacaccgugaccggggucuccgccagcugcucccacaacggcaagagcuccuucuaccgcaaccugcuguggcucaccgggaagaacggccuguaccccaaccugagcaaguccuacgccaacaacaaggagaaggaggugcucgugcuguggggcguccaccacccgcccaacaucggggaccagcgggcccuguaccacacggagaacgccuacgugagcguggucagcucccacuacagccgccgguucacccccgagaucgccaagcgccccaaggugcgggaccaggagggccgcaucaacuacuacuggacccuccuggagcccggggacaccaucaucuucgaggcgaacggcaaccugaucgccccgcgguucgccuucgcccucucccgcggguucggcagcggcaucaucacguccaacgcccccauggacgagugcgacgcgaagugccagacgccccagggggccaucaacagcucccugcccuuccagaacgugcacccggucaccaucggcgagugccccaaguacgugcggagcgccaagcugcgcauggccaccgggcuccggaacauccccuccauccagagccgcggccuguucggggccaucgcgggcuucaucgagggcggguggaccggcaugguggacgggugguacggcuaccaccaccagaacgagcagggguccggcuacgccgccgaccagaaguccacccagaacgccaucaacggcaucaccaacaaggucaacagcgugaucgagaagaugaacacccaguucacggccguggggaaggaguucagcaagcuggagcggcgcauggagaaccucaacaagaaggucgacgacggcuuccuggacaucuggaccuacaacgcggagcugcucgugcugcuggagaacgagcggacccucgacuuccacgacuccaacgucaagaaccuguacgagaaggucaagagccagcugaagaacaacgccaaggagaucgggaacggcugcuucgaguucuaccacaagugcaacgacgagugcauggaguccgugaagaacgggaccuacgacuaccccaaguacagcgaggaguccaagcucaaccgcgagaagaucgacggcgugaagcuggagagcaugggcguguaccagauccuggccaucuacagcacgguggccuccagccucguccugcuggugucccucggggccaucagcuucuggaugugcuccaacggcagccugcagugccggaucugcaucuga

SEQ ID NO: 66152 - RNA, 1698 nt, Artificial Sequence
  derived and/or modified CDS sequence (opt1) from hemagglutinin__InfluenzaA__ABW81518
augaaggugaagcugcucguccugcugugcaccuacaccgccacguacgccgacaccaucugcaucggcuaccacgcgaacaacagcaccgacaccguggacacggugcucgagaagaacgucaccgugacccacuccgugaaccugcuggaggacagccacaacgggaagcucugccugcugaagggcaucgcgccccuccagcuggggaacugcuccgucgccggcuggauccuggggaacccggagugcgagcuccugaucagcaaggaguccuggagcuacaucguggagacccccaaccccgagaacggcacgugcuaccccggcuacuucgccgacuacgaggagcugcgcgagcagcucuccagcguguccagcuucgagcgguucgagaucuucccgaaggaguccagcuggcccaaccacaccgucaccgggguguccgccagcugcucccacaacggcaagagcuccuucuaccgcaaccugcuguggcucaccgggaagaacggccuguaccccaaccugagcaaguccuacgccaacaacaaggagaaggaggugcucguccuguggggcgugcaccacccgcccaacaucggggaccagcgggcccuguaccacacggagaacgccuacgugagcgucgugagcucccacuacagccgccgguucacccccgagaucgccaagcgccccaaggugcgggaccaggagggccgcaucaacuacuacuggacccuccuggagcccggggacaccaucaucuucgaggcgaacggcaaccugaucgccccgcgguucgccuucgcccucucccgcggguucggcagcggcaucaucacguccaacgcccccauggacgagugcgacgcgaagugccagacgccccagggggccaucaacagcucccugcccuuccagaacguccacccggugaccaucggcgagugccccaaguacgugcggagcgccaagcugcgcauggccaccgggcuccggaacauccccuccauccagagccgcggccuguucggggccaucgcgggcuucaucgagggcggguggaccggcauggucgacgggugguacggcuaccaccaccagaacgagcagggguccggcuacgccgccgaccagaaguccacccagaacgccaucaacggcaucaccaacaaggugaacagcgugaucgagaagaugaacacccaguucacggccgucgggaaggaguucagcaagcuggagcggcgcauggagaaccucaacaagaagguggacgacggcuuccuggacaucuggaccuacaacgcggagcugcucguccugcuggagaacgagcggacccucgacuuccacgacuccaacgugaagaaccuguacgagaaggucaagagccagcugaagaacaacgccaaggagaucgggaacggcugcuucgaguucuaccacaagugcaacgacgagugcauggaguccgugaagaacgggaccuacgacuaccccaaguacagcgaggaguccaagcucaaccgcgagaagaucgacggcgugaagcuggagagcaugggcguguaccagauccuggccaucuacagcacggucgccuccagccucgugcugcuggugucccucggggccaucagcuucuggaugugcuccaacggcagccugcagugccggaucugcaucuga

SEQ ID NO: 66153 - RNA, 1698 nt, Artificial Sequence
  derived and/or modified CDS sequence (opt1) from hemagglutinin__InfluenzaA__ABW81519
augaaggugaagcugcucguccugcugugcaccuucaccgccacguacgccgacaccaucugcaucggcuaccacgcgaacaacagcaccgacaccguggacacggugcucgagaagaacgucaccgugacccacuccgugaaccugcuggaggacagccacaacgggaagcucugccugcugaagggcaucgcgccccuccagcuggggaacugcuccgucgccggcuggauccuggggaacccggagugcgagcuccugaucagcaaggaguccuggagcuacaucguggagacccccaaccccgagaacggcacgugcuaccccggcuacuucgccgacuacgaggagcugcgcgagcagcucuccagcguguccagcuucgagcgguucgagaucuucccgaaggaguccagcuggcccaaccacaccgucaccgggguguccgccagcugcucccacaacggcaagagcuccuucuaccgcaaccugcuguggcucaccgggaagaacggccuguaccccaaccugagcaaguccuacgccaacaacaaggagaaggaggugcucguccuguggggcgugcaccacccgcccaacaucggggaccagcgggcccuguaccacacggagaacgcccacgugagcgucgugagcucccacuacagccgccgguucacccccgagaucgccaagcgccccaaggugcgggaccaggagggccgcaucaacuacuacuggacccuccuggagcccggggacaccaucaucuucgaggcgaacggcaaccugaucgccccgcgguucgccuucgcccucucccgcggguucggcagcggcaucaucacguccaacgcccccauggacgagugcgacgcgaagugccagacgccccagggggccaucaacagcucccugcccuuccagaacguccacccggugaccaucggcgagugccccaaguacgugcggagcgccaagcugcgcauggccaccgggcuccggaacauccccuccauccagagccgcggccuguucggggccaucgcgggcuucaucgagggcggguggaccggcauggucgacgggugguacggcuaccaccaccagaacgagcagggguccggcuacgccgccgaccagaaguccacccagaacgccaucaacggcaucaccaacaaggugaacagcgugaucgagaagaugaacacccaguucacggccgucgggaaggaguucagcaagcuggagcggcgcauggagaaccucaacaagaagguggacgacggcuuccuggacaucuggaccuacaacgcggagcugcucguccugcuggagaacgagcggacccucgacuuccacgacuccaacgugaagaaccuguacgagaaggucaagagccagcugaagaacaacgccaaggagaucgggaacggcugcuucgaguucuaccacaagugcaacgacgagugcauggaguccgugaagaacgggaccuacgacuaccccaaguacagcgaggaguccaagcucaaccgcgagaagaucgacggcgugaagcuggagagcaugggcguguaccagauccuggccaucuacagcacggucgccuccagccucgugcugcuggugucccucggggccaucagcuucuggaugugcuccaacggcagccugcagugccggaucugcaucuga

SEQ ID NO: 66154 - RNA, 1698 nt, Artificial Sequence
  derived and/or modified CDS sequence (opt1) from hemagglutinin__InfluenzaA__ABW81520
augaaggugaagcugcucguccugcugugcaccuucaccgccacguacgccgacaccaucugcaucggcuaccacgcgaacaacagcaccgacaccguggacacggugcucgagaagaacgucaccgugacccacuccgugaaccugcuggaggacagccacaacgggaagcucugccugcugaagggcaucgcgccccuccagcugggguccugcagcgucgccggcuggauccuggggaacccggagugcgagcuccugaucuccaaggagagcugguccuacaucguggagacccccaaccccgagaacggcacgugcuaccccggcuacuucgccgacuacgaggagcugcgcgagcagcucagcuccgugagcuccuucgagcgguucgagaucuucccgaaggagagcuccuggcccaaccacaccgucaccggggugagcgccuccugcagccacaacggcaaguccagcuucuaccgcaaccugcuguggcucaccgggaagaacggccuguaccccaaccuguccaagagcuacgccaacaacaaggagaaggaggugcucguccuguggggcgugcaccacccgcccaacaucggggaccagcgggcccuguaccacacggagaacgccuacgugagcgucguguccagccacuacucccgccgguucacccccgagaucgccaagcgccccaaggugcgggaccaggagggccgcaucaacuacuacuggacccuccuggagcccggggacaccaucaucuucgaggcgaacggcaaccugaucgccccgcgguucgccuucgcccucagccgcggguucggcuccggcaucaucacgagcaacgcccccauggacgagugcgacgcgaagugccagacgccccagggggccaucaacuccagccugcccuuccagaacguccacccggugaccaucggcgagugccccaaguacgugcgguccgccaagcugcgcauggccaccgggcuccggaacauccccagcauccagucccgcggccuguucggggccaucgcgggcuucaucgagggcggguggaccggcauggucgacgggugguacggcuaccaccaccagaacgagcaggggagcggcuacgccgccgaccagaaguccacccagaacgccaucaacggcaucaccaacaaggugaacagcgugaucgagaagaugaacacccaguucacggccgucgggaaggaguucuccaagcuggagcggcgcauggagaaccucaacaagaagguggacgacggcuuccuggacaucuggaccuacaacgcggagcugcucguccugcuggagaacgagcggacccucgacuuccacgacagcaacgugaagaaccuguacgagaaggugaagucccagcugaagaacaacgccaaggagaucgggaacggcugcuucgaguucuaccacaagugcaacgacgagugcauggagagcgucaagaacgggaccuacgacuaccccaaguacuccgaggagagcaagcucaaccgcgagaagaucgacggcgugaagcuggagagcaugggcguguaccagauccuggccaucuacuccacggucgccagcucccucgugcugcuggugagccucggggccaucuccuucuggaugugcagcaacggcucccugcagugccggaucugcaucuga

SEQ ID NO: 66155 - RNA, 1698 nt, Artificial Sequence
  derived and/or modified CDS sequence (opt1) from hemagglutinin__InfluenzaA__ABW81521
augaaggugaagcugcucguccugcugugcaccuucaccgccacguacgccgacaccaucugcaucggcuaccacgcgaacaacagcaccgacaccguggacacggugcucgagaagaacgucaccgugacccacuccgugaaccugcuggaggacagccacaacgggaagcucugccugcugaagggcaucgcgccccuccagcuggggaacugcuccgucgccggcuggauccuggggaacccggagugcgagcuccugaucagcaaggaguccuggagcuacaucguggagacccccaaccccgagaacggcacgugcuaccccggcuacuucgccgacuacgaggagcugcgcgagcagcucuccagcguguccagcuucgagcgguucgagaucuucccgaaggaguccagcuggcccaaccacaccgucaccgggguguccgccagcugcucccacaacggcaagagcuccuucuaccgcaaccugcuguggcucaccgggaagaacggccuguaccccaaccugagcaaguccuacgccaacaacaaggagaaggaggugcucguccuguggggcgugcaccacccgcccaacaucggggaccagcgggcccuguaccacacggagaacgccuacgugagcgucgugagcucccacuacagccgccgguucacccccgagaucgccaagcgccccaaggugcgggaccaggagggccgcaucaacuacuacuggacccuccuggagcccggggacaccaucaucuucgaggcgaacggcaaccugaucgccccgcgguucgccuucgcccucucccgcggguucggcagcggcaucaucuccagcaacgcccccauggacgagugcgacgcgaagugccagacgccccagggggccaucaacuccagccugcccuuccagaacguccacccggugaccaucggcgagugccccaaguacgugcgguccgccaagcugcgcauggccaccgggcuccggaacauccccagcauccagucccgcggccuguucggggccaucgcgggcuucaucgagggcggguggaccggcauggucgacgggugguacggcuaccaccaccagaacgagcaggggagcggcuacgccgccgaccagaaguccacgcagaacgccaucaacggcaucaccaacaaggugaacagcgugaucgagaagaugaacacccaguucaccgccgucgggaaggaguucuccaagcuggagcggcgcauggagaaccucaacaagaagguggacgacggcuuccuggacaucuggacguacaacgcggagcugcucguccugcuggagaacgagcggacccucgacuuccacgacagcaacgugaagaaccuguacgagaaggugaagucccagcugaagaacaacgccaaggagaucgggaacggcugcuucgaguucuaccacaagugcaacgacgagugcauggagagcgucaagaacgggaccuacgacuaccccaaguacuccgaggagagcaagcucaaccgcgagaagaucgacggcgugaagcuggagagcaugggcguguaccagauccuggccaucuacuccaccgucgccagcucccucgugcugcuggugagccucggggccaucuccuucuggaugugcagcaacggcucccugcagugccggaucugcaucuga

SEQ ID NO: 66156 - RNA, 1698 nt, Artificial Sequence; identical to SEQ ID NO: 65409
  derived and/or modified CDS sequence (opt1) from hemagglutinin__InfluenzaA__ABW81522

SEQ ID NO: 66157 - RNA, 1698 nt, Artificial Sequence; identical to SEQ ID NO: 65409
  derived and/or modified CDS sequence (opt1) from hemagglutinin__InfluenzaA__ABW81523

SEQ ID NO: 66158 - RNA, 1698 nt, Artificial Sequence
  derived and/or modified CDS sequence (opt1) from hemagglutinin__InfluenzaA__ABW81524
augaaggugaagcugcucguccugcugugcaccuucaccgccacguacgccgacaccaucugcaucggcuaccacgcgaacaacagcaccgacaccaucgacacggugcucgagaagaacgugaccgucacccacuccgugaaccugcuggaggacagccacaacgggaagcucugccugcugaagggcaucgcgccccuccagcuggggaacugcuccguggccggcuggauccuggggaacccggagugcgagcuccugaucagcaaggaguccuggagcuacaucgucgagacccccaaccccgagaacggcacgugcuaccccggcuacuucgccgacuacgaggagcugcgcgagcagcucuccagcguguccagcuucgagcgguucgagaucuucccgaaggaguccagcuggcccaaccacaccgugaccggggucuccgccagcugcucccacaacggcaagagcuccuucuaccgcaaccugcuguggcucaccgggaagaacggccuguaccccaaccugagcaaguccuacgccaacaacaaggagaaggaggugcucgugcuguggggcguccaccacccgcccaacaucggggaccagcgggcccuguaccacacggagaacgccuacgugagcguggucagcucccacuacagccgccgguucacccccgagaucgccaagcgccccaaggugcgggaccaggagggccgcaucaacuacuacuggacccuccuggagcccggggacaccaucaucuucgaggcgaacggcaaccugaucgccccgcgguucgccuucgcccucucccgcggguucggcagcggcaucaucacguccaacgcccccauggacgagugcgacgcgaagugccagacgccccagggggccaucaacagcucccugcccuuccagaacgugcacccggucaccaucggcgagugccccaaguacgugcggagcgccaagcugcgcauggccaccgggcuccggaacauccccuccauccagagccgcggccuguucggggccaucgcgggcuucaucgagggcggguggaccggcaugguggacgggugguacggcuaccaccaccagaacgagcagggguccggcuacgccgccgaccagaaguccacccagaacgccaucaacggcaucaccaacaaggucaacagcgugaucgagaagaugaacacccaguucacggccguggggaaggaguucagcaagcuggagcggcgcauggagaaccucaacaagaaggucgacgacggcuuccuggacaucuggaccuacaacgcggagcugcucgugcugcuggagaacgagcggacccucgacuuccacgacuccaacgucaagaaccuguacgagaaggucaagagccagcugaagaacaacgccaaggagaucgggaacggcugcuucgaguucuaccacaagugcaacgacgagugcauggaguccgugaagaacgggaccuacgacuaccccaaguacagcgaggaguccaagcucaaccgcgagaagaucgacggcgugaagcuggagagcaugggcguguaccagauccuggccaucuacagcacgguggccuccagccucguccugcuggugucccucggggccaucagcuucuggaugugcuccaacggcagccugcagugccggaucugcaucuga

SEQ ID NO: 66159 - RNA, 1698 nt, Artificial Sequence
  derived and/or modified CDS sequence (opt1) from hemagglutinin__InfluenzaA__ABW81526
augaaggugaagcugcucguccugcugugcaccuucaccgccacguacgccgacaccaucugcaucggcuaccacgcgaacaacagcaccgacaccguggacacggugcucgagaagaacgucaccgugacccacuccgugaaccugcuggaggacagccacaacgggaagcucugccugcugaagggcaucgcgccccuccagcuggggaacugcuccgucgccggcuggauccuggggaacccggagugcgagcuccugaucagcaaggaguccuggagcuacaucguggagaagcccaaccccgagaacgggaccugcuaccccggccacuucgccgacuacgaggagcugcgcgagcagcucuccagcguguccagcuucgagcgguucgagaucuucccgaaggaguccagcuggcccaaccacacggucaccgggguguccgccagcugcucccacaacggcaagagcuccuucuacaagaaccugcuguggcucaccgggaagaacggccuguaccccaaccugagcaaguccuacgccaacaacaaggagaaggaggugcucguccuguggggcgugcaccacccgcccaacaucggcgaccagaaggcccuguaccacaccgagaacgccuacgugagcgucgugagcucccacuacagccgcaaguucacgcccgagaucgccaagcggcccaaggugcgcgaccaggagggccggaucaacuacuacuggacccuccuggagcccggggacaccaucaucuucgaggcgaacggcaaccugaucgccccgcgcuacgccuucgcccucucccggggguucggcagcggcaucaucaacuccaacgcccccauggggaagugcgacgcgaagugccagacgccccagggcgccaucaacagcucccugcccuuccagaacguccacccggugaccaucggggagugccccaaguacgugcgcagcgccaagcugcggauggucaccggccuccgcaacauccccuccauccagagccgggggcuguucggcgccaucgccggcuucaucgagggcggguggaccgggaugguggacggcugguacggguaccaccaccagaacgagcagggcuccggcuacgcggccgaccagaaguccacccagaacgccaucaacgggaucacgaacaaggugaacagcgucaucgagaagaugaacacccaguucaccgccgugggcaaggaguucaacaagcuggagcgccggauggagaaccucaacaagaaggucgacgacggguucaucgacaucuggaccuacaacgccgagcugcuggugcuccuggagaacgagcgcacgcuggaccuccacgacagcaacgugaagaaccuguacgagaaggucaagucccagcugaagaacaacgcgaaggagaucggcaacgggugcuucgaguucuaccacaagugcaacgacgagugcauggagagcgugaagaacggcaccuacgacuaccccaaguacuccgaggagagcaagcucaaccgggagaagaucgacggcgugaagcuggaguccaugggggucuaccagauccuggccaucuacagcaccguggccagcucccucgugcugcuggucagccucggcgccaucuccuucuggaugugcagcaacgggucccugcagugccgcaucugcaucuga

SEQ ID NO: 66160 - RNA, 1698 nt, Artificial Sequence
  derived and/or modified CDS sequence (opt1) from hemagglutinin__InfluenzaA__ABW81527
augaaggugaagcugcucguccugcugugcaccuucaccgccacguacgccgacaccaucugcaucggcuaccacgcgaacaacagcaccgacaccguggacacggugcucgagaagaacgucaccgugacccacuccgugaaccugcuggaggacagccacaacgggaagcucugccugcugaagggcaucgcgccccuccagcuggggaacugcuccgucgccggcuggauccuggggaacccggagugcgagcuccugaucagcaaggaguccuggagcuacaucguggagacccccaaccccgagaacggcacgugcuaccccggcuacuucgccgacuacgaggagcugcgcgagcagcucuccagcguguccagcuucgagcgguucgagaucuucccgaaggaguccagcuggcccaaccacaccgucaccgggguguccgccagcugcucccacaacggcaagagcuccuucuaccgcaaccugcuguggcucaccgggaagaacggccuguaccccaaccugagcaaguccuacgccaacaacaaggagaaggaggugcucguccuguggggcgugcaccacccgcccaacaucggggaccagcgggcccuguaccacacggagaacgccuacgugagcgucgugagcucccacuacagccgccgguucacccccgagaucgccaagcgccccaaggugcggaaccaggagggccgcaucaacuacuacuggacccuccuggagcccggggacaccaucaucuucgaggcgaacggcaaccugaucgccccgcgguucgccuucgcccucucccgcggguucggcagcggcaucaucacguccaacgcccccauggacgagugcgacgcgaagugccagacgccccagggggccaucaacagcucccugcccuuccagaacguccacccggugaccaucggcgagugccccaaguacgugcggagcgccaagcugcgcauggccaccgggcuccggaacauccccuccauccagagccgcggccuguucggggccaucgcgggcuucaucgagggcggguggaccggcauggucgacgggugguacggcuaccaccaccagaacgagcagggguccggcuacgccgccgaccagaaguccacccagaacgccaucaacggcaucaccaacaaggugaacagcgugaucgagaagaugaacacccaguucacggccgucgggaaggaguucagcaagcuggagcggcgcauggagaaccucaacaagaagguggacgacggcuuccuggacaucuggaccuacaacgcggagcugcucguccugcuggagaacgagcggacccucgacuuccacgacuccaacgugaagaaccuguacgagaaggucaagagccagcugaagaacaacgccaaggagaucgggaacggcugcuucgaguucuaccacaagugcaacgacgagugcauggaguccgugaagaacgggaccuacgacuaccccaaguacagcgaggaguccaagcucaaccgcgagaagaucgacggcgugaagcuggagagcaugggcguguaccagauccuggccaucuacagcacggucgccuccagccucgugcugcuggugucccucggggccaucagcuucuggaugugcuccaacggcagccugcagugccggaucugcaucuga

SEQ ID NO: 66161 - RNA, 1698 nt, Artificial Sequence
  derived and/or modified CDS sequence (opt1) from hemagglutinin__InfluenzaA__ABW81528
augaaggugaagcugcucguccugcugugcaccuucaccgccacguacgccgacaccaucugcaucggcuaccacgcgaacaacagcaccgacaccguggacacggugcucgagaagaacgucaccgugacccacuccgugaaccugcuggaggacagccacaacgggaagcucugccugcugaagggcaucgcgccccuccagcuggggaacugcuccgucgccggcuggauccuggggaacccggagugcgagcuccugaucagcaaggaguccuggagcuacaucguggagacccccaaccccgagaacggcacgugcuaccccggccacuucgccgacuacgaggagcugcgcgagcagcucuccagcguguccagcuucgagcgguucgagaucuucccgaaggaguccagcuggcccaaccacaccgucaccgggguguccgccagcugcucccacaacggcaagagcuccuucuaccgcaaccugcuguggcucaccgggaagaacggccuguaccccaaccugagcaaguccuacgccaacaacaaggagaaggaggugcucguccugugggggauccaccacccgcccaacaucggcgaccagcgggcccuguaccacacggagaacgccuacgugagcguggucagcucccacuacagccgccgguucacccccgagaucgccaagcgccccaaggugcgggaccaggagggccgcaucaacuacuacuggacccuccuggagccccgggacaccaucaucuucgaggcgaacgggaaccugaucgccccgcgcuucgccuucgcccucucccggggcuucgggagcggcaucaucacguccaacgcccccauggacgagugcgacgcgaagugccagacgccccagggcgccaucaacagcucccugcccuuccagaacgugcacccggucaccaucggggagugccccaaguacgugcgcagcgccaagcugcggauggugaccggccuccgcaacauccccuccauccagagccgggggcuguucggcgccaucgccggguucaucgagggcggcuggaccgggauggucgacggcugguacggguaccaccaccagaacgagcagggcuccggguacgcggccgaccagaaguccacccagaacgccaucaacggcaucaccaacaaggugaacagcgugaucgagaagaugaacacccaguucacggccgucggcaaggaguucaacaagcuggagcgccggauggagaaccucaacaagaagguggacgacggguuccuggacaucuggaccuacaacgccgagcugcucguccugcuggagaacgagcgcacccucgacuuccacgacagcaacgugaagaaccuguacgagaaggugaagucccagcugaagaacaacgcgaaggagaucggcaacgggugcuucgaguucuaccacaagugcaacgacgagugcauggagagcgucaagaacggcaccuacgacuaccccaaguacuccgaggagagcaagcucaaccgggagaagaucgacggggugaagcuggaguccaugggcguguaccagauccuggccaucuacagcacggucgccagcucccucgugcugcuggugagccucggcgccaucuccuucuggaugugcagcaacgggucccugcagugccgcaucugcaucuga

SEQ ID NO: 66162 - RNA, 1698 nt, Artificial Sequence
  derived and/or modified CDS sequence (opt1) from hemagglutinin__InfluenzaA__ABW81529
augaaggugaagcugcucauccugcugugcaccuucaccgccacguacgccgacaccaucugcaucggcuaccacgcgaacaacagcaccgacaccgucgacacggugcucgagaagaacgugaccgucacccacuccgugaaccugcuggaggacagccacaacgggaagcucugccugcugaagggcaucgcgccccuccagcuggggaacugcuccguggccggcuggauccuggggaacccggagugcgagcuccugaucagccgcgaguccuggagcuacaucgucgagacccccaaccccgagaacggcacgugcuaccccggcuacuucgccgacuacgaggagcugcgggagcagcucuccagcguguccagcuucgagcgcuucgagaucuucccgaaggaguccagcuggcccaaccacaccgugaccggggucuccgccagcugcucccacaacggcaagagcuccuucuaccggaaccugcuguggcucaccgggaagaacggccuguaccccaaccugagcaaguccuacgccaacaacaaggagaaggaggugcucauccuguggggcgugcaccacccgcccaacauccgcgaccagaugacgcuguaccacaccgagaacgccuacgucagcguggugagcucccacuacagccggcgcuucacccccgagaucaccaagcggcccaagguccgcgaccaggaggggcggaucaacuacuacuggacgcuccuggagcccggcgacaccaucaucuucgaggccaacgggaaccugaucgccccgugguacgcguucgcccucucccgcggcuucgggagcggcaucaucaccuccaacgcccccauggacgagugcgacgccaagugccagacccccaagggcgccaucaacagcucccugcccuuccagaacgugcacccggugacgaucggggagugccccaaguacguccggagcgcgaagcugcgcauggugaccggccuccggaacauccccuccauccagagccgcgggcuguucggcgccaucgccggguucaucgagggcggcuggaccgggaugguggacggcugguacggguaccaccaccagaacgagcagggcuccggguacgccgccgaccagaaguccacccagaacgcgaucaacggcaucacgaacaaggucaacagcgugaucgagaagaugaacacccaguucaccgccgugggcaaggaguucaacaagcuggagcggcgcauggagaaccucaacaagaaggucgacgacggguuccuggacaucuggaccuacaacgccgagcugcucgugcugcuggagaacgagcggacgcucgacuuccacgacagcaacgucaagaaccuguacgagaaggugaagucccagcugaagaacaacgccaaggagaucggcaacgggugcuucgaguucuaccacaagugcaacaacgagugcauggagagcgugaagaacggcaccuacgacuaccccaaguacuccgaggagagcaagcucaaccgcgagaagaucgacggggucaagcuggaguccaugggcguguaccagauccuggccaucuacagcaccguggcgagcucccucguccugcuggugagccucggcgccaucuccuucuggaugugcagcaacgggucccugcagugccggaucugcaucuga

SEQ ID NO: 66163 - RNA, 1698 nt, Artificial Sequence
  derived and/or modified CDS sequence (opt1) from hemagglutinin__InfluenzaA__ABW81530
augaaggugaagcugcucauccugcugugcaccuucaccgccacguacgccgacaccaucugcaucggcuaccacgcgaacaacagcaccgacaccgucgacacggugcucgagaagaacgugaccgucacccacuccgugaaccugcuggaggacagccacaacgggaagcucugccugcugaagggcaucgcgccccuccagcuggggaacugcuccguggccggcuggauccuggggaacccggagugcgagcuccugaucagcaaggaguccuggagcuacaucgucgagacccccaaccccgagaacggcgccugcuaccccggcuacuucgccgacuacgaggagcugcgcgagcagcucuccagcguguccagcuucgagcgguucgagaucuucccgaaggaguccagcuggcccaaccacacggugaccggggucuccgccagcugcucccacaacggcaagagcuccuucuaccgcaaccugcuguggcucaccgggaagaacggccuguaccccaaccugagcaaguccuacgccaacaacaaggagaaggaggugcucauccuguggggcgugcaccacccgcccaacaucggggaccagcggacccuguaccacacggagaacgccuacgucagcguggugagcucccacuacagccgccgguucacccccgagaucaccaagcgccccaagguccgggaccaggagggccgcaucaacuacuacuggacccuccuggagcccggggacacgaucaucuucgaggccaacggcaaccugaucgcgccgugguacgccuucgcccucucccggggguucggcagcggcaucaucaccuccaacgcccccauggacgagugcgacgccaagugccagacgccccagggggcgaucaacagcucccugcccuuccagaacgugcacccggugaccaucggcgagugccccaaguacguccgcagcgccaagcugcggauggugaccgggcuccgcaacauccccuccauccagagccggggccuguucggggccaucgccggcuucaucgagggcggguggaccggcaugguggacgggugguacggcuaccaccaccagaacgagcagggguccggcuacgccgcggaccagaaguccacccagaacgccaucaaccgcaucaccaacaaggucaacagcgugaucgagaagaugaacacgcaguucaccgccgugggcaaggaguucaacaagcuggagcggcgcauggagaaccucaacaagaaggucgacgacggguuccuggacaucuggaccuacaacgccgagcugcucgugcugcuggagaacgagcggacccucgacuuccacgacagcaacgucaagaaccuguacgagaaggugaagucccagcugaagaacaacgccaaggagaucggcaacgggugcuucgaguucuaccacaagugcaacaacgagugcauggagagcgugaagaacggcacguacgacuaccccaaguacuccgaggagagcaagcucaaccgcgagaagaucgacggggucaagcuggacuccaugggcguguaccagauccuggcgaucuacagcaccguggccagcucccucguccugcuggugagccucggcgccaucuccuucuggaugugcagcaacgggucccugcagugccggaucugcaucuga

SEQ ID NO: 66164 - RNA, 1698 nt, Artificial Sequence; identical to SEQ ID NO: 64350
  derived and/or modified CDS sequence (opt1) from hemagglutinin__InfluenzaA__ABW81531

SEQ ID NO: 66165 - RNA, 1698 nt, Artificial Sequence
  derived and/or modified CDS sequence (opt1) from hemagglutinin__InfluenzaA__ABW81532
augaaggugaagcugcucauccugcugugcaccuucaccgccacguacgccgacaccaucugcaucggcuaccacgcgaacaacagcaccgacaccgucgacacggugcucgagaagaacgugaccgucacccacuccgugaaccugcuggaggacagccacaacgggaagcucugccugcugaagggcaucgcgccccuccagcuggggaacugcuccguggccggcuggauccuggggaacccggagugcgagcuccugaucagcaaggaguccuggagcuacaucgucgagacccccaaccccgagaacggcgccugcuaccccugguacuucgccgacuacgaggagcugcgcgagcagcucuccagcguguccagcuucgagcgguucgagaucuucccgaaggaguccagcuggcccaaccacacggugaccggcgucuccgccagcugcucccacaacggcaagagcuccuucuaccgcaaccugcuguggcucaccgggaagaacgggcuguaccccaaccugagcaaguccuacgccaacaacaaggagaaggaggugcucauccuguggggcgugcaccacccgcccaacaucgggaaccagcggacccuguaccacacggagaacgccuacgucagcguggugagcucccacuacagccgccgguucacccccgagaucaccaagcgccccaagguccgggaccaggagggccgcaucaacuacuacuggacccuccuggagcccggcgacacgaucaucuucgaggccaacgggaaccugaucgcgccgugguacgccuucgcccucucccggggcuucgggagcggcaucaucaccuccaacgcccccauggacgagugcgacgccaagugccagacgccccagggcgcgaucaacagcucccugcccuuccagaacgugcacccggugaccaucggggagugccccaaguacguccgcagcgccaagcugcggauggugaccggccuccgcaacauccccuccauccagagccgggggcuguucggcgccaucgccggguucaucgagggcggcuggaccgggaugguggacggcugguacggguaccaccaccagaacgagcagggcuccggguacgccgcggaccagaaguccacccagaacgccaucaacggcaucaccaacaaggucaacagcgugaucgagaagaugaacacgcaguucaccgccgugggcaaggaguucaacaagcuggagcgccggauggagaaccucaacaagaaggucgacgacggguuccuggacaucuggaccuacaacgccgagcugcucgugcugcuggagaacgagcgcacccucgacuuccacgacagcaacgucaagaaccuguacgagaaggugaagucccagcugaagaacaacgccaaggagaucggcaacgggugcuucgaguucuaccacaagugcaacaacgagugcauggagagcgugaagaacggcacguacgacuaccccaaguacuccgaggagagcaagcucaaccgggagaagaucgacggggucaagcuggacuccaugggcguguaccagauccuggcgaucuacagcaccguggccagcucccucguccugcuggugagccucggcgccaucuccuucuggaugugcagcaacgggucccugcagugccgcaucugcaucuga

SEQ ID NO: 66166 - RNA, 1698 nt, Artificial Sequence; identical to SEQ ID NO: 65980
  derived and/or modified CDS sequence (opt1) from hemagglutinin__InfluenzaA__ABW86321

SEQ ID NO: 66167 - RNA, 1698 nt, Artificial Sequence; identical to SEQ ID NO: 65945
  derived and/or modified CDS sequence (opt1) from hemagglutinin__InfluenzaA__ABW86332

SEQ ID NO: 66168 - RNA, 1698 nt, Artificial Sequence; identical to SEQ ID NO: 65934
  derived and/or modified CDS sequence (opt1) from hemagglutinin__InfluenzaA__ABW86343

SEQ ID NO: 66169 - RNA, 1698 nt, Artificial Sequence; identical to SEQ ID NO: 65938
  derived and/or modified CDS sequence (opt1) from hemagglutinin__InfluenzaA__ABW86354

SEQ ID NO: 66170 - RNA, 1698 nt, Artificial Sequence; identical to SEQ ID NO: 65938
  derived and/or modified CDS sequence (opt1) from hemagglutinin__InfluenzaA__ABW86365

SEQ ID NO: 66171 - RNA, 1698 nt, Artificial Sequence; identical to SEQ ID NO: 65954
  derived and/or modified CDS sequence (opt1) from hemagglutinin__InfluenzaA__ABW86376

SEQ ID NO: 66172 - RNA, 1698 nt, Artificial Sequence; identical to SEQ ID NO: 65938
  derived and/or modified CDS sequence (opt1) from hemagglutinin__InfluenzaA__ABW86387

SEQ ID NO: 66173 - RNA, 1698 nt, Artificial Sequence; identical to SEQ ID NO: 65934
  derived and/or modified CDS sequence (opt1) from hemagglutinin__InfluenzaA__ABW86409

SEQ ID NO: 66174 - RNA, 1698 nt, Artificial Sequence; identical to SEQ ID NO: 65934
  derived and/or modified CDS sequence (opt1) from hemagglutinin__InfluenzaA__ABW86431

SEQ ID NO: 66175 - RNA, 1698 nt, Artificial Sequence; identical to SEQ ID NO: 65938
  derived and/or modified CDS sequence (opt1) from hemagglutinin__InfluenzaA__ABW86442

SEQ ID NO: 66176 - RNA, 1698 nt, Artificial Sequence; identical to SEQ ID NO: 65954
  derived and/or modified CDS sequence (opt1) from hemagglutinin__InfluenzaA__ABW86453

SEQ ID NO: 66177 - RNA, 1698 nt, Artificial Sequence; identical to SEQ ID NO: 65938
  derived and/or modified CDS sequence (opt1) from hemagglutinin__InfluenzaA__ABW86464

SEQ ID NO: 66178 - RNA, 1698 nt, Artificial Sequence; identical to SEQ ID NO: 65954
  derived and/or modified CDS sequence (opt1) from hemagglutinin__InfluenzaA__ABW86475

SEQ ID NO: 66179 - RNA, 1698 nt, Artificial Sequence; identical to SEQ ID NO: 65934
  derived and/or modified CDS sequence (opt1) from hemagglutinin__InfluenzaA__ABW86486

SEQ ID NO: 66180 - RNA, 1698 nt, Artificial Sequence; identical to SEQ ID NO: 65980
  derived and/or modified CDS sequence (opt1) from hemagglutinin__InfluenzaA__ABW86497

SEQ ID NO: 66181 - RNA, 1698 nt, Artificial Sequence; identical to SEQ ID NO: 65938
  derived and/or modified CDS sequence (opt1) from hemagglutinin__InfluenzaA__ABW86508

SEQ ID NO: 66182 - RNA, 1698 nt, Artificial Sequence
  derived and/or modified CDS sequence (opt1) from hemagglutinin__InfluenzaA__ABW86519
augaaggugaagcugcucguccugcugugcaccuucaccgccacguacgccgacaccaucugcaucggcuaccacgcgaacaacagcaccgacaccguggacacggugcucgagaagaacgucaccgugacccacuccgugaaccugcuggaggacagccacaacgggaagcucugccugcugaagggcaucgcgccccuccagcuggggaacugcuccgucgccggcuggauccuggggaacccggagugcgagcuccugaucagcaaggaguccuggagcuacaucguggagacccccaaccccgagaacggcacgugcuaccccggcuacuucgccgacuacgaggagcugcgcgagcagcucuccagcguguccagcuucgagcgguucgagaucuucccgaaggaguccagcuggcccaaccacaccgucaccgggguguccgccagcugcucccacaacggcaagagcuccuucuaccgcaaccugcuguggcucaccgggaagaacggccuguaccccaaccugagcaaguccuacgccaacaacaaggagaaggaggugcucguccuguggggcgugcaccacccgcccaacaucggggaccagcgggcccuguaccacacggagaacgccuacgugagcgucgugagcucccacuacagccgccgguucacccccgagaucgccaagcgccccaaggugcggaaccaggagggccgcaucaacuacuacuggacccuccuggagcccggggacaccaucaucuucgaggcgaacggcaaccugaucgccccgcgguucgccuucgcccucucccgcggguucggcagcggcaucaucacguccaacgcccccaugggggagugcgacgcgaagugccagacgccccagggcgccaucaacagcucccugcccuuccagaacguccacccggugaccaucggggagugccccaaguacgugcggagcgccaagcugcgcauggucaccggccuccggaacauccccuccauccagagccgcgggcuguucggcgccaucgccggcuucaucgagggcggguggaccgggaugguggacggcugguacggguaccaccaccagaacgagcagggcuccggcuacgcggccgaccagaaguccacccagaacgccaucaacgggaucaccaacaaggugaacagcgucaucgagaagaugaacacccaguucacggccgugggcaaggaguucaacaagcuggagcggcgcauggagaaccucaacaagaaggucgacgacggguuccuggacaucuggaccuacaacgccgagcugcucgugcugcuggagaacgagcggacccucgacuuccacgacagcaacgugaagaaccuguacgagaaggucaagucccagcugaagaacaacgcgaaggagaucggcaacgggugcuucgaguucuaccacaagugcaacgacgagugcauggagagcgugaagaacggcaccuacgacuaccccaaguacuccgaggagagcaagcucaaccgcgagaagaucgacggcgugaagcuggaguccaugggggucuaccagauccuggccaucuacagcacgguggccagcucccucgugcugcuggucagccucggcgccaucuccuucuggaugugcagcaacgggucccugcagugccggaucugcaucuga

SEQ ID NO: 66183 - RNA, 1698 nt, Artificial Sequence; identical to SEQ ID NO: 65934
  derived and/or modified CDS sequence (opt1) from hemagglutinin__InfluenzaA__ABW86530

SEQ ID NO: 66184 - RNA, 1698 nt, Artificial Sequence
  derived and/or modified CDS sequence (opt1) from hemagglutinin__InfluenzaA__ABW86541
augaaggugaagcugcucguccugcugugcaccuucaccgccacguacgccgacaccaucugcaucggcuaccacgcgaacaacagcaccgacaccguggacacggugcucgagaagaacgucaccgugacccacuccgugaaccugcuggaggacagccacaacgggaagcucugccugcugaagggcaucgcgccccuccagcuggggaacugcuccgucgccggcuggauccuggggaacccggagugcgagcuccugaucagcaaggaguccuggagcuacaucguggagacccccaaccccgagaacggcacgugcuaccccggcuacuucgccgacuacgaggagcugcgcgagcagcucuccagcguguccagcuucgagcgguucgagaucuucccgaaggaguccagcuggcugaaccacaccgucaccgggguguccgccagcugcucccacaacggcaagagcuccuucuaccgcaaccugcucuggcugaccgggaagaacggccuguaccccaaccucagcaaguccuacgccaacaacaaggagaaggaggugcugguccuguggggcgugcaccacccgcccaacaucggggaccagcgggcccucuaccacacggagaacgccuacgugagcgucgugagcucccacuacagccgccgguucacccccgagaucgccaagcgccccaaggugcgggaccaggagggccgcaucaacuacuacuggacccugcuggagcccggggacaccaucaucuucgaggcgaacggcaaccucaucgcgccccgguucgccuucgcccugucccgcggguucggcagcggcaucaucacguccaacgccccgaugggggagugcgacgccaagugccagacgccccagggcgccaucaacagcucccugcccuuccagaacguccaccccgugaccaucggggagugcccgaaguacgugcggagcgccaagcuccgcauggucaccggccugcggaacauccccuccauccagagccgcgggcuguucggcgccaucgccggcuucaucgagggcggguggaccgggaugguggacggcugguacggguaccaccaccagaacgagcagggcuccggcuacgcggccgaccagaaguccacccagaacgccaucaacgggaucaccaacaaggugaacagcgucaucgagaagaugaacacccaguucacggccgugggcaaggaguucaacaagcucgagcggcgcauggagaaccugaacaagaaggucgacgacggguuccuggacaucuggaccuacaacgccgagcuccuggugcugcucgagaacgagcggacccuggacuuccacgacagcaacgugaagaaccuguacgagaaggucaagucccagcucaagaacaacgcgaaggagaucggcaacgggugcuucgaguucuaccacaagugcaacgacgagugcauggagagcgugaagaacggcaccuacgacuaccccaaguacuccgaggagagcaagcugaaccgcgagaagaucgacggcgugaagcuggaguccaugggggucuaccagauccucgccaucuacagcacgguggccagcucccuggugcugcucgucagccugggcgccaucuccuucuggaugugcagcaacgggucccugcagugccggaucugcaucuga

SEQ ID NO: 66185 - RNA, 1698 nt, Artificial Sequence; identical to SEQ ID NO: 65934
  derived and/or modified CDS sequence (opt1) from hemagglutinin__InfluenzaA__ABW86552

SEQ ID NO: 66186 - RNA, 1701 nt, Artificial Sequence
  derived and/or modified CDS sequence (opt1) from hemagglutinin__InfluenzaA__ABW86563
augaagaccaucaucgcccugagcuacauccucugccugguguucgcccagaagcugcccggcaacgacaacuccaccgcgacgcucugccuggggcaccacgccgucccgaacggcaccaucgugaagaccaucaccaacgaccagaucgaggugacgaacgccaccgagcugguccagagcuccagcaccggggagaucugcgacagcccccaccagauccucgacggcgagaacugcacccugaucgacgcccugcucggggacccccagugcgacggcuuccagaacaagaagugggaccuguucguggagcgcagcaaggccuacuccaacugcuaccccuacgacgugccggacuacgcgagccugcggucccucgucgccagcuccggcacgcuggaguucaacaacgagagcuucaacuggaccggggugacccagaacggcaccuccagcgccugcauccgccgguccaacaacagcuucuucucccgccugaacuggcucacgcaccugaaguucaaguaccccgcccugaacgugaccaugcccaacaacgagaaguucgacaagcucuacaucuggggcguccaccaccccgggaccgacaacgaccagaucuuccuguacgcgcaggccagcgggcggaucaccguguccacgaagcgcagccagcagaccgugaucccgaacaucggcagccggccccgcguccggaacauccccucccgcaucagcaucuacuggaccaucgugaagcccggcgacauccugcucaucaacuccaccgggaaccugaucgccccgcggggcuacuucaagauccgcagcgggaaguccagcaucaugcgguccgacgcccccaucggcaagugcaacagcgagugcaucacgcccaacggcuccauccccaacgacaagccguuccagaacgugaaccgcaucaccuacggggccugcccccgguacgucaagcagaacacccugaagcucgcgaccggcaugcgcaacgugcccgagaagcagacgcgggggaucuucggcgccaucgccggguucaucgagaacggcugggagggcaugguggacgggugguacggcuuccgccaccagaacagcgaggggaucggccaggccgccgaccugaaguccacccaggcggccaucgaccagaucaacgggaagcugaaccggcucaucggcaagaccaacgagaaguuccaccagaucgagaaggaguucagcgaggucgagggccgcauccaggaccuggagaaguacguggaggacaccaagaucgaccugugguccuacaacgccgagcuccugguggcccuggagaaccagcacacgaucgaccucaccgacagcgagaugaacaagcuguucgagaagaccaagaagcagcugcgggagaacgccgaggacauggggaacggcugcuucaagaucuaccacaagugcgacaacgcgugcaucggguccauccgcaacggcaccuacgaccacgacgucuaccgcgacgaggcccucaacaaccgguuccagaucaaggggguggagcugaaguccggccacaaggacuggauccuguggaucuccuucgccaucagcugcuuccuccugugcguggcccugcucggcuucaucaugugggccugccagaaggggaacauccgcugcaacaucugcaucuga

SEQ ID NO: 66187 - RNA, 1698 nt, Artificial Sequence; identical to SEQ ID NO: 65971
  derived and/or modified CDS sequence (opt1) from hemagglutinin__InfluenzaA__ABW86606

SEQ ID NO: 66188 - RNA, 1701 nt, Artificial Sequence; identical to SEQ ID NO: 64945
  derived and/or modified CDS sequence (opt1) from hemagglutinin__InfluenzaA__ABW91185

SEQ ID NO: 66189 - RNA, 1701 nt, Artificial Sequence
  derived and/or modified CDS sequence (opt1) from hemagglutinin__InfluenzaA__ABW91196
augaagaccaucaucgcccugagcuacauccucugccugguguucgcccagaagcugcccggcaacgacaacuccaccgcgacgcucugccuggggcaccacgccgucccgaacggcaccaucgugaagaccaucaccaacgaccagaucgaggugacgaacgccaccgagcugguccagagcuccagcaccggggagaucugcaacagcccccaccagauccucgacggcgagaacugcacccugaucgacgcccugcucggggacccccagugcgacggcuuccagaacaagaagugggaccuguucguggagcgcagcaaggccuacuccaacugcuaccccuacgacgugccggacuacgcgagccugcggucccucgucgccagcuccggcacgcuggaguucaacaacgagagcuucaacuggaccggggugacccagaacggcaccuccagcgccugcauccgccgguccaacaacagcuucuucucccgccugaacuggcucacgcaccugaaguucaaguaccccgcccugaacgugaccaugcccaacaacgagaaguucgacaagcucuacaucuggggcguccaccaccccgggaccgacaacgaccagaucuuccuguacgcgcaggccagcgggcggaucaccguguccacgaagcgcagccagcagaccgugaucccgaacaucggcagccggccccgcguccggaacauccccucccgcaucagcaucuacuggaccaucgugaagcccggcgacauccugcucaucaacuccaccgggaaccugaucgccccgcggggcuacuucaagauccgcagcgggaaguccagcaucaugcgguccgacgcccccaucggcaagugcaacagcgagugcaucacgcccaacggcuccauccccaacgacaagccguuccagaacgugaaccgcaucaccuacggggccugcccccgguacgucaagcagaacacccugaagcucgcgaccggcaugcgcaacgugcccgagaagcagacgcgggggaucuucggcgccaucgccggguucaucgagaacggcugggagggcaugguggacgggugguacggcuuccgccaccagaacagcgaggggaucggccaggccgccgaccugaaguccacccaggcggccaucgaccagaucaacgggaagcugaaccggcucaucggcaagaccaacgagaaguuccaccagaucgagaaggaguucagcgaggucgagggccgcauccaggaccuggagaaguacguggaggacaccaagaucgaccugugguccuacaacgccgagcuccugguggcccuggagaaccagcacacgaucgaccucaccgacagcgagaugaacaagcuguucgagaagaccaagaagcagcugcgggagaacgccgaggacauggggaacggcugcuucaagaucuaccacaagugcgacaacgcgugcaucggguccauccgcaacggcaccuacgaccacgacgucuaccgcgacgaggcccucaacaaccgguuccagaucaaggggguggagcugaaguccggcuacaaggacuggauccuguggaucuccuucgccaucagcugcuuccuccugugcguggcccugcucggcuucaucaugugggccugccagaaggggaacauccgcugcaacaucugcaucuga

SEQ ID NO: 66190 - RNA, 1701 nt, Artificial Sequence; identical to SEQ ID NO: 66189
  derived and/or modified CDS sequence (opt1) from hemagglutinin__InfluenzaA__ABW91207

SEQ ID NO: 66191 - RNA, 1698 nt, Artificial Sequence; identical to SEQ ID NO: 65934
  derived and/or modified CDS sequence (opt1) from hemagglutinin__InfluenzaA__ABW91218

SEQ ID NO: 66192 - RNA, 1701 nt, Artificial Sequence; identical to SEQ ID NO: 65952
  derived and/or modified CDS sequence (opt1) from hemagglutinin__InfluenzaA__ABW91240

SEQ ID NO: 66193 - RNA, 1701 nt, Artificial Sequence
  derived and/or modified CDS sequence (opt1) from hemagglutinin__InfluenzaA__ABW91251
augaagaccaucaucgcccugagcuacauccucugccugguguucgcccagaagcugcccggcaacgacaacuccaccgcgacgcucugccuggggcaccacgccgucccgaacggcaccaucgugaagaccaucaccaacgaccagaucgaggugacgaacgccaccgagcugguccagagcuccagcaccggggagaucugcgacagcccccaccagauccucgacggcgagaacugcacccugaucgacgcccugcucggggacccccagugcgacggcuuccagaacaagaagugggaccuguucguggagcgcagcaaggccuacuccaacugcuaccccuacgacgugccggacuacgcgagccugcggucccucgucgccagcuccggcacgcuggaguucaacaacgagagcuucaacuggaccggggugacccagaacggcaccuccagcgccugcauccgccgguccaacaacagcuucuucucccgccugaacuggcucacgcaccugaaguucaaguaccccgcccugaacgugaccaugcccaacaacgagaaguucgacaagcucuacaucuggggcguccaccaccccgggaccgacaacgaccagaucuuccuguacgcgcaggccagcgggcggaucaccguguccacgaagcgcagccagcagaccgugaucccgaacaucggcagccggccccgcguccggaacauccccucccgcaucagcaucuacuggaccaucgugaaguccggcgacauccugcucaucaacagcaccgggaaccugaucgcgccccggggcuacuucaagauccgcuccgggaaguccuccaucaugcggagcgacgccccgaucggcaagugcaacuccgagugcaucacgcccaacggcagcauccccaacgacaagcccuuccagaacgugaaccgcaucaccuacggggccugcccgcgguacgucaagcagaacacccugaagcucgccaccggcaugcgcaacgugcccgagaagcagacgcgggggaucuucggcgccaucgccggguucaucgagaacggcugggagggcaugguggacgggugguacggcuuccgccaccagaacuccgaggggaucggccaggccgccgaccucaagagcacccaggcggccaucgaccagaucaacgggaagcugaaccggcugaucggcaagaccaacgagaaguuccaccagaucgagaaggaguucuccgaggucgagggccgcauccaggaccuggagaaguacguggaggacaccaagaucgaccuguggagcuacaacgccgagcuccugguggcccuggagaaccagcacacgaucgaccucaccgacuccgagaugaacaagcuguucgagaagaccaagaagcagcugcgggagaacgccgaggacauggggaacggcugcuucaagaucuaccacaagugcgacaacgcgugcaucgggagcauccgcaacggcaccuacgaccacgacgucuaccgcgacgaggcccucaacaaccgguuccagaucaaggggguggagcugaaguccggcuacaaggacuggauccuguggaucagcuucgccaucuccugcuuccuccugugcguggcccugcucggcuucaucaugugggccugccagaaggggaacauccgcugcaacaucugcaucuga

SEQ ID NO: 66194 - RNA, 1701 nt, Artificial Sequence; identical to SEQ ID NO: 65952
  derived and/or modified CDS sequence (opt1) from hemagglutinin__InfluenzaA__ABW91262

SEQ ID NO: 66195 - RNA, 1698 nt, Artificial Sequence; identical to SEQ ID NO: 65969
  derived and/or modified CDS sequence (opt1) from hemagglutinin__InfluenzaA__ABW91273

SEQ ID NO: 66196 - RNA, 1698 nt, Artificial Sequence
  derived and/or modified CDS sequence (opt1) from hemagglutinin__InfluenzaA__ABW91284
augaaggugaagcugcucguccugcugugcaccuucaccgccacguacgccgacaccaucugcaucggcuaccacgcgaacaacagcaccgacaccguggacacggugcucgagaagaacgucaccgugacccacuccgugaaccugcuggaggacagccacaacgggaagcucugccugcugaagggcaucgcgccccuccagcuggggaacugcuccgucgccggcuggauccuggggaacccggagugcgagcuccugaucagccgcgaguccuggagcuacaucguggagaagcccaaccccgagaacgggaccugcuaccccggccacuucgccgacuacgaggagcugcgggagcagcucuccagcguguccagcuucgagcgcuucgagaucuucccgaaggaguccagcuggcccaaccacacgaccaccggggucuccgccagcugcucccacaacggcgagagcuccuucuacaagaaccugcuguggcucaccgggaagaacggccuguaccccaaccugagcaaguccuacgccaacaacaaggagaaggaggugcucgugcuguggggcguccaccacccgcccaacaucggcgaccagcgggcccuguaccacacggagaacgccuacgugagcguggucagcucccacuacagccgcaaguucacccccgagaucgccaagcggcccaaggugcgcgaccaggagggccggaucaacuacuacuggacccuccuggagcccggggacaccaucaucuucgaggcgaacggcaaccugaucgccccgcgcuacgccuucgcccucucccggggguucggcagcggcaucaucaacuccaacgccagcaugggggagugcgacgcgaagugccagacgccccagggcgccaucaacuccagccugcccuuccagaacgugcaccccgucaccaucggggagugcccgaaguacgugcgcuccgccaagcugcggauggugaccggccuccgcaacauccccagcauccagucccgggggcuguucggcgccaucgccggcuucaucgagggcggguggaccgggauggucgacggcugguacggguaccaccaccagaacgagcagggcagcggcuacgcggccgaccagaaguccacgcagaacgccaucaacgggaucaccaacaaggugaacagcgugaucgagaagaugaacacccaguucaccgccgucggcaaggaguucaacaagcuggagcgccggauggagaaccucaacaagaagguggacgacggguucaucgacaucuggacguacaacgccgagcugcugguccuccuggagaacgagcgcacccuggacuuccacgacuccaacgugaagaaccucuacgagaaggucaagagccagcugaagaacaacgcgaaggagaucggcaacgggugcuucgaguucuaccacaagugcaacgacgagugcauggaguccgugaagaacggcaccuacgacuaccccaaguacagcgaggaguccaagcugaaccgggagaagaucgacggcgugaagcucgagagcauggggguguaccagauccuggccaucuacagcaccgucgccuccagccuggugcuccuggugucccugggcgccaucagcuucuggaugugcuccaacgggagccuccagugccgcaucugcaucuga

SEQ ID NO: 66197 - RNA, 1698 nt, Artificial Sequence; identical to SEQ ID NO: 65969
  derived and/or modified CDS sequence (opt1) from hemagglutinin__InfluenzaA__ABW91295

SEQ ID NO: 66198 - RNA, 1698 nt, Artificial Sequence; identical to SEQ ID NO: 65938
  derived and/or modified CDS sequence (opt1) from hemagglutinin__InfluenzaA__ABW91306

SEQ ID NO: 66199 - RNA, 1698 nt, Artificial Sequence; identical to SEQ ID NO: 65938
  derived and/or modified CDS sequence (opt1) from hemagglutinin__InfluenzaA__ABW91317

SEQ ID NO: 66200 - RNA, 1698 nt, Artificial Sequence
  derived and/or modified CDS sequence (opt1) from hemagglutinin__InfluenzaA__ABW91328
augaaggugaagcugcucauccugcugugcaccuucaccgccacguacgccgacaccaucugcaucggcuaccacgcgaacaacagcaccgacaccgucgacacggugcucgagaagaacgugaccgucacccacuccgugaaccugcuggaggacagccacaacgggaagcucugccugcugaagggcaucgcgccccuccagcuggggaacugcuccguggccggcuggauccuggggaacccggagugcgagcuccugaucagcaaggaguccuggagcuacaucgucgagacccccaaccccgagaacggcacgugcuaccccggcuacuucgccgacuacgaggagcugcgcgagcagcucuccagcguguccagcuucgagcgguucgagaucuucccgaaggaguccagcuggcccaaccacaccgugaccggggucuccgccagcugcucccacaacggcaagagcuccuucuaccgcaaccugcuguggcucaccgggaagaacggccuguaccccaaccugagcaaguccuacgccaacaacaaggagaaggaggugcucgugcuguggggcguccaccacccgcccaacaucggggaccagcgggcccuguaccacacggagaacgccuacgugagcguggucagcucccacuacagccgccgguucacccccgagaucgccaagcgccccaaggugcgggaccaggagggccgcaucaacuacuacuggacccuccuggagcccggggacaccaucaucuucgaggcgaacggcaaccugaucgccccgcgguucgccuucgcccucucccgcggguucggcagcggcaucaucacguccaacgcccccauggacgagugcgacgcgaagugccagacgccccagggggccaucaacagcucccugcccuuccagaacgugcacccggucaccaucggcgagugccccaaguacgugcggagcaccaagcugcgcauggugaccgggcuccggaacauccccuccauccagagccgcggccuguucggggccaucgccggcuucaucgagggcggguggaccggcauggucgacgggugguacggcuaccaccaccagaacgagcagggguccggcuacgccgcggaccagaaguccacccagaacgccaucaacggcaucaccaacaaggugaacagcgugaucgagaagaugaacacgcaguucaccgccgucgggaaggaguucaacaagcuggagcggcgcauggagaaccucaacaagaagguggacgacggcuuccuggacaucuggaccuacaacgccgagcugcucguccugcuggagaacgagcggacccucgacuuccacgacagcaacgugaagaaccuguacgagaaggugcgcucccagcugaagaacaacgccaaggagaucgggaacggcugcuucgaguucuaccacaagugcaacgacgagugcauggagagcgucaagaacgggacguacgacuaccccaaguacuccgaggagagcaagcucaaccgggagaagaucgacggcgugaagcuggaguccaugggcguguaccagauccuggcgaucuacagcaccgucgccagcucccucgugcugcuggugagccucggggccaucuccuucuggaugugcagcaacggcucccugcagugccgcaucugcaucuga

SEQ ID NO: 66201 - RNA, 1698 nt, Artificial Sequence; identical to SEQ ID NO: 65938
  derived and/or modified CDS sequence (opt1) from hemagglutinin__InfluenzaA__ABW91339

SEQ ID NO: 66202 - RNA, 1698 nt, Artificial Sequence; identical to SEQ ID NO: 65938
  derived and/or modified CDS sequence (opt1) from hemagglutinin__InfluenzaA__ABW91350

SEQ ID NO: 66203 - RNA, 1698 nt, Artificial Sequence
  derived and/or modified CDS sequence (opt1) from hemagglutinin__InfluenzaA__ABW91361
augaaggugaagcugcucguccugcugugcaccuucaccgccacguacgccgacaccaucugcaucggcuaccacgcgaacaacagcaccgacaccguggacacggugcucgagaagaacgucaccgugacccacuccgugaaccugcuggaggacagccacaacgggaagcucugccugcugaagggcaucgcgccccuccagcuggggaacugcuccgucgccggcuggauccuggggaacccggagugcgagcuccugaucagcaaggaguccuggagcuacaucguggagacccccaaccccgagaacggcacgugcuaccccggcuacuucgccgacuacgaggagcugcgcgagcagcucuccagcguguccagcuucgagcgguucgagaucuucccgaaggaguccagcuggcccaaccacaccgucaccgggguguccgccagcugcucccacaacggcgagagcuccuucuaccgcaaccugcuguggcucaccgggaagaacggccuguaccccaaccugagcaaguccuacgccaacaacaaggagaaggaggugcucguccuguggggcgugcaccacccgcccaacaucggggaccagcgggcccuguaccacacggagaacgccuacgugagcgucgugagcucccacuacagccgccgguucacccccgagaucgccaagcgccccaaggugcgggaccaggagggccgcaucaacuacuacuggacccuccuggagcccggggacaccaucaucuucgaggcgaacggcaaccugaucgccccgcgguucgccuucgcccucucccgcggguucggcagcggcaucaucacguccaacgcccccauggacaagugcgacgcgaagugccagacgccccagggggccaucaacagcucccugcccuuccagaacguccacccggugaccaucggcgagugccccaaguacgugcggagcaccaagcugcgcauggucaccgggcuccggaacauccccuccauccagacccgcggccuguucggggccaucgccggcuucaucgagggcggguggaccggcaugguggacgggugguacggcuaccaccaccagaacgagcaggggagcggcuacgccgcggaccagaaguccacccagaacgccaucaacggcaucacgaacaaggugaacagcgucaucgagaagaugaacacccaguucaccgccguggggaaggaguucaacaagcuggagcggcgcauggagaaccucaacaagaaggucgacgacggcuuccuggacaucuggaccuacaacgccgagcugcucgugcugcuggagaacgagcggacgcucgacuuccacgacuccaacgugaagaaccuguacgagaaggucaagagccagcugaagaacaacgccaaggagaucgggaacggcugcuucgaguucuaccacaagugcaacgacgagugcauggaguccgugaagaacgggaccuacgacuaccccaaguacagcgaggaguccaagcucaaccgcgagaagaucgacggcgugaagcuggagagcaugggcgucuaccagauccuggcgaucuacuccaccguggccagcagccucgugcugcuggucucccucggggccaucagcuucuggaugugcuccaacggcagccugcagugccggaucugcaucuga

SEQ ID NO: 66204 - RNA, 1698 nt, Artificial Sequence; identical to SEQ ID NO: 65938
  derived and/or modified CDS sequence (opt1) from hemagglutinin__InfluenzaA__ABW91372

SEQ ID NO: 66205 - RNA, 1698 nt, Artificial Sequence; identical to SEQ ID NO: 65971
  derived and/or modified CDS sequence (opt1) from hemagglutinin__InfluenzaA__ABW91383

SEQ ID NO: 66206 - RNA, 1701 nt, Artificial Sequence; identical to SEQ ID NO: 66011
  derived and/or modified CDS sequence (opt1) from hemagglutinin__InfluenzaA__ABW91394

SEQ ID NO: 66207 - RNA, 1698 nt, Artificial Sequence; identical to SEQ ID NO: 65980
  derived and/or modified CDS sequence (opt1) from hemagglutinin__InfluenzaA__ABW91405

SEQ ID NO: 66208 - RNA, 1698 nt, Artificial Sequence
  derived and/or modified CDS sequence (opt1) from hemagglutinin__InfluenzaA__ABW91416
augaaggugaagcugcucguccugcugugcaccuucaccgccacguacgccgacaccaucugcaucggcuaccacgcgaacaacagcaccgacaccguggacacggugcucgagaagaacgucaccgugacccacuccgugaaccugcuggaggacagccacaacgggaagcucugccugcugaagggcaucgcgccccuccagcuggggaacugcuccgucgccggcuggauccuggggaacccggagugcgagcuccugaucagcaaggaguccuggagcuacaucguggagacccccaaccccgagaacggcacgugcuaccccggcuacuucgccgacuacgaggagcugcgcgagcagcucuccagcguguccagcuucgagcgguucgagaucuucccgaaggaguccagcuggcccaaccacaccgucaccgggguguccgccagcugcucccacaacggcaagagcuccuucuaccgcaaccugcuguggcucaccgggaagaacggccuguaccccaaccugagcaaguccuacgccaacaacaaggagaaggaggugcucguccuguggggcgugcaccacccgcccaacaucggggaccagaaggcccuguaccacacggagaacgccuacgugagcgucgugagcucccacuacagccggcgcuucacccccgagaucgccaagcggcccaaggugcgcgaccaggagggccggaucaacuacuacuggacccuccuggagcccggggacaccaucaucuucgaggcgaacggcaaccugaucgccccgcgcuucgccuucgcccucucccggggguucggcagcggcaucaucacguccaacgcccccaugggggagugcgacgcgaagugccagacgccccagggcgccaucaacagcucccugcccuuccagaacguccacccggugaccaucggggagugccccaaguacgugcgcagcgccaagcugcggauggucaccggccuccgcaacauccccuccauccagagccgggggcuguucggcgccaucgccggcuucaucgagggcggguggaccgggaugguggacggcugguacggguaccaccaccagaacgagcagggcuccggcuacgcggccgaccagaaguccacccagaacgccaucaacgggaucaccaacaaggugaacagcgucaucgagaagaugaacacccaguucacggccgugggcaaggaguucaacaagcuggagcgccggauggagaaccucaacaagaaggucgacgacggguuccuggacaucuggaccuacaacgccgagcugcucgugcugcuggagaacgagcgcacccucgacuuccacgacagcaacgugaagaaccuguacgagaaggucaagucccagcugaagaacaacgcgaaggagaucggcaacgggugcuucgaguucuaccacaagugcaacgacgagugcauggagagcgugaagaacggcaccuacgacuaccccaaguacuccgaggagagcaagcucaaccgggagaagaucgacggcgugaagcuggaguccaugggggucuaccagauccuggccaucuacagcacgguggccagcucccucgugcugcuggucagccucggcgccaucuccuucuggaugugcagcaacgggucccugcagugccgcaucugcaucuga

SEQ ID NO: 66209 - RNA, 1698 nt, Artificial Sequence; identical to SEQ ID NO: 66083
  derived and/or modified CDS sequence (opt1) from hemagglutinin__InfluenzaA__ABW91427

SEQ ID NO: 66210 - RNA, 1701 nt, Artificial Sequence; identical to SEQ ID NO: 65952
  derived and/or modified CDS sequence (opt1) from hemagglutinin__InfluenzaA__ABW91438

SEQ ID NO: 66211 - RNA, 1698 nt, Artificial Sequence; identical to SEQ ID NO: 65980
  derived and/or modified CDS sequence (opt1) from hemagglutinin__InfluenzaA__ABW91449

SEQ ID NO: 66212 - RNA, 1698 nt, Artificial Sequence; identical to SEQ ID NO: 65980
  derived and/or modified CDS sequence (opt1) from hemagglutinin__InfluenzaA__ABW91460

SEQ ID NO: 66213 - RNA, 1698 nt, Artificial Sequence
  derived and/or modified CDS sequence (opt1) from hemagglutinin__InfluenzaA__ABW91471
augaaggugaagcugcucguccugcugugcaccuucaccgccacguacgccgacaccaucugcaucggcuaccacgcgaacaacagcaccgacaccguggacacggugcucgagaagaacgucaccgugacccacuccgugaaccugcuggaggacagccacaacgggaagcucugccugcugaagggcgucgcgccccuccagcuggggaacugcuccguggccggcuggauccuggggaacccggagugcgagcuccugaucagcaaggaguccuggagcuacaucguggagacccccaaccccgagaacggcacgugcuaccccggcuacuucgccgacuacgaggagcugcgcgagcagcucuccagcgucuccagcuucgagcgguucgagaucuucccgaaggaguccagcuggcccaaccacaccgugaccgggguguccgccagcugcucccacaacggcaagagcuccuucuaccgcaaccugcuguggcucaccgggaagaacggccuguaccccaaccugagcaaguccuacgccaacaacaaggagaaggagguccucgugcuguggggcgugcaccacccgcccaacaucggggaccagcgggcccuguaccacacggagaacgccuacgucagcguggugagcucccacuacagccgccgguucacccccgagaucgccaagcgccccaagguccgggaccaggagggccgcaucaacuacuacuggacccuccuggagcccggggacaccaucaucuucgaggcgaacggcaaccugaucgccccgcgguucgccuucgcccucucccgcggguucggcagcggcaucaucacguccaacgcccccauggacgagugcgacgcgaagugccagacgccccagggggccaucaacagcucccugcccuuccagaacgugcacccggugaccaucggcgagugccccaaguacguccggagcaccaagcugcgcauggugaccgggcuccggaacauccccuccauccagagccgcggccuguucggggccaucgccggcuucaucgagggcggguggaccggcaugguggacgggugguacggcuaccaccaccagaacgagcagggguccggcuacgccgcggaccagaaguccacccagaacgccaucaacggcaucaccaacaaggucaacagcgugaucgagaagaugaacacgcaguucaccgccgucgggaaggaguucaacaagcuggagcggcgcauggagaaccucaacaagaagguggacgacggcuuccuggacaucuggaccuacaacgccgagcugcucgugcugcuggagaacgagcggacccucgacuuccacgacagcaacgucaagaaccuguacgagaaggugaagucccagcugaagaacaacgccaaggagaucgggaacggcugcuucgaguucuaccacaagugcaacgacgagugcauggagagcgugaagaacgggacguacgacuaccccaaguacuccgaggagagcaagcucaaccgcgagaagaucgacggcgucaagcuggaguccaugggcguguaccagauccuggcgaucuacagcaccguggccagcucccucguccugcuggugagccucggggccaucuccuucuggaugugcagcaacggcucccugcagugccggaucugcaucuga

SEQ ID NO: 66214 - RNA, 1698 nt, Artificial Sequence
  derived and/or modified CDS sequence (opt1) from hemagglutinin__InfluenzaA__ABW91482
augaaggugaagcugcucguccugcugugcaccuucaccgccacguacgccgacaccaucugcaucggcuaccacgcgaacaacagcaccgacaccguggacacggugcucgagaagaacgucaccgugacccacuccgugaaccugcuggaggaccgccacaacgggaagcucugccugcugaagggcaucgcgccccuccagcuggggaacugcagcgucgccggcuggauccuggggaacccggagugcgagcuccugaucuccaaggagagcugguccuacaucguggagacccccaaccccgagaacggcacgugcuaccccggcuacuucgccgacuacgaggagcugcgggagcagcucagcuccgugagcuccuucgagcgcuucgagaucuucccgaaggagagcuccuggcccaaccacaccgucaccggggugagcgccuccugcagccacaacggccgguccagcuucuaccgcaaccugcuguggcucaccgggaagaacggccuguaccccaaccugucccggagcuacgccaacaacaaggagaaggaggugcucguccuguggggcgugcaccacccgcccaacaucggggaccagcgcgcccuguaccacacggagaacgccuacguguccgucgugagcagccacuacucccggcgcuucacccccgagaucgccaagcggcccaaggugcgcgaccaggagggccggaucaacuacuacuggacccuccuggagcccggggacaccaucaucuucgaggcgaacggcaaccugaucgccccgcgcuucgccuucgcccucagccggggguucggcuccggcaucaucacgagcaacgcccccauggacgagugcgacgcgaagugccagacgccccagggggccaucaacuccagccugcccuuccagaacguccacccggugaccaucggcgagugccccaaguacgugcgcuccgccaagcugcggauggucaccgggcuccgcaacauccccagcauccagucccggggccuguucggggccaucgccggcuucaucgagggcggguggaccggcaugguggacgggugguacggcuaccaccaccagaacgagcaggggagcggcuacgcggccgaccagaaguccacccagaacgccaucaacggcaucaccaacaaggugaacagcgucaucgagaagaugaacacccaguucacggccguggggaaggaguucaacaagcuggagcgccggauggagaaccucaacaagaaggucgacgacggcuuccuggacaucuggaccuacaacgccgagcugcucgugcugcuggagaacgagcgcacccucgacuuccacgacuccaacgugaagaaccuguacgagaaggucaagagccagcugaagaacaacgcgaaggagaucgggaacggcugcuucgaguucuaccacaagugcaacgacgagugcauggaguccgugaagaacgggaccuacgacuaccccaaguacagcgaggaguccaagcucaaccgggagaagaucgacggcgugaagcuggagagcaugggcgucuaccagauccuggccaucuacuccacgguggccagcagccucgugcugcuggucucccucggggccaucagcuucuggaugugcuccaacggcagccugcagugccgcaucugcaucuga

SEQ ID NO: 66215 - RNA, 1698 nt, Artificial Sequence
  derived and/or modified CDS sequence (opt1) from hemagglutinin__InfluenzaA__ABW91493
augaaggugaagcugcucauccugcugugcaccuucaccgccacguacgccgacaccaucugcaucggcuaccacgcgaacaacagcaccgacaccgucgacacggugcucgagaagaacgugaccgucacccacuccgugaaccugcuggaggacagccacaacgggaagcucugccugcugaagggcaucgcgccccuccagcuggggaacugcuccguggccggcuggauccuggggaacccggagugcgagcuccugaucagcaaggaguccuggagcuacaucgucgagacccccaaccccgagaacggcacgugcuaccccggcuacuucgccgacuacgaggagcugcgcgagcagcucuccagcguguccagcuucgagcgguucgagaucuucccgaaggaguccagcuggcccaaccacaccgugaccggggucuccgccagcugcucccacaacggcaagagcuccuucuaccgcaaccugcuguggcucaccgggaagaacggccuguaccccaaccugagcaaguccuacgccaacaacaaggagaaggaggugcucgugcuguggggcguccaccacccgcccaacaucggggaccagcgggcccuguaccacacggagaacgccuacgugagcguggucagcucccacuacagccgccgguucacccccgagaucgccaagcgccccaaggugcgggaccaggagggccgcaucaacuacuacuggacccuccuggagcccggggacaccaucaucuucgaggcgaacggcaaccugaucgccccgcgguucgccuucgcccucucccgcggguucggcagcggcaucaucacguccaacgcccccauggacgagugcgacgcgaagugccagacgccccagggggccaucaacagcucccugcccuuccagaacgugcacccggucaccaucggcgagugccccaaguacgugcggagcaccaagcugcgcauggugaccgggcuccggaacauccccuccauccagagccgcggccuguucggggccaucgccggcuucaucgagggcggguggaccggcauggucgacgggugguacggcuaccaccaccagaacgagcagggguccggcuacgccgcggaccagaaguccacccagaacgccaucaacggcaucaccaacaaggugaacagcgugaucgagaagaugaacacgcaguucaccgccgucgggaaggaguucaacaagcuggagaagcggauggagaaccucaacaagaagguggacgacggcuuccuggacaucuggaccuacaacgccgagcugcucguccugcuggagaacgagcgcacccucgacuuccacgacagcaacgugaagaaccuguacgagaaggugaagucccagcugaagaacaacgccaaggagaucgggaacggcugcuucgaguucuaccacaagugcaacgacgagugcauggagagcgucaagaacgggacguacgacuaccccaaguacuccgaggagagcaagcucaaccgggagaagaucgacggcgugaagcuggaguccaugggcguguaccagauccuggcgaucuacagcaccgucgccagcucccucgugcugcuggugagccucggggccaucuccuucuggaugugcagcaacggcucccugcagugccgcaucugcaucuga

SEQ ID NO: 66216 - RNA, 1698 nt, Artificial Sequence; identical to SEQ ID NO: 65954
  derived and/or modified CDS sequence (opt1) from hemagglutinin__InfluenzaA__ABW91504

SEQ ID NO: 66217 - RNA, 1698 nt, Artificial Sequence
  derived and/or modified CDS sequence (opt1) from hemagglutinin__InfluenzaA__ABW91515
augaaggugaagcugcucguccugcugugcaccuucaccgccacguacgccgacaccaucugcaucggcuaccacgcgaacaacagcaccgacaccguggacacggugcucgagaagaacgucaccgugacccacuccgugaaccugcuggaggaccgccacaacgggaagcucugccugcugaagggcaucgcgccccuccagcuggggaacugcagcgucgccggcuggauccuggggaacccggagugcgagcuccugaucuccaaggagagcugguccuacgugguggagacccccaaccccgagaacggcacgugcuaccccggcuacuucgccgacuacgaggagcugcgggagcagcucagcuccgucagcuccuucgagcgcuucgagaucuucccgaaggagagcuccuggcccaaccacaccgugaccggggugagcgccuccugcagccacaacggcaaguccagcuucuaccggaaccugcuguggcucaccgggaagaacggccuguaccccaaccuguccaagagcuacgccaacaacaaggagaaggagguccucgugcuguggggcgugcaccacccgcccaacaucggggaccagcgcgcccuguaccacacggagaacgccuacgucuccguggugagcagccacuacucccggcgcuucacccccgagaucgccaagcggcccaagguccgcgaccaggagggccggaucaacuacuacuggacccuccuggagcccggggacaccaucaucuucgaggcgaacggcaaccugaucgccccgcgcuucgccuucgcccucagccggggguucggcuccggcaucaucacgagcaacgcccccauggacgagugcgacgcgaagugccagacgccccagggggccaucaacuccagccugcccuuccagaacgugcacccggugaccaucggcgagugccccaaguacguccgcuccgccaagcugcggauggugaccgggcuccgcaacauccccagcauccagucccggggccuguucggggccaucgccggcuucaucgagggcggguggaccggcaugguggacgggugguacggcuaccaccaccagaacgagcaggggagcggcuacgcggccgaccagaaguccacccagaacgccaucaacggcaucaccaacaaggucaacagcgugaucgagaagaugaacacccaguucacggccgucgggaaggaguucaacaagcuggagcgccggauggagaaccucaacaagaagguggacgacggcuuccuggacaucuggaccuacaacgccgagcugcucgugcugcuggagaacgagcgcacccucgacuuccacgacuccaacgucaagaaccuguacgagaaggucaagagccagcugaagaacaacgcgaaggagaucgggaacggcugcuucgaguucuaccacaagugcaacgacgagugcauggaguccgugaagaacgggaccuacgacuaccccaaguacagcgaggaguccaagcucaaccgggagaagaucgacggcgugaagcuggagagcaugggcguguaccagauccuggccaucuacuccacgguggccagcagccucguccugcuggugucccucggggccaucagcuucuggaugugcuccaacggcagccugcagugccgcaucugcaucuga

SEQ ID NO: 66218 - RNA, 1698 nt, Artificial Sequence
  derived and/or modified CDS sequence (opt1) from hemagglutinin__InfluenzaA__ABW91526
augaaggugaagcugcucguccugcugugcaccuucaccgccacguacgccgacaccaucugcaucggcuaccacgcgaacaacagcaccgacaccguggacacggugcucgagaagaacgucaccgugacccacuccgugaaccugcuggaggacagccacaacgggaagcucugccugcugaagggcaucgcgccccuccagcuggggaacugcuccgucgccggcuggauccuggggaacccggagugcgagcuccugaucagcaaggaguccuggagcuacaucguggagacccccaaccccgagaacggcacgugcuaccccggcuacuucgccgacuacgaggagcugcgcgagcagcucuccagcguguccagcuucgagcgguucgagaucuucccgaaggaguccagcuggcccaaccacaccgucaccgggguguccgccagcugcucccacaacggcaagagcuccuucuaccgcaaccugcuguggcucaccgggaagaacggccuguaccccaaccugagcaaguccuacgccaacaacaaggagaaggaggugcucguccuguggggcgugcaccacccgcccaacaucggggaccagcgggcccuguaccacacggagaacgccuacgugagcgucgugagcucccacuacagccgccgguucacccccgagaucgccaagcgccccaaggugcgggagcaggagggccgcaucaacuacuacuggacccuccuggagcccggggacaccaucaucuucgaggcgaacggcaaccugaucgccccgcgguucgccuucgcccucucccgcggguucggcagcggcaucaucacguccaacgcccccauggacgagugcgacgcgaagugccagacgccccagggggccaucaacagcucccugcccuuccagaacguccacccggugaccaucggcgagugccccaaguacgugcggagcacccgccugcggauggucaccgggcuccgcaacauccccuccauccagagccggggccuguucggggccaucgccggcuucaucgagggcggguggaccggcaugguggacgggugguacggcuaccaccaccagaacgagcagggguccggcuacgccgcggaccagaaguccacccagaacgccaucaacggcaucaccaacaaggugaacagcgucaucgagaagaugaacacgcaguucaccgccguggggaaggaguucaacaagcuggagcgccggauggagaaccucaacaagaaggucgacgacggcuuccuggacaucuggaccuacaacgccgagcugcucgugcugcuggagaacgagcgcacccucgacuuccacgacagcaacgugaagaaccuguacgagaaggucaagucccagcugaagaacaacgccaaggagaucgggaacggcugcuucgaguucuaccacaagugcaacgacgagugcauggagagcgugaagaacgggacguacgacuaccccaaguacuccgaggagagcaagcucaaccgggagaagaucgacggcgugaagcuggaguccaugggcgucuaccagauccuggcgaucuacagcaccguggccagcucccucgugcugcuggucagccucggggccaucuccuucuggaugugcagcaacggcucccugcagugccgcaucugcaucuga

SEQ ID NO: 66219 - RNA, 1698 nt, Artificial Sequence; identical to SEQ ID NO: 65938
  derived and/or modified CDS sequence (opt1) from hemagglutinin__InfluenzaA__ABW91537

SEQ ID NO: 66220 - RNA, 1701 nt, Artificial Sequence; identical to SEQ ID NO: 66011
  derived and/or modified CDS sequence (opt1) from hemagglutinin__InfluenzaA__ABW91548

SEQ ID NO: 66221 - RNA, 1698 nt, Artificial Sequence
  derived and/or modified CDS sequence (opt1) from hemagglutinin__InfluenzaA__ABW91559
augaaggugaagcugcucauccugcugugcaccuucaccgccacguacgccgacaccaucugcaucggcuaccacgcgaacaacagcaccgacaccgucgacacggugcucgagaagaacgugaccgucacccacuccgugaaccugcuggaggacagccacaacgggaagcucugccugcugaagggcaucgcgccccuccagcuggggaacugcuccguggccggcuggauccuggggaacccggagugcgagcuccugaucagcaaggaguccuggagcuacaucgucgagacccccaaccccgagaacggcacgugcuaccccggcuacuucgccgacuacgaggagcugcgcgagcagcucuccagcguguccagcuucgagcgguucgagaucuucccgaaggaguccagcuggcccaaccacaccgugaccggggucuccgccagcugcucccacaacggcaagagcuccuucuaccgcaaccugcuguggcucaccgggaagaacggccuguaccccaaccugagcaaguccuacgccaacaacaaggagaaggaggugcucgugcuguggggcguccaccacccgcccaacaucggggaccagcgggcccuguaccacacggagaacgccuacgugagcguggucagcucccacuacagccgccgguucacccccgagaucgccaagcgccccaaggugcgggaccaggagggccgcaucaacuacuacuggacccuccuggagcccggggacaccaucaucuucgaggcgaacggcaaccugaucgccccgcgguucgccuucgcccucucccgcggguucggcagcggcaucaucacguccaacgcccccauggacgagugcgacgcgaagugccagacgccccagggggccaucaacagcucccugcccuuccagaacgugcacccggucaccaucggcgagugccccaaguacgugcggagcaccaagcugcgcauggugaccgggcuccggaacauccccuccauccagagccgcggccuguucggggccaucgccggcuucaucgagggcggguggaccggcauggucgacgggugguacggcuaccaccaccagaacgagcagggguccggcuacgccgcggaccagaaguccacccagaacgccaucaacggcaucaccaacaaggugaacagcgugaucgagaagaugaacacgcaguucaccgccgucgggaaggaguucaacaagcuggagcggcgcauggagaaccucaacaagaagguggacgacggcuuccuggacaucuggaccuacaacgccgagcugcucguccugcuggagaacgagcggacccucgacuuccacgacagcaacgugaagaaccuguacgagaaggugaagucccagcugaagaacaacgccaaggagaucgggaacggcugcuucgaguucuaccacaagugcaacgacgagugcauggagagcgucaagaacgggacguacgacuaccccaaguacuccgaggagagcaagcucuaccgcgagaagaucgacggcgugaagcuggaguccaugggcguguaccagauccuggcgaucuacagcaccgucgccagcucccucgugcugcuggugagccucggggccaucuccuucuggaugugcagcaacggcucccugcagugccggaucugcaucuga

SEQ ID NO: 66222 - RNA, 1698 nt, Artificial Sequence; identical to SEQ ID NO: 66079
  derived and/or modified CDS sequence (opt1) from hemagglutinin__InfluenzaA__ABW91570

SEQ ID NO: 66223 - RNA, 1698 nt, Artificial Sequence; identical to SEQ ID NO: 65954
  derived and/or modified CDS sequence (opt1) from hemagglutinin__InfluenzaA__ABW91581

SEQ ID NO: 66224 - RNA, 1698 nt, Artificial Sequence; identical to SEQ ID NO: 65934
  derived and/or modified CDS sequence (opt1) from hemagglutinin__InfluenzaA__ABW91592

SEQ ID NO: 66225 - RNA, 1698 nt, Artificial Sequence; identical to SEQ ID NO: 65980
  derived and/or modified CDS sequence (opt1) from hemagglutinin__InfluenzaA__ABW91603

SEQ ID NO: 66226 - RNA, 1698 nt, Artificial Sequence
  derived and/or modified CDS sequence (opt1) from hemagglutinin__InfluenzaA__ABW91614
augaaggugaagcugcucguccugcugugcaccuucaccgccacguacgccgacaccaucugcaucggcuaccacgcgaacaacagcaccgacaccguggacacggugcucgagaagaacgucaccgugacccacuccgugaaccugcuggaggacagccacaacgggaagcucugccugcugaagggcaucgcgccccuccagcuggggaacugcuccgucgccggcuggauccuggggaacccggagugcgagcuccugaucagcaaggaguccuggagcuacaucguggagacccccucccccgagaacggcacgugcuaccccggcuacuucgccgacuacgaggagcugcgcgagcagcucagcuccgugagcuccuucgagcgguucgagaucuucccgaaggagagcuccuggcccaaccacaccgucaccggggugagcgccuccugcagccacaacggcaaguccagcuucuaccgcaaccugcuguggcucaccgggaagaacggccuguaccccaaccuguccaagagcuacgccaacaacaaggagaaggaggugcucguccuguggggcgugcaccacccgcccaacaucggggaccagcgggcccuguaccacacggagaacgccuacgugagcgucguguccagccacuacucccgccgguucacccccgagaucgccaagcgccccaaggugcgggaccaggagggccgcaucaacuacuacuggacccuccuggagcccggggacaccaucaucuucgaggcgaacggcaaccugaucgccccgcgguucgccuucgcccucagccgcggguucggcuccggcaucaucagcuccaacgcccccaugggggagugcgacgcgaagugccagacgccccagggcgccaucaacagcucccugcccuuccagaacguccacccggugaccaucggggagugccccaaguacgugcggagcgccaagcugcgcauggucaccggccuccggaacauccccuccauccagagccgcgggcuguucggcgccaucgccggcuucaucgagggcggguggaccgggaugguggacggcugguacggguaccaccaccagaacgagcagggcuccggcuacgcggccgaccagaaguccacgcagaacgccaucaacgggaucaccaacaaggugaacagcgucaucgagaagaugaacacccaguucaccgccgugggcaaggaguucaacaagcuggagcggcgcauggagaaccucaacaagaaggucgacgacggguuccuggacaucuggacguacaacgccgagcugcucgugcugcuggagaacgagcggacccucgacuuccacgacagcaacgugaagaaccuguacgagaaggucaagucccagcugaagaacaacgcgaaggagaucggcaacgggugcuucgaguucuaccacaagugcaacgacgagugcauggagagcgugaagaacggcaccuacgacuaccccaaguacuccgaggagagcaagcucaaccgcgagaagaucgacggcgugaagcuggagagcaugggggucuaccagauccuggccaucuacuccaccguggccagcucccucgugcugcuggucagccucggcgccaucuccuucuggaugugcagcaacgggucccugcagugccggaucugcaucuga

SEQ ID NO: 66227 - RNA, 1698 nt, Artificial Sequence; identical to SEQ ID NO: 65969
  derived and/or modified CDS sequence (opt1) from hemagglutinin__InfluenzaA__ABW91625

SEQ ID NO: 66228 - RNA, 1698 nt, Artificial Sequence; identical to SEQ ID NO: 65938
  derived and/or modified CDS sequence (opt1) from hemagglutinin__InfluenzaA__ABW91636

SEQ ID NO: 66229 - RNA, 1701 nt, Artificial Sequence; identical to SEQ ID NO: 66011
  derived and/or modified CDS sequence (opt1) from hemagglutinin__InfluenzaA__ABW91647

SEQ ID NO: 66230 - RNA, 1707 nt, Artificial Sequence
  derived and/or modified CDS sequence (opt1) from hemagglutinin__InfluenzaA__ABX10515
auggagaagaucgugcugcuguucgccaucgucagccuggugaaguccgaccagaucugcaucggcuaccacgccaacaacagcaccgagcaggucgacaccaucauggagaagaacgugacggugacccacgcgcaggacauccuggagaagacccacaacgggaagcucugcgaccuggacggcgugaagccccugauccuccgcgacugcuccgucgccggguggcugcugggcaacccgaugugcgacgaguucaucaacgugcccgaguggagcuacaucguggagaaggccaaccccgucaacgaccucugcuaccccggggacuucaacgacuacgaggagcugaagcaccuccucucccggaucaaccacuucgagaagauccagaucauccccaagagcuccuggagcucccacgaggugagccugggcguguccagcgccugcccguaccagggcaaguccagcuucuuccgcaacgucguguggcugaucaagaagaacuccaccuaccccacgaucaagcggagcuacaacaacaccaaccaggaggaccuccuggugcugugggggauccaccaccccaacgacgccgcggagcagaccaagcucuaccagaacccgaccacguacaucuccgucggcaccagcacccugaaccagcgccuggugccccggaucgccacccgcuccaaggugaacgggcagagcggccggauggaguucuucuggacgauccucaagcccaacgacgccaucaacuucgagagcaacgggaacuucaucgcccccgaguacgcguacaagaucgucaagaagggcgacuccaccaucaugaaguccgagcuggaguacggcaacugcaacaccaagugccagaccccgaugggggccaucaacagcagcaugcccuuccacaacauccacccccugacgaucggcgagugccccaaguacgugaaguccaaccgccucgugcuggccaccgggcugcggaacagcccgcagcgcgagcggcgccggaagaagcgcggccucuucggcgccaucgccggguucaucgagggcggguggcagggcauggucgacgggugguacggcuaccaccacuccaacgagcagggcagcggguacgcggccgacaaggaguccacccagaaggccaucgacggcgugaccaacaaggugaacagcaucaucgacaagaugaacacgcaguucgaggccgucgggcgggaguucaacaaccuggagcgccggaucgagaaccugaacaagaagauggaggacggcuuccucgacguguggaccuacaacgccgagcugcugguccucauggagaacgagcgcacccuggacuuccacgacuccaacgugaagaaccuguacgacaaggugcggcuccagcugaaggacaacgcgaaggagcuggggaacggcugcuucgaguucuaccacaagugcgacaacgagugcauggagagcguccgcaacggcaccuacgacuacccccaguacuccgaggaggcccggcucaagcgcgaggagaucagcggggugaagcuggaguccaucggcaucuaccagauccugagcaucuacuccacgguggccagcucccucgcccuggccaucauggucgcggggcugagccucuggaugugcagcaacggcucccugcagugccgcaucugcaucuga

SEQ ID NO: 66231 - RNA, 1701 nt, Artificial Sequence; identical to SEQ ID NO: 65880
  derived and/or modified CDS sequence (opt1) from hemagglutinin__InfluenzaA__ABX10525

SEQ ID NO: 66232 - RNA, 1698 nt, Artificial Sequence; identical to SEQ ID NO: 65938
  derived and/or modified CDS sequence (opt1) from hemagglutinin__InfluenzaA__ABX58239

SEQ ID NO: 66233 - RNA, 1698 nt, Artificial Sequence; identical to SEQ ID NO: 66038
  derived and/or modified CDS sequence (opt1) from hemagglutinin__InfluenzaA__ABX58250

SEQ ID NO: 66234 - RNA, 1698 nt, Artificial Sequence
  derived and/or modified CDS sequence (opt1) from hemagglutinin__InfluenzaA__ABX58261
augaaggugaagcugcucauccugcugugcaccuucaccgccacguacgccgacaccaucugcaucggcuaccacgcgaacaacagcaccgacaccgucgacacggugcucgagaagaacgugaccgucacccacuccgugaaccugcuggaggacagccacaacgggaagcucugccugcugaagggcaucgcgccccuccagcuggggaacugcuccguggccggcuggauccuggggaacccggagugcgagcuccugaucagcaaggaguccuggagcuacaucgucgagacccccaaccccgagaacggcacgugcuaccccggcuacuucgccgacuacgaggagcugcgcgagcagcucuccagcguguccagcuucgagcgguucgagaucuucccgaaggaguccagcuggcccaaccacaccgugaccggggucuccgccagcugcucccacaacggcaagagcuccuucuaccgcaaccugcuguggcucaccgggaagaacggccuguaccccaaccugagcaaguccuacgccaacaacaaggagaaggaggugcucgugcuguggggcguccaccacccgcccaacaucggggaccagcgggcccuguaccacacggagaacgccuacgugagcguggucagcucccacuacagccgccgguucacccccgagaucgccaagcgccccaaggugcgggaccaggagggccgcaucaacuacuacuggucccuccuggagcccggggacaccaucaucuucgaggcgaacggcaaccugaucgccccgcgguucgccuucgcccucagccgcggguucggcuccggcaucaucaccagcaacgcccccauggacgagugcgacgcgaagugccagacgccccagggggccaucaacuccagccugcccuuccagaacgugcacccggucaccaucggcgagugccccaaguacgugcgguccaccaagcugcgcauggugaccgggcuccggaacauccccagcauccagucccgcggccuguucggggccaucgccggcuucaucgagggcggguggacgggcauggucgacgggugguacggcuaccaccaccagaacgagcaggggagcggcuacgccgcggaccagaaguccacccagaacgccaucaacggcaucaccaacaaggugaacagcgugaucgagaagaugaacacccaguucacggccgucgggaaggaguucaacaagcuggagcggcgcauggagaaccucaacaagaagguggacgacggcuuccuggacaucuggaccuacaacgccgagcugcucguccugcuggagaacgagcggacccucgacuuccacgacuccaacgugaagaaccuguacgagaaggucaagagccagcugaagaacaacgccaaggagaucgggaacggcugcuucgaguucuaccacaagugcaacgacgagugcauggaguccgugaagaacgggaccuacgacuaccccaaguacagcgaggaguccaagcucaaccgcgagaagaucgacggcgugaagcuggagagcaugggcguguaccagauccuggcgaucuacagcacggucgccuccagccucgugcugcuggugucccucggggccaucagcuucuggaugugcuccaacggcagccugcagugccggaucugcaucuga

SEQ ID NO: 66235 - RNA, 1698 nt, Artificial Sequence
  derived and/or modified CDS sequence (opt1) from hemagglutinin__InfluenzaA__ABX58272
augaaggugaagcugcucauccugcugugcaccuucaccgccacguacgccgacaccaucugcaucggcuaccacgcgaacaacagcaccgacaccgucgacacggugcucgagaagaacgugaccgucacccacuccgugaaccugcuggaggacagccacaacgggaagcucugccugcugaagggcaucgcgccccuccagcuggggaacugcuccguggccggcuggauccuggggaacccggagugcgagcuccugaucagcaaggaguccuggagcuacaucgucgagacccccaaccccgagaacggcacgugcuaccccggcuacuucgccgacuacgaggagcugcgcgagcagcucuccagcguguccagcuucgagcgguucgagaucuucccgaagaaguccagcuggcccaaccacaccgugaccggggucuccgccagcugcucccacaacggcaagagcuccuucuaccgcaaccugcuguggcucaccgggaagaacggccuguaccccaaccugagcaaguccuacgccaacaacaaggagaaggaggugcucgugcuguggggcguccaccacccgcccaacaucggggaccagcgggcccuguaccacacggagaacgccuacgugagcguggucagcucccacuacagccgccgguucacccccgagaucgccaagcgccccaaggugcgggaccaggagggccgcaucaacuacuacuggacccuccuggagcccggggacaccaucaucuucgaggcgaacggcaaccugaucgccccgcgguucgccuucgcccucucccgcggguucggcagcggcaucaucacguccaacgcccccauggacgagugcgacgcgaagugccagacgccccagggggccaucaacagcucccugcccuuccagaacgugcacccggucaccaucggcgagugccccaaguacgugcggagcaccaagcugcgcauggugaccgggcuccggaacauccccuccauccagagccgcggccuguucggggccaucgccggcuucaucgagggcggguggaccggcauggucgacgggugguacggcuaccaccaccagaacgagcagggguccggcuacgccgcggaccagaaguccacccagaacgccaucaacggcaucaccaacaaggugaacagcgugaucgagaagaugaacacgcaguucaccgccgucgggaaggaguucaacaagcuggagcggcgcauggagaaccucaacaagaagguggacgacggcuuccuggacaucuggaccuacaacgccgagcugcucguccugcuggagaacgagcggacccucgacuuccacgacagcaacgugaagaaccuguacgagaaggugaagucccagcugaagaacaacgccaaggagaucgggaacggcugcuucgaguucuaccacaagugcaacgacgagugcauggagagcgucaagaacgggacguacgacuaccccaaguacuccgaggagagcaagcucaaccgcgagaagaucgacggcgugaagcuggaguccaugggcguguaccagauccuggcgaucuacagcaccgucgccagcucccucgugcugcuggugagccucggggccaucuccuucuggaugugcagcaacggcucccugcagugccggaucugcaucuga

SEQ ID NO: 66236 - RNA, 1698 nt, Artificial Sequence; identical to SEQ ID NO: 65938
  derived and/or modified CDS sequence (opt1) from hemagglutinin__InfluenzaA__ABX58283

SEQ ID NO: 66237 - RNA, 1698 nt, Artificial Sequence; identical to SEQ ID NO: 66079
  derived and/or modified CDS sequence (opt1) from hemagglutinin__InfluenzaA__ABX58294

SEQ ID NO: 66238 - RNA, 1698 nt, Artificial Sequence; identical to SEQ ID NO: 65934
  derived and/or modified CDS sequence (opt1) from hemagglutinin__InfluenzaA__ABX58316

SEQ ID NO: 66239 - RNA, 1698 nt, Artificial Sequence; identical to SEQ ID NO: 66083
  derived and/or modified CDS sequence (opt1) from hemagglutinin__InfluenzaA__ABX58327

SEQ ID NO: 66240 - RNA, 1698 nt, Artificial Sequence; identical to SEQ ID NO: 65934
  derived and/or modified CDS sequence (opt1) from hemagglutinin__InfluenzaA__ABX58338

SEQ ID NO: 66241 - RNA, 1698 nt, Artificial Sequence
  derived and/or modified CDS sequence (opt1) from hemagglutinin__InfluenzaA__ABX58360
augaaggugaagcugcucguccugcugugcaccuucaccgccacguacgccgacaccaucugcaucggcuaccacgcgaacaacagcaccgacaccguggacacggugcucgagaagaacgucaccgugacccacuccgugaaccugcuggaggacagccacaacgggaagcucugccugcugaagggcaucgcccccauccagcucgggaacugcuccgucgccggcuggauccuggggaacccggagugcgagcugcucaucagcaaggaguccuggagcuacaucguggagacccccaaccccgagaacggcacgugcuaccccggcuacuucgccgacuacgaggagcugcgcgagcagcuguccagcguguccagcuucgagcgguucgagaucuucccgaaggaguccagcuggcccaaccacaccgucaccgggguguccgccagcugcucccacaacggcaagagcuccuucuaccgcaaccuccuguggcugaccgggaagaacggccucuaccccaaccugagcaaguccuacgcgaacaacaaggagaaggaggugcugguccucuggggcgugcaccacccgcccaacaucggggaccagcgggcccuguaccacacggagaacgccuacgugagcgucgugagcucccacuacagccgccgguucacccccgagaucgccaagcgccccaaggugcgggaccaggagggccgcaucaacuacuacuggacccugcucgagcccggggacaccaucaucuucgaggcgaacggcaaccugaucgccccgcgguucgccuucgcccugucccgcggguucggcagcggcaucaucacguccaacgcccccauggacgagugcgacgcgaagugccagacgccccagggggccaucaacagcucccuccccuuccagaacguccacccggugaccaucggcgagugccccaaguacgugcggagcaccaagcugcgcauggucaccgggcugcggaacauccccuccauccagagccgcggccucuucggggccaucgccggcuucaucgagggcggguggaccggcaugguggacgggugguacggcuaccaccaccagaacgagcagggguccggcuacgccgcggaccagaaguccacccagaacgccaucaacggcaucaccaacaaggugaacagcgucaucgagaagaugaacacgcaguucaccgccguggggaaggaguucaacaagcuggagcggcgcauggagaaccugaacaagaaggucgacgacggcuuccucgacaucuggaccuacaacgccgagcugcuggugcuccuggagaacgagcggacccuggacuuccacgacagcaacgugaagaaccucuacgagaaggucaagucccagcugaagaacaacgccaaggagaucgggaacggcugcuucgaguucuaccacaagugcaacgacgggugcauggagagcgugaagaacggcacguacgacuaccccaaguacuccgaggagagcaagcugaaccgcgagaagaucgacggcgugaagcucgaguccaugggggucuaccagauccuggcgaucuacagcaccguggccagcucccuggugcuccuggucagccugggcgccaucuccuucuggaugugcagcaacgggucccuccagugccggaucugcaucuga

SEQ ID NO: 66242 - RNA, 1698 nt, Artificial Sequence; identical to SEQ ID NO: 65938
  derived and/or modified CDS sequence (opt1) from hemagglutinin__InfluenzaA__ABX58371

SEQ ID NO: 66243 - RNA, 1698 nt, Artificial Sequence; identical to SEQ ID NO: 65938
  derived and/or modified CDS sequence (opt1) from hemagglutinin__InfluenzaA__ABX58382

SEQ ID NO: 66244 - RNA, 1698 nt, Artificial Sequence; identical to SEQ ID NO: 66079
  derived and/or modified CDS sequence (opt1) from hemagglutinin__InfluenzaA__ABX58393

SEQ ID NO: 66245 - RNA, 1698 nt, Artificial Sequence; identical to SEQ ID NO: 65938
  derived and/or modified CDS sequence (opt1) from hemagglutinin__InfluenzaA__ABX58404

SEQ ID NO: 66246 - RNA, 1698 nt, Artificial Sequence
  derived and/or modified CDS sequence (opt1) from hemagglutinin__InfluenzaA__ABX58415
augaaggugaagcugcucguccugcugugcaccuucaccgccacguacgccgacaccaucugcaucggcuaccacgcgaacaacagcaccgacaccguggacacggugcucgagaagaacgucaccgugacccacuccgugaaccugcuggaggaccgccacaacgggaagcucugccugcugaagggcaucgcgccccuccagcuggggaacugcagcgucgccggcuggauccuggggaacccggagugcgagcuccugaucuccaagaaguccuggagcuacaucguggagacccccaaccccgagaacggcacgugcuaccccggcuacuucgccgacuacgaggagcugcgggagcagcucagcuccgugagcuccuucgagcgcuucgagaucuucccgaaggagagcuccuggcccaaccacaccgucaccggggugagcgccuccugcagccacaacggcaaguccagcuucuaccggaaccugcuguggcucaccgggaagaacggccuguaccccaaccugucccgcagcuacgccaacaacaaggagaaggaggugcucguccuguggggcgugcaccacccgcccaacaucggggaccagcgggcccuguaccacacggagaacgccuacguguccgucgugagcagccacuacucccgccgguucacccccgagaucgccaagcgccccaaggugcgggaccaggagggccgcaucaacuacuacuggacccuccuggagcccggggacaccaucaucuucgaggcgaacggcaaccugaucgccccgcgguucgccuucgcccucagccgcggguucggcuccggcaucaucacgagcaacgcccccauggacgagugcgacgcgaagugccagacgccccagggggccaucaacuccagccugcccuuccagaacguccacccggugaccaucggcgagugccccaaguacgugcgguccgccaagcugcgcauggucaccgggcuccggaacauccccagcauccagucccgcggccuguucggggccaucgccggcuucaucgagggcggguggaccggcaugguggacgggugguacggcuaccaccaccagaacgagcaggggagcggcuacgcggccgaccagaaguccacccagaacgccaucaacggcaucaccaacaaggugaacagcgucaucgagaagaugaacacccaguucacggccguggggaaggaguucaacaagcuggagcggcgcauggagaaccucaacaagaaggucgacgacggcuuccuggacaucuggaccuacaacgccgagcugcucgugcugcuggagaacgagcggacccucgacuuccacgacuccaacgugaagaaccuguacgagaaggucaagagccagcugaagaacaacgcgaaggagaucgggaacggcugcuucgaguucuaccacaagugcaacgacgagugcauggaguccgugaagaacgggaccuacgacuaccccaaguacagcgaggaguccaagcucaaccgcgagaagaucgacggcgugaagcuggagagcaugggcgucuaccagauccuggccaucuacuccacgguggccagcagccucgugcugcuggucucccucggggccaucagcuucuggaugugcuccaacggcagccugcagugccggaucugcaucuga

SEQ ID NO: 66247 - RNA, 1698 nt, Artificial Sequence; identical to SEQ ID NO: 65938
  derived and/or modified CDS sequence (opt1) from hemagglutinin__InfluenzaA__ABX58426

SEQ ID NO: 66248 - RNA, 1698 nt, Artificial Sequence; identical to SEQ ID NO: 65938
  derived and/or modified CDS sequence (opt1) from hemagglutinin__InfluenzaA__ABX58437

SEQ ID NO: 66249 - RNA, 1698 nt, Artificial Sequence; identical to SEQ ID NO: 65934
  derived and/or modified CDS sequence (opt1) from hemagglutinin__InfluenzaA__ABX58448

SEQ ID NO: 66250 - RNA, 1698 nt, Artificial Sequence; identical to SEQ ID NO: 65980
  derived and/or modified CDS sequence (opt1) from hemagglutinin__InfluenzaA__ABX58459

SEQ ID NO: 66251 - RNA, 1698 nt, Artificial Sequence; identical to SEQ ID NO: 66079
  derived and/or modified CDS sequence (opt1) from hemagglutinin__InfluenzaA__ABX58470

SEQ ID NO: 66252 - RNA, 1698 nt, Artificial Sequence; identical to SEQ ID NO: 65980
  derived and/or modified CDS sequence (opt1) from hemagglutinin__InfluenzaA__ABX58481

SEQ ID NO: 66253 - RNA, 1698 nt, Artificial Sequence; identical to SEQ ID NO: 65938
  derived and/or modified CDS sequence (opt1) from hemagglutinin__InfluenzaA__ABX58492

SEQ ID NO: 66254 - RNA, 1698 nt, Artificial Sequence; identical to SEQ ID NO: 65954
  derived and/or modified CDS sequence (opt1) from hemagglutinin__InfluenzaA__ABX58503

SEQ ID NO: 66255 - RNA, 1698 nt, Artificial Sequence; identical to SEQ ID NO: 65980
  derived and/or modified CDS sequence (opt1) from hemagglutinin__InfluenzaA__ABX58525

SEQ ID NO: 66256 - RNA, 1698 nt, Artificial Sequence
  derived and/or modified CDS sequence (opt1) from hemagglutinin__InfluenzaA__ABX58536
augaaggugaagcugcucguccugcugugcaccuucaccgccacguacgccgacaccaucugcaucggcuaccacgcgaacaacagcaccgacaccguggacacggugcucgagaagaacgucaccgugacccacuccgugaaccugcuggaggaccgccacaacgggaagcucugccugcugaagggcaucgcgccccuccagcuggggaacugcagcgucgccggcuggauccuggggaacccggagugcgagcuccugaucuccaaggagcccuggagcuacaucguggagacccccaaccccgagaacggcacgugcuacccgggcuacuucgccgacuacgaggagcugcgggagcagcucuccagcguguccagcuucgagcgcuucgagaucuuccccaaggaguccagcuggcccaaccacaccgucaccgggguguccgccagcugcucccacaacggcaagagcuccuucuaccggaaccugcuguggcucaccgggaagaacggccuguaccccaaccugagccgcuccuacgccaacaacaaggagaaggaggugcucguccuguggggcgugcaccacccgcccaacaucggggaccagcgggcccuguaccacacggagaacgccuacgugagcgucguguccagccacuacagccgccgguucacccccgagaucgccaagcgccccaaggugcgggaccaggagggccgcaucaacuacuacuggacccuccuggagccgggggacaccaucaucuucgaggcgaacggcaaccugaucgcgccccgguucgccuucgcccucucccgcggguucggcagcggcaucaucacguccaacgcccccauggacgagugcgacgccaagugccagacgccccagggggccaucaacagcucccugccguuccagaacguccaccccgugaccaucggcgagugccccaaguacgugcggagcgccaagcugcgcauggucaccgggcuccggaacauccccuccauccagagccgcggccuguucggggccaucgccggcuucaucgagggcggguggaccggcaugguggacgggugguacggcuaccaccaccagaacgagcagggguccggcuacgcggccgaccagaaguccacccagaacgccaucaacggcaucaccaacaaggugaacagcgucaucgagaagaugaacacccaguucacggccguggggaaggaguucaacaagcuggagcggcgcauggagaaccucaacaagaaggucgacgacggcuuccuggacaucuggaccuacaacgccgagcugcucgugcugcuggagaacgagcggacccucgacuuccacgacagcaacgugaagaaccuguacgagaaggucaagucccagcugaagaacaacgcgaaggagaucgggaacggcugcuucgaguucuaccacaagugcaacgacgagugcauggagagcgugaagaacgggaccuacgacuacccgaaguacuccgaggagagcaagcucaaccgcgagaagaucgacggcgugaagcuggaguccaugggcgucuaccagauccuggccaucuacagcacgguggccuccagccucgugcugcuggucagccucggggccaucuccuucuggaugugcagcaacggcucccugcagugccggaucugcaucuga

SEQ ID NO: 66257 - RNA, 1698 nt, Artificial Sequence
  derived and/or modified CDS sequence (opt1) from hemagglutinin__InfluenzaA__ABX58547
augaaggugaagcugcucauccugcugugcaccuucaccgccacguacgccgacaccaucugcaucggcuaccacgcgaacaacagcaccgacaccgucgacacggugcucgagaagaacgugaccgucacccacuccgugaaccugcuggaggacagccacaacgggaagcucugccugcugaagggcaucgcgccccuccagcuggggaacugcuccguggccggcuggauccuggggaacccggagugcgagcuccugaucagcaaggaguccuggagcuacaucgucgagacccccaaccccgagaacggcacgugcuaccccggcuacuucgccgacuacgaggagcugcgcgagcagcucuccagcguguccagcuucgagcgguucgagaucuucccgaaggaguccagcuggcccaaccacaccgugaccggggucuccgccagcugcucccacaacggcaagagcuccuucuaccgcaaccugcuguggcucaccgggaagaacggccuguaccccaaccugagcaaguccuacgccaacaacaaggagaaggaggugcucgugcuguggggcguccaccacccgcccaacaucggggaccagcgggcccuguaccacacggagaacgccuacgugagcguggucagcucccacuacagccgccgguucacccccgagaucgccaagcgccccaaggugcgggaccaggagggccgcaucaacuacuacuggacccuccuggagcccggggacaccaucaucuucgaggcgaacggcaaccugaucgccccgcgguucgccuucgcccucucccgcggguucggcagcggcaucaucacguccaacgcccccauggacgagugcgacgcgaagugccagacgccccagggggccaucaacagcucccugcccuuccagaacgugcacccggucaccaucggcgagugccccaaguacgugcggagcaccaagcugcgcauggugaccgggcuccggaacauccccuccauccagacccgcggccuguucggggccaucgccggcuucaucgagggcggguggaccggcauggucgacgggugguacggcuaccaccaccagaacgagcaggggagcggcuacgccgcggaccagaaguccacccagaacgccaucaacggcaucacgaacaaggugaacagcgugaucgagaagaugaacacccaguucaccgccgucgggaaggaguucaacaagcuggagcggcgcauggagaaccucaacaagaagguggacgacggcuuccuggacaucuggaccuacaacgccgagcugcucguccugcuggagaacgagcggacgcucgacuuccacgacuccaacgugaagaaccuguacgagaaggucaagagccagcugaagaacaacgccaaggagaucgggaacggcugcuucgaguucuaccacaagugcaacgacgagugcauggaguccgugaagaacgggaccuacgacuaccccaaguacagcgaggaguccaagcucaaccgcgagaagaucgacggcgugaagcuggagagcaugggcguguaccagauccuggcgaucuacuccaccgucgccagcagccucgugcugcuggugucccucggggccaucagcuucuggaugugcuccaacggcagccugcagugccggaucugcaucuga

SEQ ID NO: 66258 - RNA, 1698 nt, Artificial Sequence
  derived and/or modified CDS sequence (opt1) from hemagglutinin__InfluenzaA__ABX58558
augaaggugaagcugcucguccugcugugcaccuucaccgccacguacgccgacaccaucugcaucggcuaccacgcgaacaacagcaccgacaccguggacacggugcucgagaagaacgucaccgugacccacuccgugaaccugcuggaggacagccacaacgggaagcucugccugcugaagggcaucgcgccccuccagcuggggaacugcuccgucgccggcuggauccuggggaacccggagugcgagcuccugaucagcaaggaguccuggagcuacaucguggagacccccaaccccgagaacggcacgugcuaccccggcuacuucgccgacuacgaggagcugcgcgagcagcucuccagcguguccagcuucgagcgguucgagaucuucccgaaggaguccagcuggcccaaccacaccgucaccgggguguccgccagcugcucccacaacggccgcagcuccuucuaccggaaccugcuguggcucaccgggaagaacggccuguaccccaaccugagcaaguccuacgccaacaacaaggagaaggaggugcucguccuguggggcgugcaccacccgcccaacaucggggaccagcgcgcccuguaccacacggagaacgccuacgugagcgucgugagcucccacuacagccggcgcuucacccccgagaucgccaagcggcccaaggugcgcgaccaggagggccggaucaacuacuacuggacccuccuggagcccggggacaccaucaucuucgaggcgaacggcaaccugaucgccccgcgcuucgccuucgcccucucccggggguucggcagcggcaucaucacguccaacgcccccauggacaagugcgacgcgaagugccagacgccccagggggccaucaacagcucccugcccuuccagaacguccacccggugaccaucggcgagugccccaaguacgugcgcagcaccaagcugcggauggucaccgggcuccgcaacauccccuccauccagagccggggccuguucggggccaucgccggcuucaucgagggcggguggaccggcaugguggacgggugguacggcuaccaccaccagaacgagcagggguccggcuacgccgcggaccagaaguccacccagaacgccaucaacggcaucaccaacaaggugaacagcgucaucgagaagaugaacacgcaguucaccgccguggggaaggaguucaacaagcuggagcgccggauggagaaccucaacaagaaggucgacgacggcuuccuggacaucuggaccuacaacgccgagcugcucgugcugcuggagaacgagcgcacccucgacuuccacgacagcaacgugaagaaccuguacgagaaggucaagucccagcugaagaacaacgccaaggagaucgggaacggcugcuucgaguucuaccacaagugcaacgacgagugcauggagagcgugaagaacgggacguacgacuaccccaaguacuccgaggagagcaagcucaaccgggagaagaucgacggcgugaagcuggaguccaugggcgucuaccagauccuggcgaucuacagcaccguggccagcucccucgugcugcuggucagccucggggccaucuccuucuggaugugcagcaacggcucccugcagugccgcaucugcaucuga

SEQ ID NO: 66259 - RNA, 1698 nt, Artificial Sequence
  derived and/or modified CDS sequence (opt1) from hemagglutinin__InfluenzaA__ABX58569
augaaggugaagcugcucauccugcugugcaccuucaccgccacguacgccgacaccaucugcaucggcuaccacgcgaacaacagcaccgacaccgucgacacggugcucgagaagaacgugaccgucacccacuccgugaaccugcuggaggacagccacaacgggaagcucugccugcugaagggcaucgcgccccuccagcuggggaacugcuccguggccggcuggauccuggggaacccggagugcgagcuccugaucagcaaggaguccuggagcuacaucgucgagacccccaaccccgagaacggcacgugcuaccccggcuacuucgccgacuacgaggagcugcgcgagcagcucuccagcguguccagcuucgagcgguucgagaucuucccgaaggaguccagcuggcccaaccacaccgccaccgggguguccgccagcugcucccacaacggcaagagcuccuucuaccgcaaccugcuguggcucaccgggaagaacggccuguaccccaaccugagcaaguccuacgccaacaacaaggagaaggagguccucgugcuguggggcgugcaccacccgcccaacaucggggaccagcgggcccuguaccacacggagaacgccuacgucagcguggugagcucccacuacagccgccgguucacccccgagaucgcgaagcgccccaagguccgggaccaggagggccgcaucaacuacuacuggacccuccuggagcccggggacaccaucaucuucgaggccaacggcaaccugaucgccccgcgguucgccuucgcccucucccgcggguucggcagcggcaucaucacguccaacgcgcccauggacgagugcgacgccaagugccagacgccccagggggccaucaacagcucccugcccuuccagaacgugcacccggugaccaucggcgagugccccaaguacguccggagcaccaagcugcgcauggugaccgggcuccggaacauccccuccauccagagccgcggccuguucggggccaucgccggcuucaucgagggcggguggaccggcaugguggacgggugguacggcuaccaccaccagaacgagcagggguccggcuacgcggccgaccagaaguccacccagaacgccaucaacggcaucaccaacaaggucaacagcgugaucgagaagaugaacacgcaguucaccgccguggggaaggaguucaacaagcuggagcggcgcauggagaaccucaacaagaaggucgacgacggcuuccuggacaucuggaccuacaacgccgagcugcucgugcugcuggagaacgagcggacccucgacuuccacgacagcaacgucaagaaccuguacgagaaggugaagucccagcugaagaacaacgcgaaggagaucgggaacggcugcuucgaguucuaccacaagugcaacgacgagugcauggagagcgugaagaacgggacguacgacuaccccaaguacuccgaggagagcaagcucaaccgcgagaagaucgacggcgucaagcuggaguccaugggcguguaccagauccuggccaucuacagcaccguggccagcucccucguccugcuggugagccucggggccaucuccuucuggaugugcagcaacggcucccugcagugccggaucugcaucuga

SEQ ID NO: 66260 - RNA, 1698 nt, Artificial Sequence; identical to SEQ ID NO: 65934
  derived and/or modified CDS sequence (opt1) from hemagglutinin__InfluenzaA__ABX58580

SEQ ID NO: 66261 - RNA, 1698 nt, Artificial Sequence; identical to SEQ ID NO: 65938
  derived and/or modified CDS sequence (opt1) from hemagglutinin__InfluenzaA__ABX58591

SEQ ID NO: 66262 - RNA, 1698 nt, Artificial Sequence
  derived and/or modified CDS sequence (opt1) from hemagglutinin__InfluenzaA__ABX58602
augaaggugaagcugcucguccugcugugcaccuucaccgccacguacgccgacaccaucugcaucggcuaccacgcgaacaacagcaccgacaccguggacacggugcucgagaagaacgucaccgugacccacuccgugaaccugcuggaggacagccacaacgggaagcucugccugcuggagggcaucgcgccccuccagcuggggaacugcuccgucgccggcuggauccuggggaacccggagugcgagcuccugaucagcaaggaguccuggagcuacaucguggagacccccaaccccgagaacggcacgugcuaccccggcuacuucgccgacuacgaggagcugcgcgagcagcucuccagcguguccagcuucgagcgguucgagaucuucccgaaggaguccagcuggcccaaccacaccgucaccgggguguccgccagcugcucccacaacggcaagagcuccuucuaccgcaaccugcuguggcucaccgggaagaacggccuguaccccaaccugagcaaguccuacgccaacaacaaggagaaggaggugcucguccuguggggcgugcaccacccgcccaacaucggggaccagcgggcccuguaccacacggagaacgccuacgugagcgucgugagcucccacuacagccgccgguucacccccgagaucgccaagcgccccaaggugcgggaccaggagggccgcaucaacuacuacuggacccuccuggagccccgggacaccaucaucuucgaggcgaacgggaaccugaucgccccgcgcuucgccuucgcccucucccggggcuucgggagcggcaucaucacguccaacgcccccaugggcgagugcgacgcgaagugccagacgccccagggggccaucaacagcucccugcccuuccagaacguccacccggugaccaucggcgagugccccaaguacgugcgcagcgccaagcugcggauggucaccgggcuccgcaacauccccuccauccagagccggggccuguucggggccaucgccggcuucaucgagggcggguggaccggcaugguggacgggugguacggcuaccaccaccagaacgagcagggguccggcuacgcggccgaccagaaguccacccagaacgccaucaacggcaucaccaacaaggugaacagcgucaucgagaagaugaacacccaguucacggccguggggaaggaguucaacaagcuggagcgccggauggagaaccucaacaagaaggucgacgacggcuuccuggacaucuggaccuacaacgccgagcugcucgugcugcuggagaacgagcgcacccucgacuuccacgacagcaacgugaagaaccuguacgagaaggucaagucccagcugaagaacaacgcgaaggagaucgggaacggcugcuucgaguucuaccacaagugcaacgacgagugcauggagagcgugaagaacgggaccuacgacuaccccaaguacuccgaggagagcaagcucaaccgggagaagaucgacggcgugaagcuggaguccaugggcgucuaccagauccuggccaucuacagcacgguggccagcucccucgugcugcuggucagccucggggccaucuccuucuggaugugcagcaacggcucccugcagugccgcaucugcaucuga

SEQ ID NO: 66263 - RNA, 1698 nt, Artificial Sequence; identical to SEQ ID NO: 65971
  derived and/or modified CDS sequence (opt1) from hemagglutinin__InfluenzaA__ABX58613

SEQ ID NO: 66264 - RNA, 1698 nt, Artificial Sequence; identical to SEQ ID NO: 65938
  derived and/or modified CDS sequence (opt1) from hemagglutinin__InfluenzaA__ABX58624

SEQ ID NO: 66265 - RNA, 1698 nt, Artificial Sequence
  derived and/or modified CDS sequence (opt1) from hemagglutinin__InfluenzaA__ABX58635
augaaggugaagcugcucguccugcugugcaccuucaccgccacguacgccgacaccaucugcaucggcuaccacgcgaacaacagcaccgacaccguggacacggugcucgagaagaacgucaccgugacccacuccgugaaccugcuggaggacagccacaacgggaagcucugccugcugaagggcaucgcgccccuccagcuggggaacugcuccgucgccggcuggauccuggggaacccggagugcgagcuccugaucagcaaggaguccuggagcuacaucguggagacccccaaccccgagaacggcacgugcuaccccggcuacuucgccgacuacgaggagcugcgcgagcagcucuccagcguguccagcuucgagcgguucgagaucuucccgaaggaguccagcuggcccaaccacaccgucaccgggguguccgccagcugcucccacaacggccgcagcuccuucuaccggaaccugcuguggcucaccgggaagaacggccuguaccccagccuguccaagagcuacgccaacaacaaggagaaggaggugcucguccuguggggcgugcaccacccgcccaacaucggggaccagcgcgcccuguaccacacggagaacgccuacgugagcgucguguccagccacuacucccggcgcuucacccccgagaucgccaagcggcccaaggugcgcgaccaggagggccggaucaacuacuacuggacccuccuggagcccggggacaccaucaucuucgaggcgaacggcaaccugaucgccccgcgcuucgccuucgcccucagccggggguucggcuccggcaucaucacgagcaacgcccccauggacgagugcgacgcgaagugccagacgccccagggggccaucaacuccagccugcccuuccagaacguccacccggugaccaucggcgagugccccaaguacgugcgcuccaccaagcugcggauggucaccgggcuccgcaacauccccagcauccagucccggggccuguucggggccaucgccggcuucaucgagggcggguggaccggcaugguggacgggugguacggcuaccaccaccagaacgagcaggggagcggcuacgccgcggaccagaaguccacccagaacgccaucaacggcaucaccaacaaggugaacagcgucaucgagaagaugaacacgcaguucaccgccguggggaaggaguucaacaagcuggagcgccggauggagaaccucaacaagaaggucgacgacggcuuccuggacaucuggaccuacaacgccgagcugcucgugcugcuggagaacgagcgcacccucgacuuccacgacuccaacgugaagaaccuguacgagaaggucaagagccagcugaagaacaacgccaaggagaucgggaacggcugcuucgaguucuaccacaagugcaacgacgagugcauggaguccgugaagaacgggacguacgacuaccccaaguacagcgaggaguccaagcucaaccgggagaagaucgacggcgugaagcuggagagcaugggcgucuaccagauccuggcgaucuacagcaccguggccuccagccucgugcugcuggucucccucggggccaucagcuucuggaugugcuccaacggcagccugcagugccgcaucugcaucuga

SEQ ID NO: 66266 - RNA, 1698 nt, Artificial Sequence; identical to SEQ ID NO: 65934
  derived and/or modified CDS sequence (opt1) from hemagglutinin__InfluenzaA__ABX58679

SEQ ID NO: 66267 - RNA, 1698 nt, Artificial Sequence; identical to SEQ ID NO: 65980
  derived and/or modified CDS sequence (opt1) from hemagglutinin__InfluenzaA__ABX58701

SEQ ID NO: 66268 - RNA, 1698 nt, Artificial Sequence; identical to SEQ ID NO: 66038
  derived and/or modified CDS sequence (opt1) from hemagglutinin__InfluenzaA__ABX58712

SEQ ID NO: 66269 - RNA, 1704 nt, Artificial Sequence
  derived and/or modified CDS sequence (opt1) from hemagglutinin__InfluenzaA__ABY19417
auggagaagaucgugcugcuccuggccaucaucagccuggucaaguccgaccagaucugcaucggcuaccacgccaacaacagcaccgagcaggucgacaccaucauggagaagaacgugacggugacccacgcgcaggacauccucgagaagacccacaacgggaagcugugcgaccuggacggcgugaagccccucauccugcgcgacugcuccguggccggguggcugcucggcaacccgaugugcgacgaguucaucaacguccccgaguggagcuacaucguggagaaggccaaccccgccaacgaccugugcuaccccgggaacuucaacgacuacgaggagcugaagcaccuccugucccggaucaaccacuucgagaagauccagaucauccccaagagcuccuggagcgaccacgaggccuccagcggcguguccagcgcgugcccguaccagggcguccccuccuucuuccgcaacgugguguggcugaucaagaagaacaacaccuaccccacgaucaagcggagcuacaacaacaccaaccaggaggaccuccugauccugugggggauccaccacuccaacgacgccgccgagcagaccaagcucuaccagaacccgaccacguacaucagcgucggcaccuccacccugaaccagcgccuggugcccaagaucgccacccggagcaaggugaacgggcaguccggccgcauggacuucuucuggacgauccucaagcccaacgacgcgaucaacuucgagagcaacgggaacuucaucgcccccgaguacgccuacaagaucgucaagaagggcgacagcgccaucaugaaguccgagguggaguacggcaacugcaacaccaagugccagaccccgaucggggccaucaacagcuccaugcccuuccacaacauccacccccugaccaucggcgagugccccaaguacgucaagagcaacaagcuggugcucgcgacggggcugcggaacuccccgcugcgcgagcggcgccggaagcgcggccucuucggcgccaucgccggguucaucgagggcggguggcagggcaugguggacgggugguacggcuaccaccacagcaacgagcagggcuccggguacgccgccgacaaggagagcacccagaaggcgaucgacggcgugaccaacaaggucaacuccaucaucgacaagaugaacacccaguucgaggccguggggcgggaguucaacaaccuggagcgccggaucgagaaccugaacaagaagauggaggacggcuuccucgacguguggacguacaacgccgagcugcugguccucauggagaacgagcgcacccuggacuuccacgacagcaacgugaagaaccuguacgacaagguccggcuccagcugcgcgacaacgccaaggagcuggggaacggcugcuucaaguucuaccacaagugcgacaacgagugcauggaguccgugcggaacggcaccuacgacuacccccaguacagcgaggaggcccgccucaagcgggaggagaucuccggggugaagcuggagagcaucggcaccuaccagauccuguccaucuacagcacggucgcguccagccucgcccuggccaucaugguggccgggcugucccucuggaugugcagcaacggcagccugcagugccgcauccgcaucuga

SEQ ID NO: 66270 - RNA, 1704 nt, Artificial Sequence
  derived and/or modified CDS sequence (opt1) from hemagglutinin__InfluenzaA__ABY19418
auggagaagaucgugcugcuccuggccaucaucagccuggucaaguccgaccagaucugcaucggcuaccacgccaacaacagcaccgagcaggucgacaccaucauggagaagaacgugacggugacccacgcgcaggacauccucgagaagacccacaacgggaagcugugcgaccuggacggcgugaagccccucauccugcgcgacugcuccguggccggguggcugcucggcaacccgaugugcgacgaguucaucaacguccccgaguggagcuacaucguggagaaggccaaccccgccaacgaccugugcuaccccggggacuucaacgacuacgaggagcugaagcaccuccugucccggaucaaccacuucgagaagauccagaucauccccaagagcuccuggagcgaccacgaggccuccagcggcguguccagcgcgugcccguaccagggcguccccuccuucuuccgcaacgugguguggcugaucaagaagaacaacaccuaccccacgaucaagcggagcuacaacaacaccaaccaggaggaccuccugauccugugggggauccaccacuccaacgacgccgccgagcagaccaagcucuaccagaacccgaccacguacaucagcgucggcaccuccacccugaaccagcgccuggugcccaagaucgccacccggagcaaggugaacgggcaguccggccgcauggacuucuucuggacgauccucaagcccaacgacgcgaucaacuucgagagcaacgggaacuucaucgcccccgaguacgccuacaagaucgucaagaagggcgacagcgccaucaugaaguccgagguggaguacggcaacugcaacaccaagugccagaccccgaucggggccaucaacagcuccaugcccuuccacaacauccacccccugaccaucggcgagugccccaaguacgucaagagcaacaagcuggugcucgcgacggggcugcggaacuccccgcugcgcgagcggcgccggaagcgcggccucuucggcgccaucgccggguucaucgagggcggguggcagggcaugguggacgggugguacggcuuccaccacagcaacgagcagggcuccggguacgccgccgacaaggagagcacccagaaggcgaucgacggcgugaccaacaaggucaacuccaucaucgacaagaugaacacccaguucgaggccguggggcgggaguucaacaaccuggagcgccggaucgagaaccugaacaagaagauggaggacggcuuccucgacguguggacguacaacgccgagcugcugguccucauggagaacgagcgcacccuggacuuccacgacagcaacgugaagaaccuguacgacaagguccggcuccagcugcgcgacaacgccaaggagcuggggaacggcugcuucgaguucuaccacaagugcgacaacgagugcauggaguccgugcggaacggcaccuacgacuacccccaguacagcgaggaggcccgccucaagcgggaggagaucuccggggugaagcuggagagcaucggcaccuaccagauccuguccaucuacagcacggucgcguccagccucgcccuggccaucaugguggccgggcugucccucuggaugugcagcaacggcagccugcagugccgcaucugcaucuga

SEQ ID NO: 66271 - RNA, 1704 nt, Artificial Sequence
  derived and/or modified CDS sequence (opt1) from hemagglutinin__InfluenzaA__ABY19419
auggagaagaucgugcugcuccuggccaucaucagccuggucaaguccgaccagaucugcaucggcuaccacgccaacaacagcaccgagcaggucgacaccaucauggagaagaacgugacggugacccacgcgcaggacauccucgagaagacccacaacgggaagcugugcgaccuggacggcgugaagccccucauccugcgcgacugcuccguggccggguggcugcucggcaacccgaugugcgacgaguucaucaacguccccgaguggagcuacaucguggagaaggccaaccccgccaacgaccugugcuaccccgggaacuucaacgacuacgaggagcugaagcaccuccugucccggaucaaccacuucgagaagauccagaucauccccaagagcuccuggagcgaccacgaggccuccagcggcguguccagcgcgugcccguaccagggcguccccuccuucuuccgcaacgugguguggcugaucaagaagaacaacaccuaccccacgaucaagcggagcuacaacaacaccaaccaggaggaccuccugauccugugggggauccaccacuccaacgacgccgccgagcagaccaagcucuaccagaacccgaccacguacaucagcgucggcaccuccacccugaaccagcgccuggugcccaagaucgccacccggagcaaggugaacgggcaguccggccgcauggacuucuucuggacgauccucaagcccaacgacgcgaucaacuucgagagcaacgggaacuucaucgcccccgaguacgccuacaagaucgucaagaagggcgacagcgccaucaugaaguccgagguggaguacggcaacugcaacaccaagugccagaccccgaucggggccaucaacagcuccaugcccuuccacaacauccacccccugaccaucggcgagugccccaaguacgucaagagcaacaagcuggugcucgcgacggggcugcggaacuccccgcugcgcgagcggcgccggaagcgcggccucuucggcgccaucgccggguucaucgagggcggguggcagggcaugguggacgggugguacggcuaccaccacagcaacgagcagggcuccggguacgccgccgacaaggagagcacccagaaggcgaucgacggcgugaccaacaaggucaacuccaucaucgacaagaugaacacccaguucgaggccguggggcgggaguucaacaaccuggagcgccggaucgagaaccugaacaagaagauggaggacggcuuccucgacguguggacguacaacgccgagcugcugguccucauggagaacgagcgcacccuggacuuccacgacagcaacgugaagaaccuguacgacaagguccggcuccagcugcgcgacaacgccaaggagcuggggaacggcugcuucgaguucuaccacaagugcgacaacgagugcauggaguccgugcggaacggcaccuacgacuacccccaguacagcgaggaggcccgccucaagcgggaggagaucuccggggugaagcuggagagcaucggcaccuaccagauccuguccaucuacagcacggucgcguccagccucgcccuggccaucaugguggccgggcugucccucuggaugugcagcaacggcagccugcagugccgcaucugcaucuga

SEQ ID NO: 66272 - RNA, 1698 nt, Artificial Sequence; identical to SEQ ID NO: 66079
  derived and/or modified CDS sequence (opt1) from hemagglutinin__InfluenzaA__ABY51017

SEQ ID NO: 66273 - RNA, 1701 nt, Artificial Sequence; identical to SEQ ID NO: 65952
  derived and/or modified CDS sequence (opt1) from hemagglutinin__InfluenzaA__ABY51028

SEQ ID NO: 66274 - RNA, 1698 nt, Artificial Sequence
  derived and/or modified CDS sequence (opt1) from hemagglutinin__InfluenzaA__ABY51039
augaaggugaagcugcucguccugcugugcaccuucaccgccacgaacgccgacaccaucugcaucggcuaccacgcgaacaacagcaccgacaccguggacacggugcucgagaagaacgucaccgugacccacuccgugaaccugcuggagaacagccacaacgggaagcucugccugcugaagggcaucgcgccccuccagcuggggaacugcuccgucgccggcuggauccuggggaacccggagugcgagcuccugaucagcaaggaguccuggagcuacaucguggagacccccaaccccgagaacggcacgugcuaccccggccacuucgccgacuacgaggagcugcgcgagcagcucuccagcguguccagcuucgagcgguucgagaucuucccgaaggaguccagcuggcccaaccacaccgucaccgggguguccgccagcugcucccacaacggcgagagcuccuucuaccgcaaccugcuguggcucaccgggaagaacggccuguaccccaaccugagcaaguccuacgccaacaacaaggagaaggaggugcucguccuguggggcgugcaccacccgcccaacaucggggaccagaaggcccuguaccacacggagaacgccuacgugagcgucgugagcucccacuacagccggaaguucacccccgagaucgccaagcgccccaaggugcgggaccaggagggccgcaucaacuacuacuggacccuccuggagcccggggacaccaucaucuucgaggcgaacggcaaccugaucgccccgcgguacgccuucgcccucucccgcggguucggcagcggcaucaucaacuccaacgcccccauggacaagugcgacgcgaagugccagacgccccagggggccaucaacagcucccugcccuuccagaacguccacccggugaccaucggcgagugccccaaguacgugcggagcgccaagcugcgcauggucaccgggcuccggaacauccccuccauccagagccgcggccuguucggggccaucgccggcuucaucgagggcggguggaccggcaugguggacgggugguacggcuaccaccaccagaacgagcagggguccggcuacgcggccgaccagaaguccacgcagaacgccaucaacggcaucaccaacaaggugaacagcgucaucgagaagaugaacacccaguucaccgccguggggaaggaguucaacaagcuggagcggcgcauggagaaccucaacaagaaggucgacgacggcuucaucgacaucuggacguacaacgccgagcugcuggugcuccuggagaacgagcggacccuggacuuccacgacagcaacgugaagaaccucuacgagaaggucaaggggcagcugaagaacaacgcgaaggagaucggcaacgggugcuucgaguucuaccacaagugcaacgacgagugcauggaguccgugaagaacggcaccuacgacuaccccaaguacagcgaggaguccaagcugaaccgcgagaagaucgacggcgugaagcucgagagcaugggggucuaccagauccuggccaucuacuccaccguggccagcagccuggugcuccuggucucccugggcgccaucagcuucuggaugugcuccaacgggagccuccagugccggaucugcaucuga

SEQ ID NO: 66275 - RNA, 1698 nt, Artificial Sequence
  derived and/or modified CDS sequence (opt1) from hemagglutinin__InfluenzaA__ABY51050
augaaggugaagcugcucguccugcugugcaccuucaccgccacguacgccgacaccaucugcaucggcuaccacgcgaacaacagcaccgacaccguggacacggugcucgagaagaacgucaccgugacccacuccgugaaccugcuggagaacagccacaacgggaagcucugccugcugaagggcaucgcgccccuccagcuggggaacugcuccgucgccggcuggauccuggggaacccggagugcgagcuccugaucagcaaggaguccuggagcuacaucguggagaagcccaaccccgagaacgggaccugcuaccccggccacuucgccgacuacgaggagcugcgcgagcagcucuccagcguguccagcuucgagcgguucgagaucuucccgaaggaguccagcuggcccaaccacacggucaccgggguguccgccagcugcucccacaacggcgagagcuccuucuaccgcaaccugcuguggcucaccgggaagaacggccuguaccccaaccugagcaaguccuacgccaacaacaaggagaaggaggugcucguccuguggggcgugcaccacccgcccaacaucggcgaccagaaggcccuguaccacaccgagaacgccuacgugagcgucgugagcucccacuacagccggaaguucacgcccgagaucgccaagcgccccaaggugcgggaccaggagggccgcaucaacuacuacuggacccuccuggagcccggggacaccaucaucuucgaggcgaacggcaaccugaucgccccgcgguacgccuucgcccucucccgcggguucggcagcggcaucaucaacuccaacgcccccauggacaagugcgacagcaagugccagacgccccagggggcgaucaacuccagccugcccuuccagaacguccacccggugaccaucggcgagugccccaaguacgugcgguccgccaagcugcgcauggucaccgggcuccggaacauccccagcauccagucccgcggccuguucggggccaucgccggcuucaucgagggcggguggaccggcaugguggacgggugguacggcuaccaccaccagaacgagcaggggagcggcuacgccgcggaccagaaguccacccagaacgccaucaacggcaucacgaacaaggugaacagcgucaucgagaagaugaacacccaguucaccgccguggggaaggaguucaacaagcuggagcggcgcauggagaaccucaacaagaaggucgacgacggcuucaucgacaucuggaccuacaacgccgagcugcuggugcuccuggagaacgagcggacgcuggacuuccacgacuccaacgugaagaaccucuacgagaaggucaagagccagcugaagaacaacgccaaggagaucgggaacggcugcuucgaguucuaccacaagugcaacgacgagugcauggaguccgugaagaacgggaccuacgacuaccccaaguacagcgaggaguccaagcugaaccgcgagaagaucgacggcgugaagcucgagagcaugggcgucuaccagauccuggcgaucuacagcaccguggccuccagccuggugcuccuggucucccugggggccaucagcuucuggaugugcuccaacggcagccuccagugccggaucugcaucuga

SEQ ID NO: 66276 - RNA, 1698 nt, Artificial Sequence; identical to SEQ ID NO: 66038
  derived and/or modified CDS sequence (opt1) from hemagglutinin__InfluenzaA__ABY51061

SEQ ID NO: 66277 - RNA, 1698 nt, Artificial Sequence
  derived and/or modified CDS sequence (opt1) from hemagglutinin__InfluenzaA__ABY51072
augaaggugaagcugcucauccugcugugcaccuucaccgccacguacgccgacaccaucugcaucggcuaccacgcgaacaacagcaccgacaccgucgacacggugcucgagaagaacgugaccgucacccacuccgugaaccugcuggaggacagccacaacgggaagcucugccugcugaagggcaucgcgccccuccagcuggggaacugcuccguggccggcuggauccuggggaacccggagugcgagcuccugaucagcaaggaguccuggagcuacaucgucgagacccccaaccccgagaacggcacgugcuaccccggcuacuucgccgacuacgaggagcugcgcgagcagcucuccagcguguccagcuucgagcgguucgagaucuucccgaaggaguccagcuggcccaaccacaccgugaccggggucuccgccagcugcucccacaacggcaagagcuccuucuaccgcaaccugcuguggcucaccgggaagaacggccuguaccccaaccugagcaaguccuacgccaacaacaaggagaaggaggugcucgugcuguggggcguccaccacccgcccaacaucggggaccagcgggcccuguaccacacggagaacgccuacgugagcguggucagcucccacuacagccgccgguucacccccgagaucgccaagcgccccaaggugcgggaccaggagggccgcaucaacuacuacuggacccuccuggagcccggggacaccaucaucuucgaggcgaacggcaaccugaucgccccgcgguucgccuucgcccucucccgcggguucggcagcggcaucaucacguccaacgcccccauggacgagugcgacgcgaagugccagacgccccagggggccaucaacagcucccugcccuuccagaacgugcacccggucaccaucggcgagugccccaaguacgugcggagcaccaagcugcgcauggugaccgggcuccggaacauccccuccauccagagccgcggccuguucggggccaucgccggcuucaucgagggcggguggaccggcauggucgacgggugguacggcuaccaccaccagaacgagcagggguccggcuacgccgcggaccagaaguccacccagaacgccaucaacggcaucaccaacaaggugaacagcgugaucgagaagaugaacacgcaguucaccgccgucgggaaggccuucaacaagcuggagcggcgcauggagaaccucaacaagaagguggacgacggcuuccuggacaucuggaccuacaacgccgagcugcucguccugcuggagaacgagcggacccucgacuuccacgacagcaacgugaagaaccuguacgagaaggugaagucccagcugaagaacaacgcgaaggagaucgggaacggcugcuucgaguucuaccacaagugcaacgacgagugcauggagagcgucaagaacgggacguacgacuaccccaaguacuccgaggagagcaagcucaaccgcgagaagaucgacggcgugaagcuggaguccaugggcguguaccagauccuggccaucuacagcaccgucgccagcucccucgugcugcuggugagccucggggccaucuccuucuggaugugcagcaacggcucccugcagugccggaucugcaucuga

SEQ ID NO: 66278 - RNA, 1698 nt, Artificial Sequence; identical to SEQ ID NO: 65980
  derived and/or modified CDS sequence (opt1) from hemagglutinin__InfluenzaA__ABY51083

SEQ ID NO: 66279 - RNA, 1698 nt, Artificial Sequence; identical to SEQ ID NO: 65938
  derived and/or modified CDS sequence (opt1) from hemagglutinin__InfluenzaA__ABY51094

SEQ ID NO: 66280 - RNA, 1698 nt, Artificial Sequence; identical to SEQ ID NO: 66079
  derived and/or modified CDS sequence (opt1) from hemagglutinin__InfluenzaA__ABY51105

SEQ ID NO: 66281 - RNA, 1698 nt, Artificial Sequence; identical to SEQ ID NO: 65938
  derived and/or modified CDS sequence (opt1) from hemagglutinin__InfluenzaA__ABY51116

SEQ ID NO: 66282 - RNA, 1701 nt, Artificial Sequence
  derived and/or modified CDS sequence (opt1) from hemagglutinin__InfluenzaA__ABY51127
augaagaccaucaucgcccugagcuacauccucugcaugguguucgcccagaagcugcccggcaacgacaacuccaccgcgacgcugugccucgggcaccacgccgucccgaacggcaccaucgugaagaccaucaccaacgaccagaucgaggugacgaacgccaccgagcugguccagagcuccagcaccggggagaucugcgacagcccccaccagauccuggacggcgagaacugcacccucaucgacgcccugcugggggacccccagugcgacggcuuccagaacaagaagugggaccucuucguggagcgcuccaaggccuacuccaacugcuaccccuacgacgugccggacuacgcgagccugcggucccuggucgccagcuccggcacgcucgaguucaacaacgagagcuucaacuggaccggggugacccagaacggcaccuccagcgccugcauccgccgguccaacaacagcuucuucucccgccugaacuggcugacgcaccucaaguucaaguaccccgcccugaacgugaccaugcccaacaacgagaaguucgacaagcuguacaucuggggcguccaccaccccgggaccgacaacgaccagguguuccucuacgcgcaggccagcgggcggaucaccguguccacgaagcgcagccagcagaccgucaucccgaacaucggcagccggccccgcgugcggaacauccccucccgcaucagcaucuacuggaccaucgugaagcccggcgacauccugcugaucaacuccaccgggaaccucaucgccccgcggggcuacuucaagauccgcagcgggaaguccagcaucaugcgguccgacgcccccaucggcaagugcaacagcgagugcaucacgcccaacggcuccauccccaacgacaagccguuccagaacgucaaccgcaucaccuacggggccugcccccgguacgugaagcagaacacccugaagcuggcgaccggcaugcgcaacgugcccgagaagcagacgcgggggaucuucggcgccaucgccggguucaucgagaacggcugggagggcauggucgacgggugguacggcuuccgccaccagaacagcgaggggaucggccaggccgccgaccucaaguccacccaggcggccaucgaccagaucaacgggaagcugaaccggcugaucggcaagaccaacgagaaguuccaccagaucgagaaggaguucagcgagguggagggccgcauccaggaccucgagaaguacguggaggacaccaagaucgaccugugguccuacaacgccgagcugcucgucgcccuggagaaccagcacacgaucgaccugaccgacagcgagaugaacaagcuguucgagaagaccaagaagcagcuccgggagaacgccgaggacauggggaacggcugcuucaagaucuaccacaagugcgacaacgcgugcaucggguccauccgcaacggcaccuacgaccacgacguguaccgcgacgaggcccugaacaaccgguuccagaucaaggggguggagcucaagagcggcuacaaggacuggauccuguggaucuccuucgccaucagcugcuuccugcucugcgucgcccugcugggcuucaucaugugggccugccagaaggggaacauccgcugcaacaucugcaucuga

SEQ ID NO: 66283 - RNA, 1698 nt, Artificial Sequence
  derived and/or modified CDS sequence (opt1) from hemagglutinin__InfluenzaA__ABY51138
augaaggugaagcugcucguccugcugugcaccuucaccgccacguacgccgacaccaucugcaucggcuaccacgcgaacaacagcaccgacaccguggacacggugcucgagaagaacgucaccgugacccacuccgugaaccugcuggaggaccgccacaacgggaagcucugccugcugaagggcaucgcgccccuccagcuggggaacugcagcgucgccggcuggauccuggggaacccggagugcgagcuccugaucuccaaggagagcugguccuacaucguggagacccccaaccccgagaacggcacgugcuaccccggcuacuucgccgacuacgaggagcugcgggagcagcucagcuccgugagcuccuucgagcgcuucgagaucuucccgaaggagagcuccuggcccaaccacaccgucaccggggugagcgccuccugcagccacaacggcaaguccagcuucuaccggaaccugcuguggcucaccgggaagaacggccuguaccccaaccugucccgcagcuacgccaacaacaaggagaaggaggugcucguccuguggggcgugcaccacccgcccaacaucggggaccagcgggcccuguaccacacggagaacgccuacguguccgucgugagcagccacuacucccgccgguucacccccgagaucgccaagcgccccaaggugcgggaccaggagggccgcaucaacuacuacuggacccuccuggagcccggggacaccaucaucuucgaggcgaacggcaaccugaucgccccgcgguucgccuucgcccucagccgcggguucggcuccggcaucaucacgagcaacgcccccauggacgagugcgacgcgaagugccagacgccccagggggccaucaacuccagccugcccuuccagaacguccacccggugaccaucggcgagugccccaaguacgugcgguccgccaagcugcgcauggucaccgggcuccggaacauccccagcauccagucccgcggccuguucggggccaucgccggcuucaucgagggcggguggaccggcaugguggacgggugguacggcuaccaccaccagaacgagcaggggagcggcuacgcggccgaccagaaguccacccagaacgccaucaacggcaucaccaacaaggugaacagcgucaucgagaagaugaacacccaguucacggccguggggaaggaguucaacaagcuggagcggcgcauggagaaccucaacaagaaggucgacgacggcuuccuggacaucuggaccuacaacgccgagcugcucgugcugcuggagaacgagcggacccucgacuuccacgacuccaacgugaagaaccuguacgagaaggucaagauccagcugaagaacaacgcgaaggagaucgggaacggcugcuucgaguucuaccacaagugcaacgacgagugcauggagagcgugaagaacgggaccuacgacuaccccaaguacuccgaggagagcaagcucaaccgcgagaagaucgacggcgugaagcuggaguccaugggcgucuaccagauccuggccaucuacagcacgguggccuccagccucgugcugcuggucagccucggggccaucuccuucuggaugugcagcaacggcucccugcagugccggaucugcaucuga

SEQ ID NO: 66284 - RNA, 1698 nt, Artificial Sequence; identical to SEQ ID NO: 65938
  derived and/or modified CDS sequence (opt1) from hemagglutinin__InfluenzaA__ABY51149

SEQ ID NO: 66285 - RNA, 1698 nt, Artificial Sequence
  derived and/or modified CDS sequence (opt1) from hemagglutinin__InfluenzaA__ABY51160
augaaggugaagcugcucguccugcugugcaccuucaccgccacguacgccgacaccaucugcaucggcuaccacgcgaacaacagcaccgacaccguggacacggugcucgagaagaacgucaccgugacccacuccgugaaccugcuggaggaccgccacaacgggaagcucugccugcugaagggcaucgcgccccuccagcuggggaacugcagcgucgccggcuggauccuggggaacccggagugcgagcuccugaucuccaaggagagcugguccuacaucguggagacccccaaccccgagaacggcacgugcuaccccggcuacuucgccgacuacgaggagcugcgggagcagcucagcuccgugagcuccuucgagcgcuucgagaucuucccgaaggagagcuccuggcccaaccacaccgucaccggggugagcgccuccugcagccacaacggcaaguccagcuucuaccggaaccugcuguggcucaccgggaagaacggccuguaccccaaccuguccaagagcuacgccaacaacaaggagaaggaggugcucguccuguggggcgugcaccacccgcccaacaucggggaccagcgcgcccuguaccacacggagaacgccuacguguccgucgugagcagccacuacucccggcgcuucacccccgagaucgccaagcggcccaaggugcgcgaccaggagggccggaucaacuacuacuggacccuccuggagcccggggacaccaucaucuucgaggcgaacggcaaccugaucgccccgcgcuucgccuucgcccucagccggggguucggcuccggcaucaucacgagcaacgcccccauggacaagugcgacgcgaagugccagacgccccagggggccaucaacuccagccugcccuuccagaacguccacccggugaccaucggcgagugccccaaguacgugcgcuccgccaagcugcggauggucaccgggcuccgcaacauccccagcauccagucccggggccuguucggggccaucgccggcuucaucgagggcggguggaccggcaugaucgacgggugguacggcuaccaccaccagaacgagcaggggagcggcuacgcggccgaccagaaguccacccagaacgccaucaacggcaucaccaacaaggugaacagcgugaucgagaagaugaacacccaguucacggccgucgggaaggaguucaacaagcuggagcgccggauggagaaccucaacaagaagguggacgacggcuuccuggacaucuggaccuacaacgccgagcugcucguccugcuggagaacgagcgcacccucgacuuccacgacuccaacgugaagaaccuguacgagaaggucaagagccagcugaagaacaacgcgaaggagaucgggaacggcugcuucgaguucuaccacaagugcaacgacgagugcauggaguccgugaagaacgggaccuacgacuaccccaaguacagcgaggaguccaagcucaaccgggagaagaucgacggcgugaagcuggagagcaugggcguguaccagauccuggccaucuacuccacggucgccagcagccucgugcugcuggugucccucggggccaucagcuucuggaugugcuccaacggcagccugcagugccgcaucugcaucuga

SEQ ID NO: 66286 - RNA, 1698 nt, Artificial Sequence
  derived and/or modified CDS sequence (opt1) from hemagglutinin__InfluenzaA__ABY51171
augaaggugaagcugcucguccugcugugcaccuucaccgccacguacgccgacaccaucugcaucggcuaccacgcgaacaacagcaccgacaccguggacacggugcucgagaagaacgucaccgugacccacuccgugaaccugcuggaggacagccacaacgggaagcucugccugcugaagggcaucgcgccccuccagcuggggaacugcuccgucgccggcuggauccuggggaacccggagugcgagcuccugaucagcaaggaguccuggagcuacaucguggagacccccaaccccgagaacggcacgugcuaccccggcuacuucgccgacuacgaggagcugcgcgagcagcucuccagcguguccagcuucgagcgguucgagaucuucccgaaggaguccagcuggcccaaccacaccgucaccgggguguccgccagcugcucccacaacggcaagagcuccuucuaccgcaaccugcuguggcucaccgggaagaacggccuguaccccaaccugagcaaguccuacgccaacaacaaggagaaggaggugcucguccuguggggcgugcaccacccgcccaacaucggggaccagcgggcccuguaccacacggagaacgccuacgugagcgucgugagcucccacuacagccgccgguucacccccgagaucgccaagcgccccaaggugcgggaccaggagggccgcaucaacuacuacuggacccuccuggagcccggggacaccaucaucuucgaggcgaacggcaaccugaucgccccgcgguucgccuucgcccucucccgcggguucggcagcggcaucaucacguccaacgcccccaugggggagugcgacgcgaagugccagacgccccagggcgccaucaacagcucccugcccuuccagaacguccacccggugaccaucggggagugccccaaguacgugcggagcgccaagcugcgcauggucaccggccuccggaacauccccuccauccagagccgcgggcuguucggcgccaucgccggcuucaucgagggcggguggaccgggaugguggacggcugguacggguaccaccaccagaacgagcagggcuccggcuacgcggccgaccagaaguccacccagaacgccaucaacgggaucaccaacaaggugaacagcgucaucgagaagaugaacacccaguucacggccgugggcaaggaguucaacaagcuggagcggcgcauggagaaccucaacaagaaggucgacgacggguuccuggacaucuggaccuacaacgccgagcugcucgugcugcuggagaacgagcggacccucgacuuccacgacagcaacgugaagaaccuguacgagaaggucaagucccagcugaagaacaacgcgaaggagaucggcaacgggugcuucgaguucuaccacaagugcaacgacgagugcauggagagcgugaagaacggcaccuacgacuaccagaaguacuccgaggagagcaagcucaaccgcgagaagaucgacggcgugaagcuggaguccaugggggucuaccagauccuggccaucuacagcacgguggccagcucccucgugcugcuggucagccucggcgccaucuccuucuggaugugcagcaacgggucccugcagugccggaucugcaucuga

SEQ ID NO: 66287 - RNA, 1698 nt, Artificial Sequence; identical to SEQ ID NO: 65934
  derived and/or modified CDS sequence (opt1) from hemagglutinin__InfluenzaA__ABY51182

SEQ ID NO: 66288 - RNA, 1698 nt, Artificial Sequence; identical to SEQ ID NO: 65954
  derived and/or modified CDS sequence (opt1) from hemagglutinin__InfluenzaA__ABY51193

SEQ ID NO: 66289 - RNA, 1698 nt, Artificial Sequence; identical to SEQ ID NO: 65938
  derived and/or modified CDS sequence (opt1) from hemagglutinin__InfluenzaA__ABY51237

SEQ ID NO: 66290 - RNA, 1698 nt, Artificial Sequence; identical to SEQ ID NO: 65954
  derived and/or modified CDS sequence (opt1) from hemagglutinin__InfluenzaA__ABY51248

SEQ ID NO: 66291 - RNA, 1698 nt, Artificial Sequence; identical to SEQ ID NO: 65934
  derived and/or modified CDS sequence (opt1) from hemagglutinin__InfluenzaA__ABY51259

SEQ ID NO: 66292 - RNA, 1701 nt, Artificial Sequence; identical to SEQ ID NO: 66011
  derived and/or modified CDS sequence (opt1) from hemagglutinin__InfluenzaA__ABY51270

SEQ ID NO: 66293 - RNA, 1707 nt, Artificial Sequence
  derived and/or modified CDS sequence (opt1) from hemagglutinin__InfluenzaA__ABY76282
auggagaagaucgugcugcuccuggccaucgucagccuggugaaguccgaccagaucugcaucggcuaccacgccaacaacagcaccgagcacguggacaccaucauggagaagaacgucacggugacccacgcgcaggacauccucgagaaggcccacaacgggcgccugugcgaccuggacggcgugaagccccucauccugcgggacugcuccgucgccggguggcugcucggcaacccgaugugcgacgaguuccugaacgugcccgaguggagcuacaucguggagaagaacaaccccgccaacgaccugugcuaccccgggaacuucaacgacuacgaggagcucaagcaccuccugucccgcaucaaccacuucgagaagauccagaucauccccaagagcuccuggagcgaccacgaggccuccagcggcgucuccagcgcgugcccguaccagggccgguccagcuucuuccgcaacgugguguggcugaucaagaagaacgacgccuaccccaccaucaagcgguccuacaacaacaccaaccaggaggaccugcugguccucugggggauccaccaccccaacgacgccgccgagcagacgcgccuguaccagaacccgaccaccuacaucagcgugggcaccuccacgcugaaccagcggcucgugcccaagaucgcgacccgcagcaaggucaacgggcaguccggccggauggaguucuucuggaccauccugaagcccaacgacgccaucaacuucgagagcaacgggaacuucaucgcccccgagaacgccuacaagaucgugaagaagggcgacagcaccaucaugaaguccgagcuggaguacggcaacugcaacacgaagugccagaccccgaucggggccaucaacagcuccaugcccuuccacaacauccacccccucaccaucggcgagugccccaaguacgucaagagcaaccgccuggugcuggcgaccgggcuccggaacuccccgcagggcgagcgccggcgcaagaagcggggccuguucggggccaucgccggcuucaucgagggcggguggcaggggaugguggacggcugguacggcuaccaccacagcaacgagcagggguccggcuacgccgccgacaaggagagcacgcagaaggcgaucgacggggugaccaacaaggucaacuccaucaucgacaagaugaacacccaguucgaggccgugggccgcgaguucaacaaccuggagcggcgcaucgagaaccucaacaagaagauggaggacggguuccuggacguguggaccuacaacgccgagcugcucguccugauggagaacgagcggacgcuggacuuccacgacagcaacgugaagaaccucuacgacaagguccgccugcagcugcgggacaacgccaaggagcucggcaacggcugcuucgaguucuaccaccgcugcgacaacgagugcauggaguccgugcgcaacgggaccuacgacuacccccaguacagcgaggaggcccggcugaagcgcgaggagaucuccggcgugaagcuggagagcaucgggaccuaccagauccucuccaucuacagcaccgucgcguccagccuggcccuggccaucaugguggccggccucucccuguggaugugcagcaacgggagccugcagugccggaucugcaucuga

SEQ ID NO: 66294 - RNA, 1701 nt, Artificial Sequence
  derived and/or modified CDS sequence (opt1) from hemagglutinin__InfluenzaA__ABY81349
augaaggccaagcugcucgugcugcugugcgcccucagcgcgaccgacgccgacaccaucugcaucggcuaccacgccaacaacuccacggacaccgucgacaccgugcuggagaagaacgugaccgucacgcacagcgugaaccugcucgaggacucccacaacgggaagcugugccgccugaagggcaucgcgccccuccagcuggggaagugcagcaucgccggcuggauccuggggaacccggagugcgagucccucuucagcaagaaguccuggagcuacaucgccgagacccccaacuccgagaacgggaccugcuaccccggcuacuucgccgacuacgaggagcugcgggagcagcugagcuccgugagcuccuucgagcgcuucgagaucuuccccaaggagcggagcuggccgaagcacaacgucacccgcggggugacggccgccugcucccacaagggcaagagcuccuucuaccggaaccuccuguggcugaccgagaagaacgggagcuaccccaaccucuccaagagcuacgugaacaacaaggagaaggagguccuggugcuguggggcgugcaccaccccagcaacaucaaggaccagaagaccaucuaccagaaggagaacgcguacgucuccguggugagcuccaacuacaaccgccgguucacccccgagaucgccaagcgcccgaagguccgggaccaggaggggcgcaucaacuacuacuggacgcuccuggagcccggcgacaccaucaucuucgaggccaacggcaaccugaucgcccccugguacgccuucgcgcucagccggggguucggcuccgggaucaucaccagcaacgccuccauggacgagugcgacaccaagugccagacgccccagggcgccaucaacagcucccugccguuccagaacgugcaccccgugaccaucggcgagugccccaaguacguccgcagcaccaagcugcggauggugaccgggcuccgcaacauccccuccauccagagccggggccuguucggggccaucgccggcuucaucgagggcggcuggacgggcaugaucgacgggugguacggcuaccaccaccagaacgagcagggguccggcuacgcggccgaccagaaguccacccagaacgccaucaacgggaucaccaacaaggugaacagcgucaucgagaagaugaacacccaguucacggccgugggcaaggaguucaacaagcuggagaagcgcauggagaaccucaacaagaagguggacgacggcuuccuggacaucuggaccuacaacgccgagcugcucguccugcuggagaacgagcggacccucgacuuccacgacagcaacgugaagaaccuguacgagaaggucaagucccagcugaagaacaacgcgaaggagguggggaacggcugcuucgaguucuaccacaagugcaacaacgagugcauggagagcgugaagaacgggaccuacgacuacccgaaguacuccgaggagagcaagcucaaccgcgagaagaucgacggcgucaagcuggagagcauggggguguaccagauccuggccaucuacuccacgguggccagcucccucguccugcuggugagccucggcgccaucuccuucuggaugugcagcaacggcucccugcagugccggaucugcaucuga

SEQ ID NO: 66295 - RNA, 1701 nt, Artificial Sequence; identical to SEQ ID NO: 65952
  derived and/or modified CDS sequence (opt1) from hemagglutinin__InfluenzaA__ABY81371

SEQ ID NO: 66296 - RNA, 1698 nt, Artificial Sequence; identical to SEQ ID NO: 65938
  derived and/or modified CDS sequence (opt1) from hemagglutinin__InfluenzaA__ABY81382

SEQ ID NO: 66297 - RNA, 1698 nt, Artificial Sequence; identical to SEQ ID NO: 65980
  derived and/or modified CDS sequence (opt1) from hemagglutinin__InfluenzaA__ABY81393

SEQ ID NO: 66298 - RNA, 1698 nt, Artificial Sequence
  derived and/or modified CDS sequence (opt1) from hemagglutinin__InfluenzaA__ABY81415
augaaggugaagcugcucguccugcugugcaccuucaccgccacguacgccgacaccaucugcaucggcuaccacgcgaacaacagcaccgacaccguggacacggugcucgagaagaacgucaccgugacccacuccgugaaccugcuggaggacagccacaacgggaagcucugccugcugaagggcaucgcgccccuccagcuggggaacugcuccgucgccggcuggauccuggggaacccggagugcgagcuccugaucagcaaggaguccuggagcuacaucguggagacccccucccccgagaacggcacgugcuaccccggcuacuucgccgacuacgaggagcugcgcgagcagcucagcuccgugagcuccuucgagcgguucgagaucuucccgaaggagagcuccuggcccaaccacaccgucaccggggugagcgccuccugcagccacaacggcaaguccagcuucuaccgcaaccugcuguggcucaccgggaagaacggccuguaccccaaccuguccaagagcuacgccaacaacaaggagaaggaggugcucguccuguggggcgugcaccacccgcccaacaucggggaccagcgggcccuguaccacacggagaacgccuacgugagcgucguguccagccacuacucccgccgguucacccccgagaucgccaagcgccccaaggugcgggaccaggagggccgcaucaacuacuacuggacccuccuggagcccggggacaccaucaucuucgaggcgaacggcaaccugaucgccccgcgguucgccuucgcccucagccgcggguucggcuccggcaucaucacgagcaacgcccccaugggggagugcgacgcgaagugccagacgccccagggcgccaucaacuccagccugcccuuccagaacguccacccggugaccaucggggagugccccaaguacgugcgguccgccaagcugcgcauggucaccggccuccggaacauccccagcauccagucccgcgggcuguucggcgccaucgccggcuucaucgagggcggguggaccgggaugguggacggcugguacggguaccaccaccagaacgagcagggcagcggcuacgcggccgaccagaaguccacccagaacgccaucaacgggaucaccaacaaggugaacagcgucaucgagaagaugaacacccaguucacggccgugggcaaggaguucaacaagcuggagcggcgcauggagaaccucaacaagaaggucgacgacggguuccuggacaucuggaccuacaacgccgagcugcucgugcugcuggagaacgagcggacccucgacuuccacgacuccaacgugaagaaccuguacgagaaggucaagagccagcugaagaacaacgcgaaggagaucggcaacgggugcuucgaguucuaccacaagugcaacgacgagugcauggaguccgugaagaacggcaccuacgacuaccccaaguacagcgaggaguccaagcucaaccgcgagaagaucgacggcgugaagcuggagagcaugggggucuaccagauccuggccaucuacagcacgguggccuccagccucgugcugcuggucucccucggcgccaucagcuucuggaugugcuccaacgggagccugcagugccggaucugcaucuga

SEQ ID NO: 66299 - RNA, 1701 nt, Artificial Sequence; identical to SEQ ID NO: 65952
  derived and/or modified CDS sequence (opt1) from hemagglutinin__InfluenzaA__ACA24502

SEQ ID NO: 66300 - RNA, 1698 nt, Artificial Sequence
  derived and/or modified CDS sequence (opt1) from hemagglutinin__InfluenzaA__ACA24513
augaaggugaagcugcucauccugcugugcaccuucaccgccacguacgccgacaccaucugcaucggcuaccacgcgaacaacagcaccgacaccgucgacacggugcucgagaagaacgugaccgucacccacuccgugaaccugcuggaggacagccacaacgggaagcucugccugcugaagggcaucgcgccccuccagcuggggaacugcuccguggccggcuggauccuggggaacccggagugcgagcuccugaucagcaaggaguccuggagcuacaucgucgagacccccaaccccgagaacggcacgugcuaccccggcuacuucgccgacuacgaggagcugcgcgagcagcucaacuccgugagcuccuucgagcgguucgagaucuucccgaaggagagcuccuggcccaaccacaccgugaccggggucagcgccuccugcagccacaacggcaaguccagcuucuaccgcaaccugcuguggcucaccgggaagaacggccuguaccccaaccuguccaagagcuacgccaacaacaaggagaaggaggugcucgugcuguggggcguccaccacccgcccaacaucggggaccagcgggcccuguaccacacggagaacgccuacguguccguggucagcagccacuacucccgccgguucacccccgagaucgccaagcgccccaaggugcgggaccaggagggccgcaucaacuacuacuggacccuccuggagccccgggacaccaucaucuucgaggcgaacgggaaccugaucgccccgcgcuucgccuucgcccucagccggggcuucggguccggcaucaucacgagcaacgcccccauggacgagugcgacgcgaagugccagacgccccagggcgccaucaacuccagccugcccuuccagaacgugcacccggucaccaucggggagugccccaaguacgugcgcuccaccaagcugcggauggugaccggccuccgcaacauccccagcauccagucccgggggcuguucggcgccaucgccggguucaucgagggcggcuggaccgggauggucgacggcugguacggguaccaccaccagaacgagcagggcagcggguacgccgcggaccagaaguccacccagaacgccaucaacggcaucaccaacaaggugaacagcgugaucgagaagaugaacacgcaguucaccgccgucggcaaggaguucaacaagcuggagcgccggauggagaaccucaacaagaagguggacgacggguuccuggacaucuggaccuacaacgccgagcugcucguccugcuggagaacgagcgcacccucgacuuccacgacuccaacgugaagaaccuguacgagaaggucaagagccagcugaagaacaacgccaaggagaucggcaacgggugcuucgaguucuaccacaagugcaacgacgagugcauggaguccgugaagaacggcacguacgacuaccccaaguacagcgaggaguccaagcucaaccgggagaagaucgacggggugaagcuggagagcaugggcguguaccagauccuggcgaucuacuccaccgucgccagcagccucgugcugcuggugucccucggcgccaucagcuucuggaugugcuccaacgggagccugcagugccgcaucugcaucuga

SEQ ID NO: 66301 - RNA, 1698 nt, Artificial Sequence; identical to SEQ ID NO: 65938
  derived and/or modified CDS sequence (opt1) from hemagglutinin__InfluenzaA__ACA24524

SEQ ID NO: 66302 - RNA, 1701 nt, Artificial Sequence
  derived and/or modified CDS sequence (opt1) from hemagglutinin__InfluenzaA__ACA24689
augaagaccaucaucgcccugagcuacauccucugccugguguucgcccagaagcugcccggcaucgacaacuccaccgcgacgcucugccuggggcaccacgccgucccgaacggcaccaucgugaagaccaucaccaacgaccagaucgaggugacgaacgccaccgagcugguccagaacagcuccaccgggggcaucugcgacagcccccaccagaucaucgacggggagaacugcacccucaucgacgcccugcugggcgacccccagugcgacggcuuccagaacaagaagugggaccucuucguggagcgcuccaaggccuacagcaacugcuaccccuacgacgugccggacuacgcgucccugcggagccuggucgccuccagcgggacgcucgaguucaacaacgaguccuucaacuggaccggcgugacccagaacgggaccagcuccgccugcaagcgcggcagcaacaacuccuucuucagccggcugaacuggcugacgcacuccaaguucaaguaccccgcccucaacgugaccaugcccaacaacgaggaguucgacaagcuguacaucuggggcguccaccaccccgggaccgacaacgaccagaucuuccuguacgcgcaggccagcggccgcaucaccguguccacgaagcggagccagcagaccgugaucccgaacaucgggagccgcccccggguccgcaacauccccucccggaucagcaucuacuggaccaucgugaagcccggcgacauccuccugaucaacuccaccgggaaccugaucgccccgcgcggcuacuucaagauccggagcggcaaguccagcaucaugcgcuccgacgcccccaucgggaagugcaacagcgagugcaucacgcccaacggcuccauccccaacgacaagccguuccagaacgugaaccggaucaccuacggggccugcccccgcuacgucaagcagaacacccucaagcuggcgaccggcaugcggaacgugcccgagaagcagacgcgcgggaucuucggcgccaucgccggcuucaucgagaacgggugggagggcaugguggacgggugguacggcuuccggcaccagaacagcgaggggaucggccaggccgccgaccugaaguccacccaggcggccaucgaccagaucaacggcaagcucaaccgccugaucgggaagaccaacgagaaguuccaccagaucgagaaggaguucagcgaggucgagggccggauccaggaccuggagaaguacguggaggacaccaagaucgaccucugguccuacaacgccgagcugcugguggcccucgagaaccagcacacgaucgaccugaccgacagcgagaugaacaagcuguucgagaagaccaagaagcagcuccgcgagaacgccgaggacauggggaacggcugcuucaagaucuaccacaagugcgacaacgcgugcaucggguccauccggaacggcaccuacgaccacuacgucuaccgcgacgaggcccugaacaaccgcuuccagaucaagggcaucgagcucaagagcggguacaaggacuggauccuguggaucuccuucgccaucagcugcuuccugcugugcguggcccuccugggcuucaucaugugggccugccagaaggggaacauccggugcaacaucugcaucuga

SEQ ID NO: 66303 - RNA, 1701 nt, Artificial Sequence
  derived and/or modified CDS sequence (opt1) from hemagglutinin__InfluenzaA__ACA24700
augaagaccaucaucgcccugagcuacauccucugccugguguucgcccagaagcugcccggcaucgacaacuccaccgcgacgcucugccuggggcaccacgccgucccgaacggcaccaucgugaagaccaucaccaacgaccagaucgaggugacgaacgccaccgagcugguccagaacagcuccaccgggggcaucugcgacagcccccaccagauccucgacggggagaacugcacccugaucgacgcccugcucggcgacccccagugcgacggcuuccagaacaagaagugggaccuguucguggagcgcucccaggccuacagcaacugcuaccccuacgacgugccggacuacgcgucccugcggagccucgucgccuccagcgggacgcuggaguucaacaacgaguccuucaacuggaccggcgugacccagaacgggaccagcuccgccugcaagcgcggcagcaacaacuccuucuucagccggcugaacuggcucacgcacuccaaguucaaguaccccgcccugaacgugaccaugcccaacaacgaggaguucgacaagcuguacaucuggggcguccaccaccccgggaccgacaacgaccagaucuuccucuacgcgcaggccagcggccgcaucaccguguccacgaagcggagccagcagaccgugaucccgaacaucgggagccgcccccggguccgcaacauccccucccggaucagcaucuacuggaccaucgugaagcccggcgacauccugcugaucaacuccaccgggaaccucaucgccccgcgcggcuacuucaagauccggagcggcaaguccagcaucaugcgcuccgacgcccccaucgggaagugcaacagcgagugcaucacgcccaacggcuccauccccaacgacaagccguuccagaacgugaaccggaucaccuacggggccugcccccgcuacgucaagcagaacacccugaagcuggcgaccggcaugcggaacgugcccgagaagcagacgcgcgggaucuucggcgccaucgccggcuucaucgagaacgggugggagggcaugguggacgggugguacggcuuccggcaccagaacagcgaggggaucggccaggccgccgaccucaaguccacccaggcggccaucgaccagaucaacggcaagcugaaccgccugaucgggaagaccaacgagaaguuccaccagaucgagaaggaguucagcgaggucgagggccggauccaggaccucgagaaguacguggaggacaccaagaucgaccugugguccuacaacgccgagcugcucguggcccuggagaaccagcacacgaucgaccugaccgacagcgagaugaacaagcuguucgagaagaccaagaagcagcuccgcgagaacgccgaggacauggggaacggcugcuucaagaucuaccacaagugcgacaacgcgugcaucggguccauccggaacggcaccuacgaccacgacgucuaccgcgacgaggcccugaacaaccgcuuccagaucaagggcguggagcucaagagcggguacaaggacuggauccuguggaucuccuucgccaucagcugcuuccugcucugcguggcccugcugggcuucaucaugugggccugccagaaggggaacauccggugcaacaucugcaucuga

SEQ ID NO: 66304 - RNA, 1698 nt, Artificial Sequence
  derived and/or modified CDS sequence (opt1) from hemagglutinin__InfluenzaA__ACA28846
augaaggugaagcugcucguccugcugugcaccuucaccgccacguacgccgacaccaucugcaucggcuaccacgcgaacaacagcaccgacaccguggacacggugcucgagaagaacgucaccgugacccacuccgugaaccugcuggagaacagccacaacgggaagcucugccugcugaagggcaucgcgccccuccagcuggggaacugcuccgucgccggcuggauccuggggaacccggagugcgagcuccugaucagcaaggaguccuggagcuacaucguggagaagcccaaccccgagaacgggaccugcuaccccggccacuucgccgacuacgaggagcugcgcgagcagcucuccagcguguccagcuucgagcgguucgagaucuucccgaaggaguccagcuggcccaaccacacggucaccgggguguccgccagcugcucccacaacggcgagagcuccuucuaccgcaaccugcuguggcucaccgggaagaacggccuguaccccaaccugagcaaguccuacgccaacaacaaggagaaggaggugcucguccuguggggcgugcaccacccgcccaacaucggcauccagaaggcccuguaccacaccgagaacgccuacgugagcgucgugagcucccacuacagccggaaguucacgcccgagaucgccaagcgccccaaggugcgggaccaggagggccgcaucaacuacuacuggacccuccuggagcccggggacaccaucaucuucgaggcgaacggcaaccugaucgccccgcgguacgccuucgcccucucccgcggguucggcagcggcaucaucaacuccaacgcccccauggacaagugcgacgcgaagugccagacgccccagggggccaucaacagcucccugcccuuccagaacguccacccggugaccaucggcgagugccccaaguacgugcggagcgccaagcugcgcauggucaccgggcuccggaacauccccuccauccagagccgcggccuguucggggccaucgccggcuucaucgagggcggguggaccggcaugguggacgggugguacggcuaccaccaccagaacgagcagggguccggcuacgcggccgaccagaaguccacccagaacgccaucaacggcaucacgaacaaggugaacagcgucaucgagaagaugaacacccaguucaccgccguggggaaggaguucaacaagcuggagcggcgcauggagaaccucaacaagaaggucgacgacggcuucaucgacaucuggaccuacaacgccgagcugcuggugcuccuggagaacgagcggacgcuggacuuccacgacagcaacgugaagaaccucuacgagaaggucaagucccagcugaagaacaacgcgaaggagaucgggaacggcugcuucgaguucuaccacaagugcaacgacgagugcauggagagcgugaagaacgggaccuacgacuaccccaaguacuccgaggagagcaagcugaaccgcgagaagaucgacggcgugaagcucgaguccaugggcgucuaccagauccuggccaucuacagcaccguggccagcucccuggugcuccuggucagccugggggccaucuccuucuggaugugcagcaacggcucccuccagugccggaucugcaucuga

SEQ ID NO: 66305 - RNA, 1701 nt, Artificial Sequence
  derived and/or modified CDS sequence (opt1) from hemagglutinin__InfluenzaA__ACA33749
augaagaccaucaucgcccugagcuacauccucugccugguguucgcccagaagcugcccggcaacgacaacuccaccgcgacgcucugccuggggcaccacgccgucccgaacggcaccaucgugaagaccaucaccaacgaccagaucgaggugacgaacgccaccgagcugguccagagcuccagcaccggggagaucugcgacagcccccaccagauccucgacggcgagaacugcacccugaucgacgcccugcucggggacccccagugcgacggcuuccagaacaagaagugggaccuguucguggagcgcagcaaggccuacuccaacugcuaccccuacgacgugccggacuacgcgagccugcggucccucgucgccagcuccggcacgcuggaguucaacaacgagagcuucaacuggaccggggugacccagaacggcaccuccagcuccugcauccgccggagcaacaacuccuucuucagccgccugaacuggcucacgcaccugaaguucaaguaccccgcccugaacgugaccaugcccaacaacgagaaguucgacaagcucuacaucuggggcguccaccaccccgggaccgacaacgaccagaucuuccuguacgcccaggcguccgggcggaucaccgugagcacgaagcgcagccagcagaccgugaucccgaacaucggcucccggccccgcguccggaacauccccagccgcaucuccaucuacuggaccaucgugaagcccggcgacauccugcucaucaacagcaccgggaaccugaucgccccgcggggcuacuucaagauccgcuccgggaaguccuccaucaugcggagcgacgcccccaucggcaagugcaacuccgagugcaucacgcccaacggcagcauccccaacgacaagccguuccagaacgugaaccgcaucaccuacggggccugcccccgguacgucaagcagaacacccugaagcucgccaccggcaugcgcaacgugcccgagaagcagacgcgggggaucuucggcgcgaucgccggguucaucgagaacggcugggagggcaugguggacgggugguacggcuuccgccaccagaacuccgaggggaucggccaggccgccgaccucaagagcacccaggccgcgaucgaccagaucaacgggaagcugaaccggcugaucggcaagaccaacgagaaguuccaccagaucgagaaggaguucuccgaggucgagggccgcauccaggaccuggagaaguacguggaggacaccaagaucgaccuguggagcuacaacgccgagcuccugguggcccuggagaaccagcacacgaucgaccucaccgacuccgagaugaacaagcuguucgagaagaccaagaagcagcugcgggagaacgccgaggacauggggaacggcugcuucaagaucuaccacaagugcgacaacgccugcaucgggagcauccgcaacggcaccuacgaccacgacgucuaccgcgacgaggcgcucaacaaccgguuccagaucaaggggguggagcugaaguccggcuacaaggacuggauccuguggaucagcuucgccaucuccugcuuccuccugugcguggcccugcucggcuucaucaugugggccugccagaaggggaacauccgcugcaacaucugcaucuga

SEQ ID NO: 66306 - RNA, 1698 nt, Artificial Sequence; identical to SEQ ID NO: 65934
  derived and/or modified CDS sequence (opt1) from hemagglutinin__InfluenzaA__ACA96519

SEQ ID NO: 66307 - RNA, 1659 nt, Artificial Sequence
  derived and/or modified CDS sequence (opt1) from hemagglutinin__InfluenzaA__ACC55270
augaacacccagauccuggccuucaucgccugcgugcucaccggcgucaagggggacaagaucugccugggccaccacgcgguggccaacgggacgaaggugaacacccugaccgagcgcggcaucgaggucgugaacgccaccgagacgguggagaccaccaacaucaagaagaucugcacccaggggaagcggcccacggaccucggccagugcggccugcuggggacccucaucggcccgccccagugcgaccaguuccuggaguucagcuccgaccugaucaucgagcgccgggaggggaccgacaucugcuaccccggccgcuucaccaacgaggagagccuccggcagauccugcgccgguccgggggcaucggcaaggagagcaugggguucacguacuccggcauccgcaccaacggggccaccagcgccugcacccgguccggcagcuccuucuacgcggagaugaaguggcugcucagcaacuccgacaacgccgccuucccccagaugacgaaggccuaccgcaacccgcggaacaagcccgcgcugaucaucuggggcguccaccacagcgaguccgugagcgagcagaccaagcuguacggguccggcaacaagcucaucaccgugcgcagcuccaaguaccagcagagcuucacccccaaccccggggcccggcgcaucgacuuccacuggcugcugcucgacccgaacgacacggucaccuucaccuucaacggcgccuucaucgcccccgaccggaccuccuucuuccgcggggagagccugggcgugcagagcgacgcgccccuggacuccagcugccggggcgacugcuuccacuccgggggcacgaucgugagcucccuccccuuccagaacaucaacagccgcaccgucgggaagugcccgcgguacgugaagcagaagucccugcugcucgccaccggcaugcgcaacgugcccgagaagcccaagccccgggggcuguucggcgccaucgccggcuucaucgagaacgggugggagggccugaucaacgggugguacggcuuccgccaccagaacgcccagggggagggcaccgccgcggacuacaagagcacgcaguccgccaucgaccagaucaccggcaagcucaaccgccugaucgggaagaccaaccagcaguucgagcugaucgacaacgaguucaacgagaucgagcagcagaucggcaacgucaucaacuggacccgggacgccaugacggagaucuggagcuacaacgccgagcuccugguggccauggagaaccagcacaccaucgaccuggcggacuccgagaugagcaagcucuacgagcgcgugaagaagcagcugcgggagaacgccgaggaggacgggaccggcugcuucgagaucuuccacaagugcgacgaccagugcauggaguccauccgcaacaacaccuacgaccacacgcaguaccggaccgagagccugcagaaccgcauccagaucgacccggucaagcucuccagcggcuacaaggacaucauccugugguucuccuucggggccagcugcuuccugcuccuggccaucgccaugggccugguguucaucugcaucaagaacgggaacaugcagugcaccaucugcaucuga

SEQ ID NO: 66308 - RNA, 1698 nt, Artificial Sequence; identical to SEQ ID NO: 65938
  derived and/or modified CDS sequence (opt1) from hemagglutinin__InfluenzaA__ACC61964

SEQ ID NO: 66309 - RNA, 1698 nt, Artificial Sequence
  derived and/or modified CDS sequence (opt1) from hemagglutinin__InfluenzaA__ACC61975
augaaggugaagcugcucguccugcugugcaccuucaccgccagcuacgccgacacgaucugcaucggcuaccacgcgaacaacuccaccgacaccguggacaccgugcucgagaagaacgucacggugacccacagcgugaaccugcuggaggacucccacaacgggaagcucugccugcugaagggcaucgcgccccuccagcuggggaacugcagcgucgccggcuggauccuggggaacccggagugcgagcuccugaucuccaaggagagcugguccuacaucguggaggugcccaaccccgagaacgggaccugcuaccccggcuacuucgccgacuacgaggagcugcgcgagcagcucagcuccaucagcuccuucgagcgguucgagaucuucccgaaggagagcuccuggcccaaccacaccgucacgggggugagcgccuccugcagccacaacggcaaguccagcuucuaccgcaaccugcuguggcucaccgggaagaacggccuguaccccaaccuguccaagagcuacgccaacaacaaggagaaggaggugcucguccuguggggcgugcaccacccgcccaacaucggcgaccagcgggcccuguaccacaccgagaacgccuacgugagcgucguguccagccacuacucccgccgguucacccccgagaucgccaagcgccccaaggugcgggaccaggagggccgcaucaacuacuacuggacgcuccuggagcccggggacaccaucaucuucgaggcgaacggcaaccugaucgccccgcgguucgccuucgcccucagccgcgggcugggcuccggcaucaucaccagcaacgcccccauggacgagugcgacgcgaagugccagacgccccagggggccaucaacuccagccugcccuuccagaacguccacccggugaccaucggcgagugccccaaguacgugcgguccgccaagcuccgcauggucaccgggcugcggaacauccccagcauccagucccgcggccuguucggggccaucgccggcuucaucgagggcggguggaccggcaugguggacgggugguacggcuaccaccaccagaacgagcaggggagcggcuacgcggccgaccagaaguccacccagaacgccaucaacggcaucacgaacaaggugaacagcgucaucgagaagaugaacacccaguucaccgccguggggaaggaguucaacaagcucgagcggcgcauggagaaccugaacaagaaggucgacgacggcuuccuggacaucuggaccuacaacgccgagcuccuggugcugcucgagaacgagcggacgcuggacuuccacgacuccaacgugaagaaccuguacgagaaggucaagagccagcucaagaacaacgcgaaggagaucgggaacggcugcuucgaguucuaccacaagugcaacaacgagugcauggaguccgugaagaacgggaccuacgacuaccccaaguacagcgaggaguccaagcugaaccgcgagaagaucgacggcgugaagcuggagagcaugggcgucuaccagauccucgccaucuacagcaccguggccuccagccuggugcugcucgucucccugggggccaucagcuucuggaugugcuccaacggcagccugcagugccggaucugcaucuga

SEQ ID NO: 66310 - RNA, 1698 nt, Artificial Sequence; identical to SEQ ID NO: 65934
  derived and/or modified CDS sequence (opt1) from hemagglutinin__InfluenzaA__ACC61986

SEQ ID NO: 66311 - RNA, 1698 nt, Artificial Sequence
  derived and/or modified CDS sequence (opt1) from hemagglutinin__InfluenzaA__ACD37430
augaaggccaagcugcucgugcugcugugcaccuucaccgccacguacgcggacaccaucugcaucggcuaccacgccaacaacagcaccgacaccgucgacacggugcucgagaagaacgugaccgucacccacuccgugaaccugcuggaggacagccacaacgggaagcucugccugcugaagggcaucgcgccccuccagcuggggaacugcuccguggccggcuggauccuggggaacccggagugcgagcuccugaucagcaaggaguccuggagcuacaucgucgagacccccaaccccgagaacggcacgugcuaccccggcuacuucgccgacuacgaggagcugcgcgagcagcucuccagcguguccagcuucgagcgguucgagaucuucccgaaggaguccagcuggcccacccacaccgugaccggggucuccgccagcugcucccacaacggcaagagcuccuucuaccgcaaccugcuguggcucacggggaagaacggccuguaccccaaccugagcaaguccuacgugaacaacaaggagaaggaggugcucguccuguggggcgugcaccacccgcccaacaucggggaccagcgggcccuguaccacaccgagaacgccuacgugagcgucgugagcucccacuacagccgccgguucacccccgagaucgccaagcgccccaaggugcgggaccaggagggccgcaucaacuacuacuggacccuccuggagcccggggacacgaucaucuucgaggcgaacggcaaccugaucgccccgugguacgccuucgcccucucccggggguucggcagcggcaucaucaccuccaacgcccccauggacgagugcgacgcgaagugccagacgccccagggggccaucaacagcucccugcccuuccagaacguccacccggugaccaucggcgagugccccaaguacgugcgcagcgccaagcugcggauggucaccgggcuccgcaacauccccuccauccagagccggggccuguucggggccaucgccggcuucaucgagggcggguggaccggcaugguggacgggugguacggcuaccaccaccagaacgagcagggguccggcuacgcggccgaccagaaguccacccagaacgccaucaacggcaucaccaacaaggugaacagcgucaucgagaagaugaacacgcaguucaccgccguggggaaggaguucaacaagcuggagcgccggauggagaaccucaacaagaaggucgacgacggcuuccuggacaucuggaccuacaacgccgagcugcucgugcugcuggagaacgagcgcacccucgacuuccacgacagcaacgugaagaaccuguacgagaaggucaagucccagcugaagaacaacgcgaaggagaucgggaacggcugcuucgaguucuaccacaagugcaacaacgagugcauggagagcgugaagaacgggacguacgacuaccccaaguacuccgaggagagcaagcucaaccgggagaagaucgacggcgugaagcuggaguccaugggcgucuaccagauccuggccaucuacagcaccguggccagcucccucgugcugcuggucagccucggggccaucuccuucuggaugugcagcaacggcucccugcagugccgcaucugcaucuga

SEQ ID NO: 66312 - RNA, 1698 nt, Artificial Sequence
  derived and/or modified CDS sequence (opt1) from hemagglutinin__InfluenzaA__ACD37507
augaaggccaagcugcucgugcugcugugcaccuucgccgcgaccuacgccgacacgaucugcaucggcuaccacgccaacaacagcaccgacaccgucgacaccgugcucgagaagaacgugacggucacccacuccgugaaccugcuggagaacagccacaacgggaagcucugccugcugaagggcaucgcgccccuccagcuggggaacugcuccguggccggcuggauccuggggaacccggagugcgagcuccugaucagcaaggaguccuggagcuacaucgucgagaagcccaaccccgagaacgggaccugcuaccccggccacuucgccgacuacgaggagcugcgcgagcagcucuccagcguguccagcuucgagcgguucgagaucuucccgaaggaguccagcuggcccaaccacaccgugacgggggucuccgccagcugcucccacaacggcgagagcuccuucuaccgcaaccugcuguggcucaccgggaagaacggccuguaccccaaccugagcaaguccuacgccaacaacaaggagaaggaggugcucgugcuguggggcguccaccacccgcccaacaucggcaaccagaaggcccuguaccacaccgagaacgcguacgugagcguggucagcucccacuacagccggaaguucacccccgagaucgccaagcgccccaaggugcgggaccaggagggccgcaucaacuacuacuggacgcuccuggagcccggggacaccaucaucuucgaggccaacggcaaccugaucgccccgcgguacgccuucgcgcucucccgcggguucggcagcggcaucaucaacuccaacgcccccauggacaagugcgacgccaagugccagacgccccagggggccaucaacagcucccugcccuuccagaacgugcacccggucaccaucggcgagugccccaaguacgugcggagcgccaagcugcgcauggugaccgggcuccggaacauccccuccauccagagccgcggccuguucggggcgaucgccggcuucaucgagggcggguggaccggcauggucgacgggugguacggcuaccaccaccagaacgagcagggguccggcuacgccgccgaccagaaguccacccagaacgccaucaacggcaucaccaacaaggugaacagcgugaucgagaagaugaacacgcaguucaccgcggucgggaaggaguucaacaagcuggagcggcgcauggagaaccucaacaagaagguggacgacggcuucaucgacaucuggaccuacaacgccgagcugcugguccuccuggagaacgagcggacccuggacuuccacgacagcaacgugaagaaccucuacgagaaggugaagucccagcugaagaacaacgccaaggagaucgggaacggcugcuucgaguucuaccacaagugcaacgacgagugcauggagagcgucaagaacgggacguacgacuaccccaaguacuccgaggagagcaagcugaaccgcgagaagaucgacggcgugaagcucgaguccaugggcguguaccagauccuggccaucuacagcaccgucgccagcucccuggugcuccuggugagccugggggcgaucuccuucuggaugugcagcaacggcucccuccagugccggaucugcaucuga

SEQ ID NO: 66313 - RNA, 1698 nt, Artificial Sequence; identical to SEQ ID NO: 66079
  derived and/or modified CDS sequence (opt1) from hemagglutinin__InfluenzaA__ACD56113

SEQ ID NO: 66314 - RNA, 1698 nt, Artificial Sequence; identical to SEQ ID NO: 65938
  derived and/or modified CDS sequence (opt1) from hemagglutinin__InfluenzaA__ACD56124

SEQ ID NO: 66315 - RNA, 1701 nt, Artificial Sequence; identical to SEQ ID NO: 66011
  derived and/or modified CDS sequence (opt1) from hemagglutinin__InfluenzaA__ACD56258

SEQ ID NO: 66316 - RNA, 1701 nt, Artificial Sequence; identical to SEQ ID NO: 65753
  derived and/or modified CDS sequence (opt1) from hemagglutinin__InfluenzaA__ACD56269

SEQ ID NO: 66317 - RNA, 1698 nt, Artificial Sequence
  derived and/or modified CDS sequence (opt1) from hemagglutinin__InfluenzaA__ACD56280
augaaggugaagcugcucauccugcugugcaccuucaccgccacguacgccgacaccaucugcaucggcuaccacgcgaacaacagcaccgacaccgucgacacggugcucgagaagaacgugaccgucacccacuccgugaaccugcuggaggacagccacaacgggaagcucugccugcugaagggcaucgcgccccuccagcuggggaacugcuccguggccggcuggauccuggggaacccggagugcgagcuccugaucagcaaggaguccuggagcuacaucgucgagacccccaaccccggcaacggcacgugcuaccccggguacuucgccgacuacgaggagcugcgcgagcagcucuccagcguguccagcuucgagcgguucgagaucuucccgaaggaguccagcuggcccaaccacaccgugaccggcgucuccgccagcugcucccacaacggcaagagcuccuucuaccgcaaccugcuguggcucaccgggaagaacgggcuguaccccaaccugagcaaguccuacgccaacaacaaggagaaggaggugcucgugcuguggggcguccaccacccgcccaacaucggcgaccagcgggcccuguaccacacggagaacgccuacgugagcguggucagcucccacuacagccgccgguucacccccgagaucgccaagcgccccaaggugcgggaccaggaggggcgcaucaacuacuacuggacccuccuggagcccggcgacaccaucaucuucgaggcgaacgggaaccugaucgccccgcgguucgccuucgcccucucccgcggcuucggcagcgggaucaucacguccaacgcccccauggacgagugcgaggcgaagugccagacgccccagggcgccaucaacagcucccugcccuuccagaacgugcacccggucaccaucggggagugccccaaguacgugcggagcaccaagcugcgcauggugaccggccuccggaacauccccuccauccagagccgcgggcuguucggcgccaucgccggcuucaucgagggcggguggaccgggauggucgacggcugguacggguaccaccaccagaacgagcagggcuccggcuacgccgcggaccagaaguccacccagaacgccaucaacgggaucaccaacaaggugaacagcgugaucgagaagaugaacacgcaguucaccgccgucggcaaggaguucaacaagcuggagcggcgcauggagaaccucaacaagaagguggacgacggguuccuggacaucuggaccuacaacgccgagcugcucguccugcuggagaacgagcggacccucgacuuccacgacagcaacgugaagaaccuguacgagaaggugaagucccagcugaagaacaacgccaaggagaucggcaacgggugcuucgaguucuaccacaagugcaacgacgagugcauggagagcgucaagaacggcacguacgacuaccccaaguacuccgaggagagcaagcucaaccgcgagaagaucgacggcgugaagcuggaguccauggggguguaccagauccuggcgaucuacagcaccgucgccagcucccucgugcugcuggugagccucggcgccaucuccuucuggaugugcagcaacgggucccugcagugccggaucugcaucuga

SEQ ID NO: 66318 - RNA, 1689 nt, Artificial Sequence
  derived and/or modified CDS sequence (opt1) from hemagglutinin__InfluenzaA__ACD56324
auggccaucaucuaccugauccuccuguucaccgccgugcgcggcgaccagaucugcaucggguaccacgcgaacaacagcaccgagaaggucgacacgauccuggagcggaacgugaccgugacccacgccaagaacauccucgagaagacccacaacggccgccugugcaagcugaacgggaucccgccccucgagcugggcgacugcuccaucgccggguggcugcucggcaaccccgagugcgaccggcugcugcgcguccccgaguggagcuacaucauggagaaggagaacccccggaacggccucugcuacccgggguccuucaacgacuacgaggagcugaagcaccuccugagcuccgugaagcacuucgagaaggugcgcauccugcccaaggaccgguggacgcagcacaccaccaccggcagcucccgcgccugcgccgucagcgggaaccccuccuucuuccggaacaugguguggcugacgaagaaggagagcaacuaccccguggcgaagggcuccuacaacaacaccagcggggagcagaugcucaucaucuggggcguccaccacccgaucgacgagaccgagcagcgcacccuguaccagaacgugggcacguacguguccgucgggaccagcacccugaacaagcgguccacccccgacaucgccacgcgccccaaggugaacggccucgggagccggauggaguucuccuggacccugcuggacaugugggacaccaucaacuucgagagcaccggcaaccucaucgcccccgaguacggcuucaagaucuccaagcgcgggagcagcggcaucaugaagacggagcggacccuggagaacugcgagaccaagugccagaccccgcugggggccaucaacacgacccuccccuuccacaacgugcacccccugaccaucggcgagugccccaaguacgucaaguccgagaagcuggugcucgcgaccgggcugcgcaacgugccgcagaucgagccccggggccuguucggcgccaucgccggguucaucgagggcggguggcagggcauggucgacgggugguacggcuaccaccacagcaacgaccagggcuccggguacgccgccgacaaggagagcacgcagaaggcguucgacggcaucaccaacaaggugaacuccgugaucgagaagaugaacacccaguucgaggccgucgggaaggaguucagcaaccucgagcgccggcuggagaaccugaacaagaagauggaggacggcuuccucgacguguggaccuacaacgccgagcugcuggugcucauggagaacgagcgcacgcuggacuuccacgacuccaacgucaagaaccuguacgacaaggugcggaugcagcuccgcgacaacgucaaggagcuggggaacggcugcuucgaguucuaccacaagugcgacgacgagugcaugaacagcgugaagaacggcaccuacgacuaccccaaguacgaggaggaguccaagcugaaccgcaacgagaucaagggggugaagcucagcuccaugggcgucuaccagauccuggccaucuacgccaccguggcggggagccugucccucgccaucaugauggccggcaucagcuucuggaugugcuccaacggcagccugcagugccggaucugcaucuga

SEQ ID NO: 66319 - RNA, 1689 nt, Artificial Sequence
  derived and/or modified CDS sequence (opt1) from hemagglutinin__InfluenzaA__ACD85187
auggccaucaucuaccugauccuccuguucaccgccgugcgcggcgaccagaucugcaucggguaccacgcgaacaacagcaccgagaaggucgacacgauccuggagcggaacgugaccgugacccacgccaaggacauccucgagaagacccacaacggcaagcugugcaagcugaacgggaucccgccccucgagcugggcgacugcuccaucgccggguggcugcucggcaaccccgagugcgaccgccugcugcggguccccgaguggagcuacaucauggagaaggagaacccccgcuacucccucugcuacccgggcagcuucaacgacuacgaggagcugaagcaccuccuguccagcgugaagcacuucgagaaggugaagauccugcccaaggaccgguggacgcagcacaccaccaccgggggcuccaaggccugcgccgucagcgggaagcccuccuucuuccgcaacaugguguggcugacgaagaagggccccaacuacccgguggcgaaggggagcuacaacaacaccuccggcgagcagaugcucaucaucuggggcguccaccaccccaaggacgaggccgagcagcgggcccuguaccaggagguggggaccuacgugagcgccuccaccagcacgcugaacaagcgcuccacccccgagaucgcggcccggcccgaggucaacggccucgggagccgcauggaguucuccuggacccugcuggacgugugggacaccaucaacuucgagagcacgggcaaccucguggccccggaguacggcuucaagaucuccaagcgggggagcagcggcaucaugaagaccgaggggacccugggcaacugcgagaccaagugccagacgccccugggggccaucaacaccacccuccccuuccacaacguccacccccugaccaucggcgagugcccgaaguacgugaaguccgagaagcuggugcucgccacgggccugcgcaacgucccccagaucgagagccgggggcuguucggcgcgaucgccggguucaucgagggcggguggcagggcaugguggacggcugguacggguaccaccacuccaacgaccagggcagcggguacgccgccgacaaggaguccacccagaaggccuucgacggcaucaccaacaaggugaacagcgucaucgagaagaugaacacccaguucgaggcgguggggaaggaguucaacaaccucgagaagcgccuggagaaccugaacaagaagauggaggacggcuuccucgacguguggacguacaacgccgagcugcugguccucauggagaacgagcggacccuggacuuccacgacuccaacgugaagaaccuguacgacaagguccgcaugcagcuccgggacaacgugaaggagcugggcaacgggugcuucgaguucuaccacaagugcgacgacgagugcaugaacagcgugaagaacggcaccuacgacuaccccaaguacgaggaggaguccaagcugaaccgcaacgagaucaagggggucaagcucagcuccaugggcguguaccagauccuggccaucuacgccaccguggccggcagccugucccucgcgaucaugauggccgggaucagcuucuggaugugcuccaacggcagccugcagugccggaucugcaucuga

SEQ ID NO: 66320 - RNA, 1689 nt, Artificial Sequence
  derived and/or modified CDS sequence (opt1) from hemagglutinin__InfluenzaA__ACD85198
auggccaucaucuaccugauccuccuguucaccgccgugcgcggcgaccagaucugcaucggguaccacgcgaacaacagcaccgagaaggucgacacgauccuggagcggaacgugaccgugacccacgccaaggacauccucgagaagacccacaacggcaagcugugcaagcugaacgggaucccgccccucgagcugggcgacugcuccaucgccggguggcugcucggcaaccccgagugcgaccgccugcugcggguccccgaguggagcuacaucauggagaaggagaacccccgcuacucccucugcuacccgggcagcuucaacgacuacgaggagcugaagcaccuccuguccagcgugaagcacuucgagaaggugaagauccugcccaaggacggguggacgcagcacaccaccaccggcggguccaaggccugcgccgucagcggcaagcccuccuucuuccggaacaugguguggcugacgaagaaggggcccaacuacccgguggcgaagcgcagcuacaacaacaccuccggcgagcagaugcucaucaucuggggcguccaccaccccaccgacgaggccgagcagcgggcccuguaccaggagguggggaccuacgugagcgccuccacgagcacccugaacaagcgcuccacccccgagaucgcggcccggcccgaggucaacggccuccgcagccggauggaguucuccuggacccugcuggacgugugggacacgaucaacuucgagagcaccgggaaccucguggccccggaguacggcuucaagaucuccaagcgcggcagcagcgggaucaugaagaccgagggcacccuggggaacugcgagacgaagugccagacgccccugggcgccaucaacaccacccuccccuuccacaacguccacccccugaccaucggggagugcccgaaguacgugaaguccgagaagcuggugcucgccaccggccugcggaacgucccccagaucgagagccgcggccuguucggggcgaucgccggcuucaucgagggcggguggcaggggaugguggacggcugguacggcuaccaccacuccaacgaccaggggagcggcuacgccgccgacaaggaguccacccagaaggccuucgaccggaucaccaacaaggugaacagcgucaucgagaagaugaacacgcaguucgaggcgguggggaaggaguucuccaaccucgagaagcgccuggagaaccugaacaagaagauggaggacggcuuccucgacguguggaccuacaacgccgagcugcugguccucauggagaacgagcggacccugggguuccacgacagcaacgugaagaaccuguacgacaagguccgcaugcagcuccgggacaacgugaaggagcugggcaacggcugcuucgaguucuaccacaagugcgacgacgagugcaugaacuccgugaagaacgggaccuacgacuaccccaaguacgaggaggagagcaagcugaagcgcaacgagaucaagggcgucaagcucuccagcauggggguguaccagauccuggccaucuacgccacgguggccggcucccugagccucgcgaucaugauggccggcaucuccuucuggaugugcagcaacgggucccugcagugccggaucugcaucuga

SEQ ID NO: 66321 - RNA, 1689 nt, Artificial Sequence
  derived and/or modified CDS sequence (opt1) from hemagglutinin__InfluenzaA__ACD85209
auggccaucaucuaccugauccuccuguucaccgccgugcgcggcgaccagaucugcaucggguaccacgcgaacaacagcaccgagaaggucgacacgauccuggagcggaacgugaccgugacccacgccaaggacauccucgagaagacccacaacggcaagcugugcaagcugaacgggaucccgccccucgagcugggcgacugcuccaucgccggguggcugcucggcaaccccgagugcgaccgccugcugagcguccccgagugguccuacaucauggagaaggagaacccccgggacggccucugcuacccggggagcuucaacgacuacgaggagcugaagcaccuccuguccagcgugaagcacuucgagaaggugaagauccugcccaaggaccgcuggacgcagcacaccaccaccggcgggucccgggccugcgccgucagcggcaaccccuccuucuuccgcaacaugguguggcugacgcagaaggggagcaacuaccccguggcgaagggcuccuacaacaacaccagcggcgagcagaugcucaucaucuggggcguccaccacccgaacgacgagaccgagcagcggacccuguaccagaacguggggacguacguguccgucgggaccagcacccugaacaagcgcuccacccccgacaucgccacgcggcccaaggugaacggccagggcgggcgcauggaguucagcuggacccuccuggacaugugggacaccaucaacuucgaguccaccggcaaccugaucgcccccgaguacggguucaagaucagcaagcggggcuccagcgggaucaugaagacggagggcacccucgagaacugcgagaccaagugccagaccccgcugggcgccaucaacacgacccugcccuuccacaacgugcacccccucaccaucggggagugccccaaguacgucaagagcgagaagcuggugcuggcgaccggccuccgcaacgugccgcagaucgagucccgggggcuguucggcgccaucgccggguucaucgagggcggcuggcaggggauggucgacggcugguacggguaccaccacagcaacgaccagggcuccggguacgccgccgacaaggagagcacgcagaaggcguucgacggcaucaccaacaaggugaacuccgugaucgagaagaugaacacccaguucgaggccgucggcaaggaguucagcaaccuggagcgccggcucgagaaccugaacaagaagauggaggacggguuccuggacguguggaccuacaacgccgagcuccuggugcugauggagaacgagcgcacgcucgacuuccacgacuccaacgucaagaaccuguacgacaaggugcggaugcagcugcgcgacaacgucaaggagcucggcaacgggugcuucgaguucuaccacaagugcgacgacgagugcaugaacagcgugaagaacggcaccuacgacuaccccaaguacgaggaggaguccaagcugaaccggaacgagaucaagggcgugaagcugagcuccaugggggucuaccagauccucgccaucuacgccaccguggcgggcagccugucccuggccaucaugauggccgggaucagcuucuggaugugcuccaacggcagccuccagugccgcaucugcaucuga

SEQ ID NO: 66322 - RNA, 1689 nt, Artificial Sequence
  derived and/or modified CDS sequence (opt1) from hemagglutinin__InfluenzaA__ACD85220
auggccaucaucuaccugauccuccuguucaccgccgugcgcggcgaccagaucugcaucggguaccacgcgaacaacagcaccgagaaggucgacacgauccuggagcggaacgugaccgugacccacgccaaggacauccucgagaagacccacaacggcaagcugugcaagcugaacgggaucccgccccucgagcugggcgacugcuccaucgccggguggcugcucggcaaccccgagugcgaccgccugcugcggguccccgaguggagcuacaucauggagaaggagaaccccaaguacucccucugcuacccgggcagcuucaacgacuacgaggagcugaagcaccuccuguccagcgugaagcacuucgagaaggugaagauccugcccaaggaccgcuggacgcagcacaccaccaccgggggcuccaaggccugcgccgucagcggggagcccuccuucuuccggaacaugguguggcugacgaagaagggccccaacuacccgguggcgaaggggagcuacaacaacaccuccggcgagcagaugcucaucaucuggggcguccaccaccccaaggacgaggccgagcagcgcgcccuguaccagaacguggggaccuacgugagcgccuccaccagcacgcugaacaagcgguccacccccgagaucgcggcccgccccgaggucaacggccucgggagccggauggaguucuccuggacccugcuggacgugugggacaccaucaacuucgagagcacgggcaaccucguggccccggaguacggcuucaagaucuccaagcgcgggagcagcggcaucaugaagaccgaggggacccugggcaacugcgagaccaagugccagacgccccugggggccaucaacaccacccuccccuuccacaacguccacccccugaccaucggcgagugcccgaaguacgugaaguccgagaagcuggugcucgccacgggccugcggaacgucccccagaucgagagccgcgggcuguucggcgcgaucgccggguucaucgagggcggguggcagggcaugguggacggcugguacggguaccaccacuccaacgaccagggcagcggguacgccgccgacaaggaguccacccagaaggccuucgacggcaucaccaacaaggugaacagcgucaucgagaagaugaacacccaguucgaggcgguggggaaggaguucaacaaccucgagaagcggcuggagaaccugaacaagaagauggaggacggcuuccucgacguguggacguacaacgccgagcugcugguccucauggagaacgagcgcacccuggacuuccacgacuccaacgugaagaaccuguacgacaagguccggaugcagcuccgcgacaacgugaaggagcugggcaacgggugcuucgaguucuaccacaagugcgacgacgagugcaugaacagcgugaagaacggcaccuacgacuaccccaaguacgagaaggaguccaagcugaaccggaacgagaucaagggggucaagcucagcuccaugggcguguaccagauccuggccaucuacgccaccguggccggcagccugucccucgcgaucaugauggccgggaucagcuucuggaugugcuccaacggcagccugcagugccgcaucugcaucuga

SEQ ID NO: 66323 - RNA, 1689 nt, Artificial Sequence
  derived and/or modified CDS sequence (opt1) from hemagglutinin__InfluenzaA__ACD85242
auggccaucaucuaccugauccuccuguucgccaccgugcgcggcgaccagaucugcaucggguaccacgcgaacaacagcaccgagaaggucgacacgauccuggagcggaacgugaccgugacccacgccaaggacauccucgagaagacccacaacggcaagcugugcaagcugaacgggaucccgccccucgagcugggcgacugcuccaucgccggguggcugcucggcaaccccgagugcgaccgccugcugcggguccccgaguggagcuacaucauggagaaggagaacccccgcuacucccucugcuacccgggcagccugaacgacuacgaggagcugaagcaccuccuguccagcgugaagcacuucgagaaggugcggauccugcccaaggaccgcuggacgcagcacaccaccaccgggggcuccaaggccugcgccgucagcgggaagcccuccuucuuccggaacaugguguggcucacgaagaagggccccaacuacccgguggcgaaggggagcuacaacaacaccuccggcgagcagaugcugaucaucuggggcguccaccaccccaaggacgaggccgagcagcgcgcccuguaccaggagguggggaccuacgugagcgccuccaccagcacgcucaacaagcgguccauccccgagaucgcggcccgccccgaggucaacggccuggggagccggauggaguucuccuggacccugcucgacgugugggacaccaucaacuucgagagcaccggcaaccugguggccccggaguacggcuucaagaucuccaagcgcgggagcagcggcaucaugaagacggaggggacccugggcaacugcgagaccaagugccagacgccccucggggccaucaacaccacccugcccuuccacaacguccacccccugaccaucggcgagugcccgaaguacgugaaguccgagaagcucgugcuggccaccggccugcggaacgucccccagaucgagagccgcggccucuucggggcgaucgccggguucaucgagggcggguggcagggcaugguggacggcugguacggguaccaccacuccaacgaccagggcagcggguacgccgccgacaaggaguccacgcagaaggccuucgacggcaucaccaacaaggugaacagcaugaucgagaagaugaacacccaguucgaggcggucgggaaggaguucaacaaccuggagaagcggcuggagaaccucgacaagaagauggaggacggcuuccuggacguguggaccuacaacgccgagcugcucgugcugauggagaacgagcgcacgcuggacuuccacgacuccaacgucaagaaccucuacgagaaggugcggaugcagcugcgcgacaacgucaaggagcugggcaacgggugcuucgaguucuaccacaagugcgacaacgagugcaugaacagcgugaagaacggcaccuacgacuaccccaaguacgaggaggaguccaagcucaagcggaacgagaucaagggggugaagcugagcuccaugggcgucuaccagauccuggccaucuacgccaccguggccggcagccucucccuggcgaucaugguggccgggaucagcuucuggaugugcuccaacggcagccugcagugccgcaucugcaucuga

SEQ ID NO: 66324 - RNA, 1689 nt, Artificial Sequence
  derived and/or modified CDS sequence (opt1) from hemagglutinin__InfluenzaA__ACD85253
auggccaucaucuaccugauccuccuguucgccaccgugcgcggcgaccagaucugcaucggguaccacgcgaacaacagcaccgagaaggucgacacgauccuggagcggaacgugaccgugacccacgccaaggacauccucgagaagacccacaacggcaagcugugcaagcugaacgggaucccgccccucgagcugggcgacugcuccaucgccggguggcugcucggcaaccccgagugcgaccgccugcugcggguccccgaguggagcuacaucauggagaaggagaacccccgcuacaaccucugcuacccgggcucccugaacgaguacgaggagcugaagcaccuccugagcuccgugaagcacuucgagaaggugcggauccugcccaaggaccgcuggacgcagcacaccaccaccgggggcagcaaggccugcgccgucuccggggagcccagcuucuuccggaacaugguguggcucacgaagaagggccccaacuacccgguggcgaagggguccuacaacaacaccagcggcgagcagaugcugaucaucuggggcguccaccaccccaacgacgaggccgagcagcgcgcccuguaccagaagguggggaccuacguguccgccagcaccuccacgcucaacaagcggagcauccccgagaucgcggcccgccccaaggucaacggccuggggucccggauggaguucuucuggacccugcucgacgugugggacaccaucaacuucgagagcaccggcaaccugguggucccggaguacggcuucaagaucuccaagcgcgggagcuccggcaucaugaagacggaggggacccugggcaacugcgagaccaagugccagacgccccucggggccaucaacaccacccugcccuuccacaacgugcacccccugaccaucggcgagugcccgaaguacgucaagagcgagaagcucgugcuggccaccggccugcggaacgugccccagaucgagagccgcggccucuucggggccaucgcgggguucaucgagggcggguggcagggcaugguggacggcugguacggguaccaccacuccaacgaccagggcagcggguacgccgccgacaaggaguccacgcagaaggccuucgacggcaucaccaacaaggucaacagcgugaucgagaagaugaacacccaguucgagaccguggggaaggaguucaacaaccuggagaagcggcuggagaaccucaacaagaagauggaggacggcuuccuggacgucuggacguacaacgccgagcugcucgugcugauggagaacgagcgcacccuggacuuccacgacuccaacgucaagaaccucuacgagaaggugcggaugcagcugcgcgacaacgugaaggagcugggcaacgggugcuucgaguucuaccacaagugcgacgacgagugcaugaacagcgucaagaacggcaccuacgacuaccccaaguacgaggaggaguccaagcucaagcggaacgagaucaagggggugaagcugagcuccaugggcguguaccagauccuggcgaucuacgccaccgucgccggcagccucucccuggccaucaugguggccgggaucagcuucuggaugugcuccaacggcagccugcagugccgcaucugcaucuga

SEQ ID NO: 66325 - RNA, 1701 nt, Artificial Sequence
  derived and/or modified CDS sequence (opt1) from hemagglutinin__InfluenzaA__ACD85440
augaagaccaucaucgcccugagcuacauccucugccugguguucgcccagaagcugcccggcaacgacaacuccaccgcgacgcucugccuggggcaccacgccgucccgaacggcaccaucgugaagaccaucaccaacgaccagaucgaggugacgaacgccaccgagcugguccagagcuccagcaccggggagaucugcgacagcccccaccagauccucgacggcgagaacugcacccugaucgacgcccugcucggggacccccagugcgacggcuuccagaacaagaagugggaccuguucguggagcgcagcaaggccuacuccaacugcuaccccuacgacgugccggacuacgcgagccugcggucccucgucgccagcuccggcacgcuggaguucaacaacgagagcuucaacuggaccggggugacccagaacggcaccuccagcgccugcauccgccgguccaacaacagcuucuucucccgccugaacuggcucacgcaccugaaguucaaguaccccgcccugaacgugaccaugcccaacaacgagaaguucgacaagcucuacaucuggggcguccaccaccccgggaccgacaacgaccagaucuuccuguacgcgcaggccagcgggcggaucaccguguccacgaagcgcagccagcagaccgugaucccgaacaucggcagccggccccgcguccggaacauccccucccgcaucagcaucuacuggaccaucgugaagcccggcgacauccugcucaucaacuccaccgggaaccugaucgccccgcggggcuacuucaagauccgcagcgggaaguccagcaucaugcgguccgacgcccccaucggcaagugcaacagcgagugcaucacgcccaacggcuccauccccaacgacaagccguuccagaacgugaaccgcaucaccuacggggccugcccccgguacgucaagcagaacacccugaagcucgcgaccggcaugcgcaacgugcccgagaagcagacgcgggggaucuucggcgccaucgccggguucaucgagaacggcugggagggcaugguggacgggugguacggcuuccgccaccagaacagcgaggggaucggccaggccgccgaccugaaguccacccaggcggccaucgaccagaucaacgggaagcugaaccggcucaucggcaagaccaacgagaaguuccaccagaucgagaaggaguucagcgaggucgagggccgcauccaggaccuggagaaguacguggaggacaccaagaucgaccugugguccuacaacgccgagcuccugguggcccuggagaaccagcacacgaucgaccucaccgacagcgagaugaacaagcuguucgagaagaccaagaagcagcugcgggagaacgccgaggaccucgggaacggcugcuucaagaucuaccacaagugcgacaacgcgugcaucggguccauccgcaacggcaccuacgaccacgacgucuaccgcgacgaggcccugaacaaccgguuccagaucaaggggguggagcugaaguccggcuacaaggacuggauccucuggaucuccuucgccaucagcugcuuccugcugugcguggcccuccugggcuucaucaugugggccugccagaaggggaacauccgcugcaacaucugcaucuga

SEQ ID NO: 66326 - RNA, 1701 nt, Artificial Sequence; identical to SEQ ID NO: 66325
  derived and/or modified CDS sequence (opt1) from hemagglutinin__InfluenzaA__ACD85451

SEQ ID NO: 66327 - RNA, 1701 nt, Artificial Sequence; identical to SEQ ID NO: 66325
  derived and/or modified CDS sequence (opt1) from hemagglutinin__InfluenzaA__ACD85462

SEQ ID NO: 66328 - RNA, 1701 nt, Artificial Sequence; identical to SEQ ID NO: 65952
  derived and/or modified CDS sequence (opt1) from hemagglutinin__InfluenzaA__ACD85473

SEQ ID NO: 66329 - RNA, 1701 nt, Artificial Sequence
  derived and/or modified CDS sequence (opt1) from hemagglutinin__InfluenzaA__ACD85484
augaagaccaucaucgcccugagcuacauccucugccugguguucgcccagaagcugcccggcaacgacaacuccaccgcgacgcucugccuggggcaccacgccgucccgaacggcaccaucgugaagaccaucaccaacgaccagaucgaggugacgaacgccaccgagcugguccagagcuccagcaccggggagaucugcgacagcccccaccagauccucgacggcgagaacugcacccugaucgacgcccugcucggggacccccagugcgacggcuuccagaacaagaagugggaccuguucguggagcgcagcaaggccuacuccaacugcuaccccuacgacgugccggacuacgcgagccugcggucccucgucgccagcuccggcacgcuggaguucaacaacgagagcuucaacuggaccggggugacccagaacggcaccuccagcgccugcauccgccgguccaacaacagcuucuucucccgccugaacuggcucacgcaccugaaguucaaguaccccgcccugaacgugaccaugcccaacaacgaggaguucgacaagcucuacaucuggggcguccaccaccccgggaccgacaacgaccagaucuuccuguacgcgcaggccagcgggcggaucaccguguccacgaagcgcagccagcagaccgugaucccgaacaucggcagccggccccgcguccggaacauccccucccgcaucagcaucuacuggaccaucgugaagcccggcgacauccugcucaucaacuccaccgggaaccugaucgccccgcggggcuacuucaagauccgcagcgggaaguccagcaucaugcgguccgacgcccccaucggcaagugcaacagcgagugcaucacgcccaacggcuccauccccaacgacaagccguuccagaacgugaaccgcaucaccuacggggccugcccccgguacgucaagcagaacacccugaagcucgcgaccggcaugcgcaacgugcccgagaagcagacgcgggggaucuucggcgccaucgccggguucaucgagaacggcugggagggcaugguggacgggugguacggcuuccgccaccagaacagcgaggggaucggccaggccgccgaccugaaguccacccaggcggccaucgaccagaucaacgggaagcugaaccggcucaucggcaagaccaacgagaaguuccaccagaucgagaaggaguucagcgaggucgagggccgcauccaggaccuggagaaguacguggaggacaccaagaucgaccugugguccuacaacgccgagcuccugguggcccuggagaaccagcacacgaucgaccucaccgacagcgagaugaacaagcuguucgagaagaccaagaagcagcugcgggagaacgccgaggacauggggaacggcugcuucaagaucuaccacaagugcgacaacgcgugcaucggguccauccgcaacggcaccuacgaccacgacgucuaccgcgacgaggcccucaacaaccgguuccagaucaaggggguggagcugaaguccggcuacaaggacuggauccuguggaucuccuucgccaucagcugcuuccuccugugcguggcccugcucggcuucaucaugugggccugccagaaggggaacauccgcugcaacaucugcaucuga

SEQ ID NO: 66330 - RNA, 1701 nt, Artificial Sequence; identical to SEQ ID NO: 65952
  derived and/or modified CDS sequence (opt1) from hemagglutinin__InfluenzaA__ACD85495

SEQ ID NO: 66331 - RNA, 1701 nt, Artificial Sequence
  derived and/or modified CDS sequence (opt1) from hemagglutinin__InfluenzaA__ACD85528
augaagaccaucaucgcccugagcuacauccucugccugguguucgcccagaagcugcccggcaacgacaacuccaccgcgacgcucugccuggggcaccacgccgucccgaacggcaccaucgugaagaccaucaccaacgaccagaucgaggugacgaacgccaccgagcugguccagagcuccagcaccggggagaucugcgacagcccccaccagauccucgacggcgagaacugcacccugaucgacgcccugcucggggacccccagugcgacggcuuccagaacaagaagugggaccuguucguggagcgcagcaaggccuacuccaacugcuaccccuacgacgugccggacuacgucagccugcggucccucguggcgagcuccggcacgcuggaguucaacaacgagagcuucaacuggaccggggugacccagaacggcaccuccagcgccugcauccgccgguccaacaagagcuucuucucccgccugaacuggcucacgcaccugaaguucaaguaccccgcccugaacgucaccaugcccaacaacgagaacuucgacaagcucuacaucuggggcgugcaccaccccgggaccgacaacgaccagaucuuccuguacgcccaggcgagcgggcggaucaccguguccacgaagcgcagccagcagaccgucaucccgaacaucggcagccggccccgcgugcggaacauccccucccgcaucagcaucuacuggaccaucgugaagcccggcgacauccugcucaucaacuccaccgggaaccugaucgccccgcggggcuacuucaagauccgcagcgggaaguccagcaucaugcgguccgacgcccccaucggcaagugcaacagcgagugcaucacgcccaacggcuccauccccaacgacaagccguuccagaacgucaaccgcaucaccuacggggccugcccccgguacgugaagcagaacacccugaagcucgccaccggcaugcgcaacgugcccgagaagcagacgcgggggaucuucggcgcgaucgccggguucaucgagaacggcugggagggcauggucgacgggugguacggcuuccgccaccagaacagcgaggggaucggccaggccgccgaccugaaguccacccaggccgcgaucgaccagaucaacgggaagcugaaccggcucaucggcaagaccaacgagaaguuccaccagaucgagaaggaguucagcgagguggagggccgcauccaggaccuggagaaguacguggaggacaccaagaucgaccugugguccuacaacgccgagcuccuggucgcccuggagaaccagcacacgaucgaccucaccgacagcgagaugaacaagcuguucgagaagaccaagaagcagcugcgggagaacgccgaggaccucgggaacggcugcuucaagaucuaccacaagugcgacaacgccugcaucggguccauccgcaacggcaccuacgaccacgacguguaccgcgacgaggcgcugaacaaccgguuccagaucaaggggguggagcugaaguccggcuacaaggacuggauccucuggaucuccuucgccaucagcugcuuccugcugugcgucgcccuccugggcuucaucaugugggccugccagaaggggaacauccgcugcaacaucugcaucuga

SEQ ID NO: 66332 - RNA, 1701 nt, Artificial Sequence
  derived and/or modified CDS sequence (opt1) from hemagglutinin__InfluenzaA__ACD85539
augaagaccaucaucgcccugagcuacauccucugccugguguucgcccagaagcugcccggcaacgacaacuccaccgcgacgcucugccuggggcaccacgccgucccgaacggcaccaucgugaagaccaucaccaacgaccagaucgaggugacgaacgccaccgagcugguccagagcuccagcaccggggagaucugcgacagcccccaccagauccucgacggcgagaacugcacccugaucgacgcccugcucggggacccccagugcgacggcuuccagaacaagaagugggaccuguucguggagcgcagcaaggccuacuccaacugcuaccccuacgacgugccggacuacgcgagccugcggucccucgucgccagcuccggcacgcuggaguucaacaacgagagcuucaacuggaccggggugacccagaacggcaccuccagcgccugcauccgccggacgaacaacuccuucuucagccgccugaacuggcucacccaccugaaguucaaguaccccgcccugaacgugaccaugcccaacaacgagaaguucgacaagcucuacaucuggggcguccaccaccccgggaccgacaacgaccagaucuuccuguacgcgcaggccuccgggcggaucacggugagcaccaagcgcucccagcagaccgugaucccgaacaucggcagccggccccgcguccggaacauccccagccgcaucuccaucuacuggaccaucgugaagcccggcgacauccugcucaucaacagcacggggaaccugaucgccccgcggggcuacuucaagauccgcuccgggaaguccuccaucaugcggagcgacgcccccaucggcaagugcaacuccgagugcaucacccccaacggcagcauccccaacgacaagccguuccagaacgugaaccgcaucaccuacggggccugcccccgguacgucaagcagaacacccugaagcucgcgacgggcaugcgcaacgugcccgagaagcagacccgggggaucuucggcgccaucgccggguucaucgagaacggcugggagggcaugguggacgggugguacggcuuccgccaccagaacuccgaggggaucggccaggccgccgaccucaagagcacccaggcggccaucgaccagaucaacgggaagcugaaccggcugaucggcaagaccaacgagaaguuccaccagaucgagaaggaguucuccgaggucgagggccgcauccaggaccuggagaaguacguggaggacacgaagaucgaccuguggagcuacaacgccgagcuccugguggcccuggagaaccagcacaccaucgaccucaccgacuccgagaugaacaagcuguucgagaagaccaagaagcagcugcgggagaacgccgaggacauggggaacggcugcuucaagaucuaccacaagugcgacaacgcgugcaucgggagcauccgcaacggcacguacgaccacgacgucuaccgcgacgaggcccucaacaaccgguuccagaucaaggggguggagcugaaguccggcuacaaggacuggauccuguggaucagcuucgccaucuccugcuuccuccugugcguggcccugcucggcuucaucaugugggccugccagaaggggaacauccgcugcaacaucugcaucuga

SEQ ID NO: 66333 - RNA, 1701 nt, Artificial Sequence
  derived and/or modified CDS sequence (opt1) from hemagglutinin__InfluenzaA__ACD85550
augaagaccaucaucgcccugagcuacauccucugccugguguucgcccagaagcugcccggcaacgacaacuccaccgcgacgcucugccuggggcaccacgccgucccgaacggcaccaucgugaagaccaucaccaacgaccagaucgaggugacgaacgccaccgagcugguccagagcuccagcaccggggagaucugcgacagcccccaccagauccucgacggcgagaacugcacccugaucgacgcccugcucggggacccccagugcgacggcuuccagaacaagaagugggaccuguucguggagcgcagcaaggccuacuccaacugcuaccccuacgacgugccggacuacgcgagccugcggucccucgucgccagcuccggcacgcuggaguucaacaacgagagcuucaacuggaccggggugacccagaacggcaccuccagcgccugcauccgccgguccaacaacagcuucuucucccgccugaacuggcucacgcaccugaaguucaaguaccccgcccugaacgugaccaugcccaacaacgagaaguucgacaagcucuacaucuggggcguccaccaccccgggaccgacaacgaccagaucuuccuguacgcgcaggccagcgggcggaucaccguguccacgaagcgcagccagcagaccgugaucccgaacaucggcagccggccccgcguccggaacauccccucccgcaucagcaucuacuggaccaucgugaagcccggcgacauccugcucaucaacuccaccgggaaccugaucgccccgcggggcuacuucaagauccgcagcgggaaguccagcaucaugcgguccgacgcccccaucggcaagugcaacagcgagugcaucacgcccaacggcuccauccccaacgacaagccguuccagaacgugaaccgcaucaccuacggggccugcccccgguacgucaagcagaacacccugaagcucgcgaccggcaugcgcaacgugcccgagaagcagacgcgggggaucuucggcgccaucgccggguucaucgagaacggcugggagggcaugguggacgggugguacggcuuccgccaccagaacagcgaggggaucggccaggccgccgaccugaaguccacccaggcggccaucgaccagaucaacgggaagcugaaccggcucaucggcaagaccaacgagaaguuccaccagaucgagaaggaguucagcgaggucgagggccgcauccaggaccuggagaaguacguggaggacaccaagaucgaccugugguccuacaacgccgagcuccugguggcccuggagaaccagcacacgaucgaccucaccgacagcgagaugaacaagcuguucgagaagaccaagaagcagcugcgggagaacgccgaggaccucgggaacggcugcuucaagaucuaccacaagugcgacaacgcgugcaucggguccauccgcaacggcaccuacgaccacgacgucuaccgcgacgaggcccugaacaaccgguuccagaucaaggggguggagcugaaguccggcuacaaggacuggauccucuggaucuccuucgccaugagcugcuuccugcugugcguggcccuccugggcuucaucaugugggccugccagaaggggaacauccgcugcaacaucugcaucuga

SEQ ID NO: 66334 - RNA, 1701 nt, Artificial Sequence; identical to SEQ ID NO: 65952
  derived and/or modified CDS sequence (opt1) from hemagglutinin__InfluenzaA__ACD85561

SEQ ID NO: 66335 - RNA, 1701 nt, Artificial Sequence
  derived and/or modified CDS sequence (opt1) from hemagglutinin__InfluenzaA__ACD85572
augaagaccaucaucgcccugagcuacauccucugccugguguucgcccagaagcugcccggcaacgacaacuccaccgcgacgcucugccuggggcaccacgccgucccgaacggcaccaucgugaagaccaucaccaacgaccagaucgaggugacgaacgccaccgagcugguccagagcuccagcaccggggagaucugcgacagcccccaccagauccucgacggcgagaacugcacccugaucgacgcccugcucggggacccccagugcgacggcuuccagaacaagaagugggaccuguucguggagcgcagcaaggccuacuccaacugcuaccccuacgacgugccggacuacgcgagccugcggucccucgucgccagcuccggcacgcuggaguucaacaacgagagcuucaacuggaccggggugacccagaacggcaccuccagcgccugcauccgccgguccaacaacagcuucuucucccgccugaacuggcucacgcaccugaaguucaaguaccccgcccugaacgugaccaugcccaacaacgagaaguucgacaagcucuacaucuggggcguccaccaccccgggaccgacaacgaccagaucuuccuguacgcgcaggccagcgggcggaucaccguguccacgaagcgcagccagcagaccgugaucccgaacaccggcagccggccccgcguccggaacauccccucccgcaucagcaucuacuggaccaucgugaagcccggcgacauccugcucaucaacuccacggggaaccugaucgccccgcggggcuacuucaagauccgcagcgggaaguccagcaucaugcgguccgacgcccccaucggcaagugcaacagcgagugcaucacccccaacggcuccauccccaacgacaagccguuccagaacgugaaccgcaucaccuacggggccugcccccgguacgucaagcagaacacccugaagcucgcgacgggcaugcgcaacgugcccgagaagcagacccgggggaucuucggcgccaucgccggguucaucgagaacggcugggagggcaugguggacgggugguacggcuuccgccaccagaacagcgaggggaucggccaggccgccgaccugaaguccacccaggcggccaucgaccagaucaacgggaagcugaaccggcucaucggcaagaccaacgagaaguuccaccagaucgagaaggaguucagcgaggucgagggccgcauccaggaccuggagaaguacguggaggacacgaagaucgaccugugguccuacaacgccgagcuccugguggcccuggagaaccagcacaccaucgaccucaccgacagcgagaugaacaagcuguucgagaagaccaagaagcagcugcgggagaacgccgaggacauggggaacggcugcuucaagaucuaccacaagugcgacaacgcgugcaucggguccauccgcaacggcacguacgaccacgacgucuaccgcgacgaggcccucaacaaccgguuccagaucaaggggguggagcugaaguccggcuacaaggacuggauccuguggaucuccuucgccaucagcugcuuccuccugugcguggcccugcucggcuucaucaugugggccugccagaaggggaacauccgcugcaacaucugcaucuga

SEQ ID NO: 66336 - RNA, 1701 nt, Artificial Sequence; identical to SEQ ID NO: 66332
  derived and/or modified CDS sequence (opt1) from hemagglutinin__InfluenzaA__ACD85583

SEQ ID NO: 66337 - RNA, 1701 nt, Artificial Sequence
  derived and/or modified CDS sequence (opt1) from hemagglutinin__InfluenzaA__ACD93579
augaagaccaucaucgcccugagcuacauccucugccugguguucgcccagaagcugcccggcaacgacaacuccaccgcgacgcucugccuggggcaccacgccgucccgaacggcaccaucgugaagaccaucaccaacgaccagaucgaggugacgaacgccaccgagcugguccagagcuccagcaccggggagaucugcgacagcccccaccagauccucgacggcgagaacugcacccugaucgacgcccugcucggggacccccagugcgacggcuuccagaacaagaagugggaccuguucguggagcgcagcaaggccuacuccaacugcuaccccuacgacgugccggacuacgcgagccugcggucccucgucgccagcuccggcacgcuggaguucaacaacgagagcuucaacuggaccggggugacccagaacggcaccuccagcgccugcauccgccgguccaacaacagcuucuucucccgccugaacuggcucacgcaccugaaguucaaguaccccgcccugaacgugaccaugcccaacaacgagaaguucgacaagcucuacaucuggggcguccaccaccccgggaccgacaacgaccagaucuuccuguacgcgcaggccagcgggcggaucaccguguccacgaagcgcagccagcagaccgugaucccgaacaucggcagccggccccgcguccggaacauccccucccgcaucagcaucuacuggaccaucgugaagcccggcgacauccugcucaucaacuccaccgggaaccugaucgccccgcggggcuacuucaagauccgcagcgggaaguccagcaucaugcgguccgacgcccccaucggcaagugcaacagcgagugcaucacgcccaacggcuccauccccaacgacaagccguuccagaacgugaaccgcaucaccuacggggccugcccccgguacgucaagcagaacacccugaagcucgcgaccggcaugcgcaacgugcccgagaagcagacgcgggggaucuucggcgccaucgccggguucaucgagaacggcugggagggcaugguggacgggugguacggcuuccgccaccagaacagcgaggggaucggccaggccgccgaccugaaguccacccaggcggccaucgaccagaucaacgggaagcugaaccggcucaucggcaagaccaacgagaaguuccaccagaucgagaaggaguucagcgaggucgagggccgcauccaggaccuggagaaguacguggaggacaccaagaucgaccugugguccuacaacgccgagcuccugguggcccuggagaaccagcacacgaucgaccucaccgacagcgagaugaacaagcuguucgagaagaccaagaagcagcugcgggagaacgccgaggacauggggaacggcugcuucaagaucuaccacaagugcgacaacacgugcaucggguccauccgcaacggcaccuacgaccacgacgucuaccgcgacgaggcgcucaacaaccgguuccagaucaaggggguggagcugaaguccggcuacaaggacuggauccuguggaucuccuucgccaucagcugcuuccuccugugcguggcccugcucggcuucaucaugugggccugccagaaggggaacauccgcugcaacaucugcaucuga

SEQ ID NO: 66338 - RNA, 1701 nt, Artificial Sequence; identical to SEQ ID NO: 64654
  derived and/or modified CDS sequence (opt1) from hemagglutinin__InfluenzaA__ACF09402

SEQ ID NO: 66339 - RNA, 1701 nt, Artificial Sequence
  derived and/or modified CDS sequence (opt1) from hemagglutinin__InfluenzaA__ACF22159
augaagaccaucaucgcccugagcuacauccucugccugguguucgcccagaagcugcccggcaacgacaacuccaccgcgacgcucugccuggggcaccacgccgucccgaacggcaccaucgugaagaccaucaccaacgaccagaucgaggugacgaacgccaccgagcugguccagaacagcuccaccgggggcaucugcgacagcccccaccagauccucgacggggagaacugcacccugaucgacgcccugcucggcgacccccagugcgacggcuuccagaacaagaagugggaccuguucguggagcgcuccaaggccuacagcaacugcuaccccuacgacgugccggacuacgcgucccugcggagccucgucgccuccagcgggacgcuggaguucaacaacgaguccuucaacuggaccggcgugacccagaacgggaccagcuccgccugcaagcgccggagcaacaaguccuucuucagccgccugaacuggcucacgcaccugaaguacaaguaccccgcccugaacgugaccaugcccaacaacgagaaguucgacaagcucuacaucuggggcguccaccaccccgggaccgacuccgaccagaucagccuguacgcgcaggccuccggccggaucaccgugagcacgaagcgcagccagcagaccgugaucccgaacaucggcuuccggccccgcguccgggacguguccagccgcaucuccaucuacuggaccaucgugaagcccggggacauccugcucaucaacagcaccggcaaccugaucgcgccccggggguacuucaagauccgcuccggcaagagcuccaucaugcggagcgacgccccgaucggcaagugcaacuccgagugcaucacgcccaacgggagcauccccaacgacaagcccuuccagaacgucaaccgcaucaccuacggcgccugcccgcgguacgugaagcagaacacccugaagcucgccaccgggaugcgcaacgugcccgagaagcagacgcggggcaucuucggggccaucgccggcuucaucgagaacggcugggaggggauggucgacggcugguacggguuccgccaccagaacuccgagggcaccgggcaggccgccgaccucaagagcacccaggcggccaucaaccagaucaacggcaagcugaaccggcugaucggcaagaccaacgagaaguuccaccagaucgagaaggaguucuccgagguggaggggcgcauccaggaccuggagaaguacguggaggacacgaagaucgaccuguggagcuacaacgccgagcuccuggucgcccuggagaaccagcacaccaucgaccucaccgacuccgagaugaacaagcuguucgagcggaccaagaagcagcugcgcgagaacgccgaggacaugggcaacgggugcuucaagaucuaccacaagugcgacaacgcgugcaucgagagcauccgcaacggcacguacgaccacgacguguaccgggacgaggcccucaacaaccgcuuccagaucaaggggguggagcugaaguccggcuacaaggacuggauccuguggaucagcuucgccaucuccugcuuccuccugugcgucgcccugcucggcuucaucaugugggccugccagaaggggaacauccggugcaacaucugcaucuga

SEQ ID NO: 66340 - RNA, 1701 nt, Artificial Sequence
  derived and/or modified CDS sequence (opt1) from hemagglutinin__InfluenzaA__ACF22188
augaagaccaucaucgcccugagcuacaucuucugccucgcccugggccaggaccugcccgggaacgacaacuccaccgcgacgcucugccugggccaccacgccgugccgaacgggacccuggucaagaccaucaccgacgaccagaucgaggugacgaacgccaccgagcucgugcagagcuccagcaccggcaagaucugcaacaacccccaccgcauccuggacgggaucgacugcacccugaucgacgcccuccugggcgacccccacugcgacgucuuccagaacgagacgugggaccuguucguggagcgguccaaggccuucagcaacugcuaccccuacgacgugccggacuacgcgucccuccgcagccuggucgccuccagcggcacccuggaguucaucaccgagggguucaccuggacgggcgugacccagaacgggggcuccaacgccugcaagcgggggcccggcagcggcuucuucucccgccucaacuggcugaccaagagcggguccaccuaccccgugcugaacgucacgaugcccaacaacgacaacuucgacaagcucuacaucuggggcgugcaccacccgagcaccaaccaggagcagaccucccuguacgugcaggccagcgggcgggucaccguguccacgcgccggagccagcagaccaucauccccaacaucuggagccgccccugggugcggggccuguccagccgcaucuccaucuacuggaccaucgucaagcccggcgacgugcucgugaucaacagcaacgggaaccugaucgcgccgcggggcuacuucaagaugcgcaccgggaaguccagcaucaugcgguccgacgcccccaucgacacgugcaucagcgagugcaucacccccaacggcuccauccccaacgacaagccguuccagaacgucaacaagaucaccuacggggccugccccaaguacgugaagcagaacacccugaagcucgccacgggcaugcgcaacgugcccgagaagcagacccggggccuguucggggccaucgcgggcuucaucgagaacgggugggagggcaugaucgacgggugguacggcuuccgccaccagaacagcgagggcaccgggcaggccgccgaccugaaguccacccaggccgccaucgaccagaucaacggcaagcucaaccgggucaucgagaagacgaacgagaaguuccaccagaucgagaaggaguucagcgagguggaggggcgcauccaggaccuggagaaguacguggaggacaccaagaucgaccugugguccuacaacgcggagcuccuggucgcccuggagaaccagcacaccaucgaccucaccgacagcgagaugaacaagcuguucgagaagacgcggcgccagcugcgggagaacgccgaggacaugggcaacgggugcuucaagaucuaccacaagugcgacaacgccugcaucgaguccauccgcaacggcaacuacgaccacgacguguaccgcgacgaggcccucaacaaccgguuccagaucaagggcgucgagcucaagagcggguacaaggacuggauccuguggaucuccuucgcgaucagcugcuuccugcugugcguggugcugcucggcuucaucaugugggccugccagcgcgggaacauccggugcaacaucugcaucuga

SEQ ID NO: 66341 - RNA, 1701 nt, Artificial Sequence; identical to SEQ ID NO: 66340
  derived and/or modified CDS sequence (opt1) from hemagglutinin__InfluenzaA__ACF22199

SEQ ID NO: 66342 - RNA, 1701 nt, Artificial Sequence
  derived and/or modified CDS sequence (opt1) from hemagglutinin__InfluenzaA__ACF22210
augaagaccaucaucgcccugagcuacaucuucugccucgcccugggccaggaccugcccgggaacgacaacuccaccgcgacgcucugccugggccaccacgccgugccgaacgggacccuggucaagaccaucaccgacgaccagaucgaggugacgaacgccaccgagcucgugcagagcuccagcaccggcaagaucugcaacaacccccaccgcauccuggacgggaucgacugcacccugaucgacgcccuccugggcgacccccacugcgacgucuuccagaacgagacgugggaccuguucguggagcgguccaaggccuucagcaacugcuaccccuacgacgugccggacuacgcgucccuccgcagccuggucgccuccagcggcacccuggaguucaucaccgagggguucaccuggacgggcgugacccagaacgggggcuccaacgccugcaagcgggggcccggcagcggcuucuucucccgccucaacuggcugaccaagagcggguccaccuaccccgugcugaacgucacgaugcccaacaacgacaacuucgacaagcucuacaucuggggcgugcaccacccgagcaccaaccaggagcagaccucccuguacgugcaggccagcgggcgggucaccguguccacgcgccggagccagcagaccaucauccccaacaucggcagccgccccugggugcggggccuguccagccgcaucuccaucuacuggaccaucgucaagcccggggacgugcucgugaucaacagcaacggcaaccugaucgcgccgcggggguacuucaagaugcgcaccggcaaguccagcaucaugcgguccgacgcccccaucgacacgugcaucagcgagugcaucacccccaacggguccauccccaacgacaagccguuccagaacgucaacaagaucaccuacggcgccugccccaaguacgugaagcagaacacccugaagcucgccacgggcaugcgcaacgugcccgagaagcagacccgggggcuguucggcgccaucgcgggguucaucgagaacggcugggaggggaugaucgacggcugguacggcuuccgccaccagaacagcgaggggaccggccaggccgccgaccugaaguccacccaggccgccaucgaccagaucaacgggaagcucaaccgggucaucgagaagacgaacgagaaguuccaccagaucgagaaggaguucagcgagguggagggccgcauccaggaccuggagaaguacguggaggacaccaagaucgaccugugguccuacaacgcggagcuccuggucgcccuggagaaccagcacaccaucgaccucaccgacagcgagaugaacaagcuguucgagaagacgcggcgccagcugcgggagaacgccgaggacauggggaacggcugcuucaagaucuaccacaagugcgacaacgccugcaucgaguccauccgcaacggcaccuacgaccacgacguguaccgcgacgaggcccucaacaaccgguuccagaucaagggggucgagcucaagagcggcuacaaggacuggauccuguggaucuccuucgcgaucagcugcuuccugcugugcguggugcugcucggguucaucaugugggccugccagcgcggcaacauccggugcaacaucugcaucuga

SEQ ID NO: 66343 - RNA, 1701 nt, Artificial Sequence; identical to SEQ ID NO: 66342
  derived and/or modified CDS sequence (opt1) from hemagglutinin__InfluenzaA__ACF22221

SEQ ID NO: 66344 - RNA, 1701 nt, Artificial Sequence; identical to SEQ ID NO: 66342
  derived and/or modified CDS sequence (opt1) from hemagglutinin__InfluenzaA__ACF22232

SEQ ID NO: 66345 - RNA, 1701 nt, Artificial Sequence; identical to SEQ ID NO: 66342
  derived and/or modified CDS sequence (opt1) from hemagglutinin__InfluenzaA__ACF22243

SEQ ID NO: 66346 - RNA, 1701 nt, Artificial Sequence; identical to SEQ ID NO: 66342
  derived and/or modified CDS sequence (opt1) from hemagglutinin__InfluenzaA__ACF22254

SEQ ID NO: 66347 - RNA, 1701 nt, Artificial Sequence; identical to SEQ ID NO: 66342
  derived and/or modified CDS sequence (opt1) from hemagglutinin__InfluenzaA__ACF22265

SEQ ID NO: 66348 - RNA, 1701 nt, Artificial Sequence; identical to SEQ ID NO: 66342
  derived and/or modified CDS sequence (opt1) from hemagglutinin__InfluenzaA__ACF22276

SEQ ID NO: 66349 - RNA, 1701 nt, Artificial Sequence; identical to SEQ ID NO: 66342
  derived and/or modified CDS sequence (opt1) from hemagglutinin__InfluenzaA__ACF22287

SEQ ID NO: 66350 - RNA, 1701 nt, Artificial Sequence; identical to SEQ ID NO: 66342
  derived and/or modified CDS sequence (opt1) from hemagglutinin__InfluenzaA__ACF22298

SEQ ID NO: 66351 - RNA, 1701 nt, Artificial Sequence; identical to SEQ ID NO: 66342
  derived and/or modified CDS sequence (opt1) from hemagglutinin__InfluenzaA__ACF22320

SEQ ID NO: 66352 - RNA, 1701 nt, Artificial Sequence; identical to SEQ ID NO: 66342
  derived and/or modified CDS sequence (opt1) from hemagglutinin__InfluenzaA__ACF22342

SEQ ID NO: 66353 - RNA, 1701 nt, Artificial Sequence
  derived and/or modified CDS sequence (opt1) from hemagglutinin__InfluenzaA__ACF22364
augaagaccaucaucgcccugagcuacaucuucugccucgcccugggccaggaccugcccgggaacgacaacuccaccgcgacgcucugccugggccaccacgccgugccgaacgggacccuggucaagaccaucaccgacgaccagaucgaggugacgaacgccaccgagcucgugcagagcuccagcaccggcaagaucugcaacaacccccaccgcauccuggacgggaucgacugcacccugaucgacgcccuccugggcgacccccacugcgacgucuuccagaacgagacgugggaccuguucguggagcgguccaaggccuucagcaacugcuaccccuacgacgugccggacuacgcgucccuccgcagccuggucgccuccagcggcacccuggaguucaucaccgagggguucaccuggacgggcgugacccagaacgggggcuccaacgccugcaagcgggggcccggcagcggcuucuucucccgccucaacuggcugaccaagagcggguccaccuaccccgugcugaacgucacgaugcccaacaacgacaacuucgacaagcucuacaucuggggcgugcaccacccgagcaccaaccaggagcagaccucccuguacgugcaggccagcgggcgggucaccguguccacgcgccggagccagcagaccaucauccccaacaucgagagccgccccugggugcggggccuguccagccgcaucuccaucuacuggaccaucgucaagcccggcgacgugcucgugaucaacagcaacgggaaccugaucgcgccgcggggcuacuucaagaugcgcaccgggaaguccagcaucaugcgguccgacgcccccaucgacacgugcaucagcgagugcaucacccccaacggcuccauccccaacgacaagccguuccagaacgucaacaagaucaccuacggggccugccccaaguacgugaagcagaacacccugaagcucgccacgggcaugcgcaacgugcccgagaagcagacccggggccuguucggggccaucgcgggcuucaucgagaacgggugggagggcaugaucgacgggugguacggcuuccgccaccagaacagcgagggcaccgggcaggccgccgaccugaaguccacccaggccgccaucgaccagaucaacggcaagcucaaccgggucaucgagaagacgaacgagaaguuccaccagaucgagaaggaguucagcgagguggaggggcgcauccaggaccuggagaaguacguggaggacaccaagaucgaccugugguccuacaacgcggagcuccuggucgcccuggagaaccagcacaccaucgaccucaccgacagcgagaugaacaagcuguucgagaagacgcggcgccagcugcgggagaacgccgaggacaugggcaacgggugcuucaagaucuaccacaagugcgacaacgccugcaucgaguccauccgcaacggcaccuacgaccacgacguguaccgcgacgaggcccucaacaaccgguuccagaucaagggcgucgagcucaagagcggguacaaggacuggauccuguggaucuccuucgcgaucagcugcuuccugcugugcguggugcugcucggcuucaucaugugggccugccagcgcgggaacauccggugcaacaucugcaucuga

SEQ ID NO: 66354 - RNA, 1701 nt, Artificial Sequence; identical to SEQ ID NO: 66332
  derived and/or modified CDS sequence (opt1) from hemagglutinin__InfluenzaA__ACF22408

SEQ ID NO: 66355 - RNA, 1701 nt, Artificial Sequence; identical to SEQ ID NO: 65952
  derived and/or modified CDS sequence (opt1) from hemagglutinin__InfluenzaA__ACF41669

SEQ ID NO: 66356 - RNA, 1698 nt, Artificial Sequence; identical to SEQ ID NO: 65938
  derived and/or modified CDS sequence (opt1) from hemagglutinin__InfluenzaA__ACF41680

SEQ ID NO: 66357 - RNA, 1689 nt, Artificial Sequence
  derived and/or modified CDS sequence (opt1) from hemagglutinin__InfluenzaA__ACF41691
auggccaucaucuaccugauccuccuguucaccgccgugcgcggcgaccagaucugcaucggguaccacgcgaacaacagcaccgagaaggucgacacgauccuggagcggaacgugaccgugacccacgccaaggacauccucgagaagacccacaacggcaagcugugcaagcugaacgggaucccgccccucgagcugggcgacugcuccaucgccggguggcugcucggcaaccccgagugcgaccgccugcugcggguccccgaguggagcuacaucauggagaaggagaacccccgcuacucccucugcuacccgggcagcuucaacgacuacgaggagcugaagcaccuccuguccagcgugaagcacuucgagaaggugaagauccugcccaaggacggguggacgcagcacgagaccgacggcggguccaaggccugcgccgucagcggcaagcccuccuucuuccggaacaugguguggcugaccaagaaggggcccaacuacccgguggcgaagcgcagcuacaacaacaccuccggcgagcagaugcucaucaucuggggcguccaccaccccaacgacgaggccgagcagcgggcccuguaccaggagguggggacguacgugagcgccuccaccagcacccugaacaagcgcuccacccccgagaucgcggcccggcccaaggucagcggccucgggucccgcauggaguucagcuggacgcugcuggacgugugggacaccaucuccuucgagagcaccggcaaccucguggccccggaguacggcuucaagaucagcaagcggggguccagcggcaucaugaagaccgaggggacgcugggcaacugcgagaccaagugccagacgccccugggggccaucaacaccacccuccccuuccacaacguccacccccugaccaucggcgagugcccgaaguacgugaaguccgagaagcuggugcucgccaccggccugcgcaacgucccccagaucgagagccgggggcuguucggcgcgaucgccggguucaucgagggcggguggcagggcaugguggacggcugguacggguaccaccacuccaacgaccagggcagcggguacgccgccgacaaggaguccacccagaaggccuucgaccgcaucacgaacaaggugaacagcgucaucgagaagaugaacacccaguucgaggcggugggcaaggaguucuccaaccucgagaagcggcuggagaaccugaacaagaagauggaggacggguuccucgacguguggaccuacaacgccgagcugcugguccucauggagaacgagcgcacccuggacuuccacgacagcaacgugaagaaccuguacgacaagguccggaugcagcuccgcgacaacgugaaggagcugggcaacggcugcuucgaguucuaccacaagugcgacgacgagugcaugaacuccgugaagaacgggacguacgacuaccccaaguacgaggaggagagcaagcugaagcggaacgagaucaagggcgucgagcucuccagcauggggguguaccagauccuggccaucuacgccaccguggccggcucccugagccucgcgaucaugaucgccggcaucuccuucuggaugugcagcaacgggucccugcagugccgcaucugcaucuga

SEQ ID NO: 66358 - RNA, 1701 nt, Artificial Sequence; identical to SEQ ID NO: 66340
  derived and/or modified CDS sequence (opt1) from hemagglutinin__InfluenzaA__ACF41735

SEQ ID NO: 66359 - RNA, 1701 nt, Artificial Sequence
  derived and/or modified CDS sequence (opt1) from hemagglutinin__InfluenzaA__ACF41790
augaagaccaucaucgcccugagcuacaucuucugccucgcccugggccaggaccugcccgggaacgacaacuccaccgcgacgcucugccugggccaccacgccgugccgaacgggacccuggucaagaccaucaccgacgaccagaucgaggugacgaacgccaccgagcucgugcagagcuccagcaccggcaagaucugcaacaacccccaccgcauccuggacgggaucgacugcacccugaucgacgcccuccugggcgacccccacugcgacgucuuccagaacgagacgugggaccuguucguggagcgguccaaggccuucagcaacugcuaccccuacgacgugccggacuacgcgucccuccgcagccuggucgccuccagcggcacccuggaguucaucaccgaggacuucaccuggacgggggugacccagaacggcggguccaacgccugcaagcggggccccgggagcggcuucuucucccgccucaacuggcugaccaagagcggcuccaccuaccccgugcuggacgucacgaugcccaacaacgacaacuucgacaagcucuacaucuggggcgugcaccacccgagcaccaaccaggagcagaccucccuguacgugcaggccagcgggcgggucaccguguccacgcgccggagccagcagaccaucauccccaacaucgggagccgccccugggugcggggccuguccagccgcaucuccaucuacuggaccaucgucaagcccggcgacgugcucgugaucaacagcaacgggaaccugaucgcgccgcggggcuacuucaagaugcgcaccgggaaguccagcaucaugcgguccgacgcccccaucgacacgugcaucagcgagugcaucacccccaacggcuccauccccaacgacaagccguuccagaacgucaacaagaucaccuacggggccugccccaaguacgugaagcagaacacccugaagcucgccacgggcaugcgcaacgugcccgagaagcagacccggggccuguucggggccaucgcgggcuucaucgagaacgggugggagggcaugaucgacgggugguacggcuuccgccaccagaacagcgagggcaccgggcaggccgccgaccugaaguccacccaggccgccaucgaccagaucaacggcaagcucaaccgggucaucgagaagacgaacgagaaguuccaccagaucgagaaggaguucagcgagguggaggggcgcauccaggaccuggagaaguacguggaggacaccaagaucgaccugugguccuacaacgcggagcuccuggucgcccuggagaaccagcacaccaucgaccucaccgacagcgagaugaacaagcuguucgagaagacgcggcgccagcugcgggagaacgccgaggacaugggcaacgggugcuucaagaucuaccacaagugcgacaacgccugcaucgaguccauccgcaacggcaccuacgaccacgacguguaccgcgacgaggcccucaacaaccgguuccagaucaagggcgucgagcucaagagcggguacaaggacuggauccuguggaucuccuucgcgaucagcugcuuccugcugugcguggugcugcucggcuucaucaugugggccugccagcgcgggaacauccggugcaacaucugcaucuga

SEQ ID NO: 66360 - RNA, 1701 nt, Artificial Sequence
  derived and/or modified CDS sequence (opt1) from hemagglutinin__InfluenzaA__ACF41823
augaagaccaucaucgcccugagcuacaucuucugccucgcccugggccaggaccugcccgggaacgacaacuccaccgcgacgcucugccugggccaccacgccgugccgaacgggacccuggucaagaccaucaccgacgaccagaucgaggugacgaacgccaccgagcucgugcagagcuccagcaccggcaagaucugcaacaacccccaccgcauccuggacgggaucgacugcacccugaucgacgcccuccugggcgacccccacugcgacgucuuccagaacgagacgugggaccuguucguggagcgguccaaggccuucagcaacugcuaccccuacgacgugccggacuacgcgucccuccgcagccuggucgccuccagcggcacccuggaguucaucaccgagggguucaccuggacgggcgugacccagaacgggggcuccaacgccugcaagcgggggcccggcagcggcuucuucucccgccucaacuggcugaccaagagcggguccaccuaccccgugcugaacgucacgaugcccaacaacgacaacuucgacaagcucuacaucuggggcgugcaccacccgagcaccaaccaggagcagaccucccuguacgugcaggccagcgggcgggucaccguguccacgcgccggagccgccagaccaucauccccaacaucggcagccggcccugggugcgcggccuguccagccggaucuccaucuacuggaccaucgucaagcccggggacgugcucgugaucaacagcaacggcaaccugaucgcgccgcgcggguacuucaagaugcggaccggcaaguccagcaucaugcgcuccgacgcccccaucgacacgugcaucagcgagugcaucacccccaacggguccauccccaacgacaagccguuccagaacgucaacaagaucaccuacggcgccugccccaaguacgugaagcagaacacccugaagcucgccacgggcaugcggaacgugcccgagaagcagacccgcgggcuguucggcgccaucgcgggguucaucgagaacggcugggaggggaugaucgacggcugguacggcuuccggcaccagaacagcgaggggaccggccaggccgccgaccugaaguccacccaggccgccaucgaccagaucaacgggaagcucaaccgcgucaucgagaagacgaacgagaaguuccaccagaucgagaaggaguucagcgagguggagggccggauccaggaccuggagaaguacguggaggacaccaagaucgaccugugguccuacaacgcggagcuccuggucgcccuggagaaccagcacaccaucgaccucaccgacagcgagaugaacaagcuguucgagaagacgcgccggcagcugcgcgagaacgccgaggacauggggaacggcugcuucaagaucuaccacaagugcgacaacgccugcaucgaguccauccgcaacggcaccuacgaccacaacguguaccgggacgaggcccucaacaaccgcuuccagaucaagggggucgagcucaagagcggcuacaaggacuggauccuguggaucuccuucgcgaucagcugcuuccugcugugcguggugcugcucggguucaucaugugggccugccagcggggcaacauccgcugcaacaucugcaucuga

SEQ ID NO: 66361 - RNA, 1698 nt, Artificial Sequence
  derived and/or modified CDS sequence (opt1) from hemagglutinin__InfluenzaA__ACF41834
augaaggccaaccugcucgugcugcugugcgcccucgcggccgccgacgccgacaccaucugcaucggcuaccacgccaacaacagcaccgacacggucgacaccgugcuggagaagaacgugaccgucacccacuccgugaaccugcucgaggacagccacaacgggaagcugugccgccugaagggcaucgcgccccuccagcuggggaagugcaacaucgccggcuggcugcucgggaacccggagugcgacccccugcugcccgugcgguccuggagcuacaucgucgagacgcccaacuccgagaacggcaucugcuacccgggcgacuucaucgacuacgaggagcuccgcgagcagcugagcuccgugagcuccuucgagcgguucgagaucuuccccaaggagagcuccuggcccaaccacaacaccaacggggugaccgccgccugcagccacgagggcaaguccagcuucuaccgcaaccugcucuggcugaccgagaaggagggguccuaccccaaccugaagaacagcuacgucaacaagaagggcaaggaggugcucgugcugugggggauccaccacccguccaacagcaaggagcagcagaaccuguaccagaacgagaacgcguacgucuccguggugacgagcaacuacaaccggcgcuucacccccgagaucgccgagcggcccaagguccgcgaccaggccggccggaugaacuacuacuggacccuccugaagcccggcgacaccaucaucuucgaggccaacgggaaccugaucgccccgauguacgcguucgcccucagccgcggcuucggguccggcaucaucacgagcaacgccuccaugcacgagugcaacaccaagugccagacgccccugggcgccaucaacagcucccugcccuaccagaacauccaccccgugaccaucggggagugcccgaaguacgugcggagcgccaagcuccgcauggucaccggccugcggaacauccccuccauccagagccgcgggcuguucggcgcgaucgccggguucaucgagggcggcuggaccgggaugaucgacggcugguacggguaccaccaccagaacgagcagggcuccggguacgccgccgaccagaaguccacccagaacgccaucaacggcaucaccaacaaggugaacacggugaucgagaagaugaacauccaguucaccgcggucggcaaggaguucaacaagcucgagaagcggauggagaaccugaacaagaagguggacgacggguuccuggacaucuggaccuacaacgccgagcuccuggugcugcucgagaacgagcgcacccuggacuuccacgacagcaacgucaagaaccuguacgagaaggucaagagccagcucaagaacaacgccaaggagaucggcaacgggugcuucgaguucuaccacaagugcgacaacgagugcauggaguccgugcggaacggcacguacgacuaccccaaguacagcgaggaguccaagcugaaccgcgagaagguggacggggugaagcuggagagcaugggcaucuaccagauccucgccaucuacuccaccgucgccagcucccuggugcugcucgugagccugggcgcgaucagcuucuggaugugcuccaacgggagccugcagugccggaucugcaucuga

SEQ ID NO: 66362 - RNA, 1701 nt, Artificial Sequence
  derived and/or modified CDS sequence (opt1) from hemagglutinin__InfluenzaA__ACF41856
augaagaccaucaucgcccugagcuacauccucugccugguguucgcccagaagcugcccggcaacgacaacuccaccgcgacgcucugccuggggcaccacgccgucccgaacggcacccuggugaagaccaucaccaacgaccagaucgaggugacgaacgccaccgagcucguccagagcuccagcaccgggcgcaucugcgacagcccccaccggauccuggacggcaagaacugcacccugaucgacgcccuccugggggacccccacugcgacggcuuccagaacaaggagugggaccuguucguggagcgcagcaaggccuacuccaacugcuaccccuacgacgugccggacuacgcgagccuccggucccuggucgccagcuccggcacgcuggaguucaucaacgaggacuucaacuggaccgggguggcccaggacggcgggagcuacgccugcaagcgcggcuccgugaacagcuucuucucccggcucaacuggcugcacaagagcgaguacaaguaccccgcgcugaacgucaccaugcccaacaacgggaaguucgacaagcucuacaucuggggcgugcaccaccccuccaccgaccgcgaccagacgagccuguacgugcgggccuccggccgcgucaccgugagcaccaagcggagccagcagaccgugacgccgaacaucgggucccgccccuggguccggggccagagcucccgcaucagcaucuacuggaccaucgugaagcccggggacauccugcucaucaacuccaccggcaaccugaucgcgccccggggcuacuucaagauccgcaacggcaagagcuccaucaugcggagcgacgccccgaucgggaccugcuccagcgagugcaucacgcccaacggguccauccccaacgacaagcccuuccagaacgugaaccgcaucaccuacggcgccugcccgcgguacgucaagcagaacacccugaagcucgccaccgggaugcgcaacgugcccgagaagcagacgcggggcaucuucggcgccaucgccggguucaucgagaacggcugggaggggaugguggacggcugguacggguuccgccaccagaacagcgagggcaccggccaggccgccgaccugaaguccacccaggcggccaucgaccagaucaacgggaagcugaaccggcucaucgagaagaccaacgagaaguuccaccagaucgagaaggaguucagcgaggucgagggccgcauccaggaccuggagaaguacguggaggacacgaagaucgaccugugguccuacaacgccgagcuccugguggcccuggagaaccagcacaccaucgaccucaccgacagcgagaugaacaagcuguucgagaagacccgcaagcagcugcgggagaacgccgaggacauggggaacggcugcuucaagaucuaccacaagugcgacaacgcgugcaucggguccauccgcaacggcacguacgaccacgacgucuaccgggacgaggcccucaacaaccgcuuccagaucaagggcguggagcugaaguccggguacaaggacuggauccuguggaucuccuucgccaucagcugcuuccuccugugcgucgugcugcucggcuucaucaugugggccugccagaaggggaacauccggugcaacaucugcaucuga

SEQ ID NO: 66363 - RNA, 1698 nt, Artificial Sequence
  derived and/or modified CDS sequence (opt1) from hemagglutinin__InfluenzaA__ACF41867
augaaggccaagcugcucgugcugcugugcaccuucaccgccacguacgcggacaccaucugcaucggcuaccacgccaacaacagcaccgacaccgucgacacggugcucgagaagaacgugaccgucacccacuccgugaaccugcuggaggacagccacaacgggaagcucugccugcugaagggcaucgcgccccuccagcuggggaacugcuccguggccggcuggauccuggggaacccggagugcgagagccucaucuccaaggagagcugguccuacaucgucgagacccccaaccccgagaacggcacgugcuaccccggcuacuucgccgacuacgaggagcugcgcgagcagcugagcuccgugagcuccuucgagcgguucgagaucuucccgaaggagagcuccuggcccaaccacaccgugaccggggucaccgccagcugcucccacaacggcaagagcuccuucuaccgcaaccuccuguggcugacggagaagaacgggcucuaccccaaccugagcaacuccuacgugaacaacaaggagaaggaggugcugguccucuggggcgugcaccaccccagcaacauccgggaccagcgcgccaucuaccacaccgagaacgccuacgugagcgucguguccagccacuacucccggcgcuucaccccggagaucgccaagcggcccaaggugcgcgggcaggagggccggaucaacuacuacuggacccugcuggagcccggcgacacgaucaucuucgaggcgaacgggaaccucaucgcccccugguacgccuucgcccugagccgcggcuucggguccggcaucaucaccagcaacgccccgaugaacgagugcgacgcgaagugccagacgccccagggcgccaucaacuccagccugcccuuccagaacguccaccccgugaccaucggggagugcccgaaguacgugcgguccaccaagcuccgcauggucaccggccugcggaacauccccagcauccagucccgcgggcuguucggcgccaucgccggguucaucgagggcggcuggaccgggaugauggacggcugguacggguaccaccaccagaacgagcagggcagcggguacgccgcggaccagaaguccacccagaacgccaucaacggcaucacgaacaaggugaacagcgugaucgagaagaugaacacccaguucaccgccgucggcaaggaguucaacaagcucgagcggcgcauggagaaccugaacaagaagguggacgacggguuccuggacaucuggaccuacaacgccgagcuccugguccugcucgagaacgagcggacgcuggacuuccacgacuccaacgugaagaaccuguacgagaaggucaagagccagcucaagaacaacgccaaggagaucggcaacgggugcuucgaguucuaccacaagugcaacaacgagugcauggaguccgugaagaacggcaccuacgacuaccccaaguacagcgaggaguccaagcugaaccgcgagaagaucgacggggugaagcuggagagcaugggcguguaccagauccucgcgaucuacagcaccgucgccuccagccuggugcugcucgugucccugggcgccaucagcuucuggaugugcuccaacgggagccugcagugccggaucugcaucuga

SEQ ID NO: 66364 - RNA, 1698 nt, Artificial Sequence; identical to SEQ ID NO: 66139
  derived and/or modified CDS sequence (opt1) from hemagglutinin__InfluenzaA__ACF41878

SEQ ID NO: 66365 - RNA, 1701 nt, Artificial Sequence
  derived and/or modified CDS sequence (opt1) from hemagglutinin__InfluenzaA__ACF41922
augaaggccaagcugcucgugcugcugugcgccuucaccgcgaccuacgccgacacgaucugcaucggcuaccacgccaacaacagcaccgacaccgucgacaccgugcucgagaagaacgugacggucacccacuccgugaaccugcuggaggacagccacaacgggaagcucugccgccugaagggcaucgcgccccugcagcucgggaacugcuccguggccggcuggauccuggggaacccgaagugcgagagccuguucuccaaggagagcugguccuacaucgccgagacccccaaccccgagaacgggaccugcuaccccggcuacuucgccgacuacgaggagcuccgggagcagcugagcuccgucagcuccuucgagcgcuucgagaucuucccgaaggagagcuccuggcccaaccacacggugaccaagggggugaccgccagcugcucccacaacggcaagagcuccuucuaccggaaccugcucuggcugaccgagaagaacgggcuguaccccaaccucagcaaguccuacgucaacaacaaggagaaggaggugcuggugcuguggggcguccaccaccccagcaacauccgcgaccagcgggccaucuaccacacggagaacgcguacgugagcguggucuccagccacuacucccgccgguucaccccggagaucgccaagcgccccaaggugcgggaccaggaggggcgcaucaacuacuacuggacccuccuggagcccggcgacaccaucaucuucgaggccaacggcaaccugaucgcccccugguacgccuucgcgcucagccggggguucggcuccgggaucaucacgagcaacgccuccauggacgagugcgacgccaagugccagaccccgcagggcgccaucaacagcucccugcccuuccagaacgugcaccccgucaccaucggcgagugccccaaguacgugcgcagcaccaagcugcggauggugacggggcuccgcaacaucccguccauccagagccggggccuguucggggccaucgcgggcuucaucgagggcggcuggaccggcaugaucgacgggugguacggcuaccaccaccagaacgagcagggguccggcuacgccgccgaccagaaguccacccagaacgccaucaacgggaucaccaacaaggucaacagcgugaucgagaagaugaacacgcaguucaccgccgugggcaaggaguucaacaagcuggagcgccggauggagaaccucaacaagaaggucgacgacggcuuccuggacaucuggaccuacaacgcggagcugcucgugcugcuggagaacgggcgcacccucgacuuccacgacagcaacgucaagaaccuguacgagaaggugaagucccagcugaagaacaacgccaaggagaucggcaacgggugcuucgaguucuaccacaagugcaacaacgagugcauggagagcgugaagaacggcacguacgacuaccccaaguacuccgaggagagcaagcucaaccgggggaagaucgacggcgucaagcuggagagcaugggcguguaccagauccuggccaucuacuccaccguggccagcucccucguccugcuggugagccucggggccaucuccuucuggaugugcagcaacggcucccugcagugccgcaucugcaucuga

SEQ ID NO: 66366 - RNA, 1689 nt, Artificial Sequence
  derived and/or modified CDS sequence (opt1) from hemagglutinin__InfluenzaA__ACF54389
auggccaucaucuaccugauccuccuguucgccaccgugcgcggcgaccagaucugcaucggguaccacgcgaacaacagcaccgagaaggucgacacgauccuggagcggaacgugaccgugacccacgccaaggacauccucgagaagacccacaacggcaagcugugcaagcugaacgggaucccgccccucgagcugggcgacugcuccaucgccggguggcugcucggcaaccccgagugcgaccgccugcugcggguccccgaguggagcuacaucauggagaaggagaacccccgcuacucccucugcuacccgggcagccugaacgacuacgaggagcugaagcaccuccuguccagcgugaagcacuucgagaaggugcggauccugcccaaggaccgcuggacgcagcacaccaccaccgggggcuccaaggccugcgccgucagcgggaagcccuccuucuuccggaacaugguguggcucacgaagaagggcaccaacuaccccguggcgaaggggagcuacaacaacaccuccggcgagcagaugcugaucaucuggggcguccaccacccgaucgacgaggccgagcagcgcgcccuguaccaggagguggggaccuacgugagcgccuccacgagcacccucaacaagcgguccauccccgagaucgcggcccgccccgaggucaacggccuggggagccggauggaguucuccuggacccugcucgacgugugggacaccaucaacuucgagagcacgggcaaccugguggcccccgaguacggcuucaagaucuccaagcgcgggagcagcggcaucaugaagaccgaggggacccugggcaacugcgagaccaagugccagacgccgcucggggccaucaacaccacccugcccuuccacaacguccacccccugaccaucggcgagugccccaaguacgugaaguccgagaagcucgugcuggccacgggccugcggaacgucccgcagaucgagagccgcggccucuucggggcgaucgccggguucaucgagggcggguggcagggcaugguggacggcugguacggguaccaccacuccaacgagcagggcagcggguacgccgccgacaaggaguccacccagaaggccuucgacggcaucaccaacaaggugaacagcgucaucgagaagaugaacacccaguucgaggcgguggggaaggaguucaacaaccuggagaagcggcuggagaaccucaacaagaagauggaggacggcuuccuggacguguggacguacaacgccgagcugcucguccugauggagaacgagcgcacccuggacuuccacgacuccaacgugaagaaccucuacgagaagguccggaugcagcugcgcgacaacgugaaggagcugggcaacgggugcuucgaguucuaccacaagugcgacgacgagugcaugaacagcgugaagaacggcaccuacgacuaccccaaguacgaggaggaguccaagcucaagcggaacgagaucaagggggucaagcugagcuccaugggcguguaccagauccuggccaucuacgccaccguggccggcagccucucccuggcgaucauggucgccgggaucagcuucuggaugugcuccaacggcagccugcagugccgcaucugcaucuga

SEQ ID NO: 66367 - RNA, 1701 nt, Artificial Sequence; identical to SEQ ID NO: 66340
  derived and/or modified CDS sequence (opt1) from hemagglutinin__InfluenzaA__ACF54400

SEQ ID NO: 66368 - RNA, 1701 nt, Artificial Sequence; identical to SEQ ID NO: 66342
  derived and/or modified CDS sequence (opt1) from hemagglutinin__InfluenzaA__ACF54411

SEQ ID NO: 66369 - RNA, 1701 nt, Artificial Sequence; identical to SEQ ID NO: 66342
  derived and/or modified CDS sequence (opt1) from hemagglutinin__InfluenzaA__ACF54422

SEQ ID NO: 66370 - RNA, 1701 nt, Artificial Sequence; identical to SEQ ID NO: 66353
  derived and/or modified CDS sequence (opt1) from hemagglutinin__InfluenzaA__ACF54433

SEQ ID NO: 66371 - RNA, 1701 nt, Artificial Sequence; identical to SEQ ID NO: 66342
  derived and/or modified CDS sequence (opt1) from hemagglutinin__InfluenzaA__ACF54444

SEQ ID NO: 66372 - RNA, 1701 nt, Artificial Sequence; identical to SEQ ID NO: 66360
  derived and/or modified CDS sequence (opt1) from hemagglutinin__InfluenzaA__ACF54466

SEQ ID NO: 66373 - RNA, 1689 nt, Artificial Sequence
  derived and/or modified CDS sequence (opt1) from hemagglutinin__InfluenzaA__ACF54477
auggccaucaucuaccugauccuccuguucaccgccgugcgcggcgaccagaucugcaucggguaccacgcgaacaacagcaccgagaaggucgacacgauccuggagcggaacgugaccgugacccacgccaaggacauccucgagaagacccacaacggcaagcugugcaagcugaacgggaucccgccccucgagcugggcgacugcuccaucgccggguggcugcucggcaaccccgagugcgaccgccugcugagcguccccgagugguccuacaucauggagaaggagaacccccgggacggccucugcuacccggggagcuucaacgacuacgaggagcugaagcaccuccuguccagcgugaagcacuucgagaaggugaagauccugcccaaggaccgcuggacgcagcacaccaccaccggcgggucccgggccugcgccgucagcggcaaccccuccuucuuccgcaacaugguguggcugacgaagaaggggagcaacuaccccguggcgaagggcuccuacaacaacaccagcggcgagcagaugcucaucaucuggggcguccaccacccgaacgacgagaccgagcagcggacccuguaccagaacguggggacguacguguccgucgggaccagcacccugaacaagcgcuccacccccgacaucgccacgcggcccaaggugaacggccucggcagccgcauggaguucuccuggacccugcuggacaugugggacaccaucaacuucgagagcaccgggaaccucaucgcccccgaguacggcuucaagaucuccaagcgggggagcagcggcaucaugaagacggaggggacccuggagaacugcgagaccaagugccagaccccgcugggcgccaucaacacgacccuccccuuccacaacgugcacccccugaccaucggcgagugccccaaguacgucaaguccgagaagcuggugcucgcgaccgggcugcgcaacgugccgcagaucgagagccggggccuguucggggccaucgccggcuucaucgagggcggguggcagggcauggucgacgggugguacggcuaccaccacuccaacgaccaggggagcggcuacgccgccgacaaggaguccacgcagaaggcguucgacgggaucaccaacaaggugaacagcgugaucgagaagaugaacacccaguucgaggccgucggcaaggaguucuccaaccucgagcgccggcuggagaaccugaacaagaagauggaggacggcuuccucgacguguggaccuacaacgccgagcugcuggugcucauggagaacgagcgcacgcuggacuuccacgacagcaacgucaagaaccuguacgacaaggugcggaugcagcuccgcgacaacgucaaggagcuggggaacggcugcuucgaguucuaccacaagugcgacgacgagugcaugaacuccgugaagaacgggaccuacgacuaccccaaguacgaggaggagagcaagcugaaccggaacgagaucaagggcgugaagcucuccagcaugggcgucuaccagauccuggccaucuacgccaccguggcggggucccugagccucgccaucaugauggccggcaucuccuucuggaugugcagcaacgggucccugcagugccgcaucugcaucuga

SEQ ID NO: 66374 - RNA, 1689 nt, Artificial Sequence
  derived and/or modified CDS sequence (opt1) from hemagglutinin__InfluenzaA__ACF54499
auggccaucaucuaccugauccuccuguucaccgccgugcgcggcgaccagaucugcaucggguaccacgcgaacaacagcaccgagacggucgacaccauccuggagcggaacgugaccgugacccacgccaaggacauccucgagaagacgcacaacggcaagcugugcaagcugaacgggaucccgccccucgagcugggcgacugcuccaucgccggguggcugcucggcaaccccgagugcgaccgccugcugagcguccccgagugguccuacaucauggagaaggagaacccccgggacggccucugcuacccggggagcuucaacgacuacgaggagcugaagcaccuccuguccagcgugaagcacuucgagaaggugaagauccugcccaaggaccgcuggacccagcacaccaccacgggcgggucccgggccugcgccgucagcggcaaccccuccuucuuccgcaacaugguguggcugaccaagaaggggagcaacuaccccguggcgaagggcuccuacaacaacaccagcggcgagcagaugcucaucaucuggggcguccaccacccgaacgacgagaccgagcagcggacgcuguaccagaacguggggaccuacguguccgucgggaccagcacccugaacaagcgcuccacgcccgacaucgccacccggcccaaggugaacggccucggcagccgcauggaguucuccuggacccugcuggacaugugggacaccaucaacuucgagagcacggggaaccucaucgcccccgaguacggcuucaagaucuccaagcgggggagcagcggcaucaugaagaccgaggggacccuggagaacugcgagaccaagugccagacgccgcugggcgccaucaacaccacccuccccuuccacaacgugcacccccugaccaucggcgagugccccaaguacgucaaguccgagaagcuggugcucgcgacggggcugcgcaacgugccgcagaucgagagccggggccuguucggggccaucgccggcuucaucgagggcggguggcagggcauggucgacgggugguacggcuaccaccacuccaacgaccaggggagcggcuacgccgccgacaaggaguccacccagaaggcguucgacgggaucaccaacaaggugaacagcgugaucgagaagaugaacacccaguucgaggccgucggcaaggaguucuccaaccucgagcgccggcuggagaaccugaacaagaagauggaggacggcuuccucgacguguggacguacaacgccgagcugcuggugcucauggagaacgagcgcacccuggacuuccacgacagcaacgucaagaaccuguacgacaaggugcggaugcagcuccgcgacaacgucaaggagcuggggaacggcugcuucgaguucuaccacaagugcgacgacgagugcaugaacuccgugaagaacgggaccuacgacuaccccaaguacgaggaggagagcaagcugaaccggaacgagaucaagggcgugaagcucuccagcaugggcgucuaccagauccuggccaucuacgccaccguggcggggucccugagccucgccaucaugauggccggcaucuccuucuggaugugcagcaacgggucccugcagugccgcaucugcaucuga

SEQ ID NO: 66375 - RNA, 1689 nt, Artificial Sequence; identical to SEQ ID NO: 66374
  derived and/or modified CDS sequence (opt1) from hemagglutinin__InfluenzaA__ACF54510

SEQ ID NO: 66376 - RNA, 1689 nt, Artificial Sequence; identical to SEQ ID NO: 66374
  derived and/or modified CDS sequence (opt1) from hemagglutinin__InfluenzaA__ACF54521

SEQ ID NO: 66377 - RNA, 1701 nt, Artificial Sequence
  derived and/or modified CDS sequence (opt1) from hemagglutinin__InfluenzaA__ACF54532
augaagaccaucaucgcccugagcuacauccucugccugguguucgcccagaagcugcccggcaacgacaacuccaccgcgacgcucugccuggggcaccacgccgucccgaacggcaccaucgugaagaccaucaccaacgaccagaucgaggugacgaacgccaccgagcugguccagagcuccagcaccggggagaucugcgacagcccccaccagauccucgacggcgagaacugcacccugaucgacgcccugcucggggacccccagugcgacggcuuccagaacaagaagugggaccuguucguggagcgcuccaaggccuacuccaacugcuaccccuacgacgugccggacuacgcgagccugcggucccucgucgccagcuccggcacgcuggaguucaacaacgagagcuucaacuggaccggggugacccagaacggcaccuccagcgccugcauccgccgguccaacaacagcuucuucucccgccugaacuggcucacgcaccugaaguucaaguaccccgcccugaacgugaccaugcccaacaacgagaaguucgacaagcucuacaucuggggcguccaccaccccgggaccgacaacgaccagaucuuccuguacgcgcaggccagcgggcggaucaccguguccacgaagcgcagccagcagaccgugaucccgaacaucggcagccggccccgcguccggaacauccccucccgcaucagcaucuacuggaccaucgugaagcccggcgacauccugcucaucaacuccaccgggaaccugaucgccccgcggggcuacuucaagauccgcagcgggaaguccagcaucaugcgguccgacgcccccaucggcaagugcaacagcgagugcaucacgcccaacggcuccauccccaacgacaagccguuccagaacgugaaccgcaucaccuacggggccugcccccgguacgucaagcagaacacccugaagcucgcgaccggcaugcgcaacgugcccgagaagcagacgcgggggaucuucggcgccaucgccggguucaucgagaacggcugggagggcaugguggacgggugguacggcuuccgccaccagaacagcgaggggaucggccaggccgccgaccugaaguccacccaggcggccaucgaccagaucaacgggaagcugaaccggcucaucggcaagaccaacgagaaguuccaccagaucgagaaggaguucagcgaggucgagggccgcauccaggaccuggagaaguacguggaggacaccaagaucgaccugugguccuacaacgccgagcuccugguggcccuggagaaccagcacacgaucgaccucaccgacagcgagaugaacaagcuguucgagaagaccaagaagcagcugcgggagaacgccgaggacauggggaacggcugcuucaagaucuaccacaagugcgacaacgcgugcaucggguccauccgcaacggcaccuacgaccacgacgucuaccgcgacgaggcccucaacaaccgguuccagaucaaggggguggagcugacgagcggcuacaaggacuggauccuguggaucuccuucgccaucagcugcuuccuccugugcguggcccugcucggcuucaucaugugggccugccagaaggggaacauccgcugcaacaucugcaucuga

SEQ ID NO: 66378 - RNA, 1701 nt, Artificial Sequence
  derived and/or modified CDS sequence (opt1) from hemagglutinin__InfluenzaA__ACF54543
augaagaccaucaucgcccugagcuacauccucugccugguguucgcccagaagcugcccggcaacgacaacuccaccgcgacgcucugccuggggcaccacgccgucccgaacggcaccaucgugaagaccaucaccaacgaccagaucgaggugacgaacgccaccgagcugguccagagcuccagcaccggggagaucugcgacagcccccaccagauccucgacggcgagaacugcacccugaucgacgcccugcucggggacccccagugcgacggcuuccagaacaagaagugggaccuguucguggagcgcagcaaggccuacuccaacugcuaccccuacgacgugccggacuacgucagccugcggucccucguggcgagcuccggcacgcuggaguucaacaacgagagcuucaacuggaccggggugacccagaacggcaccuccagcgccugcauccgccgguccaacaacagcuucuucucccgccugaacuggcucacgcaccugaaguucaaguaccccgcccugaacgucaccaugcccaacaacgagaacuucgacaagcucuacaucuggggcgugcaccaccccgggaccgacaacgaccagaucuuccuguacgcccaggcgagcgggcggaucaccguguccacgaagcgcagccagcagaccgucaucccgaacaucggcagccggccccgcgugcggaacauccccucccgcaucagcaucuacuggaccaucgugaagcccggcgacauccugcucaucaacuccaccgggaaccugaucgccccgcggggcuacuucaagauccgcagcgggaaguccagcaucaugcgguccgacgcccccaucggcaagugcaacagcgagugcaucacgcccaacggcuccauccccaacgacaagccguuccagaacgucaaccgcaucaccuacggggccugcccccgguacgugaagcagaacacccugaagcucgccaccggcaugcgcaacgugcccgagaagcagacgcgggggaucuucggcgcgaucgccggguucaucgagaacggcugggagggcauggucgacgggugguacggcuuccgccaccagaacagcgaggggaucggccaggccgccgaccugaaguccacccaggccgcgaucgaccagaucaacgggaagcugaaccggcucaucggcaagaccaacgagaaguuccaccagaucgagaaggaguucagcgagguggagggccgcauccaggaccuggagaaguacguggaggacaccaagaucgaccugugguccuacaacgccgagcuccuggucgcccuggagaaccagcacacgaucgaccucaccgacagcgagaugaacaagcuguucgagaagaccaagaagcagcugcgggagaacgccgaggaccucgggaacggcugcuucaagaucuaccacaagugcgacaacgccugcaucggguccauccgcaacggcaccuacgaccacgacguguaccgcgacgaggcgcugaacaaccgguuccagaucaaggggguggagcugaaguccggcuacaaggacuggauccucuggaucuccuucgccaucagcugcuuccugcugugcgucgcccuccugggcuucaucaugugggccugccagaaggggaacauccgcugcaacaucugcaucuga

SEQ ID NO: 66379 - RNA, 1701 nt, Artificial Sequence
  derived and/or modified CDS sequence (opt1) from hemagglutinin__InfluenzaA__ACF54565
augaagaccaucaucgcccugagcuacauccucugccugguguucucccagaagcugcccggcaacgacaacagcaccgccacgcucugccuggggcaccacgcggucccgaacggcaccaucgugaagaccaucaccaacgaccagaucgaggugacgaacgccaccgagcugguccaguccagcuccaccgggggcaucugcgacagcccccaccagauccucgacggggagaacugcacccugaucgacgcccugcucggcgacccccagugcgacggcuuccagaacaagaagugggaccuguucguggagcgcuccaaggccuacagcaacugcuaccccuacgacgugccggacuacgccucccugcggagccucgucgcguccagcgggacgcuggaguucaacaacgaguccuucaacugggccggcgugacccagaacgggaccagcuccgccugcaagcgccggagcaacaaguccuucuucagccgccugaacuggcucacccaccugaaguacaaguaccccgcccugaacgugacgaugcccaacaacgagaaguucgacaagcucuacaucuggggcguccaccaccccgugaccgacuccgaccagaucagccuguacgcgcaggccagcgggcggaucaccguguccaccaagcgcagccagcagacggucaucccgaacaucggcuaccggccccgcgugcgggacaucuccagccgcaucuccaucuacuggaccaucgugaagcccggcgacauccugcucaucaacagcaccgggaaccugaucgcgccccggggcuacuucaagauccgcuccggcaagagcuccaucaugcggagcgacgccccgaucgggaagugcaacuccgagugcaucacccccaacggcagcauccccaacgacaagcccuuccagaacgucaaccgcaucacguacggggccugcccgcgguacgugaagcagaacacccugaagcucgccaccggcaugcgcaacgugcccgagaagcagacccgggggaucuucggcgccaucgccggguucaucgagaacggcugggagggcauggucgacgggugguacggcuuccgccaccagaacuccgaggggacgggccaggccgccgaccucaagagcacccaggcggccaucaaccagaucaacgggaagcugaaccggcugaucggcaagaccaacgagaaguuccaccagaucgagaaggaguucuccgagguggagggccgcauccaggaccuggagaaguacguggaggacaccaagaucgaccuguggagcuacaacgccgagcuccuggucgcccuggagaaccagcacacgaucgaccucaccgacuccgagaugaacaagcuguucgagcggaccaagaagcagcugcgcgagaacgccgaggacauggggaacggcugcuucaagaucuaccacaagugcgacaacgcgugcaucgagagcauccgcaacgggaccuacgaccacgacguguaccgggacgaggcccucaacaaccgcuuccagaucaagggcguggagcugaaguccggguacaaggacuggauccuguggaucagcuucgccaucagcugcuuccuccugugcgucgcccugcucggcuucaucaugugggccugccagaagggcaacauccggugcaacaucugcaucuga

SEQ ID NO: 66380 - RNA, 1701 nt, Artificial Sequence
  derived and/or modified CDS sequence (opt1) from hemagglutinin__InfluenzaA__ACF54576
augaagaccaucaucgcccugagcuacauccucugccugguguucgcccagaagcugcccggcaacgacaacuccaccgcgacgcucugccuggggcaccacgccgucccgaacggcaccaucgugaagaccaucaccaacgaccagaucgaggugacgaacgccaccgagcugguccagagcuccagcaccgggggcaucugcgacagcccccaccagauccucgacggggagaacugcacccugaucgacgcccugcucggcgacccccagugcgacggcuuccagaacaagaagugggaccuguucguggagcgcagcaaggccuacuccaacugcuaccccuacgacgugccggacuacgcgagccugcggucccucgucgccagcuccgggacgcuggaguucaacgacgagagcuucaacuggaccggcgugacccagaacgggaccuccagcuccugcaagcgccggagcaacaacuccuucuucagccgccugaacuggcucacgcagcugaaguucaaguaccccgcccugaacgugaccaugcccaacaacgagaaguucgacaagcucuacaucuggggcguccaccaccccgugaccgacaacgaccagaucuuccuguacgcccaggcguccgggcggaucaccgugagcacgaagcgcagccagcagaccgucaucccgaacaucggcucccggccccgcauccggaacauccccagccgcaucuccaucuacuggaccaucgugaagcccggcgacauccugcucaucaacagcaccgggaaccugaucgccccgcggggcuacuucaagauccgcuccgggaaguccuccaucaugcggagcgacgcccccaucggcaagugcaacuccgagugcaucacgcccaacggcagcauccccaacgacaagccguuccagaacgugaaccgcaucaccuacggggccugcccccgguacgucaagcagaacacccugaagcucgccaccggcaugcgcaacgugcccgagaagcagacgcgggggaucuucggcgcgaucgccggguucaucgagaacggcugggagggcaugguggacgggugguacggcuuccgccaccagaacuccgaggggaucggccaggccgccgaccucaagagcacccaggccgcgaucaaccagaucaacgggaagcugaaccggcugaucggcaagaccaacgagaaguuccaccagaucgagaaggaguucuccgaggucgagggccgcauccaggaccuggagaaguacguggaggacaccaagaucgaccuguggagcuacaacgccgagcuccugguggcccuggagaaccagcacacgaucgaccucaccgacuccgagaugaacaagcuguucgagcggaccaagaagcagcugcgcgagaacgccgaggacauggggaacggcugcuucaagaucuaccacaagugcgacaacgccugcaucgggagcauccgcaacggcaccuacgaccacgacgucuaccgggacgaggcgcucaacaaccgcuuccagaucaaggggguggagcugaaguccggcuacaaggacuggauccuguggaucagcuucgccaucuccugcuuccuccugugcguggcccugcucggcuucaucaugugggccugccagaaggggaacauccggugcaacaucugcaucuga

SEQ ID NO: 66381 - RNA, 1698 nt, Artificial Sequence
  derived and/or modified CDS sequence (opt1) from hemagglutinin__InfluenzaA__ACF54598
augaaggccaagcugcucgugcugcuguacgccuucgucgcgaccgacgccgacaccaucugcaucggcuaccacgccaacaacagcacggacaccguggacaccaucuucgagaagaacguggccgucacccacuccgugaaccuccuggaggaccgccacaacgggaagcugugcaagcucaagggcaucgcgccccugcagcuggggaagugcaacaucaucggcuggcuccuggggaacccggagugcgacagccugcuccccgcccgguccuggagcuacaucguggagacgcccaacuccgagaacggcgccugcuaccccggcgacuucaucgacuacgaggagcugcgcgagcagcugagcuccgucagcucccucgagcgguucgagaucuucccgaaggagagcuccuggcccaaccacaccuucaacggggugaccgccagcugcucccaccgcggcaagagcuccuucuaccggaaccugcuguggcucaccaagaagggggacagcuaccccaagcugacgaacuccuacgugaacaacaagggcaaggagguccuggugcucuggggcgugcaccaccccagcuccagcgacgagcagcagagccuguacuccaacgggaacgccuacgucagcguggcguccagcaacuacaaccgccgguucaccccggagaucgccgcccgccccaaggugaaggaccagcacggccggaugaacuacuacuggacccugcucgagcccggggacaccaucaucuucgaggccacgggcaaccugaucgcccccugguacgcguucgcccugucccgcggguucgagagcggcaucaucaccuccaacgccagcaugcacgagugcaacaccaagugccagaccccgcagggcuccaucaacagcaaccuccccuuccagaacauccaccccgucacgaucggggagugccccaaguacgugcgguccaccaagcugcgcauggugaccggccugcggaacaucccgagcauccaguaccgcggccucuucggggccaucgccggguucaucgagggcggcuggaccgggaugaucgacggcugguacggguaccaccaccagaacgagcagggcuccggguacgcggccgaccagaaguccacgcagaacgccaucaacggcaucaccaacaaggucaacagcaucaucgagaagaugaacacccaguucaccgccgugggcaaggaguucaacaaccuggagaagcggauggagaaccugaacaagaagguggacgacggguuccucgacaucuggacguacaacgccgagcugcugguccuccuggagaacggccgcacccuggacuuccacgaccucaacgugaagaaccuguacgagaaggucaagagccagcugaagaacaacgcgaaggagaucgggaacggcugcuucgaguucuaccacaagugcgacaacgagugcauggaguccgugcggaacgggaccuacgacuaccccaaguacagcgaggaguccaagcucaaccgcgagaagaucgacggcgugaagcuggagagcaugggcgucuaccagauccuggccaucuacagcaccguggccuccagccucgugcugcuggucucccucggggccaucagcuucuggaugugcuccaacggcagccugcagugccggaucugcaucuga

SEQ ID NO: 66382 - RNA, 1704 nt, Artificial Sequence
  derived and/or modified CDS sequence (opt1) from hemagglutinin__InfluenzaA__ACG50699
auggagaagaucgugcugcuccuggccaucgucagccuggugaaguccgaccagaucugcaucggcuaccacgccaacaacagcaccgagcaggucgacaccaucauggagaagaacgugacggugacccacgcgcaggacauccucgagaagacccacaacgggaagcugugcgaccuggacggcgugaagccccucauccugcgcgacugcuccgucgccggguggcugcucggcaacccgaugugcgacgaguucaucaacgugcccgaguggagcuacaugguggagaaggccaaccccgccaacgaccugugcuaccccgggaacuucaacgacuacgaggagcugaagcaccuccugucccggaucaaccacuucgagaagauccagaucauccccaagagcuccuggagcgaccacgaggccucccugggcgucagcuccgcgugcccguaccagggcagcuccagcuucuuccgcaacgugguguggcucaucaagaagaacaacgccuaccccaccaucaagcgguccuacaacaacacgaaccaggaggaccugcugguccucugggggauccaccaccccaacgacgaggccgagcagacccgccuguaccagaacccgaccaccuacaucagcgugggcacguccacccugaaccagcggcucauccccaagaucgccacccgcagcaaggugaacgggcaguccggccggauggacuucuucuggaccauccugaagcccaacgacgcgaucaacuucgagagcaacgggaacuucaucgcccccgaguacgccuacaagaucgucaagaagggcgacagcgccaucaugaaguccgagguggaguacggcaacugcaacacgaagugccagaccccgaugggggccaucaacagcuccaugcccuuccacaacauccacccccugaccaucggcgagugccccaaguacgucaagagcaacaagcucgugcuggcgaccgggcugcgcaacuccccgcagcgggagcgccggcgcaagcggggccucuucggcgccaucgccggguucaucgagggcggguggcagggcaugguggacgggugguacggcuaccaccacagcaacgagcagggcuccggguacgccgccgacaaggagagcacgcagaaggcgaucgacggcgugaccaacaaggucaacuccaucaucgacaagaugaacacccaguucgaggccguggggcgcgaguucaacaaccuggagcggcgcaucgagaaccugaacaagaagauggaggacggcuuccucgacguguggaccuacaacgccgagcugcugguccucauggagaacgagcggacgcuggacuuccacgacagcaacgugaagaaccuguacgacaagguccgccuccagcugcgggacaacgccaaggagcuggggaacggcugcuucgaguucuaccacaagugcgacaacgagugcauggaguccgugcgcaacggcaccuacgacuacccccaguacagcgaggaggcccggcucaagcgcgaggagaucuccggggugaagcuggagagcaucggcaccuaccagauccuguccaucuacagcaccgucgcguccagccucgcccuggccaucaugguggccgggcugucccucuggaugugcagcaacggcagccugcagugccgcaucugcaucuga

SEQ ID NO: 66383 - RNA, 1701 nt, Artificial Sequence; identical to SEQ ID NO: 65952
  derived and/or modified CDS sequence (opt1) from hemagglutinin__InfluenzaA__ACG70142

SEQ ID NO: 66384 - RNA, 1701 nt, Artificial Sequence; identical to SEQ ID NO: 65952
  derived and/or modified CDS sequence (opt1) from hemagglutinin__InfluenzaA__ACG70153

SEQ ID NO: 66385 - RNA, 1701 nt, Artificial Sequence
  derived and/or modified CDS sequence (opt1) from hemagglutinin__InfluenzaA__ACG80410
augaagaccaucaucgcccugagcuacauccucugccugguguucgcccagaagcugcccggcaacgacaacuccaccgcgacgcucugccuggggcaccacgccgucccgaacggcaccaucgugcgcaccaucaccaacgaccagaucgaggugacgaacgccaccgagcugguccagagcuccagcaccggggagaucugcgacagcccccaccagauccucgacggcgagaacugcacccugaucgacgcccugcucggggacccccagugcgacggcuuccagaacaagaagugggaccuguucguggagcggagcaaggccuacuccaacugcuaccccuacgacgugccggacuacgcgagccugcgcucccucgucgccagcuccggcacgcuggaguucaacaacgagagcuucaacuggaccggggugacccagaacggcaccuccagcgccugcauccggcgcuccaacaacagcuucuucucccggcugaacuggcucacgcaccuccgcuucaaguaccccgcccugaacgugaccaugcccaacaacgagcaguucgacaagcuguacaucuggggcguccaccaccccgggaccgacaacgaccagaucuuccuguacgcgcaggccagcgggcggaucaccguguccacgaagcgcagccagcagaccgugaucccgaacaucggcagccggccccgcguccggaacauccccucccgcaucagcaucuacuggaccaucgugaagcccggcgacauccugcucaucaacuccaccgggaaccugaucgccccgcggggcuacuucaagauccgcaacgggaaguccuccaucaugcggagcgacgcccccaucggcaagugcaacuccgagugcaucacgcccaacggcagcauccccaacgacaagccguuccagaacgugaaccgcaucaccuacggggccugcccccgguacgucaagcagaacacccugaagcucgcgaccggcaugcgcaacgugcccgagaagcagacgcgggggaucuucggcgccaucgccggguucaucgagaacggcugggagggcaugguggacgggugguacggcuuccgccaccagaacuccgaggggcggggccaggccgccgaccucaagagcacccaggcggccaucgaccagaucaacgggaagcugaaccgccugaucggcaagaccaacgagaaguuccaccagaucgagaaggaguucuccgaggucgagggccgcauccaggaccuggagaaguacguggaggacaccaagaucgaccuguggagcuacaacgccgagcuccugguggcccuggagaaccagcacacgaucgaccucaccgacuccgagaugaacaagcuguucgagaagaccaagaagcagcugcgggagaacgccgaggacauggggaacggcugcuucaagaucuaccacaagugcgacaacgcgugcaucgggagcauccgcaacggcaccuacgaccacgacgucuaccgggacgaggcccucaacaaccgcuuccagaucaaggggguggagcugaaguccggcuacaaggacuggauccuguggaucagcuucgccaucuccugcuuccuccugugcguggcccugcucggcuucaucaugugggccugccagaaggggaacauccggugcaacaucugcaucuga

SEQ ID NO: 66386 - RNA, 1701 nt, Artificial Sequence
  derived and/or modified CDS sequence (opt1) from hemagglutinin__InfluenzaA__ACG80420
augcagaccaucaucgcccugagcuacauccucugccugguguucgcccagaagcugcccggcaacgacaacuccaccgcgacgcucugccuggggcaccacgccgucccgaacggcaccaucgugcgcaccaucaccaacgaccagaucgaggugacgaacgccaccgagcugguccagagcuccagcaccggggagaucugcgacagcccccaccagauccucgacggcgagaacugcacccugaucgacgcccugcucggggacccccagugcgacggcuuccagaacaagaagugggaccuguucguggagcggagcaaggccuacuccaacugcuaccccuacgacgugccggacuacgcgagccugcgcucccucgucgccagcuccggcacgcuggaguucaacaacgagagcuucaacuggaccggggugacccagaacggcaccuccagcgccugcauccggcgcuccaacaacagcuucuucucccggcugaacuggcucacgcaccuccgcuucaaguaccccgcccugaacgugaccaugcccaacaacgagcaguucgacaagcuguacaucuggggcguccaccaccccgggaccgacaacgaccagaucuuccuguacgcgcaggccagcgggcggaucaccguguccacgaagcgcagccagcagaccgugaucccgaacaucggcagccggccccgcguccggaacauccccucccgcaucagcaucuacuggaccaucgugaagcccggcgacauccugcucaucaacuccaccgggaaccugaucgccccgcggggcuacuucaagauccgcaacgggaaguccuccaucaugcggagcgacgcccccaucggcaagugcaacuccgagugcaucacgcccaacggcagcauccccaacgacaagccguuccagaacgugaaccgcaucaccuacggggccugcccccgguacgucaagcagaacacccugaagcucgcgaccggcaugcgcaacgugcccgagaagcagacgcgggggaucuucggcgccaucgccggguucaucgagaacggcugggagggcaugguggacgggugguacggcuuccgccaccagaacuccgaggggcggggccaggccgccgaccucaagagcacccaggcggccaucgaccagaucaacgggaagcugaaccgccugaucggcaagaccaacgagaaguuccaccagaucgagaaggaguucuccgaggucgagggccgcauccaggaccuggagaaguacguggaggacaccaagaucgaccuguggagcuacaacgccgagcuccugguggcccuggagaaccagcacacgaucgaccucaccgacuccgagaugaacaagcuguucgagaagaccaagaagcagcugcgggagaacgccgaggacauggggaacggcugcuucaagaucuaccacaagugcgacaacgcgugcaucgggagcauccgcaacggcaccuacgaccacgacgucuaccgggacgaggcccucaacaaccgcuuccagaucaaggggguggagcugaaguccggcuacaaggacuggauccuguggaucagcuucgccaucuccugcuuccuccugugcguggcccugcucggcuucaucaugugggccugccagaaggggaacauccggugcaacaucugcaucuga

SEQ ID NO: 66387 - RNA, 1701 nt, Artificial Sequence; identical to SEQ ID NO: 66385
  derived and/or modified CDS sequence (opt1) from hemagglutinin__InfluenzaA__ACG80426

SEQ ID NO: 66388 - RNA, 1701 nt, Artificial Sequence; identical to SEQ ID NO: 66385
  derived and/or modified CDS sequence (opt1) from hemagglutinin__InfluenzaA__ACG80430

SEQ ID NO: 66389 - RNA, 1701 nt, Artificial Sequence
  derived and/or modified CDS sequence (opt1) from hemagglutinin__InfluenzaA__ACG80436
augaagaccaucaucgcccugagcuacauccucugccugguguucgcccagaaguuccccggcaacgacaacuccaccgcgacgcugugccucgggcaccacgccgucccgaacggcaccaucgugaagaccaucaccaacgaccagaucgaggugacgaacgccaccgagcugguccagagcuccagcaccggggagaucugcgacagcccccaccagauccuggacggcgagaacugcacccucaucgacgcccugcugggggacccccagugcgacggcuuccagaacaagaagugggaccucuucguggagcgcagcaaggccuacuccaacugcuaccccuacgacgugccggacuacgcgagccugcggucccuggucgccagcuccggcacgcucgaguucaacaacgagagcuucaacuggaccggggugacccagaacggcaccuccagcgccugcauccgccgguccaacaacagcuucuucucccgccugaacuggcugacgcaccuccgguucaaguaccccgcccugaacgugaccaugcccaacaacgagaacuucgacaagcuguacaucuggggcguccaccaccccgggaccgacaacgaccagaucuuccucuacgcgcaggccagcgggcgcaucaccguguccacgaagcggagccagcagaccgugaucccgaacaucggcagccgcccccggguccgcaacauccccucccggaucagcaucuacuggaccaucgugaagcccggcgacauccugcugaucaacuccaccgggaaccucaucgccccgcgcggcuacuucaagauccggagcgggaaguccagcaucaugcgcuccgacgcccccaucggcaagugcaacagcgagugcaucacgcccaacggcuccauccccaacgacaagccguuccagaacgugaaccggaucaccuacggggccugcccccgcuacgucaagcagaacacccugaagcuggcgaccggcaugcggaacgugcccgagaagcagacgcgcgggaucuucggcgccaucgccggguucaucgagaacggcugggagggcaugguggacgggugguacggcuuccggcaccagaacagcgaggggaucggccaggccgccgaccucaaguccacccaggcggcccuggaccagaucaacgggaagcugaaccgccucaucggcaagaccaacgagaaguuccaccagaucgagaaggaguucagcgaggucgagggccggauccaggaccuggagaaguacguggaggacaccaagaucgaccugugguccuacaacgccgagcuccugguggcccuggagaaccagcacacgaucgaccucaccgacagcgagaugaacaagcuguucgagaagaccaagaagcagcugcgcgagaacgccgaggacauggggaacggcugcuucaagaucuaccacaagugcgacaacgcgugcaucggguccauccgcaacggcaccuacgaccacaacgucuaccgggacgaggcccucaacaaccgcuuccagaucaaggggguggagcugaaguccggcuacaaggacuggauccuguggaucuccuucgccaucagcugcuuccuccugugcguggcccugcucggcuucaucaugugggccugccagaaggggaacauccggugcaacaucugcaucuga

SEQ ID NO: 66390 - RNA, 1701 nt, Artificial Sequence
  derived and/or modified CDS sequence (opt1) from hemagglutinin__InfluenzaA__ACG80445
augaagaccaucaucgcccugagcuacauccucugccugguguucgcccagaagcugcccggcaacgacaacuccaccgcgacgcucugccuggggcaccacgccgucccgaacggcaccaucgugcgcaccaucaccaacgaccagaucgaggugacgaacgccaccgagcugguccagagcuccagcaccggggagaucugcgacagcccccaccagauccucgacggcgagaacugcacccugaucgacgcccugcucggggacccccagugcgacggcuuccagaacaagaagugggaccuguucguggagcggagcaaggccuacuccaacugcuaccccuacgacgugccggacuacgcgagccugcgcucccucgucgccagcuccggcacgcuggaguucaacaacgagagcuucaacuggaccggggugacccagaacggcaccuccagcgccugcauccggcgcuccaacaacagcuucuucucccggcugaacuggcucacgcaccuccgcuucaaguaccccgcccugaacgugaccaugcccaacaacgagcaguucgacaagcuguacaucuggggcguccaccaccccgggaccgacaacgaccagaucuuccuguacgcgcaggccagcgggcggaucaccguguccacgaagcgcagccagcagaccgugaucccgaacaucggcagccggccccgcguccggaacauccccucccgcaucagcaucuacuggaccaucgugaagcccggcgacauccugcucaucaacuccaccgggaaccugaucgccccgcggggcuacuucaagauccgcaacgggaaguccuccaucaugcggagcgacgcccccaucggcaagugcaacuccgagugcaucacgcccaacggcagcauccccaacgacaagccguuccagaacgugaaccgcaucaccuacggggccugcccccgguacgucaagcagaacacccugaagcucgcgaccggcaugcgcaacgugcccgagaagcagacgcgggggaucuucggcgccaucgccggguucaucgagaacggcugggagggcaugguggacgggugguacggcuuccgccaccagaacuccgaggggcggggccaggccgccgaccucaagagcacccaggcggccaucgaccagaucaacgggaagcugaaccgccugaucggcaagaccaacgagaaguuccaccagaucgagaaggaguucuccgaggucgagggccgcauccaggaccuggagaaguacguggaggacaccaagaucgaccuguggagcuacaacgccgagcuccugguggcccuggagaaccagcacacgaucgaccucaccgacuccgagaugaacaagcuguucgagaagaccaagaaccagcugcgggagaacgccgaggacauggggaacggcugcuucaagaucuaccacaagugcgacaacgcgugcaucgggagcauccgcaacggcaccuacgaccacgacgucuaccgggacgaggcccucaacaaccgcuuccagaucaaggggguggagcugaaguccggcuacaaggacuggauccuguggaucagcuucgccaucuccugcuuccuccugugcguggcccugcucggcuucaucaugugggccugccagaaggggaacauccggugcaacaucugcaucuga

SEQ ID NO: 66391 - RNA, 1701 nt, Artificial Sequence; identical to SEQ ID NO: 66385
  derived and/or modified CDS sequence (opt1) from hemagglutinin__InfluenzaA__ACG80454

SEQ ID NO: 66392 - RNA, 1701 nt, Artificial Sequence; identical to SEQ ID NO: 66385
  derived and/or modified CDS sequence (opt1) from hemagglutinin__InfluenzaA__ACG80463

SEQ ID NO: 66393 - RNA, 1701 nt, Artificial Sequence
  derived and/or modified CDS sequence (opt1) from hemagglutinin__InfluenzaA__ACG80472
augaagaccaucaucgcccugagcuacauccucugccugguguucgcccagaagcugcccggcaacgacaacuccaccgcgacgcucugccuggggcaccacgccgucccgaacggcaccaucgugcgcaccaucaccaacgaccagaucgaggugacgaacgccaccgagcugguccagagcuccagcaccggggagaucugcgacagcccccaccagauccucgacggcgagaacugcacccugaucgacgcccugcucggggacccccagugcgacggcuuccagaacaagaagugggaccuguucguggagcggagcaaggccuacuccaacugcuaccccuacgacgugccggacuacgcgagccugcgcucccucgucgccagcuccggcacgcuggaguucaacaacgagagcuucaacuggaccggggugacccagaacggcaccuccagcgccugcauccggcgcuccaacaacagcuucuucucccggcugaacuggcucacgcaccuccgcuucaaguaccccgcccugaacgugaccaugcccaacaacgagcaguucgacaagcuguacaucuggggcguccaccaccccgggaccgacaacgaccagaucuuccuguacgcgcaggccagcgggcggaucaccguguccacgaagcgcagccagcagaccgugaucccgaacaucggcagccggccccgcguccggaacauccccucccgcaucagcaucuacuggaccaucgugaagcccggcgacauccugcucaucaacuccaccgggaaccugaucgccccgcggggcuacuucaagauccgcagcgggaaguccagcaucaugcgguccgacgcccccaucggcaagugcaacagcgagugcaucacgcccaacggcuccauccccaacgacaagccguuccagaacgugaaccgcaucaccuacggggccugcccccgguacgucaagcagaacacccugaagcucgcgaccggcaugcgcaacgugcccgagaagcagacgcgggggaucuucggcgccaucgccggguucaucgagaacggcugggagggcaugguggacgggugguacggcuuccgccaccagaacagcgaggggaucggccaggccgccgaccugaaguccacccaggcggcccuggaccagaucaacgggaagcucaaccggcugaucggcaagaccaacgagaaguuccaccagaucgagaaggaguucagcgaggucgagggccgcauccaggaccuggagaaguacguggaggacaccaagaucgaccucugguccuacaacgccgagcugcugguggcccucgagaaccagcacacgaucgaccugaccgacagcgagaugaacaagcuguucgagaagaccaagaagcagcuccgcgagaacgccgaggacauggggaacggcugcuucaagaucuaccacaagugcgacaacgcgugcaucggguccauccggaacggcaccuacgaccacaacgucuaccgcgacgaggcccugaacaaccgguuccagaucaaggggguggagcugaaguccggcuacaaggacuggauccucuggaucuccuucgccaucagcugcuuccugcugugcguggcccuccugggcuucaucaugugggccugccagaaggggaacauccgcugcaacaucugcaucuga

SEQ ID NO: 66394 - RNA, 1701 nt, Artificial Sequence
  derived and/or modified CDS sequence (opt1) from hemagglutinin__InfluenzaA__ACH69558
augaagaccaucaucgcccugagcuacauccucugccugguguucgcccagaagcugcccggcaacgacaacuccaccgcgacgcucugccuggggcaccacgccgucccgaacggcaccaucgugaagaccaucaccaacgaccagaucgaggugacgaacgccaccgagcugguccagagcuccagcaccgggggcaucugcaacagcccccaccagauccucgacggggagaacugcacccugaucgacgcccugcucggcgacccccagugcgacggcuuccagaacaagaagugggaccuguucguggagcgcagcaaggccuacuccaacugcuaccccuacgacgugccggacuacgcgagccugcggucccucgucgccagcuccgggacgcuggaguucaacaacgagagcuucaacuggaccggcgugacccagaacgggaccuccagcgccugcaagcgccgguccaacaacagcuucuucucccgccugaacuggcucacgcaccuccgguucaaguaccccgcccugaacgugaccaugcccaacaacgagaaguucgacaagcuguacaucuggggcguccaccaccccgggaccgacaacgaccagaucuuccuguacgcgcaggccagcggccgcaucaccguguccacgaagcggagccagcagaccgugaucccgaacaucggcagccgcccccggguccgcaacauccccucccggaucagcaucuacuggaccaucgugaagcccggggacauccugcucaucaacuccaccggcaaccugaucgccccgcgcggguacuucaagauccggagcggcaaguccagcaucaugcgcuccgacgcccccaucggcaagugcaacagcgagugcaucacgcccaacggguccauccccaacgacaagccguuccagaacgugaaccggaucaccuacggcgccugcccccgcuacgucaagcagaacacccugaagcucgcgaccgggaugcggaacgugcccgagaagcagacgcgcggcaucuucggggccaucgccggcuucaucgagaacggcugggaggggaugguggacggcugguacggguuccggcaccagaacagcgagggcaucgggcaggccgccgaccugaaguccacccaggcggccaucaaccagaucaacggcaagcugaaccgccucaucggcaagaccaacgagaaguuccaccagaucgagaaggaguucagcgaggucgaggggcggauccaggaccuggagaaguacguggaggacaccaagaucgaccugugguccuacaacgccgagcuccugguggcccuggagaaccagcacacgaucgaccucaccgacagcgagaugaacaagcuguucgagcgcaccaagaagcagcugcgcgagaacgccgaggacaugggcaacgggugcuucaagaucuaccacaagugcgacaacgcgugcaucggcuccauccggaacgggaccuacgaccacgacgucuaccgcgacgaggcccucaacaaccgguuccagaucaagggcguggagcugaaguccggcuacaaggacuggauccuguggaucuccuucgccaucagcugcuuccuccugugcguggcccugcucggguucaucaugugggccugccagaagggcaacauccgcugcaacaucugcaucuga

SEQ ID NO: 66395 - RNA, 1701 nt, Artificial Sequence
  derived and/or modified CDS sequence (opt1) from hemagglutinin__InfluenzaA__ACH69569
augaagaccaucaucgcccugagcuacauccucugccugguguucgcccagaagcugcccggcaacgacaacuccaccgcgacgcucugccuggggcaccacgccgucccgaacggcaccaucgugaagaccaucaccaacgaccagaucgaggugacgaacgccaccgagcugguccagagcuccagcaccgggggcaucugcaacagcccccaccagauccucgacggggagaacugcacccugaucgacgcccugcucggcgacccccagugcgacggcuuccagaacaagaagugggaccuguucguggagcgcagcaaggccuacuccaacugcuaccccuacgacgugccggacuacgcgagccugcggucccucgucgccagcuccgggacgcuggaguucaacaacgagagcuucaacuggaccggcgugacccagaacgggaccuccagcgccugcaagcgccgguccaacaacagcuucuucucccgccugaacuggcucacgcaccugaaguucaaguaccccgcccugaacgugaccaugcccaacaacgagaaguucgacaagcucuacaucuggggcguccaccaccccgggaccgacaacgaccagaucuuccuguacgcgcaggccagcggccggaucaccguguccacgaagcgcagccagcagaccgugaucccgaacaucggcagccggccccgcguccggaacauccccucccgcaucagcaucuacuggaccaucgugaagcccggggacauccugcucaucaacuccaccggcaaccugaucgccccgcggggguacuucaagauccgcagcggcaaguccagcaucaugcgguccgacgcccccaucggcaagugcaacagcgagugcaucacgcccaacggguccauccccaacgacaagccguuccagaacgugaaccgcaucaccuacggcgccugcccccgguacgucaagcagaacagccugaagcucgcgaccgggaugcgcaacgugcccgagaagcagacccggggcaucuucggggccaucgccggcuucaucgagaacggcugggaggggaugguggacggcugguacggguuccgccaccagaacuccgagggcaucgggcaggccgccgaccugaaguccacgcaggcggccaucaaccagaucaacggcaagcugaaccggcucaucggcaagaccaacgagaaguuccaccagaucgagaaggaguucuccgaggucgaggggcgcauccaggaccuggagaaguacguggaggacaccaagaucgaccuguggagcuacaacgccgagcuccugguggcccuggagaaccagcacaccaucgaccucacggacuccgagaugaacaagcuguucgagcggaccaagaagcagcugcgcgagaacgccgaggacaugggcaacgggugcuucaagaucuaccacaagugcgacaacgcgugcaucggcagcauccgcaacgggaccuacgaccacgacgucuaccgggacgaggcccucaacaaccgcuuccagaucaagggcguggagcugaaguccggcuacaaggacuggauccuguggaucagcuucgccaucuccugcuuccuccugugcguggcccugcucggguucaucaugugggccugccagaagggcaacauccggugcaacaucugcaucuga

SEQ ID NO: 66396 - RNA, 1701 nt, Artificial Sequence
  derived and/or modified CDS sequence (opt1) from hemagglutinin__InfluenzaA__ACH69580
augaagaccaucaucgcccugagcuacauccucugccugguguucgcccagaagcugcccggcaacgacaacuccaccgcgacgcucugccuggggcaccacgccgucccgaacggcaccaucgugaagaccaucaccaacgaccagaucgaggugacgaacgccaccgagcugguccagagcuccagcaccgggggcaucugcgacagcccccaccagauccucgacggggagaacugcacccugaucgacgcccugcucggcgacccccagugcgacgacuuccagaacaagaagugggaccuguucguggagcgcagcaaggccuacuccaacugcuaccccuacgacgugccggacuacgcgagccugcggucccucgucgccagcuccggcacgcuggaguucaacaacgagagcuucaacuggaccggggugacccagaacggcaccuccagcgccugcaagcgccgguccaacaacagcuucuucucccgccugaacuggcucacgcaccugaaguucaaguaccccgcccugaacgugaccaugcccaacaacgagaaguucgacaagcucuacaucuggggcguccaccaccccgggaccgacaacgaccagaucuuccuguacgcgcaggccagcgggcggaucaccguguccacgaagcgcagccagcagaccgugaucccgaacaucggcagccggccccgcguccggaacauccccucccgcaucagcaucuacuggaccaucgugaagcccggcgacauccugcucaucaacuccaccgggaaccugaucgccccgcggggcuacuucaagauccgcagcgggaaguccagcaucaugcgguccgacgcccccaucggcaagugcaacagcgagugcaucacgcccaacggcuccauccccaacgacaagccguuccagaacgugaaccgcaucaccuacggggccugcccccgguacgucaagcagaacacccugaagcucgcgaccggcaugcgcaacgugcccgagaagcagacgcgggggaucuucggcgccaucgccggguucaucgagaacggcugggagggcaugguggacgggugguacggcuuccgccaccagaacagcgaggggaucggccaggccgccgaccugaaguccacccaggcggccaucaaccagaucaacgggaagcugaaccggcucaucggcaagaccaacgagaaguuccaccagaucgagaaggaguucagcgaggucgagggccgcauccaggaccuggagaaguacguggaggacaccaagaucgaccugugguccuacaacgccgagcuccugguggcccuggagaaccagcacacgaucgaccucaccgacagcgagaugaacaagcuguucgagcggaccaagaagcagcugcgcgagaacgccgaggacauggggaacggcugcuucaagaucuaccacaagugcgacaacgcgugcaucggguccauccgcaacggcaccuacgaccacgacgucuaccgggacgaggcccucaacaaccgcuuccagaucaaggggguggagcugaaguccggcuacaaggacuggauccuguggaucuccuucgccaucagcugcuuccuccugugcguggcccugcucggcuucaucaugugggccugccagaaggggaacauccggugcaacaucugcaucuga

SEQ ID NO: 66397 - RNA, 1701 nt, Artificial Sequence
  derived and/or modified CDS sequence (opt1) from hemagglutinin__InfluenzaA__ACH69591
augaagaccaucaucgcccugagcuacauccucugccuggccuucgcgcagaagcugcccggcaacgacaacuccaccgccacgcucugccuggggcaccacgccgugccgaacggcacccuggucaagaccaucaccaacgaccagaucgaggugacgaacgccaccgagcucgugcagagcuccagcaccgggcgcaucugcgacagcccccaccagauccuggacggcgagaacugcacccugaucgacgcccuccugggggacccccacugcgacggcuuccagaacaaggagugggaccuguucgucgagcggagcaaggcguacuccaacugcuaccccuacgacgugccggacuacgccagccuccgcucccugguggccagcuccggcacgcuggaguucaacaacgagagcuucaacuggaccggggucgcccagaacggcaccuccagcgcgugcaagcggcgcuccaucaacagcuucuucucccggcucaacuggcugcaccagcugaaguaccgcuaccccgcccucaacgugaccaugcccaacaacgacaaguucgacaagcuguacaucuggggcgugcaccaccccagcacggacuccgaccagaucagcgucuacgcccaggccagcgggcgggugaccguguccaccaagcgcagccagcagaccgucaucccgaacaucgggucccggcccugggugcgcggcaucagcucccggaucagcaucuacuggacgaucgugaagcccggcgacauccugcucaucaacuccaccgggaaccugaucgcgccccgcggcuacuucaagauccggagcgggaaguccagcaucaugcgcuccgacgccccgaucggcaagugcaacagcgagugcaucacccccaacggcuccauccccaacgacaagcccuuccagaacgucaaccggaucaccuacggggccugcccgcgcuacgugaagcagaacacgcugaagcucgccaccggcaugcggaacgugcccgagaagcagacccgcgggaucuucggcgccaucgccggguucaucgagaacggcugggagggcaugauggacgggugguacggcuuccggcaccagaacagcgaggggaccggccaggcggccgaccugaaguccacgcaggccgccaucaaccagaucaacgggaagcugaacaagcucaucgagaagaccaacgagaaguuccaccagaucgagaacgaguucagcgaggucgagggccgcauccaggaccuggagaaguacguggaggacaccaagaucgaccugugguccuacaacgccgagcuccugguggcgcuggagaaccagcacaccaucgaccucacggacagcgagaugaacaagcuguucgagcggacccgcaagcagcugcgcgagaacgccgaggacaugggcaacgggugcuucaagaucuaccacaagugcgacaacgccugcaucggcuccauccggaacgggaccuacgaccacgacgucuaccgcgacgaggcccucaacaaccgguuccagaucaagggcguggagcugaaguccggguacaaggacuggauccuguggaucagcuucgccaucuccugcuuccuccugugcgugguccugcucggcuucaucaugugggcgugccagaagggcaacauccgcugcaacaucugcaucuga

SEQ ID NO: 66398 - RNA, 1701 nt, Artificial Sequence
  derived and/or modified CDS sequence (opt1) from hemagglutinin__InfluenzaA__ACH69602
augaagaccaucaucgcccugagcuacauccucugccuggccuucgcgcagaagcugcccggcaacgacaacuccaccgccacgcucugccuggggcaccacgccgugccgaacggcacccuggucaagaccaucaccaacgaccagaucgaggugacgaacgccaccgagcucgugcagagcuccagcaccgggcgcaucugcgacagcccccaccagauccuggacggcgagaacugcacccugaucgacgcccuccugggggacccccacugcgacggcuuccagaacaaggagugggaccuguucgucgagcggagcaaggcguacuccaacugcuaccccuacgacgugccggacuacgccagccuccgcucccugguggccagcuccggcacgcuggaguucaacaacgagagcuucaacuggaccggggucgcccagaacggcaccuccagcgcgugcaagcggcgcuccaucaacagcuucuucucccggcucaacuggcugcaccagcugaaguaccgcuaccccgcccucaacgugaccaugcccaacaacgacaaguucgacaagcuguacaucuggggcgugcaccaccccagcacggacuccgaccagaucagcgucuacgcccaggccagcgggcgggugaccguguccaccaagcgcagccagcagaccgucaucccgaacaucgggucccggcccugggugcgcggcaucagcucccggaucagcaucuacuggacgaucgugaagcccggcgacauccugcucaucaacuccaccgggaaccugaucgcgccccgcggcuacuucaagauccggagcgggaaguccagcaucaugcgcuccgacgccccgaucggcaagugcaacagcgagugcaucacccccaacggcuccauccccaacgacaagcccuuccagaacgucaaccggaucaccuacggggccugcccgcgcuacgugaagcagaacacgcugaagcucgccaccggcaugcggaacgugcccgagaagcagacccgcgggaucuucggcgccaucgccggguucaucgagaacggcugggagggcaugauggacgggugguacggcuuccggcaccagaacagcgaggggaccggccaggcggccgaccugaaguccacgcaggccgccaucaaccagaucaacgggaagcugaacaagcucaucgagaagaccaacgagaaguuccaccagaucgagaaggaguucagcgaggucgagggccgcauccaggaccuggagaaguacguggaggacaccaagaucgaccugugguccuacaacgccgagcuccugguggcgcuggagaaccagcacaccaucgaccucacggacagcgagaugaacaagcuguucgagcggacccgcaagcagcugcgcgagaacgccgaggacaugggcaacgggugcuucaagaucuaccacaagugcgacaacgccugcaucggcuccauccggaacgggaccuacgaccacgacgucuaccgcgacgaggcccucaacaaccgguuccagaucaagggcguggagcugaaguccggguacaaggacuggauccuguggaucagcuucgccaucuccugcuuccuccugugcgugguccugcucggcuucaucaugugggcgugccagaagggcaacauccgcugcaacaucugcaucuga

SEQ ID NO: 66399 - RNA, 1701 nt, Artificial Sequence
  derived and/or modified CDS sequence (opt1) from hemagglutinin__InfluenzaA__ACH69613
augaagaccaucaucgcccugagcuacauccucugccuggccuucgcgcagaagcugcccggcaacgacaacuccaccccgacgcucugccuggggcaccacgccgugcccaacggcacccuggucaagaccaucaccaacgaccagaucgaggugacgaacgccaccgagcucgugcagagcuccagcaccgggggcaucugcgacagcccccaccagaucaucgacggggagaacugcacccugaucgacgcccugcucggcgacccccacugcgacggcuuccagaacaaggagugggaccuguucgucgagcgcuccaaggccuacuccaacugcuacccguacgacgugcccgacuacgcgagccugcggucccucguggccagcuccgggacgcuggaguucaacaacgagagcuucaacuggaccggcgucgcccagaacgggaccuccagcgccugcaagcgccgguccaucaacagcuucuucucccgccugaacuggcuccaccagcugaaguaccgguaccccgcgcugaacgugaccaugcccaacaacgacaaguucgacaagcucuacaucuggggcgugcaccacccgagcacggacuccgaccagaucagcgucuacgcccaggccagcgggcgcgugaccguguccaccaagcggagccagcagaccgucauccccaacaucggcucccgccccugggugcggggcaucagcucccgcaucagcaucuacuggacgaucgugaagcccggggacauccugcugaucaacuccaccggcaacccgaucgcgccccggggguacuucaagauccgcagcggcaaguccagcaucaugcgguccgacgcccccaucggcaagugcaacagcgagugcaucacccccaacggguccaucccgaacgacaagcccuuccagaacgucaaccgcaucaccuacggcgccugcccccgguacgugaagcagaacacgcucaagcuggccaccgggaugcgcaacgugcccgagaagcagacccggggcaucuucggggccaucgccggcuucaucgagaacggcugggaggggaugauggacggcugguacgggcugcgccaccagaacagcgagggcaccgggcaggccgcggaccucaaguccacgcaggccgccaucaaccagaucaacggcaagcugaacaagcugaucgagaagaccaacgagaaguuccaccagaucgagaacgaguucagcgaggucgagggccggauccaggaccucgagaaguacguggaggacaccaagaucgaccugugguccuacaacgccgagcugcucguggcccuggagaaccagcacaccaucgaccugacggacagcgagaugaacaagcuguucgagcgcacccggaagcagcuccgcgagaacgcggaggacauggggaacggcugcuucaagaucuaccacaagugcgacaacgccugcaucggguccauccgcaacggcaccuacgaccacgacgucuaccgggacgaggcccugaacaaccgcuuccagaucaaggggguggagcucaagagcggcuacaaggacuggauccuguggaucagcuucgccaucuccugcuuccugcucugcgugguccugcugggcuucaucaugugggccugccagaaggggaacauccggugcaacaucugcaucuga

SEQ ID NO: 66400 - RNA, 1701 nt, Artificial Sequence; identical to SEQ ID NO: 64654
  derived and/or modified CDS sequence (opt1) from hemagglutinin__InfluenzaA__ACH82060

SEQ ID NO: 66401 - RNA, 1701 nt, Artificial Sequence; identical to SEQ ID NO: 66340
  derived and/or modified CDS sequence (opt1) from hemagglutinin__InfluenzaA__ACI06123

SEQ ID NO: 66402 - RNA, 1701 nt, Artificial Sequence; identical to SEQ ID NO: 66340
  derived and/or modified CDS sequence (opt1) from hemagglutinin__InfluenzaA__ACI06126

SEQ ID NO: 66403 - RNA, 1701 nt, Artificial Sequence; identical to SEQ ID NO: 66340
  derived and/or modified CDS sequence (opt1) from hemagglutinin__InfluenzaA__ACI06127

SEQ ID NO: 66404 - RNA, 1701 nt, Artificial Sequence; identical to SEQ ID NO: 66340
  derived and/or modified CDS sequence (opt1) from hemagglutinin__InfluenzaA__ACI06129

SEQ ID NO: 66405 - RNA, 1701 nt, Artificial Sequence; identical to SEQ ID NO: 66340
  derived and/or modified CDS sequence (opt1) from hemagglutinin__InfluenzaA__ACI06130

SEQ ID NO: 66406 - RNA, 1701 nt, Artificial Sequence; identical to SEQ ID NO: 66340
  derived and/or modified CDS sequence (opt1) from hemagglutinin__InfluenzaA__ACI06132

SEQ ID NO: 66407 - RNA, 1701 nt, Artificial Sequence; identical to SEQ ID NO: 66342
  derived and/or modified CDS sequence (opt1) from hemagglutinin__InfluenzaA__ACI06133

SEQ ID NO: 66408 - RNA, 1701 nt, Artificial Sequence; identical to SEQ ID NO: 66342
  derived and/or modified CDS sequence (opt1) from hemagglutinin__InfluenzaA__ACI06134

SEQ ID NO: 66409 - RNA, 1701 nt, Artificial Sequence; identical to SEQ ID NO: 66342
  derived and/or modified CDS sequence (opt1) from hemagglutinin__InfluenzaA__ACI06135

SEQ ID NO: 66410 - RNA, 1701 nt, Artificial Sequence; identical to SEQ ID NO: 66342
  derived and/or modified CDS sequence (opt1) from hemagglutinin__InfluenzaA__ACI06136

SEQ ID NO: 66411 - RNA, 1701 nt, Artificial Sequence; identical to SEQ ID NO: 66342
  derived and/or modified CDS sequence (opt1) from hemagglutinin__InfluenzaA__ACI06137

SEQ ID NO: 66412 - RNA, 1701 nt, Artificial Sequence; identical to SEQ ID NO: 66342
  derived and/or modified CDS sequence (opt1) from hemagglutinin__InfluenzaA__ACI06138

SEQ ID NO: 66413 - RNA, 1701 nt, Artificial Sequence; identical to SEQ ID NO: 66342
  derived and/or modified CDS sequence (opt1) from hemagglutinin__InfluenzaA__ACI06139

SEQ ID NO: 66414 - RNA, 1701 nt, Artificial Sequence; identical to SEQ ID NO: 66342
  derived and/or modified CDS sequence (opt1) from hemagglutinin__InfluenzaA__ACI06140

SEQ ID NO: 66415 - RNA, 1701 nt, Artificial Sequence; identical to SEQ ID NO: 66342
  derived and/or modified CDS sequence (opt1) from hemagglutinin__InfluenzaA__ACI06141

SEQ ID NO: 66416 - RNA, 1701 nt, Artificial Sequence; identical to SEQ ID NO: 66342
  derived and/or modified CDS sequence (opt1) from hemagglutinin__InfluenzaA__ACI06142

SEQ ID NO: 66417 - RNA, 1701 nt, Artificial Sequence; identical to SEQ ID NO: 66342
  derived and/or modified CDS sequence (opt1) from hemagglutinin__InfluenzaA__ACI06143

SEQ ID NO: 66418 - RNA, 1701 nt, Artificial Sequence
  derived and/or modified CDS sequence (opt1) from hemagglutinin__InfluenzaA__ACI06144
augaagaccaucaucgcccugagcuacaucuucugccucgcccugggccaggaccugcccgggaacgacaacuccaccgcgacgcucugccugggccaccacgccgugccgaacgggacccuggucaagaccaucaccgacgaccagaucgaggugacgaacgccaccgagcucgugcagagcuccagcaccggcaagaucugcaacaacccccaccgcauccuggacgggaucgacugcacccugaucgacgcccuccugggcgacccccacugcgacgucuuccagaacgagacgugggaccuguucguggagcgguccaaggccuucagcaacugcuaccccuacgacgugccggacuacgcgucccuccgcagccuggucgccuccagcggcacccuggaguucaucaccgagggguucaccuggacgggcgugacccagaacgggggcuccaacgccugcaagcgggggcccggcagcggcuucuucucccgccucaacuggcugaccaagagcggguccaccuaccccgugcugaacgucacgaugcccaacaacgacaacuucgacaagcucuacaucuggggcgugcaccacccgagcaccaaccaggagcagaccucccuguacgugcaggccagcgggcgggucaccguguccacgcgccggagccagcagaccaucauccccaacaucggcagccgccccugggugcggggccuguccagccgcaucuccaucuacuggaccaucgucaagcccggggacgugcucgugaucaacagcaacggcaaccugaucgcgccgcggggguacuucaagaugcgcaccggcaaguccagcaucaugcgguccgacgcccccaucgacacgugcaucagcgagugcaucacccccaacggguccauccccaacgacaagccguuccagaacgucaacaagaucaccuacggcgccugccccaaguacgugaagcagaacacccugaagcucgccacgggcaugcgcaacgugcccgagaagcagacccgggggcuguucggcgccaucgcgggguucaucgagaacggcugggaggggaugaucgacggcugguacggcuuccgccaccagaacagcgaggggaccggccaggccgccgaccugaaguccacccaggccgccaucgaccagaucaacgggaagcucaaccgggucaucgagaagacgaacgagaaguuccaccagaucgagaaggaguucagcgagguggagggccgcauccaggaccuggagaaguacguggaggacaccaagaucgaccugugguccuacaacgcggagcuccuggucgcccuggagaaccagcacaccaucgaccucaccgacagcgagaugaaccggcuguucgagaagacgcgccggcagcugcgcgagaacgccgaggacauggggaacggcugcuucaagaucuaccacaagugcgacaacgccugcaucgaguccauccgcaacggcaccuacgaccacgacguguaccgggacgaggcccucaacaaccgcuuccagaucaagggggucgagcucaagagcggcuacaaggacuggauccuguggaucuccuucgcgaucagcugcuuccugcugugcguggugcugcucggguucaucaugugggccugccagcggggcaacauccgcugcaacaucugcaucuga

SEQ ID NO: 66419 - RNA, 1701 nt, Artificial Sequence; identical to SEQ ID NO: 66342
  derived and/or modified CDS sequence (opt1) from hemagglutinin__InfluenzaA__ACI06145

SEQ ID NO: 66420 - RNA, 1701 nt, Artificial Sequence
  derived and/or modified CDS sequence (opt1) from hemagglutinin__InfluenzaA__ACI06146
augaagaccaucaucgcccugagcuacaucuucugccucgcccugggccaggaccugcccgggaacgacaacuccaccgcgacgcucugccugggccaccacgccgugccgaacgggacccuggucaagaccaucaccgacgaccagaucgaggugacgaacgccaccgagcucgugcagagcuccagcaccggcaagaucugcaacaacccccaccgcauccuggacgggaucgacugcacccugaucgacgcccuccugggcgacccccacugcgacgucuuccagaacgagacgugggaccuguucguggagcgguccaaggccuucagcaacugcuaccccuacgacgugccggacuacgcgucccuccgcagccuggucgccuccagcggcacccuggaguucaucaccgagggguucaccuggacgggcgugacccagaacgggggcuccaacgccugcaagcgggggcccggcagcggcuucuucucccgccucaacuggcugaccaagagcggguccaccuaccccgugcugaacgucacgaugcccaacaacgacaacuucgacaagcucuacaucuggggcgugcaccacccgagcaccaaccaggagcagaccucccuguacgugcaggccagcgggcgggucaccguguccacgcgccggagccagcagaccaucauccccaacaucggcagcucccccugggugcgcggccugagcucccggaucagcaucuacuggaccaucgucaagcccggggacgugcucgugaucaacuccaacggcaaccugaucgcgccgcgcggguacuucaagaugcggaccggcaagagcuccaucaugcgcagcgacgcccccaucgacacgugcaucuccgagugcaucacccccaacgggagcauccccaacgacaagccguuccagaacgucaacaagaucaccuacggcgccugccccaaguacgugaagcagaacacccugaagcucgccacgggcaugcggaacgugcccgagaagcagacccgcgggcuguucggcgccaucgcgggguucaucgagaacggcugggaggggaugaucgacggcugguacggcuuccggcaccagaacuacgaggggaccggccaggccgccgaccugaaguccacccaggccgccaucgaccagaucaacgggaagcucaaccgcgucaucgagaagacgaacgagaaguuccaccagaucgagaaggaguucagcgagguggagggccggauccaggaccuggagaaguacguggaggacaccaagaucgaccugugguccuacaacgcggagcuccuggucgcccuggagaaccagcacaccaucgaccucaccgacagcgagaugaacaagcuguucgagaagacgcgccggcagcugcgcgagaacgccgaggacauggggaacggcugcuucaagaucuaccacaagugcgacaacgccugcaucgaguccauccggaacggcaccuacgaccacgacguguaccgcgacgaggcccucaacaaccgcuuccagaucaagggggucgagcucaagagcggcuacaaggacuggauccuguggaucuccuucgcgaucagcugcuuccugcugugcguggugcugcucggguucaucaugugggccugccagcggggcaacauccgcugcaacaucugcaucuga

SEQ ID NO: 66421 - RNA, 1701 nt, Artificial Sequence; identical to SEQ ID NO: 66342
  derived and/or modified CDS sequence (opt1) from hemagglutinin__InfluenzaA__ACI06147

SEQ ID NO: 66422 - RNA, 1701 nt, Artificial Sequence; identical to SEQ ID NO: 66342
  derived and/or modified CDS sequence (opt1) from hemagglutinin__InfluenzaA__ACI06148

SEQ ID NO: 66423 - RNA, 1701 nt, Artificial Sequence
  derived and/or modified CDS sequence (opt1) from hemagglutinin__InfluenzaA__ACI06149
augaagaccaucaucgcccugagcuacaucuucugccucgcccugggccaggaccugcccgggaacgacaacuccaccgcgacgcucugccugggccaccacgccgugccgaacgggacccuggucaagaccaucaccgacgaccagaucgaggugacgaacgccaccgagcucgugcagagcuccagcaccggcaagaucugcaacaacccccaccgcauccuggacgggaucgacugcacccugaucgacgcccuccugggcgacccccacugcgacgucuuccagaacgagacgugggaccuguucguggagcgguccaaggccuucagcaacugcuaccccuacgacgugccggacuacgcgucccuccgcagccuggucgccuccagcggcacccuggaguucaucaccgagggguucaccuggacgggcgugacccagaacgggggcuccaacgccugcaagcgggggcccggcagcggcuucuucucccgccucaacuggcugaccaagagcggguccaccuaccccgugcugaacgucacgaugcccaacaacgacaacuucgacaagcucuacaucuggggcgugcaccacccgagcaccaaccaggagcagaccucccuguacgugcaggccagcgggcgggucaccguguccacgcgccggagccgccagaccaucauccccaacaucggcagccggcccugggugcgcggccuguccagccggaucuccaucuacuggaccaucgucaagcccggggacgugcucgugaucaacagcaacggcaaccugaucgcgccgcgcggguacuucaagaugcggaccggcaaguccagcaucaugcgcuccgacgcccccaucgacacgugcaucagcgagugcaucacccccaacggguccauccccaacgacaagccguuccagaacgucaacaagaucaccuacggcgccugccccaaguacgugaagcagaacacccugaagcucgccacgggcaugcggaacgugcccgagaagcagacccgcgggcuguucggcgccaucgcgggguucaucgagaacggcugggaggggaugaucgacggcugguacggcuuccggcaccagaacagcgaggggaccggccaggccgccgaccugaaguccacccaggccgccaucgaccagaucaacgggaagcucaaccgcgucaucgagaagacgaacgagaaguuccaccagaucgagaaggaguucagcgagguggagggccggauccaggaccuggagaaguacguggaggacaccaagaucgaccugugguccuacaacgcggagcuccuggucgcccuggagaaccagcacaccaucgaccucaccgacagcgagaugaacaagcuguucgagaagacgcgccggcagcugcgcgagaacgccgaggacauggggaacggcugcuucaagaucuaccacaagugcgacaacgccugcaucgaguccauccgcaacggcaccuacgaccacgacguguaccgggacgaggcccucaacaaccgcuuccagaucaagggggucgagcucaagagcggcuacaaggacuggauccuguggaucuccuucgcgaucagcugcuuccugcugugcguggugcugcucggguucaucaugugggccugccagcggggcaacauccgcugcaacaucugcaucuga

SEQ ID NO: 66424 - RNA, 1701 nt, Artificial Sequence; identical to SEQ ID NO: 66353
  derived and/or modified CDS sequence (opt1) from hemagglutinin__InfluenzaA__ACI06151

SEQ ID NO: 66425 - RNA, 1701 nt, Artificial Sequence; identical to SEQ ID NO: 66353
  derived and/or modified CDS sequence (opt1) from hemagglutinin__InfluenzaA__ACI06152

SEQ ID NO: 66426 - RNA, 1701 nt, Artificial Sequence
  derived and/or modified CDS sequence (opt1) from hemagglutinin__InfluenzaA__ACI06153
augaagaccaucaucgcccugagcuacaucuucugccucgcccugggccaggaccugcccgggaacgacaacuccaccgcgacgcucugccugggccaccacgccgugccgaacgggacccuggucaagaccaucaccgacgaccagaucgaggugacgaacgccaccgagcucgugcagagcuccagcaccggcaagaucugcaacaacccccaccgcauccuggacgggaucgacugcacccugaucgacgcccuccugggcgacccccacugcgacgucuuccagaacgagacgugggaccuguucguggagcgguccaaggccuucagcaacugcuaccccuacgacgugccggacuacgcgucccuccgcagccuggucgccuccagcggcacccuggaguucaucaccgagggguucaccuggacgggcgugacccagaacgggggcuccaacgccugcaagcgggggcccggcagcggcuucuucucccgccucaacuggcugaccaagagcggguccaccuaccccgugcugaacgucacgaugcccaacaacgacaacuucgacaagcucuacaucuggggcgugcaccacccgagcaccaaccaggagcagaccucccuguacgugcaggccagcgggcgggucaccguguccacgcgccggagccagcagaccaucauccccaacaucggcagccgccccugggugcggggccuguccagccgcaucuccaucuacuggaccaucgucaagcccggggacgagcucgugaucaacagcaacggcaaccugaucgcgccgcggggguacuucaagaugcgcaccggcaaguccagcaucaugcgguccgacgcccccaucgacacgugcaucagcgagugcaucacccccaacggguccauccccaacgacaagccguuccagaacgugaacaagaucaccuacggcgccugccccaaguacgucaagcagaacacccugaagcucgccacgggcaugcgcaacgugcccgagaagcagacccgggggcuguucggcgccaucgcgggguucaucgagaacggcugggaggggaugaucgacggcugguacggcuuccgccaccagaacagcgaggggaccggccaggccgccgaccugaaguccacccaggccgccaucgaccagaucaacgggaagcucaaccgggugaucgagaagacgaacgagaaguuccaccagaucgagaaggaguucagcgaggucgagggccgcauccaggaccuggagaaguacguggaggacaccaagaucgaccugugguccuacaacgcggagcuccugguggcccuggagaaccagcacaccaucgaccucaccgacagcgagaugaacaagcuguucgagaagacgcggcgccagcugcgggagaacgccgaggacauggggaacggcugcuucaagaucuaccacaagugcgacaacgccugcaucgaguccauccgcaacggcaccuacgaccacgacgucuaccgcgacgaggcccucaacaaccgguuccagaucaaggggguggagcucaagagcggcuacaaggacuggauccuguggaucuccuucgcgaucagcugcuuccugcugugcgucgugcugcucggguucaucaugugggccugccagcgcggcaacauccggugcaacaucugcaucuga

SEQ ID NO: 66427 - RNA, 1701 nt, Artificial Sequence
  derived and/or modified CDS sequence (opt1) from hemagglutinin__InfluenzaA__ACI06155
augaagaccaucaucgcccugagcuacaucuucugccucgcccugggccaggaccugcccgggaacgacaacuccaccgcgacgcucugccugggccaccacgccgugccgaacgggacccuggucaagaccaucaccgacgaccagaucgaggugacgaacgccaccgagcucgugcagagcuccagcaccggcaagaucugcaacaacccccaccgcauccuggacgggaucgacugcacccugaucgacgcccuccugggcgacccccacugcgacgucuuccagaacgagacgugggaccuguucguggagcgguccaaggccuucagcaacugcuaccccuacgacgugccggacuacgcgucccuccgcagccuggucgccuccagcggcacccuggaguucaucaccgagggguucaccuggacgggcgugacccagaacgggggcuccaacgccugcaagcgggggcccggcagcggcuucuucucccgccucaacuggcugaccaagagcggguccaccuaccccgugcugaacgucacgaugcccaacaacgacaacuucgacaagcucuacaucuggggcgugcaccacccgagcaccaaccaggagcagaccucccuguacgugcaggccagcgggcgggucaccguguccacgcgccggagccagcagaccaucauccccaacaucgagagccgccccugggugcggggccuguccagccgcaucuccaucuacuggaccaucgucaagcccggcgacgugcucgugaucaacagcaacgggaaccugaucgcgccgcggggcuacuucaagaugcgcaccgggaaguccagcaucguccgguccgacgcccccaucgacacgugcaucagcgagugcaucacccccaacggcuccauccccaacgacaagccguuccagaacgugaacaagaucaccuacggggccugccccaaguacgugaagcagaacacccugaagcucgccacgggcaugcgcaacguccccgagaagcagacccggggccuguucggggccaucgcgggcuucaucgagaacgggugggagggcaugaucgacgggugguacggcuuccgccaccagaacagcgagggcaccgggcaggccgccgaccugaaguccacccaggccgccaucgaccagaucaacggcaagcucaaccgggugaucgagaagacgaacgagaaguuccaccagaucgagaaggaguucagcgagguggaggggcgcauccaggaccuggagaaguacgucgaggacaccaagaucgaccugugguccuacaacgcggagcuccugguggcccuggagaaccagcacaccaucgaccucaccgacagcgagaugaacaagcuguucgagaagacgcggcgccagcugcgggagaacgccgaggacaugggcaacgggugcuucaagaucuaccacaagugcgacaacgccugcaucgaguccauccgcaacggcaccuacgaccacgacgucuaccgcgacgaggcccucaacaaccgguuccagaucaagggcguggagcucaagagcggguacaaggacuggauccuguggaucuccuucgcgaucagcugcuuccugcugugcgugguccugcucggcuucaucaugugggccugccagcgcgggaacauccggugcaacaucugcaucuga

SEQ ID NO: 66428 - RNA, 1701 nt, Artificial Sequence; identical to SEQ ID NO: 66353
  derived and/or modified CDS sequence (opt1) from hemagglutinin__InfluenzaA__ACI06156

SEQ ID NO: 66429 - RNA, 1701 nt, Artificial Sequence; identical to SEQ ID NO: 66353
  derived and/or modified CDS sequence (opt1) from hemagglutinin__InfluenzaA__ACI06157

SEQ ID NO: 66430 - RNA, 1701 nt, Artificial Sequence; identical to SEQ ID NO: 66353
  derived and/or modified CDS sequence (opt1) from hemagglutinin__InfluenzaA__ACI06158

SEQ ID NO: 66431 - RNA, 1701 nt, Artificial Sequence; identical to SEQ ID NO: 66353
  derived and/or modified CDS sequence (opt1) from hemagglutinin__InfluenzaA__ACI06159

SEQ ID NO: 66432 - RNA, 1701 nt, Artificial Sequence; identical to SEQ ID NO: 66342
  derived and/or modified CDS sequence (opt1) from hemagglutinin__InfluenzaA__ACI06160

SEQ ID NO: 66433 - RNA, 1701 nt, Artificial Sequence
  derived and/or modified CDS sequence (opt1) from hemagglutinin__InfluenzaA__ACI06161
augaagaccaucaucgcccugagcuacaucuucugccucgcccugggccaggaccugcccgggaacgacaacuccaccgcgacgcucugccugggccaccacgccgugccgaacgggacccuggucaagaccaucaccgacgaccagaucgaggugacgaacgccaccgagcucgugcagagcuccagcaccggcaagaucugcaacaacccccaccgcauccuggacgggaucgacugcacccugaucgacgcccuccugggcgacccccacugcgacgucuuccagaacgagacgugggaccuguucguggagcgguccaaggccuucagcaacugcuaccccuacgacgugccggacuacgcgucccuccgcagccuggucgccuccagcggcacccuggaguucaucaccgagggguucaccuggacgggcgugacccagaacgggggcuccaacgccugcaagcgggggcccggcagcggcuucuucucccgccucaacuggcugaccaagagcggguccaccuaccccgugcugaacgucacgaugcccaacaacgacaacuucgacaagcucuacaucuggggcgugcaccacccgagcaccaaccaggagcagaccucccuguacgugcaggccagcgggcgggucaccguguccacgcgccggagccagcagaccaucauccccaacaucgagagccgccccugggugcggggccuguccagccgcaucuccaucuacuggaccaucgucaagcccggcgacgugcucgugaucaacagcaacgggaaccugaucgcgccgcggggcuacuucaagaugcgcaccgggaaguccagcaucaugcgguccgacgcccccaucgacacgugcaucagcgagugcaucacccccaacggcuccauccccaacgacaagccguuccagaacgucaacaagaucaccuacggggccugccccaaguacgugaagcagaacacccugaagcucgccacgggcaugcgcaacgugcccgagaagcagacccggggccuguucggggccaucgcgggcuucaucgagaacgggugggagggcaugaucgacgggugguacggcuuccgccaccagaacagcgagggcaccgggcaggccgccgaccugaaguccacccaggccgccaucgaccagaucaacggcaagcucaaccgggucaucgagaagacgaacgagaaguuccaccagaucgagaaggaguucagcgagguggaggggcgcauccaggaccuggagaaguacguggaggacaccaagaucgaccugugguccuacaacgcggagcuccuggucgcccuggagaaccagcacaccaucgaccucaccgacagcgagaugaacaagcuguucgagaagacgcggcgccagcugcgggagaacgccgaggacaugggcaacgggugcuucaagaucuaccacaagugcgacaacgccugcaucgaguccauccgcaagggcaccuacgaccacgacguguaccgcgacgaggcccucaacaaccgguuccagaucaagggcgucgagcucaagagcggguacaaggacuggauccuguggaucuccuucgcgaucagcugcuuccugcugugcguggugcugcucggcuucaucaugugggccugccagcgcgggaacauccggugcaacaucugcaucuga

SEQ ID NO: 66434 - RNA, 1701 nt, Artificial Sequence
  derived and/or modified CDS sequence (opt1) from hemagglutinin__InfluenzaA__ACI06162
augaagaccaucaucgcccugagcuacaucuucugccucgcccugggccaggaccugcccgggaacgacaacuccaccgcgacgcucugccugggccaccacgccgugccgaacgggacccuggucaagaccaucaccgacgaccagaucgaggugacgaacgccaccgagcucgugcagagcuccagcaccggcaagaucugcaacaacccccaccgcauccuggacgggaucgacugcacccugaucgacgcccuccugggcgacccccacugcgacgucuuccagaacgagacgugggaccuguucguggagcgguccaaggccuucagcaacugcuaccccuacgacgugccggacuacgcgucccuccgcagccuggucgccuccagcggcacccuggaguucaucaccgagggguucaccuggacgggcgugacccagaacgggggcuccaacgccugcaagcgggggcccggcagcggcuucuucucccgccucaacuggcugaccaagagcggguccaccuaccccgugcugaacgucacgaugcccaacaacgacaacuucgacaagcucuacaucuggggcgugcaccacccgagcaccaaccaggagcagaccucccuguacgugcaggccagcgggcgggucaccguguccacgcgccggagccagcagaccaucauccccaacaucgagagccgccccugggugcggggccuguccagccgcaucuccaucuacuggaccaucgucaaccccggcgacgugcucgugaucaacagcaacgggaaccugaucgcgccgcggggcuacuucaagaugcgcaccgggaaguccagcaucaugcgguccgacgcccccaucgacacgugcaucagcgagugcaucacccccaacggcuccauccccaacgacaagccguuccagaacgucaacaagaucaccuacggggccugccccaaguacgugaagcagaacacccugaagcucgccacgggcaugcgcaacgugcccgagaagcagacccggggccuguucggggccaucgcgggcuucaucgagaacgggugggagggcaugaucgacgggugguacggcuuccgccaccagaacagcgagggcaccgggcaggccgccgaccugaaguccacccaggccgccaucgaccagaucaacggcaagcucaaccgggucaucgagaagacgaacgagaaguuccaccagaucgagaaggaguucagcgagguggaggggcgcauccaggaccuggagaaguacguggaggacaccaagaucgaccugugguccuacaacgcggagcuccuggucgcccuggagaaccagcacaccaucgaccucaccgacagcgagaugaacaagcuguucgagaagacgcggcgccagcugcgggagaacgccgaggacaugggcaacgggugcuucaagaucuaccacaagugcgacaacgccugcaucgaguccauccgcaacggcaccuacgaccacgacguguaccgcgacgaggcccucaacaaccgguuccagaucaagggcgucgagcucaagagcggguacaaggacuggauccuguggaucuccuucgcgaucagcugcuuccugcugugcguggugcugcucggcuucaucaugugggccugccagcgcgggaacauccggugcaacaucugcaucuga

SEQ ID NO: 66435 - RNA, 1701 nt, Artificial Sequence
  derived and/or modified CDS sequence (opt1) from hemagglutinin__InfluenzaA__ACI06163
augaagaccaucaucgcccugagcuacaucuucugccucgcccugggccaggaccugcccgggaacgacaacuccaccgcgacgcucugccugggccaccacgccgugccgaacgggacccuggucaagaccaucaccgacgaccagaucgaggugacgaacgccaccgagcucgugcagagcuccagcaccggcaagaucugcaacaacccccaccgcauccuggacgggaucgacugcacccugaucgacgcccuccugggcgacccccacugcgacgucuuccagaacgagacgugggaccuguucguggagcgguccaaggccuucagcaacugcuaccccuacgacgugccggacuacgcgucccuccgcagccuggucgccuccagcggcacccuggaguucaucaccgagggguucaccuggacgggcgugacccagaacgggggcuccaacgccugcaagcgggggcccggcagcggcuucuucucccgccucaacuggcugaccaagagcggguccaccuaccccgugcugaacgucacgaugcccaacaacgacaacuucgacaagcucuacaucuggggcgugcaccacccgagcaccaaccaggagcagaccucccuguacgugcaggccagcgggcgggucaccguguccacgcgccggagccagcagaccaucauccccaacaucggcagccgccccugggugcggggccuguccagccgcaucuccaucuacuggaccaucgucaagcccggggacgugcucgugaucaacagcaacggcaaccugaucgcgccgcggggguacuucaagaugcgcaccggcaaguccagcaucaugcgguccgacgcccccaucgacacgugcaucagcgagugcaucacccccaacggguccauccccaacgacaagccguuccagaacgucaacaagaucaccuacggcgccugccccaaguacgugaagcagaacacccugaagcucgccacgggcaugcgcaacgugcccgagaagcagacccgggggcuguucggcgccaucgcgggguucaucgagaacggcugggaggggaugaucgacggcugguacggcuuccgccaccagaacagcgaggggaccggccaggccgccgaccugaaguccacccaggccgccaucgaccagaucaacgggaagcucaaccgggucaucgagaagacgaacgagaaguuccaccagaucgagaaggaguucagcgagguggagggccgcauccaggaccuggagaaguacguggaggacaccaagaucgaccugugguccuacaacgcggagcuccuggucgcccuggagaaccagcacaccaucgaccucaccgacagcgagaugaacaagcuguucgagaagacgcggcgccagcugcgggagaacgccgaggacauggggaacggcugcuucaagaucuaccacaagugcgacaacgccugcaucgaguccauccgcaagggcaccuacgaccacgacguguaccgcgacgaggcccucaacaaccgguuccagaucaagggggucgagcucaagagcggcuacaaggacuggauccuguggaucuccuucgcgaucagcugcuuccugcugugcguggugcugcucggguucaucaugugggccugccagcgcggcaacauccggugcaacaucugcaucuga

SEQ ID NO: 66436 - RNA, 1701 nt, Artificial Sequence
  derived and/or modified CDS sequence (opt1) from hemagglutinin__InfluenzaA__ACI06164
augaagaccaucaucgcccugagcuacaucuucugccucgcccugggccaggaccugcccgggaacgacaacuccaccgcgacgcucugccugggccaccacgccgugccgaacgggacccuggucaagaccaucaccgacgaccagaucgaggugacgaacgccaccgagcucgugcagagcuccagcaccggcaagaucugcaacaacccccaccgcauccuggacgggaucgacugcacccugaucgacgcccuccugggcgacccccacugcgacgucuuccagaacgagacgugggaccuguucguggagcgguccaaggccuucagcaacugcuaccccuacgacgugccggacuacgcgucccuccgcagccuggucgccuccagcggcacccuggaguucaucaccgagggguucaccuggacgggcgugacccagaacgggggcuccaacgccugcaagcgggggcccggcagcggcuucuucucccgccucaacuggcugaccaagagcggguccaccuaccccgugcugaacgucacgaugcccaacaacgacaacuucgacaagcucuacaucuggggcgugcaccacccgagcaccaaccaggagcagaccucccuguacgugcaggccagcgggcgggucaccguguccacgcgccggagccagcagaccaucauccccaacaucggcagccgccccugggugcggggccuguccagccgcaucaacaucuacuggaccaucgucaagcccggggacgugcucgugaucaacuccaacggcaaccugaucgcgccgcggggguacuucaagaugcgcaacggcaagagcuccaucaugcggagcgacgcccccaucgacacgugcaucuccgagugcaucacccccaacgggagcauccccaacgacaagccguuccagaacgucaacaagaucaccuacggcgccugccccaaguacgugaagcagaacacccugaagcucgccaccggcaugcgcaacgugcccgagaagcagacgcgggggcuguucggcgccaucgcgggguucaucgagaacggcugggaggggaugaucgacggcugguacggcuuccgccaccagaacuccgaggggaccggccaggccgccgaccucaagagcacccaggccgccaucgaccagaucaacgggaagcugaaccgggucaucgagaagaccaacgagaaguuccaccagaucgagaaggaguucuccgagguggagggccgcauccaggaccuggagaaguacguggaggacacgaagaucgaccuguggagcuacaacgcggagcuccuggucgcccuggagaaccagcacaccaucgaccucaccgacuccgagaugaacaagcuguucgagaagacccggcgccagcugcgggagaacgccgaggacauggggaacggcugcuucaagaucuaccacaagugcgacaacgccugcaucgagagcauccgcaacggcacguacgaccacgacguguaccgcgacgaggcccucaacaaccgguuccagaucaagggggucgagcugaaguccggcuacaaggacuggauccuguggaucagcuucgcgaucuccugcuuccuccugugcguggugcugcucggguucaucaugugggccugccagcgcggcaacauccggugcaacaucugcaucuga

SEQ ID NO: 66437 - RNA, 1701 nt, Artificial Sequence
  derived and/or modified CDS sequence (opt1) from hemagglutinin__InfluenzaA__ACI06165
augaagaccaucaucgcccugagcuacaucuucugccucgcccugggccaggaccugcccgggaacgacaacuccaccgcgacgcucugccugggccaccacgccgugccgaacgggacccuggucaagaccaucaccgacgaccagaucgaggugacgaacgccaccgagcucgugcagagcuccagcaccggcaagaucugcaacaacccccaccgcauccuggacgggaucgacugcacccugaucgacgcccuccugggcgacccccacugcgacgucuuccagaacgagacgugggaccuguucguggagcgguccaaggccuucagcaacugcuaccccuacgacgugccggacuacgcgucccuccgcagccuggucgccuccagcggcacccuggaguucaucaccgagggguucaccuggacgggcgugacccagaacgggggcuccaacgccugcaagcgggggcccggcagcggcuucuucucccgccucaacuggcugaccaagagcggguccaccuaccccgugcugaacgucacgaugcccaacaacgacaacuucgacaagcucuacaucuggggcgugcaccacccgagcaccaaccaggagcagaccucccuguacgugcaggccagcgggcgggucaccguguccacgcgccggagccagcagaccaucauccccaacaucggcagccgccccugggugcggggccuguccagccgcaucuccaucuacuggaccaucgucaagcccggggacgugcucgugaucaacagcaacggcaaccugaucgcgccgcggggguacuucaagaugcgcaacggcaaguccagcaucaugcgguccgacgcccccaucgacacgugcaucagcgagugcaucacccccaacggguccauccccaacgacaagccguuccagaacgucaacaagaucaccuacggcgccugccccaaguacgugaagcagaacacccugaagcucgccaccggcaugcgcaacgugcccgagaagcagacgcgggggcuguucggcgccaucgcgggguucaucgagaacggcugggaggggaugaucgacggcugguacggcuuccgccaccagaacagcgaggggaccggccaggccgccgaccugaaguccacccaggccgccaucgaccagaucaacgggaagcucaaccgggucaucgagaagaccaacgagaaguuccaccagaucgagaaggaguucagcgagguggagggccgcauccaggaccuggagaaguacguggaggacacgaagaucgaccugugguccuacaacgcggagcuccuggucgcccuggagaaccagcacaccaucgaccucaccgacagcgagaugaacaagcuguucgagaagacccggcgccagcugcgggagaacgccgaggacauggggaacggcugcuucaagaucuaccacaagugcgacaacgccugcaucgaguccauccgcaacggcacguacgaccacgacguguaccgcgacgaggcccucaacaaccgguuccagaucaagggggucgagcucaagagcggcuacaaggacuggauccuguggaucuccuucgcgaucagcugcuuccugcugugcguggugcugcucggguucaucaugugggccugccagcgcggcaacauccggugcaacaucugcaucuga

SEQ ID NO: 66438 - RNA, 1701 nt, Artificial Sequence
  derived and/or modified CDS sequence (opt1) from hemagglutinin__InfluenzaA__ACI06166
augaagaccaucaucgcccugagcuacaucuucugccucgcccugggccaggaccugcccgggaacgacaacuccaccgcgacgcucugccugggccaccacgccgugccgaacgggacccuggucaagaccaucaccgacgaccagaucgaggugacgaacgccaccgagcucgugcagagcuccagcaccggcaagaucugcaacaacccccaccgcauccuggacgggaucgacugcacccugaucgacgcccuccugggcgacccccacugcgacgucuuccagaacgagacgugggaccuguucguggagcgguccaaggccuucagcaacugcuaccccuacgacgugccggacuacgcgucccuccgcagccuggucgccuccagcggcacccuggaguucaucaccgagggguucaccuggacgggcgugacccagaacgggggcuccaacgccugcaagcgggggcccggcagcggcuucuucucccgccucaacuggcugaccaagagcggguccaccuaccccgugcugaacgucacgaugcccaacaacgacaacuucgacaagcucuacaucuggggcgugcaccacccgagcaccaaccaggagcagaccucccuguacgugcaggccagcgggcgggucaccguguccacgcgccggagccagcagaccaucauccccaacaucggcagccgccccuggauccggggccuguccagccgcaucaacaucuacuggaccaucgugaagcccggggacguccucgugaucaacuccaacggcaaccugaucgcgccgcggggguacuucaagaugcgcaacggcaagagcuccaucaugcggagcgacgcccccaucgacacgugcaucuccgagugcaucacccccaacgggagcauccccaacgacaagccguuccagaacgugaacaagaucaccuacggcgccugccccaaguacgucaagcagaacacccugaagcucgccaccggcaugcgcaacgugcccgagaagcagacgcgggggcuguucggcgccaucgcgggguucaucgagaacggcugggaggggaugaucgacggcugguacggcuuccgccaccagaacuccgaggggaccggccaggccgccgaccucaagagcacccaggccgccaucgaccagaucaacgggaagcugaaccgggugaucgagaagaccaacgagaaguuccaccagaucgagaaggaguucuccgaggucgagggccgcauccaggaccuggagaaguacguggaggacacgaagaucgaccuguggagcuacaacgcggagcuccugguggcccuggagaaccagcacaccaucgaccucaccgacuccgagaugaacaagcuguucgagaagacccggcgccagcugcgggagaacgccgaggacauggggaacggcugcuucaagaucuaccacaagugcgacaacgccugcaucgagagcauccgcaacggcacguacgaccacgacgucuaccgcgacgaggcccucaacaaccgguuccagaucaaggggguggagcugaaguccggcuacaaggacuggauccuguggaucagcuucgcgaucuccugcuuccuccugugcgucgugcugcucggguucaucaugugggccugccagcgcggcaacauccggugcaacaucugcaucuga

SEQ ID NO: 66439 - RNA, 1701 nt, Artificial Sequence; identical to SEQ ID NO: 66423
  derived and/or modified CDS sequence (opt1) from hemagglutinin__InfluenzaA__ACI06167

SEQ ID NO: 66440 - RNA, 1701 nt, Artificial Sequence
  derived and/or modified CDS sequence (opt1) from hemagglutinin__InfluenzaA__ACI06168
augaagaccaucaucgcccugagcuacaucuucugccucgcccugggccaggaccugcccgggaacgacaacuccaccgcgacgcucugccugggccaccacgccgugccgaacgggacccuggucaagaccaucaccgacgaccagaucgaggugacgaacgccaccgagcucgugcagagcuccagcaccggcaagaucugcaacaacccccaccgcauccuggacgggaucgacugcacccugaucgacgcccuccugggcgacccccacugcgacgucuuccagaacgagacgugggaccuguucguggagcgguccaaggccuucagcaacugcuaccccuacgacgugccggacuacgcgucccuccgcagccuggucgccuccagcggcacccuggaguucaucaccgagggguucaccuggacgggcgugacccagaacgggggcuccaacgccugcaagcgggggcccggcagcggcuucuucucccgccucaacuggcugaccaagagcggguccaccuaccccgugcugaacgucacgaugcccaacaacgacaacuucgacaagcucuacaucuggggcgugcaccacccgagcaccaaccaggagcagaccucccuguacgugcaggccagcgggcgggucaccguguccacgcgccggagccagcagaccaucauccccaacaucggcagccgccccugggugcggggccuguccagccgcaucuccaucuacuggaccaucgucaagcccggggacgugcucgugaucaacagcaacggcaaccugaucgcgccgcggggguacuucaagaugcgcaccggcaaguccagcaucaugcgguccgacgcccccaucgacacgugcaucagcgagugcaucacccccaacggguccauccccaacgacaagccguuccagaacgucaacaagaucaccuacggcgccugccccaaguacgugaagcagaacacccugaagcucgccacgggcaugcgcaacgugcccgagaagcagacccgggggcuguucggcgccaucgcgggguucaucgagaacggcugggaggggaugaucgacggcugguacggcuuccgccaccagaacagcgaggggaccggccaggccgccgaccugaaguccacccaggccgccaucgaccagaucaacgggaagcucaaccgggucaucgagaagacgaacgagaaguuccaccagaucgagaaggaguucagcgagguggagggccgcauccaggaccuggagaaguacguggaggacaccaagaucgaccugugguccuacaacgcggagcuccuggucgcccuggagaaccagcacaccaucgaccucaccgacagcgagaugaacaagcuguucgagaagacgcggaagcagcugcgcgagaacgccgaggacauggggaacggcugcuucaagaucuaccacaagugcgacaacgccugcaucgaguccauccggaacggcaccuacgaccacgacguguaccgcgacgaggcccucaacaaccgcuuccagaucaagggggucgagcucaagagcggcuacaaggacuggauccuguggaucuccuucgcgaucagcugcuuccugcugugcguggugcugcucggguucaucaugugggccugccagcggggcaacauccgcugcaacaucugcaucuga

SEQ ID NO: 66441 - RNA, 1701 nt, Artificial Sequence; identical to SEQ ID NO: 66342
  derived and/or modified CDS sequence (opt1) from hemagglutinin__InfluenzaA__ACI06169

SEQ ID NO: 66442 - RNA, 1701 nt, Artificial Sequence; identical to SEQ ID NO: 66359
  derived and/or modified CDS sequence (opt1) from hemagglutinin__InfluenzaA__ACI06171

SEQ ID NO: 66443 - RNA, 1701 nt, Artificial Sequence; identical to SEQ ID NO: 66359
  derived and/or modified CDS sequence (opt1) from hemagglutinin__InfluenzaA__ACI06172

SEQ ID NO: 66444 - RNA, 1701 nt, Artificial Sequence
  derived and/or modified CDS sequence (opt1) from hemagglutinin__InfluenzaA__ACI06173
augaagaccaucaucgcccugagcuacaucuucugccucgcccugggccaggaccugcccgggaacgacaacuccaccgcgacgcucugccugggccaccacgccgugccgaacgggacccuggucaagaccaucaccgacgaccagaucgaggugacgaacgccaccgagcucgugcagagcuccagcaccggcaagaucugcaacaacccccaccgcauccuggacgggaucgacugcacccugaucgacgcccuccugggcgacccccacugcgacgucuuccagaacgagacgugggaccuguucguggagcgguccaaggccuucagcaacugcuaccccuacgacgugccggacuacgcgucccuccgcagccuggucgccuccagcggcacccuggaguucaucaccgagggguucaccuggacgggcgugacccagaacgggggcuccaacgccugcaagcgggggcccggcagcggcuucuucucccgccucaacuggcugaccaagagcggguccaccuaccccgugcugaacgucacgaugcccaacaacgacaacuucgacaagcucuacaucuggggcgugcaccacccgagcaccaaccaggagcagaccucccuguacgugcaggccagcgggcgggucaccguguccacgcgccggagccagcagaccaucauccccaacaucggcagccgccccugggugcggggccuguccagccgcaucuccaucuacuggaccaucgucaagcccggggacgugcucgagaucaacagcaacggcaaccugaucgcgccgcggggguacuucaagaugcgcaccggcaaguccagcaucaugcgguccgacgcccccaucgacacgugcaucagcgagugcaucacccccaacggguccauccccaacgacaagccguuccagaacgugaacaagaucaccuacggcgccugccccaaguacgucaagcagaacacccugaagcucgccacgggcaugcgcaacgugcccgagaagcagacccgggggcuguucggcgccaucgcgggguucaucgagaacggcugggaggggaugaucgacggcugguacggcuuccgccaccagaacagcgaggggaccggccaggccgccgaccugaaguccacccaggccgccaucgaccagaucaacgggaagcucaaccgggugaucgagaagacgaacgagaaguuccaccagaucgagaaggaguucagcgaggucgagggccgcauccaggaccuggagaaguacguggaggacaccaagaucgaccugugguccuacaacgcggagcuccugguggcccuggagaaccagcacaccaucgaccucaccgacagcgagaugaacaagcuguucgagaagacgcggcgccagcugcgggagaacgccgaggacauggggaacggcugcuucaagaucuaccacaagugcgacaacgccugcaucgaguccauccgcaacggcaccuacgaccacgacgucuaccgcgacgaggcccucaacaaccgguuccagaucaaggggguggagcucaagagcggcuacaaggacuggauccuguggaucuccuucgcgaucagcugcuuccugcugugcgucgugcugcucggguucaucaugugggccugccagcgcggcaacauccggugcaacaucugcaucuga

SEQ ID NO: 66445 - RNA, 1701 nt, Artificial Sequence; identical to SEQ ID NO: 66359
  derived and/or modified CDS sequence (opt1) from hemagglutinin__InfluenzaA__ACI06174

SEQ ID NO: 66446 - RNA, 1701 nt, Artificial Sequence; identical to SEQ ID NO: 66360
  derived and/or modified CDS sequence (opt1) from hemagglutinin__InfluenzaA__ACI06175

SEQ ID NO: 66447 - RNA, 1701 nt, Artificial Sequence; identical to SEQ ID NO: 66360
  derived and/or modified CDS sequence (opt1) from hemagglutinin__InfluenzaA__ACI06176

SEQ ID NO: 66448 - RNA, 1701 nt, Artificial Sequence; identical to SEQ ID NO: 66360
  derived and/or modified CDS sequence (opt1) from hemagglutinin__InfluenzaA__ACI06177

SEQ ID NO: 66449 - RNA, 1689 nt, Artificial Sequence
  derived and/or modified CDS sequence (opt1) from hemagglutinin__InfluenzaA__ACI25724
auggccaucaucuaccugauccuccuguucgccaccgugcgcggcgaccagaucugcaucggguaccacgcgaacaacagcaccgagaaggucgacacgauccuggagcggaacgugaccgugacccacgccaaggacauccucgagaagacccacaacggcaagcugugcaagcugaacgggaucccgccccucgagcugggcgacugcuccaucgccggguggcugcucggcaaccccgagugcgaccgccugcugcggguccccgaguggagcuacaucauggagcgcgagaacccccgguacucccucugcuacccgggcagccugaacgacuacgaggagcugaagcaccuccuguccagcgugaagcacuucgagaaggugcgcauccugcccaaggaccgguggacgcagcacaccaccaccgggggcuccaaggccugcgccgucagcgggaagcccuccuucuuccgcaacaugguguggcucacgaagaagggccccaacuacccgguggcgaaggggagcuacaacaacaccuccggcgagcagaugcugaucaucuggggcguccaccaccccaaggacgaggccgagcagcgggcccuguaccaggagguggggaccuacgugagcgccuccaccagcacgcucaacaagcgcuccauccccgagaucgcggcccggcccgaggucaacggccuggggagccgcauggaguucuccuggacccugcucgacgugugggacaccaucaacuucgagagcaccggcaaccugguggccccggaguacggcuucaagaucuccaagcgggggagcagcggcaucaugaagacggaggggacccugggcaacugcgagaccaagugccagacgccccucggggccaucaacaccacccugcccuuccacaacguccacccccugaccaucggcgagugcccgaaguacgugaaguccgagaagcucgugcuggccaccggccugcgcaacgucccccagaucgagagccggggccucuucggggcgaucgccggguucaucgagggcggguggcagggcaugguggacggcugguacggguaccaccacuccaacgaccagggcagcggguacgccgccgacaaggaguccacgcagaaggccuucgacggcaucaccaacaaggugaacagcgucaucgagaagaugaacacccaguucgaggcgguggggaaggaguucaacaaccuggagaagcgccuggagaaccucaacaagaagauggaggacggcuuccuggacguguggaccuacaacgccgagcugcucguccugauggagaacgagcggacgcuggacuuccacgacuccaacgugaagaaccucuacgagaagguccgcaugcagcugcgggacaacgugaaggagcugggcaacgggugcuucgaguucuaccacaagugcgacgacgagugcaugaacagcgugaagaacggcaccuacgacuaccccaaguacgaggaggaguccaagcucaagcgcaacgagaucaagggggucaagcugagcuccaugggcguguaccagauccuggccaucuacgccaccguggccggcagccucucccuggcgaucauggucgccgggaucagcuucuggaugugcuccaacggcagccugcagugccggaucugcaucuga

SEQ ID NO: 66450 - RNA, 1701 nt, Artificial Sequence
  derived and/or modified CDS sequence (opt1) from hemagglutinin__InfluenzaA__ACI25746
augaagaccaucaucgcccugagcuacaucuucugccucgcccugggccaguaccugcccgggaacgacaacuccaccgcgacgcucugccugggccaccacgccgugccgaacgggacccuggucaagaccaucaccgacgaccagaucgaggugacgaacgccaccgagcucgugcagagcuccagcaccggcaagaucugcaacaacccccaccgcauccuggacgggaucgacugcacccugaucgacgcccuccugggcgacccccacugcgacgucuuccagaacgagacgugggaccuguucguggagcgguccaaggccuucagcaacugcuaccccuacgacgugccggacuacgcgucccuccgcagccuggucgccuccagcggcacccuggaguucaucaccgagggguucaccuggacgggcgugacccagaacgggggcuccaacgccugcaagcgggggcccggcagcggcuucuucucccgccucaacuggcugaccaagagcggguccaccuaccccgugcugaacgucacgaugcccaacaacgacaacuucgacaagcucuacaucuggggcgugcaccacccgagcaccaaccaggagcagaccucccuguacgugcaggccagcgggcgggucaccguguccacgcgccggagccagcagaccaucauccccaacaucggcagccgccccugggugcggggccuguccagccgcaucuccaucuacuggaccaucgucaagcccggggacgugcucgugaucgacagcaacggcaaccugaucgcgccgcggggguacuucaagaugcgcaccggcaaguccagcaucaugcgguccgacgcccccaucgacacgugcaucagcgagugcaucacccccaacggguccauccccaacgacaagccguuccagaacgucaacaagaucaccuacggcgccugccccaaguacgugaagcagaacacccugaagcucgccacgggcaugcgcaacgugcccgagaagcagacccgggggcuguucggcgccaucgcgggguucaucgagaacggcugggaggggaugaucgacggcugguacggcuuccgccaccagaacagcgaggggaccggccaggccgccgaccugaaguccacccaggccgccaucgaccagaucaacgggaagcucaaccgggucaucgagaagacgaacgagaaguuccaccagaucgagaaggaguucagcgagguggagggccgcauccaggaccuggagaaguacguggaggacaccaagaucgaccugugguccuacaacgcggagcuccuggucgcccuggagaaccagcacaccaucgaccucaccgacagcgagaugaacaagcuguucgagaagacgcggcgccagcugcgggagaacgccgaggacauggggaacggcugcuucaagaucuaccacaagugcgacaacgccugcaucgaguccauccgcaacggcaccuacgaccacgacguguaccgcgacgaggcccucaacaaccgguuccagaucaagggggucgagcucaagagcggcuacaaggacuggauccuguggaucuccuucgcgaucagcugcuuccugcugugcguggugcugcucggguucaucaugugggccugccagcgcggcaacauccggugcaacaucugcaucuga

SEQ ID NO: 66451 - RNA, 1701 nt, Artificial Sequence
  derived and/or modified CDS sequence (opt1) from hemagglutinin__InfluenzaA__ACI25757
augaagaccaucaucgcccugagcuacaucuucugccucgcccugggccaggaccugcccgggaacgacaacuccaccgcgacgcucugccugggccaccacgccgugccgaacgggacccuggucaagaccaucaccgacgaccagaucgaggugacgaacgccaccgagcucgugcagagcuccagcaccggcaagaucugcaacaacccccaccgcauccuggacgggaucgacugcacccugaucgacgcccuccugggcgacccccacugcgacgucuuccagaacgagacgugggaccuguucguggagcgguccaaggccuucagcaacugcuaccccuacgacgugccggacuacgcgucccuccgcagccuggucgccuccagcggcacccuggaguucaucaccgagggguucaccuggacgggcgugacccagaacgggggcuccaacgccugcaagcgggggcccggcagcggcuucuucucccgccucaacuggcugaccaagagcggguccaccuaccuggugcucaacgucacgaugcccaacaacgacaacuucgacaagcuguacaucuggggcgugcaccaccccagcaccaaccaggagcagaccucccuguacgugcaggccagcgggcgggucaccguguccacgcgccggagccagcagaccaucaucccgaacaucggcagccgccccugggugcggggccucuccagccgcaucuccaucuacuggaccaucgucaagcccggggacgugcuggugaucaacagcaacggcaaccugaucgcgccccggggguacuucaagaugcgcaccggcaaguccagcaucaugcgguccgacgccccgaucgacacgugcaucagcgagugcaucacccccaacggguccauccccaacgacaagcccuuccagaacgucaacaagaucaccuacggcgccugcccgaaguacgugaagcagaacacccucaagcuggccacgggcaugcgcaacgugcccgagaagcagacccgggggcuguucggcgccaucgcgggguucaucgagaacggcugggaggggaugaucgacggcugguacggcuuccgccaccagaacagcgaggggaccggccaggccgccgaccucaaguccacccaggccgccaucgaccagaucaacgggaagcugaaccgggucaucgagaagacgaacgagaaguuccaccagaucgagaaggaguucagcgagguggagggccgcauccaggaccuggagaaguacguggaggacaccaagaucgaccucugguccuacaacgcggagcugcuggucgcccucgagaaccagcacaccaucgaccugaccgacagcgagaugaacaagcuguucgagaagacgcggcgccagcuccgggagaacgccgaggacauggggaacggcugcuucaagaucuaccacaagugcgacaacgccugcaucgaguccauccgcaacggcaccuacaaccacgacguguaccgcgacgaggcccugaacaaccgguuccagaucaagggggucgagcucaagagcggcuacaaggacuggauccuguggaucuccuucgcgaucagcugcuuccugcugugcguggugcuccugggguucaucaugugggccugccagcgcggcaacauccggugcaacaucugcaucuga

SEQ ID NO: 66452 - RNA, 1701 nt, Artificial Sequence; identical to SEQ ID NO: 66340
  derived and/or modified CDS sequence (opt1) from hemagglutinin__InfluenzaA__ACI25768

SEQ ID NO: 66453 - RNA, 1701 nt, Artificial Sequence
  derived and/or modified CDS sequence (opt1) from hemagglutinin__InfluenzaA__ACI25779
augaagaccaucaucgcccugagcuacaucuucugccucgcccugggccaggaccugcccgggaacgacaacuccaccgcgacgcucugccugggccaccacgccgugccgaacgggacccuggucaagaccaucaccgacgaccagaucgaggugacgaacgccaccgagcucgugcagagcuccagcaccggcaagaucugcaacaacccccaccgcauccuggacgggaucgacugcacccugaucgacgcccuccugggcgacccccacugcgacgucuuccagaacgagacgugggaccuguucguggagcgguccaaggccuucagcaacugcuaccccuacgacgugccggacuacgcgucccuccgcagccuggucgccuccagcggcacccuggaguucaucaccgagggguucaccuggacgggcgugacccagaacgggggcuccaacgccugcaagcgggggcccggcagcggcuucuucucccgccucaacuggcugaccaagagcggguccaccuaccccgugcugaacgucacgaugcccaacaacgacaacuucgacaagcucuacaucuggggcgugcaccacccgagcaccaaccaggagcagaccucccuguacgugcaggccagcgggcgggucaccguguccacgcgccggagccagcagaccaucauccccaacaucuggagccgccccugggugcggggccuguccagccgcaucuccaucuacuggaccaucgucaagcccggcgacgugcucgugaucaacagcaacgggaaccugaucgcgccgcggggcuacuucaagaugcgcaccgggaaguccagcaucaugcgguccgacgcccccaucgacacgugcaucagcgagugcaucacccccaacggcuccauccccaacgacaagccguuccagaacgucaacaagaucaccuacggggccugccccaaguacgugaagcagaacacccugaagcucgccacgggcaugcgcaacgugcccgagaagcagacccggggccuguucggggccaucgcgggcuucaucgagaacgggugggagggcaugaucgacgggugguacggcuuccgccaccagaacagcgagggcaccgggcaggccgccgaccugaaguccacccaggccgccaucgaccagaucaacggcaagcucaaccgggucaucgagaagacgaacgagaaguuccaccagaucgagaaggaguucagcgagguggaggggcgcauccaggaccuggagaaguacguggaggacaccaagaucgaccugugguccuacaacgcggagcuccuggucgcccuggagaaccagcacaccaucgaccucaccgacagcgagaugaacaagcuguucgagaagacgcggcgccagcugcgggagaacgccgaggacaugggcaacgggugcuucaagaucuaccacaagugcgacaacgccugcaucgaguccauccgcaacggcaccuacgaccacgacguguaccgcgacgaggcccucaacaaccgguuccagaucaagggcgucgagcucaagagcggguacaaggacuggauccuguggaucuccuucgcgaucagcugcuuccugcugugcguggugcugcucggcuucaucaugugggccugccagcgcgggaacauccggugcaacaucugcaucuga

SEQ ID NO: 66454 - RNA, 1701 nt, Artificial Sequence
  derived and/or modified CDS sequence (opt1) from hemagglutinin__InfluenzaA__ACI25790
augaagaccaucaucgcccugagcuacaucuucugccucgcccugggccaggaccugcccgggaacgacaacuccaccgcgacgcucugccugggccaccacgccgugccgaacgggacccuggucaagaccaucaccgacgaccagaucgaggugacgaacgccaccgagcucgugcagagcuccagcaccggcaagaucugcaacaacccccaccgcauccuggacgggaucgacugcacccugaucgacgcccuccugggcgacccccacugcgacgucuuccagaacgagacgugggaccuguucguggagcgguccaaggccuucagcaacugcuaccccuacgacgugccggacuacgcgucccuccgcagccuggucgccuccagcggcacccuggaguucaucaccgagggguucaccuggacgggcgugacccagaacgggggcuccaacgccugcaagcgggggcccggcagcggcuucuucucccgccucaacuggcugaccaagagcggguccaccuaccccgugcugaacgucacgaugcccaacaacgacaacuucgacaagcucuacaucuggggcgugcaccacccgagcaccaaccaggagcagaccucccuguacgugcaggccagcgggcgggucaccguguccacgcgccggagccagcagaccaucauccccaacaucuggagccgccccugggugcggggccuguccagccgcaucuccaucuacuggaccaucgucaagcccggcgacgugcucgugaucaacagcaacgggaaccugaucgcgccgcggggcuacuucaagaugcgcaccgggaaguccagcaucaugcgguccgacgcccccaucgacacgugcaucagcgagugcaucacccccaacggcuccauccccaacgacaagccguuccagaacgucaacaagaucaccuacggggccugccccaaguacgugaagcagaacacccugaagcucgccacgggcaugcgcaacgugcccgagaagcagacccggggccuguucggggccaucgcgggcuucaucgagaacgggugggagggcaugaucgacgggugguacggcuuccgccaccagaacagcgagggcaccgggcaggccgccgaccugaaguccacccaggccgccaucgaccagaucaacggcaagcucaaccgggucaucgagaagacgaacgagaaguuccaccagaucgagaaggaguucagcgagguggaggggcgcauccaggaccuggagaaguacguggaggacaccaagaucgaccugugguccuacaacgcggagcuccuggucgcccuggagaaccagcacaccaucgaccucaccgacagcgagaugaacaagcuguucgagaagacgcggcgccagcugcgggagaacgccgaggacaugggcaacgggugcuucaagaucuaccacaagugcgacaacgccugcaucgaguccauccgcagcggcaccuacgaccacgacguguaccgcgacgaggcccucaacaaccgguuccagaucaagggcgucgagcugaaguccggguacaaggacuggauccuguggaucagcuucgcgaucuccugcuuccuccugugcguggugcugcucggcuucaucaugugggccugccagcgcgggaacauccggugcaacaucugcaucuga

SEQ ID NO: 66455 - RNA, 1701 nt, Artificial Sequence
  derived and/or modified CDS sequence (opt1) from hemagglutinin__InfluenzaA__ACI25801
augaagaccaucaucgcccugagcuacaucuucugccucgcccugggccaggaccugcccgggaacgacaacuccaccgcgacgcucugccugggccaccacgccgugccgaacgggacccuggucaagaccaucaccgacgaccagaucgaggugacgaacgccaccgagcucgugcagagcuccagcaccggcaagaucugcaacaacccccaccgcauccuggacgggaucaacugcacccugaucgacgcccuccugggcgacccccacugcgacgucuuccagaacgagacgugggaccuguucguggagcgguccaaggccuucagcaacugcuaccccuacgacgugccggacuacgcgucccuccgcagccuggucgccuccagcggcacccuggaguucaucaccgaggacuucaccuggacgggggugacccagaacggcggguccaacgccugcaagcggggccccgggagcggcuucuucucccgccucaacuggcugaccaagagcggcuccaccuaccccgugcuggacgucacgaugcccaacaacgacaacuucgacaagcucuacaucuggggcgugcaccacccgagcaccaaccaggagcagaccucccuguacgugcaggccagcgggcgggucaccguguccacgcgccggagccagcagaccaucauccccaacaucgggagccgccccugggugcggggccuguccagccgcaucuccaucuacuggaccaucgucaagcccggcgacgugcucgugaucaacagcaacgggaaccugaucgcgccgcggggcuacuucaagaugcgcaccgggaaguccagcaucaugcgguccgacgcccccaucgacacgugcaucagcgagugcaucacccccaacggcuccauccccaacgacaagccguuccagaacgucaacaagaucaccuacggggccugccccaaguacgugaagcagaacacccugaagcucgccacgggcaugcgcaacgugcccgagaagcagacccggggccuguucggggccaucgcgggcuucaucgagaacgggugggagggcaugaucgacgggugguacggcuuccgccaccagaacagcgagggcaccgggcaggccgccgaccugaaguccacccaggccgccaucgaccagaucaacggcaagcucaaccgggucaucgagaagacgaacgagaaguuccaccagaucgagaaggaguucagcgagguggaggggcgcauccaggaccuggagaaguacguggaggacaccaagaucgaccugugguccuacaacgcggagcuccuggucgcccuggagaaccagcacaccaucgaccucaccgacagcgagaugaacaagcuguucgagaagacgcggcgccagcugcgggagaacgccgaggacaugggcaacgggugcuucaagaucuaccacaagugcgacaacgccugcaucgaguccauccgcaacggcaccuacgaccacgacguguaccgcgacgaggcccucaacaaccgguuccagaucaagggcgucgagcucaagagcggguacaaggacuggauccuguggaucuccuucgcgaucagcugcuuccugcugugcguggugcugcucggcuucaucaugugggccugccagcgcgggaacauccggugcaacaucugcaucuga

SEQ ID NO: 66456 - RNA, 1689 nt, Artificial Sequence; identical to SEQ ID NO: 66374
  derived and/or modified CDS sequence (opt1) from hemagglutinin__InfluenzaA__ACI26274

SEQ ID NO: 66457 - RNA, 1698 nt, Artificial Sequence
  derived and/or modified CDS sequence (opt1) from hemagglutinin__InfluenzaA__ACI26307
augaagaccaucaucgcccugagcuacauccucugccugguguucacccagaagcugcccggcaacgacaacuccacggccacccucugccuggggcaccacgcggucccgaacggcaccaucgugaagaccaucacgaacgaccagaucgaggugaccaacgccaccgagcugguccagagcuccagcaccggggagaucugcgacagcccccaccagauccucgacggcgagaacugcacgcugaucgacgcccugcucggggacccccagugcgacggcuuccagaacaagaagugggaccuguucguggagcgcagcaaggccuacuccaacugcuaccccuacgacgugccggacuacgccagccugcggucccucgucgcgagcuccggcacccuggaguucaacaacgagagcuucaacuggaccggggugacccagaacggcacguccagcgccugcauccgccgguccaacaacagcuucuucucccgccugaacuggcucacccaccugaaguucaaguaccccgcccugaacgugaccaugcccaacaacgagaaguucgacaagcucuacaucuggggcguccaccaccccgugaccgacaacgaccagaucuuccuguacgcccagagcgggcggaucacgguguccaccaagcgcagccagcagaccgucaucccgaacaucgggagccggccccgcgugcggaacucccccagccgcaucuccaucuacuggaccaucgugaagcccggcgacauccugcucaucaacagcacgggcaaccugaucgcgccgcggggguacuucaagauccgcuccggcaagagcuccaucaugcggagcgacgcccccaucgggaagugcaacuccgagugcaucacccccaacggcagcauccccaacgacaagccguuccagaacgucaaccgcaucaccuacggcgccugcccccgguacgugaagcagaacacccugaagcucgccacggggaugcgcaacgugcccgagaagcagacccggggcaucuucggggccaucgcgggcuucaucgagaacgggugggagggcauggucgacggcugguacggguuccgccaccagaacuccgagggcaucgggcaggccgccgaccugaaguccacccaggccgccaucgaccagaucaacggcaagcugaaccggcucaucgggaagaccaacgagaaguuccaccagaucgagaaggaguucuccgagguggagggccgcauccaggaccuggagaaguacguggaggacacgaagaucgaccuguggagcuacaacgcggagcuccuggucgcccuggagaaccagcacaccaucgaccucaccgacuccgagaugaacaagcuguucgagaagaccaagaagcagcugcgggagaacgccgaggacaugggcaacgggugcuucaagaucuaccacaagugcgacaacgccugcaucggcagcauccgcaacgggacguacgaccacgacguguaccgcgacgaggcccucaacaaccgguuccagaucaagggcguggagcugaaguccggguacaaggacuggauccuguggaucagcuucgcgaucuccugcuuccuccugugcgucgcccugcucggcuucaucaugugggccugccagaagggcaacauccgcugcaacaucugcaucuga

SEQ ID NO: 66458 - RNA, 1701 nt, Artificial Sequence
  derived and/or modified CDS sequence (opt1) from hemagglutinin__InfluenzaA__ACI26362
augaagaccaucaucgcccugagcuacauccucugccugguguucgcccagaagcugcccggcaacgacaacuccaccgcgacgcucugccuggggcaccacgccgucccgaacggcaccaucgugaagaccaucaccaacgaccagaucgaggugacgaacgccaccgagcugguccagagcuccagcaccggggagaucugcgacagcccccaccagauccucgacggcgagaacugcacccugaucgacgcccugcucggggacccccagugcgacggcuuccagaacaagaagugggaccuguucguggagcgcagcaaggccuacuccaacugcuaccccuacgacgugccggacuacgcgagccugcggucccucgucgccagcuccggcacgcuggaguucaacaacgagagcuucaacuggaccggggugacccagaacggcaccuccagcgccugcauccgccgguccaacaacagcuucuucucccgccugaacuggcucacgcaccugaaguucaaguaccccgcccugaacgugaccaugcccaacaacgagcaguucgacaagcucuacaucuggggcguccaccaccccgggaccgacaacgaccagaucuuccuguacgcgcaggccagcgggcggaucaccguguccacgaagcgcagccagcagaccgugaucccgaacaucggcagccggccccgcguccggaacauccccucccgcaucagcaucuacuggaccaucgugaagcccggcgacauccugcucaucaacuccaccgggaaccugaucgccccgcggggcuacuucaagauccgcagcgggaaguccagcaucaugcgguccgacgcccccaucggcaagugcaacagcgagugcaucacgcccaacggcuccauccccaacgacaagccguuccagaacgugaaccgcaucaccuacggggccugcccccgguacgucaagcagaacacccugaagcucgcgaccggcaugcgcaacgugcccgagaagcagacgcgggggaucuucggcgccaucgccggguucaucgagaacggcugggagggcaugguggacgggugguacggcuuccgccaccagaacagcgaggggcggggccaggccgccgaccugaaguccacccaggcggccaucgaccagaucaacgggaagcugaaccgccucaucggcaagaccaacgagaaguuccaccagaucgagaaggaguucagcgaggucgagggccggauccaggaccuggagaaguacguggaggacaccaagaucgaccugugguccuacaacgccgagcuccugguggcccuggagaaccagcacacgaucgaccucaccgacagcgagaugaacaagcuguucgagaagaccaagaagcagcugcgcgagaacgccgaggacauggggaacggcugcuucaagaucuaccacaagugcgacaacgcgugcaucggguccauccgcaacggcaccuacgaccacgacgucuaccgggacgaggcccucaacaaccgcuuccagaucaaggggguggagcugaaguccggcuacaaggacuggauccuguggaucuccuucgccaucagcugcuuccuccugugcguggcccugcucggcuucaucaugugggccugccagaaggggaacauccggugcaacaucugcaucuga

SEQ ID NO: 66459 - RNA, 1701 nt, Artificial Sequence
  derived and/or modified CDS sequence (opt1) from hemagglutinin__InfluenzaA__ACI26373
augaagaccaucaucgcccugagcuacauccucugccugguguucgcccagaagcugcccggcaacgacaacuccaccgcgacgcucugccuggggcaccacgccgucccgaacggcaccaucgugaagaccaucaccaacgaccagaucgaggugacgaacgccaccgagcugguccagagcuccagcaccggggagaucugcgacagcccccaccagauccucgacggcgagaacugcacccugaucgacgcccugcucggggacccccagugcgacggcuuccagaacaagaagugggaccuguucguggagcgcagcaaggccuacuccaacugcuaccccuacgacgugccggacuacgcgagccugcggucccucgucgccagcuccggcacgcuggaguucaacaacgagagcuucaacugggccggggugacccagaacggcaccuccagcgccugcauccgcaaguccaacaacagcuucuucucccggcugaacuggcucacccaccugaaguucaaguaccccgcgcugaacgugacgaugcccaacaacgagcaguucgacaagcucuacaucuggggcguccaccaccccgggaccgacaacgaccagaucuuccuguacgcccaggccagcgggcgcaucaccguguccaccaagcggagccagcagacggugaucccgaacaucggcagccgcccccggguccgcaacauccccucccggaucagcaucuacuggaccaucgugaagcccggcgacauccugcucaucaacuccaccgggaaccugaucgccccgcgcggcuacuucaagauccggagcgggaaguccagcaucaugcgcuccgacgcccccaucggcaagugcaacagcgagugcaucacccccaacggcuccauccccaacgacaagccguuccagaacgugaaccggaucacguacggggcgugcccccgcuacgucaagcagaacacccugaagcucgccaccggcaugcggaacgugcccgagaagcagacccgcgggaucuucggcgccaucgccggguucaucgagaacggcugggagggcaugguggacgggugguacggcuuccggcaccagaacagcgaggggcgcggccaggccgcggaccugaaguccacgcaggccgccaucgaccagaucaacgggaagcugaaccggcucaucggcaagaccaacgagaaguuccaccagaucgagaaggaguucagcgaggucgagggccgcauccaggaccuggagaaguacguggaggacaccaagaucgaccugugguccuacaacgccgagcuccugguggcccuggagaaccagcacaccaucgaccucacggacagcgagaugaacaagcuguucgagaagaccaagaagcagcugcgggagaacgcggaggacauggggaacggcugcuucaagaucuaccacaagugcgacaacgccugcaucggguccauccgcaacggcaccuacgaccacgacgucuaccgcgacgaggcccucaacaaccgguuccagaucaaggggguggagcugaaguccggcuacaaggacuggauccuguggaucuccuucgccaucagcugcuuccuccugugcguggcccugcucggcuucaucaugugggcgugccagaaggggaacauccgcugcaacaucugcaucuga

SEQ ID NO: 66460 - RNA, 1701 nt, Artificial Sequence; identical to SEQ ID NO: 66325
  derived and/or modified CDS sequence (opt1) from hemagglutinin__InfluenzaA__ACI26395

SEQ ID NO: 66461 - RNA, 1701 nt, Artificial Sequence
  derived and/or modified CDS sequence (opt1) from hemagglutinin__InfluenzaA__ACI26406
augaagaccaucaucgcccugagcuacauccucugccugguguucgcccagaagcugcccggcaacgacaacuccaccgcgacgcucugccuggggcaccacgccgucccgaacggcaccaucgugaagaccaucaccaacgaccagaucgaggugacgaacgccaccgagcugguccagagcuccagcaccggggagaucugcgacagcccccaccagauccucgacggcgagaacugcacccugaucgacgcccugcucggggacccccagugcgacggcuuccagaacaagaagugggaccuguucguggagcgcagcaaggccuacuccaacugcuaccccuacgacgugccggacuacgcgagccugcggucccucgucgccagcuccggcacgcuggaguucaacaacgagagcuucaacuggaccggggugacccagaacggcaccuccagcgccugcauccgccgguccaacaacagcuucuucucccgccugaacuggcucacgcaccugaaguucaagcaccccgcccugaacgugaccaugcccaacaacgagaaguucgacaagcucuacaucuggggcguccaccaccccgggaccgacaacgaccagaucuuccuguacgcgcaggccagcgggcggaucaccguguccacgaagcgcagccagcagaccgugaucccgaacaucggcagccggccccgcguccggaacauccccucccgcaucagcaucuacuggaccaucgugaagcccggcgacauccugcucaucaacuccaccgggaaccugaucgccccgcggggcuacuucaagauccgcagcgggaaguccagcaucaugcgguccgacgcccccaucggcaagugcaacagcgagugcaucacgcccaacggcuccauccccaacgacaagccguuccagaacgugaaccgcaucaccuacggggccugcccccgguacgucaagcagaacacccugaagcucgcgaccggcaugcgcaacgugcccgagaagcagacgcgggggaucuucggcgccaucgccggguucaucgagaacggcugggagggcaugguggacgggugguacggcuuccgccaccagaacagcgaggggaucggccaggccgccgaccugaaguccacccaggcggccaucgaccagaucaacgggaagcugaaccggcucaucggcaagaccaacgagaaguuccaccagaucgagaaggaguucagcgaggucgagggccgcauccaggaccuggagaaguacguggaggacaccaagaucgaccugugguccuacaacgccgagcuccugguggcccuggagaaccagcacacgaucgaccucaccgacagcgagaugaacaagcuguucgagaagaccaagaagcagcugcgggagaacgccgaggacauggggaacggcugcuucaagaucuaccacaagugcgacaacgcgugcaucggguccauccgcaacggcaccuacgaccacgacgucuaccgcgacgaggcccucaacaaccgguuccagaucaaggggguggagcugaaguccggcuacaaggacuggauccuguggaucuccuucgccaucagcugcuuccuccugugcguggcccugcucggcuucaucaugugggccugccagaaggggaacauccgcugcaacaucugcaucuga

SEQ ID NO: 66462 - RNA, 1701 nt, Artificial Sequence; identical to SEQ ID NO: 65952
  derived and/or modified CDS sequence (opt1) from hemagglutinin__InfluenzaA__ACI26417

SEQ ID NO: 66463 - RNA, 1701 nt, Artificial Sequence
  derived and/or modified CDS sequence (opt1) from hemagglutinin__InfluenzaA__ACI26428
augaagaccaucaucgcccugagcuacauccucugccugguguucgcccagaagcugcccggcaacgacaacuccaccgcgacgcucugccuggggcaccacgccgucccgaacggcaccaucgugaagaccaucaccaacgaccagaucgaggugacgaacgccaccgagcugguccagaucagcuccaccgggggcaucugcgacagcccccaccagauccucgacggggagaacugcacccugaucgacgcccugcucggcgacccccagugcgacggcuuccagaacaagaagugggaccuguucguggagcgcuccaaggccuacagcaacugcuaccccuacgacgugccggacuacgcgucccugcggagccucgucgccuccagcgggacgcuggaguucaacaacgaguccuucaacuggaccggcgugacccagaacgggaccagcuccagcugcaagcgccgguccaacaacagcuucuucucccgccugaacuggcucacgcaccugaaguucaaguaccccgcccugaacgugaccaugcccaacaacgagaaguucgacaagcucuacaucuggggcguccaccaccccgugaccgacaacgaccagauccggcuguacgcccaggcgagcgggcgcaucaccguguccacgaagcggagccagcagaccgucaucccgaacaucggcuaccgcccccgggugcgcgacauccccagccggaucuccaucuacuggaccaucgugaagcccggcgacauccugcucaucaacagcaccgggaaccugaucgccccgcgcggcuacuucaagauccgguccggcaagagcuccaucaugcgcagcgacgcccccaucgggaagugcaacuccgagugcaucacgcccaacggcagcauccccaacgacaagccguuccagaacgucaaccggaucaccuacggggccugcccccgcuacgugaagcagaacacccugaagcucgccaccggcaugcggaacgugcccgagaagcagacgcgcgggaucuucggcgcgaucgccggguucaucgagaacggcugggagggcauggucgacgggugguacggcuuccggcaccagaacuccgaggggaucggccaggccgccgaccucaagagcacccaggccgcgaucaaccagaucaacgggaagcugaaccgccugaucggcaagaccaacgagaaguuccaccagaucgagaaggaguucuccgagguggagggccggauccaggaccuggagaaguacguggaggacaccaagaucgaccuguggagcuacaacgccgagcuccuggucgcccuggagaaccagcacacgaucgaccucaccgacuccgagaugaacaagcuguucgagcgcaccaagaagcagcugcgcgagaacgccgaggacauggggaacggcugcuucaagaucuaccacaagugcgacaacgccugcaucgggagcauccggaacggcaccuacgaccacgacguguaccgcgacgaggcgcucaacaaccgguuccagaucaaggggguggagcugaaguccggcuacaaggacuggauccuguggaucagcuucgccaucuccugcuuccuccugugcgucgugcugcucggcuucaucaugugggccugccagaaggggaacauccgcugcaacaucugcaucuga

SEQ ID NO: 66464 - RNA, 1698 nt, Artificial Sequence
  derived and/or modified CDS sequence (opt1) from hemagglutinin__InfluenzaA__ACI26439
augaaggugaagcugcucguccugcugugcaccuucaccgccacguacgccgacaccaucugcaucggcuaccacgcgaacaacagcaccgacaccguggacacggugcucgagaagaacgucaccgugacccacuccgugaaccugcuggaggacagccacaacgggaagcucugccugcugaagggcaucgcgccccuccagcuggggaacugcuccgucgccggcuggauccuggggaacccggagugcgagcuccugaucagcaaggaguccuggagcuacaucguggagaagcccaaccccgagaacgggaccugcuaccccggccacuucgccgacuacgaggagcugcgcgagcagcucuccagcguguccagcuucgagcgguucgagaucuucccgaaggaguccagcuggcccaaccacacggucaccgggguguccgccagcugcucccacaacggcaagagcuccuucuacaagaaccugcuguggcucaccgggaagaacggccuguaccccaaccugagcaaguccuacgccaacaacaaggagaaggaggugcucguccuguggggcgugcaccacccgcccaacaucggcaaccagcgcgcccuguaccacaccgagaacgccuacgugagcgucgugagcucccacuacagccggaaguucacgcccgagaucgccaagcgccccaaggugcgggaccaggagggccgcaucaacuacuacuggacccuccuggagcccggggacaccaucaucuucgaggcgaacggcaaccugaucgccccgcgguacgccuucgcccucucccgcggguucggcagcggcaucaucaacuccaacgcccccauggacgagugcgacgcgaagugccagacgccccagggggccaucaacagcucccugcccuuccagaacguccacccggugaccaucggcgagugccccaaguacgugcggagcgccaagcugcgcauggucaccgggcuccggaacauccccuccauccagagccgcggccuguucggggccaucgccggcuucaucgagggcggguggaccggcaugguggacgggugguacggcuaccaccaccagaacgagcagggguccggcuacgcggccgaccagaaguccacccagaacgccaucaacggcaucacgaacaaggugaacagcgucaucgagaagaugaacacccaguucaccgccguggggaaggaguucaacaagcuggagcggcgcauggagaaccucaacaagaaggucgacgacggcuucaucgacguguggaccuacaacgccgagcugcuggugcuccuggagaacgagcggacgcuggacuuccacgacagcaacgucaagaaccucuacgagaaggugaagucccagcugaagaacaacgcgaaggagaucgggaacggcugcuucgaguucuaccacaagugcaacgacgagugcauggagagcgugaagaacgggaccuacgacuaccccaaguacuccgaggagagcaagcugucccgcgagaagaucgacggcgucaagcucgagagcaugggcguguaccagauccuggccaucuacagcaccguggccuccagccugguccuccuggugucccugggggccaucagcuucuggaugugcuccaacggcagccuccagugccggaucugcaucuga

SEQ ID NO: 66465 - RNA, 1698 nt, Artificial Sequence; identical to SEQ ID NO: 66464
  derived and/or modified CDS sequence (opt1) from hemagglutinin__InfluenzaA__ACI26450

SEQ ID NO: 66466 - RNA, 1701 nt, Artificial Sequence
  derived and/or modified CDS sequence (opt1) from hemagglutinin__InfluenzaA__ACI26461
augaagaccaucaucgcccugagcuacauccucugccugguguucacccagaagcugcccggcaacgacaacuccacggccacccucugccuggggcaccacgcggucccgaacggcaccaucgugaagaccaucacgaacgaccagaucgaggugaccaacgccaccgagcugguccagagcuccagcaccggggagaucugcgacagcccccaccagauccucgacggcgagaacugcacgcugaucgacgcccugcucggggacccccagugcgacggcuuccagaacaagaagugggaccuguucguggagcgcuccaaggccuacuccaacugcuaccccuacgacgugccggacuacgccagccugcggucccucgucgcgagcuccggcacccuggaguucaacaacgagagcuucaacuggaccggggugacccagaacggcacguccagcgccugcauccgccgguccaacaacagcuucuucucccgccugaacuggcucacccaccugaaguucaaguaccccgcccugaacgugaccaugcccaacaacgagaaguucgacaagcucuacaucuggggcguccaccaccccgggaccgacaacgaccagaucuucccguacgcccaggcgagcgggcggaucacgguguccaccaagcgcagccagcagaccgugauccccaacaucggcagccggccccgcguccggaacauccccucccgcaucagcaucuacuggaccaucgugaagccgggcgacauccugcugaucaacuccacggggaaccucaucgcgccccggggcuacuucaagauccgcagcgggaaguccagcaucaugcgguccgacgcccccaucggcaagugcaacagcgagugcaucacccccaacggcuccaucccgaacgacaagcccuuccagaacgugaaccgcaucaccuacggggccugcccccgguacgucaagcagaacacccugaagcuggccacgggcaugcgcaacgugcccgagaagcagacccgggggaucuucggcgccaucgccggguucaucgagaacggcugggagggcaugguggacgggugguacggcuuccgccaccagaacagcgaggggaucggccaggccgccgaccucaaguccacccaggccgcgaucgaccagaucaacgggaagcugaaccggcugaucggcaagaccaacgagaaguuccaccagaucgagaaggaguucagcgaggucgagggccgcauccaggaccucgagaaguacguggaggacacgaagaucgaccugugguccuacaacgccgagcugcucguggcccuggagaaccagcacaccaucgaccugaccgacagcgagaugaacaagcuguucgagaagaccaagaagcagcuccgggagaacgccgaggacauggggaacggcugcuucaagaucuaccacaagugcgacaacgccugcaucggguccauccgcaacggcacguacgaccacaacgucuaccgcgacgaggcgcugaacaaccgguuccagaucaaggggguggagcucaagagcggcuacaaggacuggauccuguggaucuccuucgccaucagcugcuuccugcucugcguggcccugcugggcuucaucaugugggccugccagaaggggaacauccgcugcaacaucugcaucuga

SEQ ID NO: 66467 - RNA, 1698 nt, Artificial Sequence
  derived and/or modified CDS sequence (opt1) from hemagglutinin__InfluenzaA__ACI26472
augaagaccaucaucgcccugagcuacauccucugccugguguucacccagaagcugcccggcaacgacaacuccacggccacccucugccuggggcaccacgcggucccgaacggcaccaucgugaagaccaucacgaacgaccagaucgaggugaccaacgccaccgagcugguccagagcuccagcaccggggagaucugcgacagcccccaccagauccucgacggcgagaacugcacgcugaucgacgcccugcucggggacccccagugcgacggcuuccagaacaagaagugggaccuguucguggagcgcagcaaggccuacuccaacugcuaccccuacgacgugccggacuacgccagccugcggucccucgucgcgagcuccggcacccuggaguucaacaacgagagcuucaacuggaccggggugacccagaacggcacguccagcgccugcauccgccgguccaacaacagcuucuucucccgccugaacuggcucacccaccugaaguucaaguaccccgcccugaacgugaccaugcccaacaacgagaaguucgacaagcucuacaucuggggcguccaccaccccgugaccgacaacgaccagaucuuccuguacgcccagagcgggcggaucacgguguccaccaagcgcagccagcagaccgucaucccgaacaucggguaccggccccgcgugcggaacauccccagccgcaucuccaucuacuggaccaucgugaagcccggcgacauccugcucaucaacagcacgggcaaccugaucgcgccgcggggguacuucaagauccgcuccggcaagagcuccaucaugcggagcgacgcccccaucgggaagugcaacuccgagugcaucacccccaacggcagcauccccaacgacaagccguuccagaacgucaaccgcaucaccuacggcgccugcccccgguacgugaagcagaacacccugaagcucgccacggggaugcgcaacgugcccgagaagcagacccggggcaucuucggggccaucgcgggcuucaucgagaacgggugggagggcauggucgacggcugguacggguuccgccaccagaacuccgagggcaucgggcaggccgccgaccugaaguccacccaggccgccaucgaccagaucaacggcaagcugaaccggcucaucgggaagaccaacgagaaguuccaccagaucgagaaggaguucuccgagguggagggccgcauccaggaccuggagaaguacguggaggacacgaagaucgaccuguggagcuacaacgcggagcuccuggucgcccuggagaaccagcacaccaucgaccucaccgacuccgagaugaacaagcuguucgagaagaccaagaagcagcugcgggagaacgccgaggacaugggcaacgggugcuucaagaucuaccacaagugcgacaacgccugcaucggcagcauccgcaacgggacguacgaccacgacguguaccgcgacgaggcccucaacaaccgguuccagaucaagggcguggagcugaaguccggguacaaggacuggauccuguggaucagcuucgcgaucuccugcuuccuccugugcgucgcccugcucggcuucaucaugugggccugccagaagggcaacauccgcugcaacaucugcaucuga

SEQ ID NO: 66468 - RNA, 1701 nt, Artificial Sequence; identical to SEQ ID NO: 66459
  derived and/or modified CDS sequence (opt1) from hemagglutinin__InfluenzaA__ACI26483

SEQ ID NO: 66469 - RNA, 1701 nt, Artificial Sequence
  derived and/or modified CDS sequence (opt1) from hemagglutinin__InfluenzaA__ACI26505
augaagaccaucaucgcccugagcuacauccucugccugguguucgcccagaagcugcccggcaacgacaacuccaccgcgacgcucugccuggggcaccacgccgucccgaacggcaccaucgugaagaccaucaccaacgaccagaucgaggugacgaacgccaccgagcugguccagagcuccagcaccggggagaucugcgacagcccccaccagauccucgacggcgagaacugcacccugaucgacgcccugcucggggacccccagugcgacggcuuccagaacaagaagugggaccuguucguggagcgcagcaaggccuacuccaacugcuaccccuacgacgugccggacuacgcgagccugcggucccucgucgccagcuccggcacgcuggaguucaacaacgagagcuucaacugggccggggugacccagaacggcaccuccagcgccugcauccgcaaguccaacaacagcuucuucucccggcugaacuggcucacccaccugaaguucaaguaccccgcgcugaacgugacgaugcccaacaacgagcaguucgacaagcucuacaucuggggcguccaccaccccgggaccgacaacgaccagaucuuccuguacgcccaggccagcgggcgcaucaccguguccaccaagcggagccagcagacggugaucccgaacaucggcagccgcccccggguccgcaacauccccucccggaucagcaucuacuggaccaucgugaagcccggcgacauccugcucaucaacuccaccgggaaccugaucgccccgcgcggcuacuucaagauccggagcgggaaguccagcaucaugcgcuccgacgcccccaucggcaagugcaacagcgagugcaucacccccaacggcuccauccccaacgacaagccguuccagaacgugaaccggaucacguacggggcgugcccccgcuacgucaagcagaacacccugaagcucgccaccggcaugcggaacgugcccgagaagcagacccgcgggaucuucggcgccaucgccggguucaucgagaacggcugggagggcaugguggacgggugguacggcuuccggcaccagaacagcgaggggcgcggccaggccgcggaccugaaguccacgcaggccgccaucgaccagaucaacgggaagcugaaccggcucaucggcaagaccaacgagaaguuccaccagaucgagaaggaguucagcgaggucgagggccgcauccaggaccuggagaaguacguggaggacaccaagaucgaccugugguccuacaacgccgagcuccugguggcccuggagaaccagcacaccaucgaccucacggacagcgagaugaacaagcuguucgagaagaccaagaagcagcugcgggagaacgcggaggacauggggaacggcugcuucaagaucuaccacaagugcgacaacgccugcauccgcuccauccgcaacgggaccuacgaccacgacgucuaccgggacgaggcccucaacaaccgcuuccagaucaagggcguggagcugaaguccggguacaaggacuggauccuguggaucuccuucgccaucagcugcuuccuccugugcguggcccugcucggcuucaucaugugggcgugccagaagggcaacauccggugcaacaucugcaucuga

SEQ ID NO: 66470 - RNA, 1701 nt, Artificial Sequence; identical to SEQ ID NO: 66458
  derived and/or modified CDS sequence (opt1) from hemagglutinin__InfluenzaA__ACI26516

SEQ ID NO: 66471 - RNA, 1701 nt, Artificial Sequence; identical to SEQ ID NO: 66459
  derived and/or modified CDS sequence (opt1) from hemagglutinin__InfluenzaA__ACI26527

SEQ ID NO: 66472 - RNA, 1701 nt, Artificial Sequence
  derived and/or modified CDS sequence (opt1) from hemagglutinin__InfluenzaA__ACI26538
augaagaccaucaucgcccugagcuacauccucugccugguguucgcccagaagcugcccggcaacgacaacuccaccgcgacgcucugccuggggcaccacgccgucccgaacggcaccaucgugaagaccaucaccaacgaccagaucgaggugacgaacgccaccgagcugguccagagcuccagcaccggggagaucugcgacagcccccaccagauccucgacggcgagaacugcacccugaucgacgcccugcucggggacccccagugcgacggcuuccagaacaagaagugggaccuguucguggagcgcagcaaggccuacuccaacugcuaccccuacgacgugccggacuacgcgagccugcggucccucgucgccagcuccggcacgcuggaguucaacaacgagagcuucaacuggaccggggugacccagaacggcaccuccagcgccugcauccgccgguccaacaacagcuucuucucccgccugaacuggcucacgcaccugaaguucaaguaccccgcccugaacgugaccaugcccaacaacgagcaguucgacaagcucuacaucuggggcguccaccaccccgggaccgacaacgaccagaucuuccuguacgcgcaggccagcgggcggaucaccguguccacgaagcgcagccagcagaccgugaucccgaacaucggcagccggccccgcguccggaacauccccucccgcaucagcaucuacuggaccaucgugaagcccggcgacauccugcucaucaacuccaccgggaaccugaucgccccgcggggcuacuucaagauccgcagcgggaaguccagcaucaugcgguccgacgcccccaucggcaagugcaacagcgagugcaucacgcccaacggcuccauccccaacgacaagccguuccagaacgugaaccgcaucaccuacggggccugcccccgguacgucaagcagaacacccugaagcucgcgaccggcaugcgcaacgugcccgacaagcagacgcgggggaucuucggcgccaucgccggguucaucgagaacggcugggagggcaugguggacgggugguacggcuuccgccaccagaacagcgaggggcggggccaggccgccgaccugaaguccacccaggcggccaucgaccagaucaacgggaagcugaaccgccucaucggcaagaccaacgagaaguuccaccagaucgagaaggaguucagcgaggucgagggccggauccaggaccuggagaaguacguggaggacaccaagaucgaccugugguccuacaacgccgagcuccugguggcccuggagaaccagcacacgaucgaccucaccgacagcgagaugaacaagcuguucgagaagaccaagaagcagcugcgcgagaacgccgaggacauggggaacggcugcuucaagaucuaccacaagugcgacaacgcgugcaucggguccauccgcaacggcaccuacgaccacgacgucuaccgggacgaggcccucaacaaccgcuuccagaucaaggggguggagcugaaguccggcuacaaggacuggauccuguggaucuccuucgccaucagcugcuuccuccugugcguggcccugcucggcuucaucaugugggccugccagaaggggaacauccggugcaacaucugcaucuga

SEQ ID NO: 66473 - RNA, 1701 nt, Artificial Sequence
  derived and/or modified CDS sequence (opt1) from hemagglutinin__InfluenzaA__ACI26549
augaagaccaucaucgcccugagcuacaucuucugccucguguucgcccagaagcugcccggcaacgacaacuccaccgcgacgcugugccucgggcaccacgccgucccgaacggcacccuggugaagaccaucaccaacgaccagaucgaggugacgaacgccaccgagcugguccagagcuccagcaccgggcgcaucugcgacagcccccaccggauccucgacggcaagaacugcacccugaucgacgcccugcucggggacccccacugcgacggcuuccagaacgagaagugggaccuguucguggagcgcagcaaggccuacuccaacugcuaccccuacgacgugccggacuacgcgagccugcggucccucgucgccagcuccggcacgcuggaguucaucaacgaggacuucaacuggaccggggugacccagagcggcggguccuacagcugcaagcgcggcuccgugaacagcuucuucucccggcugaacuggcuccacgagagcgaguacaaguaccccgcccugaacgucaccaugcccaacaacgggaaguucgacaagcuguacaucuggggcgugcaccaccccuccacggaccgcgagcagaccaagcucuacgugcgggccagcggccgcgucaccgugagcaccaagcggucccagcagacggugaucccgaacaucgggagccgccccuggguccggggccuguccagccgcaucuccaucuacuggaccaucgugaagcccggggacauccugcucaucaacagcaccggcaaccugaucgcgccccggggcuacuucaagauccgcaccgggaaguccagcaucaugcgguccgacgccccgaucggcacgugcagcuccgagugcaucacccccaacgggagcauccccaacgacaagcccuuccagaacgugaacaagaucaccuacggcgccugcccgcgcuacgucaagcagaacacccugaagcucgccacggggaugcggaacgugcccgagaagcagacccgcggcaucuucggcgccaucgcgggguucaucgagaacggcugggaggggaugguggacggcugguacggguuccggcaccagaacuccgagggcaccggccaggccgccgaccugaaguccacccaggccgccaucgaccagaucaacgggaagcugaaccgccucaucgagaagacgaacgagaaguuccaccagaucgagaaggaguucuccgaggucgagggccggauccaggaccuggaggaguacguggaggacaccaagaucgaccuguggagcuacaacgcggagcuccugguggcccuggagaaccagcacaccaucgaccucaccgacuccgagaugaacaagcuguucgagaagacgcgcaagcagcugcgcgagaacgccgaggacauggggaacggcugcuucaagaucuaccacaagugcgacaacgccugcaucgggagcauccggaacggcaccuacgaccacgacgucuaccgcgacgaggcccucaacaaccgguuccagaucaagggcguggagcugaaguccggguacaaggacuggauccuguggaucagcuucgcgaucagcugcuuccuccugugcgucgugcugcucggcuucaucaugugggccugccagaaggggaacauccgcugcaacaucugcaucuga

SEQ ID NO: 66474 - RNA, 1701 nt, Artificial Sequence
  derived and/or modified CDS sequence (opt1) from hemagglutinin__InfluenzaA__ACI26560
augaagaccaucaucgcccugagcuacaucuucugccucguguucgcccagaagcugcccggcaacgacaacuccaccgcgacgcugugccucgggcaccacgccgucccgaacggcacccuggugaagaccaucaccaacgaccagaucgaggugacgaacgccaccgagcugguccagagcuccagcaccgggcgcaucugcgacagcccccaccggauccucgacggcaagaacugcacccugaucgacgcccugcucggggacccccacugcgacggcuuccagaacaaggagugggaccuguucguggagcgcagcaaggccuacuccaacugcuaccccuacgacgugccggacuacgcgagccugcggucccucgucgccagcuccggcacgcuggaguucaucaacgaggacuucaacuggaccgggguggcccagagcggcggguccuacgccugcaagcgcggcagcgugaacuccuucuucagccggcugaacuggcuccacgaguccgaguacaaguaccccgcgcugaacgucaccaugcccaacaacgggaaguucgacaagcuguacaucuggggcgugcaccaccccaucaccgaccgcgagcagacgaaccucuacgugcgggccagcggccgcgucaccguguccaccaagcggagccagcagaccgugaucccgaacaucgggagccgccccuggguccggggccuguccagccgcaucuccaucuacuggacgaucgugaagcccggggacauccugcucaucaacagcaccggcaaccugaucgcgccccggggcuacuucaagauccgcaccgggaaguccagcaucaugcgguccgacgccccgaucgggaccugcagcuccgagugcaucacgcccaacggcagcauccccaacgacaagcccuuccagaacgugaaccgcaucaccuacggcgccugcccgcgguacgucaagcagaacacccugaagcucgccaccgggaugcgcaacgugcccgagaagcagacgcggggcaucuucggcgccaucgccggguucaucgagaacggcugggaggggaugguggacggcugguacggguuccgccaccagaacuccgagggcaccggccaggccgccgaccugaaguccacccaggcggccaucgaccagaucaacgggaagcugaaccggcucaucgagaagaccaacgagaaguuccaccagaucgagaaggaguucuccgaggucgagggccgcauccaggaccuggagaaguacguggaggacacgaagaucgaccuguggagcuacaacgccgagcuccugguggcccuggagaaccagcacaccaucgaccucaccgacuccgagaugaacaagcuguucgagaagacccgcaagcagcugcgggagaacgccgaggacauggggaacggcugcuucaagaucuaccacaagugcgacaacgcgugcaucgggagcauccgcaacggcacguacgaccacgacgucuaccgggacgaggcccucaacaaccgcuuccagaucaagggcguggagcugaaguccggguacaaggacuggauccuguggaucagcuucgccaucuccugcuuccuccugugcgucgugcugcucggcuucaucaugugggccugccagaaggggaacauccggugcaacaucugcaucuga

SEQ ID NO: 66475 - RNA, 1701 nt, Artificial Sequence
  derived and/or modified CDS sequence (opt1) from hemagglutinin__InfluenzaA__ACI26571
augaagaccaucaucgcccugagcuacaucuucugccucguguucgcccagaagcugcccggcaacgacaacuccaccgcgacgcugugccucgggcaccacgccgucccgaacggcacccuggugaagaccaucaccaacgaccagaucgaggugacgaacgccaccgagcugguccagagcuccagcaccgggcgcaucugcgacagcccccaccggauccucgacggcaagaacugcacccugaucgacgcccugcucggggacccccacugcgacggcuuccagaacaaggagugggaccuguucguggagcgcagcaaggccuacuccaacugcuaccccuacgacgugccggacuacgcgagccugcggucccucgucgccagcuccggcacgcuggaguucaucaacgaggacuucaacuggaccgggguggcccagagcggcggguccuacgccugcaagcgcggcagcgugaacuccuucuucagccggcugaacuggcuccacgaguccgaguacaaguaccccgcgcugaacgucaccaugcccaacaacgggaaguucgacaagcuguacaucuggggcgugcaccaccccagcaccgaccgcgagcagacgaagcucuacgugcgggccuccggccgcgucaccgugagcaccaagcggagccagcagaccgugaucccgaacaucgggucccgccccuggguccggggccugagcucccgcaucagcaucuacuggacgaucgugaagcccggggacauccugcucaucaacuccaccggcaaccugaucgcgccccggggcuacuucaagauccgcaccggcaagagcuccaucaugcggagcgacgccccgaucgggaccugcuccagcgagugcaucacgcccaacggguccauccccaacgacaagcccuuccagaacgugaaccgcaucaccuacggcgccugcccgcgguacgucaagcagaacacccugaagcucgccaccgggaugcgcaacgugcccgagaagcagacgcggggcaucuucggcgccaucgccggguucaucgagaacggcugggaggggaugguggacggcugguacggguuccgccaccagaacagcgagggcaccggccaggccgccgaccugaaguccacccaggcggccaucgaccagaucaacgggaagcugaaccggcucaucgagaagaccaacgagaaguuccaccagaucgagaaggaguucagcgaggucgagggccgcauccaggaccuggagaaguacguggaggacacgaagaucgaccugugguccuacaacgccgagcuccugguggcccuggagaaccagcacaccaucgaccucaccgacagcgagaugaacaagcuguucgagaagacccgcaagcagcugcgggagaacgccgaggacauggggaacggcugcuucaagaucuaccacaagugcgacaacgcgugcaucggguccauccgcaacggcacguacaaccacgacgucuaccgggacgaggcccucaacaaccgcuuccagaucaagggcguggagcugaaguccggguacaaggacuggauccuguggaucuccuucgccaucagcugcuuccuccugugcgucgugcugcucggcuucaucaugugggccugccagaaggggaacauccggugcaacaucugcaucuga

SEQ ID NO: 66476 - RNA, 1701 nt, Artificial Sequence
  derived and/or modified CDS sequence (opt1) from hemagglutinin__InfluenzaA__ACI26593
augaagaccaucaucgcccugagcuacauccucugccugguguucgcccagaagcugcccggcaacgacaacuccaccgcgacgcucugccuggggcaccacgccgucccgaacggcacccuggugaagaccaucaccaacgaccagaucgaggugacgaacgccaccgagcucguccagagcuccagcaccgggcgcaucugcgacagcccccaccggauccuggacggcaagaacugcacccugaucgacgcccuccugggggacccccacugcgacggcuuccagaacaaggagugggaccuguucguggagcgcagcaaggccuacuccaacugcuaccccuacgacgugccggacuacgcgagccuccggucccuggucgccagcuccggcacgcuggaguucaccaacgaggacuucaacuggaccgggguggcccagagcggcgaguccuacgccugcaagcgcgggagcgugaaguccuucuucagccggcucaacuggcugcacaaguccgacuacaaguaccccgcgcugaacgucaccaugcccaacaacggcaaguucgacaagcucuacaucuggggcgugcaccaccccagcacggaccgcgagcagaccucccuguacgugcgggccagcgggcgcgucaccgugagcaccaagcggucccagcagacggugaucccgaacaucggcagccgccccuggguccgggggcuguccagccgcaucuccaucuacuggaccaucgugaagcccggcgacauccuccugaucaacagcaccgggaaccugaucgcgccccggggcuacuucaagauccgcaccggcaaguccagcaucaugcgguccgacgccccgaucgggacgugcagcuccgagugcaucacccccaacggcagcauccccaacgacaagcccuuccagaacgugaaccgcaucaccuacggggccugcccgcgguacgucaagcagaacacccucaagcuggccacgggcaugcgcaacgugcccgagaagcagacccgggggaucuucggcgccaucgccggcuucaucgagaacgggugggagggcaugguggacgggugguacggcuuccgccaccagaacuccgaggggaccggccaggccgccgaccugaaguccacccaggcggccaucgaccagaucaacggcaagcucaaccggcugaucgagaagacgaacgagaaguuccaccagaucgagaaggaguucuccgaggucgaggggcgcauccaggaccuggagaaguacguggaggacaccaagaucgaccucuggagcuacaacgccgagcugcugguggcccucgagaaccagcacaccaucgaccugaccgacuccgagaugaacaagcuguucgagaagacgcgcaagcagcuccgggagaacgccgaggacaugggcaacgggugcuucaagaucuaccacaagugcgacaacgcgugcaucggcagcauccgcaacgggaccuacgaccacgacgucuaccgggacgaggcccugaacaaccgcuuccagaucaagggcguggagcugaaguccggcuacaaggacuggauccucuggaucagcuucgccaucagcugcuuccugcugugcgucgugcuccugggguucaucaugugggccugccagaagggcaacauccggugcaacaucugcaucuga

SEQ ID NO: 66477 - RNA, 1698 nt, Artificial Sequence
  derived and/or modified CDS sequence (opt1) from hemagglutinin__InfluenzaA__ACI32715
augaaggugaagcugcucguccugcugugcaccuucaccgccacguacgccgacaccaucugcaucggcuaccacgcgaacaacagcaccgacaccguggacacggugcucgagaagaacgucaccgugacccacuccgugaaccugcuggaggacagccacaacgggaagcucugccugcugaagggcaucgcgccccuccagcuggggaacugcuccgucgccggcuggauccuggggaacccggagugcgagcuccugaucagcaaggaguccuggagcuacaucguggagacccccaaccccgagaacggcacgugcuaccccggcuacuucgccgacuacgaggagcugcgcgagcagcucuccagcguguccagcuucgagcgguucgagaucuucccgaaggaguccagcuggcccaaccacaccgucaccgggguguccgccagcugcucccacaacggcaagagcuccuucuaccgcaaccugcuguggcucaccgggaagaacggccuguaccccaaccugagcaaguccuacgccaacaacaaggagaaggaggugcucguccuguggggcgugcaccacccgcccaacaucggggaccagcgggcccuguaccacacggagaacgccuacgugagcgucgugagcucccacuacagccgccgguucacccccgagaucgccaagcgccccaaggugcgggaccaggagggccgcaucaacuacuacuggacccuccuggagcccggggacaccaucaucuucgaggcgaacggcaaccugaucgccccgcgguucgccuucgcccucucccgcggguucggcagcggcaucaucacguccaacgcccccauggacgagugcgacgcgaagugccagacgccccagggggccaucaacagcucccugcccuuccagaacguccacccggugaccaucggcgagugccccaaguacgugcggagcgccaagcugcgcauggccaccgggcuccggaacauccccuccauccagagccgcggccuguucggggccaucgcgggcuucaucgagggcggguggaccggcauggucgacgggugguacggcuaccaccaccagaacgagcagggguccggcuacgccgccgaccagaaguccacccagaacgccaucaacggcaucaccaacaaggugaacaccgugaucgagaagaugaacacgcaguucaccgccgucgggaaggaguucagcaagcuggagcggcgcauggagaaccucaacaagaagguggacgacggcuuccuggacaucuggaccuacaacgcggagcugcucguccugcuggagaacgagcggacccucgacuuccacgacagcaacgugaagaaccuguacgagaaggugaagucccagcugaagaacaacgccaaggagaucgggaacggcugcuucgaguucuaccacaagugcaacgacgagugcauggagagcgucaagaacgggacguacgacuaccccaaguacuccgaggagagcaagcucaaccgcgagaagaucgacggcgugaagcuggaguccaugggcguguaccagauccuggccaucuacagcaccgucgccagcucccucgugcugcuggugagccucggggccaucuccuucuggaugugcagcaacggcucccugcagugccggaucugcaucuga

SEQ ID NO: 66478 - RNA, 1698 nt, Artificial Sequence
  derived and/or modified CDS sequence (opt1) from hemagglutinin__InfluenzaA__ACI32716
augaaggugaagcugcucguccugcugugcaccuucaccgccacguacgccgacaccaucugcaucggcuaccacgcgaacaacagcaccgacaccguggacacggugcucgagaagaacgucaccgugacccacuccgugaaccugcuggaggacagccacaacgggaagcucugccugcugaagggcaucgcgccccuccagcuggggaacugcuccgucgccggcuggauccuggggaacccggagugcgagcuccugaucagcaaggaguccuggagcuacaucguggagacccccaaccccgagaacggcacgugcuaccccggcuacuucgccgacuacgaggagcugcgcgagcagcucuccagcguguccagcuucgagcgguucgagaucuucccgaaggaguccagcuggcccaaccacaccgucaccgggguguccgccagcugcucccacaacggcaagagcuccuucuaccgcaaccugcuguggcucaccgggaagaacggccuguaccccaaccugagcaaguccuacgccaacaacaaggagaaggaggugcucguccuguggggcgugcaccacccgcccaacaucggggaccagcgggcccuguaccacacggagaacgccuacgugagcgucgugagcucccacuacagccgccgguucacccccgagaucgccaagcgccccaaggugcgggaccaggagggccgcaucaacuacuacuggacccuccuggagcccggggacaccaucaucuucgaggcgaacggcaaccugaucgccccgcgguucgccuucgcccucucccgcggguucggcagcggcaucaucacguccaacgcccccauggacgagugcgacgcgaagugccagacgccccagggggccaucaacagcucccugcccuuccagaacguccacccggugaccaucggcgagugccccaaguacgugcggagcgccaagcugcgcauggccaccgggcuccggaacauccccuccauccagagccgcggccuguucggggccaucgcgggcuucaucgagggcggguggaccggcauggucgacgggugguacggcuaccaccaccagaacgagcagggguccggcuacgccgccgaccagaaguccacccagaacgccaucaacggcaucaccaacaaggugaacagcgugaucgagaagaugaacacccaguucacggccgucgggaaggaguucagcaagcuggagcggcgcauggagaaccucaacaagaagguggacgacggcuuccuggacaucuggaccuacaacgcggagcugcucguccugcuggagaacgagcggacccucgacuuccacgacuccaacgugaagaaccuguacgagaaggucaagagccagcugaagaacaacgccaaggagaucgggaacggcugcuucgaguucuaccacaagugcaacgacgagugcauggaguccgugaagaacgggaccuacgacuaccccaaguacagcgaggaguccaagcucaaccgcgagaagaucgacggcgugaagcuggagagcaugggcguguaccagauccuggccaucuacagcacggucgccuccagccucgugcugcuggugucccucggggccaucagcuucuggaugugcuccaacggcagccugcagugcaccaucugcaucuga

SEQ ID NO: 66479 - RNA, 1698 nt, Artificial Sequence
  derived and/or modified CDS sequence (opt1) from hemagglutinin__InfluenzaA__ACI32717
augaaggugaagcugcucguccugcugugcaccuucaccgccacguacgccgacaccaucugcaucggcuaccacgcgaacaacagcaccgacaccguggacacggugcucgagaagaacgucaccgugacccacuccgugaaccugcuggaggacagccacaacgggaagcucugccugcugaagggcaucgcgccccuccagcuggggaacugcuccgucgccggcuggauccuggggaacccggagugcgagcuccugaucagcaaggaguccuggagcuacaucguggagacccccaaccccgagaacggcacgugcuaccccggcuacuucgccgacuacgaggagcugcgcgagcagcucuccagcguguccagcuucgagcgguucgagaucuucccgaaggaguccagcuggcccaaccacaccgucaccgggguguccgccagcugcucccacaacggcaagagcuccuucuaccgcaaccugcuguggcucaccgggaagaacggccuguaccccaaccugagcaaguccuacgccaacaacaaggagaaggaggugcucguccuguggggcgugcaccacccgcccaacaucggggaccagcgggcccuguaccacacggagaacgccuacgugagcgucgugagcucccacuacagccgccgguucacccccgagaucgccaagcgccccaaggugcgggaccaggagggccgcaucaacuacuacuggacccuccuggagcccggggacaccaucaucuucgaggcgaacggcaaccugaucgccccgcgguucgccuucgcccucucccgcggguucggcagcggcaucaucacguccaacgcccccauggacgagugcgacgcgaagugccagacgccccagggggccaugaacagcucccugcccuuccagaacguccacccggugaccaucggcgagugccccaaguacgugcggagcgccaagcugcgcauggccaccgggcuccggaacauccccuccauccagagccgcggccuguucggggccaucgcgggcuucaucgagggcggguggaccggcauggucgacgggugguacggcuaccaccaccagaacgagcagggguccggcuacgccgccgaccagaaguccacccagaacgccaucaacggcaucaccaacaaggugaacagcgugaucgagaagaugaacacccaguucacggccgucgggaaggaguucagcaagcuggagcggcgcauggagaaccucaacaagaagguggacgacggcuuccuggacaucuggaccuacaacgcggagcugcucguccugcuggagaacgagcggacccucgacuuccacgacuccaacgugaagaaccuguacgagaaggucaagagccagcugaagaacaacgccaaggagaucgggaacggcugcuucgaguucuaccacaagugcaacgacgagugcauggaguccgugaagaacgggaccuacgacuaccccaaguacagcgaggaguccaagcucaaccgcgagaagaucgacggcgugaagcuggagagcaugggcguguaccagauccuggccaucuacagcacggucgccuccagccucgugcugcuggugucccucggggccaucaacuucuggaugugcagcaacggcucccugcagugcaagaucugcaucuga

SEQ ID NO: 66480 - RNA, 1698 nt, Artificial Sequence
  derived and/or modified CDS sequence (opt1) from hemagglutinin__InfluenzaA__ACI32718
augaaggugaagcugcucguccugcugugcaccuucaccgccacguacgccgacaccaucugcaucggcuaccacgcgaacaacagcaccgacaccguggacacggugcucgagaagaacgucaccgugacccacuccgugaaccugcuggaggacagccacaacgggaagcucugccugcugaagggcaucgcgccccuccagcuggggaacugcuccgucgccggcuggauccuggggaacccggagugcgagcuccugaucagcaaggaguccuggagcuacaucguggagacccccaaccccgagaacggcacgugcuaccccggcuacuucgccgacuacgaggagcugcgcgagcagcucuccagcguguccagcuucgagcgguucgagaucuucccgaaggaguccagcuggcccaaccacaccgccaccggggucuccgccagcugcucccacaacggcaagagcuccuucuaccgcaaccugcuguggcucaccgggaagaacggccuguaccccaaccugagcaaguccuacgccaacaacaaggagaaggaggugcucgugcuguggggcguccaccacccgcccaacaucggggaccagcgggcccuguaccacacggagaacgccuacgugagcguggucagcucccacuacagccgccgguucacccccgagaucgcgaagcgccccaaggugcgggaccaggagggccgcaucaacuacuacuggacccuccuggagcccggggacaccaucaucuucgaggccaacggcaaccugaucgccccgcgguucgccuucgcccucucccgcggguucggcagcggcaucaucacguccaacgcgcccauggacgagugcgacgccaagugccagacgccccagggggccaucaacagcucccugcccuuccagaacgugcacccggucaccaucggcgagugccccaaguacgugcggagcgccaagcugcgcauggccaccgggcuccggaacauccccuccauccagagccgcggccuguucggggcgaucgccggcuucaucgagggcggguggaccggcaugguggacgggugguacggcuaccaccaccagaacgagcagggguccggcuacgccgccgaccagaaguccacccagaacgccaucaacggcaucaccaacaaggucaacagcgugaucgagaagaugaacacccaguucacggcgguggggaaggaguucagcaagcuggagcggcgcauggagaaccucaacaagaaggucgacgacggcuuccuggacaucuggaccuacaacgccgagcugcucgugcugcuggagaacgagcggacccucgacuuccacgacuccaacgucaagaaccuguacgagaaggucaagagccagcugaagaacaacgccaaggagguggggaacggcugcuucgaguucuaccacaagugcaacgacgagugcauggaguccgugaagaacgggaccuacgacuaccccaaguacagcgaggaguccaagcucaaccgcgagaagaucgacggcgugaagcuggagagcaugggcguguaccagauccuggccaucuacagcacggucgccuccagccucgugcugcuggugucccucggggcgaucagcuucuggaugugcuccaacggcagccugcagugcaccaucugcaucuga

SEQ ID NO: 66481 - RNA, 1698 nt, Artificial Sequence; identical to SEQ ID NO: 66478
  derived and/or modified CDS sequence (opt1) from hemagglutinin__InfluenzaA__ACI32719

SEQ ID NO: 66482 - RNA, 1698 nt, Artificial Sequence; identical to SEQ ID NO: 66478
  derived and/or modified CDS sequence (opt1) from hemagglutinin__InfluenzaA__ACI32720

SEQ ID NO: 66483 - RNA, 1698 nt, Artificial Sequence
  derived and/or modified CDS sequence (opt1) from hemagglutinin__InfluenzaA__ACI32721
augaaggugaagcugcucguccugcugugcaccuucaccgccacguacgccgacaccaucugcaucggcuaccacgcgaacaacagcaccgacaccguggacacggugcucgagaagaacgucaccgugacccacuccgugaaccugcuggaggacagccacaacgggaagcucugccugcugaagggcaucgcgccccuccagcuggggaacugcuccgucgccggcuggauccuggggaacccggagugcgagcuccugaucagcaaggaguccuggagcuacaucguggagacccccaaccccgagaacggcacgugcuaccccggcuacuucgccgacuacgaggagcugcgcgagcagcucuccagcguguccagcuucgagcgguucgagaucuucccgaaggaguccagcuggcccaaccacaccgucaccgggguguccgccagcugcucccacaacggcaagagcuccuucuaccgcaaccugcuguggcucaccgggaagaacggccuguaccccaaccugagcaaguccuacgccaacaacaaggagaaggaggugcucguccuguggggcgugcaccacccgcccaacaucggggaccagcgggcccuguaccacacggagaacgccuacgugagcgucgugagcucccacuacagccgccgguucacccccgagaucgccaagcgccccaaggugcgggaccaggagggccgcaucuccuacuacuggacccuccuggagcccggggacaccaucaucuucgaggcgaacggcaaccugaucgccccgcgguucgccuucgcccucagccgcggguucggcuccggcaucaucacgagcaacgcccccauggacgagugcgacgcgaagugccagacgccccagggggccaucaacuccagccugcccuuccagaacguccacccggugaccaucggcgagugccccaaguacgugcgguccgccaagcugcgcauggccaccgggcuccggaacauccccagcauccagucccgcggccuguucggggccaucgcgggcuucaucgagggcggguggaccggcauggucgacgggugguacggcuaccaccaccagaacgagcaggggagcggcuacgccgccgaccagaaguccacccagaacgccaucaacggcaucaccaacaaggugaacagcgugaucgagaagaugaacacccaguucacggccgucgggaaggaguucuccaagcuggagcggcgcauggagaaccucaacaagaagguggacgacggcuuccuggacaucuggaccuacaacgcggagcugcucguccugcuggagaacgagcggacccucgacuuccacgacagcaacgugaagaaccuguacgagaaggugaagucccagcugaagaacaacgccaaggagaucgggaacggcugcuucgaguucuaccacaagugcaacgacgagugcauggagagcgucaagaacgggaccuacgacuaccccaaguacuccgaggagagcaagcucaaccgcgagaagaucgacggcgugaagcuggagagcaugggcguguaccagauccuggccaucuacuccacggucgccagcucccucgugcugcuggugagccucggggccaucuccuucuggaugugcagcaacggcucccugcagugccggaucugcaucuga

SEQ ID NO: 66484 - RNA, 1698 nt, Artificial Sequence; identical to SEQ ID NO: 66478
  derived and/or modified CDS sequence (opt1) from hemagglutinin__InfluenzaA__ACI32722

SEQ ID NO: 66485 - RNA, 1698 nt, Artificial Sequence
  derived and/or modified CDS sequence (opt1) from hemagglutinin__InfluenzaA__ACI32723
augaaggugaagcugcucguccugcugugcaccuucaccgccacguacgccgacaccaucugcaucggcuaccacgcgaacaacagcaccgacaccguggacacggugcucgagaagaacgucaccgugacccacuccgugaaccugcuggaggacagccacaacgggaagcucugccugcugaagggcaucgcgccccuccagcuggggaacugcuccgucgccggcuggauccuggggaacccggagugcgagcuccugaucagcaaggaguccuggagcuacaucguggagacccccaaccccgagaacggcacgugcuaccccggcuacuucgccgacuacgaggagcugcgcgagcagcucuccagcguguccagcuucgagcgguucgagaucuucccgaaggaguccagcuggcccaaccacaccgucaccgggguguccgccagcugcucccacaacggcaagagcuccuucuaccgcaaccugcuguggcucaccgggaagaacggccuguaccccaaccugagcaaguccuacgccaacaacaaggagaaggaggugcucguccuguggggcgugcaccacccgcccaacaucggggaccagcgggcccuguaccacacggagaacgccuacgugagcgucgugagcucccacuacagccgccgguucacccccgagaucgccaagcgccccaaggugcgggaccaggagggccgcaucaacuacuacuggacccuccuggagcccggggacaccaucaucuucgaggcgaacggcaaccugaucgccccgcgguucgccuucgcccucucccgcggguucggcagcggcaucaucacguccaacgcccccauggacgagugcgacgcgaagugccagacgccccagggggccaucaacagcucccugcccuuccagaacguccacccggugaccaucggcgagugccccaaguacgugcggagcgccaagcugcgcauggccaccgggcuccggaacauccccuccauccagagccgcggccuguucggggccaucgcgggcuucaucgagggcggguggaccggcauggucgacgggugguacggcuaccaccaccagaacgagcagggguccggcuacgccgccgaccagaaguccacccagaacgccaucaacggcaucaccaacaaggugaacagcgugaucgagaagaugaacacccaguucacggccgucgggaaggaguucagcaagcuggagcggcgcauggagaaccucaacaagaagguggacgacggcuuccuggacaucuggaccuacaacgcggagcugcucguccugcuggagaacgagcggacccucgacuuccacgacuccaacgugaagaaccuguacgagaaggucaagagccagcugaagaacaacgccaaggagaucgggaacggcugcuucgaguucuaccacaagugcaacgacgagugcauggaguccgugaagaacgggaccuacgacuaccccaaguacagcgaggaguccaagcucaaccgcgagaagaucgacggcgugaagcuggagagcaugggcguguaccagauccuggccaucuacagcacggucgccuccagccucgugcugcuggugucccucggggccaucagcuucuggaugugcuccaacggcagccugcagugccggaucugcuucuga

SEQ ID NO: 66486 - RNA, 1698 nt, Artificial Sequence
  derived and/or modified CDS sequence (opt1) from hemagglutinin__InfluenzaA__ACI32724
augaaggugaagcugcucguccugcugugcaccuucaccgccacguacgccgacaccaucugcaucggcuaccacgcgaacaacagcaccgacaccguggacacggugcucgagaagaacgucaccgugacccacuccgugaaccugcuggaggacagccacaacgggaagcucugccugcugaagggcaucgcgccccuccagcuggggaacugcuccgucgccggcuggauccuggggaacccggagugcgagcuccugaucagcaaggaguccuggagcuacaucguggagacccccaaccccgagaacggcacgugcuaccccggcuacuucgccgacuacgaggagcugcgcgagcagcucuccagcguguccagcuucgagcgguucgagaucuucccgaaggaguccagcuggcccaaccacaccgucaccgggguguccgccagcugcucccacaacggcaagagcuccuucuaccgcaaccugcuguggcucaccgggaagaacggccuguaccccaaccugagcaaguccuacgccaacaacaaggagaaggaggugcucguccuguggggcgugcaccacccgcccaacaucggggaccagcgggcccuguaccacacggagaacgccuacgugagcgucgugagcucccacuacagccgccgguucacccccgagaucgccaagcgccccaaggugcgggaccaggagggccgcaucaacuacuacuggacccuccugaagcccggggacaccaucaucuucgaggcgaacggcaaccugaucgccccgcgguucgccuucgcccucucccgcggguucggcagcggcaucaucacguccaacgcccccauggacgagugcgacgcgaagugccagacgccccagggggccaucaacagcucccugcccuuccagaacguccacccggugaccaucggcgagugccccaaguacgugcggagcgccaagcugcgcauggccaccgggcuccggaacauccccuccauccagagccgcggccuguucggggccaucgcgggcuucaucgagggcggguggaccggcauggucgacgggugguacggcuaccaccaccagaacgagcagggguccggcuacgccgccgaccagaaguccacccagaacgccaucaacggcaucaccaacaaggugaacagcgugaucgagaagaugaacacccaguucacggccgucgggaaggaguucagcaagcuggagcggcgcauggagaaccucaacaagaagguggacgacggcuuccuggacaucuggaccuacaacgcggagcugcucguccugcuggagaacgagcggacccucgacuuccacgacuccaacgugaagaaccuguacgagaaggucaagagccagcugaagaacaacgccaaggagaucgggaacggcugcuucgaguucuaccacaagugcaacgacgagugcauggaguccgugaagaacgggaccuacgacuaccccaaguacagcgaggaguccaagcucaaccgcgagaagaucgacggcgugaagcuggagagcaugggcguguaccagauccuggccaucuacagcacggucgccuccagccucgugcugcuggugucccucggggccaucagcuucuggaugugcuccaacggcagccugcagugcaagaucugcaucuga

SEQ ID NO: 66487 - RNA, 1698 nt, Artificial Sequence; identical to SEQ ID NO: 65409
  derived and/or modified CDS sequence (opt1) from hemagglutinin__InfluenzaA__ACI32725

SEQ ID NO: 66488 - RNA, 1698 nt, Artificial Sequence
  derived and/or modified CDS sequence (opt1) from hemagglutinin__InfluenzaA__ACI32726
augaaggugaagcugcucguccugcugugcaccuucaccgccacguacgccgacaccaucugcaucggcuaccacgcgaacaacagcaccgacaccguggacacggugcucgagaagaacgucaccgugacccacuccgugaaccugcuggaggacagccacaacgggaagcucugccugcugaagggcaucgcgccccuccagcuggggaacugcuccgucgccggcuggauccuggggaacccggagugcgagcuccugaucagcaaggaguccuggagcuacaucguggagacccccaaccccgagaacggcacgugcuaccccggcuacuucgccgacuacgaggagcugcgcgagcagcucuccagcguguccagcuucgagcgguucgagaucuucccgaaggaguccagcuggcccaaccacaccgucaccgggguguccgccagcugcucccacaacggcaagagcuccuucuaccgcaaccugcuguggcucaccgggaagaacggccuguaccccaaccugagcaaguccuacgccaacaacaaggagaaggaggugcucguccuguggggcgugcaccacccgcccaacaucggggaccagcgggcccuguaccacacggagaacgccuacgugagcgucgugagcucccacuacagccgccgguucacccccgagaucgccaagcgccccaaggugcgggaccaggagggccgcaucaacuacuacuggacccuccuggagcccggggacaccaucaucuucgaggcgaacggcaaccugaucgccccgcgguucgccuucgcccucucccgcggguucggcagcggcaucaucacguccaacgcccccauggacgagugcgacgcgaagugccagacgccccagggggccaucaacagcucccugcccuuccagaacguccacccggugaccaucggcgagugccccaaguacgugcggagcgccaagcugcgcauggccaccgggcuccggaacauccccuccauccagagccgcggccuguucggggccaucgcgggcuucaucgagggcggguggaccggcauggucgacgggugguacggcuaccaccaccagaacgagcagggguccggcuacgccgccgaccagaaguccacccagaacgccaucaacggcaucaccaacaaggugaacagcgugaucgagaagaugaacacccaguucacggccgucgggaaggaguucagcaagcuggagaagcggauggagaaccucaacaagaagguggacgacggcuuccuggacaucuggaccuacaacgcggagcugcucguccugcuggagaacgagcgcacccucgacuuccacgacuccaacgugaagaaccuguacgagaaggucaagagccagcugaagaacaacgccaaggagaucgggaacggcugcuucgaguucuaccacaagugcaacgacgagugcauggaguccgugaagaacgggaccuacgacuaccccaaguacagcgaggaguccaagcucaaccgggagaagaucgacggcgugaagcuggagagcaugggcaucuaccagauccuggccaucuacagcacggugaccuccagccucguccugcuggugucccucggggccaucagcuucuggaugugcuccaacggcagccugcagugccgcaucugcaucuga

SEQ ID NO: 66489 - RNA, 1698 nt, Artificial Sequence
  derived and/or modified CDS sequence (opt1) from hemagglutinin__InfluenzaA__ACI32727
augaaggugaagcugcucguccugcugugcaccuucaccgccacguacgccgacaccaucugcaucggcuaccacgcgaacaacagcaccgacaccguggacacggugcucgagaagaacgucaccgugacccacuccgugaaccugcuggaggacagccacaacgggaagcucugccugcugaagggcaucgcgccccuccagcuggggaacugcuccgucgccggcuggauccuggggaacccggagugcgagcuccugaucagcaaggaguccuggagcuacaucguggagacccccaaccccgagaacggcacgugcuaccccggcuacuucgccgacuacgaggagcugcgcgagcagcucuccagcaucuccagcuucgagcgguucgagaucuucccgaaggaguccagcuggcccaaccacaccgugaccggggucuccgccagcugcucccacaacggcaagagcuccuucuaccgcaaccugcuguggcucaccgggaagaacggccuguaccccaaccugagcaaguccuacgccaacaacaaggagaaggaggugcucgugcuguggggcguccaccacccgcccaacaucggggaccagcgggcccuguaccacacggagaacgccuacgugagcguggucagcucccacuacagccgccgguucacccccgagaucgccaagcgccccaaggugcgggaccaggagggccgcaucaacuacuacuggacccuccuggagcccggggacaccaucaucuucgaggcgaacggcaaccugaucgccccgcgguucgccuucgcccucucccgcggguucggcagcggcaucaucacguccaacgcccccauggacgagugcgacgcgaagugccagacgccccagggggccaucaacagcucccugcccuuccagaacgugcacccggucaccaucggcgagugccccaaguacgugcggagcgccaagcugcgcauggccaccgggcuccggaacauccccuccauccagagccgcggccuguucggggccaucgcgggcuucaucgagggcggguggaccggcaugguggacgggugguacggcuaccaccaccagaacgagcagggguccggcuacgccgccgaccagaaguccacccagaacgccaucaacggcaucaccaacaaggucaacagcgugaucgagaagaugaacacccaguucacggccguggggaaggaguucagcaagcuggagcggcgcauggagaaccucaacaagaaggucgacgacggcuuccuggacaucuggaccuacaacgcggagcugcucgugcugcuggagaacgagcggacccucgacuuccacgacuccaacgucaagaaccuguacgagaaggucaagagccagcugaagaacaacgccaaggagaucgggaacggcugcuucgaguucuaccacaagugcaacgacgagugcauggaguccgugaagaacgggaccuacgacuaccccaaguacagcgaggaguccaagcucaaccgcgagaagaucgacggcgugaagcuggagagcaugggcguguaccagauccuggccaucuacagcacgguggccuccagccucguccugcuggugacccucggggccaucuccuucuggaugugcagcaacggcucccugcagugcaccaucugcaucuga

SEQ ID NO: 66490 - RNA, 1698 nt, Artificial Sequence
  derived and/or modified CDS sequence (opt1) from hemagglutinin__InfluenzaA__ACI32729
augaaggugaagcugcucguccugcugugcaccuucaccgccacguacgccgacaccaucugcaucggcuaccacgcgaacaacagcaccgacaccguggacacggugcucgagaagaacgucaccgugacccacuccgugaaccugcuggaggacagccacaacgggaagcucugccugcugaagggcaucgcgccccuccagcuggggaacugcuccgucgccggcuggauccuggggaacccggagugcgagcuccugauccccaaggagagcugguccuacaucguggagacccccaaccccgagaacggcacgugcuacccgggcuacuucgccgacuacgaggagcugcgcgagcagcucagcuccgugagcuccuucgagcgguucgagaucuuccccaaggagagcuccuggcccaaccacaccgucaccggggugagcgccuccugcagccacaacggcaaguccagcuucuaccgcaaccugcuguggcucaccgggaagaacggccuguaccccaaccuguccaagagcuacgccaacaacaaggagaaggaggugcucguccuguggggcgugcaccacccgcccaacaucggggaccagcgggcccuguaccacacggagaacgccuacguguccgucgugagcagccacuacucccgccgguucacccccgagaucgccaagcgccccaaggugcgggaccaggagggccgcaucaacuacuacuggacccuccuggagccgggggacaccaucaucuucgaggcgaacggcaaccugaucgcgccccgguucgccuucgcccucagccgcggguucggcuccggcaucaucacgagcaacgcccccauggacgagugcgacgccaagugccagacgccccagggggccaucaacuccagccugccguuccagaacguccaccccgugaccaucggcgagugccccaaguacgugcgguccgccaagcugcgcauggucaccgggcuccggaacauccccagcauccagucccgcggccuguucggggccaucgccggcuucaucgagggcggguggaccggcaugguggacgggugguacggcuaccaccaccagaacgagcaggggagcggcuacgcggccgaccagaaguccacccagaacgccaucaacggcgugaccaacaaggucaacagcgugaucgagaagaugaacacccaguucacggccgucgggaaggaguucaacaagcuggagcggcgcauggagaaccucaacaagaagguggacgacggcuuccuggacaucuggaccuacaacgccgagcugcucgugcugcuggagaacgagcggacccucgacuuccacgacuccaacgucaagaaccuguacgagaaggucaagagccagcugaagaacaacgcgaaggagaucgggaacggcugcuucgaguucuaccacaagugcaacgacgagugcauggaguccgugaagaacgggaccuacgacuacccgaaguacagcgaggaguccaagcucaaccgcgagaagaucgacggcgugaagcuggagagcaugggcguguaccagauccuggccaucuacuccacgguggccagcagccucguccugcuggugucccucggggccaucagcuucuggaugugcuccaacggcagccugcagugccggaucugcaucuga

SEQ ID NO: 66491 - RNA, 1698 nt, Artificial Sequence; identical to SEQ ID NO: 66490
  derived and/or modified CDS sequence (opt1) from hemagglutinin__InfluenzaA__ACI32730

SEQ ID NO: 66492 - RNA, 1698 nt, Artificial Sequence
  derived and/or modified CDS sequence (opt1) from hemagglutinin__InfluenzaA__ACI32731
augaaggugaagcugcucguccugcugugcaccuucaccgccacguacgccgacaccaucugcaucggcuaccacgcgaacaacagcaccgacaccguggacacggugcucgagaagaacgucaccgugacccacuccgugaaccugcuggaggacagccacaacgggaagcucugccugcugaagggcaucgcgccccuccagcuggggaacugcuccgucgccggcuggauccuggggaacccggagugcgagcuccugaucagcaaggaguccuggagcuacaucguggagaagcccaaccccgagaacgggaccugcuaccccggccacuucgccgacuacgaggagcugcgcgagcagcucuccagcguguccagcuucgagcgguucgagaucuucccgaaggaguccagcuggcccaaccacacggucaccgggguguccgccagcugcucccacaacggcaagagcuccuucuacaagaaccugcuguggcucaccgggaagaacggccuguaccccaaccugagcaaguccuacgccaacaacaaggagaaggaggugcucguccuguggggcgugcaccacccgcccaacaucggcgaccagaaggcccuguaccacaccgagaacgccuacgugagcgucgugagcucccacuacagccgcaaguucaaccccgagaucgccaagcggcccaaggugcgcgaccaggagggccggaucaacuacuacuggacgcuccuggagcccggggacaccaucaucuucgaggcgaacggcaaccugaucgccccgcgcuacgccuucgcccucucccggggguucggcagcggcaucaucaacuccaacgcccccauggacgagugcgacgcgaagugccagacgccccagggggccaucaacagcucccugcccuuccagaacguccacccggugaccaucggcgagugccccaaguacgugcgcagcgccaagcugcggauggucaccgggcuccgcaacauccccuccauccagagccggggccuguucggggccaucgccggcuucaucgagggcggguggaccggcaugguggacgggugguacggcuaccaccaccagaacgagcagggguccggcuacgcggccgaccagaaguccacccagaacgccaucaacggcaucaccaacaaggugaacagcgucaucgagaagaugaacacgcaguucaccgccguggggaaggaguucaacaagcuggagcgccggauggagaaccucaacaagaaggucgacgacggcuucaucgacaucuggaccuacaacgccgagcugcuggugcuccuggagaacgagcgcacccuggacuuccacgacagcaacgugaagaaccucuacgagaaggucaagucccagcugaagaacaacgcgaaggagaucgggaacggcugcuucgaguucuaccacaagugcaacgacgagugcauggagagcgugaagaacgggacguacgacuaccccaaguacuccgaggagagcaagcugaaccgggagaagaucgacggcgugaagcucgaguccaugggcgucuaccagauccuggccaucuacagcaccguggccagcucccuggugcuccuggucagccugggggccaucuccuucuggaugugcagcaacggcucccuccagugcaagaucugcaucuga

SEQ ID NO: 66493 - RNA, 1698 nt, Artificial Sequence
  derived and/or modified CDS sequence (opt1) from hemagglutinin__InfluenzaA__ACI32732
augaaggugaagcugcucguccugcugugcaccuucaccgccacguacgccgacaccaucugcaucggcuaccacgcgaacaacagcaccgacaccguggacacggugcucgagaagaacgucaccgugacccacuccgugaaccugcuggaggacagccacaacgggaagcucugccugcugaagggcaucgcgccccuccagcuggggaacugcuccgucgccggcuggauccuggggaacccggagugcgagcuccugaucagcaaggaguccuggagcuacaucguggagacccccaaccccgagaacggcacgugcuaccccggcuacuucgccgacuacgaggagcugcgcgagcagcucuccagcguguccagcuucgagcgguucgagaucuucccgaaggaguccagcuggcccaaccacaccgucaccgggguguccgccagcugcucccacaacggcaagagcuccuucuaccgcaaccugcuguggcucaccgggaagaacggccuguaccccaaccugagcaaguccuacgccaacaacaaggagaaggaggugcucguccuguggggcgugcaccacccgcccaacaucggggaccagcgggcccuguaccacacggagaacgccuacgugagcgucgugagcucccacuacagccgccgguucacccccgagaucgccaagcgccccaaggugcgggaccaggagggccgcaucaacuacuacuggacccuccuggagcccggggacaccaucaucuucgaggcgaacggcaaccugaucgccccgcgguucgccuucgcccucucccgcggguucggcagcggcaucaucacguccaacgcccccauggacgagugcgacgcgaagugccagacgccccagggggccaucaacagcucccugcccuuccagaacguccacccggugaccaucggcgagugccccaaguacgugcggagcgccaagcugcgcauggucaccgggcuccggaacauccccuccauccagagccgcggccuguucggggccaucgccggcuucaucgagggcggguggaccggcaugguggacgggugguacggcuaccaccaccagaacgagcagggguccggcuacgcggccgaccagaaguccacccagaacgccaucaacggcaucaccaacaaggugaacagcgucaucgagaagaugaacacccaguucacggccguggggaaggaguucaacaagcuggagcggcgcauggagaaccucaacaagaaggucgacgacggcuuccuggacaucuggaccuacaacgccgagcugcucgugcugcuggagaacgagcggacccucgacuuccacgacagcaacgugaagaaccuguacgagaaggucaagucccagcugaagaacaacgcgaaggagaucgggaacggcugcuucgaguucuaccacaagugcaacgacgagugcauggagagcgugaagaacgggaccuacgacuaccccaaguacuccgaggagagcaagcucaaccgcgagaagaucgacggcgugaagcuggaguccaugggcgucuaccagauccuggccaucuacagcacgguggccagcucccucgugcugcuggucagccucggggccaucuccuucuggaugugcagcaacggcucccugcagugcaccaucugcaucuga

SEQ ID NO: 66494 - RNA, 1698 nt, Artificial Sequence
  derived and/or modified CDS sequence (opt1) from hemagglutinin__InfluenzaA__ACI32733
augaaggugaagcugcucguccugcugugcaccuucaccgccacguacgccgacaccaucugcaucggcuaccacgcgaacaacagcaccgacaccguggacacggugcucgagaagaacgucaccgugacccacuccgugaaccugcuggaggacagccacaacgggaagcucugccugcugaagggcaucgcgccccuccagcuggggaacugcuccgucgccggcuggauccuggggaacccggagugcgagcuccugaucagcaaggaguccuggagcuacaucguggagaagcccaaccccgagaacgggaccugcuaccccggccacuucgccgacuacgaggagcugcgcgagcagcucuccagcguguccagcuucgagcgguucgagaucuucccgaaggaguccagcuggcccaaccacacggucaccgggguguccgccagcugcucccacaacggcaagagcuccuucuacaagaaccugcuguggcucaccgggaagaacggccuguaccccaaccugagcaaguccuacgccaacaacaaggagaaggaggugcucguccuguggggcgugcaccacccgcccaacaucggcgaccagaaggcccuguaccacaccgagaacgccuacgugagcgucgugagcucccacuacagccgcaaguucaacuccgagaucgccaagcggcccaaggugcgcgaccaggagggccggaucaacuacuacuggacgcuccuggagcccggggacaccaucaucuucgaggcgaacggcaaccugaucgcgccccgcuacgccuucgcccucagccggggguucggcuccggcaucaucaacagcaacgccccgauggacgagugcgacgccaagugccagacgccccagggggccaucaacuccagccugcccuuccagaacguccaccccgugaccaucggcgagugcccgaaguacgugcgcuccgccaagcugcggauggucaccgggcuccgcaacauccccagcauccagucccggggccuguucggggccaucgccggcuucaucgagggcggguggaccggcaugguggacgggugguacggcuaccaccaccagaacgagcaggggagcggcuacgcggccgaccagaaguccacccagaacgccaucaacggcaucaccaacaaggugaacagcgucaucgagaagaugaacacgcaguucaccgccguggggaaggaguucaacaagcuggagcgccggauggagaaccucaacaagaaggucgacgacggcuucaucgacaucuggaccuacaacgccgagcugcuggugcuccuggagaacgagcgcacccuggacuuccacgacuccaacgugaagaaccucuacgagaaggucaagagccagcugaagaacaacgcgaaggagaucgggaacggcugcuucgaguucuaccacaagugcaacgacgagugcauggaguccgugaagaacgggacguacgacuaccccaaguacagcgaggaguccaagcugaaccgggagaagaucgacggcgugaagcucgagagcaugggcgucuaccagauccuggccaucuacagcaccguggccuccagccuggugcuccuggucucccugggggccaucagcuucuggaugugcuccaacggcagccuccagugcaccaucugcaucuga

SEQ ID NO: 66495 - RNA, 1698 nt, Artificial Sequence
  derived and/or modified CDS sequence (opt1) from hemagglutinin__InfluenzaA__ACI32734
augaaggugaagcugcucguccugcugugcaccuucaccgccacguacgccgacaccaucugcaucggcuaccacgcgaacaacagcaccgacaccguggacacggugcucgagaagaacgucaccgugacccacuccgugaaccugcuggaggacagccacaacgggaagcucugccugcugaagggcaucgcgccccuccagcuggggaacugcuccgucgccggcuggauccuggggaacccggagugcgagcuccugaucagcaaggaguccuggagcuacaucguggagacccccaaccccgagaacggcacgugcuaccccggcuacuucgccgacuacgaggagcugcgcgagcagcucuccagcguguccagcuucgagcgguucgagaucuucccgaaggaguccagcuggcccaaccacaccgucaccgggguguccgccagcugcucccacaacggcaagagcuccuucuaccgcaaccugcuguggcucaccgggaagaacggccuguaccccaaccugagcaaguccuacgccaacaacaagaagaaggaggugcucguccuguggggcgugcaccacccgcccaacaucggggaccagaaggcccuguaccacacggagaacgccuacgugagcgucgugagcucccacuacagccggcgcuucacccccgagaucgccaagcggcccaaggugcgcgaccaggagggccggaucaacuacuacuggacccuccuggagcccggggacaccaucaucuucgaggcgaacggcaaccugaucgccccgcgcuucgccuucgcccucucccggggguucggcagcggcaucaucacguccaacgcccccauggacgagugcgacgcgaagugccagacgccccagggggccaucaacagcucccugcccuuccagaacguccacccggugaccaucggcgagugccccaaguacgugcgcagcgccaagcugcggauggucaccgggcuccgcaacauccccuccauccagagccggggccuguucggggccaucgccggcuucaucgagggcggguggaccggcaugguggacgggugguacggcuaccaccaccagaacgagcagggguccggcuacgcggccgaccagaaguccacccagaacgccaucaacggcaucaccaacaaggugaacagcgucaucgagaagaugaacacccaguucacggccguggggaaggaguucaacaagcuggagcgccggauggagaaccucaacaagaaggucgacgacggcuuccuggacaucuggaccuacaacgccgagcugcucgugcugcuggagaacgagcgcacccucgacuuccacgacagcaacgugaagaaccuguacgagaaggucaagucccagcugaagaacaacgcgaaggagaucgggaacggcugcuucgaguucuaccacaagugcaacgacgagugcauggagagcgugaagaacgggaccuacgacuaccccaaguacuccgaggagagcaagcucaaccgggagaagaucgacggcgugaagcuggaguccaugggcgucuaccagauccuggccaucuacagcacgguggccagcucccucgugcugcuggucagccucggggccaucuccuucuggaugugcagcaacggcucccugcagugcaccaucugcaucuga

SEQ ID NO: 66496 - RNA, 1698 nt, Artificial Sequence
  derived and/or modified CDS sequence (opt1) from hemagglutinin__InfluenzaA__ACI32736
augaaggugaagcugcucguccugcugugcaccuucaccgccacguacgccgacaccaucugcaucggcuaccacgcgaacaacagcaccgacaccguggacacggugcucgagaagaacgucaccgugacccacuccgugaaccugcuggaggacagccacaacgggaagcucugccugcugaagggcaucgcgccccuccagcuggggaacugcuccgucgccggcuggauccuggggaacccggagugcgagcuccugaucagccgcgaguccuggagcuacaucguggagaagcccaaccccgagaacgggaccugcuaccccggccacuucgccgacuacgaggagcugcgggagcagcucuccagcguguccagcuucgagcgcuucgagaucuucccgaaggaguccagcuggcccaaccacacggccaccggggucuccgccagcugcucccacaacggcaagagcuccuucuacaagaaccugcuguggcucaccgggaagaacggccuguaccccaaccugagcaaguccuacgccaacaacaaggagaaggaggugcucgugcuguggggcguccaccacccgcccaacaucggcgaccagcgggcccuguaccacaccgagaacgccuacgugagcguggucagcucccacuacagccgcaaguucacgcccgagaucgcgaagcggcccaaggugcgcgaccaggagggccggaucaacuacuacuggacccuccuggagcccggggacaccaucaucuucgaggccaacggcaaccugaucgccccgcgcuacgccuucgcccucucccggggguucggcagcggcaucaucaacuccaacgcgcccauggacgagugcgacgccaagugccagacgccccagggggccaucaacagcucccugcccuuccagaacgugcacccggucaccaucggcgagugccccaaguacgugcgcagcgccaagcugcggauggugaccgggcuccgcaacauccccuccauccagagccggggccuguucggggccaucgcgggcuucaucgagggcggguggaccggcauggucgacgggugguacggcuaccaccaccagaacgagcagggguccggcuacgccgccgaccagaaguccacccagaacgccaucaacggcaucacgaacaaggugaacagcgugaucgagaagaugaacacccaguucaccgccgucgggaaggaguucaacaagcuggagcgccggauggagaaccucaacaagaagguggacgacggcuucaucgacaucuggaccuacaacgcggagcugcugguccuccuggagaacgagcgcacgcuggacuuccacgacagcaacgugcggaaccucuacgagaaggugaagucccagcugaagaacaacgccaaggagaucgggaacggcugcuucgaguucuaccacaagugcaacgacgagugcauggagagcgucaagaacgggaccuacgacuaccccaaguacuccgaggagagcaagcugaaccgcgagaagaucgacggcgugaagcucgaguccaugggcguguaccagauccuggccaucuacagcaccgucgccagcucccuggugcuccuggugagccugggggccaucuccuucuggaugugcagcaacggcucccuccagugccggaucugcaucuga

SEQ ID NO: 66497 - RNA, 1698 nt, Artificial Sequence
  derived and/or modified CDS sequence (opt1) from hemagglutinin__InfluenzaA__ACI32737
augaaggugaagcugcucguccugcugugcaccuucaccgccacguacgccgacaccaucugcaucggcuaccacgcgaacaacagcaccgacaccguggacacggugcucgagaagaacgucaccgugacccacuccgugaaccugcuggagaacagccacaacgggaagcucugccugcugaagggcaucgcgccccuccagcuggggaacugcuccgucgccggcuggauccuggggaacccggagugcgagcuccugauccccaaggagagcugguccuacaucguggagauccccaaccccgagaacgggaccugcuacccgggcuacuucgccgacuacgaggagcugcgcgagcagcucagcuccgugagcuccuucgagcgguucgagaucuuccccaaggagagcuccuggcccaaccacacggucaccggggugagcgccuccugcagccacaacggcaaguccagcuucuaccgcaaccugcuguggcucaccgggaagaacggccuguaccccaaccuguccaagagcuacgccaacaacaaggagaaggaggugcucguccuguggggcgugcaccacccgcccaacaucggcgaccagcgggcccuguaccacaccgagaacgccuacguguccgucgugagcagccacuacucccgccgguucacgcccgagaucgccaagcgccccaaggugcgggaccaggagggccgcaucaacuacuacuggacccuccuggagccgggggacaccaucaucuucgaggcgaacggcaaccugaucgcgccccgguucgccuucgcccucagccgcgggcugggcuccggcaucaucaccagcaacgcccccauggacgagugcgacgccaagugccagacgccccagggggccaucaacuccagccugccguuccagaacguccaccccgugaccaucggcgagugccccaaguacgugcgguccgccaagcuccgcauggucaccgggcugcggaacauccccagcauccagucccgcggccuguucggggccaucgccggcuucaucgagggcggguggaccggcaugguggacgggugguacggcuaccaccaccagaacgagcaggggagcggcuacgcggccgaccagaaguccacgcagaacgccaucaacggcaucaccaacaaggugaacagcgucaucgagaagaugaacacccaguucaccgccguggggaaggaguucaacaagcucgagcggcgcauggagaaccugaacaagaaggucgacgacggcuuccuggacaucuggacguacaacgccgagcuccuggugcugcucgagaacgagcggacccuggacuuccacgacuccaacgugaagaaccuguacgagaaggucaagagccagcuccgcaacaacgcgaaggagaucgggaacggcugcuucgaguucuaccacaagugcaacgacgagugcauggaguccgugaagaacgggaccuacgacuacccgaaguacagcgaggaguccaagcugaaccgggagaagaucgacggcgugaagcuggagagcaugggcgucuaccagauccucgccaucuacuccaccguggccagcagccuggugcugcucgucucccugggggccaucagcuucuggaugugcuccaacggcagccugcagugccgcaucugcaucuga

SEQ ID NO: 66498 - RNA, 1698 nt, Artificial Sequence
  derived and/or modified CDS sequence (opt1) from hemagglutinin__InfluenzaA__ACI32739
augaaggugaagcugcucauccugcugugcaccuucaccgccacguacgccgacaccaucugcaucggcuaccacgcgaacaacagcaccgacaccgucgacacggugcucgagaagaacgugaccgucacccacuccgugaaccugcuggaggacagccacaacgggaagcucugccugcugaagggcaucgcgccccuccagcuggggaacugcuccguggccggcuggauccuggggaacccggagugcgagcuccugaucagcaaggaguccuggagcuacaucgucgagacccccaaccccgagaacggcacgugcuaccccggcuacuucgccgacuacgaggagcugcgcgagcagcucuccagcguguccagcuucgagcgguucgagaucuucccgaaggaguccagcuggcccaaccacaccgugaccggggucuccgccagcugcucccacaacggcaagagcuccuucuaccgcaaccugcuguggcucaccgggaagaacggccuguaccccaaccugagcaaguccuacgccaacaacaaggagaaggaggugcucauccuguggggcgugcaccacccgcccaacaucgggaaccagcggacgcuguaccacaccgagaacgccuacgucagcguggugagcucccacuacagccgccgguucacccccgagaucaccaagcgccccaagguccgggaccaggagggccgcaucaacuacuacuggacgcuccuggagcccggggacaccaucaucuucgaggccaacggcaaccugaucgccccgugguacgcguucgcccucucccggggguucggcagcggcaucaucaccuccaacgcccccauggacgagugcgacgccaagugccagacgccccagggggccaucaacagcucccugcccuuccagaacgugcacccggugaccaucggcgagugccccaaguacguccgcagcgcgaagcugcggauggugaccgggcuccgcaacauccccuccauccagagccggggccuguucggggccaucgccggcuucaucgagggcggguggaccggcaugguggacgggugguacggcuaccaccaccagaacgagcagggguccggcuacgccgccgaccagaaguccacccagaacgcgaucaacggcaucacgaacaaggucaacagcgugaucgagaagaugaacacccaguucaccgccguggggaaggaguucaacaagcuggagcgccggauggagaaccucaacaagaaggucgacgacggcuuccuggacaucuggaccuacaacgccgagcugcucgugcugcuggagaacgagcgcacgcucgacuuccacgacagcaacgucaagaaccuguacgagaaggugaagucccagcugaagaacaacgccaaggagaucgggaacggcugcuucgaguucuaccacaagugcaacaacgagugcauggagagcgugaagaacgggaccuacgacuaccccaaguacuccgaggagagcaagcucaaccgggagaagaucgacggcgucaagcuggaguccaugggcguguaccagauccuggccaucuacagcaccguggcgagcucccucguccugcuggugagccucggggccaucuccuucuggaugugcagcaacggcucccugcagugcaagaucugcaucuga

SEQ ID NO: 66499 - RNA, 1698 nt, Artificial Sequence
  derived and/or modified CDS sequence (opt1) from hemagglutinin__InfluenzaA__ACI32740
augaaggugaagcugcucauccugcugugcaccuucaccgccacguacgccgacaccaucugcaucggcuaccacgcgaacaacagcaccgacaccgucgacacggugcucgagaagaacgugaccgucacccacuccgugaaccugcuggaggacagccacaacgggaagcucugccugcugaagggcaucgcgccccuccagcuggggaacugcuccguggccggcuggauccuggggaacccggagugcgagcuccugaucagcaaggaguccuggagcuacaucgucgagacccccaaccccgagaacggcgccugcuaccccggcuacuucgccgacuacgaggagcugcgcgagcagcucuccagcguguccagcuucgagcgguucgagaucuucccgaaggaguccagcuggcccaagcacacggugaccggggucuccgccagcugcucccacaacggcaagagcuccuucuaccgcaaccugcuguggcucaccgggaagaacggccuguaccccaaccugagcaaguccuacgccaacaacaaggagaaggaggugcucauccuguggggcgugcaccacccgcccaacaucggggaccagcggacccuguaccacacggagaacgccuacgucagcguggugagcucccacuacagccgccgguucacccccgagaucaccaagcgccccaagguccgggaccaggagggccgcaucaacuacuacuggacccuccuggagcccggggacacgaucaucuucgaggccaacggcaaccugaucgcgccgugguacgccuucgcccucucccggggguucggcagcggcaucaucaccuccaacgcccccauggacgagugcgacgccaagugccagacgccccagggggcgaucaacagcucccugcccuuccagaacgugcacccggugaccaucggcgagugccccaaguacguccgcagcgccaagcugcggauggugaccgggcuccgcaacauccccuccauccagagccggggccuguucggggccaucgccggcuucaucgagggcggguggaccggcaugguggacgggugguacggcuaccaccaccagaacgagcagggguccggcuacgccgcggaccagaaguccacccagaacgccaucaacggcaucaccaacaaggucaacagcgugaucgagaagaugaacacgcaguucaccgccguggggaaggaguucaacaagcuggagcgccggauggagaaccucaacaagaaggucgacgacggcuuccuggacaucuggaccuacaacgccgagcugcucgugcugcuggagaacgagcgcacccucgacuuccacgacagcaacgucaagaaccuguacgagaaggugaagucccagcugaagaacaacgccaaggagaucgggaacggcugcuucgaguucuaccacaagugcaacaacgagugcauggagagcgugaagaacgggacguacgacuaccccaaguacuccgaggagagcaagcucaaccgggagaagaucgacggcgucaagcuggacuccaugggcguguaccagauccuggcgaucuacagcaccguggccagcucccucguccugcuggugagccucggggccaucuccuucuggaugugcccgaacggcagccugcagugcaccaucugcaucuga

SEQ ID NO: 66500 - RNA, 1698 nt, Artificial Sequence
  derived and/or modified CDS sequence (opt1) from hemagglutinin__InfluenzaA__ACI32741
augaaggugaagcugcucauccugcugugcaccuucaccgccacguacgccgacaccaucugcaucggcuaccacgcgaacaacagcaccgacaccgucgacacggugcucgagaagaacgugaccgucacccacuccgugaaccugcuggaggacagccacaacgggaagcucugccugcugaagggcaucgcgccccuccagcuggggaacugcuccguggccggcuggauccuggggaacccggagugcgagcuccugaucagcaaggaguccuggagcuacaucgucgagacccccaaccccgagaacggcgccugcuaccccggcuacuucgccgacuacgaggagcugcgcgagcagcucuccagcguguccagcuucgagcgguucgagaucuucccgaaggaguccagcuggcccaagcacacggugaccggggucuccgccagcugcucccacaacggcaagagcuccuucuaccgcaaccugcuguggcucaccgggaagaacggccuguaccccaaccugagcaaguccuacgccaacaacaaggagaaggaggugcucauccuguggggcgugcaccacccgcccaacaucggggaccagcggacccuguaccacacggagaacgccuacgucagcguggugagcucccacuacagccgccgguucacccccgagaucaccaagcgccccaagguccgggaccaggagggccgcaucaacuacuacuggacccuccuggagcccggggacacgaucaucuucgaggccaacggcaaccugaucgcgccgugguacgccuucgcccucucccggggguucggcagcggcaucaucaccuccaacgcccccauggacgagugcgacgccaagugccagacgccccagggggcgaucaacagcucccugcccuuccagaacgugcacccggugaccaucggcgagugccccaaguacguccgcagcgccaagcugcggauggugaccgggcuccgcaacauccccuccauccagagccggggccuguucggggccaucgccggcuucaucgagggcggguggaccggcaugguggacgggugguacggcuaccaccaccagaacgagcagggguccggcuacgccgcggaccagaaguccacccagaacgccaucaacggcaucaccaacaaggucaacagcgugaucgagaagaugaacacgcaguucaccgccguggggaaggaguucaacaagcuggagcgccggauggagaaccucaacaagaaggucgacgacggcuuccuggacaucuggaccuacaacgccgagcugcucgugcugcuggagaacgagcgcacccucgacuuccacgacagcaacgucaagaaccuguacgagaaggugaagucccagcugaagaacaacgccaaggagaucgggaacggcugcuucgaguucuaccacaagugcaacaacgagugcauggagagcgugaagaacgggacguacgacuaccccaaguacuccgaggagagcaagcucaaccgggagaagaucgacggcgucaagcuggacuccaugggcguguaccagauccuggcgaucuacagcaccguggccagcucccucguccugcuggugagccucggggccaucuccuucuggaugugcccgaacggcagccugcagugcaagaucugcaucuga

SEQ ID NO: 66501 - RNA, 1698 nt, Artificial Sequence
  derived and/or modified CDS sequence (opt1) from hemagglutinin__InfluenzaA__ACI32742
augaaggugaagcugcucauccugcugugcaccuucaccgccacguacgccgacaccaucugcaucggcuaccacgcgaacaacagcaccgacaccgucgacacggugcucgagaagaacgugaccgucacccacuccgugaaccugcuggaggacagccacaacgggaagcucugccugcugaagggcaucgcgccccuccagcuggggaacugcuccguggccggcuggauccuggggaacccggagugcgagcuccugaucagcaaggaguccuggagcuacaucgucgagacccccaaccccgagaacggcacgugcuaccccggcuacuucgccgacuacgaggagcugcgcgagcagcucuccagcguguccagcuucgagcgguucgagaucuucccgaaggaguccagcuggcccaaccacaccgugaccggggucuccgccagcugcucccacaacggcaagagcuccuucuaccgcaaccugcuguggcucaccgggaagaacggccuguaccccaaccugagcaaguccuacgccaacaacaaggagaaggaggugcucauccuguggggcgugcaccacccgcccaacaucggggaccagcggacgcuguaccacaccgagaacgccuacgucagcguggugagcucccacuacagccgccgguucacccccgagaucaccaagcgccccaagguccgggaccaggagggccgcaucaacuacuacuggacgcuccuggagcccggggacaccaucaucuucgaggccaacggcaaccugaucgccccgugguacgcguucgcccucucccggggguucggcagcggcaucaucaccuccaacgcccccauggacgagugcgacgccaagugccagacgccccagggggccaucaacagcucccugcccuuccagaacgugcacccggugaccaucggcgagugccccaaguacguccgcagcgcgaagcugcggauggugaccgggcuccgcaacauccccuccauccagagccggggccuguucggggccaucgccggcuucaucgagggcggguggaccggcaugguggacgggugguacggcuaccaccaccagaacgagcagggguccggcuacgccgccgaccagaaguccacccagaacgcgaucaacggcaucacgaacaaggucaacagcgugaucgagaagaugaacacccaguucaccgccguggggaaggaguucaacaagcuggagcgccggauggagaaccucaacaagaaggucgacgacggcuuccuggacaucuggaccuacaacgccgagcugcucgugcugcuggagaacgagcgcacgcucgacuuccacgacagcaacgucaagaaccuguacgagaaggugaagucccagcugaagaacaacgccaaggagaucgggaacggcugcuucgaguucuaccacaagugcaacaacgagugcauggagagcgugaagaacgggaccuacgacuaccccaaguacuccgaggagagcaagcucaaccgggagaagaucgacggcgucaagcuggacuccaugggcguguaccagauccuggccaucuacagcaccguggcgagcucccucguccugcuggugagccucggggccaucuccuucuggaugugcagcaacggcucccugcagugcaagaucugcaucuga

SEQ ID NO: 66502 - RNA, 1698 nt, Artificial Sequence
  derived and/or modified CDS sequence (opt1) from hemagglutinin__InfluenzaA__ACI32743
augaaggugaagcugcucauccugcugugcaccuucaccgccacguacgccgacaccaucugcaucggcuaccacgcgaacaacagcaccgacaccgucgacacggugcucgagaagaacgugaccgucacccacuccgugaaccugcuggaggacagccacaacgggaagcucugccugcugaagggcaucgcgccccuccagcuggggaacugcuccguggccggcuggauccuggggaacccggagugcgagcuccugaucagcaaggaguccuggagcuacaucgucgagacccccaaccccgagaacggcgccugcuaccccggcuacuucgccgacuacgaggagcugcgcgagcagcucuccagcguguccagcuucgagcgguucgagaucuucccgaagaaguccagcuggcccaaccacacggugaccggggucuccgccagcugcucccacaacggcaagagcuccuucuaccgcaaccugcuguggcucaccgggaagaacggccuguaccccaaccugagcaaguccuacgccaacaacaaggagaaggaggugcucauccuguggggcgugcaccacccgcccaacaucgggaaccagcggacccuguaccacacggagaacgccuacgucagcguggugagcucccacuacagccgccgguucacccccgagaucaccaagcgccccaagguccgggaccaggagggccgcaucaacuacuacuggacccuccuggagcccggggacacgaucaucuucgaggccaacggcaaccugaucgcgccgugguacgccuucgcccucucccggggguucggcagcggcaucaucaccuccaacgcccccauggacgagugcgacgccaagugccagacgccccagggggcgaucaacagcucccugcccuuccagaacgugcacccggugaccaucggcgagugccccaaguacguccgcagcgccaagcugcggauggugaccgggcuccgcaacauccccuccauccagagccggggccuguucggggccaucgccggcuucaucgagggcggguggaccggcaugguggacgggugguacggcuaccaccaccagaacgagcagggguccggcuacgccgcggaccagaaguccacccagaacgccaucaacggcaucaccaacaaggucaacagcgugaucgagaagaugaacacgcaguucaccgccguggggaaggaguucaacaagcuggagcgccggauggagaaccucaacaagaaggucgacgacggcuuccuggacaucuggaccuacaacgccgagcugcucgugcugcuggagaacgagcgcacccucgacuuccacgacagcaacgucaagaaccuguacgagaaggugaagucccagcugaagaacaacgccaaggagaucgggaacggcugcuucgaguucuaccacaagugcaacaacgagugcauggagagcgugaagaacgggacguacgacuaccccaaguacuccgaggagagcaagcucaaccgggagaagaucgacggcgucaagcuggacuccaugggcguguaccagauccuggcgaucuacagcaccguggccagcucccucguccugcuggugagccucggggccaucuccuucuggaugugcagcaacggcucccugcagugccgcaucugcaucuga

SEQ ID NO: 66503 - RNA, 1701 nt, Artificial Sequence
  derived and/or modified CDS sequence (opt1) from hemagglutinin__InfluenzaA__ACJ09818
augaagaccaucaucgcccugagcuacauccucugccugguguucgcccagaagcugcccggcaacgacaacuccaccgcgacgcucugccuggggcaccacgccgucccgaacggcaccaucgugaagaccaucaccaacgaccagguggaggucacgaacgccaccgagcuggugcagagcuccagcaccggggagaucugcgacagcccccaccagauccucgacggcgagaacugcacccugaucgacgcccugcucggggacccccagugcgacggcuuccagaacaagaagugggaccuguucguggagcgcagcaaggccuacuccaacugcuaccccuacgacgucccggacuacgcgagccugcggucccucguggccagcuccggcacgcuggaguucaacaacgagagcuucaacuggaccggggugacccagaacggcaccuccagcgccugcauccgccgguccaacaacagcuucuucucccgccugaacuggcucacgcaccugaaguucaaguaccccgcccugaacgucaccaugcccaacaacgagaaguucgacaagcucuacaucuggggcgugcaccaccccgggaccgacaacgaccagaucuuccuguacgcgcaggccagcgggcggaucaccguguccacgaagcgcagccagcagaccgucaucccgaacaucggcagccggccccgcgugcggaacauccccucccgcaucagcaucuacuggaccaucgugaagcccggcgacauccugcucaucaacuccaccgggaaccugaucgccccgcggggcuacuucaagauccgcagcgggaaguccagcaucaugcgguccgacgcccccaucggcaagugcaacagcgagugcaucacgcccaacggcuccauccccaacgacaagccguuccagaacgucaaccgcaucaccuacggggccugcccccgguacgugaagcagaacacccugaagcucgcgaccggcaugcgcaacgugcccgagaagcagacgcgggggaucuucggcgccaucgccggguucaucgagaacggcugggagggcauggucgacgggugguacggcuuccgccaccagaacagcgaggggaucggccaggccgccgaccugaaguccacccaggcggccaucgaccagaucaacgggaagcugaaccggcucaucggcaagaccaacgagaaguuccaccagaucgagaaggaguucagcgagguggagggccgcauccaggaccuggagaaguacguggaggacaccaagaucgaccugugguccuacaacgccgagcuccuggucgcccuggagaaccagcacacgaucgaccucaccgacagcgagaugaacaagcuguucgagaagaccaagaagcagcugcgggagaacgccgaggacauggggaacggcugcuucaagaucuaccacaagugcgacaacgcgugcaucggguccauccgcaacggcaccuacgaccacgacguguaccgcgacgaggcccucaacaaccgguuccagaucaaggggguggagcugaaguccggcuacaaggacuggauccuguggaucuccuucgccaugagcugcuuccuccugugcgucgcccugcucggcuucaucaugugggccugccagaaggggaacauccgcugcaacaucugcaucuga

SEQ ID NO: 66504 - RNA, 1683 nt, Artificial Sequence
  derived and/or modified CDS sequence (opt1) from hemagglutinin__InfluenzaA__ACJ67533
auggagaccaucagccugaucaccauccuccugguggucacggccuccaacgccgacaagaucugcaucggccaccagagcaccaacuccaccgagaccguggacacgcugaccgagaccaacgugcccgucacccacgcgaaggagcuccugcacacggagcacaacgggaugcugugcgccaccagccucggccacccgcugauccuggacacgugcaccaucgaggggcucguguacggcaaccccuccugcgaccugcugcucgaggggcgcgaguggagcuacaucguggagcgguccagcgccgucaacgggaccugcuaccccggcaacguggagaaccuggaggagcugcgcacccucuucuccagcgccuccagcuaccagcggauccagaucuuccccgacaccaccuggaacgugacguacaccggcaccucccgcgccugcagcggcuccuucuaccggagcaugcgcuggcugacccagaaguccggguucuacccgguccaggacgcgcaguacacgaacaaccggggcaagagcauccuguucgugugggggauccaccacccgcccaccuacgccgagcagaccaaccucuacauccgcaacgacaccacgaccuccgugaccaccgaggaccugaaccggacguucaagcccgucaucggcccccgcccccuggugaacggccuccaggggcggaucgacuacuacuggagcgugcugaagcccggccagacccugcgcguccggagcaacgggaaccucaucgcccccugguacggccacgugcuguccggcgggagccacggccgcauccugaagaccgaccucaaguccgggagcugcgugguccagugccagaccgagaagggcgggcugaacuccacgcugccguuccacaacaucagcaaguacgccuucgggaccugccccaaguacgugcgggugaacucccucaagcuggcggucggccugcgcaacgugcccgcccggagcucccgcggccucuucggcgccaucgccggguucaucgagggcggguggcccggccugguggccggcugguacggguuccagcacagcaacgaccagggcgucgggauggcggccgaccgggacuccacccagaaggccaucgacaagaucaccagcaaggugaacaacaucgucgacaagaugaacaagcaguacgagaucaucgaccacgaguucuccgagguggagacgcgccugaacaugaucaacaacaagaucgacgaccagauccaggacgugugggccuacaacgccgagcuccugguccugcucgagaaccagaagacccuggacgagcacgacgcgaacgugaacaaccuguacaacaaggugaagcgggcccucggcagcaacgccauggaggacgggaagggcugcuucgagcuguaccacaagugcgacgaccagugcauggagaccauccgcaacggcaccuacaaccgccggaaguaccgcgaggagucccggcuggagcgccagaagaucgagggggucaagcucgagagcgagcggaccuacaagauccugacgaucuacuccaccguggccagcucccuggugcucgccaugggcuucgcggccuuccuguucugggccaugagcaacgggagcugccgcugcaacaucugcaucuga

SEQ ID NO: 66505 - RNA, 1704 nt, Artificial Sequence
  derived and/or modified CDS sequence (opt1) from hemagglutinin__InfluenzaA__ACJ68607
auggagaagaucgugcugcuccuggccaucgucagccuggugaaguccgaccagaucugcaucggcuaccacgccaacaacagcaccgagcaggucgacaccaucauggagaagaacgugacggugacccacgcgcaggacauccucgagaagacccacaacgggaagcugugcgaccuggacggcgugaagccccucauccugggggacugcuccgucgccggcuggcugcucgggaacccgaugugcgacgaguucaucaacgugcccgaguggagcuacaucguggagaaggccaaccccgccaacgaccugugcuaccccggcaacuucaacgacuacgaggagcugaagcaccuccugucccgcaucaaccacuucgagaagauccagaucauccccaagagcuccuggagcgaccacgaggccuccagcggcgucuccagcgcgugcccguaccaggggacccccuccuucuuccggaacgugguguggcugaucaagaagaacaacacguaccccaccaucaagcgcagcuacaacaacaccaaccaggaggaccuccugauccuguggggcauccaccacuccaacgacgccgccgagcagaccaagcucuaccagaacccgacgaccuacaucagcgucgggaccuccacccugaaccagcggcuggugcccaagaucgccacgcgcagcaaggugaacggccaguccgggcggauggacuucuucuggaccauccucaagcccaacgacgcgaucaacuucgagagcaacggcaacuucaucgcccccgaguacgccuacaagaucgucaagaagggcgacagcgccaucaugaaguccgagguggaguacgggaacugcaacaccaagugccagaccccgaucggcgccaucaacagcuccaugcccuuccacaacauccacccccugacgaucggggagugccccaaguacgucaagagcaacaagcuggugcucgcgaccggccugcgcaacuccccgcugcgggagcgccggcgcaagcggggccucuucggggccaucgccggcuucaucgagggcggguggcaggggaugguggacggcugguacggcuaccaccacagcaacgagcagggguccggcuacgccgccgacaaggagagcacccagaaggcgaucgacggggugaccaacaaggucaacuccaucaucgacaagaugaacacgcaguucgaggccgugggccgcgaguucaacaaccuggagcggcgcaucgagaaccugaacaagaagauggaggacggguuccucgacguguggaccuacaacgccgagcugcugguccucauggagaacgagcggacccuggacuuccacgacagcaacgugaagaaccuguacgacaagguccgccuccagcugcgggacaacgccaaggagcugggcaacggcugcuucgaguucuaccacaagugcgacaacgagugcauggaguccgugcgcaacgggaccuacgacuacccccaguacagcgaggaggcccggcucaagcgcgaggagaucuccggcgugaagcuggagagcaucgggacguaccagauccuguccaucuacagcaccgucgcguccagccucgcccuggccaucaugguggccggccugucccucuggaugugcagcaacgggagccugcagugccggaucugcaucuga

SEQ ID NO: 66506 - RNA, 1704 nt, Artificial Sequence
  derived and/or modified CDS sequence (opt1) from hemagglutinin__InfluenzaA__ACJ68609
auggagaagaucgugcugcuccuggccaucgucagccuggugaaguccgaccagaucugcaucggcuaccacgccaacaacagcaccgagcaggucgacaccaucauggagaagaacgugacggugacccacgcgcaggacauccucgagaagacccacaacgggaagcugugcgaccuggacggcgugaagccccucauccugcgcgacugcuccgucgccggguggcugcucggcaacccgaugugcgacgaguucaucaacgugcccgaguggagcuacaucguggagaaggccaaccccgccaacgaccugugcuaccccgggaacuucaacgacuacgaggagcugaagcaccuccugucccggaucaaccacuucgagaagauccagaucauccccaagagcuccuggagcgaccacgaggccuccagcggcgucuccagcgcgugcccguaccagggcacccccuccuucuuccgcaacgugguguggcugaucaagaagaacaacacguaccccaccaucaagcggagcuacaacaacaccaaccaggaggaccuccugauccugugggggauccaccacuccaacgacgccgccgagcagaccaagcucuaccagaacccgacgaccuacaucagcgucggcaccuccacccugaaccagcgccuggugcccaagaucgccacgcggagcaaggugaacgggcaguccggccgcauggacuucuucuggaccauccucaagcccaacgacgcgaucaacuucgagagcaacgggaacuucaucgcccccgaguacgccuacaagaucgucaagaagggcgacagcgccaucaugaaguccgagguggaguacggcaacugcaacaccaagugccagaccccgaucggggccaucaacagcuccaugcccuuccacaacauccacccccugacgaucggcgagugccccaaguacgucaagagcaacaagcuggugcucgcgaccgggcugcggaacuccccgcugcgcgagcggcgccggaagcgcggccucuucggcgccaucgccggguucaucgagggcggguggcagggcaugguggacgggugguacggcuaccaccacagcaacgagcagggcuccggguacgccgccgacaaggagagcacccagaaggcgaucgacggcgugaccaacaaggucaacuccaucaucgacaagaugaacacgcaguucgaggccguggggcgggaguucaacaaccuggagcgccggaucgagaaccugaacaagaagauggaggacggcuuccucgacguguggaccuacaacgccgagcugcugguccucauggagaacgagcgcacccuggacuuccacgacagcaacgugaagaaccuguacgacaagguccggcuccagcugcgcgacaacgccaaggagcuggggaacggcugcuucgaguucuaccacaagugcgacaacgagugcauggaguccgugcggaacggcaccuacgacuacccccaguacagcgaggaggcccgccuccggcgcgaggagaucuccggggugaagcuggagagcaucggcacguaccagauccuguccaucuacagcaccgucgcguccagccucgcccuggccaucaugguggccgggcugucccucuggaugugcagcaacggcagccugcagugccgcaucugcaucuga

SEQ ID NO: 66507 - RNA, 1704 nt, Artificial Sequence
  derived and/or modified CDS sequence (opt1) from hemagglutinin__InfluenzaA__ACJ68610
auggagaagaucgugcuguuccucgccaucgucagccuggugaaguccgaccagaucugcaucggcuaccacgccaacaacagcaccgagcaggucgacaccaucauggagaagaacgugacggugacccacgcgcaggacauccuggagaagacccacaacgggaagcucugcgaccuggacggcgugaagccccugauccuccgcgacugcuccgucgccggguggcugcugggcaacccgaugugcgacgaguucaucaacgugcccgaguggagcuacaucguggagaaggccaaccccgccaacgaccucugcuaccccgggaacuucaacgacuacgaggagcugaagcaccuccugucccggaucaaccacuucgagaagauccagaucauccccaagagcuccuggagcgaccacgaggccuccagcggcgucuccagcgcgugcccguaccagggcacccccuccuucuuccgcaacgugguguggcugaucaagaagaacaacacguaccccaccaucaagcggagcuacaacaacaccaaccaggaggaccugcucauccugugggggauccaccacuccaacgacgccgccgagcagaccaagcuguaccagaacccgacgaccuacaucagcgucggcaccuccacccucaaccagcgccuggugcccaagaucgccacgcggagcaaggugaacgggcaguccggccgcauggacuucuucuggaccauccugaagcccaacgacgcgaucaacuucgagagcaacgggaacuucaucgcccccgaguacgccuacaagaucgucaagaagggcgacagcgccaucaucaaguccgagguggaguacggcaacugcaacaccaagugccagaccccgaucggggccaucaacagcuccaugcccuuccacaacauccacccccucacgaucggcgagugccccaaguacgucaagagcaacaagcuggugcuggcgaccgggcuccggaacuccccgcugcgcgagcggcgccggaagcgcggccuguucggcgccaucgccggguucaucgagggcggguggcagggcaugguggacgggugguacggcuaccaccacagcaacgagcagggcuccggguacgccgccgacaaggagagcacccagaaggcgaucgacggcgugaccaacaaggucaacuccaucaucgacaagaugaacacgcaguucgaggccguggggcgggaguucaacaaccucgagcgccggaucgagaaccugaacaagaagauggaggacggcuuccuggacguguggaccuacaacgccgagcuccugguccugauggagaacgagcgcacccucgacuuccacgacagcaacgugaagaaccuguacgacaagguccggcugcagcuccgcgacaacgccaaggagcuggggaacggcugcuucgaguucuaccacaagugcgacaacgagugcauggaguccgugcggaacggcaccuacgacuacccccaguacagcgaggaggcccgccugaagcgggaggagaucuccggggugaagcucgagagcaucggcacguaccagauccuguccaucuacagcaccgucgcguccagccuggcccucgccaucaugguggccgggcugucccuguggaugugcagcaacggcagccuccagugccgcaucugcaucuga

SEQ ID NO: 66508 - RNA, 1704 nt, Artificial Sequence
  derived and/or modified CDS sequence (opt1) from hemagglutinin__InfluenzaA__ACJ68611
auggagaagaucgugcugcuccuggccaucgucagccuggugaaguccgaccagaucugcaucggcuaccacgccaacaacagcaccgagcaggucgacaccaucauggagaagaacgugacggugacccacgcgcaggacauccucgagaagacccacaacgggaagcugugcgaccuggacggcgugaagccccucauccugcgcgacugcuccgucgccggguggcugcucggcaacccgaugugcgacgaguucaucaacgugcccgaguggagcuacaucguggagaaggccaaccccgccaacgaccugugcuaccccgggaacuucaacgacuacgaggagcugaagcaccuccugucccggaucaaccacuucgagaagauccagaucauccccaagagcuccuggagcgaccacgaggccucccugggcgucagcuccgcgugcccguaccagggcaugcccagcuucuuccgcaacgugguguggcucaucaagaagaacaacaccuaccccacgaucaagcgguccuacaacaacaccaaccaggaggaccugcugauccucugggggauccaccacagcaacgacgccgccgagcagaccaagcuguaccagaacccgaccacguacaucuccgucggcaccagcacccugaaccagcgccucgugcccaagaucgccacccgguccaaggugaacgggcagagcggccgcauggacuucuucuggacgauccugaagcccaacgacgcgaucaacuucgaguccaacgggaacuucaucgcccccgaguacgccuacaagaucgucaagaagggcgacagcgccaucaugaaguccgaggugggcuacgggaacugcaacaccaagugccagaccccgaucggcgccaucaacagcagcaugcccuuccacaacauccacccccugaccaucggggagugccccaaguacgugaaguccaacaagcucguccuggcgacgggccugcggaacagcccgcuccgcgagcggcgccggaagcgcggccuguucggggccaucgccggcuucaucgagggcggguggcaggggaugguggacggcugguacggcuaccaccacuccaacgagcaggggagcggcuacgccgccgacaaggaguccacccagaaggcgaucgacggggugaccaacaaggucaacagcaucaucgacaagaugaacacccaguucgaggccgugggccgggaguucaacaaccuggagcgccggaucgagaaccucaacaagaagauggaggacggguuccuggacguguggacguacaacgccgagcugcucguccugauggagaacgagcgcacccuggacuuccacgacuccaacgugaagaaccucuacgacaagguccggcugcagcugcgcgacaacgccaaggagcucggcaacggcugcuucgaguucuaccacaagugcgacgacgagugcauggagagcgugcggaacgggaccuacgacuacccccaguacuccgaggaggcccgccugaagcgggaggagaucagcggcgugaagcuggaguccaucgggaccuaccagauccucagcaucuacuccacggucgcgagcucccuggcccuggccaucaugguggccggccucagccuguggaugugcuccaacgggagccugcagugccgcaucugcaucuga

SEQ ID NO: 66509 - RNA, 1704 nt, Artificial Sequence
  derived and/or modified CDS sequence (opt1) from hemagglutinin__InfluenzaA__ACJ68612
auggagaagaucgugcugcuccuggccaucgucagccuggugaaguccgaccagaucugcaucggcuaccacgccaacaacagcaccgagcaggucgacaccaucauggagaagaacgugacggugacccacgcgcaggacauccucgagaagacccacaacgggaagcugugcgaccuggacggcgugaagccccucauccugcgcgacugcuccgucgccggguggcugcucggcaacccgaugugcgacgaguucaucaacgugcccgaguggagcuacaucguggagaaggccaaccccgccaacgaccugugcuaccccgggaacuucaacgacuacgaggagcugaagcaccuccugucccggaucaaccacuucgagaagauccagaucauccccaagagcuccuggccggaccacgaggccagcuccggcgucagcuccgcgugccccuaccagggcacccccagcuucuuccgcaacgugguguggcugaucaagaagaacaacacguacccgaccaucaagcgguccuacaacaacaccaaccaggaggaccuccugauccugugggggauccaccacagcaacaacgccgccgagcagaccaagcucuaccagaaccccacgaccuacaucuccgucggcaccagcacccugaaccugcgccucgugcccaagaucgccacgcgguccaaggugaacgggcagagcggccgcauggacuucuucuggaccauccugaagcccaacgacgcgaucaacuucgaguccaacgggaacuucaucgccccggaguacgccuacaagaucgucaagaagggcgacagcgccaucaugaaguccgagguggaguacggcaacugcaacaccaagugccagacccccaucggggccaucaacagcagcaugcccuuccacaacauccacccccugacgaucggcgagugcccgaaguacgugaaguccaacaagcucguccuggcgaccgggcugcggaacagcccccuccgcgagcggcgccggaagcgcggccuguucggcgccaucgccggguucaucgagggcggguggcagggcaugguggacgggugguacggcuaccaccacuccaacgagcagggcagcggguacgccgccgacaaggaguccacccagaaggcgaucgacggcgugaccaacaaggucaacagcaucaucgacaagaugaacacgcaguucgaggccguggggcgggaguucaacaaccuggagcgccggaucgagaaccucaacaagaagauggaggacggcuuccuggacguguggaccuacaacgccgagcugcucguccugauggagaacgagcgcacccuggacuuccacgacuccaacgugaagaaccucuacgacaagguccggcugcagcugcgcgacaacgccaaggagcucgggaacggcugcuucgaguucuaccacaagugcgacaacgagugcauggagagcgugcggaacggcaccuacgacuacccccaguacuccgaggaggcccgccugaagcgggaggagaucagcggggugaagcuggaguccaucggcgcguaccagauccucagcaucuacuccacggucgccagcucccuggcccuggccaucaugguggccgggcucagccuguggaugugcuccaacggcagccugcagugccgcaucugcaucuga

SEQ ID NO: 66510 - RNA, 1704 nt, Artificial Sequence
  derived and/or modified CDS sequence (opt1) from hemagglutinin__InfluenzaA__ACJ68613
auggagaagaucgugcuguuccucgccaucgucagccacgugaaguccgaccagaucugcaucggcuaccacgccaacaacagcaccgagcaggucgacaccaucauggagaagaacgugacggugacccacgcgcaggacauccuggagaagacccacaacgggaagcugugcgaccucggcggggugaagccccugauccugcgcgacugcuccgucgccggcuggcuccuggggaacccgaugugcgacgaguucaucaacgugcccgaguggagcuacaucguggagaaggccaaccccgccaacgaccugugcuaccccggcaacuucaacgacuacgaggagcucaagcaccuccugucccggaucaaccacuucgagaagauccagaucauccccaagagcuccuggagcgaccacgaggccuccagcggcgucuccagcgugugcccguaccaggggacccccuccuucuuccgcaacguggucuggcugaucaagaagaacaacacguaccccaccaucaagaaguccuacaacaacaccaaccaggaggaccugcugauccucuggggcauccaccacagcaacgacgcggccgagcagaccaagcuguaccagaacccgacgaccuacaucagcguggggaccuccacccugaaccagcggcucgugcccaagaucgccacgcgcagcaaggucaacggccaguccgggcggauggacuucuucuggaccauccugaagcccaacgacgccaucaacuucgagagcaacggcaacuucaucgcgcccgaguacgccuacaagaucgugaagaagggcgacagcgccaucaugaaguccgagguggaguacgggaacugcaacaccaagugccagaccccgaucggcgccaucaacagcuccaugcccuuccacaacauccacccccugacgaucggggagugccccaaguacgucaagagcaacaagcucgugcuggccaccggccugcgcaacuccccgcuccgggagcgccggcgcaagcggggccuguucggggcgaucgccggcuucaucgagggcggguggcaggggaugguggacggcugguacggcuaccaccacagcaacgagcagggguccggcuacgccgccgacaaggagagcacccagaaggccaucgacggggucaccaacaaggugaacuccaucaucgacaagaugaacacgcaguucgaggcggugggccgcgaguucaacaaccuggagcggcgcaucgagaaccucaacaagaagauggaggacggguuccuggacgucuggaccuacaacgccgagcugcucgugcugauggagaacgagcggacccuggacuuccacgacagcaacgucaagaaccucuacgacaaggugcgccugcagcugcgggacaacgccaaggagcucggcaacggcugcuucgaguucuaccacaagugcgacaacgagugcauggaguccgugcgcaacgggaccuacgacuacccccaguacagcgaggaggcccggcugaagcgcgaggagaucuccggcgucaagcuggagagcaucgggacguaccagauccucuccaucuacagcaccguggccuccagccuggcgcuggccaucaugguggccggccucucccuguggaugugcagcaacgggagccugcagugccggaucugcaucuga

SEQ ID NO: 66511 - RNA, 1707 nt, Artificial Sequence
  derived and/or modified CDS sequence (opt1) from hemagglutinin__InfluenzaA__ACJ68614
auggagaagaucgugcugcuccuggccaucgucagccuggugaaguccgaccagaucugcaucggcuaccacgccaacaacagcaccgagcaggucgacaccaucauggagaagaacgugacggugacccacgcgcaggacauccucgagaagacccacaacgggaagcugugcgaccuggacggcgugaagccccucauccugcgcgacugcuccgucgccggguggcugcucggcaacccgaugugcgacgaguuccugaacgugcccgaguggagcuacaucguggagaagaucaaccccgucaacgaccugugcuaccccgggaacuucaacgacuacgaggagcucaagcaccuccugucccggaucaaccacuucgagaagauccagaucauccccaagagcuccuggagcgaccacgaggccuccagcggcguguccagcgccugcccguaccagggccgcuccagcuucuuccggaacguggucuggcugaucaagaagaacaacaccuaccccacgaucaagcgcuccuacaacaacaccaaccaggaggaccugcuggugcucugggggauccaccaccccaacgacgccgcggagcagacccggcuguaccagaacccgaccacguacaucagcgugggcaccuccacccugaaccagcgccucguccccaagcuggccacccggagcaaggugaacgggcaguccggccgcauggaguucuucuggacgauccugaagcccaacgacgccaucaacuucgagagcaacgggaacuucaucgcccccgagaacgcguacaagaucgugaagaagggcgacagcaccaucaugaaguccgagcucgaguacggcaacugcaacaccaagugccagaccccgaucggggccaucaacagcuccaugcccuuccacaacauccacccccugacgaucggcgagugccccaaguacgucaagagcaaccggcuggugcucgccaccgggcugcgcaacuccccgcagggcgagcggcgccggaagaagcgcggccuguucggggccaucgccggcuucaucgagggcggguggcaggggaugguggacggcugguacggcuaccaccacagcaacgagcggggguccggcuacgcggccgacaaggagagcacccagaaggccaucgacggggucaccaacaaggugaacuccaucaucgacaagaugaacacgcaguucgaggccgugggccgcgaguucaacaaccucgagcggcgcaucgagaaccugaacaagaagauggaggacggguuccuggacgucuggaccuacaacgccgagcuccuggugcugauggagaacgagcggacccucgacuuccacgacagcaacgucaagaaccuguacgacaaggugcgccugcagcuccgggacaacgcgaaggagcugggcaacggcugcuucgaguucuaccaccgcugcgacaacgagugcauggaguccgugcgcaacgggaccuacgacuacccccaguacagcgaggaggcccggcugaagcgcgaggagaucuccggcgucaagcucgagagcaucgggacguaccagauccuguccaucuacagcaccguggccuccagccuggcccucgccaucaugguggcgggccugucccuguggaugugcagcaacgggagccuccagugccggaucugcaucuga

SEQ ID NO: 66512 - RNA, 1698 nt, Artificial Sequence
  derived and/or modified CDS sequence (opt1) from hemagglutinin__InfluenzaA__ACK99007
augaaggugaagcugcucguccugcugugcaccuucaccgccacguacgccgacaccaucugcaucggcuaccacgcgaacaacagcaccgacaccguggacacggugcucgagaagaacgucaccgugacccacuccgugaaccugcuggagaacagccacaacgggaagcucugccugcugaagggcaucgcgccccuccagcuggggaacugcuccgucgccggcuggauccuggggaacccggagugcgagcuccugaucagcaaggaguccuggagcuacaucguggagaagcccaaccccgagaacgggaccugcuaccccggccacuucgccgacuacgaggagcugcgcgagcagcucuccagcguguccagcuucgagcgguucgagaucuucccgaaggaguccagcuggcccaaccacacggucaccgggguguccgccagcugcucccacaacggcgagagcuccuucuaccgcaaccugcuguggcucaccgggaagaacggccuguaccccaaccugagcaaguccuacgccaacaacaaggagaaggaggugcucguccuguggggcgugcaccacccgcccaacaucggcgaccagaaggcccuguaccacaccgagaacgccuacgugagcgucgugagcucccacuacagccggaaguucacgcccgagaucgccaagcgccccaaggugcgggaccaggagggccgcaucaacuacuacuggacccuccuggagcccggggacaccaucaucuucgaggcgaacggcaaccugaucgccccgcgguacgccuucgcccucucccgcggguucggcagcggcaucaucaacuccaacgcccccauggacaagugcgacgcgaagugccagacgccccagggggccaucaacagcucccugcccuuccagaacguccacccggugaccaucggcgagugccccaaguacgugcggagcgccaagcugcgcauggucaccgggcuccggaacauccccuccauccagagccgcggccuguucggggccaucgccggcuucaucgagggcggguggaccggcaugguggacgggugguacggcuaccaccaccagaacgagcagggguccggcuacgcggccgaccagaaguccacccagaacgccaucaacggcaucacgaacaaggugaacagcgucaucgagaagaugaacacccaguucaccgccguggggaaggaguucaacaagcuggagcggcgcauggagaaccucaacaagaaggucgacgacggcuucaucgacaucuggaccuacaacgccgagcugcuggugcuccuggagaacgagcggacgcuggacuuccacgacagcaacgugaagaaccucuacgagaaggucaagucccagcugaagaacaacgcgaaggagaucgggaacggcugcuucgaguucuaccacaagugcaacgacgagugcauggagagcgugaagaacgggaccuacgacuaccccaaguacuccgaggagagcaagcugaaccgcgagaagaucgacggcgugaagcucgaguccaugggcgucuaccagauccuggccaucuacagcaccguggccagcucccuggugcuccuggucagccugggggccaucuccuucuggaugugcagcaacggcucccuccagugccggaucugcaucuga

SEQ ID NO: 66513 - RNA, 1698 nt, Artificial Sequence
  derived and/or modified CDS sequence (opt1) from hemagglutinin__InfluenzaA__ACK99008
augaaggugaagcugcucguccugcugugcaccuucaccgccacguacgccgacaccaucugcaucggcuaccacgcgaacaacagcaccgacaccguggacacggugcucgagaagaacgucaccgugacccacuccgugaaccugcuggagaacagccacaacgggaagcucugccugcugaagggcaucgcgccccuccagcuggggaacugcuccgucgccggcuggauccuggggaacccggagugcgagcuccugaucagcaaggaguccuggagcuacaucguggagaagcccaaccccgagaacgggaccugcuaccccggccacuucgccgacuacgaggagcugcgcgagcagcucuccagcguguccagcuucgagcgguucgagaucuucccgaaggaguccagcuggcccaaccacacggucaccgggguguccgccagcugcucccacaacggcgagagcuccuucuaccgcaaccugcuguggcucaccgggaagaacggccuguaccccaaccugagcaaguccuacgccaacaacaaggagaaggaggugcucguccuguggggcgugcaccacccgcccaacaucggcgaccagaaggcccuguaccacaccgagaacgccuacgugagcgucgugagcucccacuacagccggaaguucacgcccgagaucgccaagcgccccaaggugcgggaccaggagggccgcaucaacuacuacuggacccuccuggagcccggggacaccaucaucuucgaggcgaacggcaaccugaucgccccgcgguacgccuucgcccucucccgcggguucggcagcggcaucaucaacuccaacgcccccauggacaagugcgacgcgaagugccagacgccccagggggccaucaacagcucccugcccuuccagaacguccacccggugaccaucggcgagugccccaaguacgugcggagcgccaagcugcgcauggucaccgggcuccggaacauccccuccauccagagccgcggccuguucggggccaucgccggcuucaucgagggcggguggaccggcaugguggacgggugguacggcuaccaccaccagaacgagcagggguccggcuacgcggccgaccagaaguccacccagaacgccaucaacggcaucacgaacaaggugaacagcgucaucgagaagaugaacacccaguucaccgccguggggaaggaguucaacaagcuggagcggcgcauggagaaccucaacaagaaggucgacgacggcuucaucgacaucuggaccuacaacgccgagcugcuggugcuccuggagaacgagcggacgcuggacuuccacgacagcaacgugaagaaccucuacgagaaggucaagucccagcugaagaacaacgcgaaggagaucgggaacggcugcuucgaguucuaccacaagugcaacgacgagugcauggagagcgugaagaacgggaccuacgacuaccccaaguacuccgaggagagcaagcugaaccgcgagaagaucgacggcgugaagcucgaguccauggaggucuaccagauccuggccaucuacagcaccguggccagcucccuggugcuccuggucagccugggcgccaucuccuucuggaugugcagcaacgggucccuccagugccggaucugcaucuga

SEQ ID NO: 66514 - RNA, 1698 nt, Artificial Sequence
  derived and/or modified CDS sequence (opt1) from hemagglutinin__InfluenzaA__ACK99009
augaaggugaagcugcucguccugcugugcaccuucaccgccacguacgccgacaccaucugcaucggcuaccacgcgaacaacagcaccgacaccguggacacggugcucgagaagaacgucaccgugacccacuccgugaaccugcuggagaacagccacaacgggaagcucugccugcugaagggcaucgcgccccuccagcuggggaacugcuccgucgccggcuggauccuggggaacccggagugcgagcuccugaucagcaaggaguccuggagcuacaucguggagaagcccaaccccgagaacgggaccugcuaccccggccacuucgccgacuacgaggagcugcgcgagcagcucuccagcguguccagcuucgagcgguucgagaucuucccgaaggaguccagcuggcccaaccacacggucaccgggguguccgccagcugcucccacaacggcgagagcuccuucuaccgcaaccugcuguggcucaccgggaagaacggccuguaccccaaccugagcaaguccuacgccaacaacaaggagaaggaggugcucguccuguggggcgugcaccacccgcccaacaucggcgaccagaaggcccuguaccacaccgagaacgccuacgugagcgucgugagcucccacuacagccggaaguucacgcccgagaucgccaagcgccccaaggugcgggaccaggagggccgcaucaacuacuacuggacccuccuggagcccggggacaccaucaccuucgaggcgaacggcaaccugaucgccccgcgguacgccuucgcccucucccgcggguucggcagcggcaucaucaacuccaacgcccccauggacaagugcgacgcgaagugccagacgccccagggggccaucaacagcucccugcccuuccagaacguccacccggugaccaucggcgagugccccaaguacgugcggagcgccaagcugcgcauggucaccgggcuccggaacauccccuccauccagagccgcggccuguucggggccaucgccggcuucaucgagggcggguggaccggcaugguggacgggugguacggcuaccaccaccagaacgagcagggguccggcuacgcggccgaccagaaguccacgcagaacgccaucaacggcaucaccaacaaggugaacagcgucaucgagaagaugaacacccaguucaccgccguggggaaggaguucaacaagcuggagcggcgcauggagaaccucaacaagaaggucgacgacggcuucaucgacaucuggacguacaacgccgagcugcuggugcuccuggagaacgagcggacccuggacuuccacgacagcaacgugaagaaccucuacgagaaggucaagucccagcugaagaacaacgcgaaggagaucgggaacggcugcuucgaguucuaccacaagugcaacgacgagugcauggagagcgugaagaacgggaccuacgacuaccccaaguacuccgaggagagcaagcugaaccgcgagaagaucgacggcgugaagcucgaguccaugggcgucuaccagauccuggccaucuacagcaccguggccagcucccuggugcuccuggucagccugggggccaucuccuucuggaugugcagcaacggcucccuccagugccggaucugcaucuga

SEQ ID NO: 66515 - RNA, 1698 nt, Artificial Sequence; identical to SEQ ID NO: 66512
  derived and/or modified CDS sequence (opt1) from hemagglutinin__InfluenzaA__ACK99011

SEQ ID NO: 66516 - RNA, 1698 nt, Artificial Sequence
  derived and/or modified CDS sequence (opt1) from hemagglutinin__InfluenzaA__ACK99012
augaaggugaagcugcucguccugcugugcaccuucaccgccacguacgccgacaccaucugcaucggcuaccacgcgaacaacagcaccgacaccguggacacggugcucgagaagaacgucaccgugacccacuccgugaaccugcuggagaacagccacaacgggaagcucugccugcugaagggcaucgcgccccuccagcuggggaacugcuccgucgccggcuggauccuggggaacccggagugcgagcuccugaucagcaaggaguccuggagcuacaucguggagaagcccaaccccgagaacgggaccugcuaccccggccacuucgccgacuacgaggagcugcgcgagcagcucuccagcguguccagcuucgagcgguucgagaucuucccgaaggaguccagcuggcccaaccacacggucaccgggguguccgccagcugcucccacaacggcgagagcuccuucuaccgcaaccugcuguggcucaccgggaagaacggccuguaccccaaccugagcaaguccuacgccaacaacaaggagaaggaggugcucguccuguggggcgugcaccacccgcccaacaucggcgaccagaaggcccuguaccacaccgagaacgccuacgugagcgucgugagcucccacuacagccggaaguucacgcccgagaucgccaagcgccccaaggugcgggaccaggagggccgcaucaacuacuacuggacccuccuggagcccggggacaccaucaucuucgaggcgaacggcaaccugaucgccccgcgguacgccuucgcccucucccgcggguucggcagcggcaucaucaacuccaacgcccccauggacaagugcgacgcgaagugccagacgccccagggggccaucaacagcucccugcccuuccagaacguccacccggugaccaucggcgagugccccaaguacgugcggagcgccaagcugcgcauggucaccgggcuccggaacauccccuccauccagagccgcggccuguucggggccaucgccggcuucaucgagggcggguggaccggcaugguggacgggugguacggcuaccaccaccagaacgagcagggguccggcuacgcggccgaccagaaguccacccagaacgccaucaacggcaucacgaacaaggugaacagcgucaucgagaagaugaacacccaguucaccgccguggggaaggaguucaacaagcuggagcggcgcauggagaaccucaacaagaaggucgacgacggcuucaucgacaucuggaccuacaacgccgagcugcuggugcuccuggagaacgagcggacgcuggacuuccacgacagcaacgugaagaaccucuacgagaaggucaagucccagcugaagaacaacgcgaaggagaucgggaacggcugcuucgaguucuaccacaagugcaacgacgagugcauggagagcgugaagaacgggaccuacgacuaccccaaguacuccgaggagagcaagcugaaccgcgagaagaucgacggcgugaagcucgaguccaugggcgucuaccagauccuggccaucuacagcaccguggccagcucccuggugcuccugaucagccugggggccaucuccuucuggaugugcagcaacggcucccuccagugccggaucugcaucuga

SEQ ID NO: 66517 - RNA, 1698 nt, Artificial Sequence; identical to SEQ ID NO: 66512
  derived and/or modified CDS sequence (opt1) from hemagglutinin__InfluenzaA__ACK99013

SEQ ID NO: 66518 - RNA, 1698 nt, Artificial Sequence
  derived and/or modified CDS sequence (opt1) from hemagglutinin__InfluenzaA__ACK99014
augaaggugaagcugcucguccugcugugcaccuucaccgccacguacgccgacaccaucugcaucggcuaccacgcgaacaacagcaccgacaccguggacacggugcucgagaagaacgucaccgugacccacuccgugaaccugcuggagaacagccacaacgggaagcucugccugcugaagggcaucgcgccccuccagcuggggaacugcuccgucgccggcuggauccuggggaacccggagugcgagcuccugaucagcaaggaguccuggagcuacaucguggagaagcccaaccccgagaacgggaccugcuaccccggccacuucgccgacuacgaggagcugcgcgagcagcucuccagcguguccagcuucgagcgguucgagaucuucccgaaggaguccagcuggcccaaccacacggucaccgggguguccgccagcugcucccacaacggcgagagcuccuucuaccgcaaccugcuguggcucaccgggaagaacggccuguaccccaaccugagcaaguccuacgccaacaacaaggagaaggaggugcucguccuguggggcgugcaccacccgcccaacaucggcgaccagaaggcccuguaccacaccgagaacgccuacgugagcgucgugagcucccacuacagccggaaguucacgcccgagaucgccaagcgccccaaggugcgggaccaggagggccgcaucaacuacuacuggacccuccuggagcccggggacaccaucaucuucgaggcgaacggcaaccugaucgccccgcgguacgccuucacccucucccgcggguucggcagcggcaucaucaacuccaacgcccccauggacaagugcgacgccaagugccagacgccccagggggcgaucaacagcucccugcccuuccagaacguccacccggugaccaucggcgagugccccaaguacgugcggagcgccaagcugcgcauggucaccgggcuccggaacauccccuccauccagagccgcggccuguucggggccaucgccggcuucaucgagggcggguggaccggcaugguggacgggugguacggcuaccaccaccagaacgagcagggguccggcuacgccgcggaccagaaguccacgcagaacgccaucaacggcaucaccaacaaggugaacagcgucaucgagaagaugaacacccaguucaccgccguggggaaggaguucaacaagcuggagcggcgcauggagaaccucaacaagaaggucgacgacggcuucaucgacaucuggacguacaacgccgagcugcuggugcuccuggagaacgagcggacccuggacuuccacgacagcaacgugaagaaccucuacgagaaggucaagucccagcugaagaacaacgccaaggagaucgggaacggcugcuucgaguucuaccacaagugcaacgacgagugcauggagagcgugaagaacgggaccuacgacuaccccaaguacuccgaggagagcaagcugaaccgcgagaagaucgacggcgugaagcucgaguccaugggcgucuaccagauccuggcgaucuacagcaccguggccagcucccuggugcuccuggucagccugggggccaucuccuucuggaugugcagcaacggcucccuccagugccggaucugcaucuga

SEQ ID NO: 66519 - RNA, 1698 nt, Artificial Sequence; identical to SEQ ID NO: 66512
  derived and/or modified CDS sequence (opt1) from hemagglutinin__InfluenzaA__ACK99016

SEQ ID NO: 66520 - RNA, 1698 nt, Artificial Sequence; identical to SEQ ID NO: 66512
  derived and/or modified CDS sequence (opt1) from hemagglutinin__InfluenzaA__ACK99018

SEQ ID NO: 66521 - RNA, 1698 nt, Artificial Sequence; identical to SEQ ID NO: 66512
  derived and/or modified CDS sequence (opt1) from hemagglutinin__InfluenzaA__ACK99023

SEQ ID NO: 66522 - RNA, 1698 nt, Artificial Sequence
  derived and/or modified CDS sequence (opt1) from hemagglutinin__InfluenzaA__ACK99026
augaaggugaagcugcucguccugcugugcaccuucaccgccacguacgccgacaccaucugcaucggcuaccacgcgaacaacagcaccgacaccguggacacggugcucgagaagaacgucaccgugacccacuccgugaaccugcuggagaacagccacaacgggaagcucugccugcugaagggcaucgcgccccuccagcuggggaacugcuccgucgccggcuggauccuggggaacccggagugcgagcuccugaucagcaaggaguccuggagcuacaucguggagaagcccaaccccgagaacgggaccugcuaccccggccacuucgccgacuacgaggagcugcgcgagcagcucuccagcguguccagcuucgagcgguucgagaucuucccgaaggaguccagcuggcccaaccacacggucaccgggguguccgccagcugcucccacaacggcgagagcuccuucuaccgcaaccugcuguggcucaccgggaagaacggccuguaccccaaccugagcaaguccuacgccaacaacaaggagaaggaggugcucguccuguggggcgugcaccacccgcccaacaucggcgaccagaaggcccuguaccacaccgagaacgccuacgugagcgucgugagcucccacuacagccggaaguucacgcccgagaucgccaagcgccccaaggugcgggaccaggagggccgcaucaacuacuacuggacccuccuggagcccggggacaccaucaucuucgaggcgaacggcaaccugaucgccccgcgguacgccuucgcccucucccgcggguucggcagcggcaucaucaacuccaacgcccccauggacaagugcgacgcgaagugccagacgccccagggggccaucaacagcucccugcccuuccagaacguccacccgaucaccaucggcgagugccccaaguacgugcggagcgccaagcugcgcauggugaccgggcuccggaacauccccuccauccagagccgcggccuguucggggccaucgccggcuucaucgagggcggguggaccggcauggucgacgggugguacggcuaccaccaccagaacgagcagggguccggcuacgcggccgaccagaaguccacccagaacgccaucaacggcaucacgaacaaggugaacagcgugaucgagaagaugaacacccaguucaccgccgucgggaaggaguucaacaagcuggagcggcgcauggagaaccucaacaagaagguggacgacggcuucaucgacaucuggaccuacaacgccgagcugcugguccuccuggagaacgagcggacgcuggacuuccacgacagcaacgugaagaaccucuacgagaaggugaagucccagcugaagaacaacgcgaaggagaucgggaacggcugcuucgaguucuaccacaagugcaacgacgagugcauggagagcgucaagaacgggaccuacgacuaccccaaguacuccgaggagagcaagcugaaccgcgagaagaucgacggcgugaagcucgaguccaugggcguguaccagauccuggccaucuacagcaccgucgccagcucccuggugcuccuggugagccugggggccaucuccuucuggaugugcagcaacggcucccuccagugccggaucugcaucuga

SEQ ID NO: 66523 - RNA, 1698 nt, Artificial Sequence; identical to SEQ ID NO: 66196
  derived and/or modified CDS sequence (opt1) from hemagglutinin__InfluenzaA__ACK99027

SEQ ID NO: 66524 - RNA, 1698 nt, Artificial Sequence
  derived and/or modified CDS sequence (opt1) from hemagglutinin__InfluenzaA__ACK99028
augaaggugaagcugcucguccugcugugcaccuucaccgccacguacgccgacaccaucugcaucggcuaccacgcgaacaacagcaccgacaccguggacacggugcucgagaagaacgucaccgugacccacuccgugaaccugcuggagaacagccacaacgggaagcucugccugcugaagggcaucgcgccccuccagcuggggaacugcuccgucgccggcuggauccuggggaacccggagugcgagcuccugaucagcaaggaguccuggagcuacaucguggagaagcccaaccccgagaacgggaccugcuaccccggccacuucgccgacuacgaggagcugcgcgagcagcucuccagcguguccagcuucgagcgguucgagaucuucccgaaggaguccagcuggcccaaccacacggucaccgggguguccgccagcugcucccacaacggcgagagcuccuucuaccgcaaccugcuguggcucaccgggaagaacggccuguaccccaaccugagcaaguccuacgccaacaacaaggagaaggaggugcucguccuguggggcgugcaccacccgcccaacaucggcgaccagaaggcccuguaccacaccgagaacgccuacgugagcgucgugagcucccacuacagccggaaguucacgcccgagaucgccaagcgccccaaggugcgggaccaggagggccgcaucaacuacuacuggacccuccuggagcccggggacaccaucaucuucgaggcgaacggcaaccugaucgccccgcgguacgccuucgcccucucccgcggguucggcagcggcaucaucaacuccaacgcccccauggacaagugcgacgcgaagugccagacccccaagggggccaucaacagcucccugcccuuccagaacguccacccggugacgaucggcgagugccccaaguacgugcggagcgccaagcugcgcauggucaccgggcuccggaacauccccuccauccagagccgcggccuguucggggccaucgccggcuucaucgagggcggguggaccggcaugguggacgggugguacggcuaccaccaccagaacgagcagggguccggcuacgcggccgaccagaaguccacccagaacgccaucaacggcaucacgaacaaggugaacagcgucaucgagaagaugaacacccaguucaccgccguggggaaggaguucaacaagcuggagcggcgcauggagaaccucaacaagaaggucgacgacggcuucaucgacaucuggaccuacaacgccgagcugcuggugcuccuggagaacgagcggacgcuggacuuccacgacagcaacgugaagaaccucuacgagaaggucaagucccagcugaagaacaacgcgaaggagaucgggaacggcugcuucgaguucuaccacaagugcaacgacgagugcauggagagcgugaagaacgggaccuacgacuaccccaaguacuccgaggagagcaagcugaaccgcgagaagaucgacggcgugaagcucgaguccaugggcgucuaccagauccuggccaucuacagcaccguggccagcucccuggugcuccuggucagccugggggccaucuccuucuggaugugcagcaacggcucccuccagugccggaucugcaucuga

SEQ ID NO: 66525 - RNA, 1698 nt, Artificial Sequence
  derived and/or modified CDS sequence (opt1) from hemagglutinin__InfluenzaA__ACK99029
augaaggugaagcugcucguccugcugugcaccuucaccgccacguacgccgacaccaucugcaucggcuaccacgcgaacaacagcaccgacaccguggacacggugcucgagaagaacgucaccgugacccacuccgugaaccugcuggagaacagccacaacgggaagcucugccugcugaagggcaucgcgccccuccagcuggggaacugcuccgucgccggcuggauccuggggaacccggagugcgagcuccugaucagcaaggaguccuggagcuacaucguggagaagcccaaccccgagaacgggaccugcuaccccggccacuucgccgacuacgaggagcugcgcgagcagcucuccagcguguccagcuucgagcgguucgagaucuucccgaaggaguccagcuggcccaaccacacggucaccgggguguccgccagcugcucccacaacggcgagagcuccuucuaccgcaaccugcuguggcucaccgggaagaacggccuguaccccaaccugagcaaguccuacgccaacaacaaggagaaggaggugcucguccuguggggcgugcaccacccgcccaacaucggcgaccagaaggcccuguaccacaccgagaacgccuacgugagcgucgugagcucccacuacagccggaaguucacgcccgagaucuccaagcgccccaaggugcgggaccaggagggccgcaucaacuacuacuggacccuccuggagcccggggacaccaucaucuucgaggccaacggcaaccugaucgcgccgcgguacgccuucgcccucagccgcggguucggcuccggcaucaucaacagcaacgcccccauggacaagugcgacgccaagugccagacgccccagggggcgaucaacuccagccugcccuuccagaacguccacccggugaccaucggcgagugccccaaguacgugcgguccgccaagcugcgcauggucaccgggcuccggaacauccccagcauccagucccgcggccuguucggggccaucgccggcuucaucgagggcggguggaccggcaugguggacgggugguacggcuaccaccaccagaacgagcaggggagcggcuacgccgcggaccagaaguccacccagaacgccaucaacggcaucacgaacaaggugaacagcgucaucgagaagaugaacacccaguucaccgccguggggaaggaguucaacaagcuggagcggcgcauggagaaccucaacaagaaggucgacgacggcuucaucgacaucuggaccuacaacgccgagcugcuggugcuccuggagaacgagcggacgcuggacuuccacgacuccaacgugaagaaccucuacgagaaggucaagagccagcugaagaacaacgccaaggagaucgggaacggcugcuucgaguucuaccacaagugcaacgacgagugcauggaguccgugaagaacgggaccuacgacuaccccaaguacagcgaggaguccaagcugaaccgcgagaagaucgacggcgugaagcucgagagcaugggcgucuaccagauccuggcgaucuacagcaccguggccuccagccuggugcuccuggucucccugggggccaucagcuucuggaugugcuccaacggcagccuccagugccggaucugcaucuga

SEQ ID NO: 66526 - RNA, 1698 nt, Artificial Sequence; identical to SEQ ID NO: 66512
  derived and/or modified CDS sequence (opt1) from hemagglutinin__InfluenzaA__ACK99030

SEQ ID NO: 66527 - RNA, 1698 nt, Artificial Sequence; identical to SEQ ID NO: 66512
  derived and/or modified CDS sequence (opt1) from hemagglutinin__InfluenzaA__ACK99031

SEQ ID NO: 66528 - RNA, 1698 nt, Artificial Sequence; identical to SEQ ID NO: 66512
  derived and/or modified CDS sequence (opt1) from hemagglutinin__InfluenzaA__ACK99032

SEQ ID NO: 66529 - RNA, 1698 nt, Artificial Sequence; identical to SEQ ID NO: 66512
  derived and/or modified CDS sequence (opt1) from hemagglutinin__InfluenzaA__ACK99033

SEQ ID NO: 66530 - RNA, 1698 nt, Artificial Sequence
  derived and/or modified CDS sequence (opt1) from hemagglutinin__InfluenzaA__ACK99034
augaaggugaagcugcucguccugcugugcaccuucaccgccacguacgccgacaccaucugcaucggcuaccacgcgaacaacagcaccgacaccguggacacggugcucgagaagaacgucaccgugacccacuccgugaaccugcuggagaacagccacaacgggaagcucugccugcugaagggcaucgcgccccuccagcuggggaacugcuccgucgccggcuggauccuggggaacccggagugcgagcuccugaucagcaaggaguccuggagcuacaucguggagaagcccaaccccgagaacgggaccugcuaccccggccacuucgccgacuacgaggagcugcgcgagcagcucuccagcguguccagcuucgagcgguucgagaucuucccgaaggaguccagcuggcccaaccacacggucaccgggguguccgccagcugcucccacaacggcgagagcuccuucuaccgcaaccugcuguggcucaccgggaagaacggccuguaccccaaccugagcaaguccuacgccaacaacaaggagaaggaggugcucguccuguggggcgugcaccacccgcccaacaucggcgaccagaaggcccuguaccacaccgagaacgccuacgugagcgucgugagcucccacuacagccggaaguucacgcccgagaucgccaagcgccccaaggugcgggaccaggagggccgcaucaacuacuacuggacccuccuggagcccggggacaccaucaucuucgaggcgaacggcaaccugaucgccccgcgguacgccuucgcccucucccgcgacuucgggagcggcaucaucaacuccaacgcccccauggacaagugcgacgcgaagugccagacgccccagggcgccaucaacagcucccugcccuuccagaacguccacccggugaccaucggggagugccccaaguacgugcggagcgccaagcugcgcauggucaccggccuccggaacauccccuccauccagagccgcgggcuguucggcgccaucgccggguucaucgagggcggcuggaccgggaugguggacggcugguacggguaccaccaccagaacgagcagggcuccggguacgcggccgaccagaaguccacccagaacgccaucaacggcaucacgaacaaggugaacagcgucaucgagaagaugaacacccaguucaccgccgugggcaaggaguucaacaagcuggagcggcgcauggagaaccucaacaagaaggucgacgacggguucaucgacaucuggaccuacaacgccgagcugcuggugcuccuggagaacgagcggacgcuggacuuccacgacagcaacgugaagaaccucuacgagaaggucaagucccagcugaagaacaacgcgaaggagaucggcaacgggugcuucgaguucuaccacaagugcaacgacgagugcauggagagcgugaagaacggcaccuacgacuaccccaaguacuccgaggagagcaagcugaaccgcgagaagaucgacggggugaagcucgaguccaugggcgucuaccagauccuggccaucuacagcaccguggccagcucccuggugcuccuggucagccugggcgccaucuccuucuggaugugcagcaacgggucccuccagugccggaucugcaucuga

SEQ ID NO: 66531 - RNA, 1698 nt, Artificial Sequence
  derived and/or modified CDS sequence (opt1) from hemagglutinin__InfluenzaA__ACK99035
augaaggugaagcugcucguccugcugugcaccuucaccgccacguacgccgacaccaucugcaucggcuaccacgcgaacaacagcaccgacaccguggacacggugcucgagaagaacgucaccgugacccacuccgugaaccugcuggagaacagccacaacgggaagcucugccugcugaagggcaucgcgccccuccagcuggggaacugcuccgucgccggcuggauccuggggaacccggagugcgagcuccugaucagcaaggaguccuggagcuacaucguggagaagcccaaccccgagaacgggaccugcuaccccggccacuucgccgacuacgaggagcugcgcgagcagcucuccagcguguccgccuucgagcgguucgagaucuucccgaaggagagcuccuggcccaaccacacggucaccggggugagcgccuccugcagccacaacggcgaguccagcuucuaccgcaaccugcuguggcucaccgggaagaacggccuguaccccaaccuguccaagagcuacgccaacaacaaggagaaggaggugcucguccuguggggcgugcaccacccgcccaacaucggcgaccagaaggcccuguaccacaccgagaacgccuacguguccgucgugagcagccacuacucccggaaguucacgcccgagaucagcaagcgccccaaggugcgggaccaggagggccgcaucaacuacuacuggacccuccuggagcccggggacaccaucaucuucgaggcgaacggcaaccugaucgccccgcgguacgccuucgcccucucccgcggguucggcagcggcaucaucaacuccaacacccccauggacaagugcgacgccaagugccagacgccccagggggcgaucaacagcucccugcccuuccagaacguccacccggugaccaucggcgagugccccaaguacgugcggagcgccaagcugcgcauggucaccgggcuccggaacauccccuccauccagagccgcggccuguucggggccaucgccggcuucaucgagggcggguggaccggcaugguggacgggugguacggcuaccaccaccagaacgagcagggguccggcuacgccgcggaccagaaguccacgcagaacgccaucaacggcaucaccaacaaggugaacagcgucaucgagaagaugaacacccaguucaccgccguggggaaggaguucaacaagcuggagcggcgcauggagaaccucaacaagaaggucgacgacggcuucaucgacaucuggacguacaacgccgagcugcuggugcuccuggagaacgagcggacccuggacuuccacgacagcaacgugaagaaccucuacgagaaggucaagucccagcugaagaacaacgccaaggagaucgggaacggcugcuucgaguucuaccacaagugcaacgacgagugcauggagagcgugaagaacgggaccuacgacuaccccaaguacuccgaggagagcaagcugaaccgcgagaagaucgacggcgugaagcucgaguccaugggcgucuaccagauccuggcgaucuacagcaccguggccagcucccuggugcuccuggucagccugggggccaucuccuucuggaugugcagcaacggcucccuccagugccggaucugcaucuga

SEQ ID NO: 66532 - RNA, 1701 nt, Artificial Sequence; identical to SEQ ID NO: 66362
  derived and/or modified CDS sequence (opt1) from hemagglutinin__InfluenzaA__ACK99421

SEQ ID NO: 66533 - RNA, 1689 nt, Artificial Sequence
  derived and/or modified CDS sequence (opt1) from hemagglutinin__InfluenzaA__ACK99432
auggccaucaucuaccugauccuccuguucaccgccgugcgcggcgaccagaucugcaucggguaccacgcgaacaacagcaccgagaagaucgacacgauccuggagcggaacgucaccgugacccacgccaaggacauccucgagaagacccacaacggcaagcugugcaagcugaacgggaucccgccccucgagcugggcgacugcuccaucgccggguggcugcucggcaaccccgagugcgaccgccugcugcgggugcccgaguggagcuacaucauggagaaggagaacccccgcuacucccucugcuacccgggcagcuucaacgacuacgaggagcugaagcaccuccuguccagcgucaagcacuucgagaaggugaagauccugcccaaggaccgguggacgcagcacaccaccaccgggggcuccauggccugcgccgugagcgggaagcccuccuucuuccgcaacauggucuggcugacgaccaagggccccaacuacccgguggcgcaggggagcuacaacaacaccuccggcgagcagaugcucaucaucuggggcgugcaccaccccaacgacgaggccgagcagcgggcccuguaccagaaggucgggaccuacgugagcgccuccacgagcacccuguacaagcgcuccauccccgagaucgcggcccggcccaaggugaacggccucgggagccgcauggaguucuccuggacccugcuggacaugugggacaccaucaacuucgagagcacgggcaaccucgucgccccggaguacggcuucaagaucuccaagcgggggagcagcggcaucaugaagaccgaggggacccuggagaacugcgagaccaagugccagacgccccugggcgccaucaacaccacccuccccuuccacaacgugcacccccugaccaucggggagugcccgaaguacgugaaguccgagaagcugguccucgccacgggccugcgcaacgugccccagaucgagagccggggccuguucggggcgaucgccggcuucaucgagggcggguggcaggggaugguggacggcugguacggcuaccaccacuccaacgaccaggggagcggcuacgccgccgacaaggaguccacccagaaggccuucgacgggaucaccaacaaggucaacagcgugaucgagaagaugaacacccaguucgaggcggugggcaaggaguucuccaaccucgagaagcgccuggagaaccugaacaagaagauggaggacggguuccucgacgucuggacguacaacgccgagcugcuggugcucauggagaacgagcggacccuggacuuccacgacagcaacgugaagaaccuguacgacaagguccgcaugcagcuccgggacaacgugaaggagcugggcaacggcugcuucgaguucuaccacaagugcgacaacgagugcauggacuccgucaagaacgggaccuacgacuaccccaaguacgaggaggagagcaagcugaaccgcaacgagaucaagggcgugaagcucuccagcauggggguguaccagauccuggccaucuacgccaccgucgccggcucccugagccucgcgaucaugauggccggcaucuccuucuggaugugcagcaacgggucccugcagugccggaucugcaucuga

SEQ ID NO: 66534 - RNA, 1701 nt, Artificial Sequence
  derived and/or modified CDS sequence (opt1) from hemagglutinin__InfluenzaA__ACK99443
augaaggccaagcugcucgugcugcugugcgccuucaccgcgaccgacgccgacacgaucugcaucggcuaccacgccaacaacagcaccgacaccgucgacaccgugcucgagaagaacgugacggucacccacuccgugaaccugcuggaggacagccacaacgggaagcucugccgccugaagggcaucgcgccccugcagcucgggaacugcuccaucgccggcuggauccuggggaacccggagugcgagagccuguucuccaaggagagcugguccuacaucgccgagacccccaacagcgagaacgggaccugcuaccccggcuacuucgccgacuacgaggagcuccgggagcagcuguccagcguguccagcuucgagcgcuucgagaucuuccccaaggaguccagcuggccgaaccacacggucaccaagggcgugaccgccgccugcucccacaacggcaagagcuccuucuaccggaaccugcucuggcugaccgagaagaacgggcuguaccccaaccucagcaaguccuacgugaacaacaaggagaaggagguccuggugcuguggggcgugcaccaccccagcaacaucggggaccagcgcgcgaucuaccacacggagaacgccuacgucagcgugguguccagccacuacucccggcgcuucacccccgagaucgccaagcggccgaagguccgcggccaggagggccggaucaacuacuacuggacccuccuggagcccggggacaccaucaucuucgaggccaacggcaaccugaucgcccccugguacgcguucgcccucagccgcggguucggcuccggcaucaucacgagcaacgccuccauggacgagugcgacgccaagugccagacgccccagggggccaucaacagcucccugccguuccagaacgugcaccccgugaccaucggcgagugccccaaguacguccggagcaccaagcugcgcauggugaccgggcuccggaacauccccuccgugcagagccgcggccuguucggggcgaucgccggcuucaucgagggcggguggaccggcaugaucgacgggugguacggcuaccaccaccagaacgagcagggguccggcuacgccgccgaccagaaguccacccagaacgccaucaacggcaucaccaacaaggucaacagcgugaucgagaagaugaacacgcaguucaccgcgguggggaaggaguucaacaagcuggagcggcgcauggagaaccucaacaagaaggucgacgacggcuuccuggacaucuggaccuacaacgccgagcugcucgugcugcuggagaacgagcggacccucgacuuccacgacagcaacgucaagaaccuguacgagaaggugaagucccagcugaagaacaacgccaaggagaucgggaacggcugcuucgaguucuaccacaagugcaacaacgagugcauggagagcgugaagaacgggacguacgacuacccgaaguacuccgaggagagcaagcucaaccgcgagaagaucgacggcgucaagcuggagagcaugggcguguaccagauccuggccaucuacuccaccguggccagcucccucguccugcuggugagccucggggcgaucuccuucuggaugugcagcaacggcucccugcagugccggaucugcaucuga

SEQ ID NO: 66535 - RNA, 1701 nt, Artificial Sequence
  derived and/or modified CDS sequence (opt1) from hemagglutinin__InfluenzaA__ACK99465
augaaggccaagcugcucgugcugcugugcgccuucaccgcgaccuacgccgacacgaucugcaucggcuaccacgccaacaacagcaccgacaccgucgacaccgugcucgagaagaacgugacggucacccacuccgugaaccugcuggaggacagccacaacgggaagcucugccgccugaagggcaccgcgccccugcagcucgggaacugcuccguggccggcuggauccuggggaacccggagugcgagagccuguucuccaaggagagcugguccuacaucgccgagaagcccaaccccgagaacgggaccugcuaccccggcuacuucgccgacuacgaggagcuccgggagcagcugagcuccgucagcuccuucgagcgcuucgagaucuucccgaaggagagcuccuggcccaaccacacggugaccaagggcgugaccgccagcugcucccacaacggcaagagcuccuucuacaagaaccugcucuggcugaccaagaagaacgggcuguaccccaaccucagcaaguccuacgucaacaacaaggagaaggaggugcuggugcuguggggcguccaccaccccagcaacaucggggaccagcgggccaucuaccacacggagaacgcguacgugagcguggucuccagccacuacucccgccgguucaccccggagaucgccaagcgccccaaggugcgggaccaggagggccgcaucaacuacuacuggacccuccuggagcccggcgacaccaucaucuucgaggccaacgggaaccugaucgcccccugguacgccuucgcgcucagccggggcuucggguccggcaucaucacgagcaacgccuccaugggcgagugcgacgccaagugccagaccccgcagggggccaucaacagcucccugcccuuccagaacgugcaccccgucaccaucggcgagugccccaaguacgugcgcagcaccaagcugcggauggugacggggcuccgcaacaucccguccauccagagccggggccuguucggggccaucgcgggcuucaucgagggcggguggaccggcaugaucgacgggugguacggcuaccaccaccagaacgagcagggguccggcuacgccgccgacaagaaguccacccagaacgccaucgacggcaucaccaacaaggucaacagcgugaucgagaagaugaacacgcaguucaccgccguggggaaggaguucaacaagcuggagcgccggauggagaaccucaacaagaaggucgacgacggcuuccuggacaucuggaccuacaacgcggagcugcucgugcugcuggagaacgagcgcacccucgacuuccacgacagcaacgucaagaaccuguacgagaaggugaagaaccagcugaagaacaacgccaaggagaucgggaacggcugcuucgaguucuaccacaagugcaacaacgagugcauggaguccgugaagaacgggacguacgacuaccccaaguacagcgaggaguccaagcucaagcgggagaagaucgacggcgucaagcuggagagcaugggcguguaccagauccuggccaucuacagcaccguggccuccagccucguccugcuggugucccucggggccaucagcuucuggaugugcuccaacggcagccugcagugccgcaucugcaucuga

SEQ ID NO: 66536 - RNA, 1701 nt, Artificial Sequence
  derived and/or modified CDS sequence (opt1) from hemagglutinin__InfluenzaA__ACK99476
augaagaccaucaucgcccugagcuacauccucugcaugguguucgcccagaagcugcccggcaacgacaacuccaccgcgacgcugugccucgggcaccacgccgucccgaacggcacccuggugaagaccaucaccaacgaccagaucgaggugacgaacgccaccgagcugguccagagcuccagcaccgggcgcaucugcgacagcccccaccggauccucgacggcaagaacugcacccugaucgacgcccugcucggggacccccacugcgacgacuuccagaacaaggagugggaccuguucguggagcgcagcaaggccuacuccaacugcuaccccuacgacgugccggacuacgcgagccugcggucccucgucgccagcuccggcacgcuggaguucaacaacgagagcuucaacuggaccggcguggcccagaacgggaccuccuacgccugcaagcgccggagcgugaaguccuucuucagccgccugaacuggcuccacaagcuggaguacaaguaccccgcgcugaacgucaccaugcccaacaacgacaaguucgacaagcucuacaucuggggcgugcaccacccccggacggacuccgaccagaccagccuguacgugcaggccuccgggcgcgucaccgugagcaccaagcggagccagcagacggugaucccgaacaucggcuccagccccuggguccgcgggguguccagccggaucuccaucuacuggaccaucgugaagcccggcgacauccugcucaucaacagcaccggcaaccugaucgcgccccgcggguacuucaagauccgguccggcaagagcuccaucaugcgcagcgacgccccgaucgggaacugcaacuccgagugcaucacccccaacggcagcauccccaacgacaagcccuuccagaacgucaaccggaucacguacggcgccugcccgcgcuacgugaagcagaacacccugaagcucgccaccgggaugcggaacgugcccgagaagcagacccgcggcaucuucggggccaucgccggcuucaucgagaacgggugggagggcauggucgacggcugguacggguuccggcaccagaacuccgagggcacggggcaggccgccgaccugaaguccacccaggcggccaucaaccagaucaacggcaagcugaaccgccucaucgagaagaccaacgagaaguuccaccagaucgagaaggaguucuccgagguggaggggcggauccaggaccuggagaaguacguggaggacaccaagaucgaccuguggagcuacaacgccgagcuccuggucgcccuggagaaccagcacacgaucgaccucaccgacuccgagaugaacaagcuguucgagcgcacccgcaagcagcugcgggagaacgccgaggacaugggcaacggcugcuucaagaucuaccacaagugcgacaacgcgugcaucgggagcauccgcaacggcaccuacgaccacgacguguaccgggacgaggcccucaacaaccgcuuccagaucaagggggucgagcugaaguccggcuacaaggacuggauccuguggaucagcuucgccaucagcugcuuccuccugugcguggugcugcucggguucaucaugugggccugccagaagggcaacauccggugcaacaucugcaucuga

SEQ ID NO: 66537 - RNA, 1698 nt, Artificial Sequence; identical to SEQ ID NO: 65938
  derived and/or modified CDS sequence (opt1) from hemagglutinin__InfluenzaA__ACL12063

SEQ ID NO: 66538 - RNA, 1701 nt, Artificial Sequence
  derived and/or modified CDS sequence (opt1) from hemagglutinin__InfluenzaA__ACL12129
augaagaccaucaucgcccugagcuacauccucugccugguguucgcccagaagcugcccggcaacgacaacuccaccgcgacgcucugccuggggcaccacgccgucccgaacggcacccuggugaagaccaucaccaacgaccagaucgaggugacgaacgccaccgagcucguccagagcuccagcaccgggcgcaucugcggcagcccccaccggauccuggacgggaagaacugcacccugaucgacgcccuccugggcgacccccacugcgacggcuuccagaacaaggagugggaccuguucguggagcgcagcaaggccuacuccaacugcuaccccuacgacgugccggacuacgcgagccuccggucccuggucgccagcuccgggacgcuggaguucaucaacgaggacuucaacuggaccggcguggcccaggacgggggcagcuacgccugcaagcgcggguccgugaacagcuucuucucccggcucaacuggcugcacaagcuggaguacaaguaccccgcgcucaacgucaccaugcccaacaacggcaaguucgacaagcuguacaucuggggcgugcaccaccccagcaccgacuccgaccagacgagccuguacgugcgcgccuccgggcgggucaccgugagcaccaagcgcagccagcagaccgugacgccgaacaucggcucccggcccuggguccgcgggcagagcucccggaucagcaucuacuggaccaucgugaagcccggcgacauccuccugaucgacuccaccggcaaccugaucgcgccccgcggguacuucaagauccggaacggcaagagcuccaucaugcgcagcgacgccccgaucgggaacugcuccagcgagugcaucacccccaacggcuccauccccaacgacaagcccuuccagaacgugaaccggaucacguacggggccugcccgcgcuacgucaagcagaacacccucaagcuggccaccggcaugcggaacgugcccgagaagcagacccgcggcaucuucggggccaucgccggcuucaucgagaacgggugggagggcaugguggacgggugguacggcuuccggcaccagaacagcgagggcacggggcaggccgccgaccugaaguccacccaggcggccaucgaccagaucaacggcaagcucaaccgccugaucgagaagaccaacgagaaguuccagcagaucgagaaggaguucagcgaggucgaggggcggauccaggaccuggagaaguacguggaggacaccaagaucgaccucugguccuacaacgccgagcugcugguggcccucgagaaccagcacacgaucgaccugaccgacagcgagaugaacaagcuguucgagaagacccgcaagcagcuccgcgagaacgccgaggacaugggcaacgggugcuucaagaucuaccacaagugcgacaacgcgugcaucggcuccauccggaacggcaccuacgaccacgacgucuaccgcgacgaggcccugaacaaccgguuccagaucaaggggguggagcugaaguccggcuacaaggacuggauccucuggaucuccuucgccaucagcugcuuccugcugugcgucgugcuccugggguucaucaugugggccugccagaagggcaacauccgcugcaacaucugcaucuga

SEQ ID NO: 66539 - RNA, 1701 nt, Artificial Sequence; identical to SEQ ID NO: 66380
  derived and/or modified CDS sequence (opt1) from hemagglutinin__InfluenzaA__ACL12140

SEQ ID NO: 66540 - RNA, 1698 nt, Artificial Sequence; identical to SEQ ID NO: 66464
  derived and/or modified CDS sequence (opt1) from hemagglutinin__InfluenzaA__ACL12151

SEQ ID NO: 66541 - RNA, 1701 nt, Artificial Sequence; identical to SEQ ID NO: 66458
  derived and/or modified CDS sequence (opt1) from hemagglutinin__InfluenzaA__ACL12162

SEQ ID NO: 66542 - RNA, 1701 nt, Artificial Sequence
  derived and/or modified CDS sequence (opt1) from hemagglutinin__InfluenzaA__ACL12173
augaagaccaucaucgcccugagcuacauccucugccugguguucgcccagaagcugcccggcaacgacaacuccaccgcgacgcucugccuggggcaccacgccgucccgaacggcaccaucgugaagaccaucaccaacgaccagaucgaggugacgaacgccaccgagcugguccagagcuccagcaccggggagaucugcgacagcccccaccagauccucgacggcgagaacugcacccugaucgacgcccugcucggggacccccagugcgacggcuuccagaacaagaagugggaccuguucguggagcgcagcaaggccuacuccaacugcuaccccuacgacgugccggacuacgcgagccugcggucccucgucgccagcuccggcacgcuggaguucaacaacgagagcuucaacuggaccggggugacccagaacggcaccuccagcgccugcauccgccgguccaacaacagcuucuucucccgccugaacuggcucacgcaccugaaguucaaguaccccgcccugaacgugaccaugcccaacaacgagcaguucgacaagcucuacaucuggggcguccaccaccccgggaccgacaacgaccagaucuuccuguacgcgcaggccagcgggcggaucaccguguccacgaagcgcagccagcagaccgugaucccgaacaucggcagccggccccgcguccggaacauccccucccgcaucagcaucuacuggaccaucgugaagcccggcgacauccugcucaucaacuccaccgggaaccugaucgccccgcggggcuacuucaagauccgcagcgggaaguccagcaucaugcgguccgacgcccccaucggcaagugcaacagcgagugcaucacgcccaacggcuccauccccaacgacaagccguuccagaacgugaaccgcaucaccuacggggccugcccccgguacgucaagcagaacacccugaagcucgcgaccggcaugcgcaacgugcccgagaagcagacgcgggggaucuucggcgccaucgccggguucaucgagaacggcugggagggcaugguggacgggugguacggcuuccgccaccagaacagcgaggggcggggccaggccgccgaccugaaguccacccaggcggccaucaaccagaucaacgggaagcugaaccgccucaucggcaagaccaacgagaaguuccaccagaucgagaaggaguucagcgaggucgagggccggauccaggaccuggagaaguacguggaggacaccaagaucgaccugugguccuacaacgccgagcuccugguggcccuggagaaccagcacacgaucgaccucaccgacagcgagaugaacaagcuguucgagaagaccaagaagcagcugcgcgagaacgccgaggacauggggaacggcugcuucaagaucuaccacaagugcgacaacgcgugcaucggguccauccgcaacggcaccuacgaccacgacgucuaccgggacgaggcccucaacaaccgcuuccagaucaaggggguggagcugaaguccggcuacaaggacuggauccuguggaucuccuucgccaucagcugcuuccuccugugcguggcccugcucggcuucaucaugugggccugccagaaggggaacauccggugcaacaucugcaucuga

SEQ ID NO: 66543 - RNA, 1701 nt, Artificial Sequence
  derived and/or modified CDS sequence (opt1) from hemagglutinin__InfluenzaA__ACL12184
augaagaccaucaucgcccugagcuacauccucugccugguguucgcccagaagcugcccggcaacgacaacuccaccgcgacgcucugccuggggcaccacgccgucccgaacggcaccaucgugaagaccaucaccaacgaccagaucgaggugacgaacgccaccgagcugguccagagcuccagcaccggggagaucugcgacagcccccaccagauccucgacggcgagaacugcacccugaucgacgcccugcucggggacccccagugcgacggcuuccagaacaagaagugggaccuguucguggagcgcagcaaggccuacuccaacugcuaccccuacgacgugccggacuacgcgagccugcggucccucgucgccagcuccggcacgcuggaguucaacaacgagagcuucaacuggaccggggugacccagaacggcaccuccagcgccugcauccgccgguccaacaacagcuucuucucccgccugaacuggcucacgcaccugaaguucaaguaccccgcccugaacgugaccaugcccaacaacgagcaguucgacaagcucuacaucuggggcguccaccaccccgggaccgacaacgaccagaucuuccuguacgcgcaggccagcgggcggaucaccguguccacgaagcgcagccagcagaccgugaucccgaacaucggcagccggccccgcguccggaacauccccucccgcaucagcaucuacuggaccaucgugaagcccggcgacauccugcucaucaacuccaccgggaaccugaucgccccgcggggcuacuucaagauccgcagcgggaaguccagcaucaugcgguccgacgcccccaucggcaagugcaacagcgagugcaucacgcccaacggcuccauccccaacgacaagccguuccagaacgugaaccgcaucaccuacggggccugcccccgguacgucaagcagaacacccugaagcucgcgaccggcaugcgcaacgugcccgagaagcagacgcgggggaucuucggcgccaucgccggguucaucgagaacggcugggagggcaugguggacgggugguacggcuuccgccaccagaacagcgaggggcggggccaggccgccgaccugaaguccacccaggcggccaucgaccagaucaacgggaagcugaaccgccucaucggcaagaccaacgagaaguuccaccagaucgagaaggaguucagcgaggucgagggccggauccaggaccuggagaaguacguggaggacaccaagaucgaccugugguccuacaacgccgagcuccugguggcccuggagaaccagcacacgaucgaccucaccgacagcgagaugaacaagcuguucgagaagaccaagaagcagcugcgcgagaacgccgaggacauggggaacggcugcuucaagaucuaccacaagugcgacaacgcgugcaucggguccauccgcaacggcaccuacaaccacgacgucuaccgggacgaggcccucaacaaccgcuuccagaucaaggggguggagcugaaguccggcuacaaggacuggauccuguggaucuccuucgccaucagcugcuuccuccugugcguggcccugcucggcuucaucaugugggccugccagaaggggaacauccggugcaacaucugcaucuga

SEQ ID NO: 66544 - RNA, 1701 nt, Artificial Sequence; identical to SEQ ID NO: 66458
  derived and/or modified CDS sequence (opt1) from hemagglutinin__InfluenzaA__ACL12195

SEQ ID NO: 66545 - RNA, 1701 nt, Artificial Sequence
  derived and/or modified CDS sequence (opt1) from hemagglutinin__InfluenzaA__ACL12217
augaagaccaucaucgcccugagcuacauccucugccugguguucgcccagaagcugcccggcaacgacaacuccaccgcgacgcucugccuggggcaccacgccgucccgaacggcaccaucgugaagaccaucaccaacgaccagaucgaggugacgaacgccaccgagcugguccagagcuccagcaccggggagaucugcgacagcccccaccagauccucgacggcgagaacugcacccugaucgacgcccugcucggggacccccagugcgacggcuuccagaacaagaagugggaccuguucguggagcgcagcaaggccuacuccaacugcuaccccuacgacgugccggacuacgcgagccugcggucccucgucgccagcuccggcacgcuggaguucaacaacgagagcuucaacuggaccggggugacccagaacggcaccuccagcgccugcauccgccgguccaacaacagcuucuucucccgccugaacuggcucacgcaccugaaguucaaguaccccgcccugaacgugaccaugcccaacaacgagcaguucgacaagcucuacaucuggggcguccaccaccccgggaccgacaacgaccagaucuuccuguacgcgcaggccagcgggcggaucaccguguccacgaagcgcagccagcagaccgugaucccgaacaucggcagccggccccgcguccggaacauccccucccgcaucagcaucuacuggaccaucgugaagcccggcgacgugcugcucaucaacuccaccgggaaccugaucgccccgcggggcuacuucaagauccgcagcgggaaguccagcaucaugcgguccgacgcccccaucggcaagugcaacagcgagugcaucacgcccaacggcuccauccccaacgacaagccguuccagaacgucaaccgcaucaccuacggggccugcccccgguacgugaagcagaacacccugaagcucgcgaccggcaugcgcaacgugcccgagaagcagacgcgggggaucuucggcgccaucgccggguucaucgagaacggcugggagggcauggucgacgggugguacggcuuccgccaccagaacagcgaggggcggggccaggccgccgaccugaaguccacccaggcggccaucgaccagaucaacgggaagcugaaccgccucaucggcaagaccaacgagaaguuccaccagaucgagaaggaguucagcgagguggagggccggauccaggaccuggagaaguacguggaggacaccaagaucgaccugugguccuacaacgccgagcuccuggucgcccuggagaaccagcacacgaucgaccucaccgacagcgagaugaacaagcuguucgagaagaccaagaagcagcugcgcgagaacgccgaggacauggggaacggcugcuucaagaucuaccacaagugcgacaacgcgugcaucggguccauccgcaacggcaccuacgaccacgacguguaccgggacgaggcccucaacaaccgcuuccagaucaaggggguggagcugaaguccggcuacaaggacuggauccuguggaucuccuucgccaucagcugcuuccuccugugcgucgcccugcucggcuucaucaugugggccugccagaaggggaacauccggugcaacaucugcaucuga

SEQ ID NO: 66546 - RNA, 1701 nt, Artificial Sequence; identical to SEQ ID NO: 66458
  derived and/or modified CDS sequence (opt1) from hemagglutinin__InfluenzaA__ACL12228

SEQ ID NO: 66547 - RNA, 1701 nt, Artificial Sequence; identical to SEQ ID NO: 66458
  derived and/or modified CDS sequence (opt1) from hemagglutinin__InfluenzaA__ACL12239

SEQ ID NO: 66548 - RNA, 1701 nt, Artificial Sequence
  derived and/or modified CDS sequence (opt1) from hemagglutinin__InfluenzaA__ACL12250
augaagaccaucaucgcccugagcuacauccucugccugguguucgcccagaaguuccccggcaacgacaacuccaccgcgacgcugugccucgggcaccacgccgucccgaacggcaccaucgugaagaccaucaccaacgaccagaucgaggugacgaacgccaccgagcugguccagagcuccagcaccggggagaucugcgacagcccccaccagauccuggacggcgagaacugcacccucaucgacgcccugcugggggacccccagugcgacggcuuccagaacaagaacugggaccucuucguggagcgcagcaaggccuacuccaacugcuaccccuacgacgugccggacuacgucagccugcggucccugguggcgagcuccggcacgcucgaguucaacaacgagagcuucaacuggaccggggugacccagaacggcaccuccagcgccugcauccgccgguccaacaacagcuucuucucccgccugaacuggcugacgcacagcaaguucaaguaccccgcccucaacgucaccaugcccaacaacgagaacuucgacaagcuguacaucuggggcgugcaccaccccgggaccgacaacgaccagaucuuccuguacgcccaggcguccgggcggaucaccgugagcacgaagcgcagccagcagaccgucaucccgaacaucggcucccggccccgcgugcggaacauccccagccgcaucuccaucuacuggaccaucgugaagcccggcgacauccuccugaucaacagcaccgggaaccugaucgccccgcggggcuacuucaagauccgcuccgggaaguccuccaucaugcggagcgacgcccccaucggcaagugcaacuccgagugcaucacgcccaacggcagcauccccaacgacaagccguuccagaacgucaaccgcaucaccuacggggccugcccccgguacgugaagcagaacacccucaagcuggccaccggcaugcgcaacgugcccgagaagcagacgcgggggaucuucggcgcgaucgccggguucaucgagaacggcugggagggcauggucgacgggugguacggcuuccgccaccagaacuccgaggggaucggccaggccgccgaccucaagagcacccaggccgcgaucgaccagaucaacgggaagcugaaccggcugaucggcaagaccaacgagaaguuccaccagaucgagaaggaguucuccgagguggagggccgcauccaggaccuggagaaguacguggaggacaccaagaucgaccucuggagcuacaacgccgagcugcuggucgcccucgagaaccagcacacgaucgaccugaccgacuccgagaugaacaagcuguucgagaagaccaagaagcagcuccgggagaacgccgaggacauggggaacggcugcuucaagaucuaccacaagugcgacaacgccugcaucgggagcauccgcaacggcaccuacgaccacgacguguaccgcgacgaggcgcugaacaaccgguuccagaucaaggggguggagcugaaguccggcuacaaggacuggauccucuggaucagcuucgccaucuccugcuuccugcugugcaucgcccuccugggcuucaucaugugggccugccagaaggggaacauccgcugcaacaucugcaucuga

SEQ ID NO: 66549 - RNA, 1701 nt, Artificial Sequence
  derived and/or modified CDS sequence (opt1) from hemagglutinin__InfluenzaA__ACL12261
augaaggccaagcugcucgugcugcugugcgccuucaccgcgaccgacgccgacacgaucugcaucggcuaccacgccaacaacagcaccgacaccgucgacaccgugcucgagaagaacgugacggucacccacuccgugaaccugcuggaggacagccacaacgggaagcucugccgccugaagggcaucgcgccccugcagcucgggaacugcuccaucgccggcuggauccuggggaacccggagugcgagagccuguucuccaagaaguccuggagcuacaucgccgagacccccaacagcgagaacgggaccugcuaccccggcuacuucgccgacuacgaggagcuccgggagcagcuguccagcguguccagcuucgagcgcuucgagaucuuccccaaggaguccagcuggccgaaccacacggucaccaagggcgugaccgccgccugcucccacaagggccggagcuccuucuaccgcaaccugcucuggcugaccgagaagaacgggcuguaccccaaccucagcaaguccuacgugaacaacaaggagaaggagguccuggugcuguggggcgugcaccaccccagcaacaucggggaccagcgggcgaucuaccacacggagaacgccuacgucagcgugguguccagccacuacaaccgccgguucacccccgagaucgccaagcgcccgaagguccggggccaggagggccgcaucaacuacuacuggacccuccuggagcccggggacaccaucaucuucgaggccaacggcaaccugaucgcccccugguacgcguucgcccucucccggggguucggcagcggcaucaucacguccaacgccagcauggacgagugcgacgccaagugccagacgccccagggggccaucaacuccagccugccguuccagaacgugcaccccgugaccaucggcgagugccccaaguacguccgcuccaccaagcugcggauggugaccgggcuccgcaacauccccagcauccagucccggggccuguucggggcgaucgccggcuucaucgagggcggguggaccggcaugaucgacgggugguacggcuaccaccaccagaacgagcaggggagcggcuacgccgccgaccagaaguccacccagaacgccaucaacggcaucaccaacaaggugaacagcgucaucgagaagaugaacacgcaguucaccgcgguggggaaggaguucaacaagcuggagaagcgcauggagaaccucaacaagaagguggacgacggcuuccuggacaucuggaccuacaacgccgagcugcucguccugcuggagaacgagcggacccucgacuuccacgacuccaacgugaagaaccuguacgagaaggucaagaaccagcugaagaacaacgccaaggagaucgggaacggcugcuucgaguucuaccacaagugcaacaacgagugcauggagagcgugaagaacgggacguacgacuacccgaaguacuccgaggagagcaagcucaaccgcgagaagaucgacggcgugaagcuggaguccaugggcgucuaccagauccuggccaucuacagcaccguggccagcucccucgugcugcuggucagccucggggcgaucuccuucuggaugugcagcaacggcucccugcagugccggaucugcaucuga

SEQ ID NO: 66550 - RNA, 1689 nt, Artificial Sequence
  derived and/or modified CDS sequence (opt1) from hemagglutinin__InfluenzaA__ACN32272
auggccaucaucuaccugauccuccuguucaccgccgugcgcggcgaccagaucugcaucggguaccacgcgaacaacagcaccgagaagaucgacacgauccuggagcggaacgucaccgugacccacgccaaggacauccucgagaagacccacaacggcaagcugugcaagcugaacgggaucccgccccucgagcugggcgacugcuccaucgccggguggcugcucggcaaccccgagugcgaccgccugcugcgggugcccgaguggagcuacaucauggagaaggagaacccccgcuacucccucugcuacccgggcagcuucaacgacuacgaggagcugaagcaccuccuguccagcgucaagcacuucgagaaggugaagauccugcccaaggaccgguggacgcagcacaccaccaccgggggcuccauggccugcgccgugagcgggaagcccuccuucuuccgcaacauggucuggcugacgaccaagggccccaacuacccgguggcgcaggggagcuacaacaacaccuccggcgagcagaugcucaucaucuggggcgugcaccaccccaacgacgaggccgagcagcgggcccuguaccagaacgucgggaccuacgugagcgccuccacgagcacccuguacaagcgcuccauccccgagaucgcggcccggcccaaggugaacggccucgggagccgcauggaguucuccuggacccugcuggacaugugggacaccaucaacuucgagagcacgggcaaccucgucgccccggaguacggcuucaagaucuccaagcgggggagcagcggcaucaugaagaccgaggggacccuggagaacugcgagaccaagugccagacgccccugggcgccaucaacaccacccuccccuuccacaacgugcacccccugaccaucggggagugcccgaaguacgugaaguccgagaagcugguccucgccacgggccugcgcaacgugccccagaucgagagccggggccuguucggggcgaucgccggcuucaucgagggcggguggcaggggaugguggacggcugguacggcuaccaccacuccaacgaccaggggagcggcuacgccgccgacaaggaguccacccagaaggccuucgacgggaucaccaacaaggucaacagcgugaucgagaagaugaacacccaguucgaggcggugggcaaggaguucuccaaccucgagaagcgccuggagaaccugaacaagaagauggaggacggguuccucgacgucuggacguacaacgccgagcugcuggugcucauggagaacgagcggacccuggacuuccacgacagcaacgugaagaaccuguacgacaagguccgcaugcagcuccgggacaacgugaaggagcugggcaacggcugcuucgaguucuaccacaagugcgacaacgagugcauggacuccgucaagaacgggaccuacgacuaccccaaguacgaggaggagagcaagcugaaccgcaacgagaucaagggcgugaagcucuccagcauggggguguaccagauccuggccaucuacgccaccgucgccggcucccugagccucgcgaucaugauggccggcaucuccuucuggaugugcagcaacgggucccugcagugccggaucugcaucuga

SEQ ID NO: 66551 - RNA, 1701 nt, Artificial Sequence
  derived and/or modified CDS sequence (opt1) from hemagglutinin__InfluenzaA__ACN32283
augaagaccaucaucgcccugagcuacauccucugccugguguccgcccagaaguuccccggcaacgacaacagcaccgcgacgcugugccucgggcaccacgccgucccgaacggcaccaucgugaagaccaucaccaacgaccagaucgaggugacgaacgccaccgagcugguccaguccagcuccaccggggagaucugcgacagcccccaccagauccuggacggcgagaacugcacccucaucgacgcccugcugggggacccccagugcgacggcuuccagaacaagaagugggaccucuucguggagcgcuccaaggccuacagcaacugcuaccccuacgacgugccggacuacgcgucccugcggagccuggucgccuccagcggcacgcucgaguucaacaacgaguccuucaacuggaccggggugacccagaacggcaccagcuccgccugcauccgccggagcaacaacuccuucuucagccgccugaacuggcugacgcaccucaaguucaaguaccccgcccugaacgugaccaugcccaacaacgaggaguucgacaagcuguacaucuggggcguccaccaccccgggaccgacaacgaccagaucuuccucuacgcgcaggccuccgggcggaucaccgugagcacgaagcgcagccagcagaccgugaucccgaacaucggcucccggccccgcguccggaacauccccagccgcaucuccaucuacuggaccaucgugaagcccggcgacauccugcugaucaacagcaccgggaaccucaucgccccgcggggcuacuucaagauccgcuccggcaagagcuccaucaugcggagcgacgcccccaucgggaagugcaacuccgagugcaucacgcccaacggcagcauccccaacgacaagccguuccagaacgugaaccgcaucaccuacggggccugcccccgguacgucaagcagaacacccugaagcuggcgaccggcaugcgcaacgugcccgagaagcagacgcgggggaucuucggcgccaucgccggguucaucgagaacggcugggagggcaugguggacgggugguacggcuuccgccaccagaacuccgaggggaucggccaggccgccgaccucaagagcacccaggcggccaucgaccagaucaacgggaagcugaaccggcugaucggcaagaccaacgagaaguuccaccagaucgagaaggaguucuccgaggucgagggccgcauccaggaccucgagaaguacguggaggacaccaagaucgaccuguggagcuacaacgccgagcugcucguggcccuggagaaccagcacacgaucgaccugaccgacuccgagaugaacaagcuguucgagaagaccaagaagcagcuccgggagaacgccgaggacauggggaacggcugcuucaagaucuaccacaagugcgacaacgcgugcaucgggagcauccgcaacggcaccuacgaccacgacgucuaccgcgacgaggcccugaacaaccgguuccagaucaaggggguggagcucaaguccggcuacaaggacuggauccuguggaucagcuucgccaucuccugcuuccugcucugcguggcccugcugggcuucaucaugugggccugccagaaggggaacauccgcugcaacaucugcaucuga

SEQ ID NO: 66552 - RNA, 1701 nt, Artificial Sequence
  derived and/or modified CDS sequence (opt1) from hemagglutinin__InfluenzaA__ACN32474
augaagaccaucaucgcccugagcuacauccucugccugguguccgcccagaagcugcccggcaacgacaacagcaccgcgacgcucugccuggggcaccacgccgucccgaacggcaccaucgugaagaccaucaccaacgaccagaucgaggugacgaacgccaccgagcugguccaguccagcuccaccggggagaucugcgacagcccccaccaggugcucgacggcgagaacugcacccugaucgacgcccugcucggggacccccagugcgacggcuuccagaacaagaagugggaccuguucguggagcgcuccaaggccuacagcaacugcuaccccuacgacgucccggacuacacgucccugcggagccucguggcguccagcggcacccuggaguucaacaacgaguccuucaacuggaccggggugacccagaacggcacgagcuccgccugcauccgccggagcaacaacuccuucuucagccgccugaacuggcucacccaccugaaguucaaguaccccgcccugaacaugaccaugcccaacaacgaggaguucgacaagcucuacaucuggggcguccaccaccccgggaccgacaacgaccagaucuuccuguacgcccaggcguccgggcggaucacggugagcaccaagcgcagccagcagaccgugaucccgaacaucggcucccggccccgcguccggaacauccccagccgcaucuccaucuacuggaccaucgugaagcccggcgacauccugcucaucaacagcacggggaaccugaucgccccgcggggcuacuucaagauccgcuccggcaagagcuccaucaugcggagcgacgcccccaucgggaagugcaacuccgagugcaucacccccaacggcagcauccccaacgacaagccguuccagaacgugaaccgcaucaccuacggggccugcccccgguacgucaagcagaacacccugaagcucgccacgggcaugcgcaacgugcccgagaagcagacccgggggaucuucggcgcgaucgccggguucaucgagaacggcugggagggcaugguggacgggugguacggcuuccgccaccagaacuccgaggggaucggccaggccgccgaccucaagagcacccaggccgcgaucgaccagaucaacgggaagcugaaccggcugaucggcaagaccaacgagaaguuccaccagaucgagaaggaguucuccgaggucgagggccgcauccaggaccuggagaaguacguggaggacacgaagaucgaccuguggagcuacaacgccgagcuccugguggcccuggagaaccagcacaccaucgaccucaccgacuccgagaugaacaagcuguucgagaagaccaagaagcagcugcgggagaacgccgaggacauggggaacggcugcuucaagaucuaccacaagugcgacaacgccugcaucgggagcauccgcaacggcacguacgaccacgaggucuaccgcgacgaggcgcucaacaaccgguuccagaucaaggggguggagcugaaguccggcuacaaggacuggauccuguggaucagcuucgccaucuccugcuuccuccugugcguggcccugcucggcuucaucaugugggccugccagaaggggaacauccgcugcaacaucugcaucuga

SEQ ID NO: 66553 - RNA, 1698 nt, Artificial Sequence; identical to SEQ ID NO: 66512
  derived and/or modified CDS sequence (opt1) from hemagglutinin__InfluenzaA__ACN32501

SEQ ID NO: 66554 - RNA, 1701 nt, Artificial Sequence
  derived and/or modified CDS sequence (opt1) from hemagglutinin__InfluenzaA__ACN32534
augaagaccaucaucgcccugagcuacauccucugccugguguucgcccagaagcugcccggcaacgacaacuccaccgcgacgcucugccuggggcaccacgccgucccgaacggcacccuggugaagaccaucaccaacgaccagaucgaggugacgaacgccaccgagcucguccagagcuccagcaccgggcgcaucugcgacagcccccaccagauccuggacggcgagaacugcacccugaucgacgcccuccugggggacccccacugcgacggcuuccagaacaaggagugggaccuguucguggagcggagcaaggccuacuccaacugcuaccccuacgacgugccggacuacgucagccuccgcucccugguggcgagcuccggcacgcuggaguucaacaacgagagcuucaacuggaccgggguggcccagaacggcaccuccagcgccugcaagcggcgcuccgacaagagcuucuucucccggcucaacuggcugcaccagcugaaguacaaguaccccgcccucaacgucaccaugcccaacaacgagaaguucgacaagcuguacaucuggggcgugcaccaccccgggacggacagcgaccagaucucccuguacgcgcaggccagcgggcgcgugaccgucagcaccaagcggucccagcagaccgugaucccgaacaucggcagcggccccugggugcgcggggucuccagccggaucuccaucuacuggacgaucgugaagcccggcgacauccuccugaucaacagcaccgggaaccugaucgcgccccgcggcuacuucaagauccgguccggcaagagcuccaucaugcgcagcgacgccccgaucgggaagugcaacuccgagugcaucacccccaacggcagcauccccaacgggaagcccuuccagaacgugaaccggaucaccuacggcgccugcccgcgcuacgucaagcagaacacgcucaagcuggccaccgggaugcggaacgugcccgagaagcagacccgcggcaucuucggcgccaucgccggguucaucgagaacggcugggaggggaugauggacggcugguacggguuccggcaccagaacuccgagggcaccggccaggccgccgaccugaaguccacgcaggcggccaucaaccagaucaacgggaagcucaaccgccugaucgagaagaccaacgagaaguuccaccagaucgagaaggaguucuccgagguggagggccggauccaggaccuggagaaguacgucgaggacaccaagaucgaccucuggagcuacaacgccgagcugcugguggcccucgagaaccagcacaccaucgaccugacggacuccgagaugaacaagcuguucgagcgcaccaagaagcagcuccgggagaacgccgaggacauggggaacggcugcuucaagaucuaccacaagugcgacaacgcgugcaucgggagcauccgcaacggcaccuacgaccacgacguguaccgcgacgaggcccugaacaaccgguuccagaucaagggcgucgagcugaaguccggguacaaggacuggauccucuggaucagcuucgccaucagcugcuuccugcugugcaucgugcuccugggcuucaucaugugggccugccagaaggggaacauccgcugcaacaucugcaucuga

SEQ ID NO: 66555 - RNA, 1701 nt, Artificial Sequence
  derived and/or modified CDS sequence (opt1) from hemagglutinin__InfluenzaA__ACN32545
augaagaccaucaucgcccugagcuacauccucugccugguguucgcccagaagcugcccggcaacgacaacuccaccgcgacgcucugccuggggcaccacgccgucccgaacggcaccaucgugaagaccaucaccaacgaccagaucgaggugacgaacgccaccgagcugguccagagcuccagcaccggggagaucugcgacagcccccaccagauccucgacggcgagaacugcacccugaucgacgcccugcucggggacccccacugcgacggcuuccagaacaagaagugggaccuguucguggagcgcagcaaggccuacuccaacugcuaccccuacgacgugccggacuacgcgagccugcggucccucaucgccagcuccggcacgcuggaguucaacaacgagagcuucaacuggaccggggucacccagaacggcaccuccagcgccugcauccgccgguccaacaacagcuucuucucccgccugaacuggcucacgcaccugaaguucaaguaccccgcccugaacgugaccaugcccaacaacgagaaguucgacaagcucuacaucuggggcgugcaccaccccgggaccgacaacgaccagaucuuccuguacgcgcaggccagcgggcggaucaccgucuccacgaagcgcagccagcagaccgugaucccgaacaucggcagccggccccgcgugcggaacauccccucccgcaucagcaucuacuggaccaucgucaagcccggcgacauccugcucaucaacuccaccgggaaccugaucgccccgcggggcuacuucaagauccgcagcgggaaguccagcaucaugcgguccgacgcccccaucggcaagugcaacagcgagugcaucacgcccaacggcuccauccccaacgacaagccguuccagaacgugaaccgcaucaccuacggggccugcccccgguacgugaagcagaacacccugaagcucgcgaccggcaugcgcaacguccccgagaagcagacgcgggggaucuucggcgccaucgccggguucaucgagaacggcugggagggcaugguggacgggugguacggcuuccgccaccagaacagcgaggggaucggccaggccgccgaccugaaguccacccaggcggccaucgaccagaucaacgggaagcugaaccggcucaucggcaagaccaacgagaaguuccaccagaucgagaaggaguucagcgagguggagggccgcauccaggaccuggagaaguacgucgaggacaccaagaucgaccugugguccuacaacgccgagcuccugguggcccuggagaaccagcacacgaucgaccucaccgacagcgagaugaacaagcuguucgagaagaccaagaagcagcugcgggagaacgccgaggacauggggaacggcugcuucaagaucuaccacaagugcgacaacgcgugcaucggguccauccgcaacggcaccuacgaccacgacguguaccgcgacgaggcccucaacaaccgguuccagaucaagggggucgagcugaaguccggcuacaaggacuggauccuguggaucuccuucgccaucagcugcuuccuccugugcguggcccugcucggcuucaucaugugggccugccagaaggggaacauccgcugcaacaucugcaucuga

SEQ ID NO: 66556 - RNA, 1698 nt, Artificial Sequence
  derived and/or modified CDS sequence (opt1) from hemagglutinin__InfluenzaA__ACN32793
augaaggugaagcugcucguccugcugugcaccuucaccgccacguacgccgacaccaucugcaucggcuaccacgcgaacaacagcaccgacaccguggacacggugcucgagaagaacgucaccgugacccacuccgugaaccugcuggaggacagccacaacgggaagcucugccugcugaagggcaucgcgccccuccagcuggggaacugcuccgucgccggcuggauccuggggaacccggagugcgagcuccugaucagcaaggaguccuggagcuacaucguggagacccccaaccccgagaacggcacgugcuaccccggcuacuucgccgacuacgaggagcugcgcgagcagcucuccagcguguccagcuucgagcgguucgagaucuucccgaaggaguccagcuggcccaaccacaccgucaccgggguguccgccagcugcucccacaacggcaagagcuccuucuaccgcaaccugcuguggcucaccgggaagaacggccuguaccccaaccugagcgaguccuacgccaacaacaaggagaaggaggugcucguccuguggggcgugcaccacccgcccaacaucggggaccagcgggcccuguaccacacggagaacgccuacgugagcgucgugagcucccacuacagccgccgguucacccccgagaucgccaagcgccccaaggugcgggaccaggagggccgcaucaacuacuacuggacccuccuggagcccggggacaccaucaucuucgaggcgaacggcaaccugaucgccccgcgguucgccuucgcccucucccgcggguucggcagcggcaucaucacguccaacgcccccauggacgagugcgacgcgaagugccagacgccccagggggccaucaacagcucccugcccuuccagaacguccacccggugaccaucggcgagugccccaaguacgugcggagcaccaagcugcgcauggucaccgggcuccggaacauccccuccauccagagccgcggccuguucggggccaucgccggcuucaucgagggcggguggaccggcaugguggacgggugguacggcuaccaccaccagaacgagcagggguccggcuacgccgcggaccagaaguccacccagaacgccaucaacggcaucaccaacaaggugaacagcgucaucgagaagaugaacacgcaguucaccgccguggggaaggaguucaacaagcuggagcggcgcauggagaaccucaacaagaaggucgacgacggcuuccuggacaucuggaccuacaacgccgagcugcucgugcugcuggagaacgagcggacccucgacuuccacgacagcaacgugaagaaccuguacgagaaggucaagucccagcugaagaacaacgccaaggagaucgggaacggcugcuucgaguucuaccacaagugcaacgacgagugcauggagagcgugaagaacgggacguacgacuaccccaaguacuccgaggagagcaagcucaaccgcgagaagaucgacggcgugaagcuggaguccaugggcgucuaccagauccuggcgaucuacagcaccguggccagcucccucgugcugcuggucagccucggggccaucuccuucuggaugugcagcaacggcucccugcagugccggaucugcaucuga

SEQ ID NO: 66557 - RNA, 1698 nt, Artificial Sequence; identical to SEQ ID NO: 65981
  derived and/or modified CDS sequence (opt1) from hemagglutinin__InfluenzaA__ACN32804

SEQ ID NO: 66558 - RNA, 1698 nt, Artificial Sequence; identical to SEQ ID NO: 65969
  derived and/or modified CDS sequence (opt1) from hemagglutinin__InfluenzaA__ACN32815

SEQ ID NO: 66559 - RNA, 1698 nt, Artificial Sequence; identical to SEQ ID NO: 65979
  derived and/or modified CDS sequence (opt1) from hemagglutinin__InfluenzaA__ACN32826

SEQ ID NO: 66560 - RNA, 1701 nt, Artificial Sequence; identical to SEQ ID NO: 66458
  derived and/or modified CDS sequence (opt1) from hemagglutinin__InfluenzaA__ACN32848

SEQ ID NO: 66561 - RNA, 1701 nt, Artificial Sequence
  derived and/or modified CDS sequence (opt1) from hemagglutinin__InfluenzaA__ACN32870
augaagaccaucaucgcccugagcuacauccucugccugguguucgcccagaaguuccccggcaacgacaacuccaccgcgacgcugugccucgggcaccacgccgucccgaacggcaccaucgugaagaccaucaccaacgaccagaucgaggugacgaacgccaccgagcugguccagagcuccagcaccggggagaucugcgacagcccccaccagauccuggacggcgagaacugcacccucaucgacgcccugcugggggacccccagugcgacggcuuccagaacaagaacugggaccucuucguggagcgcagcaaggccuacuccaacugcuaccccuacgacgugccggacuacgcgagccugcggucccuggucgccagcuccggcacgcucgaguucaacaacgagagcuucaacuggaccggggugacccagaacggcaccuccagcgccugcauccgccgguccaacaacagcuucuucucccgccugaacuggcugacgcacagcaaguucaaguaccccgcccucaacgugaccaugcccaacaacgagaacuucgacaagcuguacaucuggggcguccaccaccccgggaccgacaacgaccagaucuuccuguacgcgcaggccuccgggcggaucaccgugagcacgaagcgcagccagcagaccgugaucccgaacaucggcucccggccccgcguccggaacauccccagccgcaucuccaucuacuggaccaucgugaagcccggcgacauccuccugaucaacagcaccgggaaccugaucgccccgcggggcuacuucaagauccgcuccgggaaguccuccaucaugcggagcgacgcccccaucggcaagugcaacuccgagugcaucacgcccaacggcagcauccccaacgacaagccguuccagaacgugaaccgcaucaccuacggggccugcccccgguacgucaagcagaacacccucaagcuggcgaccggcaugcgcaacgugcccgagaagcagacgcgggggaucuucggcgccaucgccggguucaucgagaacggcugggagggcaugguggacgggugguacggcuuccgccaccagaacuccgaggggaucggccaggccgccgaccucaagagcacccaggcggccaucgaccagaucaacgggaagcugaaccggcugaucggcaagaccaacgagaaguuccaccagaucgagaaggaguucuccgaggucgagggccgcauccaggaccuggagaaguacguggaggacaccaagaucgaccucuggagcuacaacgccgagcugcugguggcccucgagaaccagcacacgaucgaccugaccgacuccgagaugaacaagcuguucgagaagaccaagaagcagcuccgggagaacgccgaggacauggggaacggcugcuucaagaucuaccacaagugcgacaacgcgugcaucgggagcauccgcaacggcaccuacgaccacgacgucuaccgcgacgaggcccugaacaaccgguuccagaucaaggggguggagcugaaguccggcuacaaggacuggauccucuggaucagcuucgccaucuccugcuuccugcugugcaucgcccuccugggcuucaucaugugggccugccagaaggggaacauccgcugcaacaucugcaucuga

SEQ ID NO: 66562 - RNA, 1701 nt, Artificial Sequence; identical to SEQ ID NO: 66561
  derived and/or modified CDS sequence (opt1) from hemagglutinin__InfluenzaA__ACN32892

SEQ ID NO: 66563 - RNA, 1701 nt, Artificial Sequence; identical to SEQ ID NO: 66458
  derived and/or modified CDS sequence (opt1) from hemagglutinin__InfluenzaA__ACN32903

SEQ ID NO: 66564 - RNA, 1701 nt, Artificial Sequence
  derived and/or modified CDS sequence (opt1) from hemagglutinin__InfluenzaA__ACN32914
augaagaccaucaucgcccugagcuacauccucugccuggccuucgcgcagaagcugcccggcaacgacaacuccaccgccacgcucugccuggggcaccacgccgugccgaacggcaccaucgucaagaccaucaccaacgaccagaucgaggugacgaacgccaccgagcuggugcagagcuccagcaccggggagaucugcgacagcccccaccagauccucgacggcgagaacugcacccugaucgacgcccugcucggggacccccagugcgacggcuuccagaacaagaagugggaccuguucgucgagcgcagcaaggcguacuccaacugcuaccccuacgacgugccggacuacgccagccugcggucccucguggccagcuccggcacgcuggaguucaacaacgagagcuucaacuggaccggggucacccagaacggcaccuccagcgccugcauccgccgguccaacaacagcuucuucucccgccugaacuggcucacgcaccugaaguucaaguaccccgcgcugaacgugaccaugcccaacaacgagcaguucgacaagcucuacaucuggggcgugcaccaccccgggaccgacaacgaccagaucuuccuguacgcccaggccagcgggcggaucaccgucuccacgaagcgcagccagcagaccgugaucccgaacaucggcagccggccccgcgugcggaacauccccucccgcaucagcaucuacuggaccaucgucaagcccggcgacauccugcucaucaacuccaccgggaaccugaucgccccgcggggcuacuucaagauccgcagcgggaaguccagcaucaugcgguccgacgcccccaucggcaagugcaacagcgagugcaucacgcccaacggcuccauccccaacgacaagccguuccagaacgugaaccgcaucaccuacggggcgugcccccgguacgugaagcagaacacccugaagcucgccaccggcaugcgcaacguccccgagaagcagacgcgggggaucuucggcgccaucgccggguucaucgagaacggcugggagggcaugguggacgggugguacggcuuccgccaccagaacagcgaggggcggggccaggccgcggaccugaaguccacccaggccgccaucgaccagaucaacgggaagcugaaccgccucaucggcaagaccaacgagaaguuccaccagaucgagaaggaguucagcgagguggagggccggauccaggaccuggagaaguacgucgaggacaccaagaucgaccugugguccuacaacgccgagcuccugguggcccuggagaaccagcacacgaucgaccucaccgacagcgagaugaacaagcuguucgagaagaccaagaagcagcugcgcgagaacgcggaggacauggggaacggcugcuucaagaucuaccacaagugcgacaacgccugcaucggguccauccgcaacggcaccuacgaccacgacguguaccgggacgaggcccucaacaaccgcuuccagaucaagggggucgagcugaaguccggcuacaaggacuggauccuguggaucuccuucgccaucagcugcuuccuccugugcguggcccugcucggcuucaucaugugggcgugccagaaggggaacauccggugcaacaucugcaucuga

SEQ ID NO: 66565 - RNA, 1701 nt, Artificial Sequence; identical to SEQ ID NO: 66458
  derived and/or modified CDS sequence (opt1) from hemagglutinin__InfluenzaA__ACN32925

SEQ ID NO: 66566 - RNA, 1701 nt, Artificial Sequence
  derived and/or modified CDS sequence (opt1) from hemagglutinin__InfluenzaA__ACN32936
augaagaccaucaucgcccugagcuacauccucugccugguguucgcccagaaguuccccggcaacgacaacuccaccgcgacgcugugccucgggcaccacgccgucccgaacggcaccaucgugaagaccaucaccaacgaccagaucgaggugacgaacgccaccgagcugguccagagcuccagcaccggggagaucugcgacagcccccaccagauccuggacggcgagaacugcacccucaucgacgcccugcugggggacccccagugcgacggcuuccagaacaagaacugggaccucuucguggagcgcagcaaggccuacuccaacugcuaccccuacgacgugccggacuacgcgagccugcggucccuggucgccagcuccggcacgcucgaguucaacaacgagagcuucaacuggaccggggugacccagaacggcaccuccagcgccugcauccgccgguccaacaacagcuucuucucccgccugaacuggcugacgcacagcaaguucaaguaccccgcccucaacgugaccaugcccaacaacgagaacuucgacaagcuguacaucuggggcguccaccaccccgggaccgacaacgaccagaucuuccuguacgcgcaggccuccgggcggaucaccgugagcacgaagcgcagccagcagaccgugaucccgaacaucggcucccggccccgcaucaagaacauccccagccggaucuccaucuacuggaccaucgucaagcccggcgacauccuccugaucaacagcaccgggaaccugaucgccccgcgcggcuacuucaagauccgguccgggaaguccuccaucaugcgcagcgacgcccccaucggcaagugcaacuccgagugcaucacgcccaacggcagcauccccaacgacaagccguuccagaacgugaaccggaucaccuacggggccugcccccgcuacgugaagcagaacacccucaagcuggcgaccggcaugcggaacguccccgagaagcagacgcgcgggaucuucggcgccaucgccggguucaucgagaacggcugggagggcaugguggacgggugguacggcuuccggcaccagaacuccgaggggaucggccaggccgccgaccucaagagcacccaggcggccaucgaccagaucaacgggaagcugaaccgccugaucggcaagaccaacgagaaguuccaccagaucgagaaggaguucuccgagguggagggccggauccaggaccuggagaaguacgucgaggacaccaagaucgaccucuggagcuacaacgccgagcugcugguggcccucgagaaccagcacacgaucgaccugaccgacuccgagaugaacaagcuguucgagaagaccaagaagcagcuccgcgagaacgccgaggacauggggaacggcugcuucaagaucuaccacaagugcgacaacgcgugcaucgggagcauccggaacggcaccuacgaccacgacguguaccgcgacgaggcccugaacaaccgcuuccagaucaagggggucgagcugaaguccggcuacaaggacuggauccucuggaucagcuucgccaucuccugcuuccugcugugcaucgcccuccugggcuucaucaugugggccugccagaaggggaacauccggugcaacaucugcaucuga

SEQ ID NO: 66567 - RNA, 1701 nt, Artificial Sequence; identical to SEQ ID NO: 66458
  derived and/or modified CDS sequence (opt1) from hemagglutinin__InfluenzaA__ACN32947

SEQ ID NO: 66568 - RNA, 1701 nt, Artificial Sequence
  derived and/or modified CDS sequence (opt1) from hemagglutinin__InfluenzaA__ACN32958
augaagaccaucaucgcccugagcuacauccucugccugguguucgcccagaagcugcccggcaacgacaacuccaccgcgacgcucugccuggggcaccacgccgucccgaacggcaccaucgugaagaccaucaccaacgaccagaucgaggugacgaacgccaccgagcugguccagagcuccagcaccggggagaucugcgacagcccccaccagauccucgacggcgagaacugcacccugaucgacgcccugcucggggacccccagugcgacggcuuccagaacaagaagugggaccuguucguggagcgcaacaaggccuacagcaacugcuaccccuacgacgugccggacuacgcgucccugcggagccucgucgccuccagcggcacgcuggaguucaacaacgaguccuucaacuggaccggggugacccagaacggcaccagcuccgccugcauccgccggagcaacaacuccuucuucagccgccugaacuggcucacgcaccugaaguucaaguaccccgcccugaacgugaccaugcccaacaacgagcaguucgacaagcucuacaucuggggcguccaccaccccgggaccgacaacgaccagaucuuccuguacgcgcaggccuccgggcggaucaccgugagcacgaagcgcucccagcagaccgugaucccgaacaucggcagccggccccgcguccggaacauccccagccgcaucuccaucuacuggaccaucgugaagcccggcgacauccugcucaucaacagcaccgggaaccugaucgccccgcggggcuacuucaagauccgcuccgggaaguccuccaucaugcggagcgacgcccccaucggcaagugcaacuccgagugcaucacgcccaacggcagcauccccaacgacaagccguuccagaacgugaaccgcaucaccuacggggccugcccccgguacgucaagcagaacacccugaagcucgcgaccggcaugcgcaacgugcccgagaagcagacgcgggggaucuucggcgccaucgccggguucaucgagaacggcugggagggcaugguggacgggugguacggcuuccgccaccagaacuccgaggggcggggccaggccgccgaccucaagagcacccaggcggccaucgaccagaucaacgggaagcugaaccgccugaucggcaagaccaacgagaaguuccaccagaucgagaaggaguucuccgaggucgagggccggauccaggaccuggagaaguacguggaggacaccaagaucgaccuguggagcuacaacgccgagcuccugguggcccuggagaaccagcacacgaucgaccucaccgacuccgagaugaacaagcuguucgagaagaccaagaagcagcugcgcgagaacgccgaggacauggggaacggcugcuucaagaucuaccacaagugcgacaacgcgugcaucgggagcauccgcaacggcaccuacgaccacgacgucuaccgggacgaggcccucaacaaccgcuuccagaucaaggggguggagcugaaguccggcuacaaggacuggauccuguggaucagcuucgccaucuccugcuuccuccugugcguggcccugcucggcuucaucaugugggccugccagaaggggaacauccggugcaacaucugcaucuga

SEQ ID NO: 66569 - RNA, 1701 nt, Artificial Sequence
  derived and/or modified CDS sequence (opt1) from hemagglutinin__InfluenzaA__ACN32969
augaagaccaucaucgcccugagcuacauccucugccugguguccgcccagaagcugcccggcaacgacaacagcaccgcgacgcucugccuggggcaccacgccgucccgaacggcaccaucgugaagaccaucaccaacgaccagaucgaggugacgaacgccaccgagcugguccaguccagcuccaccggggagaucugcgacagcccccaccaggugcucgacggcgagaacugcacccugaucgacgcccugcucggggacccccagugcgacggcuuccagaacaagaagugggaccuguucguggagcgcuccaaggccuacagcaacugcuaccccuacgacgucccggacuacgcgucccugcggagccucguggccuccagcggcacgcuggaguucaacaacgaguccuucaacuggaccggggugacccagaacggcaccagcuccgccugcauccgccggagcaacaacuccuucuucagccgccugaacuggcucacgcacuccaaguucaaguaccccgcccugaacgucaccaugcccaacaacgaggaguucgacaagcuguacaucuggggcgugcaccaccccgggaccgacaacgaccagaucuuccucuacgcgcaggccagcgggcggaucaccgugagcacgaagcgcucccagcagaccgucaucccgaacaucggcagccggccccgcgugcggaacauccccucccgcaucagcaucuacuggaccaucgugaagcccggcgacauccugcugaucaacuccaccgggaaccucaucgccccgcggggcuacuucaagcugcgcagcgggaaguccagcaucaugcgguccgacgcccccaucggcaagugcaacagcgagugcaucacgcccaacggcuccauccccaacgacaagccguuccagaacgucaaccgcaucaccuacggggccugcccccgguacgugaagcagaacacccugaagcucgcgaccggcaugcgcaacgugcccgagaagcagacgcgggggaucuucggcgccaucgccggguucaucgagaacggcugggagggcauggucgacgggugguacggcuuccgccaccagaacagcgaggggaucggccaggccgccgaccugaaguccacccaggcggccaucgaccagaucaacgggaagcugaaccggcucaucggcaagaccaacgagaaguuccaccagaucgagaaggaguucagcgagguggagggccgcauccaggaccuggagaaguacguggaggacaccaagaucgaccugugguccuacaacgccgagcuccuggucgcccuggagaaccagcacacgaucgaccucaccgacagcgagaugaacaagcuguucgagaagaccaagaagcagcugcgggagaacgccgaggacauggggaacggcugcuucaagaucuaccacaagugcgacaacgcgugcaucggguccauccgcaacggcaccuacgaccacgagguguaccgcgacgaggcccucaacaaccgguuccagaucaaggggguggagcucaagagcggcuacaaggacuggauccuguggaucuccuucgccaucagcugcuuccugcugugcgucgcccugcucggcuucaucaugugggccugccagaaggggaacauccgcugcaacaucugcaucuga

SEQ ID NO: 66570 - RNA, 1701 nt, Artificial Sequence
  derived and/or modified CDS sequence (opt1) from hemagglutinin__InfluenzaA__ACN32980
augaagaccaucaucgcccugagcuacauccucugccugguguucgcccagaagcugcccggcaacgacaacuccaccgcgacgcucugccuggggcaccacgccgucccgaacggcaccaucgugaagaccaucaccaacgaccagaucgaggugacgaacgccaccgagcugguccagagcuccagcaccggggagaucugcgacagcccccaccagauccucgacggcgagaacugcacccugaucgacgcccugcucggggacccccagugcgacggcuuccagaacaagaagugggaccuguucguggagcgcagcaaggcccacuccaacugcuaccccuacgacgugccggacuacgcgagccugcggucccucgucgccagcuccggcacgcuggaguucaacaacgagagcuucaacuggaccggggugacccagaacggcaccuccagcgccugcauccgccgguccaagaacagcuucuucucccgccugaacuggcucacgcaccugaaguucaaguaccccgcccugaacgugaccaugcccaacgacgagaaguucgacaagcucuacaucuggggcguccaccaccccgggaccgacaacgaccagaucuuccuguacgcgcaggccagcgggcggaucaccguguccacgaagcgcagccagcagaccgugaucccgaacaucggcagccggccccgcguccggaacauccccucccgcaucagcaucuacuggaccaucgugaagcccggcgacauccugcucaucaacuccaccgggaaccugaucgccccgcggggcuacuucaagauccgcagcgggaaguccagcaucaugcgguccgacgcccccaucggcaagugcaacagcgagugcaucacgcccaacggcuccauccccaacgacaagccguuccagaacgugaaccgcaucaccuacggggccugcccccgguacgucaagcagaacacccugaagcucgcgaccggcaugcgcaacgugcccgagaagcagacgcgggggaucuucggcgccaucgccggguucaucgagaacggcugggagggcaugguggacgggugguacggcuuccgccaccagaacagcgaggggaucggccaggccgccgaccugaaguccacccaggcggccaucgaccagaucaacgggaagcugaaccggcucaucggcaagaccaacgagaaguuccaccagaucgagaaggaguucagcgaggucgagggccgcauccaggaccuggagaaguacguggaggacaccaagaucgaccugugguccuacaacgccgagcuccugguggcccuggagaaccagcacacgaucgaccucaccgacagcgagaugaacaagcuguucgagaagaccaagaagcagcugcgggagaacgccgaggacauggggaacggcugcuucaagaucuaccacaagugcgacaacgcgugcgucggguccauccgcaacggcaccuacgaccacgacguguaccgcgacgaggcccucaacaaccgguuccagaucaaggggguggagcugaaguccggcuacaaggacuggauccuguggaucuccuucgccaucagcugcuuccuccugugcgucgcccugcucggcuucaucaugugggccugccagaaggggaacauccgcugcaacaucugcaucuga

SEQ ID NO: 66571 - RNA, 1701 nt, Artificial Sequence; identical to SEQ ID NO: 66458
  derived and/or modified CDS sequence (opt1) from hemagglutinin__InfluenzaA__ACN32991

SEQ ID NO: 66572 - RNA, 1701 nt, Artificial Sequence; identical to SEQ ID NO: 66458
  derived and/or modified CDS sequence (opt1) from hemagglutinin__InfluenzaA__ACN33002

SEQ ID NO: 66573 - RNA, 1701 nt, Artificial Sequence; identical to SEQ ID NO: 66458
  derived and/or modified CDS sequence (opt1) from hemagglutinin__InfluenzaA__ACN33013

SEQ ID NO: 66574 - RNA, 1701 nt, Artificial Sequence
  derived and/or modified CDS sequence (opt1) from hemagglutinin__InfluenzaA__ACN33035
augaagaccaucaucgcccugagcuacauccucugccugguguucgcccagaagcugcccggcaacgacaacuccaccgcgacgcucugccuggggcaccacgccgucccgaacggcaccaucgugaagaccaucaccaacgaccagaucgaggugacgaacgccaccgagcugguccagagcuccagcaccggggagaucugcgacagcccccaccagauccucgacggcgagaacugcacccugaucgacgcccugcucggggacccccagugcgacggcuuccagaacaagaagugggaccuguucguggagcgcagcaaggccuacuccaacugcuaccccuacgacgugccggacuacgcgagccugcggucccucgucgccagcuccggcacgcuggaguucaacaacgagagcuucaacuggaccggggugacccagaacggcaccuccagcgccugcauccgccgguccaacaacagcuucuucucccgccugaacuggcucacgcaccugaaguucaaguaccccgcccugaacgugaccaugcccaacaacgagcaguucgacaagcucuacgucuggggcgugcaccaccccgggaccgacaacgaccagaucuuccuguacgcgcaggccagcgggcggaucaccguguccacgaagcgcagccagcagaccgucaucccgaacaucggcagccggccccgcgugcggaacauccccucccgcaucagcaucuacuggaccaucgugaagcccggcgacauccugcucaucaacuccaccgggaaccugaucgccccgcggggcuacuucaagauccgcagcgggaaguccagcaucaugcgguccgacgcccccaucggcaagugcaacagcgagugcaucacgcccaacggcuccauccccaacgacaagccguuccagaacgucaaccgcaucaccuacggggccugcccccgguacgugaagcagaacacccugaagcucgcgaccggcaugcgcaacgugcccgagaagcagacgcgggggaucuucggcgccaucgccggguucaucgagaacggcugggagggcauggucgacgggugguacggcuuccgccaccagaacagcgaggggcggggccaggccgccgaccugaaguccacccaggcggccaucgaccagaucaacgggaagcugaaccgccucaucggcaagaccaacgagaaguuccaccagaucgagaaggaguucagcgagguggagggccggauccaggaccuggagaaguacguggaggacaccaagaucgaccugugguccuacaacgccgagcuccuggucgcccuggagaaccagcacacgaucgaccucaccgacagcgagaugaacaagcuguucgagaagaccaagaagcagcugcgcgagaacgccgaggacauggggaacggcugcuucaagaucuaccacaagugcgacaacgcgugcaucggguccauccgcaacggcaccuacgaccacgacguguaccgggacgaggcccucaacaaccgcuuccagaucaaggggguggagcugaaguccggcuacaaggacuggauccuguggaucuccuucgccaucagcugcuuccuccugugcgucgcccugcucggcuucaucaugugggccugccagaaggggaacauccggugcaacaucugcaucuga

SEQ ID NO: 66575 - RNA, 1701 nt, Artificial Sequence; identical to SEQ ID NO: 66458
  derived and/or modified CDS sequence (opt1) from hemagglutinin__InfluenzaA__ACN33046

SEQ ID NO: 66576 - RNA, 1701 nt, Artificial Sequence; identical to SEQ ID NO: 66458
  derived and/or modified CDS sequence (opt1) from hemagglutinin__InfluenzaA__ACN33057

SEQ ID NO: 66577 - RNA, 1701 nt, Artificial Sequence; identical to SEQ ID NO: 66458
  derived and/or modified CDS sequence (opt1) from hemagglutinin__InfluenzaA__ACN33068

SEQ ID NO: 66578 - RNA, 1701 nt, Artificial Sequence; identical to SEQ ID NO: 66561
  derived and/or modified CDS sequence (opt1) from hemagglutinin__InfluenzaA__ACN33079

SEQ ID NO: 66579 - RNA, 1698 nt, Artificial Sequence
  derived and/or modified CDS sequence (opt1) from hemagglutinin__InfluenzaA__ACN33090
augaaggugaagcugcucauccugcugugcaccuucaccgccacguacgccgacaccaucugcaucggcuaccacgcgaacaacagcaccgacaccgucgacacggugcucgagaagaacgugaccgucacccacuccgugaaccugcuggaggacagccacaacgggaagcucugccugcugaagggcaucgcgccccuccagcuggggaacugcuccguggccggcuggauccuggggaacccggagugcgagcuccugaucagcaaggaguccuggagcuacaucgucgagacccccaaccccgagaacggcacgugcuaccccggcuacuucgccgacuacgaggagcugcgcgagcagcucuccagcguguccagcuucgagcgguucgagaucuucccgaaggaguccagcuggcccaaccacaccgugaccggggucuccgccagcugcucccacaacggcaagagcuccuucuaccgcaaccugcuguggcucaccgggaagaacggccuguaccccaaccugagcaaguccuacgccaacaacaaggagaaggaggugcucgugcuguggggcguccaccaccccagcaacaucggggaccagcgggcccuguaccacacggagaacgccuacgugagcguggucuccagccacuacucccgccgguucaccccggagaucgccaagcgccccaaggugcgggaccaggagggccgcaucaacuacuacuggacccuccuggagcccggggacaccaucaucuucgaggcgaacggcaaccugaucgcgccccgguucgccuucgcccucagccgcggguucggcuccggcaucaucacgagcaacgccccgauggacgagugcgacgccaagugccagacgccccagggggccaucaacuccagccugcccuuccagaacgugcaccccgucaccaucggcgagugcccgaaguacgugcgguccaccaagcugcgcauggugaccgggcuccggaacauccccagcauccagucccgcggccuguucggggccaucgccggcuucaucgagggcggguggaccggcauggucgacgggugguacggcuaccaccaccagaacgagcaggggagcggcuacgccgcggaccagaaguccacccagaacgccaucaacggcaucaccaacaaggugaacagcgugaucgagaagaugaacacgcaguucaccgccgucgggaaggaguucaacaagcuggagcggcgcauggagaaccucaacaagaagguggacgacggcuuccuggacaucuggaccuacaacgccgagcugcucguccugcuggagaacgagcggacccucgacuuccacgacuccaacgugaagaaccuguacgagaaggucaagagccagcugaagaacaacgccaaggagaucgggaacggcugcuucgaguucuaccacaagugcaacgacgagugcauggaguccgugaagaacgggacguacgacuaccccaaguacagcgaggaguccaagcucaaccgcgagaagaucgacggcgugaagcuggagagcaugggcguguaccagauccuggcgaucuacagcaccgucgccuccagccucgugcugcuggugucccucggggccaucagcuucuggaugugcuccaacggcagccugcagugccggaucugcaucuga

SEQ ID NO: 66580 - RNA, 1698 nt, Artificial Sequence; identical to SEQ ID NO: 65938
  derived and/or modified CDS sequence (opt1) from hemagglutinin__InfluenzaA__ACN33101

SEQ ID NO: 66581 - RNA, 1701 nt, Artificial Sequence; identical to SEQ ID NO: 66561
  derived and/or modified CDS sequence (opt1) from hemagglutinin__InfluenzaA__ACN33112

SEQ ID NO: 66582 - RNA, 1698 nt, Artificial Sequence; identical to SEQ ID NO: 66512
  derived and/or modified CDS sequence (opt1) from hemagglutinin__InfluenzaA__ACN33123

SEQ ID NO: 66583 - RNA, 1698 nt, Artificial Sequence; identical to SEQ ID NO: 66512
  derived and/or modified CDS sequence (opt1) from hemagglutinin__InfluenzaA__ACN33145

SEQ ID NO: 66584 - RNA, 1701 nt, Artificial Sequence; identical to SEQ ID NO: 66458
  derived and/or modified CDS sequence (opt1) from hemagglutinin__InfluenzaA__ACN33156

SEQ ID NO: 66585 - RNA, 1701 nt, Artificial Sequence
  derived and/or modified CDS sequence (opt1) from hemagglutinin__InfluenzaA__ACN33178
augaagaccaucaucgcccugagcuacauccucugccugguguucgcccagaaguuccccggcaacgacaacuccaccgcgacgcugugccucgggcaccacgccgucccgaacggcaccaucgugaagaccaucaccaacgaccagaucgaggugacgaacgccaccgagcugguccagagcuccagcaccggggagaucugcgacagcccccaccagauccuggacggcgagaacugcacccucaucgacgcccugcugggggacccccagugcgacggcuuccagaacaagaacugggaccucuucguggagcgcagcaaggccuacuccaacugcuaccccuacgacgugccggacuacgcgagccugcggucccuggucgccagcuccggcacgcucgaguucaacaacgagagcuucaacuggaccggggugacccagaacggcaccuccagcgccugcauccgccgguccaacaacagcuucuucucccgccugaacuggcugacgcacagcaaguucaaguaccccgcccucaacgugaccaugcccaacaacgagaacuucgacaagcuguacaucuggggcguccaccaccccgggaccgacaacgaccagaucuuccuguacgcgcaggccuccgggcggaucaccgugagcacgaagcgcagccagcagaccgugaucccgaacaucggcucccggccccgcguccggaacauccccagccgcaucuccaucuacuggaccaucgugaagcccggcgacauccuccugaucaacagcaccgggaaccugaucgccccgcggggcuacuucaagauccgcuccgggaaguccuccaucaugcggagcgacgcccccaucggcaagugcaacuccgagugcaucacgcccaacggcagcauccccaacgacaagccguuccagaacgugaaccgcaucaccuacggggccugcccccgguacgucaagcagaacacccucaagcuggcgaccggcaugcgcaacgugcccgagaagcagacgcgggggaucuucggcgccaucgccggguucaucgagaacggcugggagggcaugguggacgggugguacggcuuccgccaccagaacuccgaggggaucggccaggccgccgaccucaagagcacccaggcggccaucgaccagaucaacgggaagcugaaccggcugaucggcaagaccaacgagaaguuccaccagaucgagaaggaguucuccgaggucgagggccgcauccaggaccuggagaaguacguggaggacaccaagaucgaccucuggagcuacaacgccgagcugcugguggcccucgagaaccagcacacgaucgaccugaccgacuccgagaugaacaagcuguucgagaagaccaagaagcagcuccgggagaacgccgaggacauggggaacggcugcuucaagaucuaccacaagugcgacaacgcgugcaucgggagcauccgcaacggcaccuacgaccacgacgucuaccgcgacgaggcccugaacaaccgguuccacaucaaggggguggagcugaaguccggcuacaaggacuggauccucuggaucagcuucgccaucuccugcuuccugcugugcaucgcccuccugggcuucaucaugugggccugccagaaggggaacauccgcugcaacaucugcaucuga

SEQ ID NO: 66586 - RNA, 1701 nt, Artificial Sequence; identical to SEQ ID NO: 66458
  derived and/or modified CDS sequence (opt1) from hemagglutinin__InfluenzaA__ACN33189

SEQ ID NO: 66587 - RNA, 1701 nt, Artificial Sequence
  derived and/or modified CDS sequence (opt1) from hemagglutinin__InfluenzaA__ACN33200
augaagaccaucaucgcccugagcuacauccucugccugguguucgcccagaaguuccccggcaacgacaacuccaccgcgacgcugugccucgggcaccacgccgucccgaacggcaccaucgugaagaccaucaccaacgaccagaucgaggugacgaacgccaccgagcugguccagagcuccagcaccggggagaucugcgacagcccccaccagauccuggacggcgagaacugcacccucaucgacgcccugcugggggacccccagugcgacggcuuccagaacaagaacugggaccucuucguggagcgcagcaaggccuacuccaacugcuaccccuacgacgugccggacuacgcgagccugcggucccuggucgccagcuccggcacgcucgaguucaacaacgagagcuucaacuggaccggggugacccagaacggcaccuccagcgccugcauccgccgguccaacaacagcuucuucucccgccugaacuggcugacgcacagcaaguucaaguaccccgcccucaacgugaccaugcccaacaacgagaacuucgacaagcuguacaucuggggcguccaccaccccgggaccgacaacgaccagaucuuccuguacgcgcaggccuccgggcggaucaccgugagcacgaagcgcagccagcagaccgugaucccgaacaucggcucccggccccgcguccggaacauccccagccgcaucuccaucuacuggaccaucguggagcccggcgacauccuccugaucaacagcaccgggaaccugaucgccccgcggggcuacuucaagauccgcuccgggaaguccuccaucaugcggagcgacgcccccaucggcaagugcaacuccgagugcaucacgcccaacggcagcauccccaacgacaagccguuccagaacgugaaccgcaucaccuacggggccugcccccgguacgucaagcagaacacccucaagcuggcgaccggcaugcgcaacgugcccgagaagcagacgcgggggaucuucggcgccaucgccggguucaucgagaacggcugggagggcaugguggacgggugguacggcuuccgccaccagaacuccgaggggaucggccaggccgccgaccucaagagcacccaggcggccaucgaccagaucaacgggaagcugaaccggcugaucggcaagaccaacgagaaguuccaccagaucgagaaggaguucuccgaggucgagggccgcauccaggaccuggagaaguacguggaggacaccaagaucgaccucuggagcuacaacgccgagcugcugguggcccucgagaaccagcacacgaucgaccugaccgacuccgagaugaacaagcuguucgagaagaccaagaagcagcuccgggagaacgccgaggacauggggaacggcugcuucaagaucuaccacaagugcgacaacgcgugcaucgggagcauccgcaacggcaccuacgaccacgacgucuaccgcgacgaggcccugaacaaccgguuccagaucaaggggguggagcugaaguccggcuacaaggacuggauccucuggaucagcuucgccaucuccugcuuccugcugugcaucgcccuccugggcuucaucaugugggccugccagaaggggaacauccgcugcaacaucugcaucuga

SEQ ID NO: 66588 - RNA, 1701 nt, Artificial Sequence
  derived and/or modified CDS sequence (opt1) from hemagglutinin__InfluenzaA__ACN33211
augaagaccaucaucgcccugagcuacauccucugccugguguucgcccagaagcugcccggcaacgacaacuccaccgcgacgcucugccuggggcaccacgccgucccgaacggcaccaucgugaagaccaucaccaacgaccagaucgaggugacgaacgccaccgagcugguccagagcuccagcaccggggagaucugcgacagcccccaccagauccucgacggcgagaacugcacccugaucgacgcccugcucggggacccccagugcgacggcuuccagaacaagaagugggaccuguucguggagcgcuccaaggccuacuccaacugcuaccccuacgacgugccggacuacgcgagccugcggucccucgucgccagcuccggcacgcuggaguucaacaacgagagcuucaacuggaccggggugacccagaacggcaccuccagcgccugcauccgccgguccaacaacagcuucuucucccgccugaacuggcucacgcaccugaaguucaaguaccccgcccugaacgugaccaugcccaacaacgagcaguucgacaagcucuacaucuggggcguccaccaccccgggaccgacaacgaccagaucuuccuguacgcgcaggccagcgggcggaucaccguguccacgaagcgcagccagcagaccgugaucccgaacaucggcagccggccccgcguccggaacauccccucccgcaucagcaucuacuggaccaucgugaagcccggcgacauccugcucaucaacuccaccgggaaccugaucgccccgcggggcuacuucaagauccgcagcgggaaguccagcaucaugcgguccgacgcccccaucggcaagugcaacagcgagugcaucacgcccaacggcuccauccccaacgacaagccguuccagaacgugaaccgcaucaccuacggggccugcccccgguacgucaagcagaacacccugaagcucgcgaccggcaugcgcaacgugcccgagaagcagacgcgggggaucuucggcgccaucgccggguucaucgagaacggcugggagggcaugguggacgggugguacggcuuccgccaccagaacagcgaggggcggggccaggccgccgaccugaaguccacccaggcggccaucgaccagaucaacgggaagcugaaccgccucaucggcaagaccaacgagaaguuccaccagaucgagaaggaguucagcgaggucgagggccggauccaggaccuggagaaguacguggaggacaccaagaucgaccugugguccuacaacgccgagcuccugguggcccuggagaaccagcacacgaucgaccucaccgacagcgagaugaacaagcuguucgagaagaccaagaagcagcugcgcgagaacgccgaggacauggggaacggcugcuucaagaucuaccacaagugcgacaacgcgugcaucggguccauccgcaacggcaccuacgaccacgacgucuaccgggacgaggcccucagcaaccgcuuccagaucaaggggguggagcugaaguccggcuacaaggacuggauccuguggaucagcuucgccaucuccugcuuccuccugugcguggcccugcucggcuucaucaugugggccugccagaaggggaacauccggugcaacaucugcaucuga

SEQ ID NO: 66589 - RNA, 1698 nt, Artificial Sequence; identical to SEQ ID NO: 65980
  derived and/or modified CDS sequence (opt1) from hemagglutinin__InfluenzaA__ACN42981

SEQ ID NO: 66590 - RNA, 1698 nt, Artificial Sequence; identical to SEQ ID NO: 66214
  derived and/or modified CDS sequence (opt1) from hemagglutinin__InfluenzaA__ACN42992

SEQ ID NO: 66591 - RNA, 1701 nt, Artificial Sequence; identical to SEQ ID NO: 66458
  derived and/or modified CDS sequence (opt1) from hemagglutinin__InfluenzaA__ACN43003

SEQ ID NO: 66592 - RNA, 1701 nt, Artificial Sequence
  derived and/or modified CDS sequence (opt1) from hemagglutinin__InfluenzaA__ACN43014
augaagaccaucaucgcccugagcuacauccucugccugguguucgcccagaaguuccccggcaacgacaacuccaccgcgacgcugugccucgggcaccacgccgucccgaacggcaccaucgugaagaccaucaccaacgaccagaucgaggugacgaacgccaccgagcugguccagagcuccagcaccggggagaucugcgacagcccccaccagauccuggacggcgagaacugcacccucaucgacgcccugcugggggacccccagugcgacggcuuccagaacaagaacugggaccucuucguggagcgcagcaaggccuacuccaacugcuaccccuacgacgugccggacuacgcgagccugcggucccuggucgccagcuccggcacgcucgaguucaacaacgagagcuucaacuggaucggggugacccagaacggcaccuccagcgccugcauccgccgguccaacaacagcuucuucucccgccugaacuggcugacccacagcaaguucaaguaccccgcccucaacgugacgaugcccaacaacgagaacuucgacaagcuguacaucuggggcguccaccaccccgggaccgacaacgaccagaucuuccuguacgcgcaggccuccgggcggaucaccgugagcaccaagcgcagccagcagacggugaucccgaacaucggcucccggccccgcguccggaacauccccagccgcaucuccaucuacuggaccaucgugaagcccggcgacauccuccugaucaacagcaccgggaaccugaucgccccgcggggcuacuucaagauccgcuccgggaaguccuccaucaugcggagcgacgcccccaucggcaacugcaacuccgagugcaucacccccaacggcagcauccccaacgacaagccguuccagaacgugaaccgcaucacguacggguccugcccccgguacgucaagcagaacacccucaagcuggccaccggcaugcgcaacgugcccgagaagcagacccgggggaucuucggcgcgaucgccggguucaucgagaacggcugggagggcaugguggacgggugguacggcuuccgccaccagaacagcgaggggaucggccaggccgccgaccugaaguccacgcaggccgcgaucgaccagaucaacgggaagcucaaccggcugaucggcaagaccaacgagaaguuccaccagaucgagaaggaguucagcgaggucgagggccgcauccaggaccuggagaaguacguggaggacaccaagaucgaccucugguccuacaacgccgagcugcugguggcccucgagaaccagcacaccaucgaccugacggacagcgagaugaacaagcuguucgagaagaccaagaagcagcuccgggagaacgccgaggacauggggaacggcugcuucaagaucuaccacaagugcgacaacgccugcaucggguccauccgcaacggcaccuacgaccacgacgucuaccgcgacgaggcgcugaacaaccgguuccagaucaaggggguggagcucaagagcggcuacaaggacuggauccuguggaucuccuucgccaucagcugcuuccugcugugcaucgcccuccugggcuucaucaugugggccugccagaaggggaacauccgcugcaacaucugcaucuga

SEQ ID NO: 66593 - RNA, 1701 nt, Artificial Sequence; identical to SEQ ID NO: 66458
  derived and/or modified CDS sequence (opt1) from hemagglutinin__InfluenzaA__ACN43025

SEQ ID NO: 66594 - RNA, 1701 nt, Artificial Sequence; identical to SEQ ID NO: 66458
  derived and/or modified CDS sequence (opt1) from hemagglutinin__InfluenzaA__ACN43036

SEQ ID NO: 66595 - RNA, 1701 nt, Artificial Sequence; identical to SEQ ID NO: 66458
  derived and/or modified CDS sequence (opt1) from hemagglutinin__InfluenzaA__ACN43047

SEQ ID NO: 66596 - RNA, 1701 nt, Artificial Sequence
  derived and/or modified CDS sequence (opt1) from hemagglutinin__InfluenzaA__ACN43058
augaagaccaucaucgcccugagcuacauccucugccugguguucgcccagaagcugcccggcaacgacaacuccaccgcgacgcucugccuggggcaccacgccgucccgaacggcaccaucgugaagaccaucaccaacgaccagaucgaggugacgaacgccaccgagcugguccagagcuccagcaccggggagaucugcggcagcccccaccagauccucgacggggagaacugcacccugaucgacgcccugcucggcgacccccagugcgacggcuuccagaacaagaagugggaccuguucguggagcgcagcaaggccuacuccaacugcuaccccuacgacgugccggacuacgcgagccugcggucccucgucgccagcuccgggacgcuggaguucaacaacgagagcuucaacuggaccggcgugacccagaacgggaccuccagcgccugcauccgccgguccaacaacagcuucuucucccgccugaacuggcucacgcaccugaaguucaaguaccccgcccugaacgugaccaugcccaacaacgagcaguucgacaagcucuacaucuggggcguccaccaccccgggaccgacaacgaccagaucuuccuguacgcgcaggccagcggccggaucaccguguccacgaagcgcagccagcagaccgugaucccgaacaucggcagccggccccgcguccggaacauccccucccgcaucagcaucuacuggaccaucgugaagcccggggacauccugcucaucaacuccaccggcaaccugaucgccccgcggggguacuucaagauccgcagcggcaaguccagcaucaugcgguccgacgcccccaucggcaagugcaacagcgagugcaucacgcccaacggguccauccccaacgacaagccguuccagaacgugaaccgcaucaccuacggcgccugcccccgguacgucaagcagaacacccugaagcucgcgaccgggaugcgcaacgugcccgagaagcagacgcggggcaucuucggggccaucgccggcuucaucgagaacggcugggaggggaugguggacggcugguacggguuccgccaccagaacagcgagggccgggggcaggccgccgaccugaaguccacccaggcggccaucgaccagaucaacggcaagcugaaccgccucaucggcaagaccaacgagaaguuccaccagaucgagaaggaguucagcgaggucgaggggcggauccaggaccuggagaaguacguggaggacaccaagaucgaccugugguccuacaacgccgagcuccugguggcccuggagaaccagcacacgaucgaccucaccgacagcgagaugaacaagcuguucgagaagaccaagaagcagcugcgcgagaacgccgaggacaugggcaacgggugcuucaagaucuaccacaagugcgacaacgcgugcaucggcuccauccgcaacgggaccuacgaccacgacgucuaccgggacgaggcccucaacaaccgcuuccagaucaagggcguggagcugaaguccggcuacaaggacuggauccuguggaucuccuucgccaucagcugcuuccuccugugcguggcccugcucggguucaucaugugggccugccagaagggcaacauccggugcaacaucugcaucuga

SEQ ID NO: 66597 - RNA, 1701 nt, Artificial Sequence; identical to SEQ ID NO: 66458
  derived and/or modified CDS sequence (opt1) from hemagglutinin__InfluenzaA__ACN43069

SEQ ID NO: 66598 - RNA, 1701 nt, Artificial Sequence; identical to SEQ ID NO: 66561
  derived and/or modified CDS sequence (opt1) from hemagglutinin__InfluenzaA__ACN43080

SEQ ID NO: 66599 - RNA, 1701 nt, Artificial Sequence
  derived and/or modified CDS sequence (opt1) from hemagglutinin__InfluenzaA__ACN72617
auggaggccaagcuguucguccucuucugcgccuucaccgcgcugaaggccgacaccaucugcgugggcuaccacgccaacaacagcacggacaccguggacaccauccuggagaagaacgugaccgucacgcacuccgugaaccuccuggagaacagccacaacgggaagcugugcucccucaacggcaaggcgccccugcagcuggggaacugcaacguggccggcuggauccucgggaacccggagugcgaccugcugcucaccgccaacagcugguccuacaucaucgagaccagcgacuccaagaacggcgccugcuaccccggcgaguucgccgacuacgaggagcugcgcgagcagcugagcaccgucuccagcuucgagcgguucgagaucuuccccaaggccacguccuggcccaaccacgagaccaccaaggggaccacgguggcgugcagccacuccggcgccaacagcuucuaccgcaaccuccuguggaucgugaagaaggggaacuccuacccgaagcugagcaaguccuacaccaacaacaagggcaaggagguccucgugaucuggggcgugcaccacccgcccaccgacagcgaccagcagacccuguaccagaacaagcacacguacgucuccguggggagcagcaaguacuaccagcgguucacccccgagaucgugacccgccccaagguccgggagcaggccggccgcaugaacuacuacuggacccugcucgaccagggggacacgaucaccuucgaggccaccggcaaccugaucgcccccuggcacgcguucgcccugaacaagggguccaacagcggcaucaugauguccgacgcccacgugcacaacugcaccacgaagugccagacgccccacggcgcccucaaggggaaccugcccuuccagaacgugcacccgaucaccaucggcgagugccccaaguacgucaagagcacccagcugcggauggccaccgggcuccgcaacauccccuccauccagagccggggccuguucggggcgaucgccggcuucaucgagggcggguggaccggcaugaucgacgggugguacggcuaccaccaccagaacgagcagggguccggcuacgccgccgaccgcaagagcacccagaucgccaucgacggcaucuccaacaaggugaacagcgugaucgagaagaugaacauccaguucaccuccgucgggaaggaguucaacaaccuggagaagcggaucgagaaccucaacaagaagguggacgacggcuuccuggacguguggacguacaacgcggagcugcucauccugcuggagaacgagcgcacccucgacuuccacgacuucaacgucaagaaccuguacgagaaggucaagagccagcugcggaacaacgccaaggagaucgggaacggcugcuucgaguucuaccacaagugcgacaacgagugcauggaguccgugaagaacgggaccuacaacuacccccgcuacagcgaggaguccaagcucaaccgggaggagaucgacggcgugaagcuggagagcgugggcguccaccagauccuggccaucuacuccaccguggccagcucccucgugcugcuggucagccucggggccaucagcuucuggaugugcuccaacggcagccugcagugccgcaucugcaucuga

SEQ ID NO: 66600 - RNA, 1701 nt, Artificial Sequence
  derived and/or modified CDS sequence (opt1) from hemagglutinin__InfluenzaA__ACN72632
augaagaccgugaucgcccugagcuacgucuucugccucguguucggccaggaccugcccgggaagggcaacaacaccgccacgcugugccucgggcaccacgcggugccgaacggcacccuggucaagaccaucaccgacgaccagaucgaggugacgaacgccaccgagcuggugcagaacuucuccaucgggaagaucugcaagaacccccaccgcauccucgacggcgccaacugcacccugaucgacagccugcucggcgacccccacugcgacggguuccagaacgagaagugggaccuguucaucgagcgguccaaggccuucagcaacugcuaccccuacgacgucccggaguacaccucccugcgcagccucaucgccuccagcggcacgcuggaguucaccaacgaggacuucaacuggaccggggugacccagaacggcggguccagcgcgugcaagcggggccccaacaacuccuucuucagccgccugaacuggcucuacaaguccggcaacacguaccccaugcugaacgugaccaugcccaacagcgacgacuucgacaagcuguacaucuggggcguccaccacccguccaccgaccgggagcagaccaaccucuacauccaggccagcgggaagaucaucguguccacgaagcgcagccagcagaccaucauccccaacaucgggucccggcccugggugcgcggccugagcagccggaucuccaucuacuggaccaucgucaagcccggcgacauccugaucaucaacagcaacgggaaccucaucgccccgcgcggcuacuucaagauccagaccgggaaguccagcgugaugcgguccgacgcccccaucggcacgugcaacuacgagugcaucacccccaacgggagcauccccaacgacaagccguuccagaacgugaaccgcaucaccuacggcgcgugcccccacuacaucaagcagaacacccugaagcuggccacgggcaugcggaacauccccgagcgccagacccgggggaucuucggcgccaucgccggguucaucgagaacggcugggaggggauggucaacggcugguacggcuuccgccaccagaacuccgaggggaucggccaggccgcggaccucaagagcacccaggccgccaucaaccagaucaacgggaagcugaaccgggugaucgagaagaccaacgagaaguuccaccagaucgagaaggaguucuccgagguggagggccgcauccaggaccuggagcgguacgucgaggacacgaagaucgaccucuggagcuacaacgccgagcugcugguggcccucgagaaccagcacaccaucgaccugaccgacuccgagaugaacaagcuguucgagaagacccgcaagcagcuccgggagaacgcggaggacauggggaacggcugcuucaagaucuaccacaagugcgacaacagcugcauggaguccauccgcaacggcacguacgaccacaacgaguaccgcgacgaggccgugaacaaccgguuccagaucaagagcgucgagcugaaguccggguacaaggacuggauccuguggaucagcuucgccaucuccugcuuccuccugugcgccguguggcugggcuucaucaucugggccugccagaaggggaacauccgcugcaacaucugcaucuga

SEQ ID NO: 66601 - RNA, 1701 nt, Artificial Sequence; identical to SEQ ID NO: 66458
  derived and/or modified CDS sequence (opt1) from hemagglutinin__InfluenzaA__ACN76478

SEQ ID NO: 66602 - RNA, 1701 nt, Artificial Sequence
  derived and/or modified CDS sequence (opt1) from hemagglutinin__InfluenzaA__ACN76489
augaagaccaucaucgcccugggcuacauccucugccuggugagcgcccagaagcugcccgggaacgacaacuccaccgcgacgcucugccugggccaccacgccgucccgaacgggaccaucgugaagaccaucaccaacgaccagaucgaggugacgaacgccaccgagcugguccagagcuccagcaccggcgagaucugcgacagcccccaccaggugcucgacggggagaacugcacccugaucgacgcccugcucggcgacccccagugcgacggcuuccagaacaagaagugggaccuguucguggagcgcagcaaggccuacuccaacugcuaccccuacgacgucccggacuacgcgagccugcggucccucguggccagcuccgggacgcuggaguucaacaacgagagcuucaacuggaccggcgugacccagaacgggaccuccagcgccugcauccgccgguccaacaacagcuucuucucccgccugaacuggcucacgcaccugaaguucaaguaccccgcccugaacgucaccaugcccaacaacgaggaguucgacaagcucuacaucuggggcgugcaccaccccgggaccgacaacgaccagaucuuccuguacgcgcaggccagcggccggaucaccguguccacgaagcgcagccagcagaccgucaucccgaacaucggcagccggccccgcgugcggaacauccccucccgcaucagcaucuacuggaccaucgugaagcccggggacauccugcucaucaacuccaccggcaaccugaucgccccgcggggguacuucaagauccgcagcggcaaguccagcaucaugcgguccgacgcccccaucggcaagugcaacagcgagugcaucacgcccaacggguccauccccaacgacaagccguuccagaacgucaaccgcaucaccuacggcgccugcccccgguacgugaagcagaacacccugaagcucgcgaccgggaugcgcaacgugcccgagaagcagacgcggggcaucuucggggccaucgccggcuucaucgagaacggcugggaggggauggucgacggcugguacggguuccgccaccagaacagcgagggcaucgggcaggccgccgaccugaaguccacccaggcggccaucgaccagaucaacggcaagcugaaccggcucaucggcaagaccaacgagaaguuccaccagaucgagaaggaguucagcgagguggaggggcgcauccaggaccuggagaaguacguggaggacaccaagaucgaccugugguccuacaacgccgagcuccuggucgcccuggagaaccagcacacgaucgaccucaccgacagcgagaugaacaagcuguucgagaagaccaagaagcagcugcgggagaacgccgaggacaugggcaacgggugcuucaagaucuaccacaagugcgacaacgcgugcaucggcuccauccgcaacgggaccuacgaccacgagguguaccgcgacgaggcccucaacaaccgguuccagaucaagggcguggagcugaaguccggcuacaaggacuggauccuguggaucuccuucgccaucagcugcuuccuccugugcgucgcccugcucggguucaucaugugggccugccagaagggcaacauccgcugcaacaucugcaucuga

SEQ ID NO: 66603 - RNA, 1701 nt, Artificial Sequence; identical to SEQ ID NO: 66458
  derived and/or modified CDS sequence (opt1) from hemagglutinin__InfluenzaA__ACN76500

SEQ ID NO: 66604 - RNA, 1701 nt, Artificial Sequence; identical to SEQ ID NO: 66458
  derived and/or modified CDS sequence (opt1) from hemagglutinin__InfluenzaA__ACN76511

SEQ ID NO: 66605 - RNA, 1701 nt, Artificial Sequence; identical to SEQ ID NO: 66458
  derived and/or modified CDS sequence (opt1) from hemagglutinin__InfluenzaA__ACN76522

SEQ ID NO: 66606 - RNA, 1701 nt, Artificial Sequence; identical to SEQ ID NO: 66458
  derived and/or modified CDS sequence (opt1) from hemagglutinin__InfluenzaA__ACO36331

SEQ ID NO: 66607 - RNA, 1701 nt, Artificial Sequence
  derived and/or modified CDS sequence (opt1) from hemagglutinin__InfluenzaA__ACO36342
augaagaccaucaucgcccugagcuacauccucugccugguguucgcccagaaguuccccggcaacgacaacuccaccgcgacgcugugccucgggcaccacgccgucccgaacggcaccaucgugaagaccaucaccaacgaccagaucgaggugacgaacgccaccgagcugguccagagcuccagcaccggggagaucugcgacagcccccaccagauccuggacggcgagaacugcacccucaucgacgcccugcugggggacccccagugcgacggcuuccagaacaagaacugggaccucuucguggagcgcagcaaggccuacuccaacugcuaccccuacgacgugccggacuacgcgagccugcggucccuggucgccagcuccggcacgcucgaguucaacaacgagagcuucaacuggaccggggugacccagaacggcaccuccagcgccugcauccgccgguccaacaacagcuucuucucccgccugaacuggcugacgcacagcaaguucaaguaccccgcccucaacgugaccaugcccaacaacgagaacuucgacaagcuguacaucuggggcguccaccaccccgggaccgacaacgaccagaucuuccuguacgcgcaggccuccgggcggaucaccgugagcacgaagcgcagccagcagaccgugaucccgaacaucggcucccggccccgcguccggaacauccccagccgcaucuccaucuacuggaccaucgugaagcccggcgacauccuccugaucaacagcaccgggaaccugaucgccccgcggggcuacuucaagauccgcuccgggaaguccuccaucaugcggagcgacgcccccaucggcaagugcaacuccgagugcaucacgcccaacggcagcauccccaacgacaagccguuccagaacgugaaccgcaucaccuacggggccugcccccgguacgucaagcagaacacccucaagcuggcgaccggcaugcgcaacgugcccgagaagcagacgcgggggaucuucggcgccaucgccggguucaucgagaacggcugggagggcaugguggacgggugguacggcuuccgccaccagaacuccgaggggaucggccaggccgccgaccucaagagcacccaggcggccaucgaccagaucaacgggaagcugaaccggcugaucggcaagaccaacgagaaguuccaccagaucgagaaggaguucuccgagaucgagggccgcauccaggaccuggagaaguacgucgaggacaccaagaucgaccucuggagcuacaacgccgagcugcugguggcccucgagaaccagcacacgaucgaccugaccgacuccgagaugaacaagcuguucgagaagaccaagaagcagcuccgggagaacgccgaggacauggggaacggcugcuucaagaucuaccacaagugcgacaacgcgugcaucgggagcauccgcaacggcaccuacgaccacgacguguaccgcgacgaggcccugaacaaccgguuccagaucaagggggucgagcugaaguccggcuacaaggacuggauccucuggaucagcuucgccaucuccugcuuccugcugugcaucgcccuccugggcuucaucaugugggccugccagaaggggaacauccgcugcaacaucugcaucuga

SEQ ID NO: 66608 - RNA, 1701 nt, Artificial Sequence
  derived and/or modified CDS sequence (opt1) from hemagglutinin__InfluenzaA__ACO36364
augaagaccaucaucgcccugagcuacauccucugccugguguucgcccagaagcugcccggcaacgacaacuccaccgcgacgcucugccuggggcaccacgccgucccgaacggcaccaucgugaagaccaucaccaacgaccagaucgaggugacgaacgccaccgagcugguccagagcuccagcaccggggagaucugcgacagcccccaccagauccucgacggcgagaacugcacccugaucgacgcccugcucggggacccccagugcgacggcuuccagaacaagaagugggaccuguucguggagcgcagcaaggccuacuccaacugcuaccccuacgacgugccggacuacgcgagccugcggucccucgucgccagcuccggcacgcuggaguucaacaacgagagcuucaacuggaccggggugacccagaacggcaccuccagcgccugcauccgccgguccaacaacagcuucuucucccgccugaacuggcucacgcaccugaaguucaaguaccccgcccugaacgugaccaugcccaacaacgagaaguucgacaagcucuacaucuggggcguccaccaccccgggaccgacaacgaccagaucuuccuguacgcgcaggccagcgggcggaucaccguguccacgaagcgcagccagcagaccgugaucccgaacaucggcagccggccccgcguccggaacauccccucccgcaucagcaucuacuggaccaucgugaagcccggcgacauccugcucaucaacuccaccgggaaccugaucgccccgcggggcuacuucaagauccgcagcgggaaguccagcaucaugcgguccgacgcccccaucggcaagugcaacagcgagugcaucacgcccaacggcuccauccccaacgacaagccguuccagaacgugaaccgcaucaccuacggggccugcccccgguacgucaagcagaacacccugaagcucgcgaccggcaugcgcaacgugcccgagaagcagacgcgggggaucuucggcgccaucgccggguucaucgagaacggcugggagggcaugguggacgggugguacggcuuccgccaccagaacagcgaggggaccggccaggccgccgaccugaaguccacccaggcggccaucgaccagaucaacgggaagcugaaccggcucaucggcaagaccaacgagaaguuccaccagaucgagaaggaguucagcgaggucgagggccgcauccaggaccuggagaaguacguggaggacacgaagaucgaccugugguccuacaacgccgagcuccugguggcccuggagaaccagcacaccaucgaccucaccgacagcgagaugaacaagcuguucgagaagaccaagaagcagcugcgggagaacgccgaggacauggggaacggcugcuucaagaucuaccacaagugcgacaacgcgugcaucggguccauccgcaacggcacguacgaccacgacgucuaccgcgacgaggcccucaacaaccgguuccagaucaaggggguggagcugaaguccggcuacaaggacuggauccuguggaucuccuucgccaucagcugcuuccuccugugcguggcccugcucggcuucaucaugugggccugccagaaggggaacauccgcugcaacaucugcaucuga

SEQ ID NO: 66609 - RNA, 1701 nt, Artificial Sequence; identical to SEQ ID NO: 66325
  derived and/or modified CDS sequence (opt1) from hemagglutinin__InfluenzaA__ACO36375

SEQ ID NO: 66610 - RNA, 1698 nt, Artificial Sequence; identical to SEQ ID NO: 66512
  derived and/or modified CDS sequence (opt1) from hemagglutinin__InfluenzaA__ACO36397

SEQ ID NO: 66611 - RNA, 1701 nt, Artificial Sequence; identical to SEQ ID NO: 66325
  derived and/or modified CDS sequence (opt1) from hemagglutinin__InfluenzaA__ACO36408

SEQ ID NO: 66612 - RNA, 1701 nt, Artificial Sequence; identical to SEQ ID NO: 65952
  derived and/or modified CDS sequence (opt1) from hemagglutinin__InfluenzaA__ACO36419

SEQ ID NO: 66613 - RNA, 1701 nt, Artificial Sequence; identical to SEQ ID NO: 65952
  derived and/or modified CDS sequence (opt1) from hemagglutinin__InfluenzaA__ACO36430

SEQ ID NO: 66614 - RNA, 1701 nt, Artificial Sequence
  derived and/or modified CDS sequence (opt1) from hemagglutinin__InfluenzaA__ACO36441
augaagaccaucaucgcccugagcuacauccucugccugguguucgcccagaagcugcccggcaacgacaacuccaccgcgacgcucugccuggggcaccacgccgucccgaacggcaccaucgugaagaccaucaccaacgaccagaucgaggugacgaacgccaccgagcugguccagagcuccagcaccgggggcaucugcgacagcccccaccagauccucgacggggagaacugcacccugaucgacgcccugcucggcgacccccagugcgacggcuuccagaacaagaagugggaccuguucguggagcgcagcaaggccuacuccaacugcuaccccuacgacgugccggacuacgcgagccugcggucccucgucgccagcuccgggacgcuggaguucaacaacgagagcuucgacuggaccggcgugacccagaacgggaccuccagcgccugcaagcgccgguccaacaagagcuucuucucccgccugaacuggcucacgcaccugaaguacaaguaccccgcccugaacgugaccaugcccaacaacgagaaguucgacaagcucuacaucuggggcguccaccaccccgggaccgacagcgaccagaucucccuguacgcgcaggccagcggccggaucaccgugagcacgaagcgcucccagcagaccgugaucccgaacaucggcagccggccccgcguccgggacguguccagccgcaucuccaucuacuggaccaucgugaagcccggggacauccugcucaucaacagcaccggcaaccugaucgcgccccggggguacuucaagauccgcuccggcaagagcuccaucaugcggagcgacgccccgaucggcaagugcaacuccgagugcaucacgcccaacgggagcauccccaacgacaagcccuuccagaacgucaaccgcaucaccuacggcgccugcccgcgguacgugaagcagaacacccugaagcucgccaccgggaugcgcaacgugcccgagaagcagacgcggggcaucuucggggccaucgccggcuucaucgagaacggcugggaggggauggucgacggcugguacggguuccgccaccagaacuccgagggcaccgggcaggccgccgaccugaaguccacccaggcggccaucaaccagaucaacggcaagcugaaccggcucaucggcaagaccaacgagaaguuccaccagaucgagaaggaguucuccgagguggaggggcgcauccaggaccuggagaaguacguggaggacacgaagaucgaccuguggagcuacaacgccgagcuccuggucgcccuggagaaccagcacaccaucgaccucaccgacuccgagaugaacaagcuguucgagcggaccaagaagcagcugcgcgagaacgccgaggacaugggcaacgggugcuucaagaucuaccacaagugcgacaacgcgugcaucggcagcauccgcaacgggacguacgaccacgacguguaccgggacgaggcccucaacaaccgcuuccagaucaagggcguggagcugaaguccggcuacaaggacuggauccuguggaucagcuucgccaucagcugcuuccuccugugcgucgcccugcucggguucaucaugugggccugccagaagggcaacauccggugcgacaucugcaucuga

SEQ ID NO: 66615 - RNA, 1701 nt, Artificial Sequence
  derived and/or modified CDS sequence (opt1) from hemagglutinin__InfluenzaA__ACO36452
augaagaccaucaucgcccugagcuacauccucugccugguguucgcccagaagcugcccggcaacgacaacuccaccgcgacgcucugccuggggcaccacgccgucccgaacggcaccaucgugaagaccaucaccaacgaccagaucgaggugacgaacgccaccgagcugguccagagcuccagcaccgggggcaucugcgacagcccccaccagauccucgacggggagaacugcacccugaucgacgcccugcucggcgacccccagugcgacggcuuccagaacaagaagugggaccuguucguggagcgcagcaaggccuacuccaacugcuaccccuacgacgugccggacuacgcgagccugcggucccucgucgccagcuccgggacgcuggaguucaacaacgagagcuucgacuggaccggcgugacccagaacgggaccuccagcuccugcaagcgccggagcaacaacuccuucuucagccgccugaacuggcucacgcaccugaaguacaaguaccccgcccugaacgugaccaugcccaacaacgagaaguucgacaagcucuacaucuggggcguccaccaccccgggaccgacuccgaccagaucagccuguacgcccaggcgagcggccggaucaccaucuccacgaagcgcagccagcagaccgugaucccgaacaucggcucccggccccgcgugcgggacgucagcucccgcaucagcaucuacuggaccaucgugaagcccggggacauccugcucaucaacuccaccggcaaccugaucgcgccccggggguacuucaagauccgcagcggcaaguccagcaucaugcgguccgacgccccgaucggcaagugcaacagcgagugcaucacgcccaacggguccauccccaacgacaagcccuuccagaacgugaaccgcaucaccuacggcgccugcccgcgguacgucaagcagaacacccugaagcucgccaccgggaugcgcaacgugcccgagaagcagacgcggggcaucuucggggccaucgccggcuucaucgagaacggcugggaggggaugguggacggcugguacggguuccgccaccagaacagcgagggcaccgggcaggccgccgaccugaaguccacccaggccgcgaucaaccagaucaacggcaagcugaaccggcucaucggcaagaccaacgagaaguuccaccagaucgagaaggaguucagcgaggucgaggggcgcauccaggaccuggagaaguacguggaggacacgaagaucgaccugugguccuacaacgccgagcuccugguggcccuggagaaccagcacaccaucgaccucaccgacagcgagaugaacaagcuguucgagcggaccaagaagcagcugcgcgagaacgccgaggacaugggcaacgggugcuucaagaucuaccacaagugcgacaacgccugcaucggcuccauccgcaacgggacguacgaccacgacgucuaccgggacgaggcgcucaacaaccgcuuccagaucaagggcguggagcugaaguccggcuacaaggacuggauccuguggaucagcuucgccaucuccugcuuccuccugugcguggcccugcucggguucaucaugugggccugccagaagggcaacauccggugcaacaucugcaucuga

SEQ ID NO: 66616 - RNA, 1701 nt, Artificial Sequence
  derived and/or modified CDS sequence (opt1) from hemagglutinin__InfluenzaA__ACO36463
augaagaccaucaucgcccugagcuacauccucugccugguguucgcccagaagcugcccggcaacgacaacuccaccgcgacgcucugccuggggcaccacgccgucccgaacggcaccaucgugaagaccaucaccaacgaccagaucgaggugacgaacgccaccgagcugguccagagcuccagcaccgggggcaucugcgacagcccccaccagauccucgacggggagaacugcacccugaucgacgcccugcucggcgacccccagugcgacggcuuccagaacaagaagugggaccuguucaucgagcgcagcaaggccuacuccaacugcuaccccuacgacgugccggacuacgcgagccugcggucccucguggccagcuccgggacgcuggaguucaacaacgagagcuucaacuggaccggcgucacccagaacgggaccuccagcgccugccagcgccgguccaacaagagcuucuucucccgccugaacuggcucacgcaccugaaguucaaguaccccgcccugaacgugaccaugcccaacaacgagaaguucgacaagcucuacaucuggggcgugcaccaccccgggaccgacaacgaccagaucagccuguacgcgcagaccuccggccggaucacggucagcaccaagcgcagccagcagaccgugaucccgaacaucggcucccggccccgcgugcgggacguccccagccgcaucuccaucuacuggaccaucgugaagcccggggacauccugcucaucaacagcacgggcaaccugaucgccccgcggggguacuucaagauccgcuccggcaagagcuccaucaugcggagcgacgcccccaucggcaagugcaacuccgagugcaucacccccaacgggagcauccccaacgacaagccguuccagaacgugaaccgcaucaccuacggcgccugcccccgguacgucaagcagaacacccugaagcucgccacggggaugcgcaacgugcccgagcggcagacccgcggcaucuucggggcgaucgccggcuucaucgagaacggcugggaggggaugguggacggcugguacggguuccggcaccagaacuccgagggcaccgggcaggccgccgaccugaaguccacccaggccgcgaucaaccagaucaacggcaagcugaaccgccucaucggcaagacgaacgagaaguuccaccagaucgagaaggaguucuccgaggucgaggggcggauccaggaccuggagaaguacguggaggacaccaagaucgaccuguggagcuacaacgccgagcuccugguggcccuggagaaccagcacaccaucgaccucaccgacuccgagaugaacaagcuguucgagcgcacgaagaagcagcugcgcgagaacgccgaggacaugggcaacgggugcuucaagaucuaccacaagugcgacaacgccugcaucggcagcauccggaacgggaccuacgaccacgacgucuaccgcgacgaggcgcucaacaaccgguuccagaucaagggcguggagcugaaguccggcuacaaggacuggauccuguggaucagcuucgccaucuccugcuucgugcucugcgucgcccugcugggguucaucaugugggccugccagaagggcaacauccgcugcaacaucugcaucuga

SEQ ID NO: 66617 - RNA, 1701 nt, Artificial Sequence
  derived and/or modified CDS sequence (opt1) from hemagglutinin__InfluenzaA__ACO36474
augaagaccaucaucgcccugagcuacauccucugccugguguucgcccagaagcugcccggcaacgacaacuccaccgcgacgcucugccuggggcaccacgccgucccgaacggcaccaucgugaagaccaucaccaacgaccagaucgaggugacgaacgccaccgagcugguccagagcuccagcaccgggggcaucugcgacagcccccaccagauccucgacggggagaacugcacccugaucgacgcccugcucggcgacccccagugcgacggcuuccagaacaagaagugggaccuguucguggagcgcagcaaggccuacuccaacugcuaccccuacgacgugccggacuacgcgagccugcggucccucgucgccagcuccgggacgcuggaguucaacaacgagagcuucgacuggaccggcgugacccagaacgggaccuccagcuccugcaagcgccggagcaacaacuccuucuucagccgccugaacuggcucacgcaccuccgguacaaguaccccgcccugaacgugaccaugcccaacaacgagaaguucgacaagcuguacaucuggggcguccaccaccccgggaccgacuccgaccagaucagccuguacgcccaggcgagcggccgcaucaccguguccacgaagcggagccagcagaccgugaucccgaacaucggcucccgcccccggguccgcgacgugagcucccggaucagcaucuacuggaccaucgugaagcccggggacauccugcucaucaacuccaccggcaaccugaucgcgccccgcggguacuucaagauccggagcggcaaguccagcaucaugcgcuccgacgccccgaucggcaagugcaacagcgagugcaucacgcccaacggguccauccccaacgacaagcccuuccagaacgucaaccggaucaccuacggcgacugcccgcgcuacgugaagcagaacacccugaagcucgccaccgggaugcggaacgugcccgagaagcagacgcgcggcaucuucggggccaucgccggcuucaucgagaacggcugggaggggauggucgacggcugguacggguuccggcaccagaacagcgagggcaccgggcaggccgccgaccugaaguccacccaggccgccaucaaccagaucaacggcaagcugaaccgccucaucggcaagaccaacgagaaguuccaccagaucgagaaggaguucagcgagguggaggggcggauccaggaccuggagaaguacguggaggacacgaagaucgaccugugguccuacaacgcggagcuccuggucgcccuggagaaccagcacaccaucgaccucaccgacagcgagaugaacaagcuguucgagcgcaccaagaagcagcugcgcgagaacgccgaggacaugggcaacgggugcuucaagaucuaccacaagugcgacaacgccugcaucggcuccauccggaacgggacguacgaccacgacguguaccgcgacgaggcccucaacaaccgguuccagaucaagggcguggagcugaaguccggcuacaaggacuggauccuguggaucagcuucgcgaucuccugcuuccuccugugcgucgcccugcucggguucaucaugugggccugccagaagggcaacauccgcugcaacaucugcaucuga

SEQ ID NO: 66618 - RNA, 1701 nt, Artificial Sequence
  derived and/or modified CDS sequence (opt1) from hemagglutinin__InfluenzaA__ACO36496
augaagaccaucaucgcccugagcuacauccucugccugguguucgcccagaagcugcccggcaacgacaacuccaccgcgacgcucugccuggggcaccacgccgucccgaacggcaccaucgugaagaccaucaccaacgaccagaucgaggugacgaacgccaccgagcugguccagagcuccagcaccgggggcaucugcgacagcccccaccagauccucgacggggagaacugcacccugaucgacgcccugcucggcgacccccagugcgacggcuuccagaacaagaagugggaccuguucguggagcgcagcaaggccuacuccaacugcuaccccuacgacgugccggacuacgcgagccugcggucccucgucgccagcuccgggacgcuggaguucaacaacgagagcuucaacuggaccggcgugacccagaacgggaccuccagcgccugcaagcgccgguccaacaacggcuucuucagccgccugaacuggcucacgcaccugaaguucaaguaccccgcccugaacgugaccaugcccaacaacgagaaguucgacaagcucuacaucuggggcguccaccaccccgggaccgacaacgaccagaucucccuguacgcgcaggccagcggccggaucaccguguccacgaagcgcagccagcagaccgugaucccgaacaucgggagccggccccgcguccgggacaucuccagccgcaucuccaucuacuggaccaucgugaagcccggcgacauccugcucaucaacagcaccgggaaccugaucgcgccccggggcuacuucaagauccgcuccggcaagagcuccaucaugcggagcgacgccccgaucgggaagugcaacuccgagugcaucacgcccaacggcagcauccccaacgacaagcccuuccagaacgugaaccgcaucaccuacggggccugcccgcgguacgucaagcagaacacccugaagcucgccaccggcaugcgcaacgugcccgagacgcagacccgggggaucuucggcgccaucgccggcuucaucgagaacgggugggagggcaugguggacgggugguacggcuuccgccaccagaacuccgaggggaccggccaggccgccgaccugaaguccacccaggcggccaucaaccagaucaacggcaagcugaaccggcucaucgggaagacgaacgagaaguuccaccagaucgagaaggaguucuccgaggucgagggccgcauccaggaccuggagaaguacguggaggacaccaagaucgaccuguggagcuacaacgccgagcuccugguggcccuggagaaccagcacaccaucgaccucaccgacuccgagaugaacaagcuguucgagcggacgaagaagcagcugcgcgagaacgccgaggacauggggaacggcugcuucaagaucuaccacaagugcgacaacgcgugcaucgggagcauccgcaacggcaccuacgaccacgacgucuaccgggacgaggcccucaacaaccgcuuccagaucaagggcguggagcugaaguccggguacaaggacuggauccuguggaucagcuucgccaucuccugcuuccuccugugcguggcccugcucggcuucaucaugugggccugccagaaggggaacauccggugcaacaucugcaucuga

SEQ ID NO: 66619 - RNA, 1701 nt, Artificial Sequence
  derived and/or modified CDS sequence (opt1) from hemagglutinin__InfluenzaA__ACO36518
augaagaccaucaucgcccugagcuacauccucugccugguguucgcccagaagcugcccggcaacgacaacuccaccgcgacgcucugccuggggcaccacgccgucccgaacggcaccaucgugaagaccaucaccaacgaccagaucgaggugacgaacgccaccgagcugguccagagcuccagcaccgggggcaucugcgacagcccccaccagauccucgacggggagaacugcacccugaucgacgcccugcucggcgacccccagugcgacggcuuccagaacaagaagugggaccuguucguggagcgcagcaaggccuacuccaacugcuaccccuacgacgugccggacuacgcgagccugcggucccucgucgccagcuccgggacgcuggaguucaacaacgagagcuucaacuggaccggcgugacccagaacgggaccuccagcgccugcaagcgccgguccaacaagagcuucuucucccgccugaacuggcucacgcaccugaaguucaaguaccccgcccugaacgugaccaugcccaacaacgagaaguucgacaagcucuacaucuggggcguccaccaccccgggaccgacaacgaccagaucagccuguacgcgcaggccuccggccggaucaccgugagcacgaagcgcagccagcagaccgugaucccgaacaucggcucccggccccgcguccgggacgugcccagccgcaucuccaucuacuggaccaucgugaagcccggggacauccugcucaucaacagcaccggcaaccugaucgccccgcggggguacuucaagauccgcuccggcaagagcuccaucaugcggagcgacgcccccaucggcaagugcaacuccgagugcaucacgcccaacgggagcauccccaacgacaagccguuccagaacgucaaccgcaucaccuacgggaccugcccccgguacgugaagcagaacacccugaagcucgccacgggcaugcgcaacgugcccgagaagcagacccggggcaucuucggggcgaucgccggcuucaucgagaacggcugggaggggauggucgacggcugguacggguuccgccaccagaacuccgagggcaccgggcaggccgccgaccugaaguccacccaggccgcgaucaaccagaucaacggcaagcugaaccggcucaucggcaagacgaacgagaaguuccaccagaucgagaaggaguucuccgagguggaggggcgcauccaggaccuggagaaguacguggaggacaccaagaucgaccuguggagcuacaacgccgagcuccuggucgcccuggagaaccagcacaccaucgaccucaccgacuccgagaugaacaagcuguucgagcggacgaagaagcagcugcgcgagaacgccgaggacaugggcaacgggugcuucaagaucuaccacaagugcgacaacgccugcaucggcagcauccgcaacgggaccuacgaccacgacguguaccgggacgaggcgcucaacaaccgcuuccagaucaagggcguggagcugaagcugggcuacaaggacuggauccucuggaucuccuucgccaucagcugcuuccugcugugcgucgcccuccugggguucaucaugugggccugccagaagggcaacauccggugcaacaucugcaucuga

SEQ ID NO: 66620 - RNA, 1701 nt, Artificial Sequence
  derived and/or modified CDS sequence (opt1) from hemagglutinin__InfluenzaA__ACO36551
augaagaccaucaucgcccugagccacauccucugccugguguucgcccagaagcccccgggcaacgacaacuccaccgcgacgcugugccucgggcaccacgccguccccaacggcaccaucgugaagaccaucaccaacgaccagaucgaggugacgaacgccaccgagcugguccagagcuccagcaccgggggcaucugcgacagcccccaccagauccuggacggggagaacugcacccucaucgacgcccugcugggcgacccccagugcgacggcuuccagaacaagaagugggaccucuucguggagcgcuccaaggccuacuccaacugcuacccguacgacgugcccgacuacgcgagccugcggucccuggucgccagcuccgggacgcucgaguucaacaacgagagcuucaacuggaccggcgugacccagaacgggaccuccagcgccugcaagcgccgguccaacaacagcuucuucucccgccugaacuggcugacgcaccucaaguucaaguaccccgcccugaacgugaccaugcccaacaacgagaaguucgacaagcuguacaucuggggcguccaccacccggggaccgacaacgaccagaucagccucuacgcgcaggccuccggccggaucaccgugagcacgaagcgcagccagcagaccgugauccccaacaucggcucccggccccgcguccgggacaucagcucccgcaucagcaucuacuggaccaucgugaagcccggggacauccugcugaucaacuccaccggcaaccucaucgccccgcggggguacuucaagauccgcagcggcaaguccagcaucaugcgguccgacgcccccaucggcaagugcaacagcgagugcaucacgcccaacggguccauccccaacgacaagccguuccagaacgugaaccgcaucaccuacggcgccugcccccgguacgucaagcagaacacccugaagcuggcgaccgggaugcgcaacgugcccgagacgcagacccggggcaucuucggggccaucgccggcuucaucgagaacggcugggaggggaugguggacggcugguacggguuccgccaccagaacagcgagggcaccgggcaggccgccgaccucaaguccacccaggcggccaucaaccagaucaacggcaagcugaaccggcugaucggcaagacgaacgagaaguuccaccagaucgagaaggaguucagcgaggucgaggggcgcauccaggaccucgagaaguacguggaggacaccaagaucgaccugugguccuacaacgccgagcugcucguggcccuggagaaccagcacaccaucgaccugaccgacagcgagaugaacaagcuguucgagcggacgaagaagcagcuccgcgagaacgccgaggacaugggcaacgggugcuucaagaucuaccacaagugcgacaacgcgugcaucggcuccauccgcaacgagaccuacgaccacgacgucuaccgggacgaggcccugaacaaccgcuuccagaucaaggggguggagcucaagagcggcuacaaggacuggauccuguggaucuccuucgccaucagcugcuuccugcucugcguggcccugcugggcuucaucaugugggccugccagaaggggaacauccggugcaacaucugcaucuga

SEQ ID NO: 66621 - RNA, 1701 nt, Artificial Sequence
  derived and/or modified CDS sequence (opt1) from hemagglutinin__InfluenzaA__ACO36562
augaagaccaucaucgcccugagcuacauccucugccugguguucgcccagaagcugcccggcaacgacaacuccaccgcgacgcucugccuggggcaccacgccgucccgaacggcaccaucgugaagaccaucaccaacgaccagaucgaggugacgaacgccaccgagcugguccagagcuccagcaccgggggcaucugcgacagcccccaccagauccucgacggggagaacugcacccugaucgacgcccugcucggcgacccccagugcgacggcuuccagaacaagaagugggaccuguucguggagcgcagcaaggccuacuccaacugcuaccccuacgacgugccggacuacgcgagccugcggucccucgucgccagcuccgggacgcuggaguucaacaacgagagcuucaacuggaccggcgugacccagaacgggaccuccagcgccugcaagcgccgguccaacaacagcuucuucucccgccugaacuggcucacgcaccugaaguucaaguaccccgcccugaacgugaccaugcccaacaacgagaaguucgacaagcucuacaucuggggcguccaccaccccgggaccgacaacgaccagaucagccuguacgcgcaggccuccggccggaucaccgugagcacgaagcgcagccagcagaccgugaucccgaacaucggcucccggccccgcguccgggacauccccagccgcaucuccaucuacuggaccaucgugaagcccggggacauccugcucaucaacagcaccggcaaccugaucgccccgcggggguacuucaagauccgcuccggcaagagcuccaucaugcggagcgacgcccccaucggcaagugcaacuccgagugcaucacgcccaacgggagcauccccaacgacaagccguuccagaacgugaaccgcaucaccuacggcgccugcccccgguacgucaagcagaacacccugaagcucgcgaccgggaugcgcaacgugcccgagacgcagacccggggcaucuucggggccaucgccggcuucaucgagaacggcugggaggggaugguggacggcugguacggguuccgccaccagaacuccgagggcaccgggcaggccgccgaccugaaguccacccaggcggccaucaaccagaucaacggcaagcugaaccggcucaucggcaagacgaacgagaaguuccaccagaucgagaaggaguucuccgaggucgaggggcgcauccaggaccuggagaaguacguggaggacaccaagaucgaccuguggagcuacaacgccgagcuccugguggcccuggagaaccagcacaccaucgaccucaccgacuccgagaugaacaagcuguucgagcggacgaagaagcagcugcgcgagaacgccgaggacaugggcaacgggugcuucaagaucuaccacaagugcgacaacgcgugcaucggcagcauccgcaacgagaccuacgaccacgacgucuaccgggacgaggcccucaacaaccgcuuccagaucaaggggguggagcugaaguccggcuacaaggacuggauccuguggaucagcuucgccaucuccugcuuccuccugugcguggcccugcucggcuucaucaugugggccugccagaaggggaacauccggugcaacaucugcaucuga

SEQ ID NO: 66622 - RNA, 1701 nt, Artificial Sequence
  derived and/or modified CDS sequence (opt1) from hemagglutinin__InfluenzaA__ACO36573
augaagaccaucaucgcccugagcuacauccucugccugguguucgcccagaagcugcccggcaacgacaacuccaccgcgacgcucugccuggggcaccacgccgucccgaacggcaccaucgugaagaccaucaccaacgaccagaucgaggugacgaacgccaccgagcugguccagagcuccagcaccgggggcaucugcgacagcccccaccagauccucgacggggagaacugcacccugaucgacgcccugcucggcgacccccagugcgacggcuuccagaacaagaagugggaccuguucguggagcgcagcaaggccuacuccaacugcuaccccuacgacgugccggacuacgcgagccugcggucccucgucgccagcuccgggacgcuggaguucaacaacgagagcuucaacuggaccggcgugacccagaacgggaccuccagcgccugcaagcgccgguccaacaacagcuucuucucccgccugaacuggcucacgcaccugaaguucaaguaccccgcccugaacgugaccaugcccaacaacgagaaguucgacaagcucuacaucuggggcguccaccaccccgggaccgacaacgaccagaucagccuguacgcgcaggccuccggccggaucaccgugagcacgaagcgcagccagcagaccgugaucccgaacaucggcucccggccccgcguccgggacaucagcucccgcaucagcaucuacuggaccaucgugaagcccggggacauccugcucaucaacuccaccggcaaccugaucgcgccccggggguacuucaagauccgcagcggcaaguccagcaucaugcgguccgacgccccgaucggcaagugcaacagcgagugcaucacgcccaacggguccauccccaacgacaagcccuuccagaacgugaaccgcaucaccuacggcgccugcccgcgguacgucaagcagaacacccugaagcucgccaccgggaugcgcaacgugcccgagacgcagacccggggcaucuucggggccaucgccggcuucaucgagaacggcugggaggggaugguggacggcugguacggguuccgccaccagaacagcgagggcaccgggcaggccgccgaccugaaguccacccaggcggccaucaaccagaucaacggcaagcugaaccggcucaucggcaagacgaacgagaaguuccaccagaucgagaaggaguucagcgaggucgaggggcgcauccaggaccuggagaaguacguggaggacaccaagaucgaccugugguccuacaacgccgagcuccugguggcccuggagaaccagcacaccaucgaccucaccgacagcgagaugaacaagcuguucgagcggacgaagaagcagcugcgcgagaacgccgaggacaugggcaacgggugcuucaagaucuaccacaagugcgacaacgcgugcaucggcuccauccgcaacgagaccuacgaccacgacgucuaccgggacgaggcccucaacaaccgcuuccagaucaaggggguggagcugaaguccggcuacaaggacuggauccuguggaucuccuucgccaucagcugcuuccuccugugcguggcccugcucggcuucaucaugugggccugccagaaggggaacauccggugcaacaucugcaucuga

SEQ ID NO: 66623 - RNA, 1701 nt, Artificial Sequence
  derived and/or modified CDS sequence (opt1) from hemagglutinin__InfluenzaA__ACO36584
augaagaccaucaucgcccugagcuacauccucugccugguguucucccagaagcugcccggcaacgacaacagcaccgccacgcucugccuggggcaccacgcggucccgaacggcaccaucgugaagaccaucaccaacgaccagaucgaggugacgaacgccaccgagcugguccaguccagcuccaccgggggcaucugcgacagcccccaccagauccucgacggggagaacugcacccugaucgacgcccugcucggcgacccccagugcgacggcuuccagaacaagaagugggaccuguucguggagcgcuccaaggccuacagcaacugcuaccccuacgacgugccggacuacgccucccugcggagccucgucgcguccagcgggacgcuggaguucaacaacgaguccuucaacuggaccggcgugacccagaacgggaccagcuccgccugcaagcgccggagcaacaacuccuucuucagccgccugaacuggcucacgcaccugaaguucaaguaccccgcccugaacgugaccaugcccaacaacgagaaguucgacaagcucuacaucuggggcguccaccaccccgggaccgacaacgaccagaucucccuguacgcccaggcgagcggccggaucaccgugagcacgaagaagucccagcagaccgugaucccgaacaucggcagccgcccccggguccgcgacaucuccagccggaucuccaucuacuggaccaucgugaagcccggggacauccugcucaucaacagcaccggcaaccugaucgcgccccgcggguacuucaagauccgguccggcaagagcuccaucaugcgcagcgacgccccgaucggcaagugcaacuccgagugcaucacgcccaacgggagcauccccaacgacaagcccuuccagaacgugaaccggaucaccuacggcgccugcccgcgcuacgucaagcagaacacccugaagcucgccaccgggaugcggaacgugcccgagacgcagacccgcggcaucuucggggccaucgccggcuucaucgagaacggcugggaggggaugguggacggcugguacggguuccggcaccagaacuccgagggcaccgggcaggccgccgaccucaagagcacccaggccgcgaucaaccagaucaacggcaagcugaaccgccugaucggcaagacgaacgagaaguuccaccagaucgagaaggaguucuccgaggucgaggggcggauccaggaccuggagaaguacguggaggacaccaagaucgaccuguggagcuacaacgccgagcuccugguggcccuggagaaccagcacaccaucgaccucaccgacuccgagaugaacaagcuguucgagcgcacgaagaagcagcugcgggagaacgccgaggacaugggcaacgggugcuucaagaucuaccacaagugcgacaacgccugcaucggcagcauccgcaacgagaccuacgaccacgacgucuaccgcgacgaggcgcucaacaaccgguuccagaucaaggggguggagcugaaguccggcuacaaggacuggauccuguggaucagcuucgccaucagcugcuuccuccugugcguggcccugcucggcuucaucaugugggccugccagaaggggaacauccgcugcaacaucugcaucuga

SEQ ID NO: 66624 - RNA, 1701 nt, Artificial Sequence; identical to SEQ ID NO: 64654
  derived and/or modified CDS sequence (opt1) from hemagglutinin__InfluenzaA__ACO36595

SEQ ID NO: 66625 - RNA, 1701 nt, Artificial Sequence
  derived and/or modified CDS sequence (opt1) from hemagglutinin__InfluenzaA__ACO36606
augaagaccaucaucgcccugagcuacauccucugccugguguucgcccagaagcugcccggcaacgacaacuccaccgcgacgcucugccuggggcaccacgccgucccgaacggcaccaucgugaagaccaucaccaacgaccagaucgaggugacgaacgccaccgagcugguccagagcuccagcaccgggggcaucugcgacagcccccaccagauccucgacggggagaacugcacccugaucgacgcccugcucggcgacccccagugcgacggcuuccagaacaagaagugggaccuguucguggagcgcagcaaggccuacuccaacugcuaccccuacgacgugccggacuacgcgagccugcggucccucgucgccagcuccgggacgcuggaguucaagaacgagagcuucaacuggaccggcgugacccagaacgggaccuccagcgccugcaagcgccgguccaacaacagcuucuucucccgccugaacuggcucacgcaccugaaguucaaguaccccgcccugaacgugaccaugcccaacaacgagaaguucgacaagcucuacaucuggggcguccaccaccccgggaccgacaacgaccagaucuuccuguacgcgcaggccagcggccggaucaccguguccacgcagcgcagccagcagaccgugaucccgaacaucggcagccggccccgcguccggaacauccccucccgcaucagcaucuacuggaccaucgugaagcccggggacauccugcucaucaacuccaccggcaaccugaucgccccgcggggguacuucaagauccgcagcggcaaguccagcaucaugcgguccgacgcccccaucggcaagugcaacagcgagugcaucacgcccaacggguccauccccaacgacaagccguuccagaacgugaaccgcaucaccuacggcgccugcccccgguacgucaagcagaacacccugaagcucgcgaccgggaugcgcaacgugcccgagaagcagacgcggggcaucuucggggccaucgccggcuucaucgagaacggcugggaggggaugguggacggcugguacggguuccgccaccagaacagcgagggcaucgggcaggccgccgaccugaaguccacccaggcggccaucaaccagaucaacggcaagcugaaccggcucaucggcaagaccaacgagaaguuccaccagaucgagaaggaguucagcgaggucgaggggcgcauccaggaccuggagaaguacguggaggacaccaagaucgaccugugguccuacaacgccgagcuccugguggcccuggagaaccagcacacgaucgaccucaccgacagcgagaugaacaagcuguucgagcggaccaagaagcagcugcgcgagaacgccgaggacaugggcaacgggugcuucaagaucuaccacaagugcgacaacgcgugcaucggcuccauccgcaacgggaccuacgaccacgacgucuaccgggacgaggcccucaacaaccgcuuccagaucaagggcguggagcugaaguccggcuacaaggacuggauccuguggaucuccuucgccaucagcugcuuccuccugugcguggcccugcucggguucaucaugugggccugccagaagggcaacauccggugcaacaucugcaucuga

SEQ ID NO: 66626 - RNA, 1701 nt, Artificial Sequence; identical to SEQ ID NO: 64654
  derived and/or modified CDS sequence (opt1) from hemagglutinin__InfluenzaA__ACO36617

SEQ ID NO: 66627 - RNA, 1701 nt, Artificial Sequence; identical to SEQ ID NO: 64654
  derived and/or modified CDS sequence (opt1) from hemagglutinin__InfluenzaA__ACO36628

SEQ ID NO: 66628 - RNA, 1701 nt, Artificial Sequence
  derived and/or modified CDS sequence (opt1) from hemagglutinin__InfluenzaA__ACO36639
augaagaccaucaucgcccugagcuacauccucugccugguguucgcccagaagcugcccggcaacgacaacuccaccgcgacgcucugccuggggcaccacgccgucccgaacggcaccaucgugaagaccaucaccaacgaccagaucgaggugacgaacgccaccgagcugguccagagcuccagcaccgggggcaucugcgacagcccccaccagauccucgacggggagaacugcacccugaucgacgcccugcucggcgacccccagugcgacggcuuccagaacaagaagugggaccuguucguggagcgcagcaaggccuacuccaacugcuaccccuacgacgugccggacuacgcgagccugcggucccucgucgccagcuccgggacgcuggaguucaacaacgagagcuucaacuggaccggcgugacccagaacgggaccuccagcgccugcaagcgccgguccaacaacagcuucuucucccgccugaacuggcucacgcaccugaaguucaaguaccccgcccugaacgugaccaugcccaacaacgagaaguucgacaagcucuacaucuggggcguccaccaccccgggaccgacaacgaccagaucuuccuguacgcgcaggccagcggccggaucaccguguccacgaagcgcagccagcagaccgugaucccgaacaucggcagccggccccgcguccggaacauccccucccgcaucagcaucuacuggaccaucgugaagcccggggacauccugcucaucaacuccaccggcaaccugaucgccccgcggggguacuucaagauccgcagcggcaaguccagcaucaugcgguccgacgcccccaucggcaagugcaacagcgagugcaucacgcccaacggguccauccccaacgacaagccguuccagaacgugaaccgcaucaccuacggcgccugcccccgguacgucaagcagaacacccugaagcucgcgaccgggaugcgcaacgugcccgagaagcagacgcggggcaucuucggggccaucgccggcuucaucgagaacggcugggaggggaugguggacggcugguacggguuccgccaccagaacagcgagggcaucgggcaggccgccgaccugaaguccacccaggcggccaucaaccagaucaacggcaagcugaaccggcucaucggcaagaccaacgagaaguuccaccagaucgagaaggaguucagcgaggucgaggggcgcauccaggaccuggagaaguacguggaggacaccaagaucgaccugugguccuacaacgccgagcuccugguggcccuggagaaccagcacacgaucgaccucaccgacagcgagaugaacaagcuguucgagcggaccaagaagcagcugcgcgagaacgccgaggacaugggcaacgggugcuucaagaucuaccacaagugcgacaacgcgugcaucggcuccauccgcaacgggaccuacgaccacgacgucuaccgggacgaggcccucaacaaccgcuuccagaucaagggcguggagcugaaguccggcuacaaggacuggauccuguggaucuccuucgccaucagcugcuuccuccugugcuucgcccugcucggguucaucaugugggccugccagaagggcaacauccggugcaacaucugcaucuga

SEQ ID NO: 66629 - RNA, 1701 nt, Artificial Sequence
  derived and/or modified CDS sequence (opt1) from hemagglutinin__InfluenzaA__ACO36661
augaagaccaucaucgcccugagcuacauccucugccugguguucgcccagaagcugcccggcaacgacaacuccaccgcgacgcucugccuggggcaccacgccgucccgaacggcaccaucgugaagaccaucaccaacgaccagaucgaggugacgaacgccaccgagcugguccagagcuccagcaccgggggcaucugcgacagcccccaccagauccucgacggggagaacugcacccugaucgacgcccugcucggcgacccccagugcgacggcuuccagaacaagaagugggaccuguucguggagcgcagcaaggccuacuccaacugcuaccccuacgacgugccggacuacgcgagccugcggucccucgucgccagcuccgggacgcuggaguucaacaacgagagcuucaacuggaccggcgugacccagaacgggaccuccagcgccugcaagcgccgguccaacaacagcuucuucucccgccugaacuggcucacgcaccugaaguucaaguaccccgcccugaacgugaccaugcccaacaacgagaaguucgacaagcucuacaucuggggcguccaccaccccgggaccgacaacgaccagaucuuccuguacgcgcaggccagcggccggaucaccguguccacgaagcgcagccagcagaccgugaucccgaacaucggcagccggccccgcguccggaacauccccucccgcaucagcaucuacuggaccaucgugaagcccggggacauccugcucaucaacuccaccggcaaccugaucgccccgcggggguacuucaagauccgcagcggcaaguccagcaucaugcgguccgacgcccccaucggcaagugcaacagcgagugcaucacgcccaacggguccauccccaacgacaagccguuccagaacgugaaccgcaucaccuacggcgccugcccccgguacgucaagcagaacacccugaagcucgcgaccgggaugcgcaacgugcccgagaagcagacgcggggcaucuucggggccaucgccggcuucaucgagaacggcugggaggggaugguggacggcugguacggguuccgccaccagaacagcgagggcaucgggcaggccgccgaccugaaguccacccaggcggccaucaaccagaucaacggcaagcugaaccggcucaucggcaagaccaacgagaaguuccaccagaucgagaaggaguucagcgaggucgaggggcgcauccaggaccuggagaaguacguggaggacaucaagaucgaccugugguccuacaacgccgagcuccugguggcccuggagaaccagcacaccaucgaccucacggacagcgagaugaacaagcuguucgagcggaccaagaagcagcugcgcgagaacgccgaggacaugggcaacgggugcuucaagaucuaccacaagugcgacaacgcgugcaucggcuccauccgcaacgggaccuacgaccacgacgucuaccgggacgaggcccucaacaaccgcuuccagaucaagggcguggagcugaaguccggcuacaaggacuggauccuguggaucuccuucgccaucagcugcuuccuccugugcguggcccugcucggguucaucaugugggccugccagaagggcaacauccggugcaacaucugcaucuga

SEQ ID NO: 66630 - RNA, 1701 nt, Artificial Sequence; identical to SEQ ID NO: 64654
  derived and/or modified CDS sequence (opt1) from hemagglutinin__InfluenzaA__ACO36683

SEQ ID NO: 66631 - RNA, 1701 nt, Artificial Sequence; identical to SEQ ID NO: 66621
  derived and/or modified CDS sequence (opt1) from hemagglutinin__InfluenzaA__ACO37122

SEQ ID NO: 66632 - RNA, 1701 nt, Artificial Sequence
  derived and/or modified CDS sequence (opt1) from hemagglutinin__InfluenzaA__ACO94514
augaagaccaucaucgcccugagcuacauccucugccugguguucgcccagaagcugcccggcaacgacaacuccaccgcgacgcucugccuggggcaccacgccgucccgaacggcaccaucgugaagaccaucaccaacgaccagaucgaggugacgaacgccaccgagcugguccagagcuccagcaccggggagaucugcgacagcccccaccagauccucgacggcgagaacugcacccugaucgacgcccugcucggggacccccagugcgacggcuuccagaacaagaagugggaccuguucguggagcgcagcaaggccuacuccaacugcuaccccuacgacgugccggacuacgcgagccugcggucccucgucgccagcuccggcacgcuggaguucaacaacgagagcuucaacuggaccggggugacccagaacggcaccuccagcgccugcauccgcaaguccaacaacagcuucuucucccggcugaacuggcucacgcaccugaaguucaaguaccccgcccugaacgugaccaugcccaacaacgagcaguucgacaagcucuacaucuggggcguccaccaccccgggaccgacaacgaccagaucuuccuguacgcgcaggccagcgggcgcaucaccguguccacgaagcggagccagcagaccgugaucccgaacaucggcagccgcccccggguccgcaacauccccucccggaucagcaucuacuggaccaucgugaagcccggcgacauccugcucaucaacuccaccgggaaccugaucgccccgcgcggcuacuucaagauccggagcgggaaguccagcaucaugcgcuccgacgcccccaucggcaagugcaacagcgagugcaucacgcccaacggcuccauccccaacgacaagccguuccagaacgugaaccggaucaccuacggggccugcccccgcuacgucaagcagaacacccugaagcucgcgaccggcaugcggaacgugcccgagaagcagacgcgcgggaucuucggcgccaucgccggguucaucgagaacggcugggagggcaugguggacgggugguacggcuuccggcaccagaacagcgaggggcgcggccaggccgccgaccugaaguccacccaggcggccaucgaccagaucaacgggaagcugaaccggcucaucggcaagaccaacgagaaguuccaccagaucgagaaggaguucagcgaggucgagggccgcauccaggaccuggagaaguacguggaggacaccaagaucgaccugugguccuacaacgccgagcuccugguggcccuggagaaccagcacacgaucgaccucaccgacagcgagaugaacaagcuguucgagaagaccaagaagcagcugcgggagaacgccgaggacauggggaacggcugcuucaagaucuaccacaagugcgacaacgcgugcaucggguccauccgcaacggcaccuacgaccacgacgucuaccgcgacgaggcccucaacaaccgguuccagaucaaggggguggagcugaaguccggcuacaaggacuggauccuguggaucuccuucgccaucagcugcuuccuccugugcguggcccugcucggcuucaucaugugggccugccagaaggggaacauccgcugcaacaucugcaucuga

SEQ ID NO: 66633 - RNA, 1701 nt, Artificial Sequence
  derived and/or modified CDS sequence (opt1) from hemagglutinin__InfluenzaA__ACO94515
augaagaccaucaucgcccugagcuacauccucugccugguguucgcccagaagcugcccggcaacgacaacuccaccgcgacgcucugccuggggcaccacgccgucccgaacggcaccaucgugaagaccaucaccaacgaccagaucgaggugacgaacgccaccgagcugguccagagcuccagcaccggggagaucugcgacagcccccaccagauccucgacggcgagaacugcacccugaucgacgcccugcucggggacccccagugcgacggcuuccagaacaagaagugggaccuguucguggagcgcagcaaggccuacuccaacugcuaccccuacgacgugccggacuacgcgagccugcggucccucgucgccagcuccggcacgcuggaguucaacaacgagagcuucaacuggaccggggugacccagaacggcaccuccagcgccugcauccgcaaguccaacaacagcuucuucucccggcugaacuggcucacgcaccugaaguucaaguaccccgcccugaacgugaccaugcccaacaacgagcaguucgacaagcucuacaucuggggcguccaccaccccgggaccgacaacgaccagaucuuccuguacgcgcaggccagcgggcgcaucaccguguccacgaagcggagccagcagaccgugaucccgaacaucggcagccgcccccggguccgcaacauccccucccggaucagcaucuacuggaccaucgugaagcccggcgacauccugcucaucaacuccaccgggaaccugaucgccccgcgcggcuacuucaagauccggagcgggaaguccagcaucaugcgcuccgacgcccccaucggcaagugcaacagcgagugcaucacgcccaacggcuccauccccaacgacaagccguuccagaacgugaaccggaucaccuacggggccugcccccgcuacgucaagcagaacacccugaagcucgcgaccggcaugcggaacgugcccgagaagcagacgcgcgggaucuucggcgccaucgccggguucaucgagaacggcugggagggcaugauggacgggugguacggcuuccggcaccagaacagcgaggggcgcggccaggccgccgaccugaaguccacccaggcggccaucgaccagaucaacgggaagcugaaccggcucaucggcaagaccaacgagaaguuccaccagaucgagaaggaguucagcgagguggagggccgcauccaggaccuggagaaguacgucgaggacaccaagaucgaccugugguccuacaacgccgagcuccugguggcccuggagaaccagcacacgaucgaccucaccgacagcgagaugaacaagcuguucgagaagaccaagaagcagcugcgggagaacgccgaggacauggggaacggcugcuucaagaucuaccacaagugcgacaacgcgugcaucggguccauccgcaacggcaccuacgaccacgacguguaccgcgacgaggcccucaacaaccgguuccagaucaagggggucgagcugaaguccggcuacaaggacuggauccuguggaucuccuucgccaucagcugcuuccuccugugcguggcccugcucggcuucaucaugugggccugccagaaggggaacauccgcugcaacaucugcaucuga

SEQ ID NO: 66634 - RNA, 1701 nt, Artificial Sequence; identical to SEQ ID NO: 66458
  derived and/or modified CDS sequence (opt1) from hemagglutinin__InfluenzaA__ACO94516

SEQ ID NO: 66635 - RNA, 1701 nt, Artificial Sequence; identical to SEQ ID NO: 66458
  derived and/or modified CDS sequence (opt1) from hemagglutinin__InfluenzaA__ACO94672

SEQ ID NO: 66636 - RNA, 1701 nt, Artificial Sequence
  derived and/or modified CDS sequence (opt1) from hemagglutinin__InfluenzaA__ACO94683
augaagaccaucaucgcccugagcuacauccucugccugguguccgcccagaagcugcccggcaacgacaacagcaccgcgacgcucugccuggggcaccacgccgucccgaacggcaccaucgugaagaccaucaccaacgaccagaucgaggugacgaacgccaccgagcugguccaguccagcuccaccggggagaucugcgacagcccccaccaggugcucgacggcgagaacugcacccugaucgacgcccugcucggggacccccagugcgacggcuuccagaacaagaagugggaccuguucguggagcgcuccaaggccuacagcaacugcuaccccuacgacgucccggacuacgcgucccugcggagccucguggccuccagcggcacgcuggaguucaacaacgaguccuucaacuggaccggggugacccagaacggcaccagcuccgccugcauccgccggagcaacaacuccuucuucagccgccugaacuggcucacgcacuccaaguucaaguaccccgcccugaacgucaccaugcccaacaacgaggaguucgacaagcuguacaucuggggcgugcaccaccccgggaccgacaacgaccagaucuuccucuacgcgcaggccagcgggcggaucaccgugagcacgaagcgcucccagcagaccgucaucccgaacaucggcagccggccccgcgugcggaacauccccucccgcaucagcaucuacuggaccaucgugaagcccggcgacauccugcugaucaacuccaccgggaaccucaucgccccgcggggcuacuucaagauccgcagcgggaaguccagcaucaugcgguccgacgcccccaucggcaagugcaacagcgagugcaucacgcccaacggcuccauccccaacgacaagccguuccagaacgucaaccgcaucaccuacggggccugcccccgguacgugaagcagaacacccugaagcuggcgaccggcaugcgcaacgugcccgagaagcagacgcgggggaucuucggcgccaucgccggguucaucgagaacggcugggagggcauggucgacgggugguacggcuuccgccaccagaacagcgaggggaucggccaggccgccgaccucaaguccacccaggcggccaucgaccagaucaacgggaagcugaaccggcugaucggcaagaccaacgagaaguuccaccagaucgagaaggaguucaccgagguggagggccgcauccaggaccucgagaaguacguggaggacacgaagaucgaccuguggagcuacaacgccgagcugcucgucgcccuggagaaccagcacaccaucgaccugaccgacuccgagaugaacaagcuguucgagaagaccaagaagcagcuccgggagaacgccgaggacauggggaacggcugcuucaagaucuaccacaagugcgacaacgcgugcaucgggagcauccgcaacggcacguacgaccacgagguguaccgcgacgaggcccugaacaaccgguuccagaucaaggggguggagcucaaguccggcuacaaggacuggauccuguggaucagcuucgccaucuccugcuuccugcucugcgucgcccugcugggcuucaucaugugggccugccagaaggggaacauccgcugcaacaucugcaucuga

SEQ ID NO: 66637 - RNA, 1701 nt, Artificial Sequence; identical to SEQ ID NO: 66458
  derived and/or modified CDS sequence (opt1) from hemagglutinin__InfluenzaA__ACO94694

SEQ ID NO: 66638 - RNA, 1698 nt, Artificial Sequence; identical to SEQ ID NO: 66512
  derived and/or modified CDS sequence (opt1) from hemagglutinin__InfluenzaA__ACO94705

SEQ ID NO: 66639 - RNA, 1701 nt, Artificial Sequence
  derived and/or modified CDS sequence (opt1) from hemagglutinin__InfluenzaA__ACO94727
augaagaccaucaucgcccugagcuacauccucugccugguguucgcccagaagcugcccggcaacgacaacuccaccgcgacgcucugccuggggcaccacgccgucccgaacggcaccaucgugaagaccaucaccaacgaccagaucgaggugacgaacgccaccgagcugguccagagcuccagcaccggggagaucugcgacagcccccaccagauccucgacggcgagaacugcacccugaucgacgcccugcucggggacccccagugcgacggcuuccagaacaagaagugggaccuguucguggagcgcagcaaggccuacuccaacugcuaccccuacgacgugccggacuacgcgagccugcggucccucgucgccagcuccggcacgcuggaguucaacaacgagagcuucaacuggaccggggugacccagaacggcaccuccagcgccugcauccgccgguccaacaacagcuucuucucccgccugaacuggcucacgcaccugaaguucaaguaccccgcccugaacgugaccaugcccaacaacgagcaguucgacaagcucuacaucuggggcguccaccaccccgggaccgacaacgaccagaucuuccuguacgcgcaggccagcgggcggaucaccguguccacgaagcgcagccagcagaccgugaucccgaacaucggcagccggccccgcguccggaacauccccucccgcaucagcaucuacuggaccaucgugaagcccggcgacauccugcucaucaacuccaccgggaaccugaucgccccgcggggcuacuucaagauccgcagcgggaaguccagcaucaugaaguccgacgcccccaucggcaagugcaacagcgagugcaucacgcccaacggcuccauccccaacgacaagccguuccagaacgugaaccggaucaccuacggggccugcccccgcuacgucaagcagaacacccugaagcucgcgaccggcaugcggaacgugcccgagaagcagacgcgcgggaucuucggcgccaucgccggguucaucgagaacggcugggagggcaugguggacgggugguacggcuuccggcaccagaacagcgaggggcgcggccaggccgccgaccugaaguccacccaggcggccaucgaccagaucaacgggaagcugaaccggcucaucggcaagaccaacgagaaguuccaccagaucgagaaggaguucagcgaggucgagggccgcauccaggaccuggagaaguacguggaggacaccaagaucgaccugugguccuacaacgccgagcuccugguggcccuggagaaccagcacacgaucgaccucaccgacagcgagaugaacaagcuguucgagaagaccaagaagcagcugcgggagaacgccgaggacauggggaacggcugcuucaagaucuaccacaagugcgacaacgcgugcaucggguccauccgcaacggcaccuacgaccacgacgucuaccgcgacgaggcccucaacaaccgguuccagaucaaggggguggagcugaaguccggcuacaaggacuggauccuguggaucuccuucgccaucagcugccuccugcugugcguggcccuccugggcuucaucaugugggccugccagaaggggaacauccgcugcaacaucugcaucuga

SEQ ID NO: 66640 - RNA, 1701 nt, Artificial Sequence
  derived and/or modified CDS sequence (opt1) from hemagglutinin__InfluenzaA__ACO94738
augaagaccaucaucgcccugagcuacauccagugccucguguucgcccagaaguuccccggcaacgacaacuccaccgcgacgcugugccuggggcaccacgccgucccgaacggcaccguggugaagaccaucaccaacgaccagaucgaggucacgaacgccaccgagcucgugcagagcuccagcaccggggagaucugcgacagcccccaccagauccuggacggcgagaacugcacccugaucgacgcccuccugggggacccccagugcgacggcuuccagaacaagaacugggaccuguucguggagcgcagcaaggccuacuccaacugcuaccccuacgacgucccggacuacgcgagccuccggucccugguggccagcuccggcacgcuggaguucaacaacgagagcuucaacuggaccggggugacccagaacggcaccuccagcgccugcauccgccgguccaacaacagcuucuucucccgccucaacuggcugacgcacagcaaguucaaguaccccgcccugaacgucaccaugcccaacaacgagaacuucgacaagcucuacaucuggggcgugcaccaccccgggaccgacaacgaccagaucuuccuguacgcgcgggccuccgggcgcaucaccgugagcacgaagcggagccagcagaccgucaucccgaacaucggcucccgcccccgggugcgcaacauccccagccggaucuccaucuacuggaccaucgugaagcccggcgacauccugcucaucaacagcaccgggaaccugaucgccccgcgcggcuacuucaagauccgguccgggaaguccuccaucaugcgcagcgacgcccccaucggcaagugcaacuccgagugcaucacgcccaacggcagcauccccaacgacaagccguuccagaacgucaaccggaucaccuacggggccugcccccgcuacgugaagcagaacacccugaagcucgcgaccggcaugcggaacgugcccgagaagcagacgcgcgggaucuucggcgccaucgccggguucaucgagaacggcugggagggcauggucgacgggugguacggcuuccggcaccagaacuccgaggggaucggccaggccgccgaccucaagagcacccaggcggccaucgaccagaucaacgggaagcugaaccgccugaucggcaagaccaacgagaaguuccaccagaucgagaaggaguucuccgagguggagggccggauccaggaccuggagaaguacguggaggacaccaagaucgaccuguggagcuacaacgccgagcuccuggucgcccuggagaaccagcacacgaucgaccucaccgacuccgagaugaacaagcuguucgagaagaccaagaagcagcugcgcgagaacgccgaggacauggggaacggcugcuucaagaucuaccacaagugcgacaacgcgugcaucgggagcauccgcaacggcaccuacgaccacgacguguaccgggacgaggcccucaacaaccgcuuccagaucaaggggguggagcugaaguccggcuacaaggacuggauccuguggaucagcuucgccaucuccugcuuccuccugugcaucgcccugcucggcuucaucaugugggccugccagaaggggaacauccggugcaacaucugcaucuga

SEQ ID NO: 66641 - RNA, 1701 nt, Artificial Sequence; identical to SEQ ID NO: 66561
  derived and/or modified CDS sequence (opt1) from hemagglutinin__InfluenzaA__ACO94760

SEQ ID NO: 66642 - RNA, 1701 nt, Artificial Sequence
  derived and/or modified CDS sequence (opt1) from hemagglutinin__InfluenzaA__ACO94771
augaagaccaucaucgcccugagcuacauccucugccugguguucgcccagaagcugcccggcaacgacaacuccaccgcgacgcucugccuggggcaccacgccgucccgaacggcaccaucgugaagaccaucaccaacgaccagaucgaggugacgaacgccaccgagcugguccagagcuccagcaccggggagaucugcgacagcccccaccagauccucgacggcgagaacugcacccugaucgacgcccugcucggggacccccagugcgacggcuuccagaacaagaagugggaccuguucguggagcgcagcaaggccuacuccaacugcuaccccuacgacgugccggacuacgcgagccugcggucccucgucgccagcuccggcacgcuggaguucaacaacgagagcuucaacuggaccggggugacccagaacggcaccuccagcgccugcauccgccgguccaacaacagcuucuucucccgccugaacuggcucacgcaccugaaguucaaguaccccgcccugaacgugaccaugcccaacaacgagcaguucgacaagcucuacaucuggggcguccaccaccccgggaccgacaacgaccagaucuuccuguacgcgcaggccagcgggcggaucaccguguccacgaagcgcagccagcagaccgugaucccgaacaucggcagccggccccgcguccggaacauccccucccgcaucagcaucuacuggaccaucgugaagcccggcgacauccugcucaucaacuccaccgggaaccugaucgccccgcggggcuacuucaagauccgcagcgggaaguccagcaucaugcgguccgacgcccccaucggcaagugcaacagcgagugcaucacgcccaacggcuccauccccaacgacaagccguuccagaacgugaaccgcaucaccuacggggccugcccccgguacgucaagcagaacacccugaagcucgcgaccggcaugcgcaacgugcccgagaagcagacgcgggggaucuucggcgccaucgccggguucaucgagaacggcugggagggcaugguggacgggugguacggcuuccgccaccagaacagcgaggggcggggccaggccgccgaccugaaguccacccaggcggccaucgaccagaucaacgggaagcugaaccgccucaucggcaagaccaacgagaaguuccaccagaucgagaaggaguucagcgaggucgagggccggauccaggaccuggagaaguacguggaggacaccaagaucgaccugugguccuacaacgccgagcuccugguggcccuggagaaccagcacacgaucgaccucaccgacagcgagaugaacaagcuguucgagaagaccaagaagcagcugcgcgagaacgccgaggacauggggaacggcugcuucaagaucuaccacaagugcgacaacgcgugcaucggguccauccgcaacggcaccuacgaccacgacgucuaccgggacgaggcccucaacaaccgcuuccagaucaaggggguggagcugaaguccggcuacaaggacuggauccuguggaucuccuucgccaucagcugccuccugcugugcguggcccuccugggcuucaucaugugggccugccagaaggggaacauccggugcaacaucugcaucuga

SEQ ID NO: 66643 - RNA, 1701 nt, Artificial Sequence; identical to SEQ ID NO: 66458
  derived and/or modified CDS sequence (opt1) from hemagglutinin__InfluenzaA__ACO94782

SEQ ID NO: 66644 - RNA, 1701 nt, Artificial Sequence; identical to SEQ ID NO: 66458
  derived and/or modified CDS sequence (opt1) from hemagglutinin__InfluenzaA__ACO94793

SEQ ID NO: 66645 - RNA, 1698 nt, Artificial Sequence
  derived and/or modified CDS sequence (opt1) from hemagglutinin__InfluenzaA__ACO94804
augaaggugaagcugcucguccugcugugcaccuucaccgccacguacgccgacaccaucugcaucggcuaccacgcgaacaacagcaccgacaccguggacacggugcucgagaagaacgucaccgugacccacuccgugaaccugcuggaggacagccacaacgggaagcucugccugcugaagggcaucgcgccccuccagcuggggaacugcuccgucgccggcuggauccuggggaacccggagugcgagcuccugaucagccgcgaguccuggagcuacaucguggagaagcccaaccccgagaacgggaccugcuaccccggccacuucgccgacuacgaggagcugcgggagcagcucuccagcguguccagcuucgagcgcuucgagaucuucccgaaggaguccagcuggcccaaccacacgaccaccggggucuccgccagcugcucccacaacggcgagagcuccuucuacaagaaccugcuguggcucaccgggaagaacggccuguaccccaaccugagcaaguccuacgccaacaacaaggagaaggaggugcucgugcuguggggcguccaccacccgcccaacaucggcaaccagcgggcccuguaccacacggagaacgccuacgugagcguggucagcucccacuacagccgcaaguucacccccgagaucgccaagcggcccaaggugcgcgaccaggagggccggaucaacuacuacuggacccuccuggagcccggggacaccaucaucuucgaggcgaacggcaaccugaucgccccgcgcuacgccuucgcccucucccggggguucggcagcggcaucaucaacuccaacgcccccauggacgggugcgacgcgaagugccagacgccccagggcgccaucaacagcucccugcccuuccagaacgugcacccggucaccaucggggagugccccaaguacgugcgcagcgccaagcugcggauggugaccggccuccgcaacauccccuccauccagagccgggggcuguucggcgccaucgccggcuucaucgagggcggguggaccgggauggucgacggcugguacggguaccaccaccagaacgagcagggcuccggcuacgcggccgaccagaaguccacgcagaacgccaucaacgggaucaccaacaaggugaacagcgugaucgagaagaugaacacccaguucaccgccgucggcaaggaguucaacaagcuggagcgccggauggagaaccucaacaagaagguggacgacggguucaucgacaucuggacguacaacgccgagcugcugguccuccuggagaacgagcgcacccuggacuuccacgacagcuacgugaagaaccucuacgagaaggugaagucccagcugaagaacaacgcgaaggagaucggcaacgggugcuucgaguucuaccacaagugcaacgacgagugcauggagagcgucaagaacggcaccuacgacuaccccaaguacuccgaggagagcaagcugaaccgggagaagaucgacggcgugaagcucgaguccauggggguguaccagauccuggccaucuacagcaccgucgccagcucccuggugcuccuggugagccugggcgccaucuccuucuggaugugcagcaacgggucccuccagugccgcaucugcaucuga

SEQ ID NO: 66646 - RNA, 1701 nt, Artificial Sequence; identical to SEQ ID NO: 66325
  derived and/or modified CDS sequence (opt1) from hemagglutinin__InfluenzaA__ACO94815

SEQ ID NO: 66647 - RNA, 1701 nt, Artificial Sequence; identical to SEQ ID NO: 66332
  derived and/or modified CDS sequence (opt1) from hemagglutinin__InfluenzaA__ACO94848

SEQ ID NO: 66648 - RNA, 1698 nt, Artificial Sequence; identical to SEQ ID NO: 66512
  derived and/or modified CDS sequence (opt1) from hemagglutinin__InfluenzaA__ACO94859

SEQ ID NO: 66649 - RNA, 1698 nt, Artificial Sequence
  derived and/or modified CDS sequence (opt1) from hemagglutinin__InfluenzaA__ACO94870
augaaggugaagcugcucguccugcugugcaccuucaccgccacguacgccgacaccaucugcaucggcuaccacgcgaacaacagcaccgacaccguggacacggugcucgagaagaacgucaccgugacccacuccgugaaccugcuggagaacagccacaacgggaagcucugccugcugaagggcaucgcgccccuccagcuggggaacugcuccgucgccggcuggauccuggggaacccggagugcgagcuccugaucagcaaggaguccuggagcuacaucguggagaagcccaaccccgagaacgggaccugcuaccccggccacuucgccgacuacgaggagcugcgcgagcagcucuccagcguguccagcuucgagcgguucgagaucuucccgaaggaguccagcuggcccaaccacacggucaccgggguguccgccagcugcucccacaacggcgagagcuccuucuaccgcaaccugcuguggcucaccgggaagaacggccuguaccccaaccugagcaaguccuacgccaacaacaaggggaaggaggugcucguccuguggggcgugcaccacccgcccaacaucggcgaccagaacacccuguaccacacggagaacgccuacgugagcgucgugagcucccacuacagccggaaguucacccccgagaucgccaagcgccccaaggugcgggaccaggaggggcgcaucaacuacuacuggacccuccuggagcccggcgacaccaucaucuucgaggccaacgggaaccugaucgcgccgcgguacgccuucgcccucaaccgcggcuucggcuccgggaucaucaacagcaacgcccccauggacaagugcgacgccaagugccagacgccccagggcgcgaucaacuccagccugcccuuccagaacguccacccggugaccaucggggagugccccaaguacgugcgguccgccaagcugcgcauggucaccggccuccggaacauccccagcauccagucccgcgggcuguucggcgccaucgccggcuucaucgagggcggcuggaccgggaugguggacggcugguacggguaccaccaccagaacgagcagggcagcggcuacgccgcggaccagaaguccacgcagaacgccaucaacgggaucaccaacaaggugaacagcgucaucgagaagaugaacacccaguucaccgccgugggcaaggaguucaacaagcuggagcggcgcauggagaaccucaacaagaaggucgacgacggguucaucgacaucuggacguacaacgccgagcugcuggugcuccuggagaacgagcggacccuggacuuccacgacuccaacgugaagaaccucuacgagaaggucaagagccagcugaagaacaacgccaaggagaucggcaacgggugcuucgaguucuaccacaagugcaacgacgagugcauggaguccgugaagaacggcaccuacgacuaccccaaguacagcgaggaguccaagcugaaccgcgagaagaucgacggcgugaagcucgagagcaugggggucuaccagauccuggcgaucuacuccaccguggccagcagccuggugcuccuggucucccugggcgccaucagcuucuggaugugcuccaacgggagccuccagugccggaucugcaucuga

SEQ ID NO: 66650 - RNA, 1701 nt, Artificial Sequence
  derived and/or modified CDS sequence (opt1) from hemagglutinin__InfluenzaA__ACO94881
augaagaccaucaucgcccugagcuacauccucugccugguguucgcccagaagcugcccggcaacgacaacuccaccgcgacgcucugccuggggcaccacgccgucccgaacggcaccaucgugaagaccaucaccaacgaccagaucgaggugacgaacgccaccgagcugguccagagcuccagcaccgggggcaucugcgacagcccccaccagauccucgacggggagaacugcacccugaucgacgcccugcucggcgacccccagugcgacggcuuccagaacaagaagugggaccuguucguggagcgcagcaaggccuacuccaacugcuaccccuacgacgugccggacuacgcgagccugcggucccucgucgccagcuccgggacgcuggaguucaacaacgagagcuucgacuggaccggcgugacccagaacgggaccuccagcuccugcaagcgccggagcaacaacuccuucuucagccgccugaacuggcucacgcaccugaaguacaaguaccccgcccugaacgugaccaugcccaacaacgagaaguucgacaagcucuacaucuggggcguccaccaccccgggaccgacuccgaccagaucagccuguacgcccaggcgagcggccggaucaccguguccacgaagcgcagccagcagaccgugaucccgaacaucggcucccggccccgcguccgggacgugagcucccgcaucagcaucuacuggaccaucgugaagcccggggacauccugcucaucaacuccaccggcaaccugaucgcgccccggggguacuucaagauccgcagcggcaaguccagcaucaugcgguccgacgccccgaucggcaagugcaacagcgagugcaucacgcccaacggguccauccccaacgacaagcccuuccagaacgucaaccgcaucaccuacggcgccugcccgcgguacgugaagcagaacacccugaagcucgccaccgggaugcgcaacgugcccgagaagcagacgcggggcaucuucggggccaucgccggcuucaucgagaacggcugggaggggauggucgacggcugguacggguuccgccaccagaacagcgagggcaccgggcaggccgccgaccugaaguccacccaggccgcgaucaaccagaucaacggcaagcugaaccggcucaucggcaagaccaacgagaaguuccaccagaucgagaaggaguucagcgagguggaggggcgcauccaggaccuggagaaguacguggaggacacgaagaucgaccugugguccuacaacgccgagcuccuggucgcccuggagaaccagcacaccaucgaccucaccgacagcgagaugaacaagcuguucgagcggaccaagaagcagcugcgcgagaacgccgaggacaugggcaacgggugcuucaagaucuaccaccgcugcgacaacgccugcaucggcuccauccggaacgggacguacgaccacgacguguaccgcgacgaggcgcucaacaaccgguuccagaucaagggcguggagcugaaguccggcuacaaggacuggauccuguggaucagcuucgccaucuccugcuuccuccugugcgucgcccugcucggguucaucaugugggccugccagaagggcaacauccgcugcaacaucugcaucuga

SEQ ID NO: 66651 - RNA, 1701 nt, Artificial Sequence
  derived and/or modified CDS sequence (opt1) from hemagglutinin__InfluenzaA__ACO94892
augaagaccaucaucgcccugagcuacauccucugccugguguucgcccagaagcugcccggcaacgacaacuccaccgcgacgcucugccuggggcaccacgccgucccgaacggcaccaucgugaagaccaucaccaacgaccagaucgaggugacgaacgccaccgagcugguccagagcuccagcaccgggggcaucugcgacagcccccaccagauccucgacggggagaacugcacccugaucgacgcccugcucggcgacccccagugcgacggcuuccagaacaagaagugggaccuguucguggagcgcagcaaggccuacuccaacugcuaccccuacgacgugccggacuacgcgagccugcggucccucgucgccagcuccgggacgcuggaguucaacaacgagagcuucaacuggaccggcgugacccagaacgggaccuccagcgccugccagcgccgguccaacaagagcuucuucucccgccugaacuggcucacgcaccugaaguucaaguaccccgcccugaacgugaccaugcccaacaacgagaaguucgacaagcucuacaucuggggcguccaccaccccgggaccgacaacgaccagaucagccuguacgcgcagaccuccggccggaucacgaucagcaccaagcgcagccagcagaccgugaucccgaacaucggcucccggccccgcgugcgggacguccccagccgcaucuccaucuacuggaccaucgugaagcccggggacauccugcucaucaacagcacgggcaaccugaucgccccgcggggguacuucaagauccgcuccggcaagagcuccaucaugcggagcgacgcccccaucgugaagugcaacuccgagugcaucacccccaacggcagcauccccaacgacaagccguuccagaacgucaaccgcaucaccuacggggccugcccccgguacgugaagcagaacacccugaagcucgccacgggcaugcgcaacgugcccgagcggcagacccgcgggaucuucggcgcgaucgccggguucaucgagaacggcugggagggcauggucgacgggugguacggcuuccggcaccagaacuccgaggggaccggccaggccgccgaccugaaguccacccaggccgcgaucaaccagaucaacgggaagcugaaccgccucaucggcaagacgaacgagaaguuccaccagaucgagaaggaguucuccgagguggagggccggauccaggaccuggagaaguacguggaggacaccaagaucgaccuguggagcuacaacgccgagcuccuggucgcccuggagaaccagcacaccaucgaccucaccgacuccgagaugaacaagcuguucgagcgcacgaagaagcagcugcgcgagaacgccgaggacauggggaacggcugcuucaagaucuaccacaagugcgacaacgccugcaucgggagcauccggaacggcaccuacgaccacgacguguaccgcgacgaggcgcucaacaaccgguuccagaucaaggggguggagcugaaguccggcuacaaggacuggauccuguggaucagcuucgccaucuccugcuuccuccugugcgucgcccugcucggcuucaucaugugggccugccagaaggggaacauccgcugcaacaucugcaucuga

SEQ ID NO: 66652 - RNA, 1701 nt, Artificial Sequence
  derived and/or modified CDS sequence (opt1) from hemagglutinin__InfluenzaA__ACO94903
augaagaccaucaucgcccugagcuacauccucugccugguguucgcccagaagcugcccggcaacgacaacuccaccgcgacgcucugccuggggcaccacgccgucccgaacggcaccaucgugaagaccaucaccaacgaccagaucgaggugacgaacgccaccgagcugguccagagcuccagcaccgggggcaucugcgacagcccccaccagauccucgacggggagaacugcacccugaucgacgcccugcucggcgacccccagugcgacggcuuccagaacaagaagugggaccuguucguggagcgcagcgaggccuacuccaacugcuaccccuacgacgugccggacuacgcgagccugcggucccucgucgccagcuccgggacgcuggaguucaacaacgagagcuucaacuggaccggcgugacccagaacgggaccuccagcgccugcaagcgccgguccaacaagagcuucuucucccgccugaacuggcucacgcaccugaaguucaaguaccccgcccugaacgugaccaugcccaacaacgagaaguucgacaagcucuacaucuggggcguccaccaccccgggaccgacaacgaccagaucagccuguacgcgcaggccuccggccggaucaccgugagcacgaagcgcagccagcagaccgugaucccgaacaucggcucccggccccgcguccgggacgugcccagccgcaucuccaucuacuggaccaucgugaagcccggggacauccugcucaucaacagcaccggcaaccugaucgccccgcggggguacuucaagauccgcuccggcaagagcuccaucaugcggagcgacgcccccaucggcaagugcaacuccgagugcaucacgcccaacgggagcauccccaacgacaagccguuccagaacgucaaccgcaucaccuacggcgccugcccccgguacgugaagcagaacacccugaagcucgcgaccgggaugcgcaacgugcccgagaagcagacgcggggcaucuucggggccaucgccggcuucaucgagaacggcugggaggggauggucgacggcugguacggguuccgccaccagaacuccgagggcaccgggcaggccgccgaccugaaguccacccaggcggccaucaaccagaucaacggcaagcugaaccggcucaucggcaagaccaacgagaaguuccaccagaucgagaaggaguucuccgagguggaggggcgcauccaggaccuggagaaguacguggaggacacgaagaucgaccuguggagcuacaacgccgagcuccuggucgcccuggagaaccagcacaccaucgaccucaccgacuccgagaugaacaagcuguucgagcggaccaagaagcagcugcgcgagaacgccgaggacaugggcaacgggugcuucaagaucuaccacaagugcgacaacgcgugcaucggcagcauccgcaacgggacguacgaccacgacguguaccgggacgaggcccucaacaaccgcuuccagaucaagggcguggagcugaaguccggcuacaaggacuggauccuguggaucagcuucgccaucuccugcuuccuccugugcgucgcccugcucggguucaucaugugggccugccagaagggcaacauccggugcaacaucugcaucuga

SEQ ID NO: 66653 - RNA, 1701 nt, Artificial Sequence
  derived and/or modified CDS sequence (opt1) from hemagglutinin__InfluenzaA__ACO94925
augaagaccaucaucgcccugagcuacauccucugccugguguucgcccagaagcugcccggcaacgacaacuccaccgcgacgcucugccuggggcaccacgccgucccgaacggcaccguggugaagaccaucaccaacgaccagaucgaggucacgaacgccaccgagcuggugcagagcuccagcaccgggggcaucugcgacagcccccaccagauccucgacggggagaacugcacccugaucgacgcccugcucggcgacccccagugcgacggcuuccagaacaagaagugggaccuguucguggagcgcagcaaggccuacuccaacugcuaccccuacgacgucccggacuacgcgagccugcggucccucguggccagcuccgggacgcuggaguucaacaacgagagcuucaacuggaccggcgugacccagaacgggaccuccagcgccugcaagcgccgguccaacaagagcuucuucucccgccugaacuggcucacgcaccugaaguucaaguaccccgcccugaacgucaccaugcccaacaacgagaaguucgacaagcucuacaucuggggcgugcaccaccccgggaccgacaacgaccagaucagccuguacgcgcaggccuccggccggaucaccgugagcacgaagcgcagccagcagaccgucaucccgaacaucggcucccggccccgcgugcgggacgugcccagccgcaucuccaucuacuggaccaucgucaagcccggggacauccugcucaucaacagcaccggcaaccugaucgccccgcggggguacuucaagauccgcuccggcaagagcuccaucaugcggagcgacgcccccaucggcaagugcaacuccgagugcaucacgcccaacgggagcauccccaacgacaagccguuccagaacgugaaccgcaucaccuacggcgccugcccccgguacgugaagcagaacacccugaagcucgcgaccgggaugcgcaacguccccgagaagcagacgcggggcaucuucggggccaucgccggcuucaucgagaacggcugggaggggaugguggacggcugguacggguuccgccaccagaacuccgagggcaccgggcaggccgccgaccugaaguccacccaggcggccaucaaccagaucaacggcaagcugaaccggcucaucggcaagaccaacgagaaguuccaccagaucgagaaggaguucuccgagguggaggggcgcauccaggaccuggagaaguacgucgaggacacgaagaucgaccuguggagcuacaacgccgagcuccugguggcccuggagaaccagcacaccaucgaccucaccgacuccgagaugaacaagcuguucgagcggaccaagaagcagcugcgcgagaacgccgaggacaugggcaacgggugcuucaagaucuaccacaagugcgacaacgcgugcaucggcagcauccgcaacgggacguacgaccacgacguguaccgggacgaggcccucaacaaccgcuuccagaucaagggcgucgagcugaaguccggcuacaaggacuggauccuguggaucagcuucgccaucuccugcuuccuccugugcguggcccugcucggguucaucaugugggccugccagaagggcaacauccggugcaacaucugcaucuga

SEQ ID NO: 66654 - RNA, 1701 nt, Artificial Sequence
  derived and/or modified CDS sequence (opt1) from hemagglutinin__InfluenzaA__ACO94936
augaagaccaucaucgcccugagcuacauccucugccugguguucgcccagaagcugcccggcaacgacaacuccaccgcgacgcucugccuggggcaccacgccgucccgaacggcaccaucgugaagaccaucaccaacgaccagaucgaggugacgaacgccaccgagcugguccagagcuccagcaccgggggcaucugcgacagcccccaccagauccucgacggggaggacugcacccugaucgacgcccugcucggcgacccccagugcgacggcuuccagaacaagaagugggaccuguucguggagcgcagcaaggccuacuccaacugcuaccccuacgacgugccggacuacgcgagccugcggucccucgucgccagcuccgggacgcuggaguucaacaacgagagcuucgacuggaccggcgugacccagaacgggaccuccagcuccugcaagcgccggagcaacaacuccuucuucagccgccugaacuggcucacgcaccugaaguacaaguaccccgcccugaacgugaccaugcccaacaacgagaaguucgacaagcucuacaucuggggcguccaccaccccgggaccgacuccgaccagaucagccuguacgcccaggcgagcggccggaucaccguguccacgaagcgcagccagcagaccgugaucccgaacaucggcucccggccccgcguccgggacgugagcucccgcaucagcaucuacuggaccaucgugaagcccggggacauccugcucaucaacuccaccggcaaccugaucgcgccccggggguacuucaagauccgcagcggcaaguccagcaucaugcgguccgacgccccgaucggcaagugcaacagcgagugcaucacgcccaacggguccauccccaacgacaagcccuuccagaacgucaaccgcaucaccuacggcgccugcccgcgguacgugaagcagaacacccugaagcucgccaccgggaugcgcaacgugcccgagaagcagacgcggggcaucuucggggccaucgccggcuucaucgagaacggcugggaggggauggucgacggcugguacggguuccgccaccagaacagcgagggcaccgggcaggccgccgaccugaaguccacccaggccgcgaucaaccagaucaacggcaagcugaaccggcucaucggcaagaccaacgagaaguuccaccagaucgagaaggaguucagcgagguggaggggcgcauccaggaccuggagaaguacguggaggacacgaagaucgaccugugguccuacaacgccgagcuccuggucgcccuggagaaccagcacaccaucgaccucaccgacagcgagaugaacaagcuguucgagcggaccaagaagcagcugcgcgagaacgccgaggacaugggcaacgggugcuucaagaucuaccacaagugcgacaacgccugcaucggcuccauccgcaacgggacguacgaccacgacguguaccgggacgaggcgcucaacaaccgcuuccagaucaagggcguggagcugaaguccggcuacaaggacuggauccuguggaucagcuucgccaucuccugcuuccuccugugcgucgcccugcucggguucaucaugugggccugccagaagggcaacauccggugcaacaucugcaucuga

SEQ ID NO: 66655 - RNA, 1701 nt, Artificial Sequence
  derived and/or modified CDS sequence (opt1) from hemagglutinin__InfluenzaA__ACO94947
augaagaccaucaucgcccugagcuacauccucugccugguguucgcccagaagcugcccggcaacgacaacuccaccgcgacgcucugccuggggcaccacgccgucccgaacggcaccaucgugaagaccaucaccaacgaccagaucgaggugacgaacgccaccgagcugguccagagcuccagcaccgggggcaucugcgacagcccccaccagauccucgacggggagaacugcacccugaucgacgcccugcucggcgacccccagugcgacggcuuccagaacaagaagugggaccuguucguggagcgcagcaaggccuacuccaacugcuaccccuacgacgugccggacuacgcgagccugcggucccucgucgccagcuccgggacgcuggaguucaacaacgagagcuucaacuggaccggcgugacccagaacgggaccuccagcgccugcaagcgccgguccaacaagagcuucuucucccgccugaacuggcucacgcaccugaaguucaaguaccccgcccugaacgugaccaugcccaacaacgagaaguucgacaagcucuacaucuggggcguccaccaccccgggaccgacaacgaccagaucagccuguacgcgcaggccuccggccggaucaccgugagcacgaagcgcagccagcagaccgugaucccgaacaucggcucccggccccgcguccgggacgugcccagccgcaucuccaucuacuggaccaucgugaagcccggggacauccugcucaucaacagcaccggcaaccugaucgccccgcggggguacuuccgcauccgguccggcaagagcuccaucaugcgcagcgacgcccccaucggcaagugcaacuccgagugcaucacgcccaacgggagcauccccaacgacaagccguuccagaacgucaaccggaucaccuacggcgccugcccccgcuacgugaagcagaacacccugaagcucgcgaccgggaugcggaacgugcccgagaagcagacgcgcggcaucuucggggccaucgccggcuucaucgagaacggcugggaggggauggucgacggcugguacggguuccggcaccagaacuccgagggcaccgggcaggccgccgaccugaaguccacccaggcggccaucaaccagaucaacggcaagcugaaccgccucaucggcaagaccaacgagaaguuccaccagaucgagaaggaguucuccgagguggaggggcggauccaggaccuggagaaguacguggaggacacgaagaucgaccuguggagcuacaacgccgagcuccuggucgcccuggagaaccagcacaccaucgaccucaccgacuccgagaugaacaagcuguucgagcgcaccaagaagcagcugcgcgagaacgccgaggacaugggcaacgggugcuucaagaucuaccacaagugcgacaacgcgugcaucggcagcauccggaacgggacguacgaccacgacguguaccgcgacgaggcccucaacaaccgguuccagaucaagggcguggagcugaaguccggcuacaaggacuggauccuguggaucagcuucgccaucuccugcuuccuccugugcgucgcccugcucggguucaucaugugggccugccagaagggcaacauccgcugcaacaucugcaucuga

SEQ ID NO: 66656 - RNA, 1701 nt, Artificial Sequence
  derived and/or modified CDS sequence (opt1) from hemagglutinin__InfluenzaA__ACO95153
augaagaccaucaucgcccugagcuacauccucugccugguguucgcccagaagcugcccggcaacgacaacuccaccgcgacgcucugccuggggcaccacgccgucccgaacggcaccaucgugaagaccaucaccaacgaccagaucgaggugacgaacgccaccgagcugguccagagcuccagcaccgggggcaucugcgacagcccccaccagauccucgacggggagaacugcacccugaucgacgcccugcucggcgacccccagugcgacggcuuccagaacaagaagugggaccuguucguggagcgcagcaaggccuacuccaacugcuaccccuacgacgugccggacuacgcgagccugcggucccucgucgccagcuccgggacgcuggaguucaacaacgagagcuucaacuggaccggcgugacccagaacgggaccuccagcgccugcaagcgccgguccaacaacagcuucuucucccgccugaacuggcucacgcaccugaaguucaaguaccccgcccugaacgugaccaugcccaacaacgagaacuucgacaagcucuacaucuggggcguccaccaccccgggaccgacaacgaccagaucagccuguacgcgcaggccuccggccggaucaccgugagcacgaagcgcagccagcagaccgugaucccgaacaucggcucccggccccgcguccgggacaucagcucccgcaucagcaucuacuggaccaucgugaagcccggggacauccugcucaucaacuccaccggcaaccugaucgcgccccggggguacuucaagauccgcagcggcaaguccagcaucaugcgguccgacgccccgaucggcaagugcaacagcgagugcaucacgcccaacggguccauccccaacgacaagcccuuccagaacgugaaccgcaucaccuacggcgccugcccgcgguacgucaagcagaacacccugaagcucgccaccgggaugcgcaacgugcccgagacgcagacccggggcaucuucggggccaucgccggcuucaucgagaacggcugggaggggaugguggacggcugguacggguuccgccaccagaacagcgagggcaccgggcaggccgccgaccugaaguccacccaggcggccaucaaccagaucaacggcaagcugaaccggcucaucggcaagacgaacgagaaguuccaccagaucgagaaggaguucagcgaggucgaggggcgcauccaggaccuggagaaguacguggaggacaccaagaucgaccugugguccuacaacgccgagcuccugguggcccuggagaaccagcacaccaucgaccucaccgacagcgagaugaacaagcuguucgagcggacgaagaagcagcugcgcgagaacgccgaggacaugggcaacgggugcuucaagaucuaccacaagugcgacaacgcgugcaucggcuccauccgcaacgggaccuacgaccacgacgucuaccgggacgaggcccucaacaaccgcuuccagaucaagggcguggagcugaaguccggcuacaaggacuggauccuguggaucuccuucgccaucagcugcuuccuccugugcguggcccugcucggguucaucaugugggccugccagaagggcaacauccggugcaacaucugcaucuga

SEQ ID NO: 66657 - RNA, 1701 nt, Artificial Sequence; identical to SEQ ID NO: 66622
  derived and/or modified CDS sequence (opt1) from hemagglutinin__InfluenzaA__ACO95171

SEQ ID NO: 66658 - RNA, 1701 nt, Artificial Sequence
  derived and/or modified CDS sequence (opt1) from hemagglutinin__InfluenzaA__ACO95193
augaagaccaucaucgcccugagcuacauccucugccugguguucgcccagaagcugcccggcaacgacaaguccaccgcgacgcucugccuggggcaccacgccgucccgaacggcaccaucgugaagaccaucaccaacgaccagaucgaggugacgaacgccaccgagcugguccagagcuccagcaccgggggcaucugcgacagcccccaccagauccucgacggggagaacugcacccugaucgacgcccugcucggcgacccccagugcgacggcuuccagaacaagaagugggaccuguucguggagcgcagcaaggccuacuccaacugcuaccccuacgacgugccggacuacgcgagccugcggucccucgucgccagcuccgggacgcuggaguucaacaacgagaacuucaacuggaccggcgugacccagaacgggaccagcuccgccugcaagcgccggagcaacaacuccuucuucagccgccugaacuggcucacgcaccugaaguucaaguaccccgcccugaacgugaccaugcccaacaacgagaaguucgacaagcucuacaucuggggcguccaccaccccgggaccgacaacgaccagaucucccuguacgcgcaggccagcggccggaucaccguguccacgaagcgcagccagcagaccgugaucccgaacaucggcagccggccccgcguccgggacaucuccagccgcaucuccaucuacuggaccaucgugaagcccggggacauccugcucaucaacagcaccggcaaccugaucgcgccccggggguacuucaagauccgcuccggcaagagcuccaucaugcggagcgacgccccgaucggcaagugcuccagcgagugcaucacgcccaacggguccauccccaacgacaagcccuuccagaacgugaaccgcaucaccuacggcgccugcccgcgguacgucaagcagaacacccugaagcucgccaccgggaugcgcaacgugcccgagacgcagacccggggcaucuucggggccaucgccggcuucaucgagaacggcugggaggggaugguggacggcugguacggguuccgccaccagaacagcgagggcaccgggcaggccgccgaccugaaguccacccaggcggccaucaaccagaucaacggcaagcugaaccggcucaucggcaagacgaacgagaaguuccaccagaucgagaaggaguucagcgaggucgaggggcgcauccaggaccuggagaaguacguggaggacaccaagaucgaccugugguccuacaacgccgagcuccugguggcccuggagaaccagcacaccaucgaccucaccgacagcgagaugaacaagcuguucgagcggacgaagaagcagcugcgcgagaacgccgaggacaugggcaacgggugcuucaagaucuaccacaagugcgacaacgcgugcaucggcuccauccgcaacgggaccuacgaccacgacgucuaccgggacgaggcccucaacaaccgcuuccagaucaagggcguggagcugaaguccggcuacaaggacuggauccuguggaucuccuucgccaucagcugcuuccuccugugcguggcccugcucggguucaucaugugggccugccagaagggcaacauccggugcaacaucugcaucuga

SEQ ID NO: 66659 - RNA, 1701 nt, Artificial Sequence; identical to SEQ ID NO: 66621
  derived and/or modified CDS sequence (opt1) from hemagglutinin__InfluenzaA__ACO95204

SEQ ID NO: 66660 - RNA, 1701 nt, Artificial Sequence
  derived and/or modified CDS sequence (opt1) from hemagglutinin__InfluenzaA__ACO95215
augaagaccaucaucgcccugagcuacauccucugccugguguucgcccagaagcugcccggcaacgacaacuccaccgcgacgcucugccuggggcaccacgccgucccgaacggcaccaucgugaagaccaucaccaacgaccagaucgaggugacgaacgccaccgagcugguccagagcuccagcaccgggggcaucugcgacagcccccaccagauccucgacggggagaacugcacccugaucgacgcccugcucggcgacccccagugcgacggcuuccagaacaagaagugggaccuguucguggagcgcuccaaggccuacuccaacugcuaccccuacgacgugccggacuacgcgagccugcggucccucaucgccagcuccgggacgcuggaguucaacaacgagagcuucaacuggaccggcgucacccagaacgggaccuccagcgccugcaagcgccgguccaacaacagcuucuucucccgccugaacuggcucacgcaccugaaguucaaguaccccgcccugaacgugaccaugcccaacaacgagaaguucgacaagcucuacaucuggggcgugcaccaccccgggaccgacaacgaccagaucagccuguacgcgcaggccuccggccggaucaccgucagcacgaagcgcagccagcagaccgugaucccgaacaucggcucccggccccgcgugcgggacaucagcucccgcaucagcaucuacuggaccaucgucaagcccggggacauccugcucaucaacuccaccggcaaccugaucgcgccccggggguacuucaagauccgcagcggcaaguccagcaucaugcgguccgacgccccgaucggcaagugcaacagcgagugcaucacgcccaacggguccauccccaacgacaagcccuuccagaacgugaaccgcaucaccuacggcgccugcccgcgguacgugaagcagaacacccugaagcucgccaccgggaugcgcaacguccccgagacgcagacccggggcaucuucggggccaucgccggcuucaucgagaacggcugggaggggaugguggacggcugguacggguuccgccaccagaacagcgagggcaccgggcaggccgccgaccugaaguccacccaggcggccaucaaccagaucaacggcaagcugaaccggcucaucggcaagacgaacgagaaguuccaccagaucgagaaggaguucagcgagguggaggggcgcauccaggaccuggagaaguacgucgaggacaccaagaucgaccugugguccuacaacgccgagcuccugguggcccuggagaaccagcacaccaucgaccucaccgacagcgagaugaacaagcuguucgagcggacgaagaagcagcugcgcgagaacgccgaggacaugggcaacgggugcuucaagaucuaccacaagugcgacaacgcgugcaucggcuccauccgcaacgagaccuacgaccacgacguguaccgggacgaggcccucaacaaccgcuuccagaucaagagcgucgagcugaaguccggguacaaggacuggauccuguggaucagcuucgccaucagcugcuuccuccugugcguggcccugcucggcuucaucaugugggccugccagaagggcaacauccggugcaacaucugcaucuga

SEQ ID NO: 66661 - RNA, 1701 nt, Artificial Sequence; identical to SEQ ID NO: 64305
  derived and/or modified CDS sequence (opt1) from hemagglutinin__InfluenzaA__ACO95226

SEQ ID NO: 66662 - RNA, 1701 nt, Artificial Sequence; identical to SEQ ID NO: 64654
  derived and/or modified CDS sequence (opt1) from hemagglutinin__InfluenzaA__ACO95248

SEQ ID NO: 66663 - RNA, 1701 nt, Artificial Sequence
  derived and/or modified CDS sequence (opt1) from hemagglutinin__InfluenzaA__ACO95270
augaagaccaucaucgcccugagcuacauccucugccugguguucacccagaagcugcccggcaacgacaacuccacggccacccucugccuggggcaccacgcggucccgaacggcaccaucgugaagaccaucacgaacgaccagaucgaggugaccaacgccaccgagcugguccagagcuccagcaccggggagaucugcgacagcccccaccagauccucgacggcgagaacugcacgcugaucgacgcccugcucggggacccccagugcgacggcuuccagaacaagaagugggaccuguucguggagcgcagcaaggccuacuccaacugcuaccccuacgacgugccggacuacgccagccugcggucccucgucgcgagcuccggcacccuggaguucaacaacgagagcuucaacuggaccggggugacccagaacggcacguccagcgccugcauccgccgguccaacaacagcuucuucucccgccugaacuggcucacccaccugaaguucaaguaccccgcccugaacgugaccaugcccaacaacgagaaguucgacaagcucuacaucuggggcguccaccaccccgugaccgacaacaaccagaucuuccuguacgcccaggcgagcgggcggaucacgguguccaccaagcgcagccagcagaccgucaucccgaacaucgggagccggccccgcgugcggaacauccccucccgcaucagcaucuacuggaccaucgugaagcccggcgacauccugcucaucaacuccacgggcaaccugaucgccccgcggggguacuucaagauccgcagcggcaaguccagcaucaugcgguccgacgcccccaucgggaagugcaacagcgagugcaucacccccaacggcuccauccccaacgacaagccguuccagaacgucaaccgcaucaccuacggcgccugcccccgguacgugaagcagaacacccugaagcucgccacggggaugcgcaacgugcccgagaagcagacccggggcaucuucggggcgaucgccggcuucaucgagaacgggugggagggcauggucgacggcugguacggguuccgccaccagaacagcgagggcaucgggcaggccgccgaccugaaguccacccaggccgcgaucgaccagaucaacggcaagcugaaccggcucaucgggaagaccaacgagaaguuccaccagaucgagaaggaguucagcgagguggagggccgcauccaggaccuggagaaguacguggaggacacgaagaucgaccugugguccuacaacgccgagcuccuggucgcccuggagaaccagcacaccaucgaccucaccgacagcgagaugaacaagcuguucgagaagaccaagaagcagcugcgggagaacgccgaggacaugggcaacgggugcuucaagaucuaccacaagugcgacaacgccugcaucggcuccauccgcaacgggacguacgaccacgacguguaccgcgacgaggcgcucaacaaccgguuccagaucaagggcguggagcugaaguccggguacaaggacuggauccuguggaucuccuucgccaucagcugcuuccuccugugcgucgcccugcucggcuucaucaugugggccugccagaagggcaacauccgcugcaacaucugcaucuga

SEQ ID NO: 66664 - RNA, 1701 nt, Artificial Sequence; identical to SEQ ID NO: 66458
  derived and/or modified CDS sequence (opt1) from hemagglutinin__InfluenzaA__ACO95281

SEQ ID NO: 66665 - RNA, 1701 nt, Artificial Sequence
  derived and/or modified CDS sequence (opt1) from hemagglutinin__InfluenzaA__ACO95292
augaagaccaucaucgcccugagcuacauccucugccugguguucgcccagaagcugcccggcaacgacaacuccaccgcgacgcucugccuggggcaccacgccgucccgaacggcaccaucgugaagaccaucaccaacgaccagaucgaggugacgaacgccaccgagcugguccagagcuccagcaccggggagaucugcgacagcccccaccagauccucgacggcgagaacugcacccugaucgacgcccugcucggggacccccagugcgacggcuuccagaacaagaagugggaccuguucguggagcgcagcaaggccuacuccaacugcuaccccuacgacgugccggacuacgcgagccugcggucccucgucgccagcuccggcacgcuggaguucaacaacgagagcuucaacuggaccggggugacccagaacggcaccuccagcgccugcauccgccgguccaacaacagcuucuucucccgccugaacuggcucacgcaccugaaguucaaguaccccgcccugaacgugaccaugcccaacaacgagcaguucgacaagcucuacaucuggggcguccaccaccccgggaccgacaacgaccagaucuuccuguacgcgcaggccagcgggcggaucaccguguccacgaagcgcagccagcagaccgugaucccgaacaucggcagccggccccgcguccggaacauccccucccgcaucagcaucuacuggaccaucgugaagcccggcgacauccugcucaucaacuccaccgggaaccugaucgccccgcggggcuacuucaagauccagagcgggaaguccagcaucaugcgcuccgacgcccccaucggcaagugcaacagcgagugcaucacgcccaacggcuccauccccaacgacaagccguuccagaacgugaaccggaucaccuacggggccugcccccgcuacgucaagcagaacacccugaagcucgcgaccggcaugcggaacgugcccgagaagcagacgcgcgggaucuucggcgccaucgccggguucaucgagaacggcugggagggcaugguggacgggugguacggcuuccggcaccagaacagcgaggggcgcggccaggccgccgaccugaaguccacccaggcggccaucgaccagaucaacgggaagcugaaccggcucaucggcaagaccaacgagaaguuccaccagaucgagaaggaguucagcgaggucgagggccgcauccaggaccuggagaaguacguggaggacaccaagaucgaccugugguccuacaacgccgagcuccugguggcccuggagaaccagcacacgaucgaccucaccgacagcgagaugaacaagcuguucgagaagaccaagaagcagcugcgggagaacgccgaggacauggggaacggcugcuucaagaucuaccacaagugcgacaacgcgugcaucggguccauccgcaacggcaccuacgaccacgacgucuaccgcgacgaggcccucaacaaccgguuccagaucaaggggguggagcugaaguccggcuacaaggacuggauccuguggaucuccuucgccaucagcugcuuccuccugugcguggcccugcucggcuucaucaugugggccugccagaaggggaacauccgcugcaacaucugcaucuga

SEQ ID NO: 66666 - RNA, 1701 nt, Artificial Sequence; identical to SEQ ID NO: 66561
  derived and/or modified CDS sequence (opt1) from hemagglutinin__InfluenzaA__ACO95303

SEQ ID NO: 66667 - RNA, 1698 nt, Artificial Sequence
  derived and/or modified CDS sequence (opt1) from hemagglutinin__InfluenzaA__ACO95382
augaaggugaagcugcucguccugcugugcaccuucaccgccacguacgccgacaccaucugcaucggcuaccacgcgaacaacagcaccgacaccguggacacggugcucgagaagaacgucaccgugacccacuccgugaaccugcuggagaacagccacaacgggaagcucugccugcugaagggcaucgcgccccuccagcuggggaacugcuccgucgccggcuggauccuggggaacccggagugcgagcuccugaucagcaaggaguccuggagcuacaucguggagaagcccaaccccgagaacgggaccugcuaccccggccacuucgccgacuacgaggagcugcgcgagcagcucuccagcguguccagcuucgagcgguucgagaucuucccgaaggagggguccuggcccaaccacacggucaccggcgugagcgccuccugcagccacaacggggaguccagcuucuaccgcaaccugcuguggcucaccggcaagaacgggcuguaccccaaccuguccaagagcuacgccaacaacaaggagaaggaggugcucguccuguggggcgugcaccacccgcccaacaucggcgaccagaaggcccuguaccacaccgagaacgccuacguguccgucgugagcagccacuacucccggaaguucacgcccgagaucgccaagcgccccaaggugcgggaccaggaggggcgcaucaacuacuacuggacccuccuggagcccggcgacaccaucaucuucgaggcgaacgggaaccugaucgccccgcgguacgccuucgcccucagccgcggcuucggcuccgggaucaucaacagcaacgcccccauggacaagugcgacgcgaagugccagacgccccagggcgccaucaacuccagccugcccuuccagaacguccacccggugaccaucggggagugccccaaguacgugcgguccgccaagcugcgcauggucaccggccuccggaacauccccagcauccagucccgcgggcuguucggcgccaucgccggcuucaucgagggcggcuggaccgggaugguggacggcugguacggguaccaccaccagaacgagcagggcagcggcuacgcggccgaccagaaguccacccagaacgccaucaacgggaucacgaacaaggugaacagcgucaucgagaagaugaacacccaguucaccgccgugggcaaggaguucaacaagcuggagcggcgcauggagaaccucaacaagaaggucgacgacggguucaucgacaucuggaccuacaacgccgagcugcuggugcuccuggagaacgagcggacgcuggacuuccacgacuccaacgugaagaaccucuacgagaaggucaagagccagcugaagaacaacgcgaaggagaucggcaacgggugcuucgaguucuaccacaagugcaacgacgagugcauggaguccgugaagaacggcaccuacgacuaccccaaguacagcgaggaguccaagcugaaccgcgagaagaucgacggcgugaagcucgagagcaugggggucuaccagauccuggccaucuacuccaccguggccagcagccuggugcuccuggucucccugggcgccaucagcuucuggaugugcuccaacgggagccuccagugccggaucugcaucuga

SEQ ID NO: 66668 - RNA, 1698 nt, Artificial Sequence
  derived and/or modified CDS sequence (opt1) from hemagglutinin__InfluenzaA__ACO95415
augaaggugaagcugcucguccugcugugcaccuucaccgccacguacgccgacaccaucugcaucggcuaccacgcgaacaacagcaccgacaccaucgacacggugcucgagaagaacgugaccgucacccacuccgugaaccugcuggagaacagccacaacgggaagcucugccugcugaagggcaucgcgccccuccagcuggggaacugcuccguggccggcuggauccuggggaacccggagugcgagcuccugaucagcaaggaguccuggagcuacaucgucgagaagcccaaccccgagaacgggaccugcuaccccggccacuucgccgacuacgaggagcugcgcgagcagcucuccagcguguccagcuucgagcgguucgagaucuucccgaaggaguccagcuggcccaaccacacggugaccggggucuccgccagcugcucccacaacggcgagagcuccuucuaccgcaaccugcuguggcucaccgggaagaacggccuguaccccaaccugagcaaguccuacgccaacaacaaggggaaggaggugcucgugcuguggggcguccaccacccgcccaacaucggcgaccagaacacccuguaccacacggagaacgccuacgugagcguggucagcucccacuacagccggaaguucacccccgagaucgccaagcgccccaaggugcgggaccaggaggggcgcaucaacuacuacuggacccuccuggagcccggcgacaccaucaucuucgaggccaacgggaaccugaucgcgccgcgguacgccuucgcccucucccgcggcuucggcagcgggaucaucaacuccaacgcccccauggacaagugcgacgccaagugccagacgccccagggcgcgaucaacagcucccugcccuuccagaacgugcacccggucaccaucggggagugccccaaguacgugcggagcgccaagcugcgcauggugaccggccuccggaacauccccuccauccagagccgcgggcuguucggcgccaucgccggcuucaucgagggcggcuggaccgggauggucgacggcugguacggguaccaccaccagaacgagcagggcuccggcuacgccgcggaccagaaguccacgcagaacgccaucaacgggaucaccaacaaggugaacagcgugaucgagaagaugaacacccaguucaccgccgucggcaaggaguucaacaagcuggagcggcgcauggagaaccucaacaagaagguggacgacggguucaucgacaucuggacguacaacgccgagcugcugguccuccuggagaacgagcggacccuggacuuccacgacagcaacgugaagaaccucuacgagaaggugaagucccagcugaagaacaacgccaaggagaucggcaacgggugcuucgaguucuaccacaagugcaacgacgagugcauggagagcgucaagaacggcaccuacgacuaccccaaguacuccgaggagagcaagcugaaccgcgagaagaucgacggcgugaagcucgaguccauggggguguaccagauccuggcgaucuacagcaccgucgccagcucccuggugcuccuggugagccugggcgccaucuccuucuggaugugcagcaacgggucccuccagugccggaucugcaucuga

SEQ ID NO: 66669 - RNA, 1701 nt, Artificial Sequence
  derived and/or modified CDS sequence (opt1) from hemagglutinin__InfluenzaA__ACO95426
augaagaccaucaucgcccugagcuacauccucugccugguguucgcccagaagcugcccggcaacgacaacuccaccgcgacgcucugccuggggcaccacgccgucccgaacggcaccaucgugaagaccaucaccaacgaccagaucgaggugacgaacgccaccgagcugguccagagcuccagcaccgggggcaucugcgacagcccccaccagauccucgacggggagaacugcacccugaucgacgcccugcucggcgacccccagugcgacggcuuccagaacaagaagugggaccuguucguggagcgcagcaaggccuacuccaacugcuaccccuacgacgugccggacuacgcgagccugcggucccucgucgccagcuccgggacgcuggaguucaacaacgagagcuucgacuggaccggcgugacccagaacgggaccuccagcuccugcaagcgccggagcaacaacuccuucuucagccgccugaacuggcucacgcaccugaaguacaaguaccccgcccugaacgugaccaugcccaacaacgagaaguucgacaagcucuacaucuggggcguccaccaccccgggaccgacuccgaccagaucagccuguacgcccaggcgagcggccggaucaccguguccacgaagcgcagccagcagaccgugaucccgaacaucggcucccggccccgcguccgggacgugagcucccgcaucagcaucuacuggaccaucgugaagcccggggacauccugcucaucaacuccaccggcaaccugaucgcgccccggggguacuucaagauccgcagcggcaaguccagcaucaugcgguccgacgccccgaucggcaagugcaacagcgagugcaucacgcccaacggguccauccccaacgacaagcccuuccagaacgucaaccgcaucaccuacggcgccugcccgcgguacgugaagcagaacacccugaagcucgccaccgggaugcgcaacgugcccgagaagcagacgcggggcaucuucggggccaucgccggcuucaucgagaacggcugggaggggauggucgacggcugguacggguuccgccaccagaacagcgagggcaccgggcaggccgccgaccugaaguccacccaggccgcgaucaaccagaucaacggcaagcugaaccggcucaucggcaagaccaacgagaaguuccaccagaucgagaaggaguucagcgagguggaggggcgcauccaggaccuggagaaguacguggaggacacgaagaucgaccugugguccuacaacgccgagcuccuggucgcccuggagaaccagcacaccaucgaccucaccgacagcgagaugaacaagcuguucgagcggaccaagaagcagcugcgcgagaacgccgaggacaugggcaacgggugcuucaagaucuaccacaagugcgacaacgccugcaucggcuccauccgcaacgggacguacgaccacgacguguaccgggacgaggcgcucaacaaccgcuuccagaucaagggcguggagcugaaguccggcuacaaggacuggauccuguggaucagcuucgccaucuccugcuuccuccugugcgucgcccugcucggguucaucaugugggccugccagaagggcaacauccggugcaacaucugcaucuga

SEQ ID NO: 66670 - RNA, 1701 nt, Artificial Sequence; identical to SEQ ID NO: 65819
  derived and/or modified CDS sequence (opt1) from hemagglutinin__InfluenzaA__ACO95437

SEQ ID NO: 66671 - RNA, 1701 nt, Artificial Sequence
  derived and/or modified CDS sequence (opt1) from hemagglutinin__InfluenzaA__ACO95448
augaagaccaucaucgcccugagcuacauccucugccugguguucgcccagaagcugcccggcaacgacaacuccaccgcgacgcucugccuggggcaccacgccgucccgaacggcaccaucgugaagaccaucaccaacgaccagaucgaggugacgaacgccaccgagcugguccagagcuccagcaccgggggcaucugcgacagcccccaccagauccucgacggggagaacugcacccugaucgacgcccugcucggcgacccccagugcgacggcuuccagaacaagaagugggaccuguucguggagcgcagcaaggccuacuccaacugcuaccccuacgacgugccggacuacgcgagccugcggucccucaucgccagcuccgggacgcuggaguucaacaacgagagcuucaacuggaccggcgucacccagaacgggaccuccagcgccugcaagcgccgguccaacaacagcuucuucucccgccugaacuggcucacgcaccugaaguucaaguaccccgcccugaacgugaccaugcccaacaacgaggaguucgacaagcucuacaucuggggcgugcaccaccccgggaccgacaacgaccagaucaaccuguacgcgcaggccagcggccggaucaccgucuccacgaagcgcagccagcagaccgugaucccgaacaucggcagccggccccgcgugcgggacauccccucccgcaucagcaucuacuggaccaucgucaagcccggggacauccugcucaucaacuccaccggcaaccugaucgccccgcggggguacuucaagauccgcagcggcaaguccagcaucaugcgguccgacgcccccaucggcaagugcaacagcgagugcaucacgcccaacggguccauccccaacgacaagccguuccagaacgugaaccgcaucaccuacggcgccugcccccgguacgugaagcagaacacccugaagcucgcgaccgggaugcgcaacguccccgagaagcagacgcggggcaucuucggggccaucgccggcuucaucgagaacggcugggaggggaugguggacggcugguacggguuccgccaccagaacagcgagggcaucgggcaggccgccgaccugaaguccacccaggcggccaucgaccagaucaacggcaagcugaaccggcucaucggcaagaccaacgagaaguuccaccagaucgagaaggaguucagcgagguggaggggcgcauccaggaccuggagaaguacgucgaggacaccaagaucgaccugugguccuacaacgccgagcuccugguggcccuggagaaccagcacacgaucgaccucaccgacagcgagaugaacaagcuguucgagcggaccaagaagcagcugcgcgagaacgccgaggacaugggcaacgggugcuucaagaucuaccacaagugcgacaacgcgugcaucggcuccauccgcaacgggaccuacgaccacgacguguaccgggacgaggcccucaacaaccgcuuccagaucaagggcgucgagcugaaguccggcuacaaggacuggauccuguggaucuccuucgccaucagcugcuuccuccugugcguggcccugcucggguucaucaugugggccugccagaagggcaacauccggugcaacaucugcaucuga

SEQ ID NO: 66672 - RNA, 1701 nt, Artificial Sequence; identical to SEQ ID NO: 64654
  derived and/or modified CDS sequence (opt1) from hemagglutinin__InfluenzaA__ACO95459

SEQ ID NO: 66673 - RNA, 1701 nt, Artificial Sequence
  derived and/or modified CDS sequence (opt1) from hemagglutinin__InfluenzaA__ACO95470
augaagaccaucaucgcccugagcuacauccucugccugguguucgcccagaagcugcccggcaacgacaacuccaccgcgacgcucugccuggggcaccacgccgucccgaacggcaccaucgugaagaccaucaccaacgaccagaucgaggugacgaacgccaccgagcugguccagagcuccagcaccgggggcaucugcgacagcccccaccagauccucgacggggagaacugcacccugaucgacgcccugcucggcgacccccagugcgacggcuuccagaacaagaagugggaccuguucguggagcgcagcaaggccuacuccaacugcuaccccuacgacgugccggacuacgcgagccugcggucccucgucgccagcuccgggacgcuggaguucaacaacgagagcuucaacuggaccggcgugacccagaacgggaccuccagcgccugcaagcgccgguccaacaacagcuucuucucccgccugaacuggcucacgcaccugaaguucaaguaccccgcccugaacgugaccaugcccaacaacgagaaguucgacaagcucuacaucuggggcguccaccaccccgggaccgacaacgaccagaucuuccuguacgcgcaggccagcggccggaucaccguguccacgaagcgcagccagcagaccgugaucccgaacaucggcagccggccccgcguccggaacauccccucccgcaucagcaucuacuggaccaucgugaagcccggggacauccugcucaucaacuccaccggcaaccugaucgccccgcggggguacuucaagauccgcagcggcaaguccagcaucaugcgguccgacgcccccaucggccgcugcaacagcgagugcaucacgcccaacggguccauccccaacgacaagccguuccagaacgugaaccggaucaccuacggcgccugcccccgcuacgucaagcagaacacccugaagcucgcgaccgggaugcggaacgugcccgagaagcagacgcgcggcaucuucggggccaucgccggcuucaucgagaacggcugggaggggaugguggacggcugguacggguuccggcaccagaacagcgagggcaucgggcaggccgccgaccugaaguccacccaggcggccaucaaccagaucaacggcaagcugaaccgccucaucggcaagaccaacgagaaguuccaccagaucgagaaggaguucagcgaggucgaggggcggauccaggaccuggagaaguacguggaggacaccaagaucgaccugugguccuacaacgccgagcuccugguggcccuggagaaccagcacacgaucgaccucaccgacagcgagaugaacaagcuguucgagcgcaccaagaagcagcugcgcgagaacgccgaggacaugggcaacgggugcuucaagaucuaccacaagugcgacaacgcgugcaucggcuccauccggaacgggaccuacgaccacgacgucuaccgcgacgaggcccucaacaaccgguuccagaucaagggcguggagcugaaguccggcuacaaggacuggauccuguggaucuccuucgccaucagcugcuuccuccugugcguggcccugcucggguucaucaugugggccugccagaagggcaacauccgcugcaacaucugcaucuga

SEQ ID NO: 66674 - RNA, 1701 nt, Artificial Sequence
  derived and/or modified CDS sequence (opt1) from hemagglutinin__InfluenzaA__ACO95481
augaagaccaucaucgcccugagcuacauccucugccugguguucgcccagaagcugcccggcaacgacaacuccaccgcgacgcucugccuggggcaccacgccgucccgaacggcaccaucgugaagaccaucaccaacgaccagaucgaggugacgaacgccaccgagcugguccagagcuccagcaccgggggcaucugcgacagcccccaccagauccucgacggggagaacugcacccugaucgacgcccugcucggcgacccccagugcgacggcuuccagaacaagaagugggaccuguucguggagcgcagcaaggccuacuccaacugcuaccccuacgacgugccggacuacgcgagccugcggucccucgucgccagcuccgggacgcuggaguucaacaacgagagcuucaacuggaccggcgugacccagaacgggaccuccagcgccugcaagcgccgguccaacaacagcuucuucucccgccugaacuggcucacgcaccugaaguucaaguaccccgcccugaacgugaccaugcccaacaacgagaaguucgacaagcucuacaucuggggcguccaccaccccgggaccgacaacgaccagaucuuccuguacgcgcaggccagcggccggaucaccguguccacgaagcgcagccagcagaccgugaucccgaacaucggcagccggccccgcguccggaacauccccucccgcaucagcaucuacuggaccaucgugaagcccggggacauccugcucaucaacuccaccggcaaccugaucgccccgcggggguacuucaagauccgcagcggcaaguccagcaucaugcgguccgacgcccccaucggcaagugcaacagcgagugcaucacgcccaacggguccauccccaacgacaagccguuccagaacgugaaccgcaucaccuacggcgccugcccccgguacgucaagcagaacacccugaagcucgcgaccgggaugcgcaaccugcccgagaagcagacgcggggcaucuucggggccaucgccggcuucaucgagaacggcugggaggggaugguggacggcugguacggguuccgccaccagaacagcgagggcaucgggcaggccgccgaccugaaguccacccaggcggccaucaaccagaucaacggcaagcucaaccggcugaucggcaagaccaacgagaaguuccaccagaucgagaaggaguucagcgagguggaggggcgcauccaggaccuggagaaguacgucgaggacaccaagaucgaccucugguccuacaacgccgagcugcugguggcccucgagaaccagcacacgaucgaccugaccgacagcgagaugaacaagcuguucgagcggaccaagaagcagcuccgcgagaacgccgaggacaugggcaacgggugcuucaagaucuaccacaagugcgacaacgcgugcaucggcuccauccgcaacgggaccuacgaccacgacguguaccgggacgaggcccugaacaaccgcuuccagaucaagggcgucgagcugaaguccggcuacaaggacuggauccucuggaucuccuucgccaucagcugcuuccugcugugcguggcccuccugggguucaucaugugggccugccagaagggcaacauccggugcaacaucugcaucuga

SEQ ID NO: 66675 - RNA, 1701 nt, Artificial Sequence; identical to SEQ ID NO: 64654
  derived and/or modified CDS sequence (opt1) from hemagglutinin__InfluenzaA__ACO95492

SEQ ID NO: 66676 - RNA, 1701 nt, Artificial Sequence; identical to SEQ ID NO: 64654
  derived and/or modified CDS sequence (opt1) from hemagglutinin__InfluenzaA__ACO95503

SEQ ID NO: 66677 - RNA, 1701 nt, Artificial Sequence; identical to SEQ ID NO: 64654
  derived and/or modified CDS sequence (opt1) from hemagglutinin__InfluenzaA__ACO95514

SEQ ID NO: 66678 - RNA, 1701 nt, Artificial Sequence; identical to SEQ ID NO: 64654
  derived and/or modified CDS sequence (opt1) from hemagglutinin__InfluenzaA__ACO95536

SEQ ID NO: 66679 - RNA, 1701 nt, Artificial Sequence; identical to SEQ ID NO: 64654
  derived and/or modified CDS sequence (opt1) from hemagglutinin__InfluenzaA__ACO95547

SEQ ID NO: 66680 - RNA, 1701 nt, Artificial Sequence
  derived and/or modified CDS sequence (opt1) from hemagglutinin__InfluenzaA__ACP41963
augaaggccauccuggugguccuccuguacaccuucgccaccgcgaacgccgacacgcugugcaucggcuaccacgccaacaacagcaccgacaccguggacaccgugcucgagaagaacgucacggugacccacuccgugaaccugcuggaggacaagcacaacgggaagcucugcaagcugcgcggcgucgcgccccugcaccucgggaagugcaacaucgccggcuggauccuggggaacccggagugcgagagccuguccaccgccagcuccuggagcuacaucguggagaccuccagcuccgacaacggcacgugcuaccccggcgacuucaucgacuacgaggagcuccgggagcagcugagcuccgugagcuccuucgagcgcuucgagaucuuccccaagaccagcuccuggcccaaccacgacagcaacaagggggucaccgccgccugcccgcacgccggcgcgaaguccuucuacaagaaccugaucuggcucgugaagaaggggaacagcuaccccaagcuguccaagagcuacaucaacgacaagggcaaggaggugcugguccucugggggauccaccaccccagcaccuccgccgaccagcagagccuguaccagaacgccgacgccuacguguucgugggcuccagccgguacuccaagaaguucaagcccgagaucgccauccgcccgaagguccgggaccaggagggccgcaugaacuacuacuggacgcugguggagcccggggacaagaucaccuucgaggcgaccggcaaccucguggucccccgguacgccuucgccauggagcgcaacgccgggagcggcaucaucaucuccgacacccccgugcacgacugcaacacgaccugccagaccccgaagggcgccaucaacaccagccugcccuuccagaacauccaccccaucacgaucgggaagugccccaaguacgugaaguccaccaagcugcggcucgcgaccggccugcgcaacgucccgagcauccagucccgggggcuguucggcgccaucgccggguucaucgagggcggcuggaccgggaugguggacggcugguacggguaccaccaccagaacgagcagggcagcggguacgccgccgaccucaaguccacgcagaacgcgaucgacgagaucaccaacaaggugaacagcgucaucgagaagaugaacacccaguucaccgccgugggcaaggaguucaaccaccuggagaagcgcaucgagaaccugaacaagaaggucgacgacggcuuccucgacaucuggacguacaacgccgagcugcuggugcuccuggagaacgagcggacccuggacuaccacgacuccaacgugaagaaccucuacgagaagguccgcagccagcugaagaacaacgccaaggagaucgggaacggcugcuucgaguucuaccacaagugcgacaacacgugcauggaguccgugaagaacgggaccuacgacuaccccaaguacagcgaggaggccaagcugaaccgggaggagaucgacggcgugaagcucgaguccacccgcaucuaccagauccuggcgaucuacagcaccgucgccagcucccuggugcucguggucagccugggggccaucuccuucuggaugugcagcaacggcucccugcagugccggaucugcaucuga

SEQ ID NO: 66681 - RNA, 1698 nt, Artificial Sequence; identical to SEQ ID NO: 66667
  derived and/or modified CDS sequence (opt1) from hemagglutinin__InfluenzaA__ACP44192

SEQ ID NO: 66682 - RNA, 1698 nt, Artificial Sequence; identical to SEQ ID NO: 66667
  derived and/or modified CDS sequence (opt1) from hemagglutinin__InfluenzaA__ACP44203

SEQ ID NO: 66683 - RNA, 1698 nt, Artificial Sequence
  derived and/or modified CDS sequence (opt1) from hemagglutinin__InfluenzaA__ACP44225
augaaggugaagcugcucguccugcugugcaccuucaccgccacguacgccgacaccaucugcaucggcuaccacgcgaacaacagcaccgacaccguggacacggugcucgagaagaacgucaccgugacccacuccgugaaccugcuggagaacagccacaacgggaagcucugccugcugaagggcaucgcgccccuccagcuggggaacugcuccgucgccggcuggauccuggggaacccggagugcggccuccugaucagcaaggaguccuggagcuacaucguggagaagcccaaccccgagaacgggaccugcuaccccgggcacuucgccgacuacgaggagcugcgcgagcagcucuccagcguguccagcuucgagcgguucgagaucuucccgaaggaguccagcuggcccaaccacacggucaccggcguguccgccagcugcucccacaacggggagagcuccuucuaccgcaaccugcuguggcucaccggcaagaacgggcuguaccccaaccugagcaaguccuacgccaacaacaaggagaaggaggugcucguccuguggggcgugcaccacccgcccaacaucggcgaccagaaggcccuguaccacaccgagaacgccuacgugagcgucgugagcucccacuacagccggaaguucacgcccgagaucgccaagcgccccaaggugcgggaccaggaggggcgcaucaacuacuacuggacccuccuggagcccggcgacaccaucaucuucgaggcgaacgggaaccugaucgccccgcgguacgccuucgcccucucccgcggcuucggcagcgggaucaucaacuccaacgcccccauggacaagugcgacgcgaagugccagacgccccagggcgccaucaacagcucccugcccuuccagaacguccacccggugaccaucggggagugccccaaguacgugcggagcgccaagcugcgcauggucaccggccuccggaacauccccuccauccagagccgcgggcuguucggcgccaucgccggcuucaucgagggcggcuggaccgggaugguggacggcugguacggguaccaccaccagaacgagcagggcuccggcuacgcggccgaccagaaguccacccagaacgccaucaacgggaucacgaacaaggugaacagcgucaucgagaagaugaacacccaguucaccgccgugggcaaggaguucaacaagcuggagcggcgcauggagaaccucaacaagaaggucgacgacggguucaucgacaucuggaccuacaacgccgagcugcuggugcuccuggagaacgagcggacgcuggacuuccacgacagcaacgugaagaaccucuacgagaaggucaagucccagcugaagaacaacgcgaaggagaucggcaacgggugcuucgaguucuaccacaagugcaacgacgagugcauggagagcgugaagaacggcaccuacgacuaccccaaguacuccaaggagagcaagcugaaccgcgagaagaucgacggcgugaagcucgaguccaugggggucuaccagauccuggccaucuacagcaccguggccagcucccuggugcuccuggucagccugggcgccaucuccuucuggaugugcagcaacgggucccuccagugccggaucugcaucuga

SEQ ID NO: 66684 - RNA, 1701 nt, Artificial Sequence
  derived and/or modified CDS sequence (opt1) from hemagglutinin__InfluenzaA__ACP44236
augaagaccaucaucgcccugagcuacauccucugccugguguucgcccagaagcugcccggcaacgacaacuccaccgcgacgcucugccuggggcaccacgccgucccgaacggcaccaucgugaagaccaucaccaacgaccagaucgaggugacgaacgccaccgagcugguccagagcuccagcaccgggggcaucugcgacagcccccaccagauccucgacggggagaacugcacccugaucgacgcccugcucggcgacccccagugcgacggcuuccagaacaagaagugggaccuguucguggagcgcagcaaggccuacuccaacugcuaccccuacgacgugccggacuacgcgagccugcggucccucgucgccagcuccgggacgcuggaguucaacaacgagagcuucaacuggaccggcgugacccagaacgggaccuccagcgccugcaagcgccgguccgacaagagcuucuucucccgccugaacuggcucacgcaccugaaguucaaguaccccgcccugaacgugaccaugcccaacaacgagaaguucgacaagcucuacaucuggggcguccaccaccccgggaccgacaacgaccagaucagccuguacgcgcaggccuccggccggaucaccgugagcacgaagcgcagccagcagaccgugaucccgaacaucggcucccggccccgcguccgggacgugcccagccgcaucuccaucuacuggaccaucgugaagcccggggacauccugcucaucaacagcaccggcaaccugaucgccccgcggggguacuucaagauccgcuccggcaagagcuccaucaugcggagcgacgcccccaucggcaagugcaacuccgagugcaucacgcccaacgggagcauccccaacgacaagccguuccagaacgucaaccgcaucaccuacggcgccugcccccgguacgugaagcagaacacccugaagcucgcgaccgggaugcgcaacgugcccgagaagcagacgcggggcaucuucggggccaucgccggcuucaucgagaacggcugggaggggauggucgacggcugguacggguuccgccaccagaacuccgagggcaccgggcaggccgccgaccugaaguccacccaggcggccaucaaccagaucaacggcaagcugaaccggcucaucggcaagaccaacgagaaguuccaccagaucgagaaggaguucuccgagguggaggggcgcauccaggaccuggagaaguacguggaggacacgaagaucgaccuguggagcuacaacgccgagcuccuggucgcccuggagaaccagcacaccaucgaccucaccgacuccgagaugaacaagcuguucgagcggaccaagaagcagcugcgcgagaacgccgaggacaugggcaacgggugcuucaagaucuaccacaagugcgacaacgcgugcaucggcagcauccgcaacgggacguacgaccacgacguguaccgggacgaggcccucaacaaccgcuuccagaucaagggcguggagcugaaguccggcuacaaggacuggauccuguggaucagcuucgccaucuccugcuuccuccugugcgucgcccugcucggguucaucaugugggccugccagaagggcaacauccggugcaacaucugcaucuga

SEQ ID NO: 66685 - RNA, 1701 nt, Artificial Sequence; identical to SEQ ID NO: 66621
  derived and/or modified CDS sequence (opt1) from hemagglutinin__InfluenzaA__ACP44247

SEQ ID NO: 66686 - RNA, 1701 nt, Artificial Sequence; identical to SEQ ID NO: 64654
  derived and/or modified CDS sequence (opt1) from hemagglutinin__InfluenzaA__ACP44258

SEQ ID NO: 66687 - RNA, 1701 nt, Artificial Sequence; identical to SEQ ID NO: 64654
  derived and/or modified CDS sequence (opt1) from hemagglutinin__InfluenzaA__ACP44269

SEQ ID NO: 66688 - RNA, 1701 nt, Artificial Sequence; identical to SEQ ID NO: 66680
  derived and/or modified CDS sequence (opt1) from hemagglutinin__InfluenzaA__ACQ44554

SEQ ID NO: 66689 - RNA, 1701 nt, Artificial Sequence; identical to SEQ ID NO: 66680
  derived and/or modified CDS sequence (opt1) from hemagglutinin__InfluenzaA__ACQ44556

SEQ ID NO: 66690 - RNA, 1701 nt, Artificial Sequence; identical to SEQ ID NO: 66680
  derived and/or modified CDS sequence (opt1) from hemagglutinin__InfluenzaA__ACQ45338

SEQ ID NO: 66691 - RNA, 1701 nt, Artificial Sequence
  derived and/or modified CDS sequence (opt1) from hemagglutinin__InfluenzaA__ACQ55359
augaaggccauccuggugguccuccuguacaccuucgccaccgcgaacgccgacacgcugugcaucggcuaccacgccaacaacagcaccgacaccguggacaccgugcucgagaagaacgucacggugacccacuccgugaaccugcuggaggacaagcacaacgggaagcucugcaagcugcgcggcgucgcgccccugcaccucgggaagugcaacaucgccggcuggauccuggggaacccggagugcgagagccuguccaccgcgagcuccuggagcuacaucguggagacccccuccagcgacaacggcacgugcuaccccggcgacuucaucgacuacgaggagcuccgggagcagcuguccagcguguccagcuucgagcgcuucgagaucuuccccaagaccuccagcuggccgaaccacgacuccaacaagggggucaccgccgccugcccccacgccggcgccaagagcuucuacaagaaccugaucuggcucgugaagaaggggaacuccuaccccaagcugagcaaguccuacaucaacgacaagggcaaggaggugcugguccucugggggauccaccaccccagcaccagcgccgaccagcagucccuguaccagaacgccgacgccuacguguucgugggcagcucccgguacagcaagaaguucaagccggagaucgccauccgccccaagguccgggaccaggagggccgcaugaacuacuacuggacgcugguggagcccggggacaagaucaccuucgaggcgaccggcaaccucguggucccccgguacgccuucgccauggagcgcaacgccggguccggcaucaucaucagcgacaccccggugcacgacugcaacacgaccugccagacccccaagggcgccaucaacaccucccugcccuuccagaacauccaccccaucacgaucgggaagugcccgaaguacgucaagagcaccaagcugcggcucgcgaccggccugcgcaacauccccuccauccagagccgggggcuguucggcgccaucgccggguucaucgagggcggcuggaccgggaugguggacggcugguacggguaccaccaccagaacgagcagggcuccggguacgccgccgaccucaagagcacgcagaacgcgaucgacgagaucaccaacaaggugaacuccgugaucgagaagaugaacacccaguucaccgccgucggcaaggaguucaaccaccuggagaagcgcaucgagaaccugaacaagaagguggacgacggcuuccucgacaucuggacguacaacgccgagcugcugguccuccuggagaacgagcggacccuggacuaccacgacagcaacgugaagaaccucuacgagaaggugcgcucccagcugaagaacaacgccaaggagaucgggaacggcugcuucgaguucuaccacaagugcgacaacacgugcauggagagcgucaagaacgggaccuacgacuaccccaaguacuccgaggaggccaagcugaaccgggaggagaucgacggcgugaagcucgagagcacccgcaucuaccagauccuggcgaucuacuccaccguggccagcagccugguccucguggugucccugggggccaucagcuucuggaugugcuccaacggcagccugcagugccggaucugcaucuga

SEQ ID NO: 66692 - RNA, 1701 nt, Artificial Sequence; identical to SEQ ID NO: 66680
  derived and/or modified CDS sequence (opt1) from hemagglutinin__InfluenzaA__ACQ55361

SEQ ID NO: 66693 - RNA, 1701 nt, Artificial Sequence
  derived and/or modified CDS sequence (opt1) from hemagglutinin__InfluenzaA__ACQ63223
augaaggccauccuggugguccuccuguacaccuucgccaccgcgaacgccgacacgcugugcaucggcuaccacgccaacaacagcaccgacaccguggacaccgugcucgagaagaacgucacggugacccacuccgugaaccugcuggaggacaagcacaacgggaagcucugcaagcugcgcggcgucgcgccccugcaccucgggaagugcaacaucgccggcuggauccuggggaacccggagugcgagagccuguccaccgccagcuccuggagcuacaucguggagaccuccagcuccgacaacggcacgugcuaccccggcgacuucaucgacuacgaggagcuccgggagcagcugagcuccgugagcuccuucgagcgcuucgagaucuuccccaagaccagcuccuggcccaaccacgacagcaacaagggggucaccgccgccugcccgcacgccggcgcgaaguccuucuacaagaaccugaucuggcucgugaagaaggggaacagcuaccccaagcuguccaagagcuacaucaacgacaagggcaaggaggugcugguccucugggggauccaccaccccagcaccuccgccgaccagcagagccuguaccagaacgccgacgccuacguguucgugggcacgucccgguacagcaagaaguucaagcccgagaucgccauccgcccgaagguccgggaccaggagggccgcaugaacuacuacuggacccugguggagcccggggacaagaucaccuucgaggcgaccggcaaccucguggucccccgguacgccuucgccauggagcgcaacgccggguccggcaucaucaucagcgacacgcccgugcacgacugcaacacgaccugccagaccccgaagggcgccaucaacaccucccugcccuuccagaacauccaccccaucaccaucgggaagugccccaaguacgucaagagcaccaagcugcggcucgcgaccggccugcgcaacgugccguccauccagagccgggggcuguucggcgccaucgccggguucaucgagggcggcuggacggggaugguggacggcugguacggguaccaccaccagaacgagcagggcuccggguacgccgccgaccucaagagcacccagaacgcgaucgacgagaucaccaacaaggugaacuccgucaucgagaagaugaacacccaguucacggccgugggcaaggaguucaaccaccuggagaagcgcaucgagaaccugaacaagaaggucgacgacggcuuccucgacaucuggaccuacaacgccgagcugcuggugcuccuggagaacgagcggacccuggacuaccacgacagcaacgugaagaaccucuacgagaagguccgcucccagcugaagaacaacgccaaggagaucgggaacggcugcuucgaguucuaccacaagugcgacaacacgugcauggagagcgugaagaacgggaccuacgacuaccccaaguacuccgaggaggccaagcugaaccgggaggagaucgacggcgugaagcucgagagcacccgcaucuaccagauccuggcgaucuacuccaccgucgccagcagccuggugcucguggucucccugggggccaucagcuucuggaugugcuccaacggcagccugcagugccggaucugcaucuga

SEQ ID NO: 66694 - RNA, 1701 nt, Artificial Sequence; identical to SEQ ID NO: 66693
  derived and/or modified CDS sequence (opt1) from hemagglutinin__InfluenzaA__ACQ63239

SEQ ID NO: 66695 - RNA, 1701 nt, Artificial Sequence; identical to SEQ ID NO: 66693
  derived and/or modified CDS sequence (opt1) from hemagglutinin__InfluenzaA__ACQ63244

SEQ ID NO: 66696 - RNA, 1701 nt, Artificial Sequence; identical to SEQ ID NO: 66693
  derived and/or modified CDS sequence (opt1) from hemagglutinin__InfluenzaA__ACQ63257

SEQ ID NO: 66697 - RNA, 1701 nt, Artificial Sequence
  derived and/or modified CDS sequence (opt1) from hemagglutinin__InfluenzaA__ACQ65691
augaagaccaucaucgcccugagcuacauccucugccugguguucgcccagaagcugcccggcaacgacaacuccaccgcgacgcucugccuggggcaccacgccgucccgaacggcaccaucgugaagaccaucaccaacgaccagaucgaggugacgaacgccaccgagcugguccagagcuccagcaccgggggcaucugcgacagcccccaccagauccucgacggggagaacugcacccugaucgacgcccugcucggcgacccccagugcgacggcuuccagaacaagaagugggaccuguucguggagcgcuccaaggccuacuccaacugcuaccccuacgacgugccggacuacgcgagccugcggucccucgucgccagcuccgggacgcuggaguucaacaacgagagcuucaacuggaccggcgugacccagaacgggaccuccagcuccugcaagcgcggcagcgacaacuccuucuucagccggcugaacuggcucacgcaccugaaguucaaguaccccgcccugaacgugaccaugcccaacaacgagaaguucgacaagcucuacaucuggggcguccaccaccccgggaccgacaacgaccagaucuucccguacgcccaggcguccggccgcaucaccgugagcacgaagcggagccagcagaccgugauccccaacaucgggucccgcccccggguccgcgacauccccagccggaucuccaucuacuggaccaucgugaagccgggcgacauccugcugaucaacagcaccgggaaccucaucgcgccccgcggcuacuucaagauccgguccggcaagagcuccaucaugcgcagcgacgcccccaucgggaagugcaacuccgagugcaucacgcccaacggcagcaucccgaacgacaagcccuuccagaacgugaaccggaucaccuacggggccugcccccgcuacgucaagcagaacacccugaagcuggccaccggcaugcggaacgugcccgagaagcagacgcgcgggaucuucggcgccaucgccggcuucaucgagaacgggugggagggcaugguggacgggugguacggcuuccggcaccagaacuccgaggggaucggccaggccgccgaccucaagagcacccaggccgcgaucaaccagaucaacggcaagcugaaccgccugaucgggaagaccaacgagaaguuccaccagaucgagaaggaguucuccgaggucgagggccggauccaggaccucgagaaguacguggaggacaccaagaucgaccuguggagcuacaacgccgagcugcucguggcccuggagaaccagcacacgaucgaccugaccgacuccgagaugaacaagcuguucgagcgcaccaagaagcagcuccgggagaacgccgaggacauggggaacggcugcuucaagaucuaccacaagugcgacaacgccugcaucgggagcauccgcaacggcaccuacgaccacgacgucuaccgcgacgaggcgcugaacaaccgguuccagaucaagggcguggagcucaaguccggguacaaggacuggauccuguggaucagcuucacgaucuccugcuuccugcucugcguggcccugcugggcuucaucaugugggccugccagaaggggaacauccgcugcaacaucugcaucuga

SEQ ID NO: 66698 - RNA, 1701 nt, Artificial Sequence; identical to SEQ ID NO: 66458
  derived and/or modified CDS sequence (opt1) from hemagglutinin__InfluenzaA__ACQ65713

SEQ ID NO: 66699 - RNA, 1701 nt, Artificial Sequence
  derived and/or modified CDS sequence (opt1) from hemagglutinin__InfluenzaA__ACQ65724
augaagaccaucaucgcccugagcuacauccucugccugguguucgcccagaagcugcccggcaacgacaacuccaccgcgacgcucugccuggggcaccacgccgucccgaacggcaccaucgugaagaccaucaccaacgaccagaucgaggugacgaacgccaccgagcugguccagagcuccagcaccggggagaucugcgacagcccccaccagauccucgacggcgagaacugcacccugaucgacgcccugcucggggacccccagugcgacggcuuccagaacaagaagugggaccuguucguggagcgcagcaaggccuacuccaacugcuaccccuacgacgugccggacuacgcgagccugcggucccucgucgccagcuccggcacgcuggaguucaacaacgagagcuucaacugggccggggugacccagaacggcaccuccagcgccugcauccgccgguccaacaacagcuucuucucccgccugaacuggcucacccaccugaaguucaaguaccccgcgcugaacgugacgaugcccaacaacgagcaguucgacaagcucuacaucuggggcguccaccaccccgggaccgacaacgaccagaucuuccuguacgcccaggccagcgggcggaucaccguguccaccaagcgcagccagcagacggugaucccgaacaucggcagccggccccgcguccggaacauccccucccgcaucagcaucuacuggaccaucgugaagcccggcgacauccugcucaucaacuccaccgggaaccugaucgccccgcggggcuacuucaagauccgcagcgggaaguccagcaucaugcgguccgacgcccccaucggcaagugcaacagcgagugcaucacccccaacggcuccauccccaacgacaagccguuccagaacgugaaccgcaucacguacggggcgugcccccgguacgucaagcagaacacccugaagcucgccaccggcaugcgcaacgugcccgagaagcagacccgggggaucuucggcgccaucgccggguucaucgagaacggcugggagggcaugguggacgggugguacggcuuccgccaccagaacagcgaggggcggggccaggccgcggaccugaaguccacgcaggccgccaucgaccagaucaacgggaagcugaaccgccucaucggcaagaccaacgagaaguuccaccagaucgagaaggaguucagcgaggucgagggccggauccaggaccuggagaaguacguggaggacaccaagaucgaccugugguccuacaacgccgagcuccugguggcccuggagaaccagcacaccaucgaccucacggacagcgagaugaacaagcuguucgagaagaccaagaagcagcugcgcgagaacgcggaggacauggggaacggcugcuucaagaucuaccacaagugcgacaacgccugcaucggguccauccgcaacggcaccuacgaccacgacgucuaccgggacgaggcccucaacaaccgcuuccagaucaaggggguggagcugaaguccggcuacaaggacuggauccuguggaucuccuucgccaucagcugcuuccuccugugcguggcccugcucggcuucaucaugugggcgugccagaaggggaacauccggugcaacaucugcaucuga

SEQ ID NO: 66700 - RNA, 1701 nt, Artificial Sequence
  derived and/or modified CDS sequence (opt1) from hemagglutinin__InfluenzaA__ACQ65747
augaagaccaucaucgcccugagcuacauccucugccugguguucgcccagaagcugcccggcaacgacaacuccaccgcgacgcucugccuggggcaccacgccgucccgaacggcaccaucgugaagaccaucaccaacgaccagaucgaggugacgaacgccaccgagcugguccagagcuccagcaccggggagaucugcgacagcccccaccagauccucgacggcgagaacugcacccugaucgacgcccugcucggggacccccagugcgacggcuuccagaacaagaagugggaccuguucguggagcgcagcaaggccuacuccaacugcuaccccuacgacgugccggacuacgcgagccugcggucccucgucgccagcuccggcacgcuggaguucaacaacgagagcuucaacuggaccggggugacccagaacggcaccuccagcgccugcauccgccggacgaacaacuccuucuucagccgccugaacuggcucacccaccugaaguucaaguaccccgcccugaacgugaccaugcccaacaacgagaaguucgacaagcucuacaucuggggcguccaccaccccgggaccgacaacgaccagaucuuccuguacgcgcaggccuccgggcggaucacggugagcaccaagcgcucccagcagaccgugaucccgaacaucggcagccggccccgcguccggaacauccccagccgcaucuccaucuacuggaccaucgugaagcccggcgacauccugcucaucaacagcacggggaaccugaucgccccgcggggcuacuucaagauccgcuccgggaaguccuccaucaugcggagcgacgcccccaucggcaagugcaacuccgagugcaucacccccaacggcagcauccccaacgacaagccguuccagaacgugaaccgcaucaccuacggggccugcccccgguacgucaagcagaacacccugaagcucgcgacgggcaugcgcaacgugcccgagaagcagacccgggggaucuucggcgccaucgccggguucaucgagaacggcugggagggcaugauggacgggugguacggcuuccgccaccagaacuccgaggggaucggccaggccgccgaccucaagagcacccaggcggccaucgaccagaucaacgggaagcugaacggccugaucggcaagaccaacgagaaguuccaccagaucgagaaggaguucuccgagguggaggggcggauccaggaccuggagaaguacgucgaggacacgaagaucgaccuguggagcuacaacgccgagcuccugguggcccuggagaaccagcacaccaucgaccucaccgacuccgagaugaacaagcuguucgagaagaccaagaagcagcugcgcgagaacgccgaggacaugggcaacgggugcuucaagaucuaccacaagugcgacaacgcgugcaucggcagcauccggaacgggacguacgaccacgacguguaccgcgacgaggcccucaacaaccgcuuccagaucaagggcgucgagcugaaguccggcuacaaggacuggauccuguggaucagcuucgccaucuccugcuuccuccugugcguggcccugcucggguucaucaugugggccugccagaagggcaacauccggugcaacaucugcaucuga

SEQ ID NO: 66701 - RNA, 1698 nt, Artificial Sequence
  derived and/or modified CDS sequence (opt1) from hemagglutinin__InfluenzaA__ACQ65758
augaaggugaagcugcucguccugcugugcaccuucaccgccacguacgccgacaccaucugcaucggcuaccacgcgaacaacagcaccgacaccguggacacggugcucgagaagaacgucaccgugacccacuccgugaaccugcuggagaacagccacaacgggaagcucugccugcugaagggcaucgcgccccuccagcuggggaacugcuccgucgccggcuggauccuggggaacccggagugcgagcuccugaucagcaaggaguccuggagcuacgugguggagaagcccaaccccgagaacgggaccugcuaccccggccacuucgccgacuacgaggagcugcgcgagcagcucuccagcgucuccagcuucgagcgguucgagaucuucccgaaggaguccagcuggcccaaccacacggugaccgggguguccgccagcugcucccacaacggcgagagcuccuucuaccgcaaccugcuguggcucaccgggaagaacggccuguaccccaaccugagcaaguccuacgccaacaacaaggggaaggagguccucgugcuguggggcgugcaccacccgcccaacaucggcgaccagaacacccuguaccacacggagaacgccuacgucagcguggugagcucccacuacagccggaaguucacccccgagaucgccaagcgccccaagguccgggaccaggaggggcgcaucaacuacuacuggacccuccuggagcccggcgacaccaucaucuucgaggccaacgggaaccugaucgcgccgcgguacgccuucgcccucucccgcggcuucggcagcgggaucaucaacuccaacgcccccauggacaagugcgacgccaagugccagacgccccagggcgcgaucaacagcucccugcccuuccagaacgugcacccggugaccaucggggagugccccaaguacguccggagcgccaagcugcgcauggugaccggccuccggaacauccccuccauccagagccgcgggcuguucggcgccaucgccggcuucaucgagggcggcuggaccgggaugguggacggcugguacggguaccaccaccagaacgagcagggcuccggcuacgccgcggaccagaaguccacgcagaacgccaucaacgggaucaccaacaaggucaacagcgugaucgagaagaugaacacccaguucaccgccgucggcaaggaguucaacaagcuggagcggcgcauggagaaccucaacaagaagguggacgacggguucaucgacaucuggacguacaacgccgagcugcuggugcuccuggagaacgagcggacccuggacuuccacgacagcaacgucaagaaccucuacgagaaggugaagucccagcugaagaacaacgccaaggagaucggcaacgggugcuucgaguucuaccacaagugcaacgacgagugcauggagagcgugaagaacggcaccuacgacuaccccaaguacuccgaggagagcaagcugaaccgcgagaagaucgacggcgucaagcucgaguccauggggguguaccagauccuggcgaucuacagcaccguggccagcucccugguccuccuggugagccugggcgccaucuccuucuggaugugcagcaacgggucccuccagugccggaucugcaucuga

SEQ ID NO: 66702 - RNA, 1701 nt, Artificial Sequence; identical to SEQ ID NO: 66680
  derived and/or modified CDS sequence (opt1) from hemagglutinin__InfluenzaA__ACQ73386

SEQ ID NO: 66703 - RNA, 1701 nt, Artificial Sequence; identical to SEQ ID NO: 66693
  derived and/or modified CDS sequence (opt1) from hemagglutinin__InfluenzaA__ACQ73387

SEQ ID NO: 66704 - RNA, 1701 nt, Artificial Sequence
  derived and/or modified CDS sequence (opt1) from hemagglutinin__InfluenzaA__ACQ73555
augaagaccaucaucgcccugagcuacauccucugccugguguucgcccagaagcugcccggcaacgacaacuccaccgcgacgcucugccuggggcaccacgccgucccgaacggcaccaucgugaagaccaucaccaacgaccagaucgaggugacgaacgccaccgagcugguccagagcuccagcaccgggggcaucugcgacagcccccaccagauccucgacggggagaacugcacccugaucgacgcccugcucggcgacccccagugcgacggcuuccagaacaagaagugggaccuguucguggagcgcagcaaggccuacuccaacugcuaccccuacgacgugccggacuacgcgagccugcggucccucgucgccagcuccgggacgcuggaguucaacaacgagagcuucaacuggaccggcgugacccagaacgggaccuccagcgccugcaagcgccgguccaacaacagcuucuucucccgccugaacuggcucacgcaccugaaguucaaguaccccgcccugaacgugaccaagcccaacaacgagaaguucgacaagcucuacaucuggggcguccaccaccccgggaccgacaacgaccagaucuuccuguacgcgcaggccagcggccggaucaccguguccacgaagcgcagccagcagaccgugaucccgaacaucggcagccggccccgcguccggaacauccccucccgcaucagcaucuacuggaccaucgugaagcccggggacauccugcucaucaacuccaccggcaaccugaucgccccgcggggguacuucaagauccgcagcggcaaguccagcaucaugcgguccgacgcccccaucggcaagugcaacagcgagugcaucacgcccaacggguccauccccaacgacaagccguuccagaacgugaaccgcaucaccuacggcgccugcccccgguacgucaagcagaacacccugaagcucgcgaccgggaugcgcaacgugcccgagaagcagacgcggggcaucuucggggccaucgccggcuucaucgagaacggcugggaggggaugguggacggcugguacggguuccgccaccagaacagcgagggcaucgggcaggccgccgaccugaaguccacccaggcggccaucaaccagaucaacggcaagcugaaccggcucaucggcaagaccaacgagaaguuccaccagaucgagaaggaguucagcgaggucgaggggcgcauccaggaccuggagaaguacguggaggacaccaagaucgaccugugguccuacaacgccgagcuccugguggcccuggagaaccagcacacgaucgaccucaccgacagcgagaugaacaagcuguucgagcggaccaagaagcagcugcgcgagaacgccgaggacaugggcaacgggugcuucaagaucuaccacaagugcgacaacgcgugcaucggcuccauccgcaacgggaccuacgaccacgacgucuaccgggacgaggcccucaacaaccgcuuccagaucaagggcguggagcugaaguccggcuacaaggacuggauccuguggaucuccuucgccaucagcugcuuccuccugugcguggcccugcucggguucaucaugugggccugccagaagggcaacauccggugcaacaucugcaucuga

SEQ ID NO: 66705 - RNA, 1701 nt, Artificial Sequence; identical to SEQ ID NO: 66693
  derived and/or modified CDS sequence (opt1) from hemagglutinin__InfluenzaA__ACQ76294

SEQ ID NO: 66706 - RNA, 1701 nt, Artificial Sequence; identical to SEQ ID NO: 66693
  derived and/or modified CDS sequence (opt1) from hemagglutinin__InfluenzaA__ACQ76314

SEQ ID NO: 66707 - RNA, 1701 nt, Artificial Sequence; identical to SEQ ID NO: 66693
  derived and/or modified CDS sequence (opt1) from hemagglutinin__InfluenzaA__ACQ76317

SEQ ID NO: 66708 - RNA, 1701 nt, Artificial Sequence
  derived and/or modified CDS sequence (opt1) from hemagglutinin__InfluenzaA__ACQ76318
augaaggccauccuggugguccuccuguacaccuucgccaccgcgaacgccgacacgcugugcaucggcuaccacgccaacaacagcaccgacaccguggacaccgugcucgagaagaacgucacggugacccacuccgugaaccugcuggaggacaagcacaacgggaagcucugcaagcugcgcggcgucgcgccccugcaccucgggaagugcaacaucgccggcuggauccuggggaacccggagugcgagagccuguccaccgcgagcuccuggagcuacaucguggagacccccuccagcgacaacggcacgugcuaccccggcgacuucaucgacuacgaggagcuccgggagcagcuguccagcguguccagcuucgagcgcuucgagaucuuccccaagaccuccagcuggccgaaccacgacuccaacaagggggucaccgccgccugcccccacgccggcgccaagagcuucuacaagaaccugaucuggcucgugaagaaggggaacuccuaccccaagcugagcaaguccuacaucaacgacaagggcaaggaggugcugguccucugggggauccaccaccccagcaccagcgccgaccagcagucccuguaccagaacgccgacacguacguguucgugggcagcucccgguacagcaagaaguucaagccggagaucgccauccgccccaagguccgggaccaggagggccgcaugaacuacuacuggacccugguggagcccggggacaagaucaccuucgaggccaccggcaaccucguggucccccgguacgcguucgccauggagcgcaacgccggguccggcaucaucaucagcgacacgccggugcacgacugcaacacgaccugccagacccccaagggcgccaucaacaccucccugcccuuccagaacauccaccccaucaccaucgggaagugcccgaaguacgucaagagcaccaagcugcggcucgccaccggccugcgcaacauccccuccauccagagccgggggcuguucggcgcgaucgccggguucaucgagggcggcuggacggggaugguggacggcugguacggguaccaccaccagaacgagcagggcuccggguacgccgccgaccucaagagcacccagaacgccaucgacgagaucaccaacaaggugaacuccgugaucgagaagaugaacacccaguucacggcggucggcaaggaguucaaccaccuggagaagcgcaucgagaaccugaacaagaagguggacgacggcuuccucgacaucuggaccuacaacgccgagcugcugguccuccuggagaacgagcggacccuggacuaccacgacagcaacgugaagaaccucuacgagaaggugcgcucccagcugaagaacaacgccaaggagaucgggaacggcugcuucgaguucuaccacaagugcgacaacacgugcauggagagcgucaagaacgggaccuacgacuaccccaaguacuccgaggaggccaagcugaaccgggaggagaucgacggcgugaagcucgagagcacccgcaucuaccagauccuggccaucuacuccaccguggcgagcagccugguccucguggugucccugggggccaucagcuucuggaugugcuccaacggcagccugcagugccggaucugcaucuga

SEQ ID NO: 66709 - RNA, 1701 nt, Artificial Sequence; identical to SEQ ID NO: 66680
  derived and/or modified CDS sequence (opt1) from hemagglutinin__InfluenzaA__ACQ76326

SEQ ID NO: 66710 - RNA, 1701 nt, Artificial Sequence; identical to SEQ ID NO: 66680
  derived and/or modified CDS sequence (opt1) from hemagglutinin__InfluenzaA__ACQ76336

SEQ ID NO: 66711 - RNA, 1701 nt, Artificial Sequence; identical to SEQ ID NO: 66680
  derived and/or modified CDS sequence (opt1) from hemagglutinin__InfluenzaA__ACQ76347

SEQ ID NO: 66712 - RNA, 1701 nt, Artificial Sequence; identical to SEQ ID NO: 66693
  derived and/or modified CDS sequence (opt1) from hemagglutinin__InfluenzaA__ACQ76365

SEQ ID NO: 66713 - RNA, 1701 nt, Artificial Sequence; identical to SEQ ID NO: 66693
  derived and/or modified CDS sequence (opt1) from hemagglutinin__InfluenzaA__ACQ76370

SEQ ID NO: 66714 - RNA, 1701 nt, Artificial Sequence; identical to SEQ ID NO: 66680
  derived and/or modified CDS sequence (opt1) from hemagglutinin__InfluenzaA__ACQ76376

SEQ ID NO: 66715 - RNA, 1701 nt, Artificial Sequence
  derived and/or modified CDS sequence (opt1) from hemagglutinin__InfluenzaA__ACQ76383
augaaggccauccuggugguccuccuguacaccuucgccaccgcgaacgccgacacgcugugcaucggcuaccacgccaacaacagcaccgacaccguggacaccgugcucgagaagaacgucacggugacccacuccgugaaccugcuggaggacaagcacaacgggaagcucugcaagcugcgcggcgucgcgccccugcaccucgggaagugcaacaucgccggcuggauccuggggaacccggagugcgagagccuguccaccgccagcuccuggagcuacaucguggagaccuccagcuccgacaacggcacgugcuaccccggcgacuucaucgacuacgaggagcuccgggagcagcugagcuccgugagcuccuucgagcgcuucgagaucuuccccaagaccagcuccuggcccaaccacgacagcaacaaggggaucaccgccgccugcccgcacgccggcgcgaaguccuucuacaagaaccugaucuggcucgucaagaaggggaacagcuaccccaagcuguccaagagcuacaucaacgacaagggcaaggaggugcuggugcucugggggauccaccaccccagcaccuccgccgaccagcagagccuguaccagaacgccgacgccuacgucuucgugggcuccagccgguacuccaagaaguucaagcccgagaucgccauccgcccgaaggugcgggaccaggagggccgcaugaacuacuacuggacgcuggucgagcccggggacaagaucaccuucgaggcgaccggcaaccucguggugccccgguacgccuucgccauggagcgcaacgccgggagcggcaucaucaucuccgacacccccguccacgacugcaacacgaccugccagaccccgaagggcgccaucaacaccagccugcccuuccagaacauccaccccaucacgaucgggaagugccccaaguacgugaaguccaccaagcugcggcucgcgaccggccugcgcaacgugccgagcauccagucccgggggcuguucggcgccaucgccggguucaucgagggcggcuggaccgggauggucgacggcugguacggguaccaccaccagaacgagcagggcagcggguacgccgccgaccucaaguccacgcagaacgcgaucgacgagaucaccaacaaggugaacagcgugaucgagaagaugaacacccaguucaccgccgucggcaaggaguucaaccaccuggagaagcgcaucgagaaccugaacaagaagguggacgacggcuuccucgacaucuggacguacaacgccgagcugcugguccuccuggagaacgagcggacccuggacuaccacgacuccaacgugaagaaccucuacgagaaggugcgcagccagcugaagaacaacgccaaggagaucgggaacggcugcuucgaguucuaccacaagugcgacaacacgugcauggaguccgucaagaacgggaccuacgacuaccccaaguacagcgaggaggccaagcugaaccgggaggagaucgacggcgugaagcucgaguccacccgcaucuaccagauccuggcgaucuacagcaccguggccagcucccugguccucguggugagccugggggccaucuccuucuggaugugcagcaacggcucccugcagugccggaucugcaucuga

SEQ ID NO: 66716 - RNA, 1701 nt, Artificial Sequence; identical to SEQ ID NO: 66693
  derived and/or modified CDS sequence (opt1) from hemagglutinin__InfluenzaA__ACQ76389

SEQ ID NO: 66717 - RNA, 1701 nt, Artificial Sequence; identical to SEQ ID NO: 66680
  derived and/or modified CDS sequence (opt1) from hemagglutinin__InfluenzaA__ACQ76401

SEQ ID NO: 66718 - RNA, 1701 nt, Artificial Sequence; identical to SEQ ID NO: 66693
  derived and/or modified CDS sequence (opt1) from hemagglutinin__InfluenzaA__ACQ76405

SEQ ID NO: 66719 - RNA, 1701 nt, Artificial Sequence
  derived and/or modified CDS sequence (opt1) from hemagglutinin__InfluenzaA__ACQ76408
augaaggccauccugguggucaugcucuacaccuucgccaccgcgaacgccgacacgcugugcaucggcuaccacgccaacaacagcaccgacaccguggacaccgugcuggagaagaacgucacggugacccacuccgugaaccuccuggaggacaagcacaacgggaagcugugcaagcuccgcggcgucgcgccccugcaccuggggaagugcaacaucgccggcuggauccucgggaacccggagugcgagagccuguccaccgccagcuccuggagcuacaucguggagaccuccagcuccgacaacggcacgugcuaccccggcgacuucaucgacuacgaggagcugcgggagcagcucagcuccgugagcuccuucgagcgcuucgagaucuuccccaagaccagcuccuggcccaaccacgacagcaacaagggggucaccgccgccugcccgcacgccggcgcgaaguccuucuacaagaaccugaucuggcuggugaagaaggggaacagcuaccccaagcucuccaagagcuacaucaacgacaagggcaaggaggugcugguccugugggggauccaccaccccagcaccuccgccgaccagcagagccucuaccagaacgccgacgccuacguguucgugggcuccagccgguacuccaagaaguucaagcccgagaucgccauccgcccgaagguccgggaccaggagggccgcaugaacuacuacuggacgcugguggagcccggggacaagaucaccuucgaggcgaccggcaaccugguggucccccgguacgccuucgccauggagcgcaacgccgggagcggcaucaucaucuccgacacccccgugcacgacugcaacacgaccugccagaccccgaagggcgccaucaacaccagccuccccuuccagaacauccaccccaucacgaucgggaagugccccaaguacgugaaguccaccaagcugcggcuggcgaccggccuccgcaacgucccgagcauccagucccgggggcuguucggcgccaucgccggguucaucgagggcggcuggaccgggaugguggacggcugguacggguaccaccaccagaacgagcagggcagcggguacgccgccgaccugaaguccacgcagaacgcgaucgacgagaucaccaacaaggugaacagcgucaucgagaagaugaacacccaguucaccgccgugggcaaggaguucaaccaccucgagaagcgcaucgagaaccugaacaagaaggucgacgacggcuuccuggacaucuggacguacaacgccgagcuccuggugcugcucgagaacgagcggacccuggacuaccacgacuccaacgugaagaaccuguacgagaagguccgcagccagcucaagaacaacgccaaggagaucgggaacggcugcuucgaguucuaccacaagugcgacaacacgugcauggaguccgugaagaacgggaccuacgacuaccccaaguacagcgaggaggccaagcugaaccgggaggagaucgacggcgugaagcuggaguccacccgcaucuaccagauccucgcgaucuacagcaccgucgccagcucccuggugcugguggucagccucggggccaucuccuucuggaugugcagcaacggcucccugcagugccggaucugcaucuga

SEQ ID NO: 66720 - RNA, 1701 nt, Artificial Sequence
  derived and/or modified CDS sequence (opt1) from hemagglutinin__InfluenzaA__ACQ77601
augaagaccaucaucgcccugagcuacauccucugccuggccuucgcgcagaagcugcccggcaacgacaacuccaccgccacgcucugccuggggcaccacgccgugccgaacggcacccuggucaagaccaucaccaacgaccagaucgaggugacgaacgccaccgagcucgugcagagcuccagcaccgggcgcaucugcgacagcccccaccagauccuggacggcgagaacugcacccugaucgacgcccuccugggggacccccacugcgacggcuuccagaacaaggagugggaccuguucgucgagcgguccaaggcguacuccgacugcuaccccuacgacgugccggacuacgccagccuccgcucccugguggccagcuccggcacgcuggaguucaacaacgagagcuucaacuggaccggggucgcccagaacggcaccuccagcgcgugcaagcggcgcuccaucaagagcuucuucucccggcucaacuggcugcaccagcuggagaaccgcuaccccgcccccaacgugaccaugcccaacaacgacaaguucgacaagcucuacaucuggggcgugcaccacccgagcacggacuccgaccagaucagcgucuacgcccaggccagcgggcgggugaccguguccaccaagcgcagccagcagaccgucauccccaacaucgggucccggcccugggugcgcggcaucagcucccggaucagcaucuacuggacgaucgugaagcccggcgacauccugcugaucaacuccaccgggaaccucaucgccccgcgcggcuacuucaagauccggagcgggaaguccagcaucaugcgcuccgacgcgcccaucggcaagugcaacagcgagugcaucacccccaacggcuccauccccaacgacaagccguuccagaacgucaaccggaucaccuacggggccugcccccgcuacgugaagcagaacacgcugaagcuggccaccggcaugcggaacgugcccgagaagcagacccgcgggaucuucggcgccaucgccggguucaucgagaacggcugggagggcaugauggacgggugguacggcuuccggcaccagaacagcgaggggaccggccaggcggccgaccucaaguccacgcaggccgccaucaaccagaucaacgggaagcugaacaagcugaucgagaagaccaacgagaaguuccaccagaucgagaaggaguucagcgaggucgagggccgcauccaggaccucgagaaguacguggaggacaccaagaucgaccugugguccuacaacgccgagcugcucguggcgcuggagaaccagcacaccaucgaccugacggacagcgagaugaacaagcuguucgagcggacccgcaagcagcuccgcgagaacgccgaggacaugggcaacgggugcuucaagaucuaccacaagugcgacaacgccugcaucggcuccauccggaacgggaccuacgaccacgacgucuaccgcgacgaggcccugaacaaccgguuccagaucaagggcguggagcucaagagcggguacaaggacuggauccuguggaucagcuucgccaucuccugcuuccugcucugcgugguccugcugggcuucaucaugugggcgugccagaagggcaacauccgcugcaacaucugcaucuga

SEQ ID NO: 66721 - RNA, 1701 nt, Artificial Sequence
  derived and/or modified CDS sequence (opt1) from hemagglutinin__InfluenzaA__ACQ83310
augaaggccauccuggugguccuccuguacaccuucgccaccgcgaacgccgacacgcugugcaucggcuaccacgccaacaacagcaccgacaccguggacaccgugcucgagaagaacgucacggugacccacuccgugaaccugcuggaggacaagcacaacgggaagcucugcaagcugcgcggcgucgcgccccugcaccucgggaagugcaacaucgccggcuggauccuggggaacccggagugcgagagccuguccaccgccagcuccuggagcuacaucguggagaccuccagcuccgacaacggcacgugcuaccccggcgacuucaucgacuacgaggagcuccgggagcagcugagcuccaugagcuccuucgagcgcuucgagaucuuccccaagaccagcuccuggcccaaccacgacagcaacaagggggugaccgccgccugcccgcacgccggcgcgaaguccuucuacaagaaccugaucuggcucgucaagaaggggaacagcuaccccaagcuguccaagagcuacaucaacgacaagggcaaggaggugcuggugcucugggggauccaccaccccagcaccuccgccgaccagcagagccuguaccagaacgccgacgccuacgucuucgugggcuccagccgguacuccaagaagcugaagcccgagaucgccauccgcccgaaggugcgggaccaggagggccgcaugaacuacuacuggacgcucgucgagcccggggacaagaucaccuucgaggcgaccggcaaccugguggugccccgguacgccuucgccauggagcgcaacgccgggagcggcaucaucaucuccgacacccccguccacgacugcaacacgaccugccagaccccgaagggcgccaucaacaccagccugcccuuccagaacauccaccccaucacgaucgggaagugccccaaguacgugaaguccaccaagcuccggcuggcgaccggccugcgcaacgugccgagcauccagucccggggccucuucggggccaucgccggguucaucgagggcggcuggaccgggauggucgacggcugguacggguaccaccaccagaacgagcagggcagcggguacgccgccgaccugaaguccacgcagaacgcgaucgacgagaucaccaacaaggugaacagcgugaucgagaagaugaacacccaguucaccgccgucggcaaggaguucaaccaccuggagaagcgcaucgagaaccucaacaagaagguggacgacggcuuccuggacaucuggacguacaacgccgagcugcucguccugcuggagaacgagcggacccucgacuaccacgacuccaacgugaagaaccuguacgagaaggugcgcagccagcugaagaacaacgccaaggagaucgggaacggcugcuucgaguucuaccacaagugcgacaacacgugcauggaguccgucaagaacgggaccuacgacuaccccaaguacagcgaggaggccaagcucaaccgggaggagaucgacggcgugaagcuggaguccacccgcaucuaccagauccuggcgaucuacagcaccguggccagcucccucguccugguggugagccugggggccaucuccuucuggaugugcagcaacggcucccuccagugccggaucugcaucuga

SEQ ID NO: 66722 - RNA, 1701 nt, Artificial Sequence; identical to SEQ ID NO: 66680
  derived and/or modified CDS sequence (opt1) from hemagglutinin__InfluenzaA__ACQ84451

SEQ ID NO: 66723 - RNA, 1701 nt, Artificial Sequence; identical to SEQ ID NO: 66680
  derived and/or modified CDS sequence (opt1) from hemagglutinin__InfluenzaA__ACQ84457

SEQ ID NO: 66724 - RNA, 1701 nt, Artificial Sequence
  derived and/or modified CDS sequence (opt1) from hemagglutinin__InfluenzaA__ACQ84477
augaaggccauccugcucgugcugcuguacaccuucaccgccgcgaacgccgacacgcucugcaucggcuaccacgccaacaacagcaccgacaccgucgacaccgugcuggagaagaacgugacggucacccacuccgugaaccugcucgaggaccgccacaacgggaagcugugcaagcugcggggcguggcgccccuccaccuggggaagugcaacaucgccggcuggcugcucgggaacccggagugcgagcugcuguucaccgccagcuccuggagcuacaucgucgagaccuccaacagcgacaacggcacgugcuaccccggcgacuucaucaacuacgaggagcuccgcgagcagcuguccagcguguccagcuucgagcgguucgagaucuuccccaaggccuccagcuggcccgaccacgagaccaaccgcggggugaccgccgccugcccguacgcgggcgccaacuccuucuaccggaaccugaucuggcucgucaagaaggggaacagcuaccccaagcuguccaagagcuacgugaacaacaaggagaaggaggugcugguccucuggggcauccaccacccgcccaccuccacggaccagcagagccuguaccagaacgccgacgccuacguguucgugggguccagcaaguacaacaagaaguucaagcccgagaucgccacccgccccaagguccggggccaggcgggccgcaugaacuacuacuggacccugguggagcccggggacaccaucacguucgaggccaccggcaaccucguggucccccgguacgccuucgccaugaagcgcgggagcggcuccggcaucaucaucagcgacaccccggugcacgacugcaacaccacgugccagacccccaagggggccaucaacaccucccugcccuuccagaacauccaccccgugaccaucggcgagugcccgaaguacgucaagagcacgaagcugcggauggcgaccgggcuccgcaacauccccuccauccagagccggggccuguucggggccaucgccggcuucaucgagggcggguggaccggcaugaucgacgggugguacggcuaccaccaccagaacgagcagggguccggcuacgccgccgaccagaaguccacccagaacgcgaucgacggcaucacgaacaaggugaacagcgugaucgagaagaugaacacccaguucaccgccgucgggaaggaguucaaccaccuggagaagcgcaucgagaaccucaacaagaagguggacgacggcuuccuggacgucuggaccuacaacgccgagcugcucgugcugcuggagaacgagcggacgcucgacuaccacgacagcaacgugaagaaccuguacgagaagguccgcucccagcugaagaacaacgccaaggagaucgggaacggcugcuucgaguucuaccacaagugcgacgacacgugcauggagagcgugaagaacgggaccuacgacuaccccaaguacuccgaggagagcaagcucaaccgggaggagaucgacggcgugaagcuggaguccacccgcaucuaccagauccuggccaucuacagcaccgucgcguccagccucgugcugcuggugucccucggcgccaucagcuucuggaugugcagcaacgggucccugcagugccggaucugcaucuga

SEQ ID NO: 66725 - RNA, 1701 nt, Artificial Sequence
  derived and/or modified CDS sequence (opt1) from hemagglutinin__InfluenzaA__ACQ89900
augaaggccauccuggugguccuccuguacaccuucgccaccgcgaacgccgacacgcugugcaucggcuaccacgccaacaacagcaccgacaccguggacaccgugcucgagaagaacgucacggugacccacuccgugaaccugcuggaggacaagcacaacgggaagcucugcaagcugcgcggcgucgcgccccugcaccucgggaagugcaacaucgccggcuggauccuggggaacccggagugcgagagccuguccaccgccagcuccuggagcuacaucguggagaccuccagcuccgacaacggcacgugcuaccccggcgacuucaucgacuacgaggagcuccgggagcagcugagcuccgugagcuccuucgagcgcuucgagaucuuccccaagaccagcuccuggcccaaccacgacagcaacaagggggucaccgccgccugcccgcacgccggcgcgaaguccuucuacaagaaccugaucuggcucgugaagaaggggaacagcuaccccaagcuguccaagagcuacaucaacgacaagggcaaggaggugcugguccucugggggauccaccaccccagcaccuccgccgaccagcagagccuguaccagaacgccgacgccuacguguucgugggcuccagccgguacuccaagaaguucaagcccgagaucgccauccgcccgaagguccgggaccaggagggccgcaugaacuacuacuggacgcugguggagcccggggacaagaucaccuucgaggcgaccggcaaccucguggucccccgguacgccuucgccauggagcgcaacgccgggagcggcaucaucaucuccgacacccccgugcacgacugcaacacgaccugccagaccccgaagggcgccaucaacaccagccugcccuuccagaacauccaccccaucacgaucgggaagugccccaaguacgugaaguccaccaagcugcggcucgcgaccggccugcgcaacgucccgagcauccagucccgggggcuguucggcgccaucgccggguucaucgagggcggcuggaccgggaugguggacggcugguacggguaccaccaccagaacgagcagggcagcggguacgccgccgaccucaaguccacgcagaacgcgaucgacgagaucaccaacaaggugaacagcgucguggagaagaugaacacccaguucaccgccgucggcaaggaguucaaccaccuggagaagcgcaucgagaaccugaacaagaagguggacgacggcuuccucgacaucuggacguacaacgccgagcugcuggugcuccuggagaacgagcggacccuggacuaccacgacuccaacgucaagaaccucuacgagaaggugcgcagccagcugaagaacaacgccaaggagaucgggaacggcugcuucgaguucuaccacaagugcgacaacacgugcauggaguccgugaagaacgggaccuacgacuaccccaaguacagcgaggaggccaagcugaaccgggaggagaucgacggcgucaagcucgaguccacccgcaucuaccagauccuggcgaucuacagcaccguggccagcucccuggugcucgucgugagccugggggccaucuccuucuggaugugcagcaacggcucccugcagugccggaucugcaucuga

SEQ ID NO: 66726 - RNA, 1701 nt, Artificial Sequence; identical to SEQ ID NO: 66693
  derived and/or modified CDS sequence (opt1) from hemagglutinin__InfluenzaA__ACQ89902

SEQ ID NO: 66727 - RNA, 1701 nt, Artificial Sequence
  derived and/or modified CDS sequence (opt1) from hemagglutinin__InfluenzaA__ACQ89904
augaaggccauccuggugguccuccuguacaccuucgccaccgcgaacgccgacacgcugugcaucggcuaccacgccaacaacagcaccgacaccguggacaccgugcucgagaagaacgucacggugacccacuccgugaaccugcuggaggacaagcacaacgggaagcucugcaagcugcgcggcgucgcgccccugcaccucgggaagugcaacaucgccggcuggauccuggggaacccggagugcgagagccuguccaccgccagcuccuggagcuacaucguggagaccuccagcuccgacaagggcacgugcuaccccggcgacuucaucgacuacgaggagcuccgggagcagcugagcuccgugagcuccuucgagcgcuucgagaucuuccccaagaccagcuccuggcccaaccacgacagcaacaagggggucaccgccgccugcccgcacgccggcgcgaaguccuucuacaagaaccugaucuggcucgugaagaaggggaacagcuaccccaagcuguccaagagcuacaucaacgacaagggcaaggaggugcugguccucugggggauccaccaccccagcaccuccgccgaccagcagagccuguaccagaacgccgacgccuacguguucgugggcacgucccgguacagcaagaaguucaagcccgagaucgccauccgcccgaagguccgggaccaggagggccgcaugaacuacuacuggacccugguggagcccggggacaagaucaccuucgaggcgaccggcaaccucguggucccccgguacgccuucgccauggagcgcaacgccggguccggcaucaucaucagcgacacgcccgugcacgacugcaacacgaccugccagaccccgaagggcgccaucaacaccucccugcccuuccagaacauccaccccaucaccaucgggaagugccccaaguacgucaagagcaccaagcugcggcucgcgaccggccugcgcaacgugccguccauccagagccgggggcuguucggcgccaucgccggguucaucgagggcggcuggacggggaugguggacggcugguacggguaccaccaccagaacgagcagggcuccggguacgccgccgaccucaagagcacccagaacgcgaucgacgagaucaccaacaaggugaacuccgucaucgagaagaugaacacccaguucacggccgugggcaaggaguucaaccaccuggagaagcgcaucgagaaccugaacaagaaggucgacgacggcuuccucgacaucuggaccuacaacgccgagcugcuggugcuccuggagaacgagcggacccuggacuaccacgacagcaacgugaagaaccucuacgagaagguccgcucccagcugaagaacaacgccaaggagaucgggaacggcugcuucgaguucuaccacaagugcgacaacacgugcauggagagcgugaagaacgggaccuacgacuaccccaaguacuccgaggaggccaagcugaaccgggaggagaucgacggcgugaagcucgagagcacccgcaucuaccagauccuggcgaucuacuccaccgucgccagcagccuggugcucguggucucccugggggccaucagcuucuggaugugcuccaacggcagccugcagugccggaucugcaucuga

SEQ ID NO: 66728 - RNA, 1701 nt, Artificial Sequence; identical to SEQ ID NO: 66725
  derived and/or modified CDS sequence (opt1) from hemagglutinin__InfluenzaA__ACQ89905

SEQ ID NO: 66729 - RNA, 1701 nt, Artificial Sequence; identical to SEQ ID NO: 66680
  derived and/or modified CDS sequence (opt1) from hemagglutinin__InfluenzaA__ACQ99607

SEQ ID NO: 66730 - RNA, 1701 nt, Artificial Sequence; identical to SEQ ID NO: 66680
  derived and/or modified CDS sequence (opt1) from hemagglutinin__InfluenzaA__ACQ99608

SEQ ID NO: 66731 - RNA, 1701 nt, Artificial Sequence; identical to SEQ ID NO: 66680
  derived and/or modified CDS sequence (opt1) from hemagglutinin__InfluenzaA__ACQ99609

SEQ ID NO: 66732 - RNA, 1701 nt, Artificial Sequence; identical to SEQ ID NO: 66680
  derived and/or modified CDS sequence (opt1) from hemagglutinin__InfluenzaA__ACQ99611

SEQ ID NO: 66733 - RNA, 1701 nt, Artificial Sequence
  derived and/or modified CDS sequence (opt1) from hemagglutinin__InfluenzaA__ACQ99614
augaaggccauccuggugguccuccuguacaccuucgccaccgcgaacgccgacacgcugugcaucggcuaccacgccaacaacagcaccgacaccguggacaccgugcucgagaagaacgucacggugacccacuccgugaaccugcuggaggacaagcacaacgggaagcucugcaagcugcgcggcgucgcgccccugcaccucgggaagugcaacaucgccggcuggauccuggggaacccggagugcgagagccuguccaccgccagcuccuggagcuacaucguggagaccuccagcuccgacaacggcacgugcuaccccggcgacuucaucgacuacgaggagcuccgggagcagcugagcuccgugagcuccuucgagcgcuucgagaucuuccccaagaccagcuccuggcccaaccacgacagcaacaagggggucaccgccgccugcccgcacgccggcgcgaaguccuucuacaagaaccugaucuggcucgugaagaaggggaacagcuaccccaagcuguccaagagcuacaucaacgacaagggcaaggaggugcugguccucugggggauccaccaccccagcaccuccgccgaccagcagagccuguaccagaacgccgacgccuacguguucgugggcuccagccgguacuccaagaaguucaagcccgagaucgccauccgcccgaagguccgggaccaggagggccgcaugaacuacuacuggacgcugguggagcccggggacaagaucaccuucgaggcgaccggcaaccucguggucccccgguacgccuucgccauggagcgcaacgccgggagcggcaucaucaucuccgacacccccgugcacgacugcaacacgaccugccagaccccgaagggcgccaucaacaccagccugcccuuccagaacauccaccccaucacgaucgggaagugccccaaguacgugaaguccaccaagcugcggcucgcgaccggccugcgcaacgucccgagcauccagucccgggggcuguucggcgccaucgccggguucaucgagggcggcuggaccgggaugguggacggcugguacggguaccaccaccagaacgagcagggcagcggguacgccgccgaccucaaguccacgcagaacgcgaucgacgagaucaccaacaaggugaacagcgucaucgagaagaugaacacccaguucaccgccgugggcaaggaguucaaccaccuggagaagcgcaucgagaaccugaacaagaaggucgacgacggcuuccucgacaucuggacguacaacgccgagcugcugauccuccuggagaacgagcggacccuggacuaccacgacuccaacgugaagaaccucuacgagaaggugcgcagccagcugaagaacaacgccaaggagaucgggaacggcugcuucgaguucuaccacaagugcgacaacacgugcauggaguccgucaagaacgggaccuacgacuaccccaaguacagcgaggaggccaagcugaaccgggaggagaucgacggcgugaagcucgaguccacccgcaucuaccagauccuggcgaucuacagcaccguggccagcucccugguccucguggugagccugggggccaucuccuucuggaugugcagcaacggcucccugcagugccggaucugcaucuga

SEQ ID NO: 66734 - RNA, 1701 nt, Artificial Sequence; identical to SEQ ID NO: 66733
  derived and/or modified CDS sequence (opt1) from hemagglutinin__InfluenzaA__ACQ99616

SEQ ID NO: 66735 - RNA, 1701 nt, Artificial Sequence; identical to SEQ ID NO: 66680
  derived and/or modified CDS sequence (opt1) from hemagglutinin__InfluenzaA__ACQ99617

SEQ ID NO: 66736 - RNA, 1701 nt, Artificial Sequence; identical to SEQ ID NO: 66680
  derived and/or modified CDS sequence (opt1) from hemagglutinin__InfluenzaA__ACQ99618

SEQ ID NO: 66737 - RNA, 1701 nt, Artificial Sequence; identical to SEQ ID NO: 66680
  derived and/or modified CDS sequence (opt1) from hemagglutinin__InfluenzaA__ACQ99619

SEQ ID NO: 66738 - RNA, 1701 nt, Artificial Sequence; identical to SEQ ID NO: 66680
  derived and/or modified CDS sequence (opt1) from hemagglutinin__InfluenzaA__ACQ99620

SEQ ID NO: 66739 - RNA, 1701 nt, Artificial Sequence; identical to SEQ ID NO: 66733
  derived and/or modified CDS sequence (opt1) from hemagglutinin__InfluenzaA__ACQ99621

SEQ ID NO: 66740 - RNA, 1701 nt, Artificial Sequence; identical to SEQ ID NO: 66680
  derived and/or modified CDS sequence (opt1) from hemagglutinin__InfluenzaA__ACQ99622

SEQ ID NO: 66741 - RNA, 1701 nt, Artificial Sequence
  derived and/or modified CDS sequence (opt1) from hemagglutinin__InfluenzaA__ACR01014
augaaggccauccuggugguccuccuguacaccuucgccaccgcgaacgccgacacgcugugcaucggcuaccacgccaacaacagcaccgacaccguggacaccgugcucgagaagaacgucacggugacccacuccgugaaccugcuggaggacaagcacaacgggaagcucugcaagcugcgcggcgucgcgccccugcaccucgggaagugcaacaucgccggcuggauccuggggaacccggagugcgagagccuguccaccgccagcuccuggagcuacaucguggagaccuccagcuccgacaacggcacgugcuaccccggcgacuucaucgacuacgaggagcuccgggagcagcugagcuccgugagcuccuucgagcgcuucgagaucuuccccaagaccagcuccuggcccaaccacgacagcaacaagggggucaccgccgccugcccgcacgccggcgcgaaguccuucuacaagaaccugaucuggcucgugaagaaggggaacagcuaccccaagcuguccaagagcuacaucaacgacaagggcaaggaggugcugguccucugggggauccaccaccccagcaccuccgccgaccagcagagccuguaccagaacgccgacgccuacguguucgugggcuccagccgguacuccaagaaguucaagcccgagaucgccauccgcccgaagguccgggaccaggagggccgcaugaacuacuacuggacgcugguggagcccggggacaagaucaccuucgaggcgaccggcaaccucguggucccccgguacgccuucgccauggagcgcaacgccgggagcggcaucaucaucuccgacacccccgugcacgacugcaacacgaccugccagaccccgaagggcgccaucaacaccagccugcccuuccagaacauccaccccaucacgaucgggaagugccccaaguacgugaaguccaccaagcugcggcucgcgaccggccugcgcaacgucccgagcauccagucccgggggcuguucggcgccaucgccggguucaucgagggcggcuggaccgggaugguggacggcugguacggguaccaccaccagaacgagcagggcagcggguacgccgccgaccucaaguccacgcagaacgcgaucgacgagaucaccaacaaggugaacagcgucaucgagaagaugaacacccaguucaccgccgugggcaaggaguucaaccaccuggagaagcgcauggagaaccugaacaagaaggucgacgacggcuuccucgacaucuggacguacaacgccgagcugcuggugcuccuggagaacgagcggacccuggacuaccacgacuccaacgugaagaaccucuacgagaagguccgcagccagcugaagaacaacgccaaggagaucgggaacggcugcuucgaguucuaccacaagugcgacaacacgugcauggaguccgugaagaacgggaccuacgacuaccccaaguacagcgaggaggccaagcugaaccgggaggagaucgacggcgugaagcucgaguccacccgcaucuaccagauccuggcgaucuacagcaccgucgccagcucccuggugcucguggucagccugggggccaucuccuucuggaugugcagcaacggcucccugcagugccggaucugcaucuga

SEQ ID NO: 66742 - RNA, 1701 nt, Artificial Sequence; identical to SEQ ID NO: 66693
  derived and/or modified CDS sequence (opt1) from hemagglutinin__InfluenzaA__ACR08419

SEQ ID NO: 66743 - RNA, 1701 nt, Artificial Sequence
  derived and/or modified CDS sequence (opt1) from hemagglutinin__InfluenzaA__ACR08429
augaaggccauccuggugguccuccuguacaccuucgccaccgcgaacgccgacacgcugugcaucggcuaccacgccaacaacagcaccgacaccguggacaccgugcucgagaagaacgucacggugacccacuccgugaaccugcuggaggacaagcacaacgggaagcucugcaagcugcgcggcgucgcgccccugcaccucgggaagugcaacaucgccggcuggauccuggggaacccggagugcgagagccuguccaccgccagcuccuggagcuacaucguggagaccuccagcuccgacaacggcacgugcuaccccggcgacuucaucgacuacgaggagcuccgggagcagcugagcuccgugagcuccuucgagcgcuucgagaucuuccccaagaccagcuccuggcccaaccacgacagcaacaagggggucaccgccgccugcccgcacgccggcgcgaaguccuucuacaagaaccugaucuggcucgugaagaaggggaacagcuaccccaagcuguccaagagcuacaucaacgacaagggcaaggaggugcugguccucugggggauccaccaccccagcaccuccgccgaccagcagagccuguaccagaacgccgacgccuacguguucgugggcacgucccgguacagcaagaaguucaagcccgagaucgccauccgcccgaagguccgggaccaggagggccgcaugaacuacuacuggacccugguggagcccggggacaagaucaccuucgaggcgaccggcaaccucguggucccccgguacgccuucgccauggagcgcaacacgggguccggcaucaucaucagcgacacccccgugcacgacugcaacacgaccugccagaccccgaagggcgccaucaacaccucccugcccuuccagaacauccaccccaucaccaucgggaagugccccaaguacgucaagagcaccaagcugcggcucgccacgggccugcgcaacgugccguccauccagagccgggggcuguucggcgcgaucgccggguucaucgagggcggcuggaccgggaugguggacggcugguacggguaccaccaccagaacgagcagggcuccggguacgccgccgaccucaagagcacccagaacgccaucgacgagaucaccaacaaggugaacuccgucaucgagaagaugaacacgcaguucaccgcggugggcaaggaguucaaccaccuggagaagcgcaucgagaaccugaacaagaaggucgacgacggcuuccucgacaucuggaccuacaacgccgagcugcuggugcuccuggagaacgagcggacccuggacuaccacgacagcaacgugaagaaccucuacgagaagguccgcucccagcugaagaacaacgccaaggagaucgggaacggcugcuucgaguucuaccacaagugcgacaacacgugcauggagagcgugaagaacgggaccuacgacuaccccaaguacuccgaggaggccaagcugaaccgggaggagaucgacggcgugaagcucgagagcacccgcaucuaccagauccuggccaucuacuccaccgucgcgagcagccuggugcucguggucucccugggggccaucagcuucuggaugugcuccaacggcagccugcagugccggaucugcaucuga

SEQ ID NO: 66744 - RNA, 1701 nt, Artificial Sequence; identical to SEQ ID NO: 66693
  derived and/or modified CDS sequence (opt1) from hemagglutinin__InfluenzaA__ACR08439

SEQ ID NO: 66745 - RNA, 1701 nt, Artificial Sequence; identical to SEQ ID NO: 66693
  derived and/or modified CDS sequence (opt1) from hemagglutinin__InfluenzaA__ACR08449

SEQ ID NO: 66746 - RNA, 1701 nt, Artificial Sequence
  derived and/or modified CDS sequence (opt1) from hemagglutinin__InfluenzaA__ACR08459
augaaggccauccuggugguccuccuguacaccuucgccaccgcgaacgccgacacgcugugcaucggcuaccacgccaacaacagcaccgacaccguggacaccgugcucgagaagaacgucacggugacccacuccgugaaccugcuggaggacaagcacaacgggaagcucugcaagcugcgcggcgucgcgccccugcaccucgggaagugcaacaucgccggcuggauccuggggaacccggagugcgagagccuguccaccgccagcuccuggagcuacaucguggagaccuccagcuccgacaacggcacgugcuaccccggcgacuucaucgacuacgaggagcuccgggagcagcugagcuccgugagcuccuucgagcgcuucgagaucuuccccaagaccagcuccuggcccaaccacgacagcaacaagggggucaccgccgccugcccgcacgccggcgcgaaguccuucuacaagaaccugaucuggcucgugaagaaggggaacagcuaccccaagcuguccaagagcuacaucaacgacaagggcaaggaggugcugguccucugggggauccaccaccccagcaccuccgccgaccagcagagccuguaccagaacgccgacgccuacguguucgugggcuccagccgguacuccaagaaguucaagcccgagaucgccauccgcccgaagguccgggaccaggagggccgcaugaacuacuacuggacgcugguggagcccggggacaagaucaccuucgaggcgaccggcaaccucguggucccccgguacgccuucgccauggagcgcaacgccgggagcggcaucaucaucuccgacacccccgugcacgacugcgacacgaccugccagaccccgaagggcgccaucaacaccagccugcccuuccagaacauccaccccaucacgaucgggaagugccccaaguacgugaaguccaccaagcugcggcucgcgaccggccugcgcaacgucccgagcauccagucccgggggcuguucggcgccaucgccggguucaucgagggcggcuggaccgggaugguggacggcugguacggguaccaccaccagaacgagcagggcagcggguacgccgccgaccucaaguccacgcagaacgcgaucgacgagaucaccaacaaggugaacagcgucaucgagaagaugaacacccaguucaccgccgugggcaaggaguucaaccaccuggagaagcgcaucgagaaccugaacaagaaggucgacgacggcuuccucgacaucuggacguacaacgccgagcugcuggugcuccuggagaacgagcggacccuggacuaccacgacuccaacgugaagaaccucuacgagaagguccgcagccagcugaagaacaacgccaaggagaucgggaacggcugcuucgaguucuaccacaagugcgacaacacgugcauggaguccgugaagaacgggaccuacgacuaccccaaguacagcgaggaggccaagcugaaccgggaggagaucgacggcgugaagcucgaguccacccgcaucuaccagauccuggcgaucuacagcaccgucgccagcucccuggugcucguggucagccugggggccaucuccuucuggaugugcagcaacggcucccugcagugccggaucugcaucuga

SEQ ID NO: 66747 - RNA, 1701 nt, Artificial Sequence; identical to SEQ ID NO: 66680
  derived and/or modified CDS sequence (opt1) from hemagglutinin__InfluenzaA__ACR08528

SEQ ID NO: 66748 - RNA, 1701 nt, Artificial Sequence; identical to SEQ ID NO: 66680
  derived and/or modified CDS sequence (opt1) from hemagglutinin__InfluenzaA__ACR08530

SEQ ID NO: 66749 - RNA, 1701 nt, Artificial Sequence; identical to SEQ ID NO: 66746
  derived and/or modified CDS sequence (opt1) from hemagglutinin__InfluenzaA__ACR08531

SEQ ID NO: 66750 - RNA, 1701 nt, Artificial Sequence; identical to SEQ ID NO: 66693
  derived and/or modified CDS sequence (opt1) from hemagglutinin__InfluenzaA__ACR08533

SEQ ID NO: 66751 - RNA, 1701 nt, Artificial Sequence; identical to SEQ ID NO: 66746
  derived and/or modified CDS sequence (opt1) from hemagglutinin__InfluenzaA__ACR08535

SEQ ID NO: 66752 - RNA, 1701 nt, Artificial Sequence; identical to SEQ ID NO: 66693
  derived and/or modified CDS sequence (opt1) from hemagglutinin__InfluenzaA__ACR08536

SEQ ID NO: 66753 - RNA, 1701 nt, Artificial Sequence; identical to SEQ ID NO: 66746
  derived and/or modified CDS sequence (opt1) from hemagglutinin__InfluenzaA__ACR08537

SEQ ID NO: 66754 - RNA, 1701 nt, Artificial Sequence; identical to SEQ ID NO: 66746
  derived and/or modified CDS sequence (opt1) from hemagglutinin__InfluenzaA__ACR08538

SEQ ID NO: 66755 - RNA, 1701 nt, Artificial Sequence; identical to SEQ ID NO: 66693
  derived and/or modified CDS sequence (opt1) from hemagglutinin__InfluenzaA__ACR08539

SEQ ID NO: 66756 - RNA, 1701 nt, Artificial Sequence; identical to SEQ ID NO: 66693
  derived and/or modified CDS sequence (opt1) from hemagglutinin__InfluenzaA__ACR08540

SEQ ID NO: 66757 - RNA, 1701 nt, Artificial Sequence; identical to SEQ ID NO: 66680
  derived and/or modified CDS sequence (opt1) from hemagglutinin__InfluenzaA__ACR08542

SEQ ID NO: 66758 - RNA, 1701 nt, Artificial Sequence; identical to SEQ ID NO: 66680
  derived and/or modified CDS sequence (opt1) from hemagglutinin__InfluenzaA__ACR08543

SEQ ID NO: 66759 - RNA, 1701 nt, Artificial Sequence; identical to SEQ ID NO: 66719
  derived and/or modified CDS sequence (opt1) from hemagglutinin__InfluenzaA__ACR08544

SEQ ID NO: 66760 - RNA, 1701 nt, Artificial Sequence; identical to SEQ ID NO: 66746
  derived and/or modified CDS sequence (opt1) from hemagglutinin__InfluenzaA__ACR08545

SEQ ID NO: 66761 - RNA, 1701 nt, Artificial Sequence; identical to SEQ ID NO: 66680
  derived and/or modified CDS sequence (opt1) from hemagglutinin__InfluenzaA__ACR08546

SEQ ID NO: 66762 - RNA, 1701 nt, Artificial Sequence; identical to SEQ ID NO: 66693
  derived and/or modified CDS sequence (opt1) from hemagglutinin__InfluenzaA__ACR08547

SEQ ID NO: 66763 - RNA, 1701 nt, Artificial Sequence; identical to SEQ ID NO: 66746
  derived and/or modified CDS sequence (opt1) from hemagglutinin__InfluenzaA__ACR08548

SEQ ID NO: 66764 - RNA, 1701 nt, Artificial Sequence; identical to SEQ ID NO: 66693
  derived and/or modified CDS sequence (opt1) from hemagglutinin__InfluenzaA__ACR08549

SEQ ID NO: 66765 - RNA, 1701 nt, Artificial Sequence; identical to SEQ ID NO: 66693
  derived and/or modified CDS sequence (opt1) from hemagglutinin__InfluenzaA__ACR08550

SEQ ID NO: 66766 - RNA, 1701 nt, Artificial Sequence; identical to SEQ ID NO: 66693
  derived and/or modified CDS sequence (opt1) from hemagglutinin__InfluenzaA__ACR08551

SEQ ID NO: 66767 - RNA, 1701 nt, Artificial Sequence; identical to SEQ ID NO: 66680
  derived and/or modified CDS sequence (opt1) from hemagglutinin__InfluenzaA__ACR08552

SEQ ID NO: 66768 - RNA, 1701 nt, Artificial Sequence; identical to SEQ ID NO: 66719
  derived and/or modified CDS sequence (opt1) from hemagglutinin__InfluenzaA__ACR08553

SEQ ID NO: 66769 - RNA, 1701 nt, Artificial Sequence; identical to SEQ ID NO: 66719
  derived and/or modified CDS sequence (opt1) from hemagglutinin__InfluenzaA__ACR08554

SEQ ID NO: 66770 - RNA, 1701 nt, Artificial Sequence; identical to SEQ ID NO: 66680
  derived and/or modified CDS sequence (opt1) from hemagglutinin__InfluenzaA__ACR09365

SEQ ID NO: 66771 - RNA, 1701 nt, Artificial Sequence; identical to SEQ ID NO: 66680
  derived and/or modified CDS sequence (opt1) from hemagglutinin__InfluenzaA__ACR09366

SEQ ID NO: 66772 - RNA, 1701 nt, Artificial Sequence; identical to SEQ ID NO: 66680
  derived and/or modified CDS sequence (opt1) from hemagglutinin__InfluenzaA__ACR09367

SEQ ID NO: 66773 - RNA, 1701 nt, Artificial Sequence; identical to SEQ ID NO: 66680
  derived and/or modified CDS sequence (opt1) from hemagglutinin__InfluenzaA__ACR09368

SEQ ID NO: 66774 - RNA, 1701 nt, Artificial Sequence; identical to SEQ ID NO: 66680
  derived and/or modified CDS sequence (opt1) from hemagglutinin__InfluenzaA__ACR09369

SEQ ID NO: 66775 - RNA, 1701 nt, Artificial Sequence; identical to SEQ ID NO: 66680
  derived and/or modified CDS sequence (opt1) from hemagglutinin__InfluenzaA__ACR09370

SEQ ID NO: 66776 - RNA, 1701 nt, Artificial Sequence; identical to SEQ ID NO: 66680
  derived and/or modified CDS sequence (opt1) from hemagglutinin__InfluenzaA__ACR09371

SEQ ID NO: 66777 - RNA, 1701 nt, Artificial Sequence; identical to SEQ ID NO: 66680
  derived and/or modified CDS sequence (opt1) from hemagglutinin__InfluenzaA__ACR09373

SEQ ID NO: 66778 - RNA, 1701 nt, Artificial Sequence; identical to SEQ ID NO: 66680
  derived and/or modified CDS sequence (opt1) from hemagglutinin__InfluenzaA__ACR09374

SEQ ID NO: 66779 - RNA, 1701 nt, Artificial Sequence
  derived and/or modified CDS sequence (opt1) from hemagglutinin__InfluenzaA__ACR09375
augaaggccauccuggugguccuccuguacaccuucgccaccgcgaacgccgacacgcugugcaucggcuaccacgccaacaacagcaccgacaccguggacaccgugcucgagaagaacgucacggugacccacuccgugaaccugcuggaggacaagcacaacgggaagcucugcaagcugcgcggcgucgcgccccugcaccucgggaagugcaacaucgccggcuggauccuggggaacccggagugcgagagccuguccaccgccagcuccuggagcuacaucguggagaccuccagcuccgacaacggcacgugcuaccccggcgacuucaucgacuacgaggagcuccgggagcagcugagcuccgugagcuccuucgagcgcuucgagaucuuccccaagaccagcuccuggcccaaccacgacagcaacaagggggucaccgccgccugcccgcacgccggcgcgaaguccuucuacaagaaccugaucuggcucgugaagaaggggaacagcuaccccaagcuguccaagagcuacaucaacgacaagggcaaggaggugcugguccucugggggauccaccaccccagcaccuccgccgaccagcagagccuguaccagaacgccgacgccuacguguucgugggcuccagccgguacuccaagaaguucaagcccgagaucgccauccgcccgaagguccgggaccaggagggccgcaugaacuacuacuggacgcugguggagcccggggacaagaucaccuucgaggcgaccggcaaccucguggucccccgguacgccuucgccauggagaagaacgccgggagcggcaucaucaucuccgacacccccgugcacgacugcaacacgaccugccagaccccgaagggcgccaucaacaccagccugcccuuccagaacauccaccccaucacgaucgggaagugccccaaguacgugaaguccaccaagcugcgccucgcgaccggccugcggaacgucccgagcauccagucccgcgggcuguucggcgccaucgccggguucaucgagggcggcuggaccgggaugguggacggcugguacggguaccaccaccagaacgagcagggcagcggguacgccgccgaccucaaguccacgcagaacgcgaucgacgagaucaccaacaaggugaacagcgucaucgagaagaugaacacccaguucaccgccgugggcaaggaguucaaccaccuggagaagcggaucgagaaccugaacaagaaggucgacgacggcuuccucgacaucuggacguacaacgccgagcugcuggugcuccuggagaacgagcgcacccuggacuaccacgacuccaacgugaagaaccucuacgagaagguccggagccagcugaagaacaacgccaaggagaucgggaacggcugcuucgaguucuaccacaagugcgacaacacgugcauggaguccgugaagaacgggaccuacgacuaccccaaguacagcgaggaggccaagcugaaccgcgaggagaucgacggcgugaagcucgaguccacccggaucuaccagauccuggcgaucuacagcaccgucgccagcucccuggugcucguggucagccugggggccaucuccuucuggaugugcagcaacggcucccugcagugccgcaucugcaucuga

SEQ ID NO: 66780 - RNA, 1701 nt, Artificial Sequence; identical to SEQ ID NO: 66680
  derived and/or modified CDS sequence (opt1) from hemagglutinin__InfluenzaA__ACR09376

SEQ ID NO: 66781 - RNA, 1701 nt, Artificial Sequence; identical to SEQ ID NO: 66680
  derived and/or modified CDS sequence (opt1) from hemagglutinin__InfluenzaA__ACR09377

SEQ ID NO: 66782 - RNA, 1701 nt, Artificial Sequence; identical to SEQ ID NO: 66680
  derived and/or modified CDS sequence (opt1) from hemagglutinin__InfluenzaA__ACR09395

SEQ ID NO: 66783 - RNA, 1701 nt, Artificial Sequence; identical to SEQ ID NO: 66680
  derived and/or modified CDS sequence (opt1) from hemagglutinin__InfluenzaA__ACR09396

SEQ ID NO: 66784 - RNA, 1701 nt, Artificial Sequence
  derived and/or modified CDS sequence (opt1) from hemagglutinin__InfluenzaA__ACR10186
augaaggccauccuggugguccuccuguacaccuucgccaccgcgaacgccgacacgcugugcaucggcuaccacgccaacaacagcaccgacaccguggacaccgugcucgagaagaacgucacggugacccacuccgugaaccugcuggaggacaagcacaacgggaagcucugcaagcugcgcggcgucgcgccccugcaccucgggaagugcaacaucgccggcuggauccuggggaacccggagugcgagagccuguccaccgccagcuccuggagcuacaucguggagaccuccagcuccgacaacggcacgugcuaccccggcgacuucaucgacuacgaggagcuccgggagcagcugagcuccgugagcuccuucgagcgcuucgagaucuuccccaagaccagcuccuggcccaaccacgacagcaacaagggggucaccgccgccugcccgcacgccggcgcgaaguccuucuacaagaaccugaucuggcucgugaagaaggggaacagcuaccccaagcuguccaagagcuacaucaacgacaagggcaaggaggugcugguccucugggggauccaccaccccagcaccuccgccgaccagcagagccuguaccagaacgccgacgccuacguguucgugggcacgucccgguacagcaagaaguucaagcccgagaucgccauccgcccgaagguccgggaccaggagggccgcaugaacuacuacuggacccugguggagcccggggacaagaucaccuucgaggcgaccggcaaccucguggucccccgguacgccuucgccauggagcgcaacgccggguccggcaucaucaucagcgacacgcccgugcacgacugcaacacgaccugccagaccccgaagggcgccaucaacaccucccugcccuuccagaacauccaccccaucaccaucgggaagugccccaaguacgucaagagcaccaagcugcggcucgcgaccggccugcgcaacgugccguccauccagagccgggggcuguucggcgccaucgccggguucaucgagggcggcuggacggggaugguggacggcugguacggguaccaccaccagaacgagcagggcuccggguacgccgccgaccucaagagcacccagaacgcgaucgacgagaucaccaacaaggugaacuccgucaucgagaagaugaacacccaguucacggccgugggcaaggaguucaaccaccuggagaagcgcaucgagaaccugaacaagaagaucgacgacggcuuccucgacaucuggaccuacaacgccgagcugcugguccuccuggagaacgagcggacccuggacuaccacgacagcaacgugaagaaccucuacgagaaggugcgcucccagcugaagaacaacgccaaggagaucgggaacggcugcuucgaguucuaccacaagugcgacaacacgugcauggagagcgucaagaacgggaccuacgacuaccccaaguacuccgaggaggccaagcugaaccgggaggagaucgacggcgugaagcucgagagcacccgcaucuaccagauccuggcgaucuacuccaccguggccagcagccugguccucguggugucccugggggccaucagcuucuggaugugcuccaacggcagccugcagugccggaucugcaucuga

SEQ ID NO: 66785 - RNA, 1701 nt, Artificial Sequence; identical to SEQ ID NO: 66784
  derived and/or modified CDS sequence (opt1) from hemagglutinin__InfluenzaA__ACR10222

SEQ ID NO: 66786 - RNA, 1701 nt, Artificial Sequence
  derived and/or modified CDS sequence (opt1) from hemagglutinin__InfluenzaA__ACR10223
augaaggccauccuggugguccuccuguacaccuucaccacggccaacgcggacacccugugcaucggcuaccacgccaacaacagcaccgacaccguggacacggugcucgagaagaacgucaccgugacccacuccgugaaccugcuggaggacaagcacaacgggaagcucugcaagcugcgcggcgucgcgccccugcaccucgggaagugcaacaucgccggcuggauccuggggaacccggagugcgagagccuguccaccgccagcuccuggagcuacaucguggagacguccagcuccgacaacgggaccugcuaccccggcgacuucaucgacuacgaggagcuccgggagcagcugagcuccgugagcuccuucgagcgcuucgagaucuuccccaagaccagcuccuggcccaaccacgacagcaacaagggcgucaccgccgccugcccgcacgccggcgccaaguccuucuacaagaaccugaucuggcucgugaagaaggggaacagcuaccccaagcuguccaagagcuacaucaacgacaagggcaaggaggugcugguccucugggggauccaccaccccagcacguccgcggaccagcagagccuguaccagaacgccgacgccuacguguucgugggcuccagccgguacuccaagaaguucaagcccgagaucgccauccgcccgaagguccgggaccaggagggccgcaugaacuacuacuggacccugguggagcccggggacaagaucaccuucgaggccaccggcaaccucguggucccccgguacgcguucgccauggagcgcaacgccgggagcggcaucaucaucuccgacacgcccgugcacgacugcaacacgaccugccagaccccgaagggcgccaucaacaccagccugcccuuccagaacauccaccccaucaccaucgggaagugccccaaguacgugaaguccaccaagcugcggcucgccaccggccugcgcaacgucccgagcauccagucccgggggcuguucggcgcgaucgccggguucaucgagggcggcuggacggggaugguggacggcugguacggguaccaccaccagaacgagcagggcagcggguacgccgccgaccucaaguccacccagaacgccaucgacgagaucaccaacaaggugaacagcgucaucgagaagaugaacacccaguucacggcggugggcaaggaguucaaccaccuggagaagcgcaucgagaaccugaacaagaaggucgacgacggcuuccucgacaucuggaccuacaacgccgagcugcuggugcuccuggagaacgagcggacccuggacuaccacgacuccaacgugaagaaccucuacgagaagguccgcagccagcugaagaacaacgccaaggagaucgggaacggcugcuucgaguucuaccacaagugcgacaacacgugcauggaguccgugaagaacgggaccuacgacuaccccaaguacagcgaggaggccaagcugaaccgggaggagaucgacggcgugaagcucgaguccacccgcaucuaccagauccuggccaucuacagcaccgucgcgagcucccuggugcucguggucagccugggggccaucuccuucuggaugugcagcaacggcucccugcagugccggaucugcaucuga

SEQ ID NO: 66787 - RNA, 1701 nt, Artificial Sequence
  derived and/or modified CDS sequence (opt1) from hemagglutinin__InfluenzaA__ACR15183
augaagaccaucaucgcccugagcuacauccucugccugguguucgcccagaagcugcccggcaacgacaacuccaccgcgacgcucugccuggggcaccacgccgucccgaacggcaccaucgugaagaccaucaccaacgaccagaucgaggugacgaacgccaccgagcugguccagagcuccagcaccgggggcaucugcgacagcccccaccagauccucgacggggagaacugcacccugaucgacgcccugcucggcgacccccagugcgacggcuuccagaacaagaagugggaccuguucguggagcgcuccaaggccuacuccaacugcuaccccuacgacgugccggacuacgcgagccugcggucccucgucgccagcuccgggacgcuggaguucaacaacgagagcuucaacuggaccggcgugacccagaacgggaccuccagcgccugcaagcgcggcuccgacaacagcuucuucucccggcugaacuggcucacgcaccugaaguucaaguaccccgcccugaacgugaccaugcccaacaacgagaaguucgacaagcucuacaucuggggcguccaccaccccgggaccgacaacgaccagaucuucccguacgcgcaggccagcggccgcaucaccguguccacgaagcggagccagcagaccgugauccccaacaucgggagccgcccccggguccgcaacauccccucccggaucagcaucuacuggaccaucgugaagccgggcgacauccugcugaucaacuccaccgggaaccucaucgcgccccgcggcuacuucaagauccggagcggcaaguccagcaucaugcgcuccgacgcccccaucgggaagugcaacagcgagugcaucacgcccaacggcuccaucccgaacgacaagcccuuccagaacgugaaccggaucaccuacggggccugcccccgcuacgucaagcagaacacccugaagcuggccaccggcaugcggaacgugcccgagaagcagacgcgcgggaucuucggcgccaucgccggcuucaucgagaacgggugggagggcaugguggacgggugguacggcuuccggcaccagaacagcgaggggaucggccaggccgccgaccucaaguccacccaggcggccaucaaccagaucaacggcaagcugaaccgccugaucgggaagaccaacgagaaguuccaccagaucgagaaggaguucagcgaggucgagggccggauccaggaccucgagaaguacguggaggacaccaagaucgaccugugguccuacaacgccgagcugcucguggcccuggagaaccagcacacgaucgaccugaccgacagcgagaugaacaagcuguucgagcgcaccaagaagcagcuccgggagaacgccgaggacauggggaacggcugcuucaagaucuaccacaagugcgacaacgcgugcaucggguccauccgcaacggcaccuacgaccacgacgucuaccgcgacgaggcccugaacaaccgguuccagaucaagggcguggagcucaagagcggguacaaggacuggauccuguggaucuccuucgccaucagcugcuuccugcucugcguggcccugcugggcuucaucaugugggccugccagaaggggaacauccgcugcaacaucugcaucuga

SEQ ID NO: 66788 - RNA, 1698 nt, Artificial Sequence
  derived and/or modified CDS sequence (opt1) from hemagglutinin__InfluenzaA__ACR15194
augaaggugaagcugcucguccugcugugcaccuucaccgccacguacgccgacaccaucugcaucggcuaccacgcgaacaacagcaccgacaccguggacacggugcucgagaagaacgucaccgugacccacuccgugaaccugcuggagaacagccacaacgggaagcucugccugcugaagggcaucgcgccccuccagcuggggaacugcuccgucgccggcuggauccuggggaacccggagugcgagcuccugaucagcaaggaguccuggagcuacaucguggagaagcccaaccccgagaacgggaccugcuaccccggccacuucgccgacuacgaggagcugcgcgagcagcucuccagcguguccagcuucgagcgguucgagaucuucccgaaggaguccagcuggcccaaccacacggucaccgggguguccgccagcugcucccacaacggcgagagcuccuucuaccgcaaccugcuguggcucaccgggaagaacggccuguaccccaaccugagcaaguccuacgccaacaacaaggagaaggaggugcucguccuguggggcgugcaccacccgcccaacaucggcaaccagaaggcccuguaccacaccgagaacgccuacgugagcgucgugagcucccacuacagccggaaguucacgcccgagaucgccaagcgccccaaggugcgggaccaggagggccgcaucaacuacuacuggacccuccuggagcccggggacaccaucaucuucgaggcgaacggcaaccugaucgccccgcgguacgccuucgcccucucccgcgggcugggcagcggcaucaucaacuccaacgcccccauggacaagugcgacgcgaagugccagacgccccagggggccaucaacagcucccugcccuuccagaacguccacccggugaccaucggcgagugccccaaguacgugcggagcgccaagcuccgcauggucaccgggcugcggaacauccccuccauccagagccgcggccuguucggggccaucgccggcuucaucgagggcggguggaccggcaugguggacgggugguacggcuaccaccaccagaacgagcagggguccggcuacgcggccgaccagaaguccacccagaacgccaucaacggcaucacgaacaaggugaacagcgucaucgagaagaugaacacccaguucaccgccguggggaaggaguucaacaagcucgagcggcgcauggagaaccugaacaagaaggucgacgacggcuucaucgacaucuggaccuacaacgccgagcugcucgugcugcuggagaacgagcggacgcucgacuuccacgacagcaacgugaagaaccuguacgagaaggucaagucccagcugaagaacaacgcgaaggagaucgggaaccgcugcuucgaguucuaccacaagugcaacgacgagugcauggagagcgugaagaacggcaccuacgacuaccccaaguacuccgaggagagcaagcucaaccgggagaagaucgacggggugaagcuggaguccaugggcgucuaccagauccuggccaucuacagcaccguggccagcucccucgugcugcuggucagccucggcgccaucuccuucuggaugugcagcaacgggucccugcagugccgcaucugcaucuga

SEQ ID NO: 66789 - RNA, 1698 nt, Artificial Sequence; identical to SEQ ID NO: 64894
  derived and/or modified CDS sequence (opt1) from hemagglutinin__InfluenzaA__ACR15216

SEQ ID NO: 66790 - RNA, 1701 nt, Artificial Sequence
  derived and/or modified CDS sequence (opt1) from hemagglutinin__InfluenzaA__ACR15227
augaagaccaucaucgcccugagcuacauccucugccugguguucgcccagaagcugcccggcaacgacaacuccaccgcgacgcucugccuggggcaccacgccgucccgaacggcaccaucgugaagaccaucaccaacgaccagaucgaggugacgaacgccaccgagcugguccagagcuccagcaccgggggcaucugcgacagcccccaccagauccucgacggggagaacugcacccugaucgacgcccugcucggcgacccccagugcgacggcuuccagaacaagaagugggaccuguucguggagcgcagcaaggccuacuccaacugcuaccccuacgacgugccggacuacgcgagccugcggucccucgucgccagcuccgggacgcuggaguucaacaacgagagcuucaacuggaccggcgugacccagaacgggaccuccagcgccugccagcgccgguccaacaagagcuucuucucccgccugaacuggcucacgcaccugaaguucaaguaccccgcccugaacgugaccaugcccaacaacgagaaguucgacaagcucuacaucuggggcguccaccaccccgggaccgacaacgaccagaucagccuguacgcgcagaccuccggccggaucacggugagcaccaagcgcagccagcagaccgugaucccgaacaucggcucccggccccgcguccgggacgugcccagccgcaucuccaucuacuggaccaucgugaagcccggggacauccugcucaucaacagcacgggcaaccugaucgccccgcggggguacuucaagauccgcuccggcaagagcuccaucaugcggagcgacgcccccaucggcaagugcaacuccgagugcaucacccccaacgggagcauccccaacgacaagccguuccagaacgucaaccgcaucaccuacggcgccugcccccgguacgugaagcagaacacccugaagcucgccacggggaugcgcaacgugcccgagcggcagacccgcggcaucuucggggcgaucgccggcuucaucgagaacggcugggaggggaugauggacggcugguacggguuccggcaccagaacuccgagggcaccgggcaggccgccgaccugaaguccacccaggccgcgaucaaccagaucaacggcaagcugaaccgccucaucggcaagacgaacgagaaguuccaccagaucgagaaggaguucuccgaggucgaggggcggauccaggaccuggagaaguacguggaggacaccaagaucgaccuguggagcuacaacgccgagcuccugguggcccuggagaaccagcacaccaucgaccucaccgacuccgagaugaacaagcuguucgagcgcacgaagaagcagcugcgcgagaacgccgaggacaugggcaacgggugcuucaagaucuaccacaagugcgacaacgccugcaucggcagcauccggaacgggaccuacgaccacgacgucuaccgcgacgaggcgcucaacaaccgguuccagaucaagggcguggagcugaaguccggcuacaaggacuggauccuguggaucagcuucgccaucuccugcuuccuccugugcguggcccugcucggguucaucaugugggccugccagaagggcaacauccgcugcaacaucugcaucuga

SEQ ID NO: 66791 - RNA, 1698 nt, Artificial Sequence
  derived and/or modified CDS sequence (opt1) from hemagglutinin__InfluenzaA__ACR15238
augaaggugaagcugcucguccugcugugcaccuucaccgccacguacgccgacaccaucugcaucggcuaccacgcgaacaacagcaccgacaccguggacacggugcucgagaagaacgucaccgugacccacuccgugaaccugcuggagaacagccacaacgggaagcucugccugcugaagggcaucgcgccccuccagcuggggaacugcuccgucgccggcuggauccuggggaacccggagugcgagcuccugaucagcaaggaguccuggagcuacaucguggagaagcccaaccccgagaacgggaccugcuaccccggccacuucgccgacuacgaggagcugcgcgagcagcucuccagcguguccagcuucgagcgguucgagaucuucccgaaggaguccagcuggcccaaccacacggucaccgggguguccgccagcugcucccacaacggcgagagcuccuucuaccgcaaccugcuguggcucaccgggaagaacggccuguaccccaaccugagcaaguccuacgccaacaacaaggagaaggaggugcucguccuguggggcgugcaccacccgcccaacaucggcgugcagaaggcccuguaccacaccgagaacgccuacgucagcguggugagcucccacuacagccggaaguucacgcccgagaucgccaagcgccccaagguccgggaccaggagggccgcaucaacuacuacuggacccuccuggagcccggggacaccaucaucuucgaggcgaacggcaaccugaucgccccgcgguacgccuucgcccucucccgcggguucggcagcggcaucaucaacuccaacgcccccauggacaagugcgacgcgaagugccagacgccccagggggccaucaacagcucccugcccuuccagaacgugcacccggugaccaucggcgagugccccaaguacguccggagcgccaagcugcgcauggugaccgggcuccggaacauccccuccauccagagccgcggccuguucggggccaucgccggcuucaucgagggcggguggaccggcaugguggacgggugguacggcuaccagcaccagaacgagcagggguccggcuacgcggccgaccagaaguccacccagaacgccaucaacggcaucacgaacaaggucaacagcgugaucgagaagaugaacacccaguucaccgccgucgggaaggaguucaacaagcuggagcggcgcauggagaaccucaacaagaagguggacgacggcuucaucgacaucuggaccuacaacgccgagcugcuggugcuccuggagaacgagcggacgcuggacuuccacgacagcaacgucaagaaccucuacgagaaggugaagucccagcugaagaacaacgcgaaggagaucgggaacggcugcuucgaguucuaccacaagugcaacgacgagugcauggagagcgugaagaacgggaccuacgacuaccccaaguacuccgaggagagcaagcugaaccgcgagaagaucgacggcgucaagcucgaguccaugggcguguaccagauccuggccaucuacagcaccguggccagcucccugguccuccuggugagccugggggccaucuccuucuggaugugcagcaacggcucccuccagugccggaucugcaucuga

SEQ ID NO: 66792 - RNA, 1701 nt, Artificial Sequence
  derived and/or modified CDS sequence (opt1) from hemagglutinin__InfluenzaA__ACR15249
augaagaccaucaucgcccugagcuacauccucugccugguguucgcccagaagcugcccggcaacgacaacuccaccgcgacgcucugccuggggcaccacgccgucccgaacggcaccaucgugaagaccaucaccaacgaccagaucgaggugacgaacgccaccgagcugguccagagcuccagcaccggggagaucugcgacagcccccaccagauccucgacggcgagaacugcacccugaucgacgcccugcucggggacccccagugcgacggcuuccagaacaagaagugggaccuguucguggagcgcagcaaggccuacuccaacugcuaccccuacgacgugccggacuacgcgagccugcggucccucgucgccagcuccggcacgcuggaguucaacaacgagagcuucaacuggaccggggugacccagaacggcaccuccagcgccugcauccgccgguccaacaacagcuucuucucccgccugaacuggcucacgcacagcaaguucaaguaccccgcccugaacgugaccaugcccaacaacgagaaguucgacaagcuguacaucuggggcguccaccaccccgggaccgacaacgaccagaucuuccucuacgcgcaggccuccgggcggaucaccgugagcacgaagcgcagccagcagaccgugaucccgaacaucggcucccggccccgcguccggaacauccccagccgcaucuccaucuacuggaccaucgugaagcccggcgacauccugcugaucaacagcaccgggaaccucaucgccccgcggggcuacuucaagauccgcuccgggaaguccuccaucaugcggagcgacgcccccaucggcaagugcaacuccgagugcaucacgcccaacggcagcauccccaacgacaagccguuccagaacgugaaccgcaucaccuacggggccugcccccgguacgucaagcagaacacccugaagcuggcgaccggcaugcgcaacgugcccgagaagcagacgcgggggaucuucggcgccaucgccggguucaucgagaacggcugggagggcaugguggacgggugguacggcuuccgccaccagaacuccgaggggaucggccaggccgccgaccucaagagcacccaggcggccaucgaccagaucaacgggaagcugaaccggcugaucggcaagaccaacgagaaguuccaccagaucgagaaggaguucuccgaggucgagggccgcauccaggaccucgagaaguacguggaggacaccaagaucgaccuguggagcuacaacgccgagcugcucguggcccuggagaaccagcacacgaucgaccugaccgacuccgagaugaacaagcuguucgagaagaccaagaagcagcuccgggagaacgccgaggacauggggaacggcugcuucaagaucuaccacaagugcgacaacgcgugcaucgggagcauccgcaacggcaccuacgaccacgacgucuaccgcgacgaggcccugaacaaccgguuccagaucaaggggguggagcucaaguccggcuacaaggacuggauccuguggaucagcuucgccaucuccugcuuccugcucugcguggcccugcugggcuucaucaugugggccugccagaaggggaacauccgcugcaacaucugcaucuga

SEQ ID NO: 66793 - RNA, 1701 nt, Artificial Sequence
  derived and/or modified CDS sequence (opt1) from hemagglutinin__InfluenzaA__ACR15282
augaagaccaucaucgcccugagcuacauccucugccugguguucgcccagaagcugcccggcaacgacaacuccaccgcgacgcucugccuggggcaccacgccgucccgaacggcaccaucgugaagaccaucaugaacgaccagaucgaggugaccaacgccacggagcugguccagagcuccagcaccggggagaucugcgacagcccccaccagauccucgacggcgagaacugcacccugaucgacgcccugcucggggacccccagugcgacggcuuccagaacaagaagugggaccuguucguggagcgcagcaaggccuacuccaacugcuaccccuacgacgugccggacuacgcgagccugcggucccucgucgccagcuccggcacccuggaguucaacaacgagagcuucaacuggacgggggugacccagaacggcaccuccagcgccugcauccgccgguccaacaacagcuucuucucccgccugaacuggcucacccacagcaaguucaaguaccccgcccugaacgugacgaugcccaacaacgagaaguucgacaagcuguacaucuggggcguccaccaccccgggaccgacaacgaccagaucuuccucuacgcgcaggccuccgggcggaucaccgugagcaccaagcgcagccagcagacggugaucccgaacaucggcucccggccccgcguccggaacauccccagccgcaucuccaucuacuggaccaucgugaagcccggcgacauccugcugaucaacagcaccgggaaccucaucgccccgcggggcuacuucaagauccgcuccgggaaguccuccaucaugcggagcgacgcccccaucggcaagugcaacuccgagugcaucacccccaacggcagcauccccaacgacaagccguuccagaacgugaaccgcaucacguacggggccugcccccgguacgucaagcagaacacccugaagcuggcgaccggcaugcgcaacgugcccgagaagcagacccgggggaucuucggcgccaucgccggguucaucgagaacggcugggagggcaugguggacgggugguacggcuuccgccaccagaacuccgaggggaucggccaggccgccgaccucaagagcacgcaggcggccaucgaccagaucaacgggaagcugaaccggcugaucggcaagaccaacgagaaguuccaccagaucgagaaggaguucuccgaggucgagggccgcauccaggaccucgagaaguacguggaggacaccaagaucgaccuguggagcuacaacgccgagcugcucguggcccuggagaaccagcacaccaucgaccugacggacuccgagaugaacaagcuguucgagaagaccaagaagcagcuccgggagaacgccgaggacauggggaacggcugcuucaagaucuaccacaagugcgacaacgcgugcaucgggagcauccgcaacggcaccuacgaccacgacgucuaccgcgacgaggcccugaacaaccgguuccagaucaaggggguggagcucaaguccggcuacaaggacuggauccuguggaucagcuucgccaucuccugcuuccugcucugcguggcccugcugggcuucaucaugugggccugccagaaggggaacauccgcugcaacaucugcaucuga

SEQ ID NO: 66794 - RNA, 1701 nt, Artificial Sequence
  derived and/or modified CDS sequence (opt1) from hemagglutinin__InfluenzaA__ACR15293
augaagaccaucaucgcccugagcuacauccucugccugguguucgcccagaagcugcccggcaacgacaacuccaccgcgacgcucugccuggggcaccacgccgucccgaacggcaccaucgugaagaccaucaccaacgaccagaucgaggugacgaacgccaccgagcugguccagagcuccagcaccgggggcaucugcgacagcccccaccagauccucgacggggagaacugcacccugaucgacgcccugcucggcgacccccagugcgacggcuuccagaacaagaagugggaccuguucguggagcgcagcaaggccuacuccaacugcuaccccuacgacgugccggacuacgcgagccugcggucccucaucgccagcuccgggacgcuggaguucaacaacgagaacuucaacuggaccggcgucacccagaacgggaccagcuccgccugcaagcgcggcagcgacaacuccuucuucagccggcugaacuggcucacgcaccugaaguucaaguaccccgcccugaaggugaccaugcccaacaacgagaaguucgacaagcucuacaucuggggcgugcaccaccccgggaccgacaacgaccagaucuuccuguacgcgcaggccuccggccgcaucaccgucagcacgaagcggucccagcagaccgugaucccgaacaucgggagccgcccccgggugcgcaacauccccagccggaucuccaucuacuggaccaucgucaagcccggcgacauccugcucaucaacagcaccgggaaccugaucgccccgcgcggcuacuucaagauccgguccggcaagagcuccaucaugcgcagcgacgcccccaucgggaagugcaacuccgagugcaucacgcccaacggcagcauccccaacgacaagccguuccagaacgugaaccggaucaccuacggggccugcccccgcuacgugaagcagaacacccugaagcucgcgaccggcaugcggaacguccccgagaagcagacgcgcgggaucuucggcgccaucgccggcuucaucgagaacgggugggagggcaugguggacgggugguacggcuuccggcaccagaacuccgaggggaucggccaggccgccgaccugaaguccacccaggcggccaucaaccagaucaacggcaagcugaaccgccucaucgggaagaccaacgagaaguuccaccagaucgagaaggaguucuccgagguggagggccggauccaggaccuggagaaguacgucgaggacaccaagaucgaccuguggagcuacaacgccgagcuccugguggcccuggagaaccagcacacgaucgaccucaccgacuccgagaugaacaagcuguucgagcgcaccaagaagcagcugcgggagaacgccgaggacauggggaacggcugcuucaagaucuaccacaagugcgacaacgcgugcaucgggagcauccgcaacggcaccuacgaccacgacguguaccgcgacgaggcccucaacaaccgguuccagaucaagggcgucgagcugaaguccggguacaaggacuggauccuguggaucagcuucgccaucuccugcuuccuccugugcguggcccugcucggcuucaucaugugggccugccagaaggggaacauccgcugcaacaucugcaucuga

SEQ ID NO: 66795 - RNA, 1698 nt, Artificial Sequence
  derived and/or modified CDS sequence (opt1) from hemagglutinin__InfluenzaA__ACR15304
augaaggccaagcugcucgugcugcugugcaccuucaccgccacguacgcggacaccaucugcaucggcuaccacgccaacaacagcaccgacaccgucgacacggugcucgagaagaacgugaccgucacccacuccgugaaccugcuggaggacagccacaacgggaagcucugccugcugaagggcaucgcgccccuccagcuggggaacugcuccguggccggcuggauccuggggaacccggagugcgagcuccugaucagcaaggaguccuggagcuacaucgucgagacccccaaccccgagaacggcacgugcuaccccggcuacuucgccgacuacgaggagcugcgcgagcagcucuccagcguguccagcuucgagcgguucgagaucuucccgaaggaguccagcuggcccaaccacaccgugaccggggucuccgccagcugcucccacaacggcaagagcuccuucuaccgcaaccugcuguggcucaccgggaagaacggccuguaccccaaccugagcaaguccuacgccaacaacaaggagaaggaggugcucgugcuguggggcguccaccacccgcccaacacggggaaccagcgggcccuguaccacaccgagaacgccuacgugagcguggucagcucccacuacagccgccgguucacccccgagaucgcgaagcgccccaaggugcgggaccaggagggccgcaucaacuacuacuggacccuccuggagcccggggacacgaucaucuucgaggccaacggcaaccugaucgccccgugguacgccuucgcccucucccggggguucggcagcggcaucaucaccuccaacgcgcccauggacgagugcgacgccaagugccagacgccccagggggccaucaacagcucccugcccuuccagaacgugcacccggucaccaucggcgagugccccaaguacgugcgcagcgccaagcugcggauggugaccgggcuccgcaacauccccuccauccagagccggggccuguucggggccaucgcgggcuucaucgagggcggguggaccggcauggucgacgggugguacggcuaccaccaccagaacgagcagggguccggcuacgccgccgaccagaaguccacccagaacgccaucaacggcaucaccaacaaggugaacagcgugaucgagaagaugaacacgcaguucaccgccgucgggaaggaguucaaccgccuggagcggcgcauggagaaccucaacaagaagguggacgacggcuuccuggacaucuggaccuacaacgcggagcugcucguccugcuggagaacgagcggacccucgacuuccacgacagcaacgugaagaaccuguacgagaaggugaagucccagcugaagaacaacgccaaggagaucgggaacggcugcuucgaguucuaccacaagugcaacaacgagugcauggagagcgucaagaacgggacguacgacuaccccaaguacuccgaggagagcaagcucaaccgcgagaagaucgacggcgugaagcuggaguccaugggcguguaccagauccuggccaucuacagcaccgucgccagcucccucgugcugcuggugagccucggggccaucuccuucuggaugugcagcaacggcucccugcagugccggaucugcaucuga

SEQ ID NO: 66796 - RNA, 1698 nt, Artificial Sequence
  derived and/or modified CDS sequence (opt1) from hemagglutinin__InfluenzaA__ACR15315
augaaggccaagcugcucgugcugcugugcaccuucaccgccacguacgcggacaccaucugcaucggcuaccacgccaacaacagcaccgacaccgucgacacggugcucgagaagaacgugaccgucacccacuccgugaaccugcuggaggacagccacaacgggaagcucugccugcugaagggcaucgcgccccuccagcuggggaacugcuccguggccggcuggauccuggggaacccggagugcgagcuccugaucagcaaggaguccuggagcuacaucgucgagacccccaaccccgagaacggcacgugcuaccccggcuacuucgccgacuacgaggagcugcgcgagcagcucuccagcguguccagcuucgagcgguucgagaucuucccgaagggguccagcuggcccaaccacaccgugaccggcgucuccgccagcugcucccacaacggcaagagcuccuucuaccgcaaccugcuguggcucaccgggaagaacgggcuguaccccaaccugagcauguccuacgugaacaacaaggagaaggaggugcucguccuguggggcgugcaccacccgcccaacauccgggaccagcgcgcccuguaccacacggagaacgccuacgugagcgucgugagcucccacuacagccggcgcuucacccccgagaucgccaagcggcccaaggugcgcgaccaggagggccggaucaacuacuacuggacccuccuggagcccggggacaccaucaucuucgaggcgaacggcaaccugaucgccccgugguacgccuucgcccucucccgcggguucggcagcggcaucaucacguccaacgcccccaugggggagugcgacgcgaagugccagacgccccagggcgccaucaacagcucccugcccuuccagaacguccacccggugaccaucggggagugccccaaguacgugcggagcgccaagcugcgcauggucaccggccuccggaacauccccuccauccagagccgcgggcuguucggcgccaucgccggcuucaucgagggcggguggaccgggaugguggacggcugguacggguaccaccaccagaacgagcagggcuccggcuacgcggccgaccagaaguccacccagaacgccaucaacgggaucaccaacaaggugaacagcgucaucgagaagaugaacacccaguucacggccgugggcaaggaguucaacaagcuggagcggcgcauggagaaccucaacaagaaggucgacgacggguuccuggacaucuggaccuacaacgccgagcugcucgugcugcuggagaacgagcggacccucgacuuccacgacagcaacgugaagaaccuguacgagaaggucaagucccagcugaagaacaacgcgaaggagaucggcaacgggugcuucgaguucuaccacaagugcaacaacgagugcauggagagcgugaagaacggcaccuacgacuaccccaaguacuccgaggagagcaagcucaaccgcgagaagaucgacggcgugaagcuggaguccaugggggucuaccagauccuggccaucuacagcacgguggccagcucccucgugcugcuggucagccucggcgccaucuccuucuggaugugcagcaacgggucccugcagugccggaucugcaucuga

SEQ ID NO: 66797 - RNA, 1698 nt, Artificial Sequence
  derived and/or modified CDS sequence (opt1) from hemagglutinin__InfluenzaA__ACR15326
augaaggccaagcugcucgugcugcugugcaccuucaccgccacguacgcggacaccaucugcaucggcuaccacgccaacaacagcaccgacaccgucgacacggugcucgagaagaacgugaccgucacccacuccgugaaccugcuggaggacagccacaacgggaagcucugccugcugaagggcaucgcgccccuccagcuggggaacugcuccguggccggcuggauccuggggaacccggagugcgagcuccugaucagcaaggaguccuggagcuacaucgucgagacccccaaccccgagaacggcacgugcuaccccggcuacuucgccgacuacgaggagcugcgcgagcagcucuccagcguguccagcuucgagcgguucgagaucuucccgaagggguccagcuggcccaaccacaccgugaccggcgucuccgccagcugcucccacaacggcaagagcuccuucuaccgcaaccugcuguggcucaccgggaagaacgggcuguaccccaaccugagcauguccuacgugaacaacaaggagaaggaggugcucguccuguggggcgugcaccacccgcccaacaucggcaaccagcgggcccuguaccacacggagaacgccuacgugagcgucgugagcucccacuacagccgccgguucacccccgagaucgccaagcgccccaaggugcgggaccaggaggggcgcaucaacuacuacuggacccuccuggagcccggcgacaccaucaucuucgaggcgaacgggaaccugaucgccccgugguacgccuucgcccucucccggggcuucggcagcgggaucaucacguccaacgcccccaugggcgagugcgacgagaagugccagacgccccagggggcgaucaacagcucccugcccuuccagaacguccacccggugaccaucggcgagugccccaaguacgugcgcagcgccaagcugcggauggucaccgggcuccgcaacauccccuccauccagagccggggccuguucggcgccaucgccggguucaucgagggcggguggaccggcaugguggacgggugguacggcuaccaccaccagaacgagcagggcuccggguacgccgcggaccagaaguccacccagaacgccaucaacggcaucaccaacaaggugaacagcgucaucgagaagaugaacacccaguucacggccguggggaaggaguucaacaagcuggagcgccggauggagaaccucaacaagaaggucgacgacggcuuccuggacaucuggaccuacaacgccgagcugcucgugcugcuggagaacgagcgcacccucgacuuccacgacagcaacgugaagaaccuguacgagaaggucaagucccagcugaagaacaacgccaaggagaucgggaacggcugcuucgaguucuaccacaagugcaacaacgagugcauggagagcgugaagaacggcaccuacgacuaccccaaguacuccgaggagagcaagcucaaccgggagaagaucgacggggugaagcuggaguccaugggcgucuaccagauccuggcgaucuacagcacgguggccagcucccucgugcugcuggucagccucggggccaucuccuucuggaugugcagcaacggcucccugcagugccgcaucugcaucuga

SEQ ID NO: 66798 - RNA, 1698 nt, Artificial Sequence
  derived and/or modified CDS sequence (opt1) from hemagglutinin__InfluenzaA__ACR15359
augaaggugaagcugcucguccugcugugcaccuucaccgccacguacgccgacaccaucugcaucggcuaccacgcgaacaacagcaccgacaccguggacacggugcucgagaagaacgucaccgugacccacuccgugaaccugcuggagaacagccacaacgggaagcucugccugcugaagggcaucgcgccccuccagcuggggaacugcuccgucgccggcuggauccuggggaacccggagugcggccuccugaucagcaaggaguccuggagcuacaucguggagaagcccaaccccgagaacgggaccugcuaccccgggcacuucgccgacuacgaggagcugcgcgagcagcucuccagcguguccagcuucgagcgguucgagaucuucccgaaggaguccagcuggcccaaccacacggucaccggcguguccgccagcugcucccacaacggggagagcuccuucuaccgcaaccugcuguggcucaccggcaagaacgggcuguaccccaaccugagcaaguccuacgccaacaacaaggagaaggaggugcucguccuguggggcgugcaccacccgcccaacaucggcgaccagaaggcccuguaccacaccgagaacgccuacgugagcgucgugagcucccacuacagccggaaguucacgcccgagaucgccaagcgccccaaggugcgggaccaggaggggcgcaucaacuacuacuggacccuccuggagcccggcgacaccaucaucuucgaggcgaacgggaaccugaucgccccgcgguacgccuucgcccucucccgcggcuucggcagcgggaucaucaacuccaacgcccccauggacaagugcgacgcgaagugccagacgccccagggcgccaucaacagcucccugcccuuccagaacguccacccggugaccaucggggagugccccaaguacgugcggagcgccaagcugcgcauggucaccggccuccggaacauccccuccauccagagccgcgggcuguucggcgccaucgccggcuucaucgagggcggcuggaccgggaugguggacggcugguacggguaccaccaccagaacgagcagggcuccggcuacgcggccgaccagaaguccacccagaacgccaucaacgggaucacgaacaaggugaacagcgucaucgagaagaugaacacccaguucaccgccgugggcaaggaguucaacaagcuggagcggcgcauggagaaccucaacaagaaggucgacgacggguucaucgacaucuggaccuacaacgccgagcugcuggugcuccuggagaacgagcggacgcuggacuuccacgacagcaacgugaagaaccucuacgagaaggucaagucccagcugaagaacaacgcgaaggagaucggcaacgggugcuucgaguucuaccacaagugcaacgacgagugcauggagagcgugaagaacggcaccuacgacuaccccaaguacuccgaggagagcaagcugaaccgcgagaagaucgacggcgugaagcucgaguccaugggggucuaccagauccuggccaucuacagcaccguggccagcucccuggugcuccuggucagccugggcgccaucuccuucuggaugugcagcaacgggucccuccagugccggaucugcaucuga

SEQ ID NO: 66799 - RNA, 1698 nt, Artificial Sequence
  derived and/or modified CDS sequence (opt1) from hemagglutinin__InfluenzaA__ACR15370
augaaggugaagcugcucguccugcugugcacccucaccgccacguacgccgacaccaucugcaucggcuaccacgcgaacaacagcaccgacaccguggacacggugcuggagaagaacgucaccgugacccacuccgugaaccugcucgagaacagccacaacgggaagcugugccugcucaagggcaucgcgccccugcagcuggggaacugcuccgucgccggcuggauccucgggaacccggagugcgagcugcugaucagcaaggaguccuggagcuacaucguggagaagcccaaccccgagaacgggaccugcuaccccggccacuucgccgacuacgaggagcuccgcgagcagcuguccagcguguccagcuucgagcgguucgagaucuucccgaaggaguccagcuggcccaaccacacggucaccgggguguccgccagcugcucccacaacggcgagagcuccuucuaccgcaaccugcucuggcugaccgggaagaacggccuguaccccaaccucagcaaguccuacgccaacaacaaggagaaggaggugcugguccuguggggcgugcaccacccgcccaacaucggcgaccagaaggcccucuaccacaccgagaacgccuacgugagcgucgugagcucccacuacagccggaaguucacgcccgagaucgccaagcgccccaaggugcgggaccaggagggccgcaucaacuacuacuggacccugcuggagcccggggacaccaucaucuucgaggcgaacggcaaccucaucgccccgcgguacgccuucgcccugucccgcggguucggcagcggcaucaucaacuccaacgcccccauggacaagugcgacgcgaagugccagacgccccagggggccaucaacagcucccugcccuuccagaacguccacccggugaccaucggcgagugccccaaguacgugcggagcgccaagcuccgcauggucaccgggcugcggaacauccccuccauccagagccgcggccuguucggggccaucgccggcuucaucgagggcggguggaccggcaugguggacgggugguacggcuaccaccaccagaacgagcagggguccggcuacgcggccgaccagaaguccacccagaacgccaucaacggcaucacgaacaaggugaacagcgucaucgagaagaugaacacccaguucaccgccguggggaaggaguucaacaagcucgagcggcgcauggagaaccugaacaagaaggucgacgacggcuucaucgacaucuggaccuacaacgccgagcugcucgugcugcuggagaacgagcggacgcucgacuuccacgacagcaacgugaagaaccuguacgagaaggucaagucccagcugaagaacaacgcgaaggagaucgggaacggcugcuucgaguucuaccacaagugcaacgacgagugcauggagagcgugaagaacgggaccuacgacuaccccaaguacuccgaggagagcaagcucaaccgcgagaagaucgacggcgugaagcuggaguccaugggcgucuaccagauccuggccaucuacagcaccguggccagcucccucauccugcuggugagccucggggccaucuccuucuggaugugcagcaacggcucccugcagugccggaucugcaucuga

SEQ ID NO: 66800 - RNA, 1701 nt, Artificial Sequence; identical to SEQ ID NO: 66325
  derived and/or modified CDS sequence (opt1) from hemagglutinin__InfluenzaA__ACR15381

SEQ ID NO: 66801 - RNA, 1701 nt, Artificial Sequence; identical to SEQ ID NO: 66332
  derived and/or modified CDS sequence (opt1) from hemagglutinin__InfluenzaA__ACR15392

SEQ ID NO: 66802 - RNA, 1701 nt, Artificial Sequence; identical to SEQ ID NO: 65952
  derived and/or modified CDS sequence (opt1) from hemagglutinin__InfluenzaA__ACR15403

SEQ ID NO: 66803 - RNA, 1701 nt, Artificial Sequence; identical to SEQ ID NO: 65952
  derived and/or modified CDS sequence (opt1) from hemagglutinin__InfluenzaA__ACR15414

SEQ ID NO: 66804 - RNA, 1698 nt, Artificial Sequence; identical to SEQ ID NO: 66798
  derived and/or modified CDS sequence (opt1) from hemagglutinin__InfluenzaA__ACR15425

SEQ ID NO: 66805 - RNA, 1698 nt, Artificial Sequence
  derived and/or modified CDS sequence (opt1) from hemagglutinin__InfluenzaA__ACR15436
augaaggugaagcugcucguccugcugugcaccuucaccgccacguacgccgacaccaucugcaucggcuaccacgcgaacaacagcaccgacaccguggacacggugcucgagaagaacgucaccgugacccacuccgugaaccugcuggagaacagccacaacgggaagcucugccugcugaagggcaucgcgccccuccagcuggggaacugcuccgucgccggcuggauccuggggaacccggagugcgagcuccugaucagcaaggaguccuggagcuacaucguggagaagcccaaccccgagaacgggaccugcuaccccggccacuucgccgacuacgaggagcugcgcgagcagcucuccagcguguccagcuucgagcgguucgagaucuucccgaaggaguccagcuggcccaaccacacggucaccgggguguccgccagcugcucccacaacggcgagagcuccuucuaccgcaaccugcuguggcucaccgggaagaacggccuguaccccaaccugagcaaguccuacgccaacaacaaggggaaggaggugcucguccuguggggcgugcaccacccgcccaacaucggcgaccagaacacccuguaccacacggagaacgccuacgugagcgucgugagcucccacuacagccggaaguucacccccgagaucgccaagcgccccaaggugcgggaccaggaggggcgcaucaacuacuacuggacccuccuggagcccggcgacaccaucaucuucgaggccaacgggaaccugaucgcgccgcgguacgccuucgcccucucccgcggcuucggcagcgggaucaucaacuccaacgcccccauggacaagugcgacgccaagugccagacgccccagggcgcgaucaacagcucccugcccuuccagaacguccacccggugaccaucggggagugccccaaguacgugcggagcgccaagcugcgcauggucaccggccuccggaacauccccuccauccagagccgcgggcuguucggcgccaucgccggcuucaucgagggcggcuggaccgggaugguggacggcugguacggguaccaccaccagaacgagcagggcuccggcuacgccgcggaccagaaguccacgcagaacgccaucaacgggaucaccaacaaggugaacagcgucaucgagaagaugaacacccaguucaccgccgugggcaaggaguucaacaagcuggagcggcgcauggagaaccucaacaagaaggucgacgacggguucaucgacaucuggacguacaacgccgagcugcuggugcuccuggagaacgagcggacccuggacuuccacgacagcaacgugaagaaccucuacgagaaggucaagucccagcugaagaacaacgccaaggagaucggcaacgggugcuucgaguucuaccacaagugcaacgacgagugcauggagagcgugaagaacggcaccuacgacuaccccaaguacuccgaggagagcaagcugaaccgcgagaagaucgacggcgugaagcucgaguccaugggggucuaccagauccuggcgaucuacagcaccguggccagcucccuggugcuccuggucagccugggcgccaucuccuucuggaugugcagcaacgggucccuccagugccggaucugcaucuga

SEQ ID NO: 66806 - RNA, 1698 nt, Artificial Sequence
  derived and/or modified CDS sequence (opt1) from hemagglutinin__InfluenzaA__ACR15458
augaaggugaagcugcucguccugcugugcaccuucaccgccacguacgccgacaccaucugcaucggcuaccacgcgaacaacagcaccgacaccguggacacggugcucgagaagaacgucaccgugacccacuccgugaaccugcuggagaacagccacaacgggaagcucugccugcugaagggcaucgcgccccuccagcuggggaacugcuccgucgccggcuggauccuggggaacccggagugcgagcuccugaucagcaaggaguccuggagcuacaucguggagaaccccaaccccgagaacgggaccugcuaccccggccacuucgccgacuacgaggagcugcgcgagcagcucuccagcguguccagcuucgagcgguucgagaucuucccgaaggaguccagcuggcccaaccacacggucaccgggguguccgccagcugcucccacaacggcgagagcuccuucuaccgcaaccugcuguggcucaccgggaagaacggccuguaccccaaccugagcaaguccuacgccaacaacaaggagaaggaggugcucguccuguggggcgugcaccacccgcccaacaucggcgaccagaaggcccuguaccacaccgagaacgccuacgugagcgucgugagcucccacuacagccggaaguucacgcccgagaucgccaagcgccccaaggugcgggaccaggagggccgcaucaacuacuacuggacccuccuggagcccggggacaccaucaucuucgaggcgaacggcaaccugaucgccccgcgguacgccuucgcccucucccgcggguucggcagcggcaucaucaacuccaacgcccccauggacaagugcgacgcgaagugccagacgccccagggggccaucaacagcucccugcccuuccagaacguccacccggugaccaucggcgagugccccaaguacgugcggagcgccaagcugcgcauggucaccgggcuccggaacauccccuccauccagagccgcggccuguucggggccaucgccggcuucaucgagggcggguggaccggcaugguggacgggugguacggcuaccaccaccagaacgagcagggguccggcuacgcggccgaccagaaguccacccagaacgccaucaacggcaucacgaacaaggugaacagcgucaucgagaagaugaacacccaguucaccgccguggggaaggaguucaacaagcuggagcggcgcauggagaaccucaacaagaaggucgacgacggcuucaucgacaucuggaccuacaacgccgagcugcuggugcuccuggagaacgagcggacgcuggacuuccacgacagcaacgugaagaaccucuacgagaaggucaagucccagcugaagaacaacgcgaaggagaucgggaacggcugcuucgaguucuaccacaagugcaacgacgagugcauggagagcgugaagaacgggaccuacgacuaccccaaguacuccgaggagagcaagcugaaccgcgagaagaucgacggcgugaagcucgaguccaugggcgucuaccagauccuggccaucuacagcaccguggccagcucccuggugcuccuggucagccugggggccaucuccuucuggaugugcagcaacggcucccuccagugccggaucugcaucuga

SEQ ID NO: 66807 - RNA, 1698 nt, Artificial Sequence
  derived and/or modified CDS sequence (opt1) from hemagglutinin__InfluenzaA__ACR15469
augaaggugaagcugcucguccugcugugcaccuucaccgccacguacgccgacaccaucugcaucggcuaccacgcgaacaacagcaccgacaccguggacacggugcucgagaagaacgucaccgugacccacuccgugaaccugcuggaggacagccacaacgggaagcucugccugcugaagggcaucgcgccccuccagcuggggaacugcuccgucgccggcuggauccuggggaacccggagugcgagcuccugaucagcaaggaguccuggagcuacaucguggagaagcccgaccccgagaacgggaccugcuaccccggccacuucgccgacuacgaggagcugcgcgagcagcucuccagcguguccagcuucgagcgguucgagaucuucccgaaggaguccagcuggcccaaccacacggucaccgggguguccgccagcugcucccacaacggcgagagcuccuucuaccgcaaccugcuguggcucaccgggaagaacggccuguaccccaaccugagcaaguccuacgccaacaacaaggagaaggaggugcucguccuguggggcgugcaccacccgcccaacaucggcgaccagaacacccuguaccacacggagaacgccuacgugagcgucgugagcucccacuacagccggaaguucacccccgagaucgccaagcgccccaaggugcgggaccaggagggccgcaucaacuacuacuggacccuccuggagcccggggacaccaucaucuucgaggccaacggcaaccugaucgcgccgcgguacgccuucgcccucucccgcggguucggcagcggcaucaucaacuccaacgcccccauggacaagugcgacgccaagugccagacgccccagggggcgaucaacagcucccugcccuuccagaacguccacccggugaccaucggcgagugccccaaguacgugcggagcgccaagcugcgcauggucaccgggcuccggaacauccccuccauccagagccgcggccuguucggggccaucgccggcuucaucgagggcggguggaccggcaugguggacgggugguacggcuaccaccaccagaacgagcagggguccggcuacgccgcggaccagaaguccacgcagaacgccaucaacggcaucaccaacaaggugaacagcgucaucgagaagaugaacacccaguucaccgccguggggaaggaguucaacaagcuggagcggcgcauggagaaccucaacaagaaggucgacgacggcuucaucgacaucuggacguacaacgccgagcugcuggugcuccuggagaacgagcggacccuggacuuccacgacagcaacgugaagaaccucuacgagaaggucaagucccagcugaagaacaacgccaaggagaucgggaacggcugcuucgaguucuaccacaagugcaacgacgagugcauggagagcgugaagaacgggaccuacgacuaccccaaguacuccgaggagagcaagcugaaccgcgagaagaucgacggcgugaagcucgaguccaugggcgucuaccagauccuggcgaucuacagcaccguggccagcucccuggugcuccuggucagccugggggccaucuccuucuggaugugcagcaacggcucccuccagugccggaucugcaucuga

SEQ ID NO: 66808 - RNA, 1698 nt, Artificial Sequence; identical to SEQ ID NO: 66805
  derived and/or modified CDS sequence (opt1) from hemagglutinin__InfluenzaA__ACR15480

SEQ ID NO: 66809 - RNA, 1698 nt, Artificial Sequence
  derived and/or modified CDS sequence (opt1) from hemagglutinin__InfluenzaA__ACR15491
augaaggugaagcugcucguccugcugugcaccuucaccgccacguacgccgacaccaucugcaucggcuaccacgcgaacaacagcaccgacaccguggacacggugcucgagaagaacgucaccgugacccacuccgugaaccugcuggagaacagccacaacgggaagcucugccugcugaagggcaucgcgccccuccagcuggggaacugcuccgucgccggcuggauccuggggaacccggagugcgagcuccugaucagcaaggaguccuggagcuacaucguggagaagcccaaccccgagaacgggaccugcuaccccggccacuucgccgacuacgaggagcugcgcgagcagcucuccagcguguccagcuucgagcgguucgagaucuucccgaaggaguccagcuggcccaaccacacggucaccgggguguccgccagcugcucccacaacggcgagagcuccuucuaccgcaaccugcuguggcucaccgggcggaacggccuguaccccaaccugagcaaguccuacgccaacaacaaggagaaggaggugcucguccuguggggcgugcaccacccgcccaacaucguggaccagaagacccuguaccgcacggagaacgccuacgucagcguggugagcucccacuacagccggaaguucacccccgagaucgccaagcgccccaagguccgggaccaggagggccgcaucaacuacuacuggacccuccuggagcccggcgacaccaucaucuucgaggccaacgggaaccugaucgcgccgcgguacgccuucgcccucucccgcggcuucgggagcggcaucaucaacuccaacgcccccauggacaagugcgacgccaagugccagacgccccagggcgcgaucaacagcucccugcccuuccagaacgugcacccggugaccaucggggagugccccaaguacguccggagcgccaagcugcgcauggugaccggccuccggaacauccccuccauccagagccgcgggcuguucggcgccaucgccggguucaucgagggcggcuggaccgggaugguggacggcugguacggguaccaccaccagaacgagcagggcuccggguacgccgcggaccagaaguccacgcagaacgccaucaacggcaucaccaacaaggucaacagcgugaucgagaagaugaacacccaguucaccgccgucggcaaggaguucaacaagcuggagcggcgcauggagaaccucaacaagaagguggacgacggguucaucgacaucuggacguacaacgccgagcugcuggugcuccuggagaacgagcggacccuggacuuccacgacagcaacgucaagaaccucuacgagaaggugaagucccagcugaagaacaacgccaaggagaucggcaacgggugcuucgaguucuaccacaagugcaacgacgagugcauggagagcgugaagaacggcaccuacgacuaccccaaguacuccgaggagagcaagcugaaccgcgagaagaucgacgggaucaagcucgaguccaugggcgucuaccagauccuggcgaucuacagcaccguggccagcucccuggugcuccuggucagccugggcgccaucuccuucuggaugugcagcaacgggucccuccagugccggaucugcaucuga

SEQ ID NO: 66810 - RNA, 1698 nt, Artificial Sequence
  derived and/or modified CDS sequence (opt1) from hemagglutinin__InfluenzaA__ACR15502
augaaggugaagcugcucguccugcugugcaccuucaccgccacguacgccgacaccaucugcaucggcuaccacgcgaacaacgccaccgacaccguggacacggugcucgagaagaacgucaccgugacccacagcgugaaccugcuggagaacucccacaacgggaagcucugccugcugaagggcaucgcgccccuccagcuggggaacugcagcgucgccggcuggauccuggggaacccggagugcgagcuccugaucuccaaggagagcugguccuacaucguggagaagcccaaccccgagaacgggaccugcuaccccggccacuucgccgacuacgaggagcugcgcgagcagcucagcuccgugagcuccuucgagcgguucgagaucuucccgaaggagagcuccuggcccaaccacacggucaccggggugagcgccuccugcagccacaacggcgaguccagcuucuaccgcaaccugcuguggcucaccgggaagaacggccuguaccccaaccuguccaagagcuacgccaacaacaaggggaaggaggugcucguccuguggggcgugcaccacccgcccaacaucggcgaccagaacacccuguaccacacggagaacgccuacguguccgucgugagcagccacuacucccggaaguucacccccgagaucgccaagcgccccaaggugcgggaccaggaggggcgcaucaacuacuacuggacccuccuggagcccggcgacaccaucaucuucgaggcgaacgggaaccugaucgccccgcgguacgccuucgcccucagccgcggcuucggcuccgggaucaucaacagcaacgcccccauggacaagugcgacgcgaagugccagacgccccagggcgccaucaacuccagccugcccuuccagaacguccacccggugaccaucggggagugccccaaguacgugcgguccgccaagcugcgcauggucaccggccuccggaacauccccagcauccagucccgcgggcuguucggcgccaucgccggcuucaucgagggcggcuggaccgggaugguggacggcugguacggguaccaccaccagaacgagcagggcagcggcuacgcggccgaccagaaguccacgcagaacgccaucaacgggaucaccaacaaggugaacagcgucaucgagaagaugaacacccaguucaccgccgugggcaaggaguucaacaagcuggagcggcgcauggagaaccucaacaagaaggucgacgacggguucaucgacaucuggacguacaacgccgagcugcuggugcuccuggagaacgagcggacccuggacuuccacgacuccaacgugaagaaccucuacgagaaggucaagagccagcugaagaacaacgcgaaggagaucggcaacgggugcuucgaguucuaccacaagugcaacgacgagugcauggaguccgugaagaacggcaccuacgacuaccccaaguacagcgaggaguccaagcugaaccgcgagaagaucgacggcgugaagcucgagagcaugggggucuaccagauccuggccaucuacuccaccguggccagcagccuggugcuccuggucucccugggcgccaucagcuucuggaugugcuccaacgggagccuccagugccggaucugcaucuga

SEQ ID NO: 66811 - RNA, 1698 nt, Artificial Sequence; identical to SEQ ID NO: 66667
  derived and/or modified CDS sequence (opt1) from hemagglutinin__InfluenzaA__ACR15513

SEQ ID NO: 66812 - RNA, 1701 nt, Artificial Sequence
  derived and/or modified CDS sequence (opt1) from hemagglutinin__InfluenzaA__ACR15524
augaagaccaucaucgcccugagcuacauccucugccugguguucgcccagaagcugcccggcaacgacaacuccaccgcgacgcucugccuggggcaccacgccgucccgaacggcaccaucgugaagaccaucaccaacgaccagaucgaggugacgaacgccaccgagcugguccagagcuccagcaccgggggcaucugcgacagcccccaccagauccucgacggggagaacugcacccugaucgacgcccugcucggcgacccccagugcgacggcuuccagaacaagaagugggaccuguucguggagcgcagcaaggccuacuccaacugcuaccccuacgacgugccggacuacgcgagccugcggucccucgucgccagcuccgggacgcuggaguucaacaacgagagcuucaacuggaccggcgugacccagaacgggaccuccagcgccugcaagcgccgguccaacaagagcuucuucucccgccugaacuggcucacgcaccugaaguucaaguaccccgcccugaacgugaccaugcccaacaacgagaaguucgacaagcucuacaucuggggcguccaccaccccgggaccgacaacgaccagaucagccuguacgcgcaggccuccggccggaucaccgugagcacgaagcgcagccagcagaccgugaucccgaacaucggcucccggccccgcguccgggacgugcccagccgcaucuccaucuacuggaccaucgugaaguccggggacauccugcucaucaacuccaccggcaaccugaucgcgccccggggguacuucaagauccgcagcggcaaguccagcaucaugcgguccgacgccccgaucggcaagugcaacagcgagugcaucacgcccaacggguccauccccaacgacaagcccuuccagaacgucaaccgcaucaccuacggcgccugcccgcgguacgugaagcagaacacccugaagcucgccaccgggaugcgcaacgugcccgagaagcagacgcggggcaucuucggggccaucgccggcuucaucgagaacggcugggaggggauggucgacggcugguacggguuccgccaccagaacagcgagggcaccgggcaggccgccgaccugaaguccacccaggcggccaucaaccagaucaacggcaagcugaaccggcucaucggcaagaccaacgagaaguuccaccagaucgagaaggaguucagcgagguggaggggcgcauccaggaccuggagaaguacguggaggacacgaagaucgaccugugguccuacaacgccgagcuccuggucgcccuggagaaccagcacaccaucgaccucaccgacagcgagaugaacaagcuguucgagcggaccaagaagcagcugcgcgagaacgccgaggacaugggcaacgggugcuucaagaucuaccacaagugcgacaacgcgugcaucggcuccauccgcaacgggacguacgaccacgacguguaccgggacgaggcccucaacaaccgcuuccagaucaagggcguggagcucaagagcggcuacaaggacuggauccuguggaucuccuucgccaucagcugcuuccugcugugcgucgugcugcucggguucaucaugugggccugccagaagggcaacauccggugcaacaucugcaucuga

SEQ ID NO: 66813 - RNA, 1701 nt, Artificial Sequence; identical to SEQ ID NO: 66621
  derived and/or modified CDS sequence (opt1) from hemagglutinin__InfluenzaA__ACR15535

SEQ ID NO: 66814 - RNA, 1701 nt, Artificial Sequence
  derived and/or modified CDS sequence (opt1) from hemagglutinin__InfluenzaA__ACR15546
augaagaccaucaucgcccugagcuacauccucugccugguguucgcccagaagcugcccggcaacgacaacuccaccgcgacgcucugccuggggcaccacgccgucccgaacggcaccaucgugaagaccaucaccaacgaccagaucgaggugacgaacgccaccgagcugguccagagcuccagcaccgggggcaucugcgacagcccccaccacauccucgacggggagaacugcacccugaucgacgcccugcucggcgacccccagugcgacggcuuccagaacaagaagugggaccuguucguggagcgcagcaaggccuacuccaacugcuaccccuacgacgugccggacuacgcgagccugcggucccucgucgccagcuccgggacgcuggaguucaacaacgagagcuucaacuggaccggcgugacccagaacgggaccuccagcgccugcaagcgccgguccaacaacagcuucuucucccgccugaacuggcucacgcaccugaaguucaaguaccccgcccugaacgugaccaugcccaacaacgagaaguucgacaagcucuacaucuggggcguccaccaccccgggaccgacaacgaccagaucagccuguacgcgcaggccuccggccggaucaccgugagcacgaagcgcagccagcagaccgugaucccgaacaucggcucccggccccgcguccgggacaucagcucccgcaucagcaucuacuggaccaucgugaagcccggggacauccugcucaucaacuccaccggcaaccugaucgcgccccggggguacuucaagauccgcagcggcaaguccagcaucaugcgguccgacgccccgaucggcaagugcaacagcgagugcaucacgcccaacggguccauccccaacgacaagcccuuccagaacgugaaccgcaucaccuacggcgccugcccgcgguacgucaagcagaacacccugaagcucgccaccgggaugcgcaacgugcccgagacgcagacccggggcaucuucggggccaucgccggcuucaucgagaacggcugggaggggaugguggacggcugguacggguuccgccaccagaacagcgagggcaccgggcaggccgccgaccugaaguccacccaggcggccaucaaccagaucaacggcaagcugaaccggcucaucggcaagacgaacgagaaguuccaccagaucgagaaggaguucagcgaggucgaggggcgcauccaggaccuggagaaguacguggaggacaccaagaucgaccugugguccuacaacgccgagcuccugguggcccuggagaaccagcacaccaucgaccucaccgacagcgagaugaacaagcuguucgagcggacgaagaagcagcugcgcgagaacgccgaggacaugggcaacgggugcuucaagaucuaccacaagugcgacaacgcgugcaucggcuccauccgcaacgagaccuacgaccacgacgucuaccgggacgaggcccucaacaaccgcuuccagaucaaggggguggagcugaaguccggcuacaaggacuggauccuguggaucuccuucgccaucagcugcuuccuccugugcguggcccugcucggcuucaucaugugggccugccagaaggggaacauccggugcaacaucugcaucuga

SEQ ID NO: 66815 - RNA, 1701 nt, Artificial Sequence; identical to SEQ ID NO: 66396
  derived and/or modified CDS sequence (opt1) from hemagglutinin__InfluenzaA__ACR15557

SEQ ID NO: 66816 - RNA, 1701 nt, Artificial Sequence; identical to SEQ ID NO: 64654
  derived and/or modified CDS sequence (opt1) from hemagglutinin__InfluenzaA__ACR15568

SEQ ID NO: 66817 - RNA, 1701 nt, Artificial Sequence
  derived and/or modified CDS sequence (opt1) from hemagglutinin__InfluenzaA__ACR15579
augaagaccaucaucgcccugagcuacauccucugccugguguucgcccagaagcugcccggcaacgacaacuccaccgcgacgcucugccuggggcaccacgccgucccgaacggcaccaucgugaagaccaucaccaacgaccagaucgaggugacgaacgccaccgagcugguccagagcuccagcaccgggggcaucugcgacagcccccaccagauccucgacggggagaacugcacccugaucgacgcccugcucggcgacccccagugcgacggcuuccagaacaagaagugggaccuguucguggagcgcagcaaggccuacuccaacugcuaccccuacgacgugccggacuacgcgagccugcggucccucgucgccagcuccgggacgcuggaguucaacaacgagagcuucaacuggaccggcgugacccagaacgggaccuccagcgccugcaagcgccgguccaacaacagcuucuucucccgccugaacuggcucacgcaccugaaguucaaguaccccgcccugaacgugaccaugcccaacaacgagaaguucgacaagcucuacaucuggggcguccaccaccccgggaccgacaacgaccagaucuuccuguacgcgcaggccagcggccggaucaccguguccacgaagcgcagccagcagaccgugaucccgaacaucggcagccggccccgcguccggaacauccccucccgcaucagcaucuacuggaccaucgugaaccccggggacauccugcucaucaacuccaccggcaaccugaucgccccgcggggguacuucaagauccgcagcggcaaguccagcaucaugcgguccgacgcccccaucggcaagugcaacagcgagugcaucacgcccaacggguccauccccaacgacaagccguuccagaacgugaaccgcaucaccuacggcgccugcccccgguacgucaagcagaacacccugaagcucgcgaccgggaugcgcaacgugcccgagaagcagacgcggggcaucuucggggccaucgccggcuucaucgagaacggcugggaggggaugguggacggcugguacggguuccgccaccagaacagcgagggcaucgggcaggccgccgaccugaaguccacccaggcggccaucaaccagaucaacggcaagcugaaccggcucaucggcaagaccaacgagaaguuccaccagaucgagaaggaguucagcgaggucgaggggcgcauccaggaccuggagaaguacguggaggacaccaagaucgaccugugguccuacaacgccgagcuccugguggcccuggagaaccagcacacgaucgaccucaccgacagcgagaugaacaagcuguucgagcggaccaagaagcagcugcgcgagaacgccgaggacaugggcaacgggugcuucaagaucuaccacaagugcgacaacgcgugcaucggcuccauccgcaacgggaccuacgaccacgacgucuaccgggacgaggcccucaacaaccgcuuccagaucaagggcguggagcugaaguccggcuacaaggacuggauccuguggaucuccuucgccaucagcugcuuccuccugugcguggcccugcucggguucaucaugugggccugccagaagggcaacauccggugcaacaucugcaucuga

SEQ ID NO: 66818 - RNA, 1701 nt, Artificial Sequence
  derived and/or modified CDS sequence (opt1) from hemagglutinin__InfluenzaA__ACR15590
augaagaccaucaucgcccugagcuacauccucugccugguguucacccagaagcugcccggcaacgacaacuccacggccacccucugccuggggcaccacgcggucccgaacggcaccaucgugaagaccaucacgaacgaccagaucgaggugaccaacgccaccgagcugguccagagcuccagcaccgggggcaucugcgacagcccccaccagauccucgacggggagaacugcacgcugaucgacgcccugcucggcgacccccagugcgacggcuuccagaacaagaagugggaccuguucguggagcgcagcaaggccuacuccaacugcuaccccuacgacgugccggacuacgccagccugcggucccucgucgcgagcuccgggacccuggaguucaacaacgagagcuucaacuggaccggcgugacccagaacgggacguccagcgccugcaagcgccgguccaacaacagcuucuucucccgccugaacuggcucacccaccugaaguucaaguaccccgcccugaacgugaccaugcccaacaacgagaaguucgacaagcucuacaucuggggcguccaccaccccgggaccgacaacgaccagaucuuccuguacgcccaggcgagcggccggaucacgguguccaccaagcgcagccagcagaccgugaucccgaacaucggcagccggccccgcguccggaacauccccucccgcaucagcaucuacuggaccaucgugaagcccggggacauccugcucaucaacuccacgggcaaccugaucgccccgcggggguacuucaagauccgcagcggcaaguccagcaucaugcgguccgacgcccccaucggcaagugcaacagcgagugcaucacccccaacggguccauccccaacgacaagccguuccagaacgugaaccgcaucaccuacggcgccugcccccgguacgucaagcagaacacccugaagcucgccacggggaugcgcaacgugcccgagaagcagacccggggcaucuucggggcgaucgccggcuucaucgagaacggcugggaggggaugguggacggcugguacggguuccgccaccagaacagcgagggcaucgggcaggccgccgaccugaaguccacccaggccgcgaucaaccagaucaacggcaagcugaaccggcucaucggcaagaccaacgagaaguuccaccagaucgagaaggaguucagcgaggucgaggggcgcauccaggaccuggagaaguacguggaggacacgaagaucgaccugugguccuacaacgccgagcuccugguggcccuggagaaccagcacaccaucgaccucaccgacagcgagaugaacaagcuguucgagcggaccaagaagcagcugcgcgagaacgccgaggacaugggcaacgggugcuucaagaucuaccacaagugcgacaacgccugcaucggcuccauccgcaacgggacguacgaccacgacgucuaccgggacgaggcgcucaacaaccgcuuccagaucaagggcguggagcugaaguccggcuacaaggacuggauccuguggaucuccuucgccaucagcugcuuccuccugugcguggcccugcucggguucaucaugugggccugccagaagggcaacauccggugcaacaucugcaucuga

SEQ ID NO: 66819 - RNA, 1701 nt, Artificial Sequence; identical to SEQ ID NO: 64654
  derived and/or modified CDS sequence (opt1) from hemagglutinin__InfluenzaA__ACR15601

SEQ ID NO: 66820 - RNA, 1701 nt, Artificial Sequence
  derived and/or modified CDS sequence (opt1) from hemagglutinin__InfluenzaA__ACR18920
augaaggccauccuggugguccuccuguacaccuucgccaccgcgaacgccgacacgcugugcaucggcuaccacgccaacaacagcaccgacaccguggacaccgugcucgagaagaacgucacggugacccacuccgugaaccugcuggaggacaagcacaacgggaagcucugcaagcugcgcggcgucgcgccccugcaccucgggaagugcaacaucgccggcuggauccuggggaacccggagugcgagagccuguccaccgccagcuccuggagcuacaucguggagaccuccagcuccgacaacggcacgugcuaccccggcgacuucaucgacuacgaggagcuccgggagcagcugagcuccgugagcuccuucgagcgcuucgagaucuuccccaagaccagcuccuggcccaaccacgacagcaacaagggggucaccgccgccugcccgcacgccggcgcgaaguccuucuacaagaaccugaucuggcucgugaagaaggggaacagcuaccccaagcuguccaagagcuacaucaacgacaagggcaaggaggugcugguccucugggggauccaccaccccagcaccuccgccgaccagcagagccuguaccagaacgccgacgccuacguguucgugggcuccagccgguacuccaagaaguucaagcccgagaucgccauccgcccgaagguccgggaccaggagggccgcaugaacuacuacuggacgcugguggagcccggggacaagaucaccuucgaggcgaccggcaaccucguggucccccgguacgccuucgccauggagcgcaacgccgggagcggcaucaucaucuccgacacccccgugcacgacugcaacacgaccugccagaccccgaagggcgccaucaacaccagccugcccuuccagaacauccaccccaucacgaucgggaagugccccaaguacgugaaguccaccaagcugcggcucgcgaccggccugcgcaacgucccgagcauccagucccgggggcuguucggcgccaucgccggguucaucgagggcggcuggaccgggaugguggacggcugguacggguaccaccaccagaacgagcagggcagcggguacgccgccgaccucaaguccacgcagaacgcgaucgacgagaucaccaacaaggugaacagcgucaucgagaagaugaacauccaguucaccgccgugggcaaggaguucaaccaccuggagaagcgcaucgagaaccugaacaagaaggucgacgacggcuuccucgacaucuggaccuacaacgccgagcugcuggugcuccuggagaacgagcggacgcuggacuaccacgacuccaacgugaagaaccucuacgagaagguccgcagccagcugaagaacaacgccaaggagaucgggaacggcugcuucgaguucuaccacaagugcgacaacacgugcauggaguccgugaagaacgggaccuacgacuaccccaaguacagcgaggaggccaagcugaaccgggaggagaucgacggcgugaagcucgaguccacccgcaucuaccagauccuggcgaucuacagcaccgucgccagcucccuggugcucguggucagccugggggccaucuccuucuggaugugcagcaacggcucccugcagugccggaucugcaucuga

SEQ ID NO: 66821 - RNA, 1701 nt, Artificial Sequence; identical to SEQ ID NO: 66693
  derived and/or modified CDS sequence (opt1) from hemagglutinin__InfluenzaA__ACR18975

SEQ ID NO: 66822 - RNA, 1701 nt, Artificial Sequence; identical to SEQ ID NO: 66680
  derived and/or modified CDS sequence (opt1) from hemagglutinin__InfluenzaA__ACR18976

SEQ ID NO: 66823 - RNA, 1701 nt, Artificial Sequence; identical to SEQ ID NO: 66680
  derived and/or modified CDS sequence (opt1) from hemagglutinin__InfluenzaA__ACR18977

SEQ ID NO: 66824 - RNA, 1701 nt, Artificial Sequence; identical to SEQ ID NO: 66693
  derived and/or modified CDS sequence (opt1) from hemagglutinin__InfluenzaA__ACR18978

SEQ ID NO: 66825 - RNA, 1701 nt, Artificial Sequence; identical to SEQ ID NO: 66680
  derived and/or modified CDS sequence (opt1) from hemagglutinin__InfluenzaA__ACR18979

SEQ ID NO: 66826 - RNA, 1701 nt, Artificial Sequence; identical to SEQ ID NO: 66746
  derived and/or modified CDS sequence (opt1) from hemagglutinin__InfluenzaA__ACR18981

SEQ ID NO: 66827 - RNA, 1701 nt, Artificial Sequence; identical to SEQ ID NO: 66680
  derived and/or modified CDS sequence (opt1) from hemagglutinin__InfluenzaA__ACR18982

SEQ ID NO: 66828 - RNA, 1701 nt, Artificial Sequence; identical to SEQ ID NO: 66693
  derived and/or modified CDS sequence (opt1) from hemagglutinin__InfluenzaA__ACR18988

SEQ ID NO: 66829 - RNA, 1701 nt, Artificial Sequence
  derived and/or modified CDS sequence (opt1) from hemagglutinin__InfluenzaA__ACR18991
augaaggccauccuggugguccuccuguacaccuucgccaccgcgaacgccgacacgcugugcaucggcuaccacgccaacaacagcaccgacaccguggacaccgugcucgagaagaacgucacggugacccacuccgugaaccugcuggaggacaagcacaaccgcaagcucugcaagcugcgcggggucgcgccccugcaccucggcaagugcaacaucgccggguggauccugggcaacccggagugcgagagccuguccaccgccagcuccuggagcuacaucguggagaccuccagcuccgacaacgggacgugcuaccccggcgacuucaucgacuacgaggagcuccgggagcagcugagcuccgugagcuccuucgagcgguucgagaucuuccccaagaccagcuccuggcccaaccacgacagcaacaagggcgucaccgccgccugcccgcacgccggggcgaaguccuucuacaagaaccugaucuggcucgugaagaagggcaacagcuaccccaagcuguccaagagcuacaucaacgacaaggggaaggaggugcugguccucuggggcauccaccaccccagcaccuccgccgaccagcagagccuguaccagaacgccgacgccuacguguucgugggguccagccgcuacuccaagaaguucaagcccgagaucgccauccggccgaagguccgcgaccaggagggccggaugaacuacuacuggacgcugguggagcccggcgacaagaucaccuucgaggcgaccgggaaccucguggucccccgcuacgccuucgccauggagcggaacgccggcagcgggaucaucaucuccgacacccccgugcacgacugcaacacgaccugccagaccccgaagggcgccaucaacaccagccugcccuuccagaacauccaccccaucacgaucggcaagugccccaaguacgugaaguccaccaagcugcgccucgcgaccgggcugcggaacgucccgagcauccagucccgcggccuguucggggccaucgccggcuucaucgagggcggguggaccggcaugguggacgggugguacggcuaccaccaccagaacgagcaggggagcggcuacgccgccgaccucaaguccacgcagaacgcgaucgacgagaucaccaacaaggugaacagcgucaucgagaagaugaacacccaguucaccgccguggggaaggaguucaaccaccuggagaagcggaucgagaaccugaacaagaaggucgacgacggcuuccucgacaucuggacguacaacgccgagcugcuggugcuccuggagaacgagcgcacccuggacuaccacgacuccaacgugaagaaccucuacgagaagguccggagccagcugaagaacaacgccaaggagaucggcaacgggugcuucgaguucuaccacaagugcgacaacacgugcauggaguccgugaagaacggcaccuacgacuaccccaaguacagcgaggaggccaagcugaaccgcgaggagaucgacggggugaagcucgaguccacccggaucuaccagauccuggcgaucuacagcaccgucgccagcucccuggugcucguggucagccugggcgccaucuccuucuggaugugcagcaacgggucccugcagugccgcaucugcaucuga

SEQ ID NO: 66830 - RNA, 1701 nt, Artificial Sequence; identical to SEQ ID NO: 66680
  derived and/or modified CDS sequence (opt1) from hemagglutinin__InfluenzaA__ACR18993

SEQ ID NO: 66831 - RNA, 1701 nt, Artificial Sequence; identical to SEQ ID NO: 66719
  derived and/or modified CDS sequence (opt1) from hemagglutinin__InfluenzaA__ACR18995

SEQ ID NO: 66832 - RNA, 1701 nt, Artificial Sequence; identical to SEQ ID NO: 66741
  derived and/or modified CDS sequence (opt1) from hemagglutinin__InfluenzaA__ACR23302

SEQ ID NO: 66833 - RNA, 1701 nt, Artificial Sequence; identical to SEQ ID NO: 66693
  derived and/or modified CDS sequence (opt1) from hemagglutinin__InfluenzaA__ACR33743

SEQ ID NO: 66834 - RNA, 1701 nt, Artificial Sequence; identical to SEQ ID NO: 66680
  derived and/or modified CDS sequence (opt1) from hemagglutinin__InfluenzaA__ACR38821

SEQ ID NO: 66835 - RNA, 1701 nt, Artificial Sequence; identical to SEQ ID NO: 66680
  derived and/or modified CDS sequence (opt1) from hemagglutinin__InfluenzaA__ACR38822

SEQ ID NO: 66836 - RNA, 1701 nt, Artificial Sequence; identical to SEQ ID NO: 66680
  derived and/or modified CDS sequence (opt1) from hemagglutinin__InfluenzaA__ACR38823

SEQ ID NO: 66837 - RNA, 1701 nt, Artificial Sequence; identical to SEQ ID NO: 66746
  derived and/or modified CDS sequence (opt1) from hemagglutinin__InfluenzaA__ACR38824

SEQ ID NO: 66838 - RNA, 1701 nt, Artificial Sequence
  derived and/or modified CDS sequence (opt1) from hemagglutinin__InfluenzaA__ACR38825
augaaggccauccuggugguccuccuguacaccuucgccaccgcgaacgccgacacgcugugcaucggcuaccacgccaacaacagcaccgacaccguggacaccgugcucgagaagaacgucacggugacccacuccgugaaccugcuggaggacaagcacaacgggaagcucugcaagcugcgcggcgucgcgccccugcaccucgggaagugcaacaucgccggcuggauccuggggaacccggagugcgagagccuguccaccgccagcuccuggagcuacaucguggagaccuccagcuccgacaacggcacgugcuaccccggcgacuucaucgacuacgaggagcuccgggagcagcugagcuccgugagcuccuucgagcgcuucgagaucuuccccaagaccagcuccuggcccaaccacgacagcaacaagggggucaccgccgccugcccgcacgccggcgcgaaguccuucuacaagaaccugaucuggcucgugaagaaggggaacagcuaccccaagcuguccaagagcuacaucaacgacaagggcaaggaggugcugguccucugggggauccaccaccccagcaccuccgccgaccagcagagccuguaccagaacgccgacgccuacguguucgugggcacgucccgguacagcaagaaguucaagcccgagaucgccauccgcccgaagguccggggccaggaggggcgcaugaacuacuacuggacccugguggagcccggcgacaagaucaccuucgaggcgaccgggaaccucguggucccccgguacgccuucgccauggagcgcaacgccggcuccggcaucaucaucagcgacacgcccgugcacgacugcaacacgaccugccagaccccgaagggggccaucaacaccucccugcccuuccagaacauccaccccaucaccaucggcaagugccccaaguacgucaagagcaccaagcugcggcucgcgaccgggcugcgcaacgugccguccauccagagccggggccuguucggggccaucgccggcuucaucgagggcggguggacgggcaugguggacgggugguacggcuaccaccaccagaacgagcagggguccggcuacgccgccgaccucaagagcacccagaacgcgaucgacgagaucaccaacaaggugaacuccgucaucgagaagaugaacacccaguucacggccgugggcaaggaguucaaccaccuggagaagcgcaucgagaaccugaacaagaagaucgacgacggguuccucgacaucuggaccuacaacgccgagcugcugguccuccuggagaacgagcggacccuggacuaccacgacagcaacgugaagaaccucuacgagaaggugcgcucccagcugaagaacaacgccaaggagaucggcaacgggugcuucgaguucuaccacaagugcgacaacacgugcauggagagcgucaagaacggcaccuacgacuaccccaaguacuccgaggaggccaagcugaaccgggaggagaucgacggggugaagcucgagagcacccgcaucuaccagauccuggcgaucuacuccaccguggccagcagccugguccucguggugucccugggcgccaucagcuucuggaugugcuccaacggcagccugcagugccggaucugcaucuga

SEQ ID NO: 66839 - RNA, 1701 nt, Artificial Sequence; identical to SEQ ID NO: 66693
  derived and/or modified CDS sequence (opt1) from hemagglutinin__InfluenzaA__ACR38826

SEQ ID NO: 66840 - RNA, 1701 nt, Artificial Sequence; identical to SEQ ID NO: 66680
  derived and/or modified CDS sequence (opt1) from hemagglutinin__InfluenzaA__ACR38827

SEQ ID NO: 66841 - RNA, 1701 nt, Artificial Sequence; identical to SEQ ID NO: 66746
  derived and/or modified CDS sequence (opt1) from hemagglutinin__InfluenzaA__ACR38828

SEQ ID NO: 66842 - RNA, 1701 nt, Artificial Sequence; identical to SEQ ID NO: 66680
  derived and/or modified CDS sequence (opt1) from hemagglutinin__InfluenzaA__ACR38829

SEQ ID NO: 66843 - RNA, 1701 nt, Artificial Sequence; identical to SEQ ID NO: 66719
  derived and/or modified CDS sequence (opt1) from hemagglutinin__InfluenzaA__ACR38830

SEQ ID NO: 66844 - RNA, 1701 nt, Artificial Sequence; identical to SEQ ID NO: 66693
  derived and/or modified CDS sequence (opt1) from hemagglutinin__InfluenzaA__ACR39354

SEQ ID NO: 66845 - RNA, 1701 nt, Artificial Sequence; identical to SEQ ID NO: 66693
  derived and/or modified CDS sequence (opt1) from hemagglutinin__InfluenzaA__ACR39393

SEQ ID NO: 66846 - RNA, 1701 nt, Artificial Sequence; identical to SEQ ID NO: 66693
  derived and/or modified CDS sequence (opt1) from hemagglutinin__InfluenzaA__ACR39403

SEQ ID NO: 66847 - RNA, 1701 nt, Artificial Sequence; identical to SEQ ID NO: 66693
  derived and/or modified CDS sequence (opt1) from hemagglutinin__InfluenzaA__ACR39413

SEQ ID NO: 66848 - RNA, 1701 nt, Artificial Sequence; identical to SEQ ID NO: 66693
  derived and/or modified CDS sequence (opt1) from hemagglutinin__InfluenzaA__ACR39423

SEQ ID NO: 66849 - RNA, 1701 nt, Artificial Sequence; identical to SEQ ID NO: 66693
  derived and/or modified CDS sequence (opt1) from hemagglutinin__InfluenzaA__ACR39433

SEQ ID NO: 66850 - RNA, 1701 nt, Artificial Sequence; identical to SEQ ID NO: 66693
  derived and/or modified CDS sequence (opt1) from hemagglutinin__InfluenzaA__ACR39443

SEQ ID NO: 66851 - RNA, 1701 nt, Artificial Sequence
  derived and/or modified CDS sequence (opt1) from hemagglutinin__InfluenzaA__ACR39453
auggaggccauccuggugguccuccuguacaccuucgccaccgcgaacgccgacacgcugugcaucggcuaccacgccaacaacagcaccgacaccguggacaccgugcucgagaagaacgucacggugacccacuccgugaaccugcuggaggacaagcacaacgggaagcucugcaagcugcgcggcgucgcgccccugcaccucgggaagugcaacaucgccggcuggauccuggggaacccggagugcgagagccuguccaccgccagcuccuggagcuacaucguggagaccuccagcuccgacaacggcacgugcuaccccggcgacuucaucgacuacgaggagcuccgggagcagcugagcuccgugagcuccuucgagcgcuucgagaucuuccccaagaccagcuccuggcccaaccacgacagcaacaagggggucaccgccgccugcccgcacgccggcgcgaaguccuucuacaagaaccugaucuggcucgugaagaaggggaacagcuaccccaagcuguccaagagcuacaucaacgacaagggcaaggaggugcugguccucugggggauccaccaccccagcaccuccgccgaccagcagagccuguaccagaacgccgacgccuacguguucgugggcacgucccgguacagcaagaaguucaagcccgagaucgccauccgcccgaagguccgggaccaggagggccgcaugaacuacuacuggacccugguggagcccggggacaagaucaccuucgaggcgaccggcaaccucguggucccccgguacgccuucgccauggagcgcaacgccggguccggcaucaucaucagcgacacgcccgugcacgacugcaacacgaccugccagaccccgaagggcgccaucaacaccucccugcccuuccagaacauccaccccaucaccaucgggaagugccccaaguacgucaagagcaccaagcugcggcucgcgaccggccugcgcaacgugccguccauccagagccgggggcuguucggcgccaucgccggguucaucgagggcggcuggacggggaugguggacggcugguacggguaccaccaccagaacgagcagggcuccggguacgccgccgaccucaagagcacccagaacgcgaucgacgagaucaccaacaaggugaacuccgucaucgagaagaugaacacccaguucacggccgugggcaaggaguucaaccaccuggagaagcgcaucgagaaccugaacaagaaggucgacgacggcuuccucgacaucuggaccuacaacgccgagcugcuggugcuccuggagaacgagcggacccuggacuaccacgacagcaacgugaagaaccucuacgagaagguccgcucccagcugaagaacaacgccaaggagaucgggaacggcugcuucgaguucuaccacaagugcgacaacacgugcauggagagcgugaagaacgggaccuacgacuaccccaaguacuccgaggaggccaagcugaaccgggaggagaucgacggcgugaagcucgagagcacccgcaucuaccagauccuggcgaucuacuccaccgucgccagcagccuggugcucguggucucccugggggccaucagcuucuggaugugcuccaacggcagccugcagugccggaucugcaucuga

SEQ ID NO: 66852 - RNA, 1701 nt, Artificial Sequence; identical to SEQ ID NO: 66693
  derived and/or modified CDS sequence (opt1) from hemagglutinin__InfluenzaA__ACR39463

SEQ ID NO: 66853 - RNA, 1701 nt, Artificial Sequence; identical to SEQ ID NO: 66693
  derived and/or modified CDS sequence (opt1) from hemagglutinin__InfluenzaA__ACR39473

SEQ ID NO: 66854 - RNA, 1701 nt, Artificial Sequence; identical to SEQ ID NO: 66693
  derived and/or modified CDS sequence (opt1) from hemagglutinin__InfluenzaA__ACR39483

SEQ ID NO: 66855 - RNA, 1701 nt, Artificial Sequence; identical to SEQ ID NO: 66693
  derived and/or modified CDS sequence (opt1) from hemagglutinin__InfluenzaA__ACR39493

SEQ ID NO: 66856 - RNA, 1701 nt, Artificial Sequence; identical to SEQ ID NO: 66693
  derived and/or modified CDS sequence (opt1) from hemagglutinin__InfluenzaA__ACR40288

SEQ ID NO: 66857 - RNA, 1701 nt, Artificial Sequence; identical to SEQ ID NO: 66693
  derived and/or modified CDS sequence (opt1) from hemagglutinin__InfluenzaA__ACR40298

SEQ ID NO: 66858 - RNA, 1701 nt, Artificial Sequence
  derived and/or modified CDS sequence (opt1) from hemagglutinin__InfluenzaA__ACR40308
augaaggccauccuggugguccuccuguacaccuucgccaccgcgaacgccgacacgcugugcaucggcuaccacgccaacaacagcaccgacaccguggacaccgugcucgagaagaacgucacggugacccacuccgugaaccugcuggaggacaagcacaacgggaagcucugcaagcugcgcggcgucgcgccccugcaccucgggaagugcaacaucgccggcuggauccuggggaacccggagugcgagagccuguccaccgccagcuccuggagcuacaucguggagaccuccagcuccgacaacggcacgugcuaccccggcgacuucaucgacuacgaggagcuccgggagcagcugagcuccgugagcuccuucgagcgcuucgagaucuuccccaagaccagcuccuggcccaaccacgacagcaacaagggggucaccgccgccugcccgcacgccggcgcgaaguccuucuacaagaaccugaucuggcucgugaagaaggggaacagcuaccccaagcuguccaagagcuacaucaacgacaagggcaaggaggugcugguccucugggggauccaccaccccagcaccuccgccgaccagcagagccuguaccagaacgccgacgccuacguguucgugggcuccagccgguacuccaagaaguucaagcccgagaucgccauccgcccgaagguccgggaccaggagggccgcaugaacuacuacuggacgcugguggagcccggggacaagaucaccuucgaggcgaccggcaaccucguggucccccgguacgccuucgccauggagcgcaacgccgggagcggcaucaucaucuccgacacccccgugcacgacugcaacacgaccugccagaccccgaagggcgccaucaacaccagccugcccuuccagaacaucuaccccaucacgaucgggaagugccccaaguacgugaaguccaccaagcugcggcucgcgaccggccugcgcaacgucccgagcauccagucccgggggcuguucggcgccaucgccggguucaucgagggcggcuggaccgggaugguggacggcugguacggguaccaccaccagaacgagcagggcagcggguacgccgccgaccucaaguccacgcagaacgcgaucgacgagaucaccaacaaggugaacagcgucaucgagaagaugaacacccaguucaccgccgugggcaaggaguucaaccaccuggagaagcgcaucgagaaccugaacaagaaggucgacgacggcuuccucgacaucuggacguacaacgccgagcugcuggugcuccuggagaacgagcggacccuggacuaccacgacuccaacgugaagaaccucuacgagaagguccgcagccagcugaagaacaacgccaaggagaucgggaacggcugcuucgaguucuaccacaagugcgacaacacgugcauggaguccgugaagaacgggaccuacgacuaccccaaguacagcgaggaggccaagcugaaccgggaggagaucgacggcgugaagcucgaguccacccgcaucuaccagauccuggcgaucuacagcaccgucgccagcucccuggugcucguggucagccugggggccaucuccuucuggaugugcagcaacggcucccugcagugccggaucugcaucuga

SEQ ID NO: 66859 - RNA, 1701 nt, Artificial Sequence; identical to SEQ ID NO: 66693
  derived and/or modified CDS sequence (opt1) from hemagglutinin__InfluenzaA__ACR40318

SEQ ID NO: 66860 - RNA, 1701 nt, Artificial Sequence; identical to SEQ ID NO: 66693
  derived and/or modified CDS sequence (opt1) from hemagglutinin__InfluenzaA__ACR40328

SEQ ID NO: 66861 - RNA, 1701 nt, Artificial Sequence; identical to SEQ ID NO: 66693
  derived and/or modified CDS sequence (opt1) from hemagglutinin__InfluenzaA__ACR40338

SEQ ID NO: 66862 - RNA, 1701 nt, Artificial Sequence; identical to SEQ ID NO: 66693
  derived and/or modified CDS sequence (opt1) from hemagglutinin__InfluenzaA__ACR40348

SEQ ID NO: 66863 - RNA, 1701 nt, Artificial Sequence; identical to SEQ ID NO: 66693
  derived and/or modified CDS sequence (opt1) from hemagglutinin__InfluenzaA__ACR40358

SEQ ID NO: 66864 - RNA, 1701 nt, Artificial Sequence; identical to SEQ ID NO: 66693
  derived and/or modified CDS sequence (opt1) from hemagglutinin__InfluenzaA__ACR40378

SEQ ID NO: 66865 - RNA, 1701 nt, Artificial Sequence; identical to SEQ ID NO: 66693
  derived and/or modified CDS sequence (opt1) from hemagglutinin__InfluenzaA__ACR40388

SEQ ID NO: 66866 - RNA, 1701 nt, Artificial Sequence; identical to SEQ ID NO: 66680
  derived and/or modified CDS sequence (opt1) from hemagglutinin__InfluenzaA__ACR46986

SEQ ID NO: 66867 - RNA, 1701 nt, Artificial Sequence; identical to SEQ ID NO: 66680
  derived and/or modified CDS sequence (opt1) from hemagglutinin__InfluenzaA__ACR46988

SEQ ID NO: 66868 - RNA, 1701 nt, Artificial Sequence; identical to SEQ ID NO: 66680
  derived and/or modified CDS sequence (opt1) from hemagglutinin__InfluenzaA__ACR46989

SEQ ID NO: 66869 - RNA, 1701 nt, Artificial Sequence; identical to SEQ ID NO: 66680
  derived and/or modified CDS sequence (opt1) from hemagglutinin__InfluenzaA__ACR46990

SEQ ID NO: 66870 - RNA, 1701 nt, Artificial Sequence; identical to SEQ ID NO: 66680
  derived and/or modified CDS sequence (opt1) from hemagglutinin__InfluenzaA__ACR46992

SEQ ID NO: 66871 - RNA, 1701 nt, Artificial Sequence; identical to SEQ ID NO: 66680
  derived and/or modified CDS sequence (opt1) from hemagglutinin__InfluenzaA__ACR46993

SEQ ID NO: 66872 - RNA, 1701 nt, Artificial Sequence; identical to SEQ ID NO: 66680
  derived and/or modified CDS sequence (opt1) from hemagglutinin__InfluenzaA__ACR46994

SEQ ID NO: 66873 - RNA, 1701 nt, Artificial Sequence
  derived and/or modified CDS sequence (opt1) from hemagglutinin__InfluenzaA__ACR47006
augaaggccauccuggugguccuccuguacaccuucgccaccgcgaacgccgacacgcugugcaucggcuaccacgccaacaacagcaccgacaccguggacaccgugcucgagaagaacgucacggugacccacuccgugaacauccuggaggacaagcacaacgggaagcugugcaagcuccgcggcgucgcgccccugcaccuggggaagugcaacaucgccggcuggauccucgggaacccggagugcgagagccuguccaccgccagcuccuggagcuacaucguggagaccuccagcuccgacaacggcacgugcuaccccggcgacuucaucgacuacgaggagcugcgggagcagcucagcuccgugagcuccuucgagcgcuucgagaucuuccccaagaccagcuccuggcccaaccacgacagcaacaagggggucaccgccgccugcccgcacgccggcgcgaaguccuucuacaagaaccugaucuggcuggugaagaaggggaacagcuaccccaagcucuccaagagcuacaucaacgacaagggcaaggaggugcugguccugugggggauccaccaccccagcaccuccgccgaccagcagagccucuaccagaacgccgacgccuacguguucgugggcuccagccgguacuccaagaaguucaagcccgagaucgccauccgcccgaagguccgggaccaggagggccgcaugaacuacuacuggacgcugguggagcccggggacaagaucaccuucgaggcgaccggcaaccugguggucccccgguacgccuucgccauggagcgcaacgccgggagcggcaucaucaucuccgacacccccgugcacgacugcaacacgaccugccagaccccgaagggcgccaucaacaccagccuccccuuccagaacauccaccccaucacgaucgggaagugccccaaguacgugaaguccaccaagcugcggcuggcgaccggccuccgcaacgucccgagcauccagucccgggggcuguucggcgccaucgccggguucaucgagggcggcuggaccgggaugguggacggcugguacggguaccaccaccagaacgagcagggcagcggguacgccgccgaccugaaguccacgcagaacgcgaucgacgagaucaccaacaaggugaacagcgucaucgagaagaugaacacccaguucaccgccgugggcaaggaguucaaccaccucgagaagcgcaucgagaaccugaacaagaaggucgacgacggcuuccuggacaucuggacguacaacgccgagcuccuggugcugcucgagaacgagcggacccuggacuaccacgacuccaacgugaagaaccuguacgagaagguccgcagccagcucaagaacaacgccaaggagaucgggaacggcugcuucgaguucuaccacaagugcgacaacacgugcauggaguccgugaagaacgggaccuacgacuaccccaaguacagcgaggaggccaagcugaaccgggaggagaucgacggcgugaagcuggaguccacccgcaucuaccagauccucgcgaucuacagcaccgucgccagcucccuggugcugguggucagccucggggccaucuccuucuggaugugcagcaacggcucccugcagugccggaucugcaucuga

SEQ ID NO: 66874 - RNA, 1701 nt, Artificial Sequence; identical to SEQ ID NO: 66693
  derived and/or modified CDS sequence (opt1) from hemagglutinin__InfluenzaA__ACR49281

SEQ ID NO: 66875 - RNA, 1701 nt, Artificial Sequence
  derived and/or modified CDS sequence (opt1) from hemagglutinin__InfluenzaA__ACR49282
augaaggccauccuggugguccuccuguacaccuucgccaccgcgaacgccgacacgcugugcaucggcuaccacgccaacaacagcaccgacaccguggacaccgugcucgagaagaacgucacggugacccacuccguggaccugcuggaggacaagcacaacgggaagcucugcaagcugcgcggcgucgcgccccugcaccucgggaagugcaacaucgccggcuggauccuggggaacccggagugcgagagccuguccaccgccagcuccuggagcuacaucguggagaccuccagcuccgacaacggcacgugcuaccccggcgacuucaucgacuacgaggagcuccgggagcagcugagcuccgugagcuccuucgagcgcuucgagaucuuccccaagaccagcuccuggcccaaccacgacagcaacaagggggucaccgccgccugcccgcacgccggcgcgaaguccuucuacaagaaccugaucuggcucgugaagaaggggaacagcuaccccaagcuguccaagagcuacaucaacgacaagggcaaggaggugcugguccucugggggauccaccaccccagcaccuccgccgaccagcagagccuguaccagaacgccgacgccuacguguucgugggcuccagccgguacuccaagaaguucaagcccgagaucgccauccgcccgaagguccgggaccaggagggccgcaugaacuacuacuggacgcugguggagcccggggacaagaucaccuucgaggcgaccggcaaccucguggucccccgguacgccuucgccauggagcgcaacgccgggagcggcaucaucaucuccgacacccccgugcacgacugcaacacgaccugccagaccccgaagggcgccaucaacaccagccugcccuuccagaacauccaccccaucacgaucgggaagugccccaaguacgugaaguccaccaagcugcggcucgcgaccggccugcgcaacgucccgagcauccagucccgggggcuguucggcgccaucgccggguucaucgagggcggcuggaccgggaugguggacggcugguacggguaccaccaccagaacgagcagggcagcggguacgccgccgaccucaaguccacgcagaacgcgaucgacgagaucaccaacaaggugaacagcgucaucgagaagaugaacacccaguucaccgccgugggcaaggaguucaaccaccuggagaagcgcaucgagaaccugaacaagaaggucgacgacggcuuccucgacaucuggacguacaacgccgagcugcuggugcuccuggagaacgagcggacccuggacuaccacgacuccaacgugaagaaccucuacgagaagguccgcagccagcugaagaacaacgccaaggagaucgggaacggcugcuucgaguucuaccacaagugcgacaacacgugcauggaguccgugaagaacgggaccuacgacuaccccaaguacagcgaggaggccaagcugaaccgggaggagaucgacggcgugaagcucgaguccacccgcaucuaccagauccuggcgaucuacagcaccgucgccagcucccuggugcucguggucagccugggggccaucuccuucuggaugugcagcaacggcucccugcagugccggaucugcaucuga

SEQ ID NO: 66876 - RNA, 1701 nt, Artificial Sequence; identical to SEQ ID NO: 66680
  derived and/or modified CDS sequence (opt1) from hemagglutinin__InfluenzaA__ACR49283

SEQ ID NO: 66877 - RNA, 1701 nt, Artificial Sequence; identical to SEQ ID NO: 66680
  derived and/or modified CDS sequence (opt1) from hemagglutinin__InfluenzaA__ACR49288

SEQ ID NO: 66878 - RNA, 1701 nt, Artificial Sequence; identical to SEQ ID NO: 66719
  derived and/or modified CDS sequence (opt1) from hemagglutinin__InfluenzaA__ACR49290

SEQ ID NO: 66879 - RNA, 1701 nt, Artificial Sequence; identical to SEQ ID NO: 66693
  derived and/or modified CDS sequence (opt1) from hemagglutinin__InfluenzaA__ACR49291

SEQ ID NO: 66880 - RNA, 1701 nt, Artificial Sequence; identical to SEQ ID NO: 66719
  derived and/or modified CDS sequence (opt1) from hemagglutinin__InfluenzaA__ACR49293

SEQ ID NO: 66881 - RNA, 1701 nt, Artificial Sequence; identical to SEQ ID NO: 66719
  derived and/or modified CDS sequence (opt1) from hemagglutinin__InfluenzaA__ACR49295

SEQ ID NO: 66882 - RNA, 1701 nt, Artificial Sequence; identical to SEQ ID NO: 66733
  derived and/or modified CDS sequence (opt1) from hemagglutinin__InfluenzaA__ACR50993

SEQ ID NO: 66883 - RNA, 1701 nt, Artificial Sequence; identical to SEQ ID NO: 66693
  derived and/or modified CDS sequence (opt1) from hemagglutinin__InfluenzaA__ACR50995

SEQ ID NO: 66884 - RNA, 1701 nt, Artificial Sequence; identical to SEQ ID NO: 66693
  derived and/or modified CDS sequence (opt1) from hemagglutinin__InfluenzaA__ACR51005

SEQ ID NO: 66885 - RNA, 1701 nt, Artificial Sequence; identical to SEQ ID NO: 66693
  derived and/or modified CDS sequence (opt1) from hemagglutinin__InfluenzaA__ACR51015

SEQ ID NO: 66886 - RNA, 1701 nt, Artificial Sequence; identical to SEQ ID NO: 66693
  derived and/or modified CDS sequence (opt1) from hemagglutinin__InfluenzaA__ACR51025

SEQ ID NO: 66887 - RNA, 1701 nt, Artificial Sequence; identical to SEQ ID NO: 66693
  derived and/or modified CDS sequence (opt1) from hemagglutinin__InfluenzaA__ACR51035

SEQ ID NO: 66888 - RNA, 1701 nt, Artificial Sequence; identical to SEQ ID NO: 66693
  derived and/or modified CDS sequence (opt1) from hemagglutinin__InfluenzaA__ACR51045

SEQ ID NO: 66889 - RNA, 1701 nt, Artificial Sequence; identical to SEQ ID NO: 66693
  derived and/or modified CDS sequence (opt1) from hemagglutinin__InfluenzaA__ACR51055

SEQ ID NO: 66890 - RNA, 1701 nt, Artificial Sequence; identical to SEQ ID NO: 66680
  derived and/or modified CDS sequence (opt1) from hemagglutinin__InfluenzaA__ACR51065

SEQ ID NO: 66891 - RNA, 1701 nt, Artificial Sequence; identical to SEQ ID NO: 66693
  derived and/or modified CDS sequence (opt1) from hemagglutinin__InfluenzaA__ACR52368

SEQ ID NO: 66892 - RNA, 1701 nt, Artificial Sequence; identical to SEQ ID NO: 66693
  derived and/or modified CDS sequence (opt1) from hemagglutinin__InfluenzaA__ACR52378

SEQ ID NO: 66893 - RNA, 1701 nt, Artificial Sequence; identical to SEQ ID NO: 66693
  derived and/or modified CDS sequence (opt1) from hemagglutinin__InfluenzaA__ACR52398

SEQ ID NO: 66894 - RNA, 1701 nt, Artificial Sequence; identical to SEQ ID NO: 66693
  derived and/or modified CDS sequence (opt1) from hemagglutinin__InfluenzaA__ACR52408

SEQ ID NO: 66895 - RNA, 1701 nt, Artificial Sequence; identical to SEQ ID NO: 66693
  derived and/or modified CDS sequence (opt1) from hemagglutinin__InfluenzaA__ACR52418

SEQ ID NO: 66896 - RNA, 1701 nt, Artificial Sequence; identical to SEQ ID NO: 66693
  derived and/or modified CDS sequence (opt1) from hemagglutinin__InfluenzaA__ACR52428

SEQ ID NO: 66897 - RNA, 1701 nt, Artificial Sequence; identical to SEQ ID NO: 66693
  derived and/or modified CDS sequence (opt1) from hemagglutinin__InfluenzaA__ACR52438

SEQ ID NO: 66898 - RNA, 1701 nt, Artificial Sequence; identical to SEQ ID NO: 66693
  derived and/or modified CDS sequence (opt1) from hemagglutinin__InfluenzaA__ACR52448

SEQ ID NO: 66899 - RNA, 1701 nt, Artificial Sequence; identical to SEQ ID NO: 66693
  derived and/or modified CDS sequence (opt1) from hemagglutinin__InfluenzaA__ACR52458

SEQ ID NO: 66900 - RNA, 1701 nt, Artificial Sequence; identical to SEQ ID NO: 66693
  derived and/or modified CDS sequence (opt1) from hemagglutinin__InfluenzaA__ACR52468

SEQ ID NO: 66901 - RNA, 1701 nt, Artificial Sequence; identical to SEQ ID NO: 66693
  derived and/or modified CDS sequence (opt1) from hemagglutinin__InfluenzaA__ACR52478

SEQ ID NO: 66902 - RNA, 1701 nt, Artificial Sequence; identical to SEQ ID NO: 66693
  derived and/or modified CDS sequence (opt1) from hemagglutinin__InfluenzaA__ACR52488

SEQ ID NO: 66903 - RNA, 1701 nt, Artificial Sequence; identical to SEQ ID NO: 66693
  derived and/or modified CDS sequence (opt1) from hemagglutinin__InfluenzaA__ACR54045

SEQ ID NO: 66904 - RNA, 1701 nt, Artificial Sequence
  derived and/or modified CDS sequence (opt1) from hemagglutinin__InfluenzaA__ACR54047
augaaggccauccuggugguccuccuguacaccuucgccaccgcgaacgccgacacgcugugcaucggcuaccacgccaacaacagcaccgacaccguggacaccgugcucgagaagaacgucacggugacccacuccgugaaccugcuggaggacaagcacaacgggaagcucugcaagcugcgcggcgucgcgccccugcaccucgggaagugcaacaucgccggcuggauccuggggaacccggagugcgagagccuguccaccgccagcuccuggagcuacaucguggagaccuccagcuccgacaacggcacgugcuaccccggcgacuucaucgacuacgaggagcuccgggagcagcugagcuccgugagcuccuucgagcgcuucgagaucuuccccaagaccagcuccuggcccaaccacgacagcaacaagggggucaccgccgccugcccgcacgccggcgcgaaguccuucuacaagaaccugaucuggcucgugaagaaggggaacagcuaccccaagcuguccaagagcuacaucaacgacaagggcaaggaggugcugguccucugggggauccaccaccccagcaccuccgccgaccagcagagccuguaccagaacgccgacgccuacguguucgugggcuccagccgguacuccaagaaguucaagcccgagaucgccauccgcccgaagguccgggaccaggagggccgcaugaacuacuacuggacgcugguggagcccggggacaagaucaccuucgaggcgaccggcaaccucguggucccccgguacgccuucgccauggagcgcaacgccgggagcggcaucaucaucuccgacacccccgugcacgacugcaacacgaccugccagaccccgaagggcgccaucaacaccagccugcccuuccagaacauccaccccaucacgaucgggaagugccccaaguacgugaaguccaccaagcugcggcucgcgaccggccugcgcaacgucccgagcauccagucccgggggcuguucggcgccaucgccggguucaucgagggcggcuggaccgggaugguggacggcugguacggguaccaccaccagaacgagcagggcagcggguacgccgccgaccucaaguccacgcagaacgcgaucgacgagaucaccaacaaggugaacagcgucaucgagaagaugaacacccaguucaccgccgugggcaaggaguucaaccaccuggagaagcgcaucgagaaccugaacaagaaggucgacgacggcuuccucgacaucuggacguacaacgccgagcugcuggugcuccuggagaacgagcggacccuggacuaccacgacuccaacgugaagaaccucuacgagaagguccgcagccagcugaagaacaacgccaaggagaucgggaacggcugcuucgaguucuaccacaagugcgacaacacgugcauggaguccgugaagaacgggaccuacgacuaccccaaguacagcgaggaggccaagcugaaccgggaggagaucgacggcaucaagcucgaguccacccgcaucuaccagauccuggcgaucuacagcaccguggccagcucccugguccucguggugagccugggggccaucuccuucuggaugugcagcaacggcucccugcagugccggaucugcaucuga

SEQ ID NO: 66905 - RNA, 1701 nt, Artificial Sequence
  derived and/or modified CDS sequence (opt1) from hemagglutinin__InfluenzaA__ACR54964
augaaggccauccuggugguccuccuguacaccuucgccaccgcgaacgccgacacgcugugcaucggcuaccacgccaacaacagcaccgacaccguggacaccgugcucgagaagaacgucacggugacccacuccgugaaccugcuggaggacaagcacaacgggaagcucugcaagcugcgcggcgucgcgccccugcaccucgggaagugcaacaucgccggcuggauccuggggaacccggagugcgagagccuguccaccgccagcuccuggagcuacaucguggagaccuccagcuccgacaacggcacgugcuaccccggcgacuucaucgacuacgaggagcuccgggagcagcugagcuccgugagcuccuucgagcgcuucgagaucuuccccaagaccagcuccuggcccaaccacgacagcaacaagggggucaccgccgccugcccgcacgccggcgcgaaguccuucuacaagaaccugaucuggcucgugaagaaggggaacagcuaccccaagcuguccaagagcuacaucaacgacaagggcaaggaggugcugguccucugggggauccaccaccccagcaccuccgccgaccagcagagccuguaccagaacgccgacgccuacguguucgugggcacgucccgguacagcaagaaguucaagcccgagaucgccauccgcccgaagguccgggaccaggagggccgcaugaacuacuacuggacccugguggagcccggggacaagaucaccuucgaggcgaccggcaaccucguggucccccgguacgccuucgccauggagcgcaacgccggguccggcaucaucaucagcgacacgcccgugcacgacugcaacacgaccugccagaccccgaagggcgccaucaacaccucccugcccuuccagaacauccaccccaucaccaucgggaagugccccaaguacgucaagagcaccaagcugcggcucgcgaccggccugcgcaacgugccguccauccagagccgggggcuguucggcgccaucgccggguucaucgagggcggcuggacggggaugguggacggcugguacggguaccaccaccagaacgagcagggcuccggguacgccgccgaccucaagagcacccagaacgcgaucgacgagaucaccaacaaggugaacuccgucaucgagaagaugaacacccaguucaucgccgugggcaaggaguucaaccaccuggagaagcgcaucgagaaccugaacaagaaggucgacgacggcuuccucgacaucuggacguacaacgccgagcugcuggugcuccuggagaacgagcggacccuggacuaccacgacagcaacgugaagaaccucuacgagaagguccgcucccagcugaagaacaacgccaaggagaucgggaacggcugcuucgaguucuaccacaagugcgacaacacgugcauggagagcgugaagaacgggaccuacgacuaccccaaguacuccgaggaggccaagcugaaccgggaggagaucgacggcgugaagcucgagagcacccgcaucuaccagauccuggcgaucuacuccaccgucgccagcagccuggugcucguggucucccugggggccaucagcuucuggaugugcuccaacggcagccugcagugccggaucugcaucuga

SEQ ID NO: 66906 - RNA, 1701 nt, Artificial Sequence; identical to SEQ ID NO: 66784
  derived and/or modified CDS sequence (opt1) from hemagglutinin__InfluenzaA__ACR54974

SEQ ID NO: 66907 - RNA, 1701 nt, Artificial Sequence; identical to SEQ ID NO: 66693
  derived and/or modified CDS sequence (opt1) from hemagglutinin__InfluenzaA__ACR54984

SEQ ID NO: 66908 - RNA, 1701 nt, Artificial Sequence; identical to SEQ ID NO: 66680
  derived and/or modified CDS sequence (opt1) from hemagglutinin__InfluenzaA__ACR54994

SEQ ID NO: 66909 - RNA, 1701 nt, Artificial Sequence; identical to SEQ ID NO: 66680
  derived and/or modified CDS sequence (opt1) from hemagglutinin__InfluenzaA__ACR55004

SEQ ID NO: 66910 - RNA, 1701 nt, Artificial Sequence; identical to SEQ ID NO: 66873
  derived and/or modified CDS sequence (opt1) from hemagglutinin__InfluenzaA__ACR56380

SEQ ID NO: 66911 - RNA, 1701 nt, Artificial Sequence; identical to SEQ ID NO: 66746
  derived and/or modified CDS sequence (opt1) from hemagglutinin__InfluenzaA__ACR56390

SEQ ID NO: 66912 - RNA, 1701 nt, Artificial Sequence; identical to SEQ ID NO: 66693
  derived and/or modified CDS sequence (opt1) from hemagglutinin__InfluenzaA__ACR56400

SEQ ID NO: 66913 - RNA, 1701 nt, Artificial Sequence; identical to SEQ ID NO: 66693
  derived and/or modified CDS sequence (opt1) from hemagglutinin__InfluenzaA__ACR56410

SEQ ID NO: 66914 - RNA, 1701 nt, Artificial Sequence; identical to SEQ ID NO: 66693
  derived and/or modified CDS sequence (opt1) from hemagglutinin__InfluenzaA__ACR56420

SEQ ID NO: 66915 - RNA, 1701 nt, Artificial Sequence; identical to SEQ ID NO: 66693
  derived and/or modified CDS sequence (opt1) from hemagglutinin__InfluenzaA__ACR56430

SEQ ID NO: 66916 - RNA, 1701 nt, Artificial Sequence; identical to SEQ ID NO: 66693
  derived and/or modified CDS sequence (opt1) from hemagglutinin__InfluenzaA__ACR56440

SEQ ID NO: 66917 - RNA, 1698 nt, Artificial Sequence
  derived and/or modified CDS sequence (opt1) from hemagglutinin__InfluenzaA__ACR58541
augaaggugaagcugcucguccugcugugcaccuucaccgccacguacgccgacaccaucugcaucggcuaccacgcgaacaacagcaccgacaccguggacacggugcucgagaagaacgucaccgugacccacuccgugaaccugcuggagaacagccacaacgggaagcucugccugcugaagggcaucgcgccccuccagcuggggaacugcuccgucgccggcuggauccuggggaacccggagugcgagcuccugaucagcaaggaguccuggagcuacaucguggagaagcccaaccccgagaacgggaccugcuaccccggccacuucgccgacuacgaggagcugcgcgagcagcucuccagcguguccagcuucgagcgguucgagaucuucccgaaggaguccagcuggcccaaccacacggucaccggcguguccgccagcugcucccacaacggcgagagcuccuucuaccgcaaccugcuguggcucacccggaagaacgggcuguaccccaaccugagcaaguccuacgccaacaacaaggagaaggaggugcucguccuguggggcgugcaccacccgcccaacaucggggaccagaaggcccuguaccacaccgagaacgccuacgugagcgucgugagcucccacuacagccgcaaguucacgcccgagaucgccaagcggcccaaggugcgcgaccaggagggccggaucaacuacuacuggacccuccuggagcccggcgacaccaucaucuucgaggcgaacgggaaccugaucgccccgcgcuacgccuucgcccucucccggggcuucgggagcggcaucaucaacuccaacgcccccauggacaagugcgacgcgaagugccagacgccccagggcgccaucaacagcucccugcccuuccagaacguccacccggugaccaucggggagugccccaaguacgugcgcagcgccaagcugcggauggucaccggccuccgcaacauccccuccauccagagccgggggcuguucggcgccaucgccggguucaucgagggcggcuggaccgggaugguggacggcugguacggguaccaccaccagaacgagcagggcuccggguacgcggccgaccagaaguccacccagaacgccaucaacggcaucacgaacaaggugaacagcgucaucgacaagaugaacacccaguucaccgccgugggcaaggaguucaacaagcuggagcgccggauggagaaccucaacaagaaggucgacgacggguucaucgacaucuggaccuacaacgccgagcugcuggugcuccuggagaacgagcgcacgcuggacuuccacgacagcaacgugaagaaccucuacgagaaggucaagucccagcugaagaacaacgcgaaggagaucggcaacgggugcuucgaguucuaccacaagugcaacgacgagugcauggagagcgugaagaacggcaccuacgacuaccccaaguacuccgaggagagcaagcugaaccgggagaagaucgacggggugaagcucgaguccaugggcgucuaccagauccuggccaucuacagcaccguggccagcucccuggugcuccuggucagccugggcgccaucuccuucuggaugugcagcaacgggucccuccagugccgcaucugcaucuga

SEQ ID NO: 66918 - RNA, 1698 nt, Artificial Sequence; identical to SEQ ID NO: 65938
  derived and/or modified CDS sequence (opt1) from hemagglutinin__InfluenzaA__ACR61655

SEQ ID NO: 66919 - RNA, 1698 nt, Artificial Sequence; identical to SEQ ID NO: 65954
  derived and/or modified CDS sequence (opt1) from hemagglutinin__InfluenzaA__ACR61666

SEQ ID NO: 66920 - RNA, 1701 nt, Artificial Sequence; identical to SEQ ID NO: 66458
  derived and/or modified CDS sequence (opt1) from hemagglutinin__InfluenzaA__ACR61677

SEQ ID NO: 66921 - RNA, 1701 nt, Artificial Sequence; identical to SEQ ID NO: 66458
  derived and/or modified CDS sequence (opt1) from hemagglutinin__InfluenzaA__ACR61688

SEQ ID NO: 66922 - RNA, 1701 nt, Artificial Sequence; identical to SEQ ID NO: 66458
  derived and/or modified CDS sequence (opt1) from hemagglutinin__InfluenzaA__ACR61699

SEQ ID NO: 66923 - RNA, 1701 nt, Artificial Sequence; identical to SEQ ID NO: 66680
  derived and/or modified CDS sequence (opt1) from hemagglutinin__InfluenzaA__ACR67170

SEQ ID NO: 66924 - RNA, 1701 nt, Artificial Sequence; identical to SEQ ID NO: 66719
  derived and/or modified CDS sequence (opt1) from hemagglutinin__InfluenzaA__ACR67171

SEQ ID NO: 66925 - RNA, 1701 nt, Artificial Sequence; identical to SEQ ID NO: 66680
  derived and/or modified CDS sequence (opt1) from hemagglutinin__InfluenzaA__ACR67172

SEQ ID NO: 66926 - RNA, 1701 nt, Artificial Sequence; identical to SEQ ID NO: 66680
  derived and/or modified CDS sequence (opt1) from hemagglutinin__InfluenzaA__ACR67177

SEQ ID NO: 66927 - RNA, 1701 nt, Artificial Sequence; identical to SEQ ID NO: 66680
  derived and/or modified CDS sequence (opt1) from hemagglutinin__InfluenzaA__ACR67181

SEQ ID NO: 66928 - RNA, 1701 nt, Artificial Sequence
  derived and/or modified CDS sequence (opt1) from hemagglutinin__InfluenzaA__ACR67183
augaaggccauccuggugguccuccuguacaccuucgccaccgcgaacgccgacacgcugugcaucggcuaccacgccaacaacagcaccgacaccguggacaccgugcucgagaagaacgucacggugacccacuccgugaaccugcuggaggacaagcacaacgggaagcucugcaagcugcgcggcgucgcgccccugcaccucgggaagugcaacaucgccggcuggauccuggggaacccggagugcgagagccuguccaccgccagcuccuggagcuacaucguggagaccuccagcuccgacaacggcacgugcuaccccggcgacuucaucgacuacgaggagcuccgggagcagcugagcuccgugagcuccuucgagcgcuucgagaucuuccccaagaccagcuccuggcccaaccacgacagcaacaagggggucaccgccgccugcccgcacgccggcgcgaaguccuucuacaagaaccugaucuggcucgugaagaaggggaacagcuaccccaagcuguccaagagcuacaucaacgacaagggcaaggaggugcugguccucugggggauccaccaccccagcaccuccgccgaccagcagagccuguaccagaacgccgacgccuacguguucgugggcuccagccgguacuccaagaaguucaagcccgagaucgccauccgcccgaagguccgggaccgcgagggccggaugaacuacuacuggacgcugguggagcccggggacaagaucaccuucgaggcgaccggcaaccucguggucccccgcuacgccuucgccauggagcggaacgccgggagcggcaucaucaucuccgacacccccgugcacgacugcaacacgaccugccagaccccgaagggcgccaucaacaccagccugcccuuccagaacauccaccccaucacgaucgggaagugccccaaguacgugaaguccaccaagcugcgccucgcgaccggccugcggaacgucccgagcauccagucccgcgggcuguucggcgccaucgccggguucaucgagggcggcuggaccgggaugguggacggcugguacggguaccaccaccagaacgagcagggcagcggguacgccgccgaccucaaguccacgcagaacgcgaucgacgagaucaccaacaaggugaacagcgucaucgagaagaugaacacccaguucaccgccgugggcaaggaguucaaccaccuggagaagcggaucgagaaccugaacaagaaggucgacgacggcuuccucgacaucuggacguacaacgccgagcugcuggugcuccuggagaacgagcgcacccuggacuaccacgacuccaacgugaagaaccucuacgagaagguccggagccagcugaagaacaacgccaaggagaucgggaacggcugcuucgaguucuaccacaagugcgacaacacgugcauggaguccgugaagaacgggaccuacgacuaccccaaguacagcgaggaggccaagcugaaccgcgaggagaucgacggcgugaagcucgaguccacccggaucuaccagauccuggcgaucuacagcaccgucgccagcucccuggugcucguggucagccugggggccaucuccuucuggaugugcagcaacggcucccugcagugccgcaucugcaucuga

SEQ ID NO: 66929 - RNA, 1701 nt, Artificial Sequence; identical to SEQ ID NO: 66693
  derived and/or modified CDS sequence (opt1) from hemagglutinin__InfluenzaA__ACR67184

SEQ ID NO: 66930 - RNA, 1701 nt, Artificial Sequence; identical to SEQ ID NO: 66680
  derived and/or modified CDS sequence (opt1) from hemagglutinin__InfluenzaA__ACR67185

SEQ ID NO: 66931 - RNA, 1701 nt, Artificial Sequence; identical to SEQ ID NO: 66873
  derived and/or modified CDS sequence (opt1) from hemagglutinin__InfluenzaA__ACR67186

SEQ ID NO: 66932 - RNA, 1701 nt, Artificial Sequence; identical to SEQ ID NO: 66680
  derived and/or modified CDS sequence (opt1) from hemagglutinin__InfluenzaA__ACR67187

SEQ ID NO: 66933 - RNA, 1701 nt, Artificial Sequence; identical to SEQ ID NO: 66719
  derived and/or modified CDS sequence (opt1) from hemagglutinin__InfluenzaA__ACR67188

SEQ ID NO: 66934 - RNA, 1701 nt, Artificial Sequence; identical to SEQ ID NO: 66719
  derived and/or modified CDS sequence (opt1) from hemagglutinin__InfluenzaA__ACR67189

SEQ ID NO: 66935 - RNA, 1701 nt, Artificial Sequence
  derived and/or modified CDS sequence (opt1) from hemagglutinin__InfluenzaA__ACR67190
auggaggccauccuggugguccuccuguacaccuucgccaccgcgaacgccgacacgcugugcaucggcuaccacgccaacaacagcaccgacaccguggacaccgugcucgagaagaacgucacggugacccacuccgugaaccugcuggaggacaagcacaacgggaagcucugcaagcugcgcggcgucgcgccccugcaccucgggaagugcaacaucgccggcuggauccuggggaacccggagugcgagagccuguccaccgccagcuccuggagcuacaucguggagaccuccagcuccgacaacggcacgugcuaccccggcgacuucaucgacuacgaggagcuccgggagcagcugagcuccgugagcuccuucgagcgcuucgagaucuuccccaagaccagcuccuggcccaaccacgacagcaacaagggggucaccgccgccugcccgcacgccggcgcgaaguccuucuacaagaaccugaucuggcucgugaagaaggggaacagcuaccccaagcuguccaagagcuacaucaacgacaagggcaaggaggugcugguccucugggggauccaccaccccagcaccuccgccgaccagcagagccuguaccagaacgccgacgccuacguguucgugggcuccagccgguacuccaagaaguucaagcccgagaucgccauccgcccgaagguccgggaccaggagggccgcaugaacuacuacuggacgcugguggagcccggggacaagaucaccuucgaggcgaccggcaaccucguggucccccgguacgccuucgccauggagcgcaacgccgggagcggcaucaucaucuccgacacccccgugcacgacugcaacacgaccugccagaccccgaagggcgccaucaacaccagccugcccuuccacaacauccaccccaucacgaucgggaagugccccaaguacgugaaguccaccaagcugcggcucgcgaccggccugcgcaacgucccgagcauccagucccgggggcuguucggcgccaucgccggguucaucgagggcggcuggaccgggaugguggacggcugguacggguaccaccaccagaacgagcagggcagcggguacgccgccgaccucaaguccacgcagaacgcgaucgacgagaucaccaacaaggugaacagcgucaucgagaagaugaacacccaguucaccgccgugggcaaggaguucaaccaccuggagaagcgcaucgagaaccugaacaagaaggucgacgacggcuuccucgacaucuggacguacaacgccgagcugcuggugcuccuggagaacgagcggacccuggacuaccacgacuccaacgugaagaaccucuacgagaagguccgcagccagcugaagaacaacgccaaggagaucgggaacggcugcuucgaguucuaccacaagugcgacaacacgugcauggaguccgugaagaacgggaccuacgacuaccccaaguacagcgaggaggccaagcugaaccgggaggagaucgacggcgugaagcucgaguccacccgcaucuaccagauccuggcgaucuacagcaccgucgccagcucccuggugcucguggucagccugggggccaucuccuucuggaugugcagcaacggcucccugcagugccggaucugcaucuga

SEQ ID NO: 66936 - RNA, 1701 nt, Artificial Sequence; identical to SEQ ID NO: 66680
  derived and/or modified CDS sequence (opt1) from hemagglutinin__InfluenzaA__ACR67192

SEQ ID NO: 66937 - RNA, 1701 nt, Artificial Sequence
  derived and/or modified CDS sequence (opt1) from hemagglutinin__InfluenzaA__ACR67193
augaaggccauccuggugguccuccuguacaccuucgccaccgcgaacgccgacacgcugugcaucggcuaccacgccaacaacagcaccgacaccguggacaccgugcucgagaagaacgucacggugacccacuccgugaacauccuggaggacaagcacaacgggaagcugugcaagcuccgcggcgucgcgccccugcaccuggggaagugcaacaucgccggcuggauccucgggaacccggagugcgagagccuguccaccgccagcuccuggagcuacaucguggagaccuccagcuccgacaacggcacgugcuaccccggcgacuucaucgacuacgaggagcugcgggagcagcucagcuccgugagcuccuucgagcgcuucgagaucuuccccaagaccagcuccuggcccaaccacgacagcaacaagggggucaccgccgccugcccgcacgccggcgcgaaguccuucuacaagaaccugaucuggcuggugaagaaggggaacagcuaccccaagcucuccaagagcuacaucaacgacaagggcaaggaggugcugguccugugggggauccaccaccccagcaccuccgccgaccagcagagccucuaccagaacgccgacgccuacguguucgugggcuccagccgguacuccaagaaguucaagcccgagaucgccauccgcccgaagguccgggaccaggagggccgcaugaacuacuacuggacgcugguggagcccggggacaagaucaccuucgaggcgaccggcaaccugguggucccccgguacgccuucgccauggagcgcaacgccgggagcggcaucaucaucuccgacacccccgugcacgagugcaacacgaccugccagaccccgaagggcgccaucaacaccagccuccccuuccagaacauccaccccaucacgaucgggaagugccccaaguacgugaaguccaccaagcugcggcuggcgaccggccuccgcaacgucccgagcauccagucccgggggcuguucggcgccaucgccggguucaucgagggcggcuggaccgggaugguggacggcugguacggguaccaccaccagaacgagcagggcagcggguacgccgccgaccugaaguccacgcagaacgcgaucgacgagaucaccaacaaggugaacagcgucaucgagaagaugaacacccaguucaccgccgugggcaaggaguucaaccaccucgagaagcgcaucgagaaccugaacaagaaggucgacgacggcuuccuggacaucuggacguacaacgccgagcuccuggugcugcucgagaacgagcggacccuggacuaccacgacuccaacgugaagaaccuguacgagaagguccgcagccagcucaagaacaacgccaaggagaucgggaacggcugcuucgaguucuaccacaagugcgacaacacgugcauggaguccgugaagaacgggaccuacgacuaccccaaguacagcgaggaggccaagcugaaccgggaggagaucgacggcgugaagcuggaguccacccgcaucuaccagauccucgcgaucuacagcaccgucgccagcucccuggugcugguggucagccucggggccaucuccuucuggaugugcagcaacggcucccugcagugccggaucugcaucuga

SEQ ID NO: 66938 - RNA, 1701 nt, Artificial Sequence; identical to SEQ ID NO: 66680
  derived and/or modified CDS sequence (opt1) from hemagglutinin__InfluenzaA__ACR67195

SEQ ID NO: 66939 - RNA, 1701 nt, Artificial Sequence; identical to SEQ ID NO: 66680
  derived and/or modified CDS sequence (opt1) from hemagglutinin__InfluenzaA__ACR67197

SEQ ID NO: 66940 - RNA, 1701 nt, Artificial Sequence; identical to SEQ ID NO: 66937
  derived and/or modified CDS sequence (opt1) from hemagglutinin__InfluenzaA__ACR67198

SEQ ID NO: 66941 - RNA, 1701 nt, Artificial Sequence; identical to SEQ ID NO: 66680
  derived and/or modified CDS sequence (opt1) from hemagglutinin__InfluenzaA__ACR67199

SEQ ID NO: 66942 - RNA, 1701 nt, Artificial Sequence; identical to SEQ ID NO: 66693
  derived and/or modified CDS sequence (opt1) from hemagglutinin__InfluenzaA__ACR67244

SEQ ID NO: 66943 - RNA, 1701 nt, Artificial Sequence
  derived and/or modified CDS sequence (opt1) from hemagglutinin__InfluenzaA__ACR67254
augaaggccauccuggugguccuccuguacaccuucgccaccgcgaacgccgacacgcugugcaucggcuaccacgccaacaacagcaccgacaccguggacaccgugcucgagaagaacgucacggugacccacuccgugaaccugcuggaggacaagcacaacgggaagcucugcaagcugcgcggcgucgcgccccugcaccucgggaagugcaacaucgccggcuggauccuggggaacccggagugcgagagccuguccaccgccagcuccuggagcuacaucguggagaccuccagcuccgacaacggcacgugcuaccccggcgacuucaucgacuacgaggagcuccgggagcagcugagcuccgugagcuccuucgagcgcuucgagaucuuccccaagaccagcuccuggcccaaccacgacagcaacaagggggucaccgccgccugcccgcacgccggcgcgaaguccuucuacaagaaccugaucuggcucgugaagaaggggaacagcuaccccaagcuguccaagagcuacaucaacgacaagggcaaggaggugcugguccucugggggauccaccaccccagcaccuccgccgaccagcagagccuguaccagaacgccgacgccuacguguucgugggcuccagccgguacuccaagaaguucaagcccgagaucgccauccgcccgaagguccgggaccaggagggccgcaugaacuacuacuggacgcugguggagcccggggacaagaucaccuucgaggcgaccggcaaccucguggucccccgguacgccuucgccauggagcgcaacguggggagcggcaucaucaucuccgacacccccgugcacgacugcaacacgaccugccagaccccgaagggcgccaucaacaccagccugcccuuccagaacauccaccccaucacgaucgggaagugccccaaguacgucaaguccaccaagcugcggcucgccaccggccugcgcaacgugccgagcauccagucccgggggcuguucggcgcgaucgccggguucaucgagggcggcuggaccgggaugguggacggcugguacggguaccaccaccagaacgagcagggcagcggguacgccgccgaccucaaguccacgcagaacgccaucgacgagaucaccaacaaggucaacagcgugaucgagaagaugaacacccaguucaccgcggucggcaaggaguucaaccaccuggagaagcgcaucgagaaccugaacaagaagguggacgacggcuuccucgacaucuggacguacaacgccgagcugcuggugcuccuggagaacgagcggacccuggacuaccacgacuccaacgucaagaaccucuacgagaaggugcgcagccagcugaagaacaacgccaaggagaucgggaacggcugcuucgaguucuaccacaagugcgacaacacgugcauggaguccgugaagaacgggaccuacgacuaccccaaguacagcgaggaggccaagcugaaccgggaggagaucgacggcgucaagcucgaguccacccgcaucuaccagauccuggccaucuacagcaccguggcgagcucccuggugcucgucgugagccugggggccaucuccuucuggaugugcagcaacggcucccugcagugccggaucugcaucuga

SEQ ID NO: 66944 - RNA, 1701 nt, Artificial Sequence; identical to SEQ ID NO: 66693
  derived and/or modified CDS sequence (opt1) from hemagglutinin__InfluenzaA__ACR77438

SEQ ID NO: 66945 - RNA, 1701 nt, Artificial Sequence; identical to SEQ ID NO: 66693
  derived and/or modified CDS sequence (opt1) from hemagglutinin__InfluenzaA__ACR77448

SEQ ID NO: 66946 - RNA, 1701 nt, Artificial Sequence
  derived and/or modified CDS sequence (opt1) from hemagglutinin__InfluenzaA__ACR77458
augaaggccauccuggugguccuccuguacaccuucgccaccgcgaacgccgacacgcugugcaucggcuaccacgccaacaacagcaccgacaccguggacaccgugcucgagaagaacgucacggugacccacuccgugaaccugcuggaggacaagcacaacgggaagcucugcaagcugcgcggcgucgcgccccugcaccucgacaagugcaacaucgccggguggauccugggcaacccggagugcgagagccuguccaccgccagcuccuggagcuacaucguggagaccuccagcuccgacaacgggacgugcuaccccggcgacuucaucgacuacgaggagcuccgggagcagcugagcuccgugagcuccuucgagcgcuucgagaucuuccccaagaccagcuccuggcccaaccacgacagcaacaagggcgucaccgccgccugcccgcacgccggggcgaaguccuucuacaagaaccugaucuggcucgugaagaagggcaacagcuaccccaagcuguccaagagcuacaucaacgacaaggggaaggaggugcugguccucuggggcauccaccaccccagcaccuccgccgaccagcagagccuguaccagaacgccgacgccuacguguucguggggacgucccgguacagcaagaaguucaagcccgagaucgccauccgcccgaagguccgggaccaggagggccgcaugaacuacuacuggacccugguggagcccggcgacaagaucaccuucgaggcgaccgggaaccucguggucccccgguacgccuucgccauggagcgcaacgccggcuccgggaucaucaucagcgacacgcccgugcacgacugcaacacgaccugccagaccccgaagggcgccaucaacaccucccugcccuuccagaacauccaccccaucaccaucggcaagugccccaaguacgucaagagcaccaagcugcggcucgcgaccgggcugcgcaacgugccguccauccagagccggggccuguucggggccaucgccggcuucaucgagggcggguggacgggcaugguggacgggugguacggcuaccaccaccagaacgagcagggguccggcuacgccgccgaccucaagagcacccagaacgcgaucgacgagaucaccaacaaggugaacuccgucaucgagaagaugaacacccaguucacggccguggggaaggaguucaaccaccuggagaagcgcaucgagaaccugaacaagaaggucgacgacggcuuccucgacaucuggaccuacaacgccgagcugcuggugcuccuggagaacgagcggacccuggacuaccacgacagcaacgugaagaaccucuacgagaagguccgcucccagcugaagaacaacgccaaggagaucggcaacgggugcuucgaguucuaccacaagugcgacaacacgugcauggagagcgugaagaacggcaccuacgacuaccccaaguacuccgaggaggccaagcugaaccgggaggagaucgacggggugaagcucgagagcacccgcaucuaccagauccuggcgaucuacuccaccgucgccagcagccuggugcucguggucucccugggcgccaucagcuucuggaugugcuccaacgggagccugcagugccggaucugcaucuga

SEQ ID NO: 66947 - RNA, 1701 nt, Artificial Sequence; identical to SEQ ID NO: 66693
  derived and/or modified CDS sequence (opt1) from hemagglutinin__InfluenzaA__ACR77468

SEQ ID NO: 66948 - RNA, 1701 nt, Artificial Sequence; identical to SEQ ID NO: 66693
  derived and/or modified CDS sequence (opt1) from hemagglutinin__InfluenzaA__ACR77478

SEQ ID NO: 66949 - RNA, 1701 nt, Artificial Sequence; identical to SEQ ID NO: 66693
  derived and/or modified CDS sequence (opt1) from hemagglutinin__InfluenzaA__ACR77488

SEQ ID NO: 66950 - RNA, 1701 nt, Artificial Sequence; identical to SEQ ID NO: 66693
  derived and/or modified CDS sequence (opt1) from hemagglutinin__InfluenzaA__ACR77498

SEQ ID NO: 66951 - RNA, 1701 nt, Artificial Sequence; identical to SEQ ID NO: 66680
  derived and/or modified CDS sequence (opt1) from hemagglutinin__InfluenzaA__ACR83525

SEQ ID NO: 66952 - RNA, 1701 nt, Artificial Sequence
  derived and/or modified CDS sequence (opt1) from hemagglutinin__InfluenzaA__ACR83538
augaaggccauccuggugguccuccuguacaccuucgccaccgcgaacgccgacacgcugugcaucggcuaccacgccaacaacagcaccgacaccguggacaccgugcucgagaagaacgucacggugacccacuccgugaaccugcuggaggacaagcacaacgggaagcucugcaagcugcgcggcgucgcgccccugcaccucgggaagugcaacaucgccggcuggauccuggggaacccggagugcgagagccuguccaccgccagcuccuggagcuacaucguggagaccuccagcuccgacaacggcacgugcuaccccggcgacuucaucgacuacgaggagcuccgggagcagcugagcuccgugagcuccuucgagcgcuucgagaucuuccccaagaccagcuccuggcccaaccacgacagcaacaagggggucaccgccgccugcccgcacgccggcgcgaaguccuucuacaagaaccugaucuggcucgugaagaaggggaacagcuaccccaagcuguccaagagcuacaucaacgacaagggcaaggaggugcugguccucugggggauccaccaccccagcaccuccgccgaccagcagagccuguaccagaacgccgacgccuacguguucgugggcacgucccgguacagcaagaaguucaagcccgagaucgccauccgcccgaagguccgggaccaggagggccgcaugaacuacuacuggacccugguggagcccggggacaagaucaccuucgaggcgaccggcaaccucguggucccccgguacgccuucgccauggagcgcaacgccggguccggcaucaucaucagcgacacgcccgugcacgacugcaacacgaccugccagaccccgaagggcgccaucaacaccucccugcccuuccagaacauccaccccaucaccaucgggaagugccccaaguacgucaagagcaccaagcugcggcucgcgaccggccugcgcaacgugccguccauccugagccgggggcuguucggcgccaucgccggguucaucgagggcggcuggacggggaugguggacggcugguacggguaccaccaccagaacgagcagggcuccggguacgccgccgaccucaagagcacccagaacgcgaucgacgagaucaccaacaaggugaacuccgucaucgagaagaugaacacccaguucacggccgugggcaaggaguucaaccaccuggagaagcgcaucgagaaccucaacaagaaggucgacgacggcuuccuggacaucuggaccuacaacgccgagcugcucgugcugcuggagaacgagcggacccucgacuaccacgacagcaacgugaagaaccuguacgagaagguccgcucccagcugaagaacaacgccaaggagaucgggaacggcugcuucgaguucuaccacaagugcgacaacacgugcauggagagcgugaagaacgggaccuacgacuaccccaaguacuccgaggaggccaagcucaaccgggaggagaucgacggcgugaagcuggagagcacccgcaucuaccagauccuggcgaucuacuccaccgucgccagcagccucgugcugguggucucccugggggccaucagcuucuggaugugcuccaacggcagccuccagugccggaucugcaucuga

SEQ ID NO: 66953 - RNA, 1701 nt, Artificial Sequence; identical to SEQ ID NO: 66693
  derived and/or modified CDS sequence (opt1) from hemagglutinin__InfluenzaA__ACS14666

SEQ ID NO: 66954 - RNA, 1701 nt, Artificial Sequence; identical to SEQ ID NO: 66693
  derived and/or modified CDS sequence (opt1) from hemagglutinin__InfluenzaA__ACS14676

SEQ ID NO: 66955 - RNA, 1701 nt, Artificial Sequence; identical to SEQ ID NO: 66693
  derived and/or modified CDS sequence (opt1) from hemagglutinin__InfluenzaA__ACS14686

SEQ ID NO: 66956 - RNA, 1701 nt, Artificial Sequence; identical to SEQ ID NO: 66693
  derived and/or modified CDS sequence (opt1) from hemagglutinin__InfluenzaA__ACS14696

SEQ ID NO: 66957 - RNA, 1701 nt, Artificial Sequence; identical to SEQ ID NO: 66693
  derived and/or modified CDS sequence (opt1) from hemagglutinin__InfluenzaA__ACS14706

SEQ ID NO: 66958 - RNA, 1701 nt, Artificial Sequence; identical to SEQ ID NO: 66693
  derived and/or modified CDS sequence (opt1) from hemagglutinin__InfluenzaA__ACS14716

SEQ ID NO: 66959 - RNA, 1701 nt, Artificial Sequence; identical to SEQ ID NO: 66693
  derived and/or modified CDS sequence (opt1) from hemagglutinin__InfluenzaA__ACS14726

SEQ ID NO: 66960 - RNA, 1701 nt, Artificial Sequence; identical to SEQ ID NO: 66693
  derived and/or modified CDS sequence (opt1) from hemagglutinin__InfluenzaA__ACS14736

SEQ ID NO: 66961 - RNA, 1701 nt, Artificial Sequence; identical to SEQ ID NO: 66873
  derived and/or modified CDS sequence (opt1) from hemagglutinin__InfluenzaA__ACS27189

SEQ ID NO: 66962 - RNA, 1701 nt, Artificial Sequence; identical to SEQ ID NO: 66693
  derived and/or modified CDS sequence (opt1) from hemagglutinin__InfluenzaA__ACS27199

SEQ ID NO: 66963 - RNA, 1701 nt, Artificial Sequence; identical to SEQ ID NO: 66693
  derived and/or modified CDS sequence (opt1) from hemagglutinin__InfluenzaA__ACS27209

SEQ ID NO: 66964 - RNA, 1701 nt, Artificial Sequence; identical to SEQ ID NO: 66746
  derived and/or modified CDS sequence (opt1) from hemagglutinin__InfluenzaA__ACS27219

SEQ ID NO: 66965 - RNA, 1701 nt, Artificial Sequence; identical to SEQ ID NO: 66693
  derived and/or modified CDS sequence (opt1) from hemagglutinin__InfluenzaA__ACS27229

SEQ ID NO: 66966 - RNA, 1701 nt, Artificial Sequence
  derived and/or modified CDS sequence (opt1) from hemagglutinin__InfluenzaA__ACS27239
augaaggccauccuggugguccuccuguacaccuucgccaccgcgaacgccgacacgcugugcaucggcuaccacgccaacaacagcaccgacaccguggacaccgugcucgagaagaacgucacggugacccacuccgugaaccugcuggaggacaagcacaacgggaagcucugcaagcugcgcggcgucgcgccccugcaccucgggaagugcaacaucgccggcuggauccuggggaacccggagugcgagagccuguccaccgccagcuccuggagcuacaucguggagaccuccagcuccgacaacggcacgugcuaccccggcgacuucaucgacuacgaggagcuccgggagcagcugagcuccaugagcuccuucgagcgcuucgagaucuuccccaagaccagcuccuggcccaaccacgacagcaacaagggggugaccgccgccugcccgcacgccggcgcgaaguccuucuacaagaaccugaucuggcucgucaagaaggggaacagcuaccccaagcuguccaagagcuacaucaacgacaagggcaaggaggugcuggugcucugggggauccaccaccccagcaccuccgccgaccagcagagccuguaccagaacgccgacgccuacgucuucgugggcuccagccgguacuccaagaaguucaagcccgagaucgccauccgcccgaaggugcgggaccaggagggccgcaugaacuacuacuggacgcuggucgagcccggggacaagaucaccuucgaggcgaccggcaaccucguggugccccgguacgccuucgccauggagcgcaacgccgggagcggcaucaucaucuccgacacccccguccacgacugcaacacgaccugccagaccccgaagggcgccaucaacaccagccugcccuuccagaacauccaccccaucacgaucgggaagugccccaaguacgugaaguccaccaagcugcggcucgcgaccggccugcgcaacgugccgagcauccagucccgggggcuguucggcgccaucgccggguucaucgagggcggcuggaccgggauggucgacggcugguacggguaccaccaccagaacgagcagggcagcggguacgccgccgaccucaaguccacgcagaacgcgaucgacgagaucaccaacaaggugaacagcgugaucgagaagaugaacacccaguucaccgccgucggcaaggaguucaaccaccuggagaagcgcaucgagaaccugaacaagaagguggacgacggcuuccucgacaucuggacguacaacgccgagcugcugguccuccuggagaacgagcggacccuggacuaccacgacuccaacgugaagaaccucuacgagaaggugcgcagccagcugaagaacaacgccaaggagaucgggaacggcugcuucgaguucuaccacaagugcgacaacacgugcauggaguccgucaagaacgggaccuacgacuaccccaaguacagcgaggaggccaagcugaaccgggaggagaucgacggcgugaagcucgaguccacccgcaucuaccagauccuggcgaucuacagcaccguggccagcucccugguccucguggugagccugggggccaucuccuucuggaugugcagcaacggcucccugcagugccggaucugcaucuga

SEQ ID NO: 66967 - RNA, 1701 nt, Artificial Sequence; identical to SEQ ID NO: 66693
  derived and/or modified CDS sequence (opt1) from hemagglutinin__InfluenzaA__ACS27249

SEQ ID NO: 66968 - RNA, 1701 nt, Artificial Sequence; identical to SEQ ID NO: 66693
  derived and/or modified CDS sequence (opt1) from hemagglutinin__InfluenzaA__ACS27775

SEQ ID NO: 66969 - RNA, 1701 nt, Artificial Sequence; identical to SEQ ID NO: 66680
  derived and/or modified CDS sequence (opt1) from hemagglutinin__InfluenzaA__ACS34705

SEQ ID NO: 66970 - RNA, 1701 nt, Artificial Sequence; identical to SEQ ID NO: 66680
  derived and/or modified CDS sequence (opt1) from hemagglutinin__InfluenzaA__ACS34966

SEQ ID NO: 66971 - RNA, 1701 nt, Artificial Sequence
  derived and/or modified CDS sequence (opt1) from hemagglutinin__InfluenzaA__ACS34967
augaaggccauccuggugguccuccuguacaccuucgccaccgcgaacgccgacacgcugugcaucggcuaccacgccaacaacagcaccgacaccguggacaccgugcucgagaagaacgucacggugacccacuccgugaaccugcuggaggacaagcacaacgggaagcucugcaagcugcgcggcgucgcgccccugcaccucgggaagugcaacaucgccggcuggauccuggggaacccggagugcgagagccuguccaccgccagcuccuggagcuacaucguggagaccuccagcuccgacaacggcacgugcuaccccggcgacuucaucgacuacgaggagcuccgggagcagcugagcuccgugagcuccuucgagcgcuucgagaucuuccccaagaccagcuccuggcccaaccacgacagcaacaagggggucaccgccgccugcccgcacgccggcgcgaaguccuucuacaagaaccugaucuggcucgugaagaaggggaacagcuaccccaagcuguccaagagcuacaucaacgacaagggcaaggaggugcugguccucugggggauccaccaccccagcaccuccgccgaccagcagagccuguaccagaacgccgacgccuacguguucgugggcuccagccgguacuccaagaaguucaagcccgagaucgccauccgcccgaagguccgggaccaggagggccgcaugaacuacuacuggacgcugguggagcccggggacaagaucaccuucgaggcgaccggcaaccucguggucccccgguacgccuucgccauggagcgcaacgccgggagcggcaucaucaucuccgacacccccgugcacgacugcaacacgaccugccagaccccgaagggcgccaucaacaccagccugcccuuccagaacauccaccccaucacgaucgggaagugccccaaguacgugaaguccaccaagagccggcuggcgaccggccuccgcaacgucccguccauccagagccgggggcuguucggcgccaucgccggguucaucgagggcggcuggaccgggaugguggacggcugguacggguaccaccaccagaacgagcagggcuccggguacgccgccgaccucaagagcacgcagaaggcgaucgacgagaucaccaacaaggugaacuccgucaucgagaagaugaacacccaguucaccgccgugggcaaggaguucaaccaccuggagaagcgcaucgagaaccugaacaagaaggucgacgacggcuuccuggacaucuggacguacaacgccgagcuccuggugcugcucgagaacgagcggacccuggacuaccacgacagcaacgugaagaaccuguacgagaagguccgcucccagcucaagaacaacgccaaggagaucgggaacggcugcuucgaguucuaccacaagugcgacaacacgugcauggagagcgugaagaacgggaccuacgacuaccccaaguacuccgaggaggccaagcugaaccgggaggagaucgacggcgugaagcuggagagcacccgcaucuaccagauccucgcgaucuacagcaccgucgccuccagccuggugcugguggucucccucggggccaucagcuucuggaugugcuccaacggcagccugcagugccggaucugcaucuga

SEQ ID NO: 66972 - RNA, 1701 nt, Artificial Sequence
  derived and/or modified CDS sequence (opt1) from hemagglutinin__InfluenzaA__ACS34968
augaaggccauccuggugguccuccuguacaccuucgccaccgcgaacgccgacacgcugugcaucggcuaccacgccaacaacagcaccgacaccguggacaccgugcucgagaagaacgucacggugacccacuccgugaaccugcuggaggacaagcacaacgggaagcucugcaagcugcgcggcgucgcgccccugcaccucgggaagugcaacaucgccggcuggauccuggggaacccggagugcgagagccuguccaccgcgagcuccuggagcuacaucguggaguccagcuccagcgacaacgggaccugcuaccccggcgacuucaucgacuacgaggagcuccgggagcagcuguccagcguguccagcuucgagcgcuucgagaucuuccccaagacguccagcuggcccaaccacgacuccaacaagggcgucaccgccgccugcccgcacgccggcgccaagagcuucuacaagaaccugaucuggcucgugaagaaggggaacuccuaccccaagcugagcaagagcuacaucaacgacaagggcaaggaggugcugguccucugggggauccaccaccccuccaccagcgccgaccagcagucccuguaccagaacgccgacgccuacguguucgugggcagcucccgguacagcaagaaguucaagcccgagaucgccauccgcccgaagguccgggaccaggagggccgcaugaacuacuacuggacccugguggagcccggggacaagaucaucuucgaggcgacgggcaaccucguggucccccgguacgccuucgccauggagcgcaacgccggguccggcaucaucaucagcgacacccccgugcacgacugcaacacgaccugccagaccccgaagggcgccaucaacaccucccugcccuuccagaacauccaccccaucaccaucgggaagugccccaaguacgucaagagcaccaagcugcggcucgcgacgggccugcgcaacgugccguccauccagagccgggggcuguucggcgccaucgccggguucaucgagggcggcuggaccgggaugguggacggcugguacggguaccaccaccagaacgagcagggcuccggguacgccgccgaccucaagagcacccagaacgcgaucgacgagaucaccaacaaggugaacuccgucaucgagaagaugaacacgcaguucaccgccgugggcaaggaguucaaccaccuggagaagcgcaucgagaaccugaacaagaaggucgacgacggcuuccucgacaucuggaccuacaacgccgagcugcuggugcuccuggagaacgagcggacccuggacuaccacgacagcaacgugaagaaccucuacgagaagguccgcucccagcugaagaacaacgccaaggagaucgggaacggcugcuucgaguucuaccacaagugcgacaacacgugcauggagagcgugaagaacgggaccuacgacuaccccaaguacuccgaggaggccaagcugaaccgggaggagaucgacggcgugaagcucgagagcacccgcaucuaccagauccuggcgaucuacagcaccgucgccuccagccuggugcucguggucucccugggggccaucagcuucuggaugugcuccaacggcagccugcagugccggaucugcaucuga

SEQ ID NO: 66973 - RNA, 1701 nt, Artificial Sequence
  derived and/or modified CDS sequence (opt1) from hemagglutinin__InfluenzaA__ACS36632
augaaggccauccuggugguccuccuguacaccuucgccaccgcgaacgccgacacgcugugcaucggcuaccacgccaacaacagcaccgacaccguggacaccgugcucgagaagaacgucacggugacccacuccgugaaccugcuggaggacaagcacaacgggaagcucugcaagcugcgcggcgucgcgccccugcaccucgggaagugcaacaucgccggcuggauccuggggaacccggagugcgagagccuguccaccgccagcuccuggagcuacaucguggagaccuccagcuccgacaacggcacgugcuaccccggcgacuucaucgacuacgaggagcuccgggagcagcugagcuccgugagcuccuucgagcgcuucgagaucuuccccaagaccagcuccuggcccaaccacgacagcaacaagggggucaccgccgccugcccgcacgccggcgcgaaguccuucuacaagaaccugaucuggcucgugaagaaggggaacagcuaccccaagcuguccaagagcuacaucaacgacaagggcaaggaggugcugguccucugggggauccaccaccccagcaccuccgccgaccagcagagccuguaccagaacgccgacgccuacguguucgugggcuccagccgguacuccaagaaguucaagcccgagaucgccauccgcccgaagguccgggaccaggagggccgcaugaacuacuacuggacgcugguggagcccggggacaagaucaccuucgaggcgaccggcaaccucguggucccccgguacgccuucgccauggagcgcaacgccgggagcggcaucaucaucuccgacacccccgugcacgacugcaacacgaccugccagaccccgaagggcgccaucaacaccagccugcccuuccagaacauccaccccaucacgaucgggaagugccccaaguacgugaaguccaccaagcugcggcucgcgaccggccugcgcaacgucccgagcauccagucccgggggcuguucggcgccaucgccggguucaucgagggcggcuggaccgggaugguggacggcugguacggguaccaccaccagaacgagcagggcagcggguacgccgccgaccucaaguccacgcagaaggcgaucgacgagaucaccaacaaggugaacagcgucaucgagaagaugaacacccaguucaccgccgugggcaaggaguucaaccaccuggagaagcgcaucgagaaccugaacaagaaggucgacgacggcuuccucgacaucuggacguacaacgccgagcugcuggugcuccuggagaacgagcggacccuggacuaccacgacuccaacgugaagaaccucuacgagaagguccgcagccagcugaagaacaacgccaaggagaucgggaacggcugcuucgaguucuaccacaagugcgacaacacgugcauggaguccgugaagaacgggaccuacgacuaccccaaguacagcgaggaggccaagcugaaccgggaggagaucgacggcgugaagcucgaguccacccgcaucuaccagauccuggcgaucuacagcaccgucgccagcucccuggugcucguggucagccugggggccaucuccuucuggaugugcagcaacggcucccugcagugccggaucugcaucuga

SEQ ID NO: 66974 - RNA, 1701 nt, Artificial Sequence
  derived and/or modified CDS sequence (opt1) from hemagglutinin__InfluenzaA__ACS36645
augaaggccauccuggugguccuccuguacaccuucgccaccgcgaacgccgacacgcugugcaucggcuaccacgccaacaacagcaccgacaccguggacaccgugcucgagaagaacgucacggugacccacuccgugaaccugcuggaggacaagcacaacgggaagcucugcaagcugcgcggcgucgcgccccugcaccucgggaagugcaacaucgccggcuggauccuggggaacccggagugcgagagccuguccaccgccagcuccuggagcuacaucguggagaccuccagcuccgacaacggcacgugcuaccccggcgacuucaucgacuacgaggagcuccgggagcagcugagcuccgugagcuccuucgagcgcuucgagaucuuccccaagaccagcuccuggcccaaccacgacagcaacaagggggucaccgccgccugcccgcacgccggcaccaaguccuucuacaagaaccugaucuggcucgugaagaaggggaacagcuaccccaagcuguccaagagcuacaucaacgacaagggcaaggaggugcugguccucugggggauccaccaccccagcacguccgcggaccagcagagccuguaccagaacgccgacgccuacguguucgugggcuccagccgguacuccaagaaguucaagcccgagaucgccauccgcccgaagguccgggaccaggagggccgcaugaacuacuacuggacccugguggagcccggggacaagaucaccuucgaggccaccggcaaccucguggucccccgguacgcguucgccauggagcgcaacgccgggagcggcaucaucaucuccgacacgcccgugcacgacugcaacacgaccugccagaccccgaagggcgccaucaacaccagccugcccuuccagaacauccaccccaucaccaucgggaagugccccaaguacgugaaguccaccaagcugcggcucgccaccggccugcgcaacgucccgagcauccagucccgggggcuguucggcgcgaucgccggguucaucgagggcggcuggacggggaugguggacggcugguacggguaccaccaccagaacgagcagggcagcggguacgccgccgaccucaaguccacccagaacgccaucgacgagaucaccaacaaggugaacagcgucaucgagaagaugaacacccaguucacggcggugggcaaggaguucaaccaccuggagaagcgcaucgagaaccugaacaagaaggucgacgacggcuuccucgacaucuggaccuacaacgccgagcugcuggugcuccuggagaacgagcggacccuggacuaccacgacuccaacgugaagaaccucuacgagaagguccgcagccagcugaaguccaacgccaaggagaucgggaacggcugcuucgaguucuaccacaagugcgacaacacgugcauggagagcgugaagaacgggaccuacgacuaccccaaguacuccgaggaggccaagcugaaccgggaggagaucgacggcaucaagcucgagagcacccgcaucuaccagauccuggccaucuacagcaccguggcguccagccugguccucguggugucccugggggccaucagcuucuggaugugcuccaacggcagccugcagugccggaucugcaucuga

SEQ ID NO: 66975 - RNA, 1701 nt, Artificial Sequence
  derived and/or modified CDS sequence (opt1) from hemagglutinin__InfluenzaA__ACS45035
augaaggccauccuggugguccuccuguacaccuucgccaccgcgaacgccgacacgcugugcaucggcuaccacgccaacaacagcaccgacaccguggacaccgugcucgagaagaacgucacggugacccacuccgugaaccugcuggaggacaagcacaacgggaagcucugcaagcugcgcggcgucgcgccccugcaccucgggaagugcaacaucgccggcuggauccuggggaacccggagugcgagagccuguccaccgcgagcuccuggagcuacaucguggagacccccuccagcgacaacggcacgugcuaccccggcgacuucaucgacuacgaggagcuccgggagcagcuguccagcguguccagcuucgagcgcuucgagaucuuccccaagaccuccagcuggccgaaccacgacuccaacaagggggucaccgccgccugcccccacgccggcgccaagagcuucuacaagaaccugaucuggcucgugaagaaggggaacuccuaccccaagcugagcaaguccuacaucaacgacaagggcaaggaggugcugguccucugggggauccaccaccccagcaccagcgccgaccagcaguccaucuaccagaacgccgacacguacguguucgugggcagcucccgguacagcaagaaguucaagccggagaucgccauccgccccaagguccgggaccaggagggccgcaugaacuacuacuggacccugguggagcccggggacaagaucaccuucgaggccaccggcaaccugguggucccccgguacgcguucgccauggagcgcaacgccggguccggcaucaucaucagcgacacgccggugcacgacugcaacacgaccugccagacccccaagggcgccaucaacaccucccuccccuuccagaacauccaccccaucaccaucgggaagugcccgaaguacgucaagagcaccaagcugcggcuggccaccggccuccgcaacauccccuccauccagagccgggggcuguucggcgcgaucgccggguucaucgagggcggcuggacggggaugguggacggcugguacggguaccaccaccagaacgagcagggcuccggguacgccgccgaccucaagagcacccagaacgccaucgacgagaucaccaacaaggugaacuccgugaucgagaagaugaacacccaguucacggcggucggcaaggaguucaaccaccuggagaagcgcaucgagaaccugaacaagaagguggacgacggcuuccuggacaucuggaccuacaacgccgagcuccugguccugcucgagaacgagcggacccuggacuaccacgacagcaacgugaagaaccuguacgagaaggugcgcucccagcucaagaacaacgccaaggagaucgggaacggcugcuucgaguucuaccacaagugcgacaacacgugcauggagagcgucaagaacgggaccuacgacuaccccaaguacuccgaggaggccaagcugaaccgggaggagaucgacggcgugaagcuggagagcacccgcaucuaccagauccucgccaucuacuccaccguggcgagcagccugguccugguggugucccucggggccaucagcuucuggaugugcuccaacggcagccugcagugccggaucugcaucuga

SEQ ID NO: 66976 - RNA, 1701 nt, Artificial Sequence; identical to SEQ ID NO: 66693
  derived and/or modified CDS sequence (opt1) from hemagglutinin__InfluenzaA__ACS50084

SEQ ID NO: 66977 - RNA, 1701 nt, Artificial Sequence; identical to SEQ ID NO: 66935
  derived and/or modified CDS sequence (opt1) from hemagglutinin__InfluenzaA__ACS50095

SEQ ID NO: 66978 - RNA, 1701 nt, Artificial Sequence
  derived and/or modified CDS sequence (opt1) from hemagglutinin__InfluenzaA__ACS54258
augaaggccauccuggugguccuccuguacaccuucgccaccgcgaacgccgacacgcugugcaucggcuaccacgccaacaacagcaccgacaccguggacaccgugcucgagaagaacgucacggugacccacuccgugaaccugcuggaggacaagcacaacgggaagcucugcaagcugcgcggcgucgcgccccugcaccucgggaagugcaacaucgccggcuggauccuggggaacccggagugcgagagccuguccaccgccagcuccuggagcuacaucguggagaccuccagcuccgacaacggcacgugcuaccccggcgacuucaucgacuacgaggagcuccgggagcagcugagcuccgugagcuccuucgagcgcuucgagaucuuccccaagaccagcuccuggcccaaccacgacagcaacaagggggucaccgccgccugcccgcacgccggcgcgaaguccuucuacaagaaccugaucuggcucgugaagaaggggaacagcuaccccaagcuguccaagagcuacaucaacgacaagggcaaggaggugcugguccucugggggauccaccaccccagcaccuccgccgaccagcagagccuguaccagaacgccgacgccuacguguucgugggcacgucccgguacagcaagaaguucaagcccgagaucgccauccgcccgaagguccgggaccaggagggccgcaugaacuacuacuggacccugguggagcccggggacaagaucaccuucgaggcgaccggcaaccucguggucccccgguacgccuucgccauggagcgcaacgccggguccggcaucaucaucagcgacacgcccgugcacgacugcaacacgaccugccagaccccgaagggcgccaucaacaccucccugcccuuccagaacauccaccccaucaccaucgggaagugccccaaguacgucaagagcaccaagcugcggcucgcgaccggccugcgcaacgugccguccauccagagccgggggcuguucggcgccaucgccggguucaucgagggcggcuggacggggaugguggacggcugguacggguaccaccaccagaacgagcagggcuccggguacgccgccgaccucaagagcacccagaacgcgaucgacgagaucaccaacaaggugaacuccgucaucgagaagaugaacacccaguucacggccgugggcaaggaguucaaccaccuggagaagcgcaucgagaaccugaacaagaaggucgacgacggcuuccucgacaucuggaccuacaacgccgagcugcuggugcuccuggagaacgagcggacccuggacuaccacgacagcaacgugaagaaccucuacgagaagguccgcucccagcugaagaacaacgccaaggagaucgggaacggcugcuucgaguucuaccacaagugcgacaacacgugcauggagagcgugaagaacgggaccuacuacuaccccaaguacuccgaggaggccaagcugaaccgggaggagaucgacggcgugaagcucgagagcacccgcaucuaccagauccuggcgaucuacuccaccgucgccagcagccuggugcucguggucucccugggggccaucagcuucuggaugugcuccaacggcagccugcagugccggaucugcaucuga

SEQ ID NO: 66979 - RNA, 1701 nt, Artificial Sequence; identical to SEQ ID NO: 66708
  derived and/or modified CDS sequence (opt1) from hemagglutinin__InfluenzaA__ACS54259

SEQ ID NO: 66980 - RNA, 1701 nt, Artificial Sequence; identical to SEQ ID NO: 66680
  derived and/or modified CDS sequence (opt1) from hemagglutinin__InfluenzaA__ACS54260

SEQ ID NO: 66981 - RNA, 1701 nt, Artificial Sequence; identical to SEQ ID NO: 66693
  derived and/or modified CDS sequence (opt1) from hemagglutinin__InfluenzaA__ACS54261

SEQ ID NO: 66982 - RNA, 1701 nt, Artificial Sequence; identical to SEQ ID NO: 66693
  derived and/or modified CDS sequence (opt1) from hemagglutinin__InfluenzaA__ACS54263

SEQ ID NO: 66983 - RNA, 1701 nt, Artificial Sequence; identical to SEQ ID NO: 66693
  derived and/or modified CDS sequence (opt1) from hemagglutinin__InfluenzaA__ACS54301

SEQ ID NO: 66984 - RNA, 1701 nt, Artificial Sequence; identical to SEQ ID NO: 66680
  derived and/or modified CDS sequence (opt1) from hemagglutinin__InfluenzaA__ACS66821

SEQ ID NO: 66985 - RNA, 1701 nt, Artificial Sequence
  derived and/or modified CDS sequence (opt1) from hemagglutinin__InfluenzaA__ACS68822
augaaggccauccuggugguccuccuguacaccuucgccaccgcgaacgccgacacgcugugcaucggcuaccacgccaacaacagcaccgacaccguggacaccgugcucgagaagaacgucacggugacccacuccgugaaccugcuggaggacaagcacaacgggaagcucugcaagcugcgcggcgucgcgccccugcaccucgggaagugcaacaucgccggcuggauccuggggaacccggagugcgagagccuguccaccgccagcuccuggagcuacaucguggagaccuccagcuccgacaacggcacgugcuaccccggcgacuucaucgacuacgaggggcuccgggagcagcugagcuccgugagcuccuucgagcgcuucgagaucuuccccaagaccagcuccuggcccaaccacgacagcaacaagggcgucaccgccgccugcccgcacgccggggcgaaguccuucuacaagaaccugaucuggcucgugaagaagggcaacagcuaccccaagcuguccaagagcuacaucaacgacaaggggaaggaggugcugguccucuggggcauccaccaccccagcaccuccgccgaccagcagagccuguaccagaacgccgacgccuacguguucgugggcacgucccgguacagcaagaaguucaagcccgagaucgccauccgcccgaagguccgggaccaggaggggcgcaugaacuacuacuggacccugguggagcccggcgacaagaucaccuucgaggcgaccgggaaccucguggucccccgguacgccuucgccauggagcgcaacgccggcuccggcaucaucaucagcgacacgcccgugcacgacugcaacacgaccugccagaccccgaagggggccaucaacaccucccugcccuuccagaacauccaccccaucaccaucggcaagugccccaaguacgucaagagcaccaagcugcggcucgcgaccgggcugcgcaacgugccguccauccagagccggggccuguucggggccaucgccggcuucaucgagggcggguggacgggcaugguggacgggugguacggcuaccaccaccagaacgagcagggguccggcuacgccgccgaccucaagagcacccagaacgcgaucgacgagaucaccaacaaggugaacuccgucaucgagaagaugaacacccaguucacggccgugggcaaggaguucaaccaccuggagaagcgcaucgagaaccugaacaagaagaucgacgacggguuccucgacaucuggaccuacaacgccgagcugcugguccuccuggagaacgagcggacccuggacuaccacgacagcaacgugaagaaccucuacgagaaggugcgcucccagcugaagaacaacgccaaggagaucggcaacgggugcuucgaguucuaccacaagugcgacaacacgugcauggagagcgucaagaacggcaccuacgacuaccccaaguacuccgaggaggccaagcugaaccgggaggagaucgacggggugaagcucgagagcacccgcaucuaccagauccuggcgaucuacuccaccguggccagcagccugguccucguggugucccugggcgccaucagcuucuggaugugcuccaacggcagccugcagugccggaucugcaucuga

SEQ ID NO: 66986 - RNA, 1701 nt, Artificial Sequence; identical to SEQ ID NO: 66693
  derived and/or modified CDS sequence (opt1) from hemagglutinin__InfluenzaA__ACS75821

SEQ ID NO: 66987 - RNA, 1701 nt, Artificial Sequence; identical to SEQ ID NO: 66693
  derived and/or modified CDS sequence (opt1) from hemagglutinin__InfluenzaA__ACS77926

SEQ ID NO: 66988 - RNA, 1701 nt, Artificial Sequence; identical to SEQ ID NO: 66693
  derived and/or modified CDS sequence (opt1) from hemagglutinin__InfluenzaA__ACS77936

SEQ ID NO: 66989 - RNA, 1701 nt, Artificial Sequence; identical to SEQ ID NO: 66786
  derived and/or modified CDS sequence (opt1) from hemagglutinin__InfluenzaA__ACS77946

SEQ ID NO: 66990 - RNA, 1701 nt, Artificial Sequence; identical to SEQ ID NO: 66693
  derived and/or modified CDS sequence (opt1) from hemagglutinin__InfluenzaA__ACS77956

SEQ ID NO: 66991 - RNA, 1701 nt, Artificial Sequence; identical to SEQ ID NO: 66693
  derived and/or modified CDS sequence (opt1) from hemagglutinin__InfluenzaA__ACS77966

SEQ ID NO: 66992 - RNA, 1701 nt, Artificial Sequence; identical to SEQ ID NO: 66693
  derived and/or modified CDS sequence (opt1) from hemagglutinin__InfluenzaA__ACS77976

SEQ ID NO: 66993 - RNA, 1701 nt, Artificial Sequence; identical to SEQ ID NO: 66935
  derived and/or modified CDS sequence (opt1) from hemagglutinin__InfluenzaA__ACS77986

SEQ ID NO: 66994 - RNA, 1701 nt, Artificial Sequence
  derived and/or modified CDS sequence (opt1) from hemagglutinin__InfluenzaA__ACS77996
augaaggccacccuggugguccuccuguacaccuucgccacggcgaacgccgacacccugugcaucggcuaccacgccaacaacagcaccgacaccguggacacggugcucgagaagaacgucaccgugacccacuccgugaaccugcuggaggacaagcacaacgggaagcucugcaagcugcgcggcgucgcgccccugcaccucgggaagugcaacaucgccggcuggauccuggggaacccggagugcgagagccuguccaccgccagcuccuggagcuacaucguggagacguccagcuccgacaacgggaccugcuaccccggcgacuucaucgacuacgaggagcuccgggagcagcugagcuccgugagcuccuucgagcgcuucgagaucuuccccaagaccagcuccuggcccaaccacgacagcaacaagggcgucaccgccgccugcccgcacgccggcgcgaaguccuucuacaagaaccugaucuggcucgugaagaaggggaacagcuaccccaagcuguccaagagcuacaucaacgacaagggcaaggaggugcugguccucugggggauccaccaccccagcacguccgccgaccagcagagccuguaccagaacgccgacgccuacguguucgugggcaccucccgguacagcaagaaguucaagcccgagaucgccauccgcccgaagguccgggaccaggagggccgcaugaacuacuacuggacccugguggagcccggggacaagaucaccuucgaggcgacgggcaaccucguggucccccgguacgccuucgccauggagcgcaacgccggguccggcaucaucaucagcgacacccccgugcacgacugcaacacgaccugccagaccccgaagggcgccaucaacaccucccugcccuuccagaacauccaccccaucaccaucgggaagugccccaaguacgucaagagcaccaagcugcggcucgcgacgggccugcgcaacgugccguccauccagagccgggggcuguucggcgccaucgccggguucaucgagggcggcuggaccgggaugguggacggcugguacggguaccaccaccagaacgagcagggcuccggguacgccgccgaccucaagagcacccagaacgcgaucgacgagaucaccaacaaggugaacuccgucaucgagaagaugaacacgcaguucaccgccgugggcaaggaguucaaccaccuggagaagcgcaucgagaaccugaacaagaaggucgacgacggcuuccucgacaucuggaccuacaacgccgagcugcuggugcuccuggagaacgagcggacccuggacuaccacgacagcaacgugaagaaccucuacgagaagguccgcucccagcugaagaacaacgccaaggagaucgggaacggcugcuucgaguucuaccacaagugcgacaacacgugcauggagagcgugaagaacgggaccuacgacuaccccaaguacuccgaggaggccaagcugaaccgggaggagaucgacggcgugaagcucgagagcacccgcaucuaccagauccuggcgaucuacuccaccgucgccagcagccuggugcucguggucucccugggggccaucagcuucuggaugugcuccaacggcagccugcagugccggaucugcaucuga

SEQ ID NO: 66995 - RNA, 1701 nt, Artificial Sequence; identical to SEQ ID NO: 66693
  derived and/or modified CDS sequence (opt1) from hemagglutinin__InfluenzaA__ACS78006

SEQ ID NO: 66996 - RNA, 1701 nt, Artificial Sequence; identical to SEQ ID NO: 66693
  derived and/or modified CDS sequence (opt1) from hemagglutinin__InfluenzaA__ACS78016

SEQ ID NO: 66997 - RNA, 1701 nt, Artificial Sequence
  derived and/or modified CDS sequence (opt1) from hemagglutinin__InfluenzaA__ACS78026
augaaggccauccuggugguccuccuguacaccuucgccaccgcgaacgccgacacgcugugcaucggcuaccacgccaacaacagcaccgacaccguggacaccgugcucgagaagaacgucacggugacccacuccgugaaccugcuggaggacaagcacaacgggaagcucugcaagcugcgcggcgucgcgccccugcaccucgggaagugcaacaucgccggcuggauccuggggaacccggagugcgagagccuguccaccgccagcuccuggagcuacaucguggagaccuccagcuccgacaacggcacgugcuaccccggcgacuucaucgacuacgaggagcuccgggagcagcugagcuccgugagcuccuucgagcgcuucgagaucuuccccaagaucagcuccuggcccaaccacgacagcaaccgcggggucaccgccgccugcccgcacgccggcgcgaaguccuucuacaagaaccugaucuggcucgugaagaaggggaacagcuaccccaagcugaucaaguccuacaucaacgacaagggcaaggaggugcugguccucugggggauccaccaccccagcaccagcgccgaccagcagucccuguaccagaacgccgacgccuacguguucgugggcagcucccgguacagcaagaaguucaagcccgagaucgccauccggccgaagguccgcgaccaggagggccggaugaacuacuacuggacccugguggagcccggggacaagaucacguucgaggcgaccggcaaccucguggucccccgcuacgccuucgccauggagcggaacgccggguccggcaucaucaucagcgacacccccgugcacgacugcaacaccacgugccagaccccgaagggcgccaucaacaccucccugcccuuccagaacauccaccccaucaccaucgggaagugccccaaguacgucaagagcacgaagcugcgccucgcgaccggccugcggaacgugccguccauccagagccgcgggcuguucggcgccaucgccggguucaucgagggcggcuggaccgggaugguggacggcugguacggguaccaccaccagaacgagcagggcuccggguacgccgccgaccucaagagcacccagaacgcgaucgacgagaucacgaacaaggugaacuccgucaucgagaagaugaacacccaguucaccgccgugggcaaggaguucaaccaccuggagaagcggaucgagaaccugaacaagaaggucgacgacggcuuccucgacaucuggaccuacaacgccgagcugcuggugcuccuggagaacgagcgcacgcuggacuaccacgacagcaacgugaagaaccucuacgagaagguccggucccagcugaagaacaacgccaaggagaucgggaacggcugcuucgaguucuaccacaagugcgacaacacgugcauggagagcgugaagaacgggaccuacgacuaccccaaguacuccgaggaggccaagcugaaccgcgaggagaucgacggcgugaagcucgagagcacccggaucuaccagauccuggcgaucuacuccaccgucgccagcagccuggugcucguggucucccugggggccaucagcuucuggaugugcuccaacggcagccugcagugccgcaucugcaucuga

SEQ ID NO: 66998 - RNA, 1701 nt, Artificial Sequence; identical to SEQ ID NO: 66935
  derived and/or modified CDS sequence (opt1) from hemagglutinin__InfluenzaA__ACS78036

SEQ ID NO: 66999 - RNA, 1701 nt, Artificial Sequence; identical to SEQ ID NO: 66935
  derived and/or modified CDS sequence (opt1) from hemagglutinin__InfluenzaA__ACS78046

SEQ ID NO: 67000 - RNA, 1701 nt, Artificial Sequence; identical to SEQ ID NO: 66708
  derived and/or modified CDS sequence (opt1) from hemagglutinin__InfluenzaA__ACS92569

SEQ ID NO: 67001 - RNA, 1701 nt, Artificial Sequence; identical to SEQ ID NO: 66708
  derived and/or modified CDS sequence (opt1) from hemagglutinin__InfluenzaA__ACS92579

SEQ ID NO: 67002 - RNA, 1701 nt, Artificial Sequence; identical to SEQ ID NO: 66693
  derived and/or modified CDS sequence (opt1) from hemagglutinin__InfluenzaA__ACS92589

SEQ ID NO: 67003 - RNA, 1701 nt, Artificial Sequence
  derived and/or modified CDS sequence (opt1) from hemagglutinin__InfluenzaA__ACS92612
augaaggccauccuggugguccuccuguacaccuucgccaccgcgaacgccgacacgcugugcaucggcuaccacgccaacaacagcaccgacaccguggacaccgugcucgagaagaacgucacggugacccacuccgugaaccugcuggaggacaagcacaacgggaagcucugcaagcugcgcggcgucgcgccccugcaccucgggaagugcaacaucgccggcuggauccuggggaacccggagugcgagagccuguccaccgccagcuccuggagcuacaucguggagaccuccagcuccgacaacggcacgugcuaccccggcgacuucaucgacuacgaggagcuccgggagcagcugagcuccgugagcuccuucgagcgcuucgagaucuuccccaagaccagcuccuggcccauccacgacagcaacaagggggucaccgccgccugcccgcacgccggcgcgaaguccuucuacaagaaccugaucuggcucgugaagaaggggaacagcuaccccaagcuguccaagagcuacaucaacgacaagggcaaggaggugcugguccucugggggauccaccaccccagcaccuccgccgaccagcagagccuguaccagaacgccgacgccuacguguucgugggcuccagccgguacuccaagaaguucaagcccgagaucgccauccgcccgaagguccgggaccaggagggccgcaugaacuacuacuggacgcugguggagcccggggacaagaucaccuucgaggcgaccggcaaccucguggucccccgguacgccuucgccauggagcgcaacgccgggagcggcaucaucaucuccgacacccccgugcacgacugcgacacgaccugccagaccccgaagggcgccaucaacaccagccugcccuuccagaacauccaccccaucacgaucgggaagugccccaaguacgugaaguccaccaagcugcggcucgcgaccggccugcgcaacaucccgagcauccagucccgggggcuguucggcgccaucgccggguucaucgagggcggcuggaccgggauggucgacggcugguacggguaccaccaccagaacgagcagggcagcggguacgccgccgaccucaaguccacgcagaacgcgaucgacgagaucaccaacaaggugaacagcgugaucgagaagaugaacacccaguucaccgccgucggcaaggaguucaaccaccuggagaagcgcaucgagaaccugaacaagaagguggacgacggcuuccucgacaucuggacguacaacgccgagcugcugguccuccuggagaacgagcggacccuggacuaccacgacuccaacgugaagaaccucuacgagaaggugcgcagccagcugaagaacaacgccaaggagaucgggaacggcugcuucgaguucuaccacaagugcgacaacacgugcauggaguccgucaagaacgggaccuacgacuaccccaaguacagcgaggaggccaagcugaaccgggaggagaucgacggcgugaagcucgaguccacccgcaucuaccagauccuggcgaucuacagcaccguggccagcucccugguccucguggugagccugggggccaucuccuucuggaugugcagcaacggcucccugcagugccggaucugcaucuga

SEQ ID NO: 67004 - RNA, 1701 nt, Artificial Sequence; identical to SEQ ID NO: 66693
  derived and/or modified CDS sequence (opt1) from hemagglutinin__InfluenzaA__ACT10307

SEQ ID NO: 67005 - RNA, 1701 nt, Artificial Sequence; identical to SEQ ID NO: 66693
  derived and/or modified CDS sequence (opt1) from hemagglutinin__InfluenzaA__ACT10314

SEQ ID NO: 67006 - RNA, 1701 nt, Artificial Sequence
  derived and/or modified CDS sequence (opt1) from hemagglutinin__InfluenzaA__ACT11057
augaaggccauccuggugguccuccuguacaccuucgccaccgcgaacgccgacacgcugugcaucggcuaccacgccaacaacagcaccgacaccguggacaccgugcucgagaagaacgucacggugacccacuccgugaacauccuggaggacaagcacaacgggaagcugugcaagcuccgcggcgucgcgccccugcaccuggggaagugcaacaucgccggcuggauccucgggaacccggagugcgagagccuguccaccgccagcuccuggagcuacaucguggagaccuccagcuccgacaacggcacgugcuaccccggcgacuucaucgacuacgaggagcugcgggagcagcucagcuccgugagcuccuucgagcgcuucgagaucuuccccaagaccagcuccuggcccaaccacgacagcaacaagggggucaccgccgccugcccgcacgccggcgcgaaguccuucuacaagaaccugaucuggcuggugaagaaggggaacagcuaccccaagcucuccaagagcuacaucaacgacaagggcaaggaggugcugguccugugggggauccaccaccccagcaccuccgccgaccagcagagccucuaccagaacgccgacgccuacguguucgugggcuccagccgguacuccaagaaguucaagcccgagaucgccauccgcccgaagguccgggaccaggagggccgcaugaacuacuacuggacgcugguggagcccggggacaagaucaccuucgaggcgaccggcaaccugguggucccccgguacgccuucgccauggagcgcaacgccgggagcggcaucaucaucuccgacacccccgugcacgacugcaacacgaccugccagaccccgaagggcgccaucaacaccagccuccccuuccagaacauccaccccaucacgaucgggaagugccccaaguacgugaaguccaccaagcugcggcuggcgaccggccuccgcaacgucccgagcauccagucccgggggcuguucggcgccaucgccggguucaucgagggcggcuggaccgggaugguggacggcugguacggguaccaccaccagaacgagcagggcagcggguacgccgccgaccugaaguccacgcagaacgcgaucgacgagaucaccaacaaggugaacagcgucaucgagaagaugaacacccaguucaccgccgugggcaaggaguucaaccaccucgagaagcgcaucgagaaccugaacaagaaggucgacgacggcuuccuggacaucuggacguacaacgccgagcuccuggugcugcucgagaacgagcggacccuggacuaccacgacuccaacgugaagaaccuguacgagaagguccgcagccagcucaagaacaacgccaaggagguggggaacggcugcuucgaguucuaccacaagugcgacaacacgugcauggaguccgugaagaacgggaccuacgacuaccccaaguacagcgaggaggccaagcugaaccgggaggagaucgacggcgucaagcuggaguccacccgcaucuaccagauccucgcgaucuacagcaccguggccagcucccuggugcuggucgugagccucggggccaucuccuucuggaugugcagcaacggcucccugcagugccggaucugcaucuga

SEQ ID NO: 67007 - RNA, 1704 nt, Artificial Sequence
  derived and/or modified CDS sequence (opt1) from hemagglutinin__InfluenzaA__ACT15312
auggagaagaucgugcugcuccuggccaucgucagcaucgugaaguccgaccagaucugcaucggcuaccacgccaacaacagcaccgagcaggucgacaccaucauggagaagaacgugacggugacccacgcgcaggacauccuggagaagacccacaacgggaagcucugcaaccuggacggcgugaagccccugauccuccgcgacugcuccgucgccggguggcugcugggcaacccgaugugcgacgaguuccucaacgugcccgaguggagcuacaucguggagaagaucaaccccgccaacgaccugugcuaccccgggaacuucaacgacuacgaggagcugaagcaccuccugucccggaucaaccacuucgagaagauccagaucaucccgaagaacagcugguccgaccacgaggccagcggcgucuccagcgccugccccuaccagggccgcuccagcuucuuccggaacgugguguggcugaccaagaagaacaacgcguaccccacgaucaagcgcuccuacaacaacaccaaccaggaggaccuccugguccugugggggauccaccaccccaacgacgccgccgagcagacccggcucuaccagaacccgaccacguacaucagcgugggcaccuccacccugaaccagcgccuggugcccaagaucgccacccggagcaaggucaacgggcaguccggccgcauggaguucuucuggacgauccucaagagcaacgacgcgaucaacuucgaguccaacgggaacuucaucgcccccgagaacgccuacaagaucgugaagaagggcgacagcaccaucaugaaguccgagcuggaguacggcaacugcaacaccaagugccagacccccaucggggccaucaacagcagcaugccguuccacaacauccacccccugacgaucggcgagugccccaaguacgugaaguccaaccggcucguccuggccaccgggcugcgcaacagcccccagggcgagcggcgccggaagaagcgcggccucuucggggcgaucgccggcuucaucgagggcggguggcaggggaugguggacggcugguacggcuaccaccacuccaacgagcaggggagcggcuacgccgccgacaaggaguccacccagaaggccaucgacggggugaccaacaaggucaacagcaucaucgacaagaugaacacgcaguucgaggcggugggccgggaguucaacaaccuggagcgccggaucgagaaccugaacaagaagauggaggacggguuccucgacguguggaccuacaacgccgagcugcugguccucauggagaacgagcgcacccuggacuuccacgacuccaacgugaagaaccuguacgacaagguccggcuccagcugcgcgacaacgccaaggagcugggcaacggcugcuucgaguucuaccaccggugcgacaacgagugcauggagagcgugcgcaacgggaccuacgacuacccgcaguacuccgaggaggcccgccucaagcgggaggagaucagcggcgugaagcuggaguccaucgggacguaccagauccugagcaucuacuccaccgucgccagcucccucgcgcuggccaucaugguggccggccuguuccucuggaugugcagcaacgggucccugcagugccgcaucugcaucuga

SEQ ID NO: 67008 - RNA, 1704 nt, Artificial Sequence
  derived and/or modified CDS sequence (opt1) from hemagglutinin__InfluenzaA__ACT15314
auggagaagaucgugcugcuccuggccaucgucagccuggugaaguccgaccagaucugcaucggcuaccacgccaacaacagcaccgagcaggucgacaccaucauggagaagaacgugacggugacccacgcgcaggacauccucgagaagacccacaacgggaagcugugcaaccuggacggcgugaagccccucauccugcgcgacugcuccgucgccggguggcugcucggcaacccgaugugcgacgaguuccugaacgugcccgaguggagcuacaucguggagaagaucaaccccgccaacgaccugugcuaccccgggaacuucaacgacuacgaggagcucaagcaccuccugucccggaucaaccacuucgagaagauccagaucaucccgaagaacagcugguccgaccacgaggccagcggcgucuccagcgccugccccuaccagggccgcuccagcuucuuccggaacgugguguggcugaccaagaagaacaacgcguaccccacgaucaagcgcuccuacaacaacaccaaccaggaggaccugcugguccucugggggauccaccaccccaacgacgccgccgagcagacccggcuguaccagaacccgaccacguacaucagcgugggcaccuccacccugaaccagcgccucgugcccaagaucaccacgcggagcaaggucaacgggcaguccggccgcauggaguucuucuggaccauccucaagagcaacgacgccaucaacuucgaguccaacgggaacuucaucgcgcccgagaacgccuacaagaucgugaagaagggcgacagcaccaucaugaaguccgagcuggaguacggcaacugcaacaccaagugccagacgcccaucggggccaucaacagcagcaugccguuccacaacauccacccccugaccaucggcgagugccccaaguacgugaaguccaaccggcugguccuggccaccgggcuccgcaacagcccccagggcgagcggcgccggaagaagcgcggccuguucggggccaucgcgggcuucaucgagggcggguggcaggggaugguggacggcugguacggcuaccaccacuccaacgagcaggggagcggcuacgccgccgacaaggaguccacccagaaggccaucgacggggugacgaacaaggucaacagcaucaucgacaagaugaacacccaguucgaggccgugggccgggaguucaacaaccuggagcgccggaucgagaaccucaacaagaagauggaggacggguuccuggacguguggaccuacaacgcggagcugcucguccugauggagaacgagcgcacccuggacuuccacgacuccaacgugaagaaccucuacgacaagguccggcugcagcugcgcgacaacgccaaggagcucggcaacggcugcuucgaguucuaccaccggugcgacaacgagugcauggagagcgugcgcaacgggacguacgacuacccgcaguacuccgaggaggcccgccugaagcgggaggagaucagcggcgugaagcuggaguccaucgggaccuaccagauccucagcaucuacuccaccgucgccagcucccuggcccuggcgaucaugguggccggccucuuccuguggaugugcagcaacgggucccugcagugccgcaucugcaucuga

SEQ ID NO: 67009 - RNA, 1704 nt, Artificial Sequence
  derived and/or modified CDS sequence (opt1) from hemagglutinin__InfluenzaA__ACT15316
auggagaagaucgugcugcuccuggccaucgucagccuggugaaguccgaccagaucugcaucggcuaccacgccaacaacagcaccgagcaggucgacaccaucauggagaagaacgugacggugacccacgcgcaggacauccucgagaagacccacaacgggaagcugugcaaccuggacggcgugaagccccucauccugcgcgacugcuccgucgccggguggcugcucggcaacccgaugugcgacgaguuccugaacgugcccgaguggagcuacaucguggagaagaucaaccccgccaacgaccugugcuaccccgggaacuucaacgacuacgaggagcucaagcaccuccugucccggaucaaccacuucgagaagauccagaucaucccgaagaacagcugguccgaccacgaggccagcggcgucuccagcgccugccccuaccagggccgcuccagcuucuuccggaacgugguguggcugaccaagaaggacaacgcguaccccacgaucaagcgcuccuacaacaacaccaaccaggaggaccugcugguccucugggggauccaccaccccaacgacgccgccgagcagacccggcuguaccagaacccgaccacguacaucagcgugggcaccuccacccugaaccagcgccucauccccaagaucgccacccggagcaaggugaacgggcaguccggccgcauggaguucuucuggacgauccucaagagcaacgacgcgaucaacuucgaguccaacgggaacuucaucgcccccgagaacgccuacaagaucgucaagaagggcgacagcaccaucaugaaguccgagcuggaguacggcaacugcaacaccaagugccagacccccaucggggccaucaacagcagcaugccguuccacaacauccacccccugacgaucggcgagugccccaaguacgugaaguccaaccggcuggugcuggccaccgggcuccgcaacagcccccagggcgagcggcgccggaagaagcgcggccuguucggggcgaucgccggcuucaucgagggcggguggcaggggauggucgacggcugguacggcuaccaccacuccaacgagcaggggagcggcuacgccgccgacaaggaguccacccagaaggccaucgacggggugaccaacaaggugaacagcaucaucgacaagaugaacacgcaguucgaggcggucggccgggaguucaacaaccuggagcgccggaucgagaaccucaacaagaagauggaggacggguuccuggacguguggaccuacaacgccgagcugcucgugcugauggagaacgagcgcacccuggacuuccacgacuccaacgucaagaaccucuacgacaaggugcggcugcagcugcgcgacaacgccaaggagcucggcaacggcugcuucgaguucuaccaccggugcgacaacgagugcauggagagcguccgcaacgggaccuacgacuacccgcaguacuccgaggaggcccgccugaagcgggaggagaucagcggcgugaagcuggaguccaucgggacguaccagauccucagcaucuacuccaccguggccagcucccuggcgcuggccaucauggucgccggccucuuccuguggaugugcagcaacgggucccugcagugccgcaucugcaucuga

SEQ ID NO: 67010 - RNA, 1704 nt, Artificial Sequence
  derived and/or modified CDS sequence (opt1) from hemagglutinin__InfluenzaA__ACT15320
auggagaagaucgugcugcuccuggccaucgucagccuggugaaguccgaccagaucugcaucggcuaccacgccaacaacagcaccgagcaggucgacaccaucauggagaagaacgugacggugacccacgcgcaggacauccucgagaagacccacaacgggaagcugugcaaccuggacggcgugaagccccucauccugcgcgacugcuccgucgccggguggcugcucggcaacccgaugugcgacgaguuccugaacgugcccgaguggagcuacaucguggagaagaucaaccccgccaacgaccugugcuaccccgggaacuucaacgacuacgaggagcucaagcaccuccugucccggaucaaccacuucgagaagauccagaucaucccgaagaacagcugguccgaccacgaggccagcggcauguccagcgccugccccuaccagggccgcuccagcuucuuccggaacgucguguggcugaccaagaaggacaacgcguaccccacgaucaagcgcuccuacaacaacaccaaccaggaggaccugcuggugcucugggggauccaccaccccaacgacgccgccgagcagacccggcuguaccagaacccgaccacguacaucagcgucggcaccuccacccugaaccagcgccucgugcccaagaucgccacccggagcaaggugaacgggcaguccggccgcauggaguucuucuggacgauccucaagagcaacgacgcgaucaacuucgaguccaacgggaacuucaucgcccccgagaacgccuacaagaucgucaagaagggcgacagcaccaucaugaaguccgagcuggaguacggcaacugcaacaccaagugccagacccccaucggggccaucaacagcagcaugccguuccacaacauccacccccugacgaucggcgagugccccaaguacgugaaguccaaccggcuggugcuggccaccgggcuccgcaacagcccccagggcgagcggcgccggaagaagcgcggccuguucggggcgaucgccggcuucaucgagggcggguggcaggggauggucgacggcugguacggcuaccaccacuccaacgagcaggggagcggcuacgccgccgacaaggaguccacccagaaggccaucgacggggugaccaacaaggugaacagcaucaucgacaagaugaacacgcaguucgaggcggucggccgggaguucaacaaccuggagcgccggaucgagaaccucaacaagaagauggaggacggguuccuggacguguggaccuacaacgccgagcugcucgugcugauggagaacgagcgcacccuggacuuccacgacuccaacgucaagaaccucuacgacaaggugcggcugcagcugcgcgacaacgccaaggagcucggcaacggcugcuucgaguucuaccaccggugcgacaacgagugcauggagagcguccgcaacgggaccuacgacuacccgcaguacuccgaggaggcccgccugaagcgggaggagaucagcggcgugaagcuggaguccaucgggacguaccagauccucagcaucuacuccaccguggccagcucccuggcgcuggccaucauggucgccggccucuuccuguggaugugcagcaacgggucccugcagugccgcaucugcaucuga

SEQ ID NO: 67011 - RNA, 1704 nt, Artificial Sequence
  derived and/or modified CDS sequence (opt1) from hemagglutinin__InfluenzaA__ACT15322
auggagaagaucgugcugcuccuggccaucgucagccuggugaaguccgaccagaucugcaucggcuaccacgccaacaacagcaccgagcaggucgacaccaucauggagaagaacgugacggugacccacgcgcaggacauccucgagaagacccacaacgggaagcugugcaaccuggacggcgugaagccccucauccugcgcgacugcuccgucgccggguggcugcucggcaacccgaugugcgacgaguuccugaacgugcccgaguggagcuacaucguggagaagaucaaccccgccaacgaccugugcuaccccgggaacuucaacgacuacgaggagcucaagcaccuccugucccggaucaaccacuucgagaagauccagaucaucccgaagaacagcugguccgaccacgaggccagcggcgucuccagcgccugccccuaccagggccgcuccagcuucuuccggaacgugguguggcugaccaagaaggacaacgcguaccccacgaucaagcgcuccuacaacaacaccaaccaggaggaccugcugguccucugggggauccaccaccccaacgacgccgccgagcagacccggcuguaccagaacccgaccacguacaucagcgugggcaccuccacccugaaccagcgccucgugcccaagaucgccacccggagcaaggucaacgggcaguccggccgcauggaguucuucuggacgauccucaagagcaacgacgcgaucaacuucgaguccaacgggaacuucaucgcccccgagaacgccuacaagaucgugaagaagggcgacagcaccaucaugaaguccgagcuggaguacggcaacugcaacaccaagugccagacccccaucggggccaucaacagcagcaugccguuccacaacauccacccccugacgaucggcgagugccccaaguacgugaaguccaaccggcugguccuggccaccgggcuccgcaacagcccccagggcgagcggcgccggaagaagcgcggccuguucggggcgaucgccggcuucaucgagggcggguggcaggggaugguggacggcugguacggcuaccaccacuccaacgagcaggggagcggcuacgccgccgacaaggaguccacccagaaggccaucgacggggugaccaacaaggucaacagcaucaucgacaagaugaacacgcaguucgaggcggugggccgggaguucaacaaccuggagucccgcaucgagaaccucaacaagaagauggaggacggguuccuggacguguggaccuacaacgccgagcugcucguccugauggagaacgagcggacccuggacuuccacgacagcaacgugaagaaccucuacgacaagguccgccugcagcugcgggacaacgccaaggagcucggcaacggcugcuucgaguucuaccaccgcugcgacaacgagugcauggaguccgugcggaacgggaccuacgacuacccgcaguacagcgaggaggcccgccugaagcgcgaggagaucuccggcgugaagcuggagagcaucgggacguaccagauccucuccaucuacagcaccgucgccuccagccuggcgcuggccaucaugguggccggccucuuccuguggaugugcuccaacgggagccugcagugccggaucugcaucuga

SEQ ID NO: 67012 - RNA, 1704 nt, Artificial Sequence
  derived and/or modified CDS sequence (opt1) from hemagglutinin__InfluenzaA__ACT15326
auggagaagaucgugcugcuccuggccaucgucagccuggugaaguccgaccagaucugcaucggcuaccacgccaacaacagcaccgagcaggucgacaccaucauggagaagaacgugacggugacccacgcgcaggacauccucgagaagacccacaacgggaagcugugcaaccuggacggcgugaagccccucauccugcgcgacugcuccgucgccggguggcugcucggcaacccgaugugcgacgaguuccugaacgugcccgaguggagcuacaucguggagaagaucaaccccgccaacgaccugugcuaccccgggaacuucaacgacuacgaggagcucaagcaccuccugucccggaucaaccacuucgagaagauccagaucaucccgaagaacagcugguccgaccacgaggccagcggcgucuccagcgccugccccuaccagggccgcuccagcuucuuccggaacgugguguggcugaccaagaaggacaacgcguaccccacgaucaagcgcuccuacaacaacaccaaccaggaggaccugcugguccucugggggauccaccaccccaacgacgccgccgagcagacccggcuguaccagaacccgaccacguacaucagcgugggcaccuccacccugaaccagcgccucauccccaagaucgccacccggagcaaggugaacgggcaguccggccgcauggaguucuucuggacgauccugaagcccaacgacgcgaucaacuucgagagcaacgggaacuucaucgcccccgagaacgccuacaagaucgucaagaagggcgacuccaccaucaugaaguccgagcuggaguacggcaacugcaacaccaagugccagaccccgaucggggccaucaacagcagcaugcccuuccacaacauccacccccucacgaucggcgagugccccaaguacgucaagagcaaccggcuggugcuggccaccgggcuccgcaacuccccgcagggcgagcggcgccggaagaagcgcggccuguucggggcgaucgccggcuucaucgagggcggguggcaggggaugguggacggcugguacggcuaccaccacagcaacgagcagggguccggcuacgccgccgacaaggagagcacccagaaggccaucgacggggugaccaacaaggugaacuccaucaucgacaagaugaacacgcaguucgaggcggucggccgggaguucaacaaccuggagcgccggaucgagaaccucaacaagaagauggaggacggguuccuggacguguggaccuacaacgccgagcugcucgugcugauggagaacgagcgcacccuggacuuccacgacagcaacgucaagaaccucuacgacaaggugcggcugcagcugcgcgacaacgccaaggagcucggcaacggcugcuucgaguucuaccaccggugcgacaacgagugcauggaguccguccgcaacgggaccuacgacuacccccaguacagcgaggaggcccgccugaagcgggaggagaucuccggcgugaagcuggagagcaucgggacguaccagauccucuccaucuacagcaccguggccuccagccuggcgcuggccaucauggucgccggccucuuccuguggaugugcuccaacgggagccugcagugccgcaucugcaucuga

SEQ ID NO: 67013 - RNA, 1704 nt, Artificial Sequence
  derived and/or modified CDS sequence (opt1) from hemagglutinin__InfluenzaA__ACT15328
auggagaagaucgugcugcuccuggccaucgucagccuggugaaguccgaccagaucugcaucggcuaccacgccaacaacagcaccgagcaggucgacaccaucauggagaagaacgugacggugacccacgcgcaggacauccucgagaagacccacaacgggaagcugugcaaccuggacggcgugaagccccucauccugcgcgacugcuccgucgccggguggcugcucggcaacccgaugugcgacgaguuccugaacgugcccgaguggagcuacaucguggagaagaucaaccccgccaacgaccugugcuaccccgggaacuucaacgacuacgaggagcucaagcaccuccugucccggaucaaccacuucgagaagauccagaucaucccgaagaacagcugguccgaccacgaggccagcggcgucuccagcgccugccccuaccagggccgcuccagcuucuuccggaacgugguguggcugaccaagaaggacaacgcguaccccacgaucaagcgcuccuacaacaacaccaaccaggaggaccugcugguccucugggggauccaccaccccaacgacgccgccgagcagacccggcuguaccagaacccgaccacguacaucagcgugggcaccuccacccugaaccagcgccucgugcccaagaucgccacccggagcaaggucaacgggcagaacggccgcauggaguucuucuggacgauccugaaguccaacgacgcgaucaacuucgagagcaacgggaacuucaucgcccccgagaacgccuacaagaucgugaagaagggcgacuccaccaucaugaaguccgagcuggaguacggcaacugcaacaccaagugccagacccccaucggggccaucaacagcuccaugccguuccacaacauccacccccucacgaucggcgagugccccaaguacgucaagagcaaccggcuggugcuggccaccgggcuccgcaacagcccccagggcgagcggcgccggaagaagcgcggccuguucggggcgaucgccggcuucaucgagggcggguggcaggggaugguggacggcugguacggcuaccaccacagcaacgagcagggguccggcuacgccgccgacaaggagagcacccagaaggccaucgacggggugaccaacaaggucaacuccaucaucgacaagaugaacacgcaguucgaggcggugggccgggaguucaacaaccuggagcgccggaucgagaaccucaacaagaagauggaggacggguuccuggacguguggaccuacaacgccgagcugcucguccugauggagaacgagcgcacccuggacuuccacgacagcaacgugaagaaccucuacgacaagguccggcugcagcugcgcgacaacgccaaggagcucggcaacggcugcuucgaguucuaccaccggugcgacaacgagugcauggaguccgugcgcaacgggaccuacgacuacccgcacuacagcgaggaggcccgccugaagcgggaggagaucuccggcgugaagcuggagagcaucgggacguaccagauccucuccaucuacagcaccgucgccuccagccuggcgcuggccaucaugguggccggccucuuccuguggaugugcuccaacgggagccugcagugccgcaucugcaucuga

SEQ ID NO: 67014 - RNA, 1704 nt, Artificial Sequence
  derived and/or modified CDS sequence (opt1) from hemagglutinin__InfluenzaA__ACT15330
auggagaagaucgugcugcuccuggccaucgucagccuggugaaguccgaccagaucugcaucggcuaccacgccaacaacagcaccgagcaggucgacaccaucauggagaagaacgugacggugacccacgcgcaggacauccucgagaagacccacaacgggaagcugugcaaccuggacggcgugaagccccucauccugcgcgacugcuccgucgccggguggcugcucggcaacccgaugugcgacgaguuccugaacgugcccgaguggagcuacaucguggagaagaucaaccccgccaacgaccugugcuaccccgggaacuucaacgacuacgaggagcucaagcaccuccugucccggaucaaccacuucgagaagauccagaucaucccgaagaacagcugguccgaccacgaggccagcggcgucuccagcgccugccccuaccagggccgcuccagcuucuuccggaacgugguguggcugaccaagaaggacaacgcguaccccacgaucaagcgcuccuacaacaacaccaaccaggaggaccugcugguccucugggggauccaccaccccaacgacgccgccgagcagacccggcuguaccagaacccgaccacguacaucagcgugggcaccuccacccugaaccagcgccucgugcccaagaucgccacccggagcaaggucaacgggcaguccggccgcauggaguucuucuggacgauccucaagagcaacgacgcgaucaacuucgaguccaacgggaacuucaucgcccccgagaacgccuacaagaucgugaagaagggcgacagcaccaucaugaaguccgagcuggaguacggcaacugcaacaccaagugccagacccccaucggggccaucaacagcagcaugccguuccacaacauccacccccugacgaucggcgagugccccaaguacgugaaguccaaccggcugguccuggccaccgggcuccgcaacagcccccagggcgagcggcgccggaagaagcgcggccuguucggggcgaucgccggcuucaucgagggcggguggcaggggaugguggacggcugguacggcuaccaccacuccaacgagcaggggagcggcuacgccgccgacaaggaguccacccagaaggccaucgacggggugaccaacaaggucaacagcaucaucgacaagaugaacacgcaguucgaggcggugggccgggaguucaacaaccuggagcgccggaucgagaaccucaacaagaagauggaggacggguuccuggacguguggaccuacaacgccgagcugcucguccugauggagaacgagcgcacccuggacuuccacgacuccaacgugaagaaccucuacgacaagguccggcugcagcugcgcgacaacgccaaggagcucggcaacggcugcuucgaguucuaccaccggugcgacaacgagugcauggagagcgugcgcaacgggaccuacgacuacccgcacuacuccgaggaggcccgccugaagcgggaggagaucagcggcgugaagcuggaguccaucgggacguaccagauccucagcaucuacuccaccgucgccagcucccuggcgcuggccaucaugguggccggccucuuccuguggaugugcagcaacgggucccugcagugccgcaucugcaucuga

SEQ ID NO: 67015 - RNA, 1707 nt, Artificial Sequence
  derived and/or modified CDS sequence (opt1) from hemagglutinin__InfluenzaA__ACT15332
auggagaagaucgugcugcuccuggccaucgucagccuggugaaguccgaccagaucugcaucggcuaccacgccaacaacagcaccgagcaggucgacaccaucauggagaagaacgugacggugacccacgcgcaggacauccucgagaagacccacaacgggaagcugugcgaccuggacggcgugaagccccucauccugcgcgacugcuccgucgccggguggcugcucggcaacccgaugugcgacgaguuccugaacgugcccgaguggagcuacaucguggagaagaucaaccccgccaacgaccugugcuaccccggggacuucaacgacuacgaggagcucaagcaccuccugucccggaucaaccacuucgagaagauccagaucauccccaagagcuccuggagcgaccacgaggccuccagcggcgucuccagcgccugcccguaccagggccgcuccagcuucuuccggaacgugguguggcugaucaagaaggacaacgcguaccccaccaucaagcgcuccuacaacaacacgaaccaggaggaccugcugguccucugggggauccaccaccccaacgacgccgccgagcagacccggcuguaccacaacccgaccaccuacaucagcgugggcacguccacccugaaccagcgccucgugcccaagaucgccacccggagcaagaucaacgggcaguccggccgcauggaguucuucuggaccauccugaagcccaacgacgcgaucaacuucgagagcaacgggaacuucaucgcccccgagaacgccuacaagaucgucaagaagggcgacagcacgaucaugaaguccgagcuggaguacggcaacugcaacaccaagugccagaccccgaucggggccaucaacagcuccaugcccuuccacaacauccacccccucaccaucggcgagugccccaaguacgucaagagcucccggcuggugcuggccacggggcuccgcaacagcccgcagggcaagucccggcgcaagaagcggggccuguucggggcgaucgccggcuucaucgagggcggguggcaggggaugguggacggcugguacggcuaccaccacagcaacgagcagggguccggcuacgccgccgacaaggagagcacccagcgcgccaucgacggggugaccaacaaggugaacuccaucaucgacaagaugaacacccaguucgaggcggucggccgggaguucaacaaccuggagcgccggaucgagaaccucaacaagaagauggaggacggguuccuggacguguggacguacaacgccgagcugcucgugcugauggagaacgagcgcacccuggacuuccacgacagcaacgucaagaaccucuacgacaaggugcggcugcagcugcgcgacaacgccaaggagcucggcaacggcugcuucgaguucuaccaccggugcgacaacgagugcauggaguccguccgcaacgggaccuacgacuacccccaguacagcgaggaggcccgccugaagcgggaggagaucuccggcgugaagcuggagagcaucgggaucuaccagauccucuccaucuacagcaccguggccuccagccuggcgcuggccaucauggucgccggccucuuccuguggaugugcagcaacgggucccugcagugccgcaucugcaucuga

SEQ ID NO: 67016 - RNA, 1704 nt, Artificial Sequence
  derived and/or modified CDS sequence (opt1) from hemagglutinin__InfluenzaA__ACT15336
auggagaagaucgugcugcuccuggccaucgucagccuggugaaguccgaccagaucugcaucggcuaccacgccaacaacagcaccgagcaggucgacaccaucauggagaagaacgugacggugacccacgcgcaggacauccucgagaagacccacaacgggaagcugugcaaccuggacggcgugaagccccucauccugcgcgacugcuccgucgccggguggcugcucggcaacccgaugugcgacgaguuccugaacgugcccgaguggagcuacaucguggagaagaucaaccccgccaacgaccugugcuaccccgggaacuucaacgacuacgaggagcucaagcaccuccugucccggaucaaccacuucgagaagauccagaucaucccgaagaacagcugguccgaccacgaggccagcggcgucuccagcgccugccccuaccagggccgcuccagcuucuuccggaacgugguguggcugaccaagaaggacaacgcguaccccacgaucaagcgcuccuacaacaacaccaaccaggaggaccugcugguccucugggggauccaccaccccaacgacgccgccgagcagacccggcuguaccagaacccgaccacguacaucagcgugggcaccuccacccugaaccagcgccucgugcccaagaucgccacccggagcaaggucaacgggcaguccggccgcauggaguucuucuggacgauccucaagagcaacgacgcgaucaacuucgaguccaacgggaacuucaucgcccccgagaacgccuacaagaucgugaagaagggcgacagcaccaucaugaaguccgagcuggaguacggcaacugcaacaccaagugccagacccccaucggggccaucaacagcagcaugccguuccacaacauccacccccugacgaucggcgagugccccaaguacgugaaguccaaccggcugguccuggccaccgggcuccgcaacagcccccagggcgagcggcgccggaagaagcgcggccuguucggggcgaucgccggcuucaucgagggcggguggcaggggaugguggacggcugguacggcuaccaccacuccaacgagcaggggagcggcuacgccgccgacaaggaguccacccagaaggccaucgacggggugaccaacaaggucaacagcaucaucgacaagaugaacacgcaguucgaggcggugggccgggaguucaacaaccuggagcgccggaucgagaaccucaacaagaagauggaggacggguuccuggacguguggaccuacaacgccgagcugcucguccugauggagaacgagcgcacccuggacuuccacgacuccaacgugaagaaccucuacgacaagguccggcugcagcugcgcgacaacgccaaggagcucggcaacggcugcuucgaguucuaccaccggugcgacaacgagugcauggagagcgugcgcaacgggaccuacgacuacccgcaguacuccgaggaggcccgccugaagcgggaggagaucagcggcgugaagcuggaguccaucgggacguaccagauccucagcaucuacuccaccgucgccagcucccuggcgcuggccaucaugguggccggccucuuccuguggaugugcagcaacgggucccugcagugccgcaucugcaucuga

SEQ ID NO: 67017 - RNA, 1704 nt, Artificial Sequence
  derived and/or modified CDS sequence (opt1) from hemagglutinin__InfluenzaA__ACT15338
auggagaagaucgugcugcuccuggccaucgucagccuggugaaguccgaccagaucugcaucggcuaccacgccaacaacagcaccgagcaggucgacaccaucauggagaagaacgugacggugacccacgcgcaggacauccucgagaagacccacaacgggaagcugugcaaccuggacggcgugaagccccucauccugcgcgacugcuccgucgccggguggcugcucggcaacccgaugugcgacgaguuccugaacgugcccgaguggagcuacaucguggagaagaucaaccccgccaacgaccugugcuaccccgggaacuucaacgacuacgaggagcucaagcaccuccugucccggaucaaccacuucgagaagauccagaucaucccgaagaacagcugguccgaccacgaggccagcggcgucuccagcgccugccccuaccagggccgcuccagcuucuuccggaacgugguguggcugaccaagaagaacaacgcguaccccacgaucaagcgcuccuacaacaacaccaaccaggaggaccugcugguccucugggggauccaccaccccaacgacgccaccgagcagacccggcuguaccagaacccgacgaccuacaucagcgugggcaccuccacccugaaccagcgccucauccccaagaucgccacgcggagcaaggugaacgggcaguccggccgcauggaguucuucuggaccauccucaagagcaacgacgccaucaacuucgaguccaacgggaacuucaucgcgcccgagaacgccuacaagaucgucaagaagggcgacagcaccaucaugaaguccgagcuggaguacggcaacugcaacaccaagugccagacgcccaucggggccaucaacagcagcaugccguuccacaacauccacccccugaccaucggcgagugccccaaguacgugaaguccaaccggcuggugcuggccaccgggcuccgcaacagcccccaggagggccggcgccggaagaagcgcggccuguucggggccaucgcgggcuucaucgagggcggguggcaggggauggucgacggcugguacggcuaccaccacuccaacgagcaggggagcggcuacgccgccgacaaggaguccacccagaaggccaucgacggggugacgaacaaggugaacagcaucaucgacaagaugaacacccaguucgaggccgucggccgggaguucaacaaccuggagcgccggaucgagaaccucaacaagaagauggaggacggguuccuggacguguggaccuacaacgcggagcugcucgugcugauggagaacgagcgcacccuggacuuccacgacuccaacgucaagaaccucuacgacaaggugcggcugcagcugcgcgacaacgccaaggagcucggcaacggcugcuucgaguucuaccaccggugcgacaacgagugcauggagagcguccgcaacgggacguacgacuacccgcaguacuccgaggaggcccgccugaagcgggaggagaucagcggcgugaagcuggaguccaucgggaccuaccagauccucagcaucuacuccaccguggccagcucccuggcccuggcgaucauggucgccggccucuuccuguggaugugcagcaacgggucccugcagugccgcaucugcaucuga

SEQ ID NO: 67018 - RNA, 1704 nt, Artificial Sequence
  derived and/or modified CDS sequence (opt1) from hemagglutinin__InfluenzaA__ACT15340
auggagaagaucgugcugcuccuggccaucgucagccuggugaaguccgaccagaucugcaucggcuaccacgccaacaacagcaccgagcaggucgacaccaucauggagaagaacgugacggugacccacgcgcaggacauccucgagaagacccacaacgggaagcugugcaaccuggacggcgugaagccccucauccugcgcgacugcuccgucgccggguggcugcucggcaacccgaugugcgacgaguuccugaacgugcccgaguggagcuacaucguggagaagaucaaccccgccaacgaccugugcuaccccgggaacuucaacgacuacgaggagcucaagcaccuccugucccggaucaaccacuucgagaagauccagaucaucccgaagaacagcugguccgaccacgaggccagcggcgucuccagcgccugccccuaccagggccgcuccagcuucuuccggaacgugguguggcugaccaagaagaacaacgcguaccccacgaucaagcgcuccuacaacaacaccaaccaggaggaccugcugguccucugggggauccaccaccccaacgacgccgaggagcagacccggcuguaccagaacccgaccacguacaucagcgugggcaccuccacccugaaccagcgccucgugcccaagaucgccacccggagcaaggucaacgggcaguccggccgcauggaguucuucuggacgauccucaagagcaacgacgccaucaacuucgaguccaacgggaacuucaucgcgcccgagaacgccuacaagaucgugaagaagggcgacagcaccaucaugaaguccgagcuggaguacggcaacugcaacaccaagugccagacccccaucggggccaucaacagcagcaugccguuccacaacauccacccccugacgaucggcgagugccccaaguacgugaaguccaaccggcugguccuggccaccgggcuccgcaacagcccccagggcgagcggcgccggaagaagcgcggccuguucggggccaucgcgggcuucaucgagggcggguggcaggggaugguggacggcugguacggcuaccaccacuccaacgagcaggggagcggcuacgccgccgacaaggaguccacccagaaggccaucgacggggugaccaacaaggucaacagcaucaucgacaagaugaacacgcaguucgaggccgugggccgggaguucaacgcgcuggagcgccggaucgagaaccucaacaagaagauggaggacggguuccuggacguguggaccuacaacgccgagcugcucguccugauggagaacgagcgcacccuggacuuccacgacuccaacgugaagaaccucuacgacaagguccggcugcagcugcgcgacaacgccaaggagcucggcaacggcugcuucgaguucuaccaccggugcgacaacgagugcauggagagcgugcgcaacgggaccuacgacuacccgcaguacuccgaggaggcccgccugaagcgggaggagaucagcggcgugaagcuggaguccaucgggacguaccagauccucagcaucuacuccaccgucgccagcucccuggcgcuggccaucaugguggccggccucuuccuguggaugugcagcaacgggucccugcagugccgcaucugcaucuga

SEQ ID NO: 67019 - RNA, 1704 nt, Artificial Sequence
  derived and/or modified CDS sequence (opt1) from hemagglutinin__InfluenzaA__ACT15342
auggagaagaucgugcugcuccuggccaucgucagccuggugaaguccgaccagaucugcaucggcuaccacgccaacaacagcaccgagcaggucgacaccaucauggagaagaacgugacggugacccacgcgcaggacauccucgagaagacccacaacgggaagcugugcaaccuggacggcgugaagccccucauccugcgcgacugcuccgucgccggguggcugcucggcaacccgaugugcgacgaguuccugaacgugcccgaguggagcuacaucguggagaagaucaaccccgccaacgaccugugcuaccccggguccuucaacgacuacgaggagcucaagcaccuccugagccggaucaaccacuucgagaagauccagaucaucccgaagaacuccuggagcgaccacgaggccuccggcgucagcuccgccugccccuaccagggccgcagcuccuucuuccggaacgugguguggcugaccaagaaggacaacgcguaccccacgaucaagcgcagcuacaacaacaccaaccaggaggaccugcugguccucugggggauccaccaccccaacgacgccgccgagcagacccggcuguaccagaacccgaccacguacaucuccgugggcaccagcacccugaaccagcgccucgugcccaagaucgccacccgguccaaggucaacgggcagagcggccgcauggaguucuucuggacgauccugaagcccaacgacgcgaucaacuucgaguccaacgggaacuucaucgcccccgagaacgccuacaagaucgugaagaagggcgacagcaccaucaugaaguccgagcuggaguacggcaacugcaacaccaagugccagaccccgaucggggccaucaacagcagcaugcccuuccacaacauccacccccucacgaucggcgagugccccaaguacgugaaguccaaccggcugauccuggccaccgggcuccgcaacagcccgcagggcgagcggcgccggaagaagcgcggccuguucggggcgaucgccggcuucaucgagggcggguggcaggggauggucgacggcugguacggcuaccaccacuccaacgagcaggggagcggcuacgccgccgacaaggaguccacccagaaggccaucgacggggugaccaacaaggugaacagcaucaucgacaagaugaacacgcaguucgaggcggucggccgggaguucaacaaccuggagcgccggaucgagaaccucaacaagaagauggaggacggguuccuggacguguggaccuacaacgccgagcugcucgugcugauggagaacgagcgcacccuggacuuccacgacuccaacgucaagaaccucuacgacaaggugcggcugcagcugcgcgacaacgccaaggagcucggcaacggcugcuucgaguucuaccaccggugcgacaacgagugcauggagagcguccgcaacgggaccuacgacuacccccaguacuccgaggaggcccgccugaagcgggaggagaucagcggcgugaagcuggaguccaucgggacguaccagauccucagcaucuacuccaccguggccagcucccuggcgcuggccaucauggucgccggccucuuccuguggaugugcagcaacgggucccugcagugccgcaucugcaucuga

SEQ ID NO: 67020 - RNA, 1704 nt, Artificial Sequence; identical to SEQ ID NO: 67016
  derived and/or modified CDS sequence (opt1) from hemagglutinin__InfluenzaA__ACT15343

SEQ ID NO: 67021 - RNA, 1704 nt, Artificial Sequence
  derived and/or modified CDS sequence (opt1) from hemagglutinin__InfluenzaA__ACT15345
auggagaagaucgugcugcuccuggccaucgucagccuggugaaguccgaccagaucugcaucggcuaccacgccaacaacagcaccgagcaggucgacaccaucauggagaagaacgugacggugacccacgcgcaggacauccucgagaagacccacaacgggaagcugugcaaccuggacggcgugaagccccucauccugcgcgacugcuccgucgccggguggcugcucggcaacccgaugugcgacgaguuccugaacgugcccgaguggagcuacaucguggagaagaucaaccccgccaacgaccugugcuaccccgggaacuucaacgacuacgaggagcucaagcaccuccugucccggaucaaccacuucgagaagauccagaucaucccgaagaacagcugguccgaccacgaggccagcggcgucuccagcuccugccccuaccagggccgcagcuccuucuuccggaacgugguguggcucaccaagaaggacaacgccuaccccacgaucaagcgcagcuacaacaacaccaaccaggaggaccugcugguccucugggggauccaccaccccaacgacgcggccgagcagacccggcuguaccagaacccgaccacguacaucuccgugggcaccagcacccugaaccagcgccucgugcccaagaucgccacccgguccaaggucaacgggcagagcggccgcauggaguucuucuggacgauccugaaguccaacgacgccaucaacuucgggagcaacggcaacuucaucgcgcccgagaacgccuacaagaucgugaagaagggcgacagcaccaucaugaaguccgagcuggaguacgggaacugcaacaccaagugccagacccccaucggcgccaucaacagcuccaugccguuccacaacauccacccccucacgaucggggagugccccaaguacgugaaguccaaccggcugguccuggccaccggccuccgcaacagcccccagggcgagcggcgccggaagaagcgcgggcuguucggcgccaucgcgggguucaucgagggcggguggcagggcaugguggacggcugguacggguaccaccacagcaacgagcagggcuccggguacgccgccgacaaggagagcacccagaaggccaucgacggcgugaccaacaaggucaacuccaucaucgacaagaugaacacgcaguucgaggccguggggcgggaguucaacaaccuggagcgccggaucgagaaccucaacaagaagauggaggacggcuuccuggacguguggaccuacaacgcggagcugcucguccugauggagaacgagcgcacccuggacuuccacgacagcaacgugaagaaccucuacgacaagguccggcugcagcugcgcgacaacgccaaggagcucggcaacgggugcuucgaguucuaccaccggugcgacaacgagugcauggaguccgugcgcaacggcaccuacgacuacccgcaguacagcgaggaggcccgccugaagcgggaggagaucuccggggugaagcuggagagcaucggcacguaccagauccucuccaucuacagcaccgucgccuccagccuggcccuggcgaucaugguggccgggcuguuccuguggaugugcuccaacggcagccugcagugccgcaucugcaucuga

SEQ ID NO: 67022 - RNA, 1707 nt, Artificial Sequence
  derived and/or modified CDS sequence (opt1) from hemagglutinin__InfluenzaA__ACT15347
auggagaagaucgugcugcuccuggccaucgucagccuggugaaguccgaccagaucugcaucggcuaccacgccaacaacagcaccgagcaggucgacaccaucauggagaagaacgugacggugacccacgcgcaggacauccucgagaagacccacaacgggaagcugugcgaccuggacggcgugaagccccucauccugcgcgacugcuccgucgccggguggcugcucggcaacccgaugugcgacgaguuccugaacgugcccgaguggagcuacaucguggagaagaucaaccccgccaacgaccugugcuaccccggggacuucaacgacuacgaggagcucaagcaccuccugucccggaucaaccacuucgagaagauccagaucauccccaagagcuccuggagcgaccacgaggccuccagcggcgucuccagcgccugcccguaccagggccgcuccagcuucuuccggaacgugguguggcugaucaagaaggacaacgcguaccccaccaucaagcgcuccuacaacaacacgaaccaggaggaccugcugguccucugggggauccaccaccccaacgacgccgccgagcagacccggcuguaccacaacccgaccaccuacaucagcgugggcacguccacccugaaccagcgccucgugcccaagaucgccacccggagcaaggucaacgggcaguccggccgcauggaguucuucuggaccauccugaagcccaacgacgcgaucaacuucgagagcaacgggaacuucaucgcccccgagaacgccuacaagaucgugaagaagggcgacagcacgaucaugaaguccgagcuggaguacggcaacugcaacaccaagugccagaccccgaucggggccaucaacagcuccaugcccuuccacaacauccacccccucaccaucggcgagugccccaaguacgucaagagcucccggcuggugcuggccacggggcuccgcaacagcccgcagggcaagaaccggcgcaagaagcggggccuguucggggcgaucgccggcuucaucgagggcggguggcaggggaugguggacggcugguacggcuaccaccacuccaacgagcaggggagcggcuacgccgccgacaaggaguccacccagcgcgccaucgacggggugaccaacaaggucaacagcaucaucgacaagaugaacacccaguucgaggcggugggccgggaguucaacaaccuggagcgccggaucgagaaccucaacaagaagauggaggacggguuccuggacguguggacguacaacgccgagcugcucguccugauggagaacgagcgcacccuggacuuccacgacuccaacgugaagaaccucuacgacaagguccggcugcagcugcgcgacaacgccaaggagcucggcaacggcugcuucgaguucuaccaccggugcgacaacgagugcauggagagcgugcgcaacgggaccuacgacuacccccaguacuccgaggaggcccgccugaagcgggaggagaucagcggcgugaagcuggaguccaucgggaucuaccagauccucagcaucuacuccaccgucgccagcucccuggcgcuggccaucaugguggccggccucuuccuguggaugugcagcaacgggagccugcagugccgcaucugcaucuga

SEQ ID NO: 67023 - RNA, 1704 nt, Artificial Sequence
  derived and/or modified CDS sequence (opt1) from hemagglutinin__InfluenzaA__ACT15349
auggagaagaucgugcugcuccuggccaucgucagccuggugaaguccgaccagaucugcaucggcuaccacgccaacaacagcaccgagcaggucgacaccaucauggagaagaacgugacggugacccacgcgcaggacauccucgagaagacccacaacgggaagcugugcaaccuggacggcgugaagccccucauccugcgcgacugcuccgucgccggguggcugcucggcaacccgaugugcgacgaguuccugaacgugcccgaguggagcuacaucguggagaagaucaaccccgccaacgaccugugcuaccccgggaacuucaacgacuacgaggagcucaagcaccuccugucccggaucaaccacuucgagaagauccagaucaucccgaagaacagcugguccgaccacgaggccagcggcgucuccagcgccugccccuaccagggccgcuccagcuucuuccggaacgugguguggcucaccaagaaggacaacgcguaccccacgaucaagcgcuccuacaacaacaccaaccaggaggaccugcugguccucugggggauccaccaccccaacgacgccaccgagcagacccggcuguaccagaacccgacgaccuacaucagcgugggcaccuccacccugaaccagcgccucauccccaagaucgccacgcggagcaaggugaacgggcaguccggccgcauggaguucuucuggaccauccucaagagcaacgacgccaucaacuucgaguccaacgggaacuucaucgcgcccgagaacgccuacaagaucgucaagaagggcgacagcaccaucaugaaguccgagcuggaguacggcaacugcaacaccaagugccagacgcccaucggggccaucaacagcagcaugccguuccacaacauccacccccugaccaucggcgagugccccaaguacgugaaguccaaccggcuggugcuggccaccgggcuccgcaacagcccccaggaggagcggcgccggaagaagcgcggccuguucggcgccaucgcgggguucaucgagggcggguggcagggcauggucgacgggugguacggcuaccaccacuccaacgagcagggcagcggguacgccgccgacaaggaguccacccagaaggccaucgacggcgugacgaacaaggugaacagcaucaucgacaagaugaacacccaguucgaggccgucgggcgggaguucaacaaccuggagcgccggaucgagaaccucaacaagaagauggaggacggcuuccuggacguguggaccuacaacgcggagcugcucgugcugauggagaacgagcgcacccuggacuuccacgacuccaacgucaagaaccucuacgacaaggugcggcugcagcugcgcgacaacgccaaggagcucgggaacggcugcuucgaguucuaccaccggugcgacaacgagugcauggagagcguccgcaacggcacguacgacuacccgcaguacuccgaggaggcccgccugaagcgggaggagaucagcggggugaagcuggaguccaucggcaccuaccagauccucagcaucuacuccaccguggccagcucccuggcccuggcgaucauggucgccgggcuguuccuguggaugugcagcaacggcucccugcagugccgcaucugcaucuga

SEQ ID NO: 67024 - RNA, 1707 nt, Artificial Sequence
  derived and/or modified CDS sequence (opt1) from hemagglutinin__InfluenzaA__ACT15351
auggagaagaucgugcugcuccuggccaucgucagccuggugaaguccgaccagaucugcaucggcuaccacgccaacaacagcaccgagcaggucgacaccaucauggagaagaacgugacggugacccacgcgcaggacauccucgagaagacccacaacgggaagcugugcgaccuggacggcgugaagccccucauccugcgcgacugcuccgucgccggguggcugcucggcaacccgaugugcgacgaguuccugaacgugcccgaguggagcuacaucguggagaagaucaaccccgccaacgaccugugcuaccccggggacuucaacgacuacgaggagcucaagcaccuccugucccggaucaaccacuucgagaagauccagaucauccccaagagcuccuggagcgaccacgaggccuccagcggcgucuccagcgccugcccguaccagggcggguccagcuucuuccgcaacgugguguggcucaucaagaaggacaacgcguaccccaccaucaagcgguccuacaacaacacgaaccaggaggaccugcugguccucuggggcauccaccaccccaacgacgccgccgagcagacccgccuguaccacaacccgaccaccuacaucagcguggggacguccacccugaaccagcggcucgugcccaagaucgccacccgcagcaaggucaacggccaguccgggcggauggaguucuucuggaccauccugaagcccaacgacgcgaucaacuucgagagcaacggcaacuucaucgcccccgagaacgccuacaagaucgugaagaagggcgacagcacgaucaugaaguccgagcuggaguacgggaacugcaacaccaagugccagaccccgaucggcgccaucaacagcuccaugcccuuccacaacauccacccccucaccaucggggagugccccaaguacgucaagagcucccgccuggugcuggccacgggccuccggaacagcccgcagggcaagucccgccggaagaagcgcgggcuguucggcgcgaucgccggguucaucgagggcggguggcagggcaugguggacggcugguacggguaccaccacagcaacgagcagggcuccggguacgccgccgacaaggagagcacccagcgggccaucgacggcgugaccaacaaggucaacuccaucaucgacaagaugaacacccaguucgaggcgguggggcgcgaguucaacaagcuggagcggcgcaucgagaaccucaacaagaagauggaggacggcuuccuggacguguggacguacaacgccgagcugcucguccugauggagaacgagcggacccuggacuuccacgacagcaacgugaagaaccucuacgacaagguccgccugcagcugcgggacaacgccaaggagcucggcaacgggugcuucgaguucuaccaccgcugcgacaacgagugcauggaguccgugcggaacggcaccuacgacuacccccaguacagcgaggaggcccgccugaagcgcgaggagaucuccggggugaagcuggagagcaucggcaucuaccagauccucuccaucuacagcaccgucgccuccagccuggcgcuggccaucaugguggccgggcuguuccuguggaugugcagcaacggcucccugcagugccggaucugcaucuga

SEQ ID NO: 67025 - RNA, 1704 nt, Artificial Sequence
  derived and/or modified CDS sequence (opt1) from hemagglutinin__InfluenzaA__ACT15353
auggagaagaucgugcugcuccuggccaucgucagccuggugaaguccgaccagaucugcaucggcuaccacgccaacaacagcaccgagcaggucgacaccaucauggagaagaacgugacggugacccacgcgcaggacauccucgagaagacccacaacgggaagcugugcaaccuggacggcgugaagccccucauccugcgcgacugcuccgucgccggguggcugcucggcaacccgaugugcgacgaguuccugaacgugcccgaguggagcuacaucguggagaagaucaaccccgccaacgaccugugcuaccccgggaacuucaacgacuacgaggagcucaagcaccuccugucccggaucaaccacuucgagaagauccagaucaucccgaagaacagcugguccgaccacgaggccagcggcgucuccagcgccugccccuaccagggccgcuccagcuucuuccggaacgugguguggcucaccaagaagaacuccgcguaccccacgaucaagcgcagcuacaacaacaccaaccaggaggaccugcugguccucugggggauccaccaccccaacgacgccgccgagcagacccggcuguaccagaacccgaccacguacaucuccgugggcaccagcacccugaaccagcgccucgugcccaagaucgccacccgguccaaggucaacgggcagagcggccgcauggaguucuucuggacgauccugaaguccaacgacgcgaucaacuucgagagcaacgggaacuucaucgcccccgagaacgccuacaagaucgugaagaagggcgacagcaccaucaugaaguccgagcuggaguacagcaacugcaacaccaagugccagacccccaucggcgccaucaacuccagcaugccguuccacaacauccacccccucacgaucggggagugccccaaguacgugaaguccaaccggcugguccuggccaccggccuccgcaacagcccccagggggagcggcgccggaagaagcgcggccuguucggcgcgaucgccggguucaucgagggcggguggcagggcaugguggacgggugguacggcuaccaccacuccaacgagcagggcagcggguacgccgccgacaaggaguccacccagaaggccaucgacggcgugaccaacaaggucaacagcaucaucgacaagaugaacacgcaguucgaggcgguggggcgggaguucaacaaccuggagcgccggaucgagaaccucaacaagaagauggaggacggcuuccuggacguguggaccuacaacgccgagcugcucguccugauggagaacgagcgcacccuggacuuccacgacuccaacgugaagaaccucuacgacaagguccggcugcagcugcgcgacaacgccaaggagcucgggaacggcugcuucgaguucuaccaccggugcgacaacgagugcauggagagcgugcgcaacggcaccuacgacuacccgcaguacuccgaggaggcccgccugaagcgggaggagaucagcggggugaagcuggaguccaucggcacguaccagauccucagcaucuacuccaccgucgccagcucccuggcgcuggccaucaugguggccgggcuguuccuguggaugugcagcaacggcagccugcagugccgcaucugcaucuga

SEQ ID NO: 67026 - RNA, 1707 nt, Artificial Sequence
  derived and/or modified CDS sequence (opt1) from hemagglutinin__InfluenzaA__ACT15355
auggagaagaucgugcugcuccuggccaucgucagccuggugaaguccgaccagaucugcaucggcuaccacgccaacaacagcaccgagcaggucgacaccaucauggagaagaacgugacggugacccacgcgcaggacauccucgagaagacccacaacgggaagcugugcgaccuggacggcgugaagccccucauccugcgcgacugcuccgucgccggguggcugcucggcaacccgaugugcgacgaguuccugaacgugcccgaguggagcuacaucguggagaagaucaaccccgccaacgaccugugcuaccccggggacuucaacgacuacgaggagcucaagcaccuccugucccggaucaaccacuucgagaagauccagaucauccccaagagcuccuggagcgaccacgaggccuccagcggcgucuccagcgccugcccguaccagggccgcuccagcuucuuccggaacgugguguggcugaucaagaaggacaacgcguaccccaccaucaagcgcuccuacaacaacacgaaccaggaggaccugcugguccucugggggauccaccaccccaacgacgccgccgagcagacccggcuguaccacaacccgaccaccuacaucagcgugggcacguccacccugaaccagcgccucgugcccaagaucgccacccggagcaaggucaacgggcaguccggccgcauggaguucuucuggaccauccugaagcccaacgacgcgaucaacuucgagagcaacgggaacuucaucgcccccgagaacgccuacaagaucgugaagaagggcgacagcacgaucaugaaguccgagcuggaguacggcaacugcaacaccaagugccagaccccgaucggggccaucaacagcuccaugcccuuccacaacauccacccccucaccaucggcgagugccccaaguacgucaagagcucccggcuggugcuggccacggggcuccgcaacagcccgcagggcaagucccggcgcaagaagcggggccuguucggggcgaucgccggcuucaucgagggcggguggcaggggaugguggacggcugguacggcuaccaccacagcaacgagcagggguccggcuacgccgccgacaaggagagcacccagcgcgccaucgacggggugaccaacaaggucaacuccaucaucgacaagaugaacacccaguucgaggcggugggccgggaguucaacaaccuggagcgccggaucgagaaccucaacaagaagauggaggacggguuccuggacguguggacguacaacgccgagcugcucguccugauggagaacgagcgcacccuggacuuccacgacagcaacgugaagaaccucuacgacaagguccggcugcagcugcgcgacaacgccaaggagcucggcaacggcugcuucgaguucuaccaccggugcgacaacgagugcauggaguccgugcgcaacgggaccuacgacuacccccaguacagcgaggaggcccgccugaagcgggaggagaucuccggcgugaagcuggagagcaucgggaucuaccagauccucuccaucuacagcaccgucgccuccagccuggcgcuggccaucaugguggccggccucuuccuguggaugugcagcaacgggucccugcagugccgcaucugcaucuga

SEQ ID NO: 67027 - RNA, 1704 nt, Artificial Sequence
  derived and/or modified CDS sequence (opt1) from hemagglutinin__InfluenzaA__ACT15357
auggagaagaucgugcugcuccuggccaucgucagccuggugaaguccgaccagaucugcaucggcuaccacgccaacaacagcaccgagcaggucgacaccaucauggagcgcaacgugacggugacccacgcgcaggacauccucgagaagacccacaacgggaagcugugcaaccuggacggcgugaagccccucauccugcgggacugcuccgucgccggguggcugcucggcaacccgaugugcgacgaguuccugaacgugcccgaguggagcuacaucguggagaagaucaaccccgccaacgaccugugcuaccccgggaacuucaacgacuacgaggagcucaagcaccuccugucccgcaucaaccacuucgagaagauccagaucaucccgaagaacagcugguccgaccacgaggccagcggcgucuccagcgccugccccuaccagggccgguccagcuucuuccgcaacgugguguggcugacccagaaggacaacgcguaccccacgaucaagcgguccuacaacaacaccaaccaggaggaccugcugguccucugggggauccaccaccccaacgacgccgccgagcagacccgccuguaccagaacccgaccacguacaucagcgugggcaccuccacccugaaccagcggcucauccccaagaucgccacccgcagcaaggugaacgggcaguccggccggauggaguucuucuggacgauccucaagagcaacgacgcgaucaacuucgaguccaacgggaacuucaucgcccccgagaacgccuacaagaucgucaagaagggcgacagcaccaucaugaaguccgagcuggaguacggcaacugcaacaccaagugccagacccccaucggggccaucaacagcagcaugccguuccacaacauccacccccugacgaucggcgagugccccaaguacgugaaguccaaccgccuggugcuggccaccgggcuccggaacagcccccagggcgagcgccggcgcaagaagcggggccuguucggggcgaucgccggcuucaucgagggcggguggcaggggauggucgacggcugguacggcuaccaccacuccaacgagcaggggagcggcuacgccgccgacaaggaguccacccagaaggccaucgacggggugaccaacaaggugaacagcaucaucgacaagaugaacacgcaguucgaggcggucggccgcgaguucaacaaccuggagcggcgcaucgagaaccucaacaagaagauggaggacggguuccuggacguguggaccuacaacgccgagcugcucgugcugauggagaacgagcggacccuggacuuccacgacuccaacgucaagaaccucuacgacaaggugcgccugcagcugcgggacaacgccaaggagcucggcaacggcugcuucgaguucuaccaccgcugcgacaacgagugcauggagagcguccgcaacgggaccuacgacuacccgcaguacuccgaggaggcccggcugaagcgcgaggagaucagcggcgugaagcuggaguccaucgggacguaccagauccucagcaucuacuccaccguggccagcucccuggcgcuggccaucauggucgccggccucuuccuguggaugugcagcaacgggucccugcagugccggaucugcaucuga

SEQ ID NO: 67028 - RNA, 1701 nt, Artificial Sequence
  derived and/or modified CDS sequence (opt1) from hemagglutinin__InfluenzaA__ACT20200
augaaggccauccuggugguccuccuguacaccuucgccaccgcgaacgccgacacgcugugcaucggcuaccacgccaacaacagcaccgacaccguggacaccgugcucgagaagaacgucacggugacccacuccgugaaccugcuggaggacaagcacaacgggaagcucugcaagcugcgcggcgucgcgccccugcaccucgggaagugcaacaucgccggcuggauccuggggaacccggagugcgagagccuguccaccgccagcuccuggagcuacaucguggagaccuccagcuccgacaacggcacgugcuaccccggcgacuucaucgacuacgaggagcuccgggagcagcugagcuccgugagcuccuucgagcgcuucgagaucuuccccaagaccagcuccuggcccaaccacgacagcaacaagggggucaccgccgccugcccgcacgccggcgcgaaguccuucuacaagaaccugaucuggcucgugaagaaggggaacagcuaccccaagcuguccaagagcuacaucaacgacaagggcaaggaggugcugguccucugggggauccaccaccccagcaccuccgccgaccagcagagccuguaccagaacgccgacgccuacguguucgugggcuccagccgguacuccaagaaguucaagcccgagaucgccauccgcccgaagguccgggaccaggagggccgcaugaacuacuacuggacgcugguggagcccggggacaagaucaccuucgaggcgaccggcaaccucguggucccccgguacgccuucgccauggagcgcaacgccgggagcggcaucaucaucuccgacacccccgugcacgacugcaacacgaccugccagaccccgaagggcgccaucaacaccagccugcccuuccagaacauccaccccaucacgaucgggaagugccccaaguacgugaaguccaccaagcugcggcucgcgaccggccugcgcaacgucccgagcauccagucccgggggcuguucggcgccaucgccggguucaucgagggcggcuggaccgggaugguggacggcugguacggguaccaccaccagaacgagcagggcagcggguacgccgccgaccucaaguccacgcagaacgcgaucgacgagaucaccaacaaggugaacagcgucaucgagaagaugaacacccaguucaccgccgugggcaaggaguucaaccaccuggagaagcgcaucgagaaccugaacaagaaggucgacgacggcuuccucgacaucuggacguacaacgccgagcugcuggugcuccuggagaacgagcggacccuggacuaccacgacuccaacgugaagaaccucuacgagaagguccgcaaccagcugaagaacaacgccaaggagaucgggaacggcugcuucgaguucuaccacaagugcgacaacacgugcauggagagcgugaagaacgggaccuacgacuaccccaaguacuccgaggaggccaagcugaaccgggaggagaucgacggcgugaagcucgagagcacccgcaucuaccagauccuggcgaucuacuccaccgucgccagcagccuggugcucguggucucccugggggccaucagcuucuggaugugcuccaacggcagccugcagugccggaucugcaucuga

SEQ ID NO: 67029 - RNA, 1701 nt, Artificial Sequence
  derived and/or modified CDS sequence (opt1) from hemagglutinin__InfluenzaA__ACT21466
augaagaccaucaucgcccugagcuacauccucugccugguguucgcccagaagcugcccggcaacgacaacuccaccgcgacgccgugccucgggcaccacgccguccccaacggcacccuggugaagaccaucaccaacgaccagaucgaggugacgaacgccaccgagcugguccagagcuccagcaccgggaagaucugcgacagcccccaccgcauccucgacggcaagaacugcacccugaucgacgcccugcucggggacccccacugcgacggcuucaagaacaaggagugggaccuguucguggagcggagcacggccuacuccaacugcuacccguacgacgugcccgacuacgcgagccugcgcucccucgucgccagcuccggcacccuggaguucaccaacgagggguucaacuggaccggcguggcccaggacgggacgagcuacgccugcaagcggggcuccgugaaguccuucuucucccgccugaacuggcuccacaagcuggaguacaaguaccccgcgcugaacgucaccaugcccaacaacgacaaguucgacaagcucuacaucuggggcgugcaccacccgagcaccgacuccgaccagaccagccuguacgugcaggccuccgggcgggucacggugagcaccaagcgcagccagcagaccgugauccccaacaucggcucccggcccuggguccgcgggaucagcucccggaucagcaucuacuggaccaucgugaagcccggcgacauccugcucaucaacuccacggggaaccugaucgccccgcgcggcuacuucaagauccggagcggcaaguccagcaucaugcgcuccgacgcccccaucgacaacugcaacagcgagugcaucacccccaacggguccauccccaacgacaagccguuccagaacgugaaccggaucaccuacggcgccugcccccgcuacgucaagcagaacacccugaagcucgcgacggggaugcggaacgugcccgagaagcagacccgcggcaucuucggggccaucgccggcuucaucgagaacggcugggaggggaugguggacggcugguacggguuccggcaccagaacagcgagggcaccgggcaggccgccgaccugaaguccacccaggcggccaucaaccagaucaacggcaagcugaaccgccucaucgagaagacgaacgagaaguuccaccagaucgagaaggaguucagcgaggucgagggccggauccaggaccuggagaaguacguggaggacaccaagaucgaccugugguccuacaacgccgagcuccugguggcccuggagaaccagcacaccaucgaccucaccgacagcgagaugaacaagcuguucgagaagacgcgcaagcagcugcgggagaacgccgaggacauggggaacggcugcuucaagaucuaccacaagugcgacaacgcgugcaucggguccauccgcaacggcaccuacgaccacgacgucuaccgcgacgaggcccucaacaaccgguuccagaucaaggggguggagcucaagagcggcuacaaggacuggauccuguggaucuccuucgccaucagcugcuuccugcugugcgucgugcugcucggcuucaucaugugggccugccagaaggggaacauccgcugcaacaucugcaucuga

SEQ ID NO: 67030 - RNA, 1701 nt, Artificial Sequence
  derived and/or modified CDS sequence (opt1) from hemagglutinin__InfluenzaA__ACT21467
augaagaccaucaucgcccugagcuacauccucugccugguguucgcccagaagcugcccggcuccgacaacagcaccgcgacgcucugccuggggcaccacgccgucccgaacggcacccuggugaagaccaucaccaacgaccagaucgaggugacgaacgccaccgagcucguccaguccagcuccaccgggaagaucugcgacagcccccaccgcauccuggacggcaagaacugcacccugaucgacgcccuccugggggacccccacugcgacggcuucaagaacaaggagugggaccuguucguggagcgguccacggccuacagcaacugcuaccccuacgacgugccggacuacgcgucccuccgcagccuggucgccuccagcggcacccuggaguucaccaacgagggguucaacuggaccggcguggcccaggacgggacguccuacgccugcaagcggggcagcgugaaguccuucuucagccgccucaacuggcugcacaagcuggaguacaaguaccccgcgcucaacgucaccaugcccaacaacgacaaguucgacaagcuguacaucuggggcgugcaccaccccuccaccgacagcgaccagaccucccuguacgugcaggccagcgggcgggucacggugagcaccaagcgcucccagcagaccgugaucccgaacaucggcagccggcccuggguccgcgggaucuccagccggaucuccguguacuggaccaucgugaagccccgcgacauccuccugaucaacagcacgggcaaccugaucgcgccccggggguacuucaagauccgcuccggcaagagcuccaucaugcggagcgacgccccgaucgacaacugcaacuccgagugcaucacccccaacggcagcauccccaacgacaagcccuuccagaacgucaaccgcaucaccuacggggccugcccgcgguacgugaagcagaacacccucaagcuggccacgggcaugcgcaacgugcccgagaagcagacccgggggaucuucggcgccaucgccggguucaucgagaacggcugggagggcauggucgacgggugguacggcuuccgccaccagaacuccgaggggaccggccaggccgccgaccucaagagcacccaggcggccaucaaccggaucaacgggaagcugaaccgccugaucgagaagacgaacgagaaguuccaccagaucgagaaggaguucuccgagguggagggccggauccaggaccuggagaaguacguggaggacaccaagaucgaccucuggagcuacaacgccgagcugcuggucgcccucgagaaccagcacaccaucgaccugaccgacuccgagaugaacaagcuguucgagaagacgcgcaagcagcuccgcgagaacgccgaggacaugggcaacgggugcuucaagaucuaccacaagugcgacaacgcgugcaucggcagcauccggaacgggaccuacgaccacgacguguaccgcgacgaggcccugaacaaccgguuccagaucaagggcgucgagcugaaguccggguacaaggacuggauccucuggaucagcuucgccaucagcugcuuccugcugugcguggugcuccugggcuucaucaugugggccugccagaagggcaacauccgcugcaacaucugcaucuga

SEQ ID NO: 67031 - RNA, 1701 nt, Artificial Sequence
  derived and/or modified CDS sequence (opt1) from hemagglutinin__InfluenzaA__ACT21468
augaagaccaucaucgcccugagcuacauccucugccugguguucgcccagaagcugcccggcaacgacaacuccaccgcgacgcucugccuggggcaccacgccgucccgaacggcacccuggugaagaccaucaccaacgaccagaucgaggugacgaacgccaccgagcucguccagagcuccagcaccgggaagaucugcgacagcccccaccgcauccuggacggcaagaacugcacccugaucgacgcccuccugggggacccccacugcgacggcuucaagaacaaggagugggaccuguucguggagcggagcacggccuacuccaacugcuaccccuacgacgugccggacuacgcgagccuccgcucccuggucgccagcuccggcacccuggaguucaccaacgagggguucaacuggaccggcguggcccaggacgggacgagcuacgccugcaagcggggcuccgugaaguccuucuucucccgccucaacuggcugcacaagcuggaguacaaguaccccgcgcucaacgucaccaugcccaacaacgacaaguucgacaagcuguacaucuggggcgugcaccaccccagcaccgacuccgaccagaccagccuguacgugcaggccuccgggcgggucacggugagcaccaagcgcagccagcagaccgugaucccgaacaucggcucccggcccuggguccgcgggaucagcucccggaucagcaucuacuggaccaucgugaagcccggcgacauccuccugaucaacuccacggggaaccugaucgcgccccgcggcuacuucaagauccggagcggcaaguccagcaucaugcgcuccgacgccccgaucgacaacugcaacagcgagugcaucacccccaacggguccauccccaacgacaagcccuuccagaacgugaaccggaucaccuacggcgccugcccgcgcuacgucaagcagaacacccucaagcuggccacggggaugcggaacgugcccgagaagcagacccgcggcaucuucggggccaucgccggcuucaucgagaacggcugggaggggaugguggacggcugguacggguuccggcaccagaacagcgagggcaccgggcaggccgccgaccugaaguccacccaggcggccaucaaccagaucaacggcaagcucaaccgccugaucgagaagacgaacgagaaguuccaccagaucgagaaggaguucagcgaggucgagggccggauccaggaccuggagaaguacguggaggacaccaagaucgaccucugguccuacaacgccgagcugcugguggcccucgagaaccagcacaccaucgaccugaccgacagcgagaugaacaagcuguucgagaagacgcgcaagcagcuccgggagaacgucgaggacauggggaacggcugcuucaagaucuaccacaagugcgacaacgccugcaucggguccauccgcaacggcaccuacgaccacgacguguaccgcgacgaggcgcugaacaaccgguuccagaucaagggggucgagcucaagagcggcuacaaggacuggauccuguggaucuccuucgccaucagcugcuuccugcugugcguggugcuccugggcuucaucaugugggccugccagaaggggaacauccgcugcaacaucugcaucuga

SEQ ID NO: 67032 - RNA, 1701 nt, Artificial Sequence
  derived and/or modified CDS sequence (opt1) from hemagglutinin__InfluenzaA__ACT21469
augaagaccaucaucgcccugagcuacaucucccgccucguguucgcccagaagcugcccggcaacgacaacagcaccgcgacgcugugccucgggcaccacgccgucccgaacggcacccuggugaagaccaucaccaacgaccagaucgaggugacgaacgccaccgagcugguccaguccagcuccaccgggcggaucugcgacagcccccaccgcauccucgacggcgagaacugcacccugaucgacgcccugcucggggacccccacugcgacggcuuccagaacaaggagugggaccuguucguggagcgguccaaggccuacagcaacugcuaccccuacgacgugccggacuacgcgucccugcgcagccucgucgccuccagcggcacgcuggaguucaacaacgaguccuucaacuggaccgggguggcccaggacggcaccagcuacgccugcaagcggcgcuccaucaagagcuucuucucccggcugaacuggcuccaccagcugaaguacaaguaccccgcgcugaacgugaccaugcccaacaacgacaaguucgacaagcucuacaucuggggcguccaccaccccagcacggacuccgaccagaccagccuguacgcccaggccagcgggcgcgugaccguguccaccaagcggagccagcagacggucaucccgaacaucgggucccgccccugggugcggggcgugagcucccgcaucagcaucuacuggaccaucgucaagcccggcgacauccugcucaucaacuccaccgggaaccugaucgcgccccggggcuacuucaagauccgcagcgggaaguccagcaucaugcgguccgacgccccgaucggcaagugcaacagcgagugcaucacccccaacggcuccauccccaacgacaagcccuuccagaacgugaaccgcaucacguacggggccugcccgcgguacgugaagcagaacacccugaagcucgccaccggcaugcgcaacguccccgagaagcagacccgggggaucuucggcgccaucgccggguucaucgagaacggcugggagggcaugguggacgggugguacggcuuccgccaccagaacagcgaggggacgggccaggccgcggaccugaaguccacccaggccgccaucaaccagaucaacgggaagcugaaccggcucaucgagaagaccaacgagaaguuccaccagaucgagaaggaguucagcgagguggagggccgcauccaggaccuggagaaguacgucgaggacaccaagaucgaccugugguccuacaacgccgagcuccugguggcccuggagaaccagcacacgaucgaccucaccgacagcgagaugaacaagcuguucgagcgcacccggaagcagcugcgcgagaacgcggaggacaugggcaacgggugcuucaagaucuaccacaagugcgacaacgccugcaucggcuccauccggaacgggaccuacgaccacgacguguaccgcgacgaggcccucaacaaccgguuccagaucaagggcgucgagcucaagagcggguacaaggacuggauccuguggaucagcuucgccaucuccugcuuccugcugugcgugguccugcucggcuucaucaugugggccugccagaagggcaacauccgcugcaacaucugcaucuga

SEQ ID NO: 67033 - RNA, 1701 nt, Artificial Sequence
  derived and/or modified CDS sequence (opt1) from hemagglutinin__InfluenzaA__ACT21471
augaagaccaucaucgcccugagcuacaucuccugccucguguucgcccagaagcugcccggcaacgacaacagcaccgcgacgcugugccucgggcaccacgccgucccgaacggcacccuggugaagaccaucaccaacgaccagaucgaggugacgaacgccaccgagcugguccaguccagcuccaccgggcgcaucugcgacagcccccaccggauccucgacggcgagaacugcacccugaucgacgcccugcucggggacccccacugcgacggcuuccagaacaaggagugggaccuguucguggagcgcuccaaggccuacagcaacugcuaccccuacgacgugccggacuacgcgucccugcggagccucgucgccuccagcggcacgcuggaguucaacaacgaguccuucaacuggaccgggguggcccaggacggcaccagcuacgccugcaagcgccgguccaucaagagcuucuucucccgccugaacuggcuccaccagcugaaguacaaguaccccgcgcugaacgugaccaugcccaacaacgacaaguucgacaagcucuacaucuggggcguccaccaccccagcacggacuccgaccagaccagccuguacgcccaggccagcgggcgggugaccguguccaccaagcgcagccagcagacggucaucccgaacaucgggucccggcccugggugcgcggcgugagcucccggaucagcaucuacuggaccaucgucaagcccggcgacauccugcucaucaacuccaccgggaaccugaucgcgccccgcggcuacuucaagauccggagcgggaaguccagcaucaugcgcuccgacgccccgaucggcaagugcaacagcgagugcaucacccccaacggcuccauccccaacgacaagcccuuccagaacgugaaccggaucacguacggggccugcccgcgcuacgugaagcagaacacccugaagcucgccaccggcaugcggaacguccccgagaagcagacccgcgggaucuucggcgccaucgccggguucaucgagaacggcugggagggcaugguggacgggugguacggcuuccggcaccagaacagcgaggggacgggccaggccgcggaccugaaguccacccaggccgccaucaaccagaucaacgggaagcugaaccgccucaucgagaagaccaacgagaaguuccaccagaucgagaaggaguucagcgagguggagggccggauccaggaccuggagaaguacgucgaggacaccaagaucgaccugugguccuacaacgccgagcuccugguggcccuggagaaccagcacacgaucgaccucaccgacagcgagaugaacaagcuguucgagcgcacccgcaagcagcugcgggagaacgcggaggacaugggcaacgggugcuucaagaucuaccacaagugcgacaacgccugcaucggcuccauccgcaacgggaccuacgaccacgacguguaccgggacgaggcccucaacaaccgcuuccagaucaagggcgucgagcucaagagcggguacaaggacuggauccuguggaucagcuucgccaucuccugcuuccugcugugcgugguccugcucggcuucaucaugugggccugccagaagggcaacauccggugcaacaucugcaucuga

SEQ ID NO: 67034 - RNA, 1701 nt, Artificial Sequence
  derived and/or modified CDS sequence (opt1) from hemagglutinin__InfluenzaA__ACT21472
augaagaccaucaucgcccugagcuacaucuccugccucguguucgcccagaagcugcccggcaacgacaacagcaccgcgacgcugugccucgggcaccacgccgucccgaacggcacccuggugaagaccaucaccaacgaccagaucgaggugacgaacgccaccgagcugguccaguccagcuccaccgggcgcaucugcgacagcccccaccggauccucgacggcgagaacugcacccugaucgacgcccugcucggggacccccacugcgacggcuuccagaacaaggagugggaccuguucguggagcgcuccaaggccuacagcaacugcuaccccuacgacgugccggacuacgcgucccugcggagccucgucgccuccagcggcacgcuggaguucaacaacgaguccuucaacuggaccgggguggcccaggacggcaccagcuacgccugcaagcgccgguccaucaagagcuucuucuccacccugaacuggcuccaccagcugaaguacaaguaccccgcgcugaacgugacgaugcccaacaacgacaaguucgacaagcucuacaucuggggcguccaccaccccagcaccgacuccgaccagaccagccuguacgcccaggccagcgggcgcgugaccguguccacgaagcggagccagcagaccgucaucccgaacaucgggucccgccccugggugcggggcgugagcucccgcaucagcaucuacuggaccaucgucaagcccggcgacauccugcucaucaacuccaccgggaaccugaucgcgccccggggcuacuucaagauccgcagcgggaaguccagcaucaugcgguccgacgccccgaucggcaagugcaacagcgagugcaucacgcccaacggcuccauccccaacgacaagcccuuccagaacgugaaccgcaucaccuacggggccugcccgcgguacgugaagcagaacacccugaagcucgccaccggcaugcgcaacguccccgagaagcagacgcgggggaucuucggcgccaucgccggguucaucgagaacggcugggagggcaugguggacgggugguacggcuuccgccaccagaacagcgaggggaccggccaggccgcggaccugaaguccacccaggccgccaucaaccagaucaacgggaagcugaaccggcucaucgagaagaccaacgagaaguuccaccagaucgagaaggaguucagcgagguggagggccgcauccaggaccuggagaaguacgucgaggacacgaagaucgaccugugguccuacaacgccgagcuccugguggcccuggagaaccagcacaccaucgaccucaccgacagcgagaugaacaagcuguucgagcggacccgcaagcagcugcgcgagaacgcggaggacaugggcaacgggugcuucaagaucuaccacaagugcgacaacgccugcaucggcuccauccggaacgggacguacgaccacgacguguaccgcgacgaggcccucaacaaccgguuccagaucaagggcgucgagcucaagagcggguacaaggacuggauccuguggaucagcuucgccaucuccugcuuccugcugugcgugguccugcucggcuucaucaugugggccugccagaagggcaacauccgcugcaacaucugcaucuga

SEQ ID NO: 67035 - RNA, 1701 nt, Artificial Sequence
  derived and/or modified CDS sequence (opt1) from hemagglutinin__InfluenzaA__ACT21507
augaagaccaucaucgcccugagcuacauccucugccugguguucgcccagaagcugcccggcaacgacaacuccaccgcgacgcucugccuggggcaccacgccgucccgaacggcaccaucgugaagaccaucaccaacgaccagaucgaggugacgaacgccaccgagcugguccagagcuccagcaccgggggcaucugcgacagcccccaccagauccucgacggggagaaccgcacccugaucgacgcccugcucggcgacccccagugcgacggcuuccagaacaagaagugggaccuguucguggagcggagcaaggccuacuccaacugcuaccccuacgacgugccggacuacgcgagccugcgcucccucgucgccagcuccgggacgcuggaguucaacaacgagagcuucaacuggaccggcgugacccagaacgggaccuccagcgccugcaagggccgguccaacaacagcuucuucucccgccugaacuggcucacgcaccugaaguucaaguaccccgcccugaacgugaccaugcccaacaacgagaaguucgacaagcucuacaucuggggcguccaccaccccgggaccgacaacgaccagaucagccuguacgcgcaggccuccggccggaucaccgugagcacgaagcgcagccagcagaccgugaucccgaacaucgggucccggccccgcguccgggacauccccagccgcaucuccaucuacuggaccaucgugaagcccggcgacauccugcucaucaacagcaccgggaaccugaucgccccgcggggcuacuucaagauccgcuccggcaagagcuccaucaugcggagcgacgcccccaucgggaagugcaacuccgagugcaucacgcccaacggcagcauccccaacgacaagccguuccagaacgugaaccgcaucaccuacggggccugcccccgguacgucaagcagaacacccugaagcucgcgaccggcaugcgcaacgugcccgagaagcagacgcgggggaucuucggcgccaucgccggcuucaucgagaacgggugggagggcaugguggacgggugguacggcuuccgccaccagaacuccgaggggaucggccaggccgccgaccugaaguccacccaggcggccaucaaccagaucaacggcaagcugaaccggcucaucgggaagaccaacgagaaguuccaccagaucgagaaggaguucuccgaggucgagggccgcauccaggaccuggagaaguacguggaggacacccggaucgaccuguggagcuacaacgccgagcuccugguggcccuggagucccagcacacgaucgaccucaccgacagcgagaugaacaagcuguucgagcgcaccaagaagcagcugcgcgagaacgccgaggacauggggaacggcugcuucaagaucuaccacaagugcgacaacgcgugcaucggguccauccggaacggcaccuacgaccacgacgucuaccgcgacgaggcccucaacaagcgguuccagaucaagggcguggagcucaagagcggguacaaggacuggauccuguggaucuccuucgccaucagcugcuuccugcugugcguggcccugcucggcuucaucaugugggccugccagaaggggaacauccgcugcaacaucugcaucuga

SEQ ID NO: 67036 - RNA, 1701 nt, Artificial Sequence
  derived and/or modified CDS sequence (opt1) from hemagglutinin__InfluenzaA__ACT21508
augaagaccaucaucgcccugagcuacauccucugccugguguucgcccagaagcugcccggcaacgacaacuccaccgcgacgcucugccuggggcaccacgccgucccgaacggcaccaucgugaagaccaucaccaacgaccagaucgaggugacgaacgccaccgagcugguccagagcuccagcaccgggggcaucugcgacagcccccaccagauccucgacggggagaacugcacccugaucgacgcccugcucggcgacccccagugcgacggcuuccagaacaagaagugggaccuguucguggagcgcagcaaggccuacuccaacugcuaccccuacgacgugccggacuacgcgagccugcggucccucgucgccagcuccgggacgcuggaguucaacaacgagagcuucaacuggaccggcgugacccagaacgggaccuccagcgccugcaagcgccgguccaacaacagcuucuucucccgccugaacuggcucacgcaccugaaguucaaguaccccgcccugaacgugaccaugcccaacaacgagaaguucgacaagcucuacaucuggggcguccaccaccccgggaccgacaacgaccagaucagccuguacgcgcaggccuccggccggaucaccgugagcacgaagcgcagccagcagaccgugaucccgaacaucggcucccggccccgcguccgggacauccccagccgcaucuccaucuacuggaccaucgugaagcccggggacauccugcucaucaacagcaccggcaaccugaucgccccgcggggguacuucaagauccgcuccggcaagagcuccaucaugcggagcgacgcccccaucggcaagugcaacuccgagugcaucacgcccaacgggagcauccccaacgacaagccguuccagaacgugaaccgcaucaccuacggcgccugcccccgguacgucaagcaggacacccugaagcucgcgaccgggaugcgcaacgugcccgagaagcagacgcggggcaucuucggggccaucgccggcuucaucgagaacggcugggaggggaugguggacggcugguacggguuccgccaccagaacuccgagggcaucgggcaggccgccgaccugaaguccacccaggcggccaucaaccagaucaacggcaagcugaaccggcucaucggcaagaccaacgagaaguuccaccagaucgagaaggaguucuccgaggucgaggggcgcauccaggaccuggagaaguacguggaggacaccaagaucgaccuguggagcuacaacgccgagcuccugguggcccuggagaaccagcacacgaucgaccucaccgacuccgagaugaacaagcuguucgagcggaccaagaagcagcugcgcgagaacgccgaggacaugggcaacgggugcuucaagaucuaccacaagugcgacaacgcgugcaucggcagcauccgcaacgggaccuacgaccacgacgucuaccgggacgaggcccucaacaaccgcuuccagaucaagggcguggagcugaaguccggcuacaaggacuggauccuguggaucagcuucgccaucuccugcuuccuccugugcguggcccugcucggguucaucaugugggccugccagaagggcaacauccggugcaacaucugcaucuga

SEQ ID NO: 67037 - RNA, 1701 nt, Artificial Sequence
  derived and/or modified CDS sequence (opt1) from hemagglutinin__InfluenzaA__ACT21509
augaagaccaucaucgcccugagcuacauccucugccugguguucgcccagaagcugcccggcaacgacaacuccaccgcgacgcucugccuggggcaccacgccgucccgaacggcaccaucgugaagaccaucaccaacgaccagaucgaggugacgaacgccaccgagcugguccagagcuccagcaccgggggcaucugcgacagcccccaccagauccucgacggggagaacugcacccugaucgacgcccugcucggcgacccccagugcgacggcuuccagaacaagaagugggaccuguucguggagcgcuccaaggccuacuccaacugcuaccccuacgacgugccggacuacgcgagccugcggucccucgucgccagcuccgggacgcuggaguucaacaacgagagcuucaacuggaccggcgugacccagaacgggaccuccagcgccugcaagcgccgguccaacaacagcuucuucucccgccugaacuggcucacgcaccugaaguucaaguaccccgcccugaacgugaccaugcccaacaacgagaaguucgacaagcucuacaucuggggcguccaccaccccgggaccgacaacgaccagaucagccuguacgcgcaggccuccggccggaucaccgugagcacgaagcgcagccagcagaccgugaucccgaacaucggcucccggccccgcguccgggacauccccagccgcaucuccaucuacuggaccaucgugaagcccggggacauccugcucaucaacagcaccggcaaccugaucgccccgcggggguacuucaagauccgcuccggcaagagcuccaucaugcggagcgacgcccccaucggcaagugcaacuccgagugcaucacgcccaacgggagcauccccaacgacaagccguuccagaacgugaaccgcaucaccuacggcgccugcccccgguacgucaagcagaacacccugaagcucgcgaccgggaugcgcaacgugcccgagacgcagacccggggcaucuucggggccaucgccggcuucaucgagaacggcugggaggggaugguggacggcugguacggguuccgccaccagaacuccgagggcaccgggcaggccgccgaccucaagagcacccaggcggccaucaaccagaucaacggcaagcccaaccggcugaucggcaagacgaacgagaaguuccaccagaucgagaaggaguucuccgaggucgaggggcgcauccaggaccucgagaaguacguggaggacaccaagaucgaccuguggagcuacaacgccgagcugcucguggcccuggagaaccagcacaccaucgaccugaccgacuccgagaugaacaagcuguucgagaagacgaagaagcagcugcgggagaacgccgaggacaugggcaacgggugcuucaagaucuaccacaagugcgacaacgcgugcaucggcagcauccgcaacgagaccuacgaccacgacgucuaccgcgacgaggcccugaacaaccgguuccagaucaaggggguggagcucaaguccggcuacaaggacuggauccuguggaucagcuucgccaucuccugcuuccugcucugcguggcccugcugggcuucaucaugugggccugccagaaggggaacauccgcugcaacaucugcaucuga

SEQ ID NO: 67038 - RNA, 1701 nt, Artificial Sequence
  derived and/or modified CDS sequence (opt1) from hemagglutinin__InfluenzaA__ACT21510
augaagaccaucaucgcccugagcuacauccucugccccguguucgcccagaagcugccgggcaacgacaacuccaccgcgacgcugugccucgggcaccacgccguccccaacggcaccaucgugaagaccaucaccaacgaccagaucgaggugacgaacgccaccgagcugguccagagcuccagcaccgggggcaucugcgacagcccccaccagauccuggacggggagaacugcacccucaucgacgcccugcugggcgacccccagugcgacggcuuccagaacaagaagugggaccucuucguggagcgcuccaaggccuacuccaacugcuacccguacgacgugcccgacuacgcgagccugcggucccuggucgccagcuccgggacgcucgaguucaacaacgagagcuucaacuggaccggcgugacccagaacgggaccuccagcgccugcaagcgccgguccaacaacagcuucuucucccgccugaacuggcugacgcaccucaaguucaaguaccccgcccugaacgugaccaugcccaacaacgagaaguucgacaagcuguacaucuggggcguccaccacccggggaccgacaacgaccagaucagccucuacgcgcaggccuccggccggaucaccgugagcacgaagcgcagccagcagaccgugauccccaacaucggcucccggccccgcguccgggacauccccagccgcaucuccaucuacuggaccaucgugaagccgggggacauccugcugaucaacagcaccggcaaccucaucgcgccccggggguacuucaagauccgcuccggcaagagcuccaucaugcggagcgacgcccccaucggcaagugcaacuccgagugcaucacgcccaacgggagcaucccgaacgacaagcccuuccaggacgugaaccgcaucaccuacggcgccugcccccgguacgucaagcagaacacccugaagcuggccaccgggaugcgcaacgugcccgagaagcagacgcggggcaucuucggggccaucgccggcuucaucgagaacggcugggaggggaugguggacggcugguacggguuccgccaccagaacuccgagggcaucgggcaggccgccgaccucaagagcacccaggcggccaucaaccagaucaacggcaagcugaaccggcugaucggcaagaccaacgagaaguuccaccagaucgagaaggaguucuccgaggucgaggggcgcauccaggaccucgagaaguacguggaggacaccaagaucgaccuguggagcuacaacgccgagcugcucguggcccuggagaaccagcacacgaucgaccugaccgacuccgagaugaacaagcuguucgagcggaccgagaagcagcuccgcgagaacgccgaggacaugggcaacgggugcuucaagaucuaccacaagugcgacaacgcgggcaucgggagcauccgcaacggcaccuacgaccacgacgucuaccgggacgaggcccugaacaaccgcuuccagaucaagggcguggagcucaaguccggguacaaggacuggauccuguggaucagcuucgccaucuccugcuuccugcucugcguggcccugcugggcuucaucaugugggccugccagaaggggaacauccggugcaacaucugcaucuga

SEQ ID NO: 67039 - RNA, 1701 nt, Artificial Sequence; identical to SEQ ID NO: 66937
  derived and/or modified CDS sequence (opt1) from hemagglutinin__InfluenzaA__ACT21572

SEQ ID NO: 67040 - RNA, 1701 nt, Artificial Sequence; identical to SEQ ID NO: 66693
  derived and/or modified CDS sequence (opt1) from hemagglutinin__InfluenzaA__ACT22031

SEQ ID NO: 67041 - RNA, 1701 nt, Artificial Sequence; identical to SEQ ID NO: 66693
  derived and/or modified CDS sequence (opt1) from hemagglutinin__InfluenzaA__ACT22032

SEQ ID NO: 67042 - RNA, 1701 nt, Artificial Sequence; identical to SEQ ID NO: 66693
  derived and/or modified CDS sequence (opt1) from hemagglutinin__InfluenzaA__ACT22033

SEQ ID NO: 67043 - RNA, 1701 nt, Artificial Sequence; identical to SEQ ID NO: 66693
  derived and/or modified CDS sequence (opt1) from hemagglutinin__InfluenzaA__ACT22034

SEQ ID NO: 67044 - RNA, 1701 nt, Artificial Sequence; identical to SEQ ID NO: 66708
  derived and/or modified CDS sequence (opt1) from hemagglutinin__InfluenzaA__ACT22035

SEQ ID NO: 67045 - RNA, 1701 nt, Artificial Sequence
  derived and/or modified CDS sequence (opt1) from hemagglutinin__InfluenzaA__ACT22036
augaaggccauccuggugguccuccuguacaccuucgccaccgcgaacgccgacacgcugugcaucggcuaccacgccaacaacagcaccgacaccguggacaccgugcucgagaagaacgucacggugacccacuccgugaaccugcuggaggacaagcacaacgggaagcucugcaagcugcgcggcgucgcgccccugcaccucgggaagugcaacaucgccggcuggauccuggggaacccggagugcgagagccuguccaccgccagcuccuggagcuacaucguggagaccuccagcuccgacaacggcacgugcuaccccggcgacuucaucgacuacgaggagcuccgggagcagcugagcuccgugagcuccuucgagcgcuucgagaucuuccccaagaccagcuccuggcccaaccacgacagcaacaagggggucaccgccgccugcccgcacgccggcgcgaaguccuucuacaagaaccugaucuggcucaucaagaaggggaacagcuaccccaagcuguccaagagcuacaucaacgacaagggcaaggaggugcuggugcucugggggauccaccaccccagcaccuccgccgaccagcagagccuguaccagaacgccgacgccuacgucuucgugggcuccagccgguacuccaagaaguucaagcccgagaucgccauccgcccgaaggugcgggaccaggagggccgcaugaacuacuacuggacgcuggucgagcccggggacaagaucaccuucgaggcgaccggcaaccucguggugccccgguacgccuucgccauggagcgcaacgccgggagcggcaucaucaucuccgacacccccguccacgacugcaacacgaccugccagaccccgaagggcgccaucaacaccagccugcccuuccagaacauccaccccaucacgaucgggaagugccccaaguacgugaaguccaccaagcugcggcucgcgaccggccugcgcaacgugccgagcauccagucccgggggcuguucggcgccaucgccggguucaucgagggcggcuggaccgggauggucgacggcugguacggguaccaccaccagaacgagcagggcagcggguacgccgccgaccucaaguccacgcagaacgcgaucgacgagaucaccaacaaggugaacagcgugaucgagaagaugaacacccaguucaccgccgucggcaaggaguucaaccaccuggagaagcgcaucgagaaccugaacaagaagguggacgacggcuuccucgacaucuggacguacaacgccgagcugcugguccuccuggagaacgagcggacccuggacuaccacgacuccaacgugaagaaccucuacgagaaggugcgcagccagcugaagaacaacgccaaggagaucgggaacggcugcuucgaguucuaccacaagugcgacaacacgugcauggaguccgucaagaacgggaccuacgacuaccccaaguacagcgaggaggccaagcugaaccgggaggagaucgacggcgugaagcucgaguccacccgcaucuaccagauccuggcgaucuacagcaccguggccagcucccugguccucguggugagccugggggccaucuccuucuggaugugcagcaacggcucccugcagugccggaucugcaucuga

SEQ ID NO: 67046 - RNA, 1701 nt, Artificial Sequence
  derived and/or modified CDS sequence (opt1) from hemagglutinin__InfluenzaA__ACT22037
augaaggccauccuggugguccuccuguacaccuucgccaccgcgaacgccgacacgcugugcaucggcuaccacgccaacaacagcaccgacaccguggacaccgugcucgagaagaacgucacggugacccacuccgugaaccugcuggaggacaagcacaacgggaagcucugcaagcugcgcggcgucgcgccccugcaccucgggaagugcaacaucgccggcuggauccuggggaacccggagugcgagagccuguccaccgccagcuccuggagcuacaucguggagaccuccagcuccgacaacggcacgugcuaccccggcgacuucaucgacuacgaggagcuccgggagcagcugagcuccgugagcuccuucgagcgcuucgagaucuuccccaagaccagcuccuggcccaaccacgacagcaacaagggggucaccgccgccugcccgcacgccggcgcgaaguccuucuacaagaaccugaucuggcucgugaagaaggggaacagcuaccccaagcuguccaagagcuacaucaacgacaagggcaaggaggugcugguccucugggggauccaccaccccagcaccuccgccgaccagcagagccuguaccagaacgccgacgccuacguguucgugggcacgucccgguacagcaagaaguucaagcccgagaucgccauccgcccgaagguccgggagcaggagggccgcaugaacuacuacuggacccugguggagcccggggacaagaucaccuucgaggcgaccggcaaccucguggucccccgguacgccuucgccauggagcgcaacgccggguccggcaucaucaucagcgacacgcccgugcacgacugcaacacgaccugccagaccccgaagggcgccaucaacaccucccugcccuuccagaacauccaccccaucaccaucgggaagugccccaaguacgucaagagcaccaagcugcggcucgcgaccggccugcgcaacgugccguccauccagagccgggggcuguucggcgccaucgccggguucaucgagggcggcuggacggggaugguggacggcugguacggguaccaccaccagaacgagcagggcuccggguacgccgccgaccucaagagcacccagaacgcgaucgacgagaucaccaacaaggugaacuccgucaucgagaagaugaacacccaguucacggccgugggcaaggaguucaaccaccuggagaagcgcaucgagaaccugaacaagaaggucgacgacggcuuccucgacaucuggaccuacaacgccgagcugcuggugcuccuggagaacgagcggacccuggacuaccacgacagcaacgugaagaaccucuacgagaagguccgcucccagcugaagaacaacgccaaggagaucgggaacggcugcuucgaguucuaccacaagugcgacaacacgugcauggagagcgugaagaacgggaccuacgacuaccccaaguacuccgaggaggccaagcugaaccgggaggagaucgacggcgugaagcucgagagcacccgcaucuaccagauccuggcgaucuacuccaccgucgccagcagccuggugcucguggucucccugggggccaucagcuucuggaugugcuccaacggcagccugcagugccggaucugcaucuga

SEQ ID NO: 67047 - RNA, 1701 nt, Artificial Sequence
  derived and/or modified CDS sequence (opt1) from hemagglutinin__InfluenzaA__ACT22038
augaaggccauccuggugguccuccuguacaccuucgccaccgcgaacgccgacacgcugugcaucggcuaccacgccaacaacagcaccgacaccguggacaccgugcucgagaagaacgucacggugacccacuccgugaaccugcuggaggacaagcacaacgggaagcucugcaagcugcgcggcgucgcgccccugcaccucgggaagugcaacaucgccggcuggauccuggggaacccggagugcgagagccuguccaccgccagcuccuggagcuacaucguggagaccuccagcuccgacaacggcacgugcuaccccggcgacuucaucgacuacgaggagcuccgggagcagcugagcuccgugagcuccuucgagcgcuucgagaucuuccccaagaccagcuccuggcccaaccacgacagcaacaagggggucaccgccgccugcccgcacgccggcgcgaaguccuucuacaagaaccugaucuggcucgugaagaaggggaacagcuaccccaagcuguccaagagcuacaucaacgacaagggcaaggaggugcugguccucugggggauccaccaccccagcaccaacgccgaccagcagucccuguaccagaacgccgacgccuacguguucgugggcagcucccgguacagcaagaaguucaagcccgagaucgccauccgcccgaagguccgggaccaggagggccgcaugaacuacuacuggacgcugguggagcccggggacaagaucaccuucgaggcgaccggcaaccucguggucccccgguacgccuucgccauggagcgcaacgccggguccggcaucaucaucagcgacacccccgugcacgacugcaacacgaccugccagaccccgaagggcgccaucaacaccucccugcccuuccagaacauccaccccaucacgaucgggaagugccccaaguacgucaagagcaccaagcugcggcucgcgaccggccugcgcaacgugccguccauccagagccgggggcuguucggcgccaucgccggguucaucgagggcggcuggaccgggaugguggacggcugguacggguaccaccaccagaacgagcagggcuccggguacgccgccgaccucaagagcacgcagaacgcgaucgacgagaucaccaacaaggugaacuccgucaucgagaagaugaacacccaguucaccgccgugggcaaggaguucaaccaccuggagaagcgcaucgagaaccugaacaagaaggucgacgacggcuuccucgacaucuggacguacaacgccgagcugcuggugcuccuggagaacgagcggacccuggacuaccacgacagcaacgugaagaaccucuacgagaagguccgcucccagcugaagaacaacgccaaggagaucgggaacggcugcuucgaguucuaccacaagugcgacaacacgugcauggagagcgugaagaacgggaccuacgacuaccccaaguacuccgaggaggccaagcugaaccgggaggagaucgacggcgugaagcucgagagcacccgcaucuaccagauccuggcgaucuacuccaccgucgccagcagccuggugcucguggucucccugggggccaucagcuucuggaugugcuccaacggcagccugcagugccggaucugcaucuga

SEQ ID NO: 67048 - RNA, 1701 nt, Artificial Sequence
  derived and/or modified CDS sequence (opt1) from hemagglutinin__InfluenzaA__ACT22055
augaaggccauccuggugguccuccuguacaccuucgccaccgcgaacgccgacacgcugugcaucggcuaccacgccaacaacagcaccgacaccguggacaccgugcucgagaagaacgucacggugacccacuccgugaaccugcuggaggacaagcacaacgggaagcucugcaagcugcgcggcgucgcgccccugcaccucgggaagugcaacaucgccggcuggauccuggggaacccggagugcgagagccuguccaccgccagcuccuggagcuacaucguggagaccuccagcuccgacaacggcacgugcuaccccggcgacuucaucgacuacgaggagcuccgggagcagcugagcuccgugagcuccuucgagcgcuucgagaucuuccccaagaccagcuccuggcccaaccacgacagcaacaagggggucaccgccgccugcccgcacgccggcgcgaaguccuucuacaagaaccugaucuggcucgugaagaaggggaacagcuaccccaagcugcggaaguccuacaucaacgacaagggcaaggaggugcugguccucugggggauccaccaccccagcaccagcgccgaccagcagucccuguaccagaacgccgacgccuacguguucgugggcacgagccgcuacuccaagaaguucaagcccgagaucgccauccggccgaagguccgcgaccaggagggccggaugaacuacuacuggacccugguggagcccggggacaagaucaccuucgaggcgaccggcaaccucguggucccccgcuacgccuucgccauggagcggaacgccgggagcggcaucaucaucuccgacacgcccgugcacgacugcaacacgaccugccagaccccgaagggcgccaucaacaccagccugcccuuccagaacauccaccccaucaccaucgggaagugccccaaguacgugaaguccaccaagcugcgccucgcgaccggccugcggaacgucccgagcauccagucccgcgggcuguucggcgccaucgccggguucaucgagggcggcuggacggggaugguggacggcugguacggguaccaccaccagaacgagcagggcagcggguacgccgccgaccucaaguccacccagaacgcgaucgacgagaucaccaacaaggugaacagcgucaucgagaagaugaacacccaguucacggccgugggcaaggaguucaaccaccuggagaagcggaucgagaaccugaacaagaaggucgacgacggcuuccucgacaucuggaccuacaacgccgagcugcuggugcuccuggagaacgagcgcacccuggacuaccacgacuccaacgugaagaaccucuacgagaagguccggagccagcugaagaacaacgccaaggagaucgggaacggcugcuucgaguucuaccacaagugcgacaacacgugcauggaguccgugaagaacgggaccuacgacuaccccaaguacagcgaggaggccaagcugaaccgcgaggagaucgacggcgugaagcucgaguccacccggaucuaccagauccuggcgaucuacagcaccgucgccuccagccuggugcucguggucagccugggggccaucuccuucuggaugugcagcaacggcucccugcagugccgcaucugcaucuga

SEQ ID NO: 67049 - RNA, 1701 nt, Artificial Sequence; identical to SEQ ID NO: 67006
  derived and/or modified CDS sequence (opt1) from hemagglutinin__InfluenzaA__ACT22504

SEQ ID NO: 67050 - RNA, 1701 nt, Artificial Sequence; identical to SEQ ID NO: 66935
  derived and/or modified CDS sequence (opt1) from hemagglutinin__InfluenzaA__ACT33122

SEQ ID NO: 67051 - RNA, 1701 nt, Artificial Sequence
  derived and/or modified CDS sequence (opt1) from hemagglutinin__InfluenzaA__ACT33123
augaaggccauccuggugguccuccuguacaccuucgccaccgcgaacgccgacacgcugugcaucggcuaccacgccaacaacagcaccgacaccguggacaccgugcucgagaagaacgucacggugacccacuccgugaaccugcuggaggacaagcacaacgggaagcucugcaagcugcgcggcgucgcgccccugcaccucgggaagugcaacaucgccggcuggauccuggggaacccggagugcgagagccuguccaccgccagcuccuggagcuacaucguggagaccuccagcuccgacaacggcacgugcuaccccggcgacuucaucgacuacgaggagcuccgggagcagcugagcuccgugagcuccuucgagcgcuucgagaucuuccccaagaccagcuccuggcccaaccacgacagcaacaagggggucaccgccgccugcccgcacgccggcgcgaaguccuucuacaagaaccugaucuggcucgugaagaaggggaacagcuaccccaagcuguccaagagcuacaucaacgacaagggcaaggaggugcugguccucugggggauccaccaccccagcaccuccgccgaccagcagagccuguaccagaacgccgacgccuacguguucgugggcacgucccgguacagcaagaaguucaagcccgagaucgccauccgcccgaagguccgggaccaggagggccgcaugaacuacuacuggacccugguggagcccggggacaagaucaccuucgaggcgaccggcaaccucguggucccccgguacgccuucgccauggagcgcaacgccggguccggcaucaucaucagcgacacgcccgugcacgacugcaacacgaccugccagaccccgaagggcgccaucaacaccucccugcccuuccagaacauccaccccaucaccaucgggaagugccccaaguacgucaagagcaccaagcugcggcucgcgaccggccugcgcaacgugccguccauccagagccgggggcuguucggcgccaucgccggguucaucgagggcggcuggacggggaugguggacggcugguacggguaccaccaccagaacgagcagggcuccggguacgccgccgaccucaagagcacccagaacgcgaucgacgagaucaccaacaaggugaacuccgucaucgagaagaugaacacccaguucacggccgugggcaaggaguucaaccaccuggagaagcgcaucgagaaccugaacaagaaggucgacgacggcuuccucgacaucuggaccuacaacgccgagcugcuggugcuccuggagaacgagcggacccuggacuaccacgacagcaacgugaagaaccucuacgagaagguccgcucccagcugaagaacaacgccaaggagaucgggaacggcugcuucgaguucuaccacaagugcgacaacacgugcauggagagcgugaagaacgggaccuacgacuaccccaaguacuccgaggaggccaagcugaaccgggaggagaucgacggcgugaagcucgagagcacccgcaucuaccagauccuggcgaucuacuccaccgucgccagcagccuggugcucguggucucccugggggccaucagcuucuggaugugcuccaacggcagccugcaguuccggaucugcaucuga

SEQ ID NO: 67052 - RNA, 1701 nt, Artificial Sequence; identical to SEQ ID NO: 66693
  derived and/or modified CDS sequence (opt1) from hemagglutinin__InfluenzaA__ACT33125

SEQ ID NO: 67053 - RNA, 1701 nt, Artificial Sequence
  derived and/or modified CDS sequence (opt1) from hemagglutinin__InfluenzaA__ACT36505
augaaggccauccuggugguccuccuguacaccuucgccaccgcgaacgccgacacgcugugcaucggcuaccacgccaacaacagcaccgacaccguggacaccgugcucgagaagaacgucacggugacccacuccgugaaccugcuggaggacaagcacaacgggaagcucugcaagcugcgcggcgucgcgccccugcaccucgggaagugcaacaucgccggcuggauccuggggaacccggagugcgagagccuguccaccgccagcuccuggagcuacaucguggagaccuccagcuccgacaacggcacgugcuaccccggcgacuucaucgacuacgaggagcuccgggagcagcugagcuccgugagcuccuucgagcgcuucgagaucuuccccaagaccagcuccuggcccaaccacgacagcaacaagggggucaccgccgccugcccgcacgccggcgcgaaguccuucuacaagaaccugaucuggcucgugaagaaggggaacagcuaccccaagcuguccaagagcuacaucaacgacaagggcaaggaggugcugguccucugggggauccaccaccccagcaccuccgccgaccagcagagccuguaccagaacgccgacgccuacguguucgugggcacgucccgguacagcaagaaguucaagcccgagaucgccauccgcccgaagguccgggaccaggagggccgcaugaacuacuacuggacccugaucgagcccggggacaagaucaccuucgaggcgaccggcaaccucguggugccccgguacgccuucgccauggagcgcaacgccggguccggcaucaucaucagcgacacgcccguccacgacugcaacacgaccugccagaccccgaagggcgccaucaacaccucccugcccuuccagaacauccaccccaucaccaucgggaagugccccaaguacgucaagagcaccaagcugcggcucgcgaccggccugcgcaacgugccguccauccagagccgggggcuguucggcgccaucgccggguucaucgagggcggcuggacggggaugguggacggcugguacggguaccaccaccagaacgagcagggcuccggguacgccgccgaccucaagagcacccagaacgcgaucgacgagaucaccaacaaggugaacuccgugaucgagaagaugaacacccaguucacggccgucggcaaggaguucaaccaccuggagaagcgcaucgagaaccugaacaagaagguggacgacggcuuccucgacaucuggaccuacaacgccgagcugcugguccuccuggagaacgagcggacccuggacuaccacgacagcaacgugaagaaccucuacgagaaggugcgcucccagcugaagaacaacgccaaggagaucgggaacggcugcuucgaguucuaccacaagugcgacaacacgugcauggagagcgucaagaacgggaccuacgacuaccccaaguacuccgaggaggccaagcugaaccgggaggagaucgacggcgugaagcucgagagcacccgcaucuaccagauccuggcgaucuacuccaccguggccagcagccugguccucguggugucccugggggccaucagcuucuggaugugcuccaacggcagccugcagugccggaucugcaucuga

SEQ ID NO: 67054 - RNA, 1701 nt, Artificial Sequence
  derived and/or modified CDS sequence (opt1) from hemagglutinin__InfluenzaA__ACT36649
augaaggccauccuggugguccuccuguacaccuucgccaccgcgaacgccgacacgcugugcaucggcuaccacgccaacaacagcaccgacaccguggacaccgugcucgagaagaacgucacggugacccacuccgugaaccugcuggaggacaagcacaacgggaagcucugcaagcugcgcggcgucgcgccccugcaccucgggaagugcaacaucgccggcuggauccuggggaacccggagugcgagagccuguccaccgcccggagcugguccuacaucguggagaccagcuccagcgacaacggcacgugcuaccccggcgacuucaucgacuacgaggagcuccgcgagcagcugaacuccgugagcuccuucgagcgguucgagaucuuccccaagaccagcuccuggcccaaccacgacagcaacaagggggucaccgccgccugcccgcacgccggcgcgaaguccuucuacaagaaccugaucuggcucgugaagaaggggaacagcuaccccaagcuguccaagagcuacaucaacgacaagggcaaggaggugcugguccucugggggauccaccaccccuccaccagcgccgaccagcagagccuguaccagaacgccgacgccuacguguucgugggcuccagccgcuacuccaagaaguucaagcccgagaucgccauccggccgaagguccgcgaccaggagggccggaugaacuacuacuggacgcugguggagcccggggacaagaucaccuucgaggcgaccggcaaccucguggucccccgcuacgccuucgccauggagcggaacgccgggagcggcaucaucaucuccgacacccccgugcacgacugcaacacgaccugccagaccccgaagggcgccaucaacaccagccugcccuuccagaacauccaccccaucacgaucgggaagugccccaaguacgugaaguccaccaagcugcgccucgcgaccggccugcggaacgucccgagcauccagucccgcgggcuguucggcgccaucgccggguucaucgagggcggcuggaccgggaugguggacggcugguacggguaccaccaccagaacgagcagggcagcggguacgccgccgaccucaaguccacgcagaacgcgaucgacgagaucaccaacaaggugaacagcgucaucgagaagaugaacacccaguucaccgccgugggcaaggaguucaaccaccuggagaagcggaucgagaaccugaacaagaaggucgacgacggcuuccucgacaucuggacguacaacgccgagcugcuggugcuccuggagaacgagcgcacccuggacuaccacgacuccaacgucaagagccucuacgagaaggugcggucccagcugaagaacaacgccaaggagaucgggaacggcugcuucgaguucuaccacaagugcgacaacacgugcauggagagcgugaagaacgggaccuacgacuaccccaaguacuccgaggaggccaagcugaaccgcgaggagaucgacggcgugaagcucgagagcacccggaucuaccagauccuggcgaucuacuccaccgucgccagcagccuggugcucguggucucccugggggccaucagcuucuggaugugcuccaacggcagccugcagugccgcaucugcaucuga

SEQ ID NO: 67055 - RNA, 1701 nt, Artificial Sequence; identical to SEQ ID NO: 66693
  derived and/or modified CDS sequence (opt1) from hemagglutinin__InfluenzaA__ACT36650

SEQ ID NO: 67056 - RNA, 1701 nt, Artificial Sequence; identical to SEQ ID NO: 66693
  derived and/or modified CDS sequence (opt1) from hemagglutinin__InfluenzaA__ACT36652

SEQ ID NO: 67057 - RNA, 1701 nt, Artificial Sequence; identical to SEQ ID NO: 66691
  derived and/or modified CDS sequence (opt1) from hemagglutinin__InfluenzaA__ACT36653

SEQ ID NO: 67058 - RNA, 1701 nt, Artificial Sequence
  derived and/or modified CDS sequence (opt1) from hemagglutinin__InfluenzaA__ACT36655
augaaggccauccuggugguccuccuguacaccuucgccaccgcgaacgccgacacgcugugcaucggcuaccacgccaacaacagcaccgacaccguggacaccgugcucgagaagaacgucacggugacccacuccgugaaccugcuggaggacaagcacaacgggaagcucugcaagcugcgcggcgucgcgccccugcaccucgggaagugcaacaucgccggcuggauccuggggaacccggagugcgagagccuguccaccgccagcuccuggagcuacaucguggagaccuccagcuccggcaacggcacgugcuaccccggggacuucaucgacuacgaggagcuccgggagcagcugagcuccgugagcuccuucgagcgcuucgagaucuuccccaagaccagcuccuggcccaaccacgacagcaacaagggcgucaccgccgccugcccgcacgccggggcgaaguccuucuacaagaaccugaucuggcucgugaagaagggcaacagcuaccccaagcuguccaagagcuacaucaacgacaaggggaaggaggugcugguccucuggggcauccaccaccccagcaccuccgccgaccagcagagccuguaccagaacgccgacgccuacguguucgugggcuccagccgguacuccaagaaguucaagcccgagaucgccauccgcccgaagguccgggaccaggaggggcgcaugaacuacuacuggacgcugguggagcccggcgacaagaucaccuucgaggcgaccgggaaccucguggucccccgguacgccuucgccauggagcgcaacgccggcagcggcaucaucaucuccgacacccccgugcacgacugcaacacgaccugccagaccccgaagggggccaucaacaccagccugcccuuccagaacauccaccccaucacgaucggcaagugccccaaguacgugaaguccaccaagcugcggcucgcgaccgggcugcgcaacgucccgagcauccagucccggggccuguucggggccaucgccggcuucaucgagggcggguggaccggcaugguggacgggugguacggcuaccaccaccagaacgagcaggggagcggcuacgccgccgaccucaaguccacgcagaacgcgaucgacgagaucaccaacaaggugaacagcgucaucgagaagaugaacacccaguucaccgccgugggcaaggaguucaaccaccuggagaagcgcaucgagaaccugaacaagaaggucgacgacggguuccucgacaucuggacguacaacgccgagcugcuggugcuccuggagaacgagcggacccuggacuaccacgacuccaacgugaagaaccucuacgagaagguccgcagccagcugaagaacaacgccaaggagaucggcaacgggugcuucgaguucuaccacaagugcgacaacacgugcauggaguccgugaagaacggcaccuacgacuaccccaaguacagcgaggaggccaagcugaaccgggaggagaucgacggggugaagcucgaguccacccgcaucuaccagauccuggcgaucuacagcaccgucgccagcucccuggugcucguggucagccugggcgccaucuccuucuggaugugcagcaacggcucccugcagugccggaucugcaucuga

SEQ ID NO: 67059 - RNA, 1701 nt, Artificial Sequence; identical to SEQ ID NO: 66680
  derived and/or modified CDS sequence (opt1) from hemagglutinin__InfluenzaA__ACT36658

SEQ ID NO: 67060 - RNA, 1701 nt, Artificial Sequence; identical to SEQ ID NO: 66719
  derived and/or modified CDS sequence (opt1) from hemagglutinin__InfluenzaA__ACT36659

SEQ ID NO: 67061 - RNA, 1701 nt, Artificial Sequence; identical to SEQ ID NO: 66680
  derived and/or modified CDS sequence (opt1) from hemagglutinin__InfluenzaA__ACT36661

SEQ ID NO: 67062 - RNA, 1701 nt, Artificial Sequence; identical to SEQ ID NO: 66693
  derived and/or modified CDS sequence (opt1) from hemagglutinin__InfluenzaA__ACT36663

SEQ ID NO: 67063 - RNA, 1701 nt, Artificial Sequence; identical to SEQ ID NO: 66693
  derived and/or modified CDS sequence (opt1) from hemagglutinin__InfluenzaA__ACT36666

SEQ ID NO: 67064 - RNA, 1701 nt, Artificial Sequence
  derived and/or modified CDS sequence (opt1) from hemagglutinin__InfluenzaA__ACT52687
augaaggccauccuggugguccuccuguacaccuucgccaccgcgaacgccgacacgcugugcaucggcuaccacgccaacaacagcaccgacaccguggacaccgugcucgagaagaacgucacggugacccacuccgugaaccugcuggaggacaagcacaacgggaagcucugcaagcugcgcggcgucgcgccccugcaccucgggaagugcaacaucgccggcuggauccuggggaacccggagugcgagagccuguccaccgccagcuccuggagcuacaucguggagaccuccagcuccgacaacggcacgugcuaccccggcgacuucaucgacuacgaggagcuccgggagcagcugagcuccgugagcuccuucgagcgcuucgagaucuuccccaagaccagcuccuggcccaaccacgacagcaacaagggggucaccgccgccugcccgcacgccggcgcgaaguccuucuacaagaaccugaucuggcucgugaagaaggggaacagcuaccccaagcuguccaagagcuacaucaacgacaagggcaaggaggugcugguccucugggggauccaccaccccagcaccuccgccgaccagcagagccuguaccagaacgccgacgccuacguguucgugggcuccagccgguacuccaagaaguucaagcccgagaucgccauccgcccgaagguccggggccaggaggggcgcaugaacuacuacuggacgcugguggagcccggcgacaagaucaccuucgaggcgaccgggaaccucguggucccccgguacgccuucgccauggagcgcaacgccggcagcggcaucaucaucuccgacacccccgugcacgacugcaacacgaccugccagaccccgaagggggccaucaacaccagccugcccuuccagaacauccaccccaucacgaucggcaagugccccaaguacgugaaguccaccaagcugcggcucgcgaccgggcugcgcaacgucccgagcauccagucccggggccuguucggggccaucgccggcuucaucgagggcggguggaccggcaugguggacgggugguacggcuaccaccaccagaacgagcaggggagcggcuacgccgccgaccucaaguccacgcagaacgcgaucgacgagaucaccaacaaggugaacagcgucaucgagaagaugaacacccaguucaccgccgugggcaaggaguucaaccaccuggagaagcgcaucgagaaccugaacaagaaggucgacgacggguuccucgacaucuggacguacaacgccgagcugcuggugcuccuggagaacgagcggacccuggacuaccacgacuccaacgugaagaaccucuacgagaagguccgcagccagcugaagaacaacgccaaggagaucggcaacgggugcuucgaguucuaccacaagugcgacaacacgugcauggaguccgugaagaacggcaccuacgacuaccccaaguacagcgaggaggccaagcugaaccgggaggagaucgacggggugaagcucgaguccacccgcuucuaccagauccuggcgaucuacagcaccgucgccagcucccuggugcucguggucagccugggcgccaucuccuucuggaugugcagcaacggcucccugcagugccggaucugcaucuga

SEQ ID NO: 67065 - RNA, 1701 nt, Artificial Sequence; identical to SEQ ID NO: 66680
  derived and/or modified CDS sequence (opt1) from hemagglutinin__InfluenzaA__ACT54606

SEQ ID NO: 67066 - RNA, 1701 nt, Artificial Sequence; identical to SEQ ID NO: 66693
  derived and/or modified CDS sequence (opt1) from hemagglutinin__InfluenzaA__ACT66146

SEQ ID NO: 67067 - RNA, 1701 nt, Artificial Sequence; identical to SEQ ID NO: 66935
  derived and/or modified CDS sequence (opt1) from hemagglutinin__InfluenzaA__ACT66155

SEQ ID NO: 67068 - RNA, 1701 nt, Artificial Sequence
  derived and/or modified CDS sequence (opt1) from hemagglutinin__InfluenzaA__ACT66162
auggaggccauccuggugguccuccuguacaccuucgccaccgcgaacgccgacacgcugugcaucggcuaccacgccaacaacagcaccgacaccguggacaccgugcucgagaagaacgucacggugacccacuccgugaaccugcuggaggacaagcacaacgggaagcucugcaagcugcgcggcgucgcgccccugcaccucgggaagugcaacaucgccggcuggauccuggggaacccggagugcgagagccuguccaccgccagcuccuggagcuacaucguggagaccuccagcuccgacaacggcacgugcuaccccggcgacuucaucgacuacgaggagcuccgggagcaccugagcuccgugagcuccuucgagcgcuucgagaucuuccccaagaccagcuccuggcccaaccacgacagcaacaagggggucaccgccgccugcccgcacgccggcgcgaaguccuucuacaagaaccugaucuggcucgugaagaaggggaacagcuaccccaagcuguccaagagcuacaucaacgacaagggcaaggaggugcugguccucugggggauccaccaccccagcaccuccgccgaccagcagagccuguaccagaacgccgacgccuacguguucgugggcuccagccgguacuccaagaaguucaagcccgagaucgccauccgcccgaagguccgggaccaggagggccgcaugaacuacuacuggacgcugguggagcccggggacaagaucaccuucgaggcgaccggcaaccucguggucccccgguacgccuucgccauggagcgcaacgccgggagcggcaucaucaucuccgacacccccgugcacgacugcaacacgaccugccagaccccgaagggcgccaucaacaccagccugcccuuccagaacauccaccccaucacgaucgggaagugccccaaguacgugaaguccaccaagcugcggcucgcgaccggccugcgcaacgucccgagcauccagucccgggggcuguucggcgccaucgccggguucaucgagggcggcuggaccgggaugguggacggcugguacggguaccaccaccagaacgagcagggcagcggguacgccgccgaccucaaguccacgcagaacgcgaucgacgagaucaccaacaaggugaacagcgucaucgagaagaugaacacccaguucaccgccgugggcaaggaguucaaccaccuggagaagcgcaucgagaaccugaacaagaaggucgacgacggcuuccucgacaucuggacguacaacgccgagcugcuggugcuccuggagaacgagcggacccuggacuaccacgacuccaacgugaagaaccucuacgagaagguccgcagccagcugaagaacaacgccaaggagaucgggaacggcugcuucgaguucuaccacaagugcgacaacacgugcauggaguccgugaagaacgggaccuacgacuaccccaaguacagcgaggaggccaagcugaaccgggaggagaucgacggcgugaagcucgaguccacccgcaucuaccagauccuggcgaucuacagcaccgucgccagcucccuggugcucguggucagccugggggccaucuccuucuggaugugcagcaacggcucccugcagugccggaucugcaucuga

SEQ ID NO: 67069 - RNA, 1701 nt, Artificial Sequence; identical to SEQ ID NO: 66693
  derived and/or modified CDS sequence (opt1) from hemagglutinin__InfluenzaA__ACT67239

SEQ ID NO: 67070 - RNA, 1701 nt, Artificial Sequence; identical to SEQ ID NO: 66693
  derived and/or modified CDS sequence (opt1) from hemagglutinin__InfluenzaA__ACT67255

SEQ ID NO: 67071 - RNA, 1701 nt, Artificial Sequence; identical to SEQ ID NO: 66680
  derived and/or modified CDS sequence (opt1) from hemagglutinin__InfluenzaA__ACT68102

SEQ ID NO: 67072 - RNA, 1701 nt, Artificial Sequence
  derived and/or modified CDS sequence (opt1) from hemagglutinin__InfluenzaA__ACT68103
augaaggccauccuggugguccuccuguacaccuucgccaccgcgaacgccgacacgcugugcaucggcuaccacgccaacaacagcaccgacaccguggacaccgugcucgagaagaacgucacggugacccacuccgugaaccugcuggaggacaagcacaacgggaagcucugcaagcugcgcggcgucgcgccccugcaccucgggaagugcaacaucgccggcuggauccuggggaacccggagugcgagagccuguccaccgccagcuccuggagcuacaucguggagaccuccagcuccgacaacggcacgugcuaccccggcgacuucaucgacuacgaggagcuccgggagcagcugagcuccgugagcuccuucgagcgcuucgagaucuuccccaagaccagcuccuggcccaaccacgacagcaacaagggggucaccgccgccugcccgcacgccggcgcgaaguccuucuacaagaaccugaucuggcucgugaagaaggggaacagcuaccccaagcuguccaagagcuacaucaacgacaagggcaaggaggugcugguccucugggggauccaccaccccagcaccuccgccgaccagcagagccuguaccagaacgccgacgccuacguguucgugggcuccagccgguacuccaagaaguucaagcccgagaucgccauccgcccgaagguccgggaccaggagggccgcaugaacuacuacuggacgcugguggagcccggggacaagaucaccuucgaggcgaccggcaaccucguggucccccgguacgccuucgccauggagcgcaacgccgggagcggcaucaucaucuccgacacccccgugcacgacugcaacacgaccugccagacccugaagggcgccaucaacaccagccugccguuccagaacauccaccccaucacgaucgggaagugccccaaguacgugaaguccaccaagcuccggcuggcgaccggccugcgcaacguccccagcauccagucccggggccucuucggggccaucgccggguucaucgagggcggcuggaccgggaugguggacggcugguacggguaccaccaccagaacgagcagggcagcggguacgccgccgaccugaaguccacgcagaacgcgaucgacgagaucaccaacaaggugaacagcgucaucgagaagaugaacacccaguucaccgccgugggcaaggaguucaaccaccuggagaagcgcaucgagaaccucaacaagaaggucgacgacggcuuccuggacaucuggacguacaacgccgagcugcucgugcugcuggagaacgagcggacccucgacuaccacgacuccaacgugaagaaccuguacgagaagguccgcagccagcugaagaacaacgccaaggagaucgggaacggcugcuucgaguucuaccacaagugcgacaacacgugcauggaguccgugaagaacgggaccuacgacuacccgaaguacagcgaggaggccaagcucaaccgggaggagaucgacggcgugaagcuggaguccacccgcaucuaccagauccuggcgaucuacagcaccgucgccagcucccucgugcugguggucagccugggggccaucuccuucuggaugugcagcaacggcucccuccagugccggaucugcaucuga

SEQ ID NO: 67073 - RNA, 1701 nt, Artificial Sequence; identical to SEQ ID NO: 66680
  derived and/or modified CDS sequence (opt1) from hemagglutinin__InfluenzaA__ACT68104

SEQ ID NO: 67074 - RNA, 1701 nt, Artificial Sequence
  derived and/or modified CDS sequence (opt1) from hemagglutinin__InfluenzaA__ACT68105
augaaggccauccuggugguccuccuguacaccuucgccaccgcgaacgccgacacgcugugcaucggcuaccacgccaacaacagcaccgacaccguggacaccgugcucgagaagaacgucacggugacccacuccgugaaccugcuggaggacaagcacaacgggaagcucugcaagcugcgcggcgucgcgccccugcaccucgggaagugcaacaucgccggcuggauccuggggaacccggagugcgagagccuguccaccgccagcuccuggagcuacaucguggagaccuccagcuccgacaacggcacgugcuaccccggcgacuucaucgacuacgaggagcuccgggagcagcugagcuccgugagcuccuucgagcgcuucgagaucuuccccaagaccagcuccuggcccaaccacgacagcaacaagggggucaccgccgccugcccgcacgccggcgcgaaguccuucuacaagaaccugaucuggcucgugaagaaggggaacagcuaccccaagcuguccaagagcuacaucaacgacaagggcaaggaggugcugguccucugggggauccaccaccccagcaccuccgccgaccagcagagccuguaccagaacgccgacgccuacguguucgugggcuccagcaaguacuccaagaaguucaagcccgagaucgccauccggccgaagguccgcgaccaggagggccggaugaacuacuacuggacgcugguggagcccggggacaagaucaccuucgaggcgaccggcaaccucguggucccccgcuacgccuucgccauggagcggaacgccgggagcggcaucaucaucuccgacacccccgugcacgacugcaacacgaccugccagaccccgaagggcgccaucaacaccagccugcccuuccagaacauccaccccaucacgaucgggaagugccccaaguacgugaaguccaccaagcugcgccucgcgaccggccugcggaacgucccgagcauccagucccgcgggcuguucggcgccaucgccggguucaucgagggcggcuggaccgggaugguggacggcugguacggguaccaccaccagaacgagcagggcagcggguacgccgccgaccucaaguccacgcagaacgcgaucgacgagaucaccaacaaggugaacagcgucaucgagaagaugaacacccaguucaccgccgugggcaaggaguucaaccaccuggagaagcggaucgagaaccugaacaagaaggucgacgacggcuuccucgacaucuggacguacaacgccgagcugcuggugcuccuggagaacgagcgcacccuggacuaccacgacuccaacgugaagaaccucuacgagaagguccggagccagcugaagaacaacgccaaggagaucgggaacggcugcuucgaguucuaccacaagugcgacaacacgugcauggaguccgugaagaacgggaccuacgacuaccccaaguacagcggcgaggccaagcugaaccgcgaggagaucgacggggugaagcucgaguccacccggaucuaccagauccuggcgaucuacagcaccgucgccagcucccuggugcucguggucagccugggcgccaucuccuucuggaugugcagcaacggcucccugcagugccgcaucugcaucuga

SEQ ID NO: 67075 - RNA, 1701 nt, Artificial Sequence; identical to SEQ ID NO: 66680
  derived and/or modified CDS sequence (opt1) from hemagglutinin__InfluenzaA__ACT68106

SEQ ID NO: 67076 - RNA, 1701 nt, Artificial Sequence; identical to SEQ ID NO: 66680
  derived and/or modified CDS sequence (opt1) from hemagglutinin__InfluenzaA__ACT68107

SEQ ID NO: 67077 - RNA, 1701 nt, Artificial Sequence; identical to SEQ ID NO: 66873
  derived and/or modified CDS sequence (opt1) from hemagglutinin__InfluenzaA__ACT68108

SEQ ID NO: 67078 - RNA, 1701 nt, Artificial Sequence
  derived and/or modified CDS sequence (opt1) from hemagglutinin__InfluenzaA__ACT68109
augaaggccauccuggugguccuccuguacaccuucgccaccgcgaacacggacacccugugcaucggcuaccacgccaacaacagcaccgacaccguggacacggugcucgagaagaacgucaccgugacccacuccgugaaccugcuggaggacaagcacaacgggaagcucugcaagcugcgcggcgucgcgccccugcaccucgggaagugcaacaucgccggcuggauccuggggaacccggagugcgagagccuguccaccgccagcuccuggagcuacaucguggagacguccagcuccgacaacgggaccugcuaccccggcgacuucaucgacuacgaggagcuccgggagcagcugagcuccgugagcuccuucgagcgcuucgagaucuuccccaagaccagcuccuggcccaaccacgacagcaacaagggcgucaccgccgccugcccgcacgccggcgccaaguccuucuacaagaaccugaucuggcucgugaagaaggggaacagcuaccccaagcuguccaagagcuacaucaacgacaagggcaaggaggugcugguccucugggggauccaccaccccagcacguccgcggaccagcagagccuguaccagaacgccgacgccuacguguucgugggcaccucccgguacagcaagaaguucaagcccgagaucgccauccgcccgaagguccgggaccaggagggccgcaugaacuacuacuggacccugguggagcccggggacaagaucaccuucgaggccacgggcaaccucguggucccccgguacgcguucgccauggagcgcaacgccggguccggcaucaucaucagcgacacccccgugcacgacugcaacacgaccugccagaccccgaagggcgccaucaacaccucccugcccuuccagaacauccaccccaucaccaucgggaagugccccaaguacgucaagagcaccaagcugcggcucgccacgggccugcgcaacgugccguccauccagagccgggggcuguucggcgcgaucgccggguucaucgagggcggcuggaccgggaugguggacggcugguacggguaccaccaccagaacgagcagggcuccggguacgccgccgaccucaagagcacccagaacgccaucgacgagaucaccaacaaggugaacuccgucaucgagaagaugaacacgcaguucaccgcggugggcaaggaguucaaccaccuggagaagcgcaucgagaaccugaacaagaaggucgacgacggcuuccucgacaucuggaccuacaacgccgagcugcuggugcuccuggagaacgagcggacccuggacuaccacgacagcaacgugaagaaccucuacgagaagguccgcucccagcugaagaacaacgccaaggagaucgggaacggcugcuucgaguucuaccacaagugcgacaacacgugcauggagagcgugaagaacgggaccuacgacuaccccaaguacuccgaggaggccaagcugaaccgggaggagaucgacggcgugaagcucgagagcacccgcaucuaccagauccuggccaucuacuccaccgucgcgagcagccuggugcucguggucucccugggggccaucagcuucuggaugugcuccaacggcagccugcagugccggaucugcaucuga

SEQ ID NO: 67079 - RNA, 1701 nt, Artificial Sequence; identical to SEQ ID NO: 66680
  derived and/or modified CDS sequence (opt1) from hemagglutinin__InfluenzaA__ACT68110

SEQ ID NO: 67080 - RNA, 1701 nt, Artificial Sequence; identical to SEQ ID NO: 66680
  derived and/or modified CDS sequence (opt1) from hemagglutinin__InfluenzaA__ACT68112

SEQ ID NO: 67081 - RNA, 1701 nt, Artificial Sequence; identical to SEQ ID NO: 66680
  derived and/or modified CDS sequence (opt1) from hemagglutinin__InfluenzaA__ACT68113

SEQ ID NO: 67082 - RNA, 1701 nt, Artificial Sequence; identical to SEQ ID NO: 66680
  derived and/or modified CDS sequence (opt1) from hemagglutinin__InfluenzaA__ACT68115

SEQ ID NO: 67083 - RNA, 1701 nt, Artificial Sequence; identical to SEQ ID NO: 66680
  derived and/or modified CDS sequence (opt1) from hemagglutinin__InfluenzaA__ACT68119

SEQ ID NO: 67084 - RNA, 1701 nt, Artificial Sequence
  derived and/or modified CDS sequence (opt1) from hemagglutinin__InfluenzaA__ACT79133
augaaggccauccuggugguccuccuguacaccuucgccaccgcgaacgccgacacgcugugcaucggcuaccacgccaacaacagcaccgacaccguggacaccgugcucgagaagaacgucacggugacccacuccgugaaccugcuggaggacaagcacaacgggaagcucugcaagcugcgcggcgucgcgccccugcaccucgggaagugcaacaucgccggcuggauccuggggaacccggagugcgagagccuguccaccgccagcuccuggagcuacaucguggagaccuccagcuccgacaacggcacgugcuaccccggcgacuucaucgacuacgaggagcuccgggagcagcugagcuccgugagcuccuucgagcgcuucgagaucuuccccaagaccagcuccuggcccaaccacgacagcaacaagggggucaccgccgccugcccgcacgccggcgcgaaguccuucuacaagaaccugaucuggcucgugaagaaggggaacagcuaccccaagcuguccaagagcuacaucaacgacaagggcaaggaggugcugguccucugggggauccaccaccccagcaccuccgccgaccagcagagccuguaccagaacgccgacgccuacguguucgugggcacgucccgguacagcaagaaguucaagcccgagaucgccauccgcccgaagguccgggaccaggagggccgcaugaacuacuacuggaagcugguggagcccggggacaagaucaccuucgaggcgaccggcaaccucguggucccccgguacgccuucgccauggagcgcaacgccggguccggcaucaucaucagcgacacccccgugcacgacugcaacacgaccugccagaccccgaagggcgccaucaacaccucccugcccuuccagaacauccaccccaucacgaucgggaagugccccaaguacgucaagagcaccaagcugcggcucgcgaccggccugcgcaacgugccguccauccagagccgggggcuguucggcgccaucgccggguucaucgagggcggcuggaccgggaugguggacggcugguacggguaccaccaccagaacgagcagggcuccggguacgccgccgaccucaagagcacgcagaacgcgaucgacgagaucaccaacaaggugaacuccgucaucgagaagaugaacacccaguucaccgccgugggcaaggaguucaaccaccuggagaagcgcaucgagaaccugaacaagaaggucgacgacggcuuccucgacaucuggacguacaacgccgagcugcuggugcuccuggagaacgagcggacccuggacuaccacgacagcaacgugaagaaccucuacgagaagguccgcucccagcugaagaacaacgccaaggagaucgggaacggcugcuucgaguucuaccacaagugcgacaacacgugcauggagagcgugaagaacgggaccuacgacuaccccaaguacuccgaggaggccaagcugaaccgggaggagaucgacggcgugaagcucgagagcacccgcaucuaccagauccuggcgaucuacuccaccgucgccagcagccuggugcucguggucucccugggggccaucagcuucuggaugugcuccaacggcagccugcagugccggaucugcaucuga

SEQ ID NO: 67085 - RNA, 1701 nt, Artificial Sequence; identical to SEQ ID NO: 66680
  derived and/or modified CDS sequence (opt1) from hemagglutinin__InfluenzaA__ACT79143

SEQ ID NO: 67086 - RNA, 1701 nt, Artificial Sequence; identical to SEQ ID NO: 66719
  derived and/or modified CDS sequence (opt1) from hemagglutinin__InfluenzaA__ACT79153

SEQ ID NO: 67087 - RNA, 1701 nt, Artificial Sequence; identical to SEQ ID NO: 67006
  derived and/or modified CDS sequence (opt1) from hemagglutinin__InfluenzaA__ACT79163

SEQ ID NO: 67088 - RNA, 1701 nt, Artificial Sequence; identical to SEQ ID NO: 67006
  derived and/or modified CDS sequence (opt1) from hemagglutinin__InfluenzaA__ACT79173

SEQ ID NO: 67089 - RNA, 1701 nt, Artificial Sequence
  derived and/or modified CDS sequence (opt1) from hemagglutinin__InfluenzaA__ACT79625
augaaggccauccuggugguccuccuguacaccuucgccaccgcgaacgccgacacgcugugcaucggcuaccacgccaacaacagcaccgacaccguggacaccgugcucgagaagaacgucacggugacccacuccgugaaccugcuggaggacaagcacaacgggaagcucugcaagcugcgcggcgucgcgccccugcaccucgggaagugcaacaucgccggcuggauccuggggaacccggagugcgagagccuguccaccgccagcuccuggagcuacaucguggagaccuccagcuccgacaacggcacgugcuaccccggcgacuucaucgacuacgaggagcuccgggagcagcugagcuccgugagcuccuucgagcgcuucgagaucuuccccaagaccagcuccuggcccaaccacgacagcaacaagggggucaccaccgccugcccgcacgccggcgccaaguccuucuacaagaaccugaucuggcucgugaagaaggggaacagcuaccccaagcuguccaagagcuacaucaacgacaagggcaaggaggugcugguccucugggggauccaccaccccagcacguccgcggaccagcagagccuguaccagaacgccgacgccuacguguucgugggcaccucccgguacagcaagaaguucaagcccgagaucgccauccgcccgaagguccgggaccaggagggccgcaugaacuacuacuggacccugguggagcccggggacaagaucaccuucgaggccacgggcaaccucguggucccccgguacgcguucgccauggagcgcaacgccggguccggcaucaucaucagcgacacccccgugcacgacugcaacacgaccugccagaccccgaagggcgccaucaacaccucccugcccuuccagaacauccaccccaucaccaucgggaagugccccaaguacgucaagagcaccaagcugcggcucgccacgggccugcgcaacgugccguccauccagagccgggggcuguucggcgcgaucgccggguucaucgagggcggcuggaccgggaugguggacggcugguacggguaccaccaccagaacgagcagggcuccggguacgccgccgaccucaagagcacccagaacgccaucgacgagaucaccaacaaggugaacuccgucaucgagaagaugaacacgcaguucaccgcggugggcaaggaguucaaccaccuggagaagcgcaucgagaaccugaacaagaagaucgacgacggcuuccucgacaucuggaccuacaacgccgagcugcugguccuccugaagaacgagcggacccuggacuaccacgacagcaacgugaagaaccucuacgagaaggugcgcucccagcugaagaacaacgccaaggagaucgggaacggcugcuucgaguucuaccacaagugcgacaacacgugcauggagagcgucaagaacgggaccuacgacuaccccaaguacuccgaggaggccaagcugaaccgggaggagaucgacggcgugaagcucgagagcacccgcaucuaccagauccuggccaucuacuccaccguggcgagcagccugguccucguggugucccugggggccaucagcuucuggaugugcuccaacggcagccugcagugccggaucugcaucuga

SEQ ID NO: 67090 - RNA, 1701 nt, Artificial Sequence; identical to SEQ ID NO: 66680
  derived and/or modified CDS sequence (opt1) from hemagglutinin__InfluenzaA__ACT79627

SEQ ID NO: 67091 - RNA, 1701 nt, Artificial Sequence
  derived and/or modified CDS sequence (opt1) from hemagglutinin__InfluenzaA__ACT82512
augaaggccauccuggugguccuccuguacaccuucgccaccgcgaacgccgacacgcugugcaucggcuaccacgccaacaacagcaccgacaccguggacaccgugcucgagaagaacgucacggugacccacuccgugaaccugcuggaggacaagcacaacgggaagcucugcaagcugcgcggcgucgcgccccugcaccucgggaagugcaacaucgccggcuggauccuggggaacccggagugcgagagccuguccaccgccagcuccuggagcuacaucguggagaccuccagcuccgacaacggcacgugcuaccccggcgacuucaucgacuacgaggagcuccgggagcagcugagcuccgugagcuccuucgagcgcuucgagaucuuccccaagaccagcuccuggcccaaccacgacagcaacaagggggucaccgccgccugcccgcacgccggcgcgaaguccuucuacaagaaccugaucuggcucgugaagaaggggaacagcuaccccaagcuguccaagagcuacaucaacgacaagggcaaggaggugcugguccucugggggauccaccaccccagcaccuccgccgaccagcagagccuguaccagaacgccgacgccuacguguucgugggcacgucccgguacagcaagaaguucaagcccgagaucgccauccgcccgaagguccgggaccaggagggccgcaugaacuacuacuggacccugguggagcccggggacaagaucaccuucgaggcgaccggcaaccucguggucccccgguacgccuucgccauggagcgcaacgccggguccggcaucaucaucagcgacacgcccgugcacgacugcaacacgaccugccagaccccgaagggcgccaucaacaccucccugcccuuccagaacauccaccccaucaccaucgggaagugccccaaguacgucaagagcaccaagcugcggcucgcgaccggccugcgcaacgugccguccauccagagccgggggcuguucggcgccaucgccggguucaucgagggcggcuggacggggaugguggacggcugguacggguaccaccaccagaacgagcagggcuccggguacgccgccgaccucaagagcacccagaacgcgaucgacgagaucaccaacaaggugaacuccgucaucgagaagaugaacacccaguucacggccgugggcaaggaguucaaccaccuggagaagcgcaucgagaaccugaacaagaaggucgacgacggcuuccucgacaucuggaccuacaacgccgagcugcuggugcuccuggagaacgagcggacccuggacuaccacgacagcaacgugaagaaccucuacgagaagguccgcucccaguucaagaacaacgccaaggagaucgggaacggcugcuucgaguucuaccacaagugcgacaacacgugcauggagagcgugaagaacgggaccuacgacuaccccaaguacuccgaggaggccaagcugaaccgggaggagaucgacggcgugaagcuggagagcacccgcaucuaccagauccucgcgaucuacuccaccgucgccagcagccuggugcugguggucucccucggggccaucagcuucuggaugugcuccaacggcagccugcagugccggaucugcaucuga

SEQ ID NO: 67092 - RNA, 1701 nt, Artificial Sequence; identical to SEQ ID NO: 66693
  derived and/or modified CDS sequence (opt1) from hemagglutinin__InfluenzaA__ACT82513

SEQ ID NO: 67093 - RNA, 1701 nt, Artificial Sequence
  derived and/or modified CDS sequence (opt1) from hemagglutinin__InfluenzaA__ACT82514
augaaggccauccuggugguccuccuguacaccuucgccaccgcgaacgccgacacgcugugcaucggcuaccacgccaacaacagcaccgacaccguggacaccgugcucgagaagaacgucacggugacccacuccgugaaccugcuggaggacaagcacaacgggaagcucugcaagcugcgcggcgucgcgccccugcaccucgggaagugcaacaucgccggcuggauccuggggaacccggagugcgagagccuguccaccgccagcuccuggagcuacaucguggagaccuccagcuccgacaacggcacgugcuaccccggcgacuucaucgacuacgaggagcuccgggagcagcugagcuccgugagcuccuucgagcgcuucgagaucuuccccaagaccagcuccuggcccaaccacgacagcaacaagggggucaccgccgccugcccgcacgccggcgcgaaguccuucuacaagaaccugaucuggcucgugaagaaggggaacagcuaccccaagcuguccaagagcuacaucaacgacaagggcaaggaggugcugguccucugggggauccaccaccccagcaccuccgccgaccagcagagccuguaccagaacgccgacgccuacguguucgugggcacgucccgguacagcaagaaguucaagcccgagaucgccauccgcccgaagguccgggaccaggagggccgcaugaacuacuacuggacccugguggagcccggggacaagaucaccuucgaggcgaccggcaaccucguggucccccgguacgccuucgccauggagcgcaacgccggguccggcaucaucaucagcaacacgcccgugcacgacugcaacacgaccugccagaccccgaagggcuccaucaacaccagccugcccuuccagaacauccaccccaucaccaucgggaagugccccaaguacgugaaguccaccaagcugcggcucgccaccggccugcgcaacgucccgagcauccagucccgggggcuguucggcgcgaucgccggguucaucgagggcggcuggacggggaugguggacggcugguacggguaccaccaccagaacgagcagggcagcggguacgccgccgaccucaaguccacccagaacgccaucgacgagaucaccaacaaggugaacagcgucaucgagaagaugaacacccaguucacggcggugggcaaggaguucaaccaccuggagaagcgcaucgagaaccugaacaagaaggucgacgacggcuuccucgacaucuggaccuacaacgccgagcugcuggugcuccuggagaacgagcggacccuggacuaccacgacuccaacgugaagaaccucuacgagaagguccgcagccagcugaagaacaacgccaaggagaucgggaacggcugcuucgaguucuaccacaagugcgacaacacgugcauggaguccgugaagaacgggaccuacgacuaccccaaguacagcgaggaggccaagcugaaccgggaggagaucgacggcgugaagcucgaguccacccgcaucuaccagauccuggccaucuacagcaccgucgcgagcucccuggugcucguggucagccugggggccaucuccuucuggaugugcagcaacggcucccugcagugccggaucugcaucuga

SEQ ID NO: 67094 - RNA, 1701 nt, Artificial Sequence; identical to SEQ ID NO: 66693
  derived and/or modified CDS sequence (opt1) from hemagglutinin__InfluenzaA__ACT82515

SEQ ID NO: 67095 - RNA, 1701 nt, Artificial Sequence
  derived and/or modified CDS sequence (opt1) from hemagglutinin__InfluenzaA__ACT82516
augaaggccauccuggugguccuccuguacaccuucgccaccgcgaacgccgacacgcugugcaucggcuaccacgccaacaacagcaccgacaccguggacaccgugcucgagaagaacgucacggugacccacuccgugaaccugcuggaggacaagcacaacgggaagcucugcaagcugcgcggcgucgcgccccugcaccucgggaagugcaacaucgccggcuggauccuggggaacccggagugcgagagccuguccaccgccagcuccuggagcuacaucguggagaccuccagcuccgacaacggcacgugcuaccccggcgacuucaucgacuacgaggagcuccgggagcagcugagcuccgugagcuccuucgagcgcuucgagaucuuccccaagaccagcuccuggcccaaccacgacagcaacaagggggucaccgccgccugcccgcacgccggcgcgaaguccuucuacaagaaccugaucuggcucgugaagaaggggaacagcuaccccaagcuguccaagagcuacaucaacgacaagggcaaggaggugcugguccucugggggauccaccaccccagcaccuccgccgaccagcagagccuguaccagaacgccgacgccuacguguucgugggcuccagccgguacuccaagaaguucaagcccgagaucgccauccgcccgaagguccgggaccaggagggccgcaugaacuacuacuggacgcugguggagcccggggacaagaucaccuucgaggcgaccggcaaccucauggugccccgguacgccuucgccauggagcgcaacgccgggagcggcaucaucaucuccgacacccccguccacgacugcaacacgaccugccagaccccgaagggcgccaucaacaccagccugcccuuccacaacauccaccccaucacgaucgggaagugccccaaguacgugaaguccaccaagcugcggcucgcgaccggccugcgcaacgugccgagcauccagucccgggggcuguucggcgccaucgccggguucaucgagggcggcuggaccgggauggucgacggcugguacggguaccaccaccagaacgagcagggcagcggguacgccgccgaccucaaguccacgcagaacgcgaucgacgagaucaccaacaaggugaacagcgugaucgagaagaugaacacccaguucaccgccgucggcaaggaguucaaccaccuggagaagcgcaucgagaaccugaacaagaagguggacgacggcuuccucgacaucuggacguacaacgccgagcugcugguccuccuggagaacgagcggacccuggacuaccacgacuccaacgugaagaaccucuacgagaaggugcgcagccagcugaagaacaacgccaaggagaucgggaacggcugcuucgaguucuaccacaagugcgacaacacgugcauggaguccgucaagaacgggaccuacgacuaccccaaguacagcgaggaggccaagcugaaccgggaggagaucgacggcgugaagcucgaguccacccgcaucuaccagauccuggcgaucuacagcaccguggccagcucccugguccucguggugagccugggggccaucuccuucuggaugugcagcaacggcucccugcagugccggaucugcaucuga

SEQ ID NO: 67096 - RNA, 1701 nt, Artificial Sequence; identical to SEQ ID NO: 66935
  derived and/or modified CDS sequence (opt1) from hemagglutinin__InfluenzaA__ACT83795

SEQ ID NO: 67097 - RNA, 1701 nt, Artificial Sequence; identical to SEQ ID NO: 66935
  derived and/or modified CDS sequence (opt1) from hemagglutinin__InfluenzaA__ACT83805

SEQ ID NO: 67098 - RNA, 1701 nt, Artificial Sequence; identical to SEQ ID NO: 66693
  derived and/or modified CDS sequence (opt1) from hemagglutinin__InfluenzaA__ACT83815

SEQ ID NO: 67099 - RNA, 1701 nt, Artificial Sequence; identical to SEQ ID NO: 66693
  derived and/or modified CDS sequence (opt1) from hemagglutinin__InfluenzaA__ACT83825

SEQ ID NO: 67100 - RNA, 1701 nt, Artificial Sequence; identical to SEQ ID NO: 66693
  derived and/or modified CDS sequence (opt1) from hemagglutinin__InfluenzaA__ACT83835

SEQ ID NO: 67101 - RNA, 1701 nt, Artificial Sequence; identical to SEQ ID NO: 66786
  derived and/or modified CDS sequence (opt1) from hemagglutinin__InfluenzaA__ACT83845

SEQ ID NO: 67102 - RNA, 1701 nt, Artificial Sequence; identical to SEQ ID NO: 66680
  derived and/or modified CDS sequence (opt1) from hemagglutinin__InfluenzaA__ACT83855

SEQ ID NO: 67103 - RNA, 1701 nt, Artificial Sequence; identical to SEQ ID NO: 66693
  derived and/or modified CDS sequence (opt1) from hemagglutinin__InfluenzaA__ACT83865

SEQ ID NO: 67104 - RNA, 1701 nt, Artificial Sequence; identical to SEQ ID NO: 66935
  derived and/or modified CDS sequence (opt1) from hemagglutinin__InfluenzaA__ACT83875

SEQ ID NO: 67105 - RNA, 1701 nt, Artificial Sequence; identical to SEQ ID NO: 66935
  derived and/or modified CDS sequence (opt1) from hemagglutinin__InfluenzaA__ACT85999

SEQ ID NO: 67106 - RNA, 1701 nt, Artificial Sequence; identical to SEQ ID NO: 66935
  derived and/or modified CDS sequence (opt1) from hemagglutinin__InfluenzaA__ACT86009

SEQ ID NO: 67107 - RNA, 1701 nt, Artificial Sequence; identical to SEQ ID NO: 66693
  derived and/or modified CDS sequence (opt1) from hemagglutinin__InfluenzaA__ACT86019

SEQ ID NO: 67108 - RNA, 1701 nt, Artificial Sequence; identical to SEQ ID NO: 66786
  derived and/or modified CDS sequence (opt1) from hemagglutinin__InfluenzaA__ACT86029

SEQ ID NO: 67109 - RNA, 1701 nt, Artificial Sequence; identical to SEQ ID NO: 66693
  derived and/or modified CDS sequence (opt1) from hemagglutinin__InfluenzaA__ACT86039

SEQ ID NO: 67110 - RNA, 1701 nt, Artificial Sequence; identical to SEQ ID NO: 66693
  derived and/or modified CDS sequence (opt1) from hemagglutinin__InfluenzaA__ACT86059

SEQ ID NO: 67111 - RNA, 1701 nt, Artificial Sequence; identical to SEQ ID NO: 66693
  derived and/or modified CDS sequence (opt1) from hemagglutinin__InfluenzaA__ACT86069

SEQ ID NO: 67112 - RNA, 1701 nt, Artificial Sequence; identical to SEQ ID NO: 66693
  derived and/or modified CDS sequence (opt1) from hemagglutinin__InfluenzaA__ACT86079

SEQ ID NO: 67113 - RNA, 1701 nt, Artificial Sequence; identical to SEQ ID NO: 66693
  derived and/or modified CDS sequence (opt1) from hemagglutinin__InfluenzaA__ACT86089

SEQ ID NO: 67114 - RNA, 1701 nt, Artificial Sequence; identical to SEQ ID NO: 66693
  derived and/or modified CDS sequence (opt1) from hemagglutinin__InfluenzaA__ACT86099

SEQ ID NO: 67115 - RNA, 1701 nt, Artificial Sequence; identical to SEQ ID NO: 66935
  derived and/or modified CDS sequence (opt1) from hemagglutinin__InfluenzaA__ACT86109

SEQ ID NO: 67116 - RNA, 1701 nt, Artificial Sequence; identical to SEQ ID NO: 66693
  derived and/or modified CDS sequence (opt1) from hemagglutinin__InfluenzaA__ACT86119

SEQ ID NO: 67117 - RNA, 1701 nt, Artificial Sequence; identical to SEQ ID NO: 66935
  derived and/or modified CDS sequence (opt1) from hemagglutinin__InfluenzaA__ACT86129

SEQ ID NO: 67118 - RNA, 1701 nt, Artificial Sequence; identical to SEQ ID NO: 66693
  derived and/or modified CDS sequence (opt1) from hemagglutinin__InfluenzaA__ACT86139

SEQ ID NO: 67119 - RNA, 1701 nt, Artificial Sequence
  derived and/or modified CDS sequence (opt1) from hemagglutinin__InfluenzaA__ACU00932
augaaggccauccuggugguccuccuguacaccuucgccaccgcgaacgccgacacgcugugcaucggcuaccacgccaacaacagcaccgacaccguggacaccgugcucgagaagaacgucacggugacccacuccgugaaccugcuggaggacaagcacaacgggaagcucugcaagcugcgcggcgucgcgccccugcaccucgggaagugcaacaucgccggcuggauccuggggaacccggagugcgagagccuguccaccgccagcuccuggagcuacaucguggagaccuccagcuccgacaacggcacgugcuaccccggcgacuucaucgacuacgaggagcuccgggagcagcugagcuccgugagcuccuucgagcgcuucgagaucuuccccaagaccagcuccuggcccaaccacgacagcaacaagggggucaccgccgccugcccgcacgccggcgcgaaguccuucuacaagaaccugaucuggcucgugaagaaggggaacagcuaccccaagcuguccaagagcuacaucaacgacaagggcaaggaggugcugguccucugggggauccaccaccccagcaccuccgccgaccagcagagccuguaccagaacgccgacgccuacguguucgugggcacgucccgguacagcaagaacuucaagcccgagaucgccauccgcccgaagguccgggaccaggagggccgcaugaacuacuacuggacccugguggagcccggggacaagaucaccuucgaggcgaccggcaaccucguggucccccgguacgccuucgccauggagcgcaacgccggguccggcaucaucaucagcgacacgcccgugcacgacugcaacacgaccugccagaccccgaagggcgccaucaacaccucccugcccuuccagaacauccaccccaucaccaucgggaagugccccaaguacgucaagagcaccaagcugcggcucgcgaccggccugcgcaacgugccguccauccagagccgggggcuguucggcgccaucgccggguucaucgagggcggcuggacggggaugguggacggcugguacggguaccaccaccagaacgagcagggcuccggguacgccgccgaccucaagagcacccagaacgcgaucgacgagaucaccaacaaggugaacuccgucaucgagaagaugaacacccaguucacggccgugggcaaggaguucaaccaccuggagaagcgcaucgagaaccugaacaagaaggucgacgacggcuuccucgacaucuggaccuacaacgccgagcugcuggugcuccuggagaacgagcggacccuggacuaccacgacagcaacgugaagaaccucuacgagaagguccgcucccagcugaagaacaacgccaaggagaucgggaacggcugcuucgaguucuaccacaagugcgacaacacgugcauggagagcgugaagaacgggaccuacgacuaccccaaguacuccgaggaggccaagcugaaccgggaggagaucgacggcgugaagcucgagagcacccgcaucuaccagauccuggcgaucuacuccaccgucgccagcagccuggugcucguggucucccugggggccaucagcuucuggaugugcuccaacggcagccugcagugccggaucugcaucuga

SEQ ID NO: 67120 - RNA, 1701 nt, Artificial Sequence; identical to SEQ ID NO: 66693
  derived and/or modified CDS sequence (opt1) from hemagglutinin__InfluenzaA__ACU00942

SEQ ID NO: 67121 - RNA, 1701 nt, Artificial Sequence; identical to SEQ ID NO: 66693
  derived and/or modified CDS sequence (opt1) from hemagglutinin__InfluenzaA__ACU00952

SEQ ID NO: 67122 - RNA, 1701 nt, Artificial Sequence
  derived and/or modified CDS sequence (opt1) from hemagglutinin__InfluenzaA__ACU12494
augaagaccaucaucgcccugagcuacauccucugccugguguucgcccagaagcugcccggcaacgacaacuccaccgcgacgcucugccuggggcaccacgccgucccgaacggcacccuggugaagaccaucaccaacgaccagaucgaggugacgaacgccaccgagcucguccagagcuccagcaccgggcgcaucugcgacagcccccaccggauccuggacggcaagaacugcacccugaucgacgcccuccugggggacccccacugcgacggcuuccagaacaaggagugggaccuguucguggagcgcagcaaggccuacuccaacugcuaccccuacgacgugccggacuacgcgagccuccggucccuggucgccagcuccggcacgcuggaguucaucaacgaggacuucaacuggaccgggguggcccagagcggcgaguccuacgccugcaagcgcgggagcgugaaguccuucuucagccggcucaacuggcugcacgaguccgacuacaaguaccccgcgcugaacgucaccaugcccaacaacggcaaguucgacaagcucuacaucuggggcgugcaccaccccaucaccgaccgcgagcagacgagccuguacgugcgggccuccgggcgcgucaccgugagcaccaagcggagccagcagaccgugaucccgaacaucggcucccgccccuggguccgggggcugagcucccgcaucagcaucuacuggacgaucgugaagcccggcgacauccuccugaucaacuccaccgggaaccugaucgcgccccggggcuacuucaagauccgcaccggcaagagcuccaucaugcggagcgacgccccgaucgggaccugcuccagcgagugcaucacgcccaacggcuccauccccaacgacaagcccuuccagaacgugaaccgcaucaccuacggggccugcccgcgguacgucaagcagaacacccucaagcuggccaccggcaugcgcaacgugcccgagaagcagacgcgggggaucuucggcgccaucgccggcuucaucgagaacgggugggagggcaugguggacgggugguacggcuuccgccaccagaacagcgaggggaccggccaggccgccgaccugaaguccacccaggcggccaucgaccagaucaacggcaagcucaaccggcugaucgagaagaccaacgagaaguuccaccagaucgagaaggaguucagcgaggucgaggggcgcauccaggaccuggagaaguacguggaggacacgaagaucgaccucugguccuacaacgccgagcugcugguggcccucgagaaccagcacaccaucgaccugaccgacagcgagaugaacaagcuguucgagaagacccgcaagcagcuccgggagaacgccgaggacaugggcaacgggugcuucaagaucuaccacaagugcgacaacgcgugcaucggcuccauccgcaacgggacguacgaccacgacgucuaccgggacgaggcccugaacaaccgcuuccagaucaagggcguggagcugaaguccggcuacaaggacuggauccucuggaucuccuucgccaucagcugcuuccugcugugcgucgugcuccugggguucaucaugugggccugccagaagggcaacauccggugcaacaucugcaucuga

SEQ ID NO: 67123 - RNA, 1698 nt, Artificial Sequence; identical to SEQ ID NO: 66805
  derived and/or modified CDS sequence (opt1) from hemagglutinin__InfluenzaA__ACU12505

SEQ ID NO: 67124 - RNA, 1701 nt, Artificial Sequence
  derived and/or modified CDS sequence (opt1) from hemagglutinin__InfluenzaA__ACU12516
augaagaccaucaucgcccugagcuacauccucugccugguguucgcccagaagcugcccggcaacgacaacuccaccgcgacgcucugccuggggcaccacgccgucccgaacggcaccaucgugaagaccaucaccaacgaccagaucgaggugacgaacgccaccgagcugguccagagcuccagcaccgggggcaucugcgacagcccccaccagauccucgacggggagaacugcacccugguggacgcccugcucggcgacccccagugcgacggcuuccagaacaagaagugggaccuguucguggagcgcagcaaggccuacuccaacugcuaccccuacgacgucccggacuacgcgagccugcggucccucguggccagcuccgggacgcuggaguucaacaacgagagcuucaacuggaccggcgugacccagaacgggaccuccagcgccugcaagcgccgguccaacaacagcuucuucucccgccugaacuggcucacgcaccugaaguucaaguaccccgcccugaacgucaccaugcccaacaacgagaaguucgacaagcucuacaucuggggcgugcaccaccccgggaccgacaacgaccagaucagccuguacgcgcaggccuccggccggaucaccgugagcacgaagcgcagccagcagaccgucaucccgaacaucggcucccggccccgcgugcgggacaucagcucccgcaucagcaucuacuggaccaucgugaagcccggggacauccugcucaucaacuccaccggcaaccugaucgcgccccggggguacuucaagauccgcagcggcaaguccagcaucaugcgguccgacgccccgaucggcaagugcaacagcgagugcaucacgcccaacggguccauccccaacgacaagcccuuccagaacgucaaccgcaucaccuacggcgccugcccgcgguacgugaagcagaacacccugaagcucgccaccgggaugcgcaacgugcccgagacgcagacccggggcaucuucggggccaucgccggcuucaucgagaacggcugggaggggauggucgacggcugguacggguuccgccaccagaacagcgagggcaccgggcaggccgccgaccugaaguccacccaggcggccaucaaccagaucaacggcaagcugaaccggcucaucggcaagacgaacgagaaguuccaccagaucgagaaggaguucagcgagguggaggggcgcauccaggaccuggagaaguacguggaggacaccaagaucgaccugugguccuacaacgccgagcuccuggucgcccuggagaaccagcacaccaucgaccucaccgacagcgagaugaacaagcuguucgagcggacgaagaagcagcugcgcgagaacgccgaggacaugggcaacgggugcuucaagaucuaccacaagugcgacaacgcgugcaucggcuccauccgcaacgggaccuacgaccacgacguguaccgggacgaggcccucaacaaccgcuuccagaucaagggcguggagcugaaguccggcuacaaggacuggauccuguggaucuccuucgccaucagcugcuuccuccugugcgucgcccugcucggguucaucaugugggccugccagaagggcaacauccggugcaacaucugcaucuga

SEQ ID NO: 67125 - RNA, 1701 nt, Artificial Sequence; identical to SEQ ID NO: 64654
  derived and/or modified CDS sequence (opt1) from hemagglutinin__InfluenzaA__ACU12527

SEQ ID NO: 67126 - RNA, 1701 nt, Artificial Sequence; identical to SEQ ID NO: 66396
  derived and/or modified CDS sequence (opt1) from hemagglutinin__InfluenzaA__ACU12538

SEQ ID NO: 67127 - RNA, 1701 nt, Artificial Sequence; identical to SEQ ID NO: 65592
  derived and/or modified CDS sequence (opt1) from hemagglutinin__InfluenzaA__ACU12549

SEQ ID NO: 67128 - RNA, 1698 nt, Artificial Sequence
  derived and/or modified CDS sequence (opt1) from hemagglutinin__InfluenzaA__ACU12560
augaaggugaagcugcucguccugcugugcaccuucaccgccacguacgccgacaccaucugcaucggcuaccacgcgaacaacagcaccgacaccguggacacggugcucgagaagaacgucaccgugacccacuccgugaaccugcuggagaacagccacaacgggaagcucugccugcugaagggcaucgcgccccuccagcuggggaacugcuccgucgccggcuggauccuggggaacccggagugcgagcuccugaucagcaaggaguccuggagcuacaucguggagaagcccaaccccgagaacgggaccugcuaccccggccacuucgccgacuacgaggagcugcgcgagcagcucuccagcguguccagcuucgagcgguucgagaucuucccgaaggaguccagcuggcccaaccacacggucaccgggguguccgccagcugcucccacaacggcgagagcuccuucuaccgcaaccugcuguggcucaccgggaagaacggccuguaccccaaccugagcaaguccuacgccaacaacaaggggaaggaggugcucguccuguggggcgugcaccacccgcccaacaucggcgaccagaacacccuguaccacacggagaacgccuacgugagcgucgugagcucccacuacagccggaaguucacccccgagaucgccaagcgccccaaggugcgggaccaggaggggcgcaucaacuacuacuggacccuccuggagcccggcgacaccaucaucuucgaggccaacgggaaccugaucgcgccgcgguacgccuucgcccucucccgcggcuucggcagcgggaucaucaacuccaacguccccauggacaagugcgacgccaagugccagacgccccagggcgccaucaacagcucccugcccuuccagaacgugcacccggugaccaucggggagugccccaaguacguccggagcgcgaagcugcgcauggugaccggccuccggaacauccccuccauccagagccgcgggcuguucggcgccaucgccggcuucaucgagggcggcuggaccgggaugguggacggcugguacggguaccaccaccagaacgagcagggcuccggcuacgccgccgaccagaaguccacgcagaacgcgaucaacgggaucaccaacaaggucaacagcgugaucgagaagaugaacacccaguucaccgccgucggcaaggaguucaacaagcuggagcggcgcauggagaaccucaacaagaagguggacgacggguucaucgacaucuggacguacaacgccgagcugcuggugcuccuggagaacgagcggacccuggacuuccacgacagcaacgucaagaaccucuacgagaaggugaagucccagcugaagaacaacgccaaggagaucggcaacgggugcuucgaguucuaccacaagugcaacgacgagugcauggagagcgugaagaacggcaccuacgacuaccccaaguacuccgaggagagcaagcugaaccgcgagaagaucgacggcgucaagcucgaguccauggggguguaccagauccuggccaucuacagcaccguggcgagcucccugguccuccuggugagccugggcgccaucuccuucuggaugugcagcaacgggucccuccagugccggaucugcaucuga

SEQ ID NO: 67129 - RNA, 1698 nt, Artificial Sequence; identical to SEQ ID NO: 66512
  derived and/or modified CDS sequence (opt1) from hemagglutinin__InfluenzaA__ACU12571

SEQ ID NO: 67130 - RNA, 1698 nt, Artificial Sequence
  derived and/or modified CDS sequence (opt1) from hemagglutinin__InfluenzaA__ACU12582
augaaggugaagcugcucguccugcugugcaccuucaccgccacguacgccgacaccaucugcaucggcuaccacgcgaacaacagcaccgacaccguggacacggugcucgagaagaacgucaccgugacccacuccgugaaccugcuggagaacagccacaacgggaagcucugccugcugaagggcaucgcgccccuccagcuggggaacugcuccgucgccggcuggauccuggggaacccggagugcgagcuccugaucagcaaggaguccuggagcuacaucguggagaagcccaaccccgagaacgggaccugcuaccccggccgcuucgccgacuacgaggagcugcgggagcagcucuccagcguguccagcuucgagcgcuucgagaucuucccgaaggaguccagcuggcccaaccacacggucaccgggguguccgccagcugcucccacaacggcgagagcuccuucuaccggaaccugcuguggcucaccgggaagaacggccuguaccccaaccugagcaaguccuacgccaacaacaaggggaaggaggugcucguccuguggggcgugcaccacccgcccaacaucggcgaccagaacacccuguaccacacggagaacgccuacgugagcgucgugagcucccacuacagccgcaaguucacccccgagaucgccaagcggcccaaggugcgcgaccaggaggggcggaucaacuacuacuggacccuccuggagcccggcgacaccaucaucuucgaggccaacgggaaccugaucgcgccgcgcuacgccuucgcccucucccggggcuucggcagcgggaucaucaacuccaacgcccccauggacaagugcgacgccaagugccagacgccccagggcgcgaucaacagcucccugcccuuccagaacguccacccggugaccaucggggagugccccaaguacgugcgcagcgccaagcugcggauggucaccggccuccgcaacauccccuccauccagagccgggggcuguucggcgccaucgccggcuucaucgagggcggcuggaccgggaugguggacggcugguacggguaccaccaccagaacgagcagggcuccggcuacgccgcggaccagaaguccacgcagaacgccaucaacgggaucaccaacaaggugaacagcgucaucgagaagaugaacacccaguucaccgccgugggcaaggaguucaacaagcuggagcgccggauggagaaccucaacaagaaggucgacgacggguucaucgacaucuggacguacaacgccgagcugcuggugcuccuggagaacgagcgcacccuggacuuccacgacagcaacgugaagaaccucuacgagaaggucaagucccagcugaagaacaacgccaaggagaucggcaacgggugcuucgaguucuaccacaagugcaacgacgagugcauggagagcgugaagaacggcaccuacgacuaccccaaguacuccgaggagagcaagcugaaccgggagaagaucgacggcgugaagcucgaguccaugggggucuaccagauccuggcgaucuacagcaccguggccagcucccuggugcuccuggucagccugggcgccaucuccuucuggaugugcagcaacgggucccuccagugccgcaucugcaucuga

SEQ ID NO: 67131 - RNA, 1698 nt, Artificial Sequence
  derived and/or modified CDS sequence (opt1) from hemagglutinin__InfluenzaA__ACU12593
augaaggugaagcugcucguccugcugugcaccuucaccgccacguacgccgacaccaucugcaucggcuaccacgcgaacaacagcaccgacaccguggacacggugcucgagaagaacgucaccgugacccacuccgugaaccugcuggagaacagccacaacgggaagcucugccugcugaagggcaucgcgccccuccagcuggggaacugcuccgucgccggcuggauccuggggaacccggagugcgagcuccugaucagcaaggaguccuggagcuacaucguggagaagcccaaccccgagaacgggaccugcuaccccggccacuucgccgacuacgaggagcugcgcgagcagcucuccagcguguccagcuucgagcgguucgagaucuucccgaaggaguccagcuggcccaaccacacggucaccgggguguccgccagcugcucccacaacggcgagagcuccuucuaccgcaaccugcuguggcucaccgggaagaacggccuguaccccaaccugagcaaguccuacgccaacaacaaggagaaggaggugcucguccuguggggcgugcaccacccgcccaacaucguggaccagaagacccuguaccggacggagaacgccuacgucagcguggugagcucccacuacagccgcaaguucacccccgagaucgccaagcggcccaagguccgcgaccaggagggccggaucaacuacuacuggacccuccuggagcccggcgacaccaucaucuucgaggccaacgggaaccugaucgcgccgcgcuacgccuucgcccucucccggggcuucgggagcggcaucaucaacuccaacgcccccauggacaagugcgacgccaagugccagacgccccagggcgcgaucaacagcucccugcccuuccagaacgugcacccggugaccaucggggagugccccaaguacguccgcagcgccaagcugcggauggugaccggccuccgcaacauccccuccauccagagccgggggcuguucggcgccaucgccggguucaucgagggcggcuggaccgggaugguggacggcugguacggguaccaccaccagaacgagcagggcuccggguacgccgcggaccagaaguccacgcagaacgccaucgacggcaucaccaacaaggucaacagcgugaucgagaagaugaacacccaguucaccgccgucggcaaggaguucaacaagcuggagcgccggauggagaaccucaacaagaagguggacgacggguucaucgacaucuggacguacaacgccgagcugcuggugcuccuggagaacgagcgcacccuggacuuccacgacagcaacgucaagaaccucuacgagaaggugaagucccagcugaagaacaacgccaaggagaucggcaacgggugcuucgaguucuaccacaagugcaacgacgagugcauggagagcgugaagaacggcaccuacgacuaccccaaguacuccgaggagagcaagcugaaccgggagaagaucgacgggaucaagcucgaguccaugggcgucuaccagauccuggcgaucuacagcaccguggccagcucccuggugcuccuggucagccugggcgccaucuccuucuggaugugcagcaacgggucccuccagugccgcaucugcaucuga

SEQ ID NO: 67132 - RNA, 1701 nt, Artificial Sequence; identical to SEQ ID NO: 66693
  derived and/or modified CDS sequence (opt1) from hemagglutinin__InfluenzaA__ACU13090

SEQ ID NO: 67133 - RNA, 1701 nt, Artificial Sequence; identical to SEQ ID NO: 66693
  derived and/or modified CDS sequence (opt1) from hemagglutinin__InfluenzaA__ACU13091

SEQ ID NO: 67134 - RNA, 1701 nt, Artificial Sequence; identical to SEQ ID NO: 66693
  derived and/or modified CDS sequence (opt1) from hemagglutinin__InfluenzaA__ACU13092

SEQ ID NO: 67135 - RNA, 1701 nt, Artificial Sequence; identical to SEQ ID NO: 66693
  derived and/or modified CDS sequence (opt1) from hemagglutinin__InfluenzaA__ACU13093

SEQ ID NO: 67136 - RNA, 1701 nt, Artificial Sequence
  derived and/or modified CDS sequence (opt1) from hemagglutinin__InfluenzaA__ACU13094
augaaggccauccuggugguccuccuguacaccuucgccaccgcgaacgccgacacgcugugcaucggcuaccacgccaacaacagcaccgacaccguggacaccgugcucgagaagaacgucacggugacccacuccgugaaccugcuggaggacaagcacaacgggaagcucugcaagcugcgcggcgucgcgccccugcaccucgggaagugcaacaucgccggcuggauccuggggaacccggagugcgagagccuguccaccgccagcuccuggagcuacaucguggagaccuccagcuccgacaacggcacgugcuaccccggcgacuucaucgacuacgaggagcuccgggagcagcugagcuccgugagcuccuucgagcgcuucgagaucuuccccaagaccagcuccuggcccaaccacgacagcaacaagggggucaccgccgccugcccgcacgccggcgcgaaguccuucuacaagaaccugaucuggcucgugaagaaggggaacagcuaccccaagcuguccaagagcuacaucaacgacaagggcaaggaggugcugguccucugggggauccaccaccccagcaccuccgccgaccagcagagccuguaccagaacgccgacgccuacguguucgugggcuccagccgguacuccaagaaguucaagcccgagaucgccauccgcccgaagguccggggccaggaggggcgcaugaacuacuacuggacgcugguggagcccggcgacaagaucaccuucgaggcgaccgggaaccucguggucccccgguacgccuucgccauggagcgcaacgccggcagcggcaucaucaucuccgacacccccgugcacgacugcaacacgaccugccagaccccgaagggggccaucaacaccagccugcccuuccagaacauccaccccaucacgaucggcaagugccccaaguacgugaaguccaccaagcugcggcucgcgaccgggcugcgcaacgucccgagcauccagucccggggccuguucggggccaucgccggcuucaucgagggcggguggaccggcaugguggacgggugguacggcuaccaccaccagaacgagcaggggagcggcuacgccgccgaccucaaguccacgcagaacgcgaucgacgagaucaccaacaaggugaacagcgucaucgagaagaugaacacccaguucaccgccgugggcaaggaguucaaccaccuggagaagcgcaucgagaaccugaacaagaaggucgacgacggguuccucgacaucuggacguacaacgccgagcugcuggugcuccuggagaacgagcggacccuggacuaccacgacuccaacgugaagaaccucuacgagaagguccgcagccagcugaagaacaacgccaaggagaucggcaacgggugcuucgaguucuaccacaagugcgacaacacgugcauggaguccgugaagaacggcaccuacgacuaccccaaguacagcgaggaggccaagcugaaccgggaggagaucgacggggugaagcucgaguccacccgcaucuaccagauccuggcgaucuacagcaccgucgccagcucccuggugcucguggucagccugggcgccaucuccuucuggaugugcagcaacggcucccugcagugccggaucugcaucuga

SEQ ID NO: 67137 - RNA, 1701 nt, Artificial Sequence; identical to SEQ ID NO: 66693
  derived and/or modified CDS sequence (opt1) from hemagglutinin__InfluenzaA__ACU13095

SEQ ID NO: 67138 - RNA, 1701 nt, Artificial Sequence
  derived and/or modified CDS sequence (opt1) from hemagglutinin__InfluenzaA__ACU13096
augaaggccauccuggugguccuccugcacaccuucgccaccgcgaacgccgacacgcugugcaucggcuaccacgccaacaacagcaccgacaccguggacaccgugcucgagaagaacgucacggugacccacuccgugaaccugcuggaggacaagcacaacgggaagcucugcaagcugcgcggcgucgcgccccugcaccucgggaagugcaacaucgccggcuggauccuggggaacccggagugcgagagccuguccaccgccagcuccuggagcuacaucguggagaccuccagcuccgacaacggcacgugcuaccccggcgacuucaucgacuacgaggagcuccgggagcagcugagcuccgugagcuccuucgagcgcuucgagaucuuccccaagaccagcuccuggcccaaccacgacagcaacaagggggucaccgccgccugcccgcacgccggcgcgaaguccuucuacaagaaccugaucuggcucgugaagaaggggaacagcuaccccaagcuguccaagagcuacaucaacgacaagggcaaggaggugcugguccucugggggauccaccaccccagcaccuccgccgaccagcagagccuguaccagaacgccgacgccuacguguucgugggcuccagccgguacuccaagaaguucaagcccgagaucgccauccgcccgaagguccgggaccaggagggccgcaugaacuacuacuggacgcugguggagcccggggacaagaucaccuucgaggcgaccggcaaccucguggucccccgguacgccuucgccauggagcgcaacgccgggagcggcaucaucaucuccgacacccccgugcacgacugcaacacgaccugccagaccccgaagggcgccaucaacaccagccugcccuuccagaacauccaccccaucacgaucgggaagugccccaaguacgugaaguccaccaagcugcggcucgcgaccggccugcgcaacgucccgagcauccagucccgggggcuguucggcgccaucgccggguucaucgagggcggcuggaccgggaugguggacggcugguacggguaccaccaccagaacgagcagggcagcggguacgccgccgaccucaaguccacgcagaacgcgaucgacgagaucaccaacaaggugaacagcgucaucgagaagaugaacacccaguucaccgccgugggcaaggaguucaaccaccuggagaagcgcaucgagaaccugaacaagaaggucgacgacggcuuccucgacaucuggacguacaacgccgagcugcuggugcuccuggagaacgagcggacccuggacuaccacgacuccaacgugaagaaccucuacgagaagguccgcagccagcugaagaacaacgccaaggagaucgggaacggcugcuucgaguucuaccacaagugcgacaacacgugcauggaguccgugaagaacgggaccuacgacuaccccaaguacagcgaggaggccaagcugaaccgggaggagaucgacggcgugacccucgaguccacccgcaucuaccagauccuggcgaucuacagcaccgucgccagcucccuggugcucguggucagccugggggccaucuccuucuggaugugcagcaacggcucccugcagugccggaucugcaucuga

SEQ ID NO: 67139 - RNA, 1701 nt, Artificial Sequence; identical to SEQ ID NO: 66693
  derived and/or modified CDS sequence (opt1) from hemagglutinin__InfluenzaA__ACU13098

SEQ ID NO: 67140 - RNA, 1701 nt, Artificial Sequence
  derived and/or modified CDS sequence (opt1) from hemagglutinin__InfluenzaA__ACU13099
augaaggccauccuggugguccuccuguacaccuucgccaccgcgaacgccgacacgcugugcaucggcuaccacgccaacaacagcaccgacaccguggacaccgugcucgagaagaacgucacggugacccacuccgugaaccugcuggaggacaagcacaacgggaagcucugcaagcugcgcggcgucgcgccccugcaccucgggaagugcaacaucgccggcuggauccuggggaacccggagugcgagagccuguccaccgccagcuccuggagcuacaucguggagaccuccagcuccgacaacggcacgugcuaccccggcgacuucaucgacuacgaggagcuccgggagcagcugagcuccgugagcuccuucgagcgcuucgagaucuuccccaagaccagcuccuggcccaaccacgacagcaacaagggggucaccgccgccugcccgcacgccggcgcgaaguccuucuacaagaaccugaucuggcucgugaagaaggggaacagcuaccccaagcuguccaagagcuacaucaacgacaagggcaaggaggugcugguccucugggggauccaccaccccagcaccuccgccgaccagcagagccuguaccagaacgccgacgccuacguguucgugggcacgucccgguacagcaagaaguucaagcccgagaucgccauccgcccgaagguccgggagcaggagggccgcaugaacuacuacuggacccugguggagcccggggacaagaucaccuucgaggcgaccggcaaccucguggucccccgguacgccuucgccauggagcgcaacgccggguccggcaucaucaucagcgacacgcccgugcacgacugcaacacgaccugccagaccccgaagggcgccaucaacaccucccugcccuuccagaacauccacagcaucaccaucgggaagugccccaaguacgugaaguccaccaagcugcggcucgcgaccggccugcgcaacguccccagcauccagucccgggggcuguucggcgccaucgccggguucaucgagggcggcuggacggggaugguggacggcugguacggguaccaccaccagaacgagcagggcagcggguacgccgccgaccucaaguccacccagaacgcgaucgacgagaucaccaacaaggugaacagcgucaucgagaagaugaacacccaguucacggccgugggcaaggaguucaaccaccuggagaagcgcaucgagaaccugaacaagaaggucgacgacggcuuccucgacaucuggaccuacaacgccgagcugcuggugcuccuggagaacgagcggacccuggacuaccacgacuccaacgugaagaaccucuacgagaagguccgcagccagcugaagaacaacgccaaggagaucgggaacggcugcuucgaguucuaccacaagugcgacaacacgugcauggaguccgugaagaacgggaccuacgacuacccgaaguacagcgaggaggccaagcugaaccgggaggagaucgacggcgugaagcucgaguccacccgcaucuaccagauccuggcgaucuacagcaccgucgccagcucccuggugcucguggucagccugggggccaucuccuucuggaugugcagcaacggcucccugcagugccggaucugcaucuga

SEQ ID NO: 67141 - RNA, 1701 nt, Artificial Sequence
  derived and/or modified CDS sequence (opt1) from hemagglutinin__InfluenzaA__ACU13129
augaaggccauccuggugguccuccuguacaccuucgccaccgcgaacgccgacacgcugugcaucggcuaccacgccaacaacagcaccgacaccguggacaccgugcucgagaagaacgucacggugacccacuccgugaaccugcuggaggacaagcacaacgggaagcucugcaagcugcgcggcgucgcgccccugcaccucgggaagugcaacaucgccggcuggauccuggggaacccggagugcgagagccuguccaccgccagcuccuggagcuacaucguggagaccuccagcuccgacaacggcacgugcuaccccggcgacuucaucgacuacgaggagcuccgggagcagcugagcuccgugagcuccuucgagcgcuucgagaucuuccccaagaccagcuccuggcccaaccacgacagcaacaagggggucaccgccgccugcccgcacgccggcgcgaaguccuucuacaagaaccugaucuggcucgugaagaaggggaacagcuaccccaagcuguccaagagcuacaucaacgacaagggcaaggaggugcugguccucugggggauccaccaccccagcaccuccgccgaccagcagagccuguaccagaacgccgacgccuacguguucgugggcacgucccgguacagcaagaaguucaagcccgagaucgccauccgcccgaagguccgggagcaggagggccgcaugaacuacuacuggacccugguggagcccggggacaagaucaccuucgaggcgaccggcaaccucguggucccccgguacgccuucgccauggagcgcaacgccggguccggcaucaucaucagcgacacgcccgugcacgacugcaacacgaccugccagaccccgaagggcgccaucaacaccucccugcccuuccagaacauccaccccaucaccaucgggaagugccccaaguacgucaagagcaccaagcugcggcucgcgaccggccugcgcaacgugccguccauccagagccgggggcuguucggcgccaucgccggguucaucgagggcggcuggacggggaugguggacggcugguacggguaccaccaccagaacgagcagggcuccggguacgccgccgaccucaagagcacccagaacgcgaucgacgagaucaccaacaaggugaacuccgucaucgagaagaugaacacccaguucacggccgugggcgaggaguucaaccaccuggagaagcgcaucgagaaccugaacaagaaggucgacgacggcuuccucgacaucuggaccuacaacgccgagcugcuggugcuccuggagaacgagcggacccuggacuaccacgacagcaacgugaagaaccucuacgagaagguccgcucccagcugaagaacaacgccaaggagaucgggaacggcugcuucgaguucuaccacaagugcgacaacacgugcauggagagcgugaagaacgggaccuacgacuaccccaaguacuccgaggaggccaagcugaaccgggaggagaucgacggcgugaagcucgagagcacccgcaucuaccagauccuggcgaucuacuccaccgucgccagcagccuggugcucguggucucccugggggccaucagcuucuggaugugcuccaacggcagccugcagugccggaucugcaucuga

SEQ ID NO: 67142 - RNA, 1701 nt, Artificial Sequence; identical to SEQ ID NO: 66693
  derived and/or modified CDS sequence (opt1) from hemagglutinin__InfluenzaA__ACU16795

SEQ ID NO: 67143 - RNA, 1701 nt, Artificial Sequence; identical to SEQ ID NO: 66693
  derived and/or modified CDS sequence (opt1) from hemagglutinin__InfluenzaA__ACU16858

SEQ ID NO: 67144 - RNA, 1701 nt, Artificial Sequence; identical to SEQ ID NO: 66693
  derived and/or modified CDS sequence (opt1) from hemagglutinin__InfluenzaA__ACU16930

SEQ ID NO: 67145 - RNA, 1701 nt, Artificial Sequence; identical to SEQ ID NO: 66693
  derived and/or modified CDS sequence (opt1) from hemagglutinin__InfluenzaA__ACU16993

SEQ ID NO: 67146 - RNA, 1701 nt, Artificial Sequence; identical to SEQ ID NO: 66693
  derived and/or modified CDS sequence (opt1) from hemagglutinin__InfluenzaA__ACU17059

SEQ ID NO: 67147 - RNA, 1701 nt, Artificial Sequence; identical to SEQ ID NO: 66693
  derived and/or modified CDS sequence (opt1) from hemagglutinin__InfluenzaA__ACU17126

SEQ ID NO: 67148 - RNA, 1701 nt, Artificial Sequence; identical to SEQ ID NO: 66784
  derived and/or modified CDS sequence (opt1) from hemagglutinin__InfluenzaA__ACU17187

SEQ ID NO: 67149 - RNA, 1701 nt, Artificial Sequence; identical to SEQ ID NO: 66693
  derived and/or modified CDS sequence (opt1) from hemagglutinin__InfluenzaA__ACU17258

SEQ ID NO: 67150 - RNA, 1701 nt, Artificial Sequence
  derived and/or modified CDS sequence (opt1) from hemagglutinin__InfluenzaA__ACU17389
auggaggccauccuggugguccuccuguacaccuucgccaccgcgaacgccgacacgcugugcaucggcuaccacgccaacaacagcaccgacaccguggacaccgugcucgagaagaacgucacggugacccacuccgugaaccugcuggaggacaagcacaacgggaagcucugcaagcugcgcggcgucgcgccccugcaccucgggaagugcaacaucgccggcuggauccuggggaacccggagugcgagagccuguccaccgccagcuccuggagcuacaucguggagaccuccagcuccgacaacggcacgugcuaccccggcgacuucaucgacuacgaggagcuccgggagcagcugagcuccgugagcuccuucgagcgcuucgagaucuuccccaagaccagcuccuggcccaaccacgacagcaacaagggggucaccgccgccugcccgcacgccggcgcgaaguccuucuacaagaaccugaucuggcucgugaagaaggggaacagcuaccccaagcuguccaagagcuacaucaacgacaagggcaaggaggugcugguccucugggggauccaccaccccagcaccuccgccgaccagcagagccuguaccagaacgccgacgccuacguguucgugggcuccagccgguacuccaagaaguucaagcccgagaucgccauccgcccgaagguccgggaccaggagggccgcaugaacuacuacuggacgcugguggagcccggggacaagaucaccuucgaggcgaccggcaaccucguggucccccgguacgccuucgccauggagcgcaacgccgggagcggcaucaucaucuccgacacccccgugcacgacugcaacacggccugccagaccccgaagggcgcgaucaacaccagccugcccuuccacaacauccaccccaucaccaucgggaagugccccaaguacgugaaguccacgaagcugcggcucgccaccggccugcgcaacgucccgagcauccagucccgggggcuguucggcgccaucgccggguucaucgagggcggcuggaccgggaugguggacggcugguacggguaccaccaccagaacgagcagggcagcggguacgccgcggaccucaaguccacccagaacgccaucgacgagaucacgaacaaggugaacagcgucaucgagaagaugaacacccaguucaccgccgugggcaaggaguucaaccaccuggagaagcgcaucgagaaccugaacaagaaggucgacgacggcuuccucgacaucuggaccuacaacgccgagcugcuggugcuccuggagaacgagcggacgcuggacuaccacgacuccaacgugaagaaccucuacgagaagguccgcagccagcugaagaacaacgccaaggagaucgggaacggcugcuucgaguucuaccacaagugcgacaacacgugcauggaguccgugaagaacgggaccuacgacuaccccaaguacagcgaggaggcgaagcugaaccgggaggagaucgacggcgugaagcucgaguccacccgcaucuaccagauccuggccaucuacagcaccgucgccagcucccuggugcucguggucagccugggggccaucuccuucuggaugugcagcaacggcucccugcagugccggaucugcaucuga

SEQ ID NO: 67151 - RNA, 1701 nt, Artificial Sequence; identical to SEQ ID NO: 66693
  derived and/or modified CDS sequence (opt1) from hemagglutinin__InfluenzaA__ACU17450

SEQ ID NO: 67152 - RNA, 1701 nt, Artificial Sequence; identical to SEQ ID NO: 66693
  derived and/or modified CDS sequence (opt1) from hemagglutinin__InfluenzaA__ACU17521

SEQ ID NO: 67153 - RNA, 1701 nt, Artificial Sequence; identical to SEQ ID NO: 66680
  derived and/or modified CDS sequence (opt1) from hemagglutinin__InfluenzaA__ACU27041

SEQ ID NO: 67154 - RNA, 1698 nt, Artificial Sequence
  derived and/or modified CDS sequence (opt1) from hemagglutinin__InfluenzaA__ACU27406
augaaggugaagcugcucguccugcugugcaccuucaccgccacguacgccgacaccaucugcaucggcuaccacgcgaacaacagcaccgacaccguggacacggugcucgagaagaacgucaccgugacccacuccgugaaccugcuggagaacagccacaacgggaagcucugccugcugaagggcaucgcgccccuccagcuggggaacugcuccgucgccggcuggauccuggggaacccggagugcgagcuccugaucagcaaggaguccuggagcuacaucguggagaagcccaaccccgagaacgggaccugcuaccccggccacuucgccgacuacgaggagcugcgcgagcagcucuccagcguguccagcuucgagcgguucgagaucuucccgaaggaguccagcuggcccaaccacacggucaccgggguguccgccagcugcucccacaacggcgagagcuccuucuaccgcaaccugcuguggcucaccgggaagaacggccuguaccccaaccugagcaaguccuacgccaacaacaaggagaaggaggugcucguccuguggggcgugcaccacccgcccaacaucguggaccagaagacccuguaccggacggagaacgccuacgucagcguggugagcucccacuacagccgcaaguucacccccgagaucgccaagcggcccaagauccgcgaccaggagggccggaucaacuacuacuggacccuccuggagcccggcgacaccaucaucuucgaggccaacgggaaccugaucgcgccgcgcuacgccuucgcccucucccggggcuucgggagcggcaucaucaacuccaacgcccccauggacaagugcgacgccaagugccagacgccccagggcgcgaucaacagcucccugcccuuccagaacguccacccggugaccaucggggagugccccaaguacgugcgcagcgccaagcugcggauggucaccggccuccgcaacauccccuccauccagagccgggggcuguucggcgccaucgccggguucaucgagggcggcuggaccgggaugguggacggcugguacggguaccaccaccagaacgagcagggcuccggguacgccgcggaccagaaguccacgcagaacgccaucaacggcaucaccaacaaggugaacagcgucaucgagcgcaugaacacccaguucaccgccgugggcaaggaguucaacaagcuggagcggcgcauggagaaccucaacaagaaggucgacgacggguucaucgacaucuggacguacaacgccgagcugcuggugcuccuggagaacgagcggacccuggacuuccacgacagcaacgugaagaaccucuacgagaaggucaagucccagcugaagaacaacgccaaggagaucggcaacgggugcuucgaguucuaccacaagugcaacgacgagugcauggagagcgugaagaacggcaccuacgacuaccccaaguacuccgaggagagcaagcugaaccgcgagaagaucgacggggugaagcucgaguccaugggcgucuaccagauccuggcgaucuacagcaccguggccagcucccuggugcuccuggucagccugggcgccaucuccuucuggaugugcagcaacgggucccuccagugccggaucugcaucuga

SEQ ID NO: 67155 - RNA, 1698 nt, Artificial Sequence
  derived and/or modified CDS sequence (opt1) from hemagglutinin__InfluenzaA__ACU27407
augaaggugaagcugcucguccugcugugcaccuucaccgccacguacgccgacaccaucugcaucggcuaccacgcgaacaacagcaccgacaccguggacacggugcucgagaagaacgucaccgugacccacuccgugaaccugcuggagaacagccacaacgggaagcucugccugcugaagggcaucgcgccccuccagcuggggaacugcuccgucgccggcuggauccuggggaacccggagugcgagcuccugaucagcaaggaguccuggagcuacaucguggagaagcccaaccccgagaacgggaccugcuaccccggccacuucgccgacuacgaggagcugcgcgagcagcucuccagcguguccagcuucgagcgguucgagaucuucccgaaggaguccagcuggcccaaccacacggucaccgggguguccgccagcugcucccacaacggcgagagcuccuucuaccgcaaccugcuguggcucaccgggaagaacggccuguaccccaaccugagcaaguccuacgccaacaacaaggagaaggaggugcucguccuguggggcgugcaccacccgcccaacaucguggaccagaagacccuguaccggacggagaacgccuacgucagcguggugagcucccacuacagccgcaaguucacccccgagaucgccaagcggcccaagguccgcgaccaggagggccggaucaacuacuacuggacccuccuggagcccggcgacaccaucaucuucgaggccaacgggaaccugaucgcgccgcgcuacgccuucgcccucucccggggcuucgggagcggcaucaucaacuccaacgcccccauggacaagugcgacgccaagugccagacgccccagggcgcgaucaacagcucccugcccuuccagaacgugcacccggugaccaucggggagugccccaaguacguccgcagcgccaagcugcggauggugaccggccuccgcaacauccccuccauccagagccgggggcuguucggcgccaucgccggguucaucgagggcggcuggaccgggaugguggacggcugguacggguaccaccaccagaacgagcagggcuccggguacgccgcggaccagaaguccacgcagaacgccaucaacggcaucaccaacaaggucaacagcgugaucgagaagaugaacacccaguucaccgccgucggcaaggaguucaacaagcuggagcgccggauggagaaccucaacaagaagguggacgacggguucaucgacaucuggacguacaacgccgagcugcuggugcuccuggagaacgagcgcacccuggacuuccacgacagcaacgucaagaaccucuacgagaaggugaagucccagcugaagaacaacgccaaggagaucggcaacgggugcuucgaguucuaccacaagugcaacgacgagugcauggagagcgugaagaacggcaccuacgacuaccccaaguacuccgaggagagcaagcugaaccgggagaagaucgacggggucaagcucgaguccaugggcguguaccagauccuggcgaucuacagcaccguggccagcucccugguccuccuggugagccugggcgccaucuccuucuggaugugcagcaacgggucccuccagugccgcaucugcaucuga

SEQ ID NO: 67156 - RNA, 1701 nt, Artificial Sequence; identical to SEQ ID NO: 66680
  derived and/or modified CDS sequence (opt1) from hemagglutinin__InfluenzaA__ACU29949

SEQ ID NO: 67157 - RNA, 1701 nt, Artificial Sequence
  derived and/or modified CDS sequence (opt1) from hemagglutinin__InfluenzaA__ACU29979
augaaggccauccuggugguccuccuguacaccuucgccgcggccaacgccgacacccugugcaucggcuaccacgccaacaacagcacggacaccguggacaccgugcucgagaagaacgucaccgugacgcacuccgugaaccugcuggaggacaagcacaacgggaagcucugcaagcugcgcggcgucgcgccccugcaccucgggaagugcaacaucgccggcuggauccuggggaacccggagugcgagagccuguccaccgccagcuccuggagcuacaucguggagaccuccagcuccgacaacgggaccugcuaccccggcgacuucaucgacuacgaggagcuccgggagcagcugagcuccgugagcuccuucgagcgcuucgagaucuuccccaagacgagcuccuggcccaaccacgacagcaacaagggcgucaccgccgccugcccgcacgcgggcgccaaguccuucuacaagaaccugaucuggcucgugaagaaggggaacagcuaccccaagcuguccaagagcuacaucaacgacaagggcaaggaggugcugguccucugggggauccaccaccccagcaccuccgccgaccagcagagccuguaccagaacgccgacgccuacguguucgugggcaccucccgguacagcaagaaguucaagcccgagaucgcgauccgcccgaagguccgggaccaggagggccgcaugaacuacuacuggacgcugguggagcccggggacaagaucaccuucgaggccaccggcaaccucguggucccccgguacgccuucgccauggagcgcaacgccggguccggcaucaucaucagcgacacccccgugcacgacugcaacacgaccugccagaccccgaagggcgcgaucaacaccucccugcccuuccagaacauccaccccaucacgaucgggaagugccccaaguacgucaagagcaccaagcugcggcucgccaccggccugcgcaacgugccguccauccagagccgggggcuguucggcgccaucgccggguucaucgagggcggcuggaccgggaugguggacggcugguacggguaccaccaccagaacgagcagggcuccggguacgccgcggaccucaagagcacgcagaacgccaucgacgagaucaccaacaaggugaacuccgucaucgagaagaugaacacccaguucaccgccgugggcaaggaguucaaccaccuggagaagcgcaucgagaaccugaacaagaaggucgacgacggcuuccucgacaucuggacguacaacgccgagcugcuggugcuccuggagaacgagcggacccuggacuaccacgacagcaacgugaagaaccucuacgagaagguccgcucccagcugaagaacaacgccaaggagaucgggaacggcugcuucgaguucuaccacaagugcgacaacacgugcauggagagcgugaagaacgggaccuacgacuaccccaaguacuccgaggaggcgaagcugaaccgggaggagaucgacggcgugaagcucgagagcacccgcaucuaccagauccuggccaucuacuccaccgucgccagcagccuggugcucguggucucccugggggccaucagcuucuggaugugcuccaacggcagccugcagugccggaucugcaucuga

SEQ ID NO: 67158 - RNA, 1701 nt, Artificial Sequence; identical to SEQ ID NO: 66693
  derived and/or modified CDS sequence (opt1) from hemagglutinin__InfluenzaA__ACU29989

SEQ ID NO: 67159 - RNA, 1704 nt, Artificial Sequence
  derived and/or modified CDS sequence (opt1) from hemagglutinin__InfluenzaA__ACU29999
augaaggccauccuggugguccuccuguacaccuucgccaccgcgaacgccgacacgcugugcaucggcuaccacgccaacaacagcaccgacaccguggacaccgugcucgagaagaacgucacggugacccacuccgugaaccugcuggaggacaagcacaacgggaagcucugcaagcugcgcggcgucgcgccccugcaccucgggaagugcaacaucgccggcuggauccuggggaacccggagugcgagagccuguccaccgccagcuccuggagcuacaucguggagaccuccagcuccgacaacggcacgugcuaccccggcgacuucaucgacuacgaggagcuccgggagcagcugagcuccgugagcuccuucgagcgcuucgagaucuuccccaagaccagcuccuggcccaaccacgacagcaacaagggggucaccgccgccugcccgcacgccggcgcgaaguccuucuacaagaaccugaucuggcucgugaagaaggggaacagcuaccccaagcuguccaagagcuacaucaacgacaagggcaaggaggugcugguccucugggggauccaccaccccagcaccuccgccgaccagcagagccuguaccagaacgccgacgccuacguguucgugggcacgucccgguacagcaagaaguucaagcccgagaucgccauccgcccgaagguccgggaccaggagggccgcaugaacuacuacuggacccugguggagcccggggacaagaucaccuucgaggcgaccggcaaccucguggucccccgguacgccuucgccauggagcgcaacgccggguccggcaucaucaucagcgacacgcccgugcacgacugcaacacgaccugccagaccccgaagggcgccaucaacaccucccugcccuuccagaacauccaccccaucaccaucgggaagugccccaaguacgucaagagcaccaagcugcggcucgcgaccggccugcgcaacgugccguccauccagagccgggggcuguucggcgccaucgccggguucaucgagggcggcuggacggggaugguggacggcugguacggguaccaccaccagaacgagcagggcuccggguacgccgccgaccucaagagcacccagaacgcgaucgacgagaucaccaacaaggugaacuccgucaucgagaagaugaacacccaguucacggccgugggcaaggaguucaaccaccuggagaagcgcaucgagaaccugaacaagaaggucgacgacggcuuccucgacaucuggaccuacaacgccgagcugcuggugcuccuggagaacgagcggacccuggacuaccacgacagcaacgugaagaaccucuacgagaagguccgcucccagcugaagaacaacgccaaggagaucgggaacggcugcuucgaguucuaccacaagugcgacaacacgugcauggagagcgugaagaacgggaccuacgacuaccccaaguacuccgaggaggccaagcugaaccgggaggagaucgacggcgugaagcucgagagcacccgcaucuaccagauccuggcgaucuacuccaccgucgccagcagccuggugcucguggucucccugggggccaucagcuucuggaugugcuccaacggcagccugcuccagugccggaucugcaucuga

SEQ ID NO: 67160 - RNA, 1704 nt, Artificial Sequence
  derived and/or modified CDS sequence (opt1) from hemagglutinin__InfluenzaA__ACU30009
auggaggccauccuggugguccuccuguacaccuucgccaccgcgaacgccgacacgcugugcaucggcuaccacgccaacaacagcaccgacaccguggacaccgugcucgagaagaacgucacggugacccacuccgugaaccugcuggaggacaagcacaacgggaagcucugcaagcugcgcggcgucgcgccccugcaccucgggaagugcaacaucgccggcuggauccuggggaacccggagugcgagagccuguccaccgccagcuccuggagcuacaucguggagaccuccagcuccgacaacggcacgugcuaccccggcgacuucaucgacuacgaggagcuccgggagcagcugagcuccgugagcuccuucgagcgcuucgagaucuuccccaagaccagcuccuggcccaaccacgacagcaacaagggggucaccgccgccugcccgcacgccggcgcgaaguccuucuacaagaaccugaucuggcucgugaagaaggggaacagcuaccccaagcuguccaagagcuacaucaacgacaagggcaaggaggugcugguccucugggggauccaccaccccagcaccuccgccgaccagcagagccuguaccagaacgccgacgccuacguguucgugggcuccagccgguacuccaagaaguucaagcccgagaucgccauccgcccgaagguccgggaccaggagggccgcaugaacuacuacuggacgcugguggagcccggggacaagaucaccuucgaggcgaccggcaaccucguggucccccgguacgccuucgccauggagcgcaacgccgggagcggcaucaucaucuccgacacccccgugcacgacugcaacacgaccugccagaccccgaagggcgccaucaacaccagccugcccuuccacaacauccaccccaucacgaucgggaagugccccaaguacgugaaguccaccaagcugcggcucgcgaccggccugcgcaacgucccgagcauccagucccgggggcuguucggcgccaucgccggguucaucgagggcggcuggaccgggaugguggacggcugguacggguaccaccaccagaacgagcagggcagcggguacgccgccgaccucaaguccacgcagaacgcgaucgacgagaucaccaacaaggugaacagcgucaucgagaagaugaacacccaguucaccgccgugggcaaggaguucaaccaccuggagaagcgcaucgagaaccugaacaagaaggucgacgacggcuuccucgacaucuggacguacaacgccgagcugcuggugcuccuggagaacgagcggacccuggacuaccacgacuccaacgugaagaaccucuacgagaagguccgcagccagcugaagaacaacgccaaggagaucgggaacggcugcuucgaguucuaccacaagugcgacaacacgugcauggaguccgugaagaacgggaccuacgacuaccccaaguacagcgaggaggccaagcugaaccgggaggagaucgacggcgugaagcucgaguccacccgcaucuaccagauccuggcgaucuacagcaccgucgccagcucccuggugcucguggucagccugggggccaucuccuucuggaugugcagcggcuacggcucccugcagugccggaucugcaucuga

SEQ ID NO: 67161 - RNA, 1701 nt, Artificial Sequence; identical to SEQ ID NO: 67053
  derived and/or modified CDS sequence (opt1) from hemagglutinin__InfluenzaA__ACU30019

SEQ ID NO: 67162 - RNA, 1701 nt, Artificial Sequence; identical to SEQ ID NO: 66873
  derived and/or modified CDS sequence (opt1) from hemagglutinin__InfluenzaA__ACU30093

SEQ ID NO: 67163 - RNA, 1701 nt, Artificial Sequence
  derived and/or modified CDS sequence (opt1) from hemagglutinin__InfluenzaA__ACU30103
augaaggccauccuggugguccuccuguacaccuucgccaccgcgaacgccgacacgcugugcaucggcuaccacgccaacaacagcaccgacaccguggacaccgugcucgagaagaacgucacggugacccacuccgugaaccugcuggaggacaagcacaacgggaagcucugcaagcugcgcggcgucgcgccccugcaccucgggaagugcaacaucgccggcuggauccuggggaacccggagugcgagagccuguccaccgccagcuccuggagcuacaucguggagaccuccagcuccgacaacggcacgugcuaccccggcgacuucaucgacuacgaggagcuccgggagcagcugagcuccgugagcuccuucgagcgcuucgagaucuuccccaagaccagcuccuggcccaaccacgacagcaacaagggggucaccgccgccugcccgcacgccggcgcgaaguccuucuacaagaaccugaucuggcucgugaagaaggggaacagcuaccccaagcuguccaagagcuacaucaacgacaagggcaaggaggugcugguccucugggggauccaccaccccagcaccuccgccgaccagcagagccuguaccagaacgccgacgccuacguguucgugggcacgucccgguacagcaagaaguucaagcccgagaucgccauccgcccgaagguccgggaccaggagggccgcaugaacuaccacuggacccugguggagcccggggacaagaucaccuucgaggcgaccggcaaccucguggucccccgguacgccuucgccauggagcgcaacgccggguccggcaucaucaucagcgacacgcccgugcacgacugcaacacgaccugccagaccccgaagggcgccaucaacaccucccugcccuuccagaacauccaccccaucaccaucgggaagugccccaaguacgucaagagcaccaagcugcggcucgcgaccggccugcgcaacgugccguccauccagagccgggggcuguucggcgccaucgccggguucaucgagggcggcuggacggggaugguggacggcugguacggguaccaccaccagaacgagcagggcuccggguacgccgccgaccucaagagcacccagaacgcgaucgacgagaucaccaacaaggugaacuccgucaucgagaagaugaacacccaguucacggccgugggcaaggaguucaaccaccuggagaagcgcaucgagaaccugaacaagaaggucgacgacggcuuccucgacaucuggaccuacaacgccgagcugcuggugcuccuggagaacgagcggacccuggacuaccacgacagcaacgugaagaaccucuacgagaagguccgcucccagcugaagaacaacgccaaggagaucgggaacggcugcuucgaguucuaccacaagugcgacaacacgugcauggagagcgugaagaacgggaccuacgacuaccccaaguacuccgaggaggccaagcugaaccgggaggagaucgacggcgugaagcucgagagcacccgcaucuaccagauccuggcgaucuacuccaccgucgccagcagccuggugcucguggucucccugggggccaucagcuucuggaugugcuccaacggcagccugcagugccggaucugcaucuga

SEQ ID NO: 67164 - RNA, 1704 nt, Artificial Sequence
  derived and/or modified CDS sequence (opt1) from hemagglutinin__InfluenzaA__ACU30112
auggaggccauccuggugguccuccuguacaccuucgccaccgcgaacgccgacacgcugugcaucggcuaccacgccaacaacagcaccgacaccguggacaccgugcucgagaagaacgucacggugacccacuccgugaaccugcuggaggacaagcacaacgggaagcucugcaagcugcgcggcgucgcgccccugcaccucgggaagugcaacaucgccggcuggauccuggggaacccggagugcgagagccuguccaccgccagcuccuggagcuacaucguggagaccuccagcuccgacaacggcacgugcuaccccggcgacuucaucgacuacgaggagcuccgggagcagcugagcuccgugagcuccuucgagcgcuucgagaucuuccccaagaccagcuccuggcccaaccacgacagcaacaagggggucaccgccgccugcccgcacgccggcgcgaaguccuucuacaagaaccugaucuggcucgugaagaaggggaacagcuaccccaagcuguccaagagcuacaucaacgacaagggcaaggaggugcugguccucugggggauccaccaccccagcaccuccgccgaccagcagagccuguaccagaacgccgacgccuacguguucgugggcuccagccgguacuccaagaaguucaagcccgagaucgccauccgcccgaagguccgggaccaggagggccgcaugaacuacuacuggacgcugguggagcccggggacaagaucaccuucgaggcgaccggcaaccucguggucccccgguacgccuucgccauggagcgcaacgccgggagcggcaucaucaucuccgacacccccgugcacgacugcaacacgaccugccagaccccgaagggcgccaucaacaccagccugcccuuccacaacauccaccccaucacgaucgggaagugccccaaguacgugaaguccaccaagcugcggcucgcgaccggccugcgcaacgucccgagcauccagucccgggggcuguucggcgccaucgccggguucaucgagggcggcuggaccgggaugguggacggcugguacggguaccaccaccagaacgagcagggcagcggguacgccgccgaccucaaguccacgcagaacgcgaucgacgagaucaccaacaaggugaacagcgucaucgagaagaugaacacccaguucaccgccgugggcaaggaguucaaccaccuggagaagcgcaucgagaaccugaacaagaaggucgacgacggcuuccucgacaucuggacguacaacgccgagcugcuggugcuccuggagaacgagcggacccuggacuaccacgacuccaacgugaagaaccucuacgagaagguccgcagccagcugaagaacaacgccaaggagaucgggaacggcugcuucgaguucuaccacaagugcgacaacacgugcauggaguccgugaagaacgggaccuacgacuaccccaaguacagcgaggaggccaagcugaaccgggaggagaucgacggcgugaagcucgaguccacccgcaucuaccagauccuggcgaucuacagcaccgucgccagcucccuggugcucguggucagccugggggccaucuccuucuggaugugcagccacauggugcugcuccagugccggaucugcaucuga

SEQ ID NO: 67165 - RNA, 1701 nt, Artificial Sequence
  derived and/or modified CDS sequence (opt1) from hemagglutinin__InfluenzaA__ACU30121
auggaggccauccuggugguccuccuguacaccuucgccaccgcgaacgccgacacgcugugcaucggcuaccacgccaacaacagcaccgacaccguggacaccgugcucgagaagaacgucacggugacccacuccgugaaccugcuggaggacaagcacaacgggaagcucugcaagcugcgcggcgucgcgccccugcaccucgggaagugcaacaucgccggcuggauccuggggaacccggagugcgagagccuguccaccgccagcuccuggagcuacaucguggagaccuccagcuccgacaacggcacgugcuaccccggcgacuucaucgacuacgaggagcuccgggagcagcugagcuccgugagcuccuucgagcgcuucgagaucuuccccaagaccagcuccuggcccaaccacgacagcaacaagggggucaccgccgccugcccgcacgccggcgcgaaguccuucuacaagaaccugaucuggcucgugaagaaggggaacagcuaccccaagcuguccaagagcuacaucaacgacaagggcaaggaggugcugguccucugggggauccaccaccccagcaccuccgccgaccagcagagccuguaccagaacgccgacgccuacguguucgugggcuccagccgguacuccaagaaguucaagcccgagaucgccauccgcccgaagguccgggaccaggagggccgcaugaacuacuacuggacgcugguggagcccggggacaagaucaccuucgaggcgaccggcaaccucguggucccccgguacgccuucgccauggagcgcaacgccgggagcggcaucaucaucuccgacacccccgugcacgacugcaacacgaccugccagaccccgaagggcgccaucaacaccagccugcccuuccacaacauccaccccaucacgaucgggaagugccccaaguacgugaaguccaccaagcugcggcucgcgaccggccugcgcaacgucccgagcauccagucccgggggcuguucggcgccaucgccggguucaucgagggcggcuggaccgggaugguggacggcugguacggguaccaccaccagaacgagcagggcagcggguacgccgccgaccucaaguccacgcagaacgcgaucgacgagaucaccaacaaggugaacagcgucaucgagaagaugaacacccaguucaccgccgugggcaaggaguucaaccaccuggagaagcgcaucgagaaccugaacaagaaggucgacgacggcuuccucgacaucuggacguacaacgccgagcugcuggugcuccuggagaacgagcggacccuggacuaccacgacuccaacgugaagaaccucuacgagaagguccgcaaccagcugaagaacaacgccaaggagaucgggaacggcugcuucgaguucuaccacaagugcgacaacacgugcauggagagcgugaagaacgggaccuacgacuaccccaaguacuccgaggaggccaagcugaaccgggaggagaucgacggcgugaagcucgagagcacccgcaucuaccagauccuggcgaucuacuccaccgucgccagcagccuggugcucguggucucccugggggccaucagcuucuggaugugcuccaacggcagccugcagugccggaucugcaucuga

SEQ ID NO: 67166 - RNA, 1701 nt, Artificial Sequence; identical to SEQ ID NO: 66786
  derived and/or modified CDS sequence (opt1) from hemagglutinin__InfluenzaA__ACU31124

SEQ ID NO: 67167 - RNA, 1701 nt, Artificial Sequence; identical to SEQ ID NO: 66725
  derived and/or modified CDS sequence (opt1) from hemagglutinin__InfluenzaA__ACU31143

SEQ ID NO: 67168 - RNA, 1701 nt, Artificial Sequence; identical to SEQ ID NO: 66725
  derived and/or modified CDS sequence (opt1) from hemagglutinin__InfluenzaA__ACU31144

SEQ ID NO: 67169 - RNA, 1701 nt, Artificial Sequence; identical to SEQ ID NO: 66725
  derived and/or modified CDS sequence (opt1) from hemagglutinin__InfluenzaA__ACU31145

SEQ ID NO: 67170 - RNA, 1701 nt, Artificial Sequence; identical to SEQ ID NO: 66873
  derived and/or modified CDS sequence (opt1) from hemagglutinin__InfluenzaA__ACU31146

SEQ ID NO: 67171 - RNA, 1701 nt, Artificial Sequence; identical to SEQ ID NO: 66693
  derived and/or modified CDS sequence (opt1) from hemagglutinin__InfluenzaA__ACU31147

SEQ ID NO: 67172 - RNA, 1701 nt, Artificial Sequence
  derived and/or modified CDS sequence (opt1) from hemagglutinin__InfluenzaA__ACU31148
augaaggccauccuggugaucaugcucuacaccuucgccaccgcgaacgccgacacgcugugcaucggcuaccacgccaacaacagcaccgacaccgucgacaccgugcuggagaagaacgugacggucacccacuccgugaaccuccuggaggacaagcacaacgggaagcugugcaagcuccgcggcguggcgccccugcaccuggggaagugcaacaucgccggcuggauccucgggaacccggagugcgagagccuguccaccgccagcuccuggagcuacaucgucgagaccuccagcuccgacaacggcacgugcuaccccggcgacuucaucgacuacgaggagcugcgggagcagcucagcuccgugagcuccuucgagcgcuucgagaucuuccccaagaccagcuccuggcccaaccacgacagcaacaagggggugaccgccgccugcccgcacgccggcgcgaaguccuucuacaagaaccugaucuggcuggucaagaaggggaacagcuaccccaagcucuccaagagcuacaucaacgacaagggcaaggaggugcuggugcugugggggauccaccaccccagcaccuccgccgaccagcagagccucuaccagaacgccgacgccuacgucuucgugggcuccagccgguacuccaagaaguucaagcccgagaucgccauccgcccgaaggugcgggaccaggagggccgcaugaacuacuacuggacgcuggucgagcccggggacaagaucaccuucgaggcgaccggcaaccugguggugccccgguacgccuucgccauggagcgcaacgccgggagcggcaucaucaucuccgacacccccguccacgacugcaacacgaccugccagaccccgaagggcgccaucaacaccagccuccccuuccagaacauccaccccaucacgaucgggaagugccccaaguacgugaaguccaccaagcugcggcuggcgaccggccuccgcaacgugccgagcauccagucccgggggcuguucggcgccaucgccggguucaucgagggcggcuggaccgggauggucgacggcugguacggguaccaccaccagaacgagcagggcagcggguacgccgccgaccugaaguccacgcagaacgcgaucgacgagaucaccaacaaggugaacagcgugaucgagaagaugaacacccaguucaccgccgucggcaaggaguucaaccaccucgagaagcgcaucgagaaccugaacaagaagguggacgacggcuuccuggacaucuggacguacaacgccgagcuccugguccugcucgagaacgagcggacccuggacuaccacgacuccaacgugaagaaccuguacgagaaggugcgcagccagcucaagaacaacgccaaggagaucgggaacggcugcuucgaguucuaccacaagugcgacaacacgugcauggaguccgucaagaacgggaccuacgacuaccccaaguacagcgaggaggccaagcugaaccgggaggagaucgacggcgugaagcuggaguccacccgcaucuaccagauccucgcgaucuacagcaccguggccagcucccugguccugguggugagccucggggccaucuccuucuggaugugcagcaacggcucccugcagugccggaucugcaucuga

SEQ ID NO: 67173 - RNA, 1701 nt, Artificial Sequence; identical to SEQ ID NO: 66680
  derived and/or modified CDS sequence (opt1) from hemagglutinin__InfluenzaA__ACU31149

SEQ ID NO: 67174 - RNA, 1701 nt, Artificial Sequence; identical to SEQ ID NO: 66680
  derived and/or modified CDS sequence (opt1) from hemagglutinin__InfluenzaA__ACU31150

SEQ ID NO: 67175 - RNA, 1701 nt, Artificial Sequence; identical to SEQ ID NO: 66680
  derived and/or modified CDS sequence (opt1) from hemagglutinin__InfluenzaA__ACU31151

SEQ ID NO: 67176 - RNA, 1701 nt, Artificial Sequence; identical to SEQ ID NO: 66680
  derived and/or modified CDS sequence (opt1) from hemagglutinin__InfluenzaA__ACU31152

SEQ ID NO: 67177 - RNA, 1707 nt, Artificial Sequence
  derived and/or modified CDS sequence (opt1) from hemagglutinin__InfluenzaA__ACU46644
auggagaagaucgugcugcuguucgccaucgucagccuggugaaguccgaccagaucugcaucggcuaccacgccaacaacagcaccgagcaggucgacaccaucauggagaagaacgugacggugacccacgcgcaggacauccuggagaagacccacaacgggaagcucugcgaccuggacggcgggaagccccugauccuccgcgacugccggguggccggcuggcugcuggggaacccgaugugcgacgaguucaucaacguccccgagugguccuacaucguggagaaggccaaccccgugaacgaccucugcuaccccggcgacuucaacgacuacgaggagcugaagcaccuccucagccgcaucaaccacuucgagaagauccagaucaucccgaaguccagcugguccagccacgaggccucccugggcgucagcuccgccugccccuaccagggcaagagcuccuucuuccggaacgugguguggcugaucaagaagaacagcaccuaccccacgaucaagcgcuccuacaacaacaccaaccaggaggaccuccugguccugugguggauccaccaccccaacgacgcggccgagcagaccaagcucuaccagaacccgaccacguacaucagcguggggaccuccacccugaaccagcggcuggugccccgcaucgccacccggagcaaggucaacgggcaguccggccgcauggaguucuucuggacgauccucaagcccaacgacgccaucaacuucgagagcaacgggaacuucaucgcgcccgaguacgccuacaagaucgugaagaagggcgacagcaccaucaugaaguccgagcuggaguacggcaacugcaacaccaagugccagaccccgaugggggccaucaacagcuccaugcccuuccaccacauccacccccugacgaucggcgagugccccaaguacgucaagagcaaccggcucgugcuggccaccgggcugcgcaacuccccgcagcgggagcgccggcgcaagaagcggggccucuucggcgccaucgcgggguucaucgagggcggguggcagggcaugguggacgggugguacggcuaccaccacagcaacgagcagggcuccggguacgccgccgacaaggagagcacccagaaggccaucgacggcgugaccaacaaggucaacuccaucaucgacaagaugaacacgcaguucgaggccguggggcgcgaguucaaccaccuggagcggcgcaucgagaaccugaacaagaagauggaggacggcuuccucgacguguggaccuacaacgcggagcugcugguccucauggagaacgagcggacccuggacuuccacgacagcaacgugaagaaccuguacgacaagguccgccuccagcugcgggacaacgccaaggagcuggggaacggcugcuucgaguucuaccacaagugcgacgacgagugcauggaguccgugcgcaacggcaccuacgacuacccccaguacagcgaggaggcccgccucaagcgggaggagaucuccggggugaagcuggagagcaucggcaucuaccagauccuguccaucuacagcacggucgccuccagccucgcccuggcgaucaugguggccgggcugucccucuggaugugcagcaacggcagccugcagugccgcaucugcaucuga

SEQ ID NO: 67178 - RNA, 1701 nt, Artificial Sequence
  derived and/or modified CDS sequence (opt1) from hemagglutinin__InfluenzaA__ACU56924
augaaggccauccuggugguccuccuguacaccuucgccaccgcgaacgccgacacgcugugcaucggcuaccacgccaacaacagcaccgacaccguggacaccgugcucgagaagaacgucacggugacccacuccgugaaccugcuggaggacaagcacaacgggaagcucugcaagcugcgcggcgucgcgccccugcaccucgggaagugcaacaucgccggcuggauccuggggaacccggagugcgagagccuguccaccgccagcuccuggagcuacaucguggagaccuccagcuccgacaacggcacgugcuaccccggcgacuucaucgacuacgaggagcuccgggagcagcugagcuccgugagcuccuucgagcgcuucgagaucuuccccaagaccagcuccuggcccaaccacgacagcaacaagggggucaccgccgccugcccgcacgccggcgcgaaguccuucuacaagaaccugaucuggcucgugaagaaggggaacagcuaccccaagcuguccaagagcuacaucaacgacaagggcaaggaggugcugguccucugggggauccaccaccccagcaccuccgccgaccagcagagccuguaccagaacgccgacgccuacguguucgugggcacgucccgguacagcaagaaguucaagcccgagaucgccauccgcccgaagguccgggaccgcgagggccggaugaacuacuacuggacccugguggagcccggggacaagaucaccuucgaggcgaccggcaaccucguggucccccgcuacgccuucgccauggagcggaacgccggguccggcaucaucaucagcgacacgcccgugcacgacugcaacacgaccugccagaccccgaagggcgccaucaacaccucccugcccuuccagaacauccaccccaucaccaucgggaagugccccaaguacgucaagagcaccaagcugcgccucgcgaccggccugcggaacgugccguccauccagagccgcgggcuguucggcgccaucgccggguucaucgagggcggcuggacggggaugguggacggcugguacggguaccaccaccagaacgagcagggcuccggguacgccgccgaccucaagagcacccagaacgcgaucgacgagaucaccaacaaggugaacuccgucaucgagaagaugaacacccaguucacggccgugggcaaggaguucaaccaccuggagaagcggaucgagaaccugaacaagaaggucgacgacggcuuccucgacaucuggaccuacaacgccgagcugcuggugcuccuggagaacgagcgcacccuggacuaccacgacagcaacgugaagaaccucuacgagaagguccggucccagcugaagaacaacgccaaggagaucgggaacggcugcuucgaguucuaccacaagugcgacaacacgugcauggagagcgugaagaacgggaccuacgacuaccccaaguacuccgaggaggccaagcugaaccgcgaggagaucgacggcgugaagcucgagagcacccggaucuaccagauccuggcgaucuacuccaccgucgccagcagccuggugcucguggucucccugggggccaucagcuucuggaugugcuccaacggcagccugcagugccgcaucugcaucuga

SEQ ID NO: 67179 - RNA, 1701 nt, Artificial Sequence; identical to SEQ ID NO: 67046
  derived and/or modified CDS sequence (opt1) from hemagglutinin__InfluenzaA__ACU56931

SEQ ID NO: 67180 - RNA, 1701 nt, Artificial Sequence; identical to SEQ ID NO: 66693
  derived and/or modified CDS sequence (opt1) from hemagglutinin__InfluenzaA__ACU64792

SEQ ID NO: 67181 - RNA, 1701 nt, Artificial Sequence; identical to SEQ ID NO: 66873
  derived and/or modified CDS sequence (opt1) from hemagglutinin__InfluenzaA__ACU64801

SEQ ID NO: 67182 - RNA, 1701 nt, Artificial Sequence; identical to SEQ ID NO: 66873
  derived and/or modified CDS sequence (opt1) from hemagglutinin__InfluenzaA__ACU64812

SEQ ID NO: 67183 - RNA, 1701 nt, Artificial Sequence; identical to SEQ ID NO: 66342
  derived and/or modified CDS sequence (opt1) from hemagglutinin__InfluenzaA__ACU79871

SEQ ID NO: 67184 - RNA, 1701 nt, Artificial Sequence; identical to SEQ ID NO: 66340
  derived and/or modified CDS sequence (opt1) from hemagglutinin__InfluenzaA__ACU79882

SEQ ID NO: 67185 - RNA, 1701 nt, Artificial Sequence; identical to SEQ ID NO: 66353
  derived and/or modified CDS sequence (opt1) from hemagglutinin__InfluenzaA__ACU79893

SEQ ID NO: 67186 - RNA, 1701 nt, Artificial Sequence; identical to SEQ ID NO: 66353
  derived and/or modified CDS sequence (opt1) from hemagglutinin__InfluenzaA__ACU79904

SEQ ID NO: 67187 - RNA, 1698 nt, Artificial Sequence
  derived and/or modified CDS sequence (opt1) from hemagglutinin__InfluenzaA__ACU79937
augaaggccaagcugcucgugcugcugugcaccuucaccgccacguacgcggacaccaucugcaucggcuaccacgccaacaacagcaccgacaccgucgacacggugcucgagaagaacgugaccgucacccacuccgugaaccugcuggaggacagccacaacgggaagcucugccugcugaagggcaucgcgccccuccagcuggggaacugcuccguggccggcuggauccuggggaacccggagugcgagagccucaucuccaaggagagcugguccuacaucgucgagacccccaaccccgagaacggcacgugcuaccccggcuacuucgccgacuacgaggagcugcgcgagcagcugagcuccgugagcuccuucgagcgguucgagaucuucccgaaggagagcuccuggcccaaccacaccgugaccggggucaccgccagcugcucccacaacggcaagagcuccuucuaccgcaaccuccuguggcugacggagaagaacgggcucuaccccaaccugagcaacuccuacgugaacaacaaggagaaggaggugcugguccucuggggcgugcaccaccccagcaacaucggggugcagcgggccaucuaccacaccgagaacgccuacgucagcgugguguccagccacuacucccgccgguucaccccggagaucgccaagcgccccaagguccggggccaggagggccgcaucaacuacuacuggacccugcuggagcccggggacacgaucaucuucgaggcgaacggcaaccucaucgcccccugguacgccuucgcccugagccggggguucggcuccggcaucaucaccagcaacgccccgaugaacgagugcgacgcgaagugccagacgccccagggggccaucaacuccagccugcccuuccagaacgugcaccccgugaccaucggcgagugcccgaaguacguccgcuccaccaagcuccggauggugaccgggcugcgcaacauccccagcauccagucccggggccuguucggggccaucgccggcuucaucgagggcggguggaccggcaugauggacgggugguacggcuaccaccaccagaacgagcaggggagcggcuacgccgcggaccagaaguccacccagaacgccaucaacggcaucacgaacaaggugaacagcgucaucgagaagaugaacacccaguucaccgccguggggaaggaguucaacaagcucgagcgccggauggagaaccugaacaagaaggucgacgacggcuuccuggacaucuggaccuacaacgccgagcuccuggugcugcucgagaacgagcgcacgcuggacuuccacgacuccaacgugaagaaccuguacgagaaggucaagagccagcucaagaacaacgccaaggagaucgggaacggcugcuucgaguucuaccacaagugcaacaacgagugcauggaguccgugaagaacgggaccuacgacuaccccaaguacagcgaggaguccaagcugaaccgggagaagaucgacggcgugaagcuggagagcaugggcgucuaccagauccucgcgaucuacagcaccguggccuccagccuggugcugcucgucucccugggggccaucagcuucuggaugugcuccaacggcagccugcagugccgcaucugcaucuga

SEQ ID NO: 67188 - RNA, 1689 nt, Artificial Sequence
  derived and/or modified CDS sequence (opt1) from hemagglutinin__InfluenzaA__ACU79948
auggccaucaucuaccugauccuccuguucaccgccgugcgcggcgaccagaucugcaucggguaccacgcgaacaacagcaccgagaaggucgacacgauccuggagcggaacgugaccgugacccacgccaaggacauccucgagaagacccacaacggcaagcugugcaagcugaacgggaucccgccccucgagcugggcgacugcuccaucgccggguggcugcucggcaaccccgagugcgaccgccugcugagcguccccgagugguccuacaucauggagaaggagaacccccgggacggccucugcuacccggggagcuucaacgacuacgaggagcugaagcaccuccuguccagcgugaagcacuucgagaaggugaagauccugcccaaggaccgcuggacgcagcacaccaccaccggcgggucccgggccugcgccgucagcggcaaccccuccuucuuccgcaacaugguguggcugacgaagaaggggagcgacuaccccguggcgaagggcuccuacaacaacaccagcggcgagcagaugcucaucaucuggggcguccaccacccgaacgacgagaccgagcagcggacccuguaccagaacguggggacguacguguccgucgggaccagcacccugaacaagcgcuccacccccgagaucgccacgcggcccaaggugaacggccagggcgggcgcauggaguucagcuggacccuccuggacaugugggacaccaucaacuucgaguccaccggcaaccugaucgcccccgaguacggguucaagaucagcaagcggggcuccagcgggaucaugaagacggagggcacccucgagaacugcgagaccaagugccagaccccgcugggcgccaucaacacgacccugcccuuccacaacgugcacccccucaccaucggggagugccccaaguacgucaagagcgagaagcuggugcuggcgaccggccuccgcaacgugccgcagaucgagucccgggggcuguucggcgccaucgccggguucaucgagggcggcuggcaggggauggucgacggcugguacggguaccaccacagcaacgaccagggcuccggguacgccgccgacaaggagagcacgcagaaggcguucgacggcaucaccaacaacgugaacuccgugaucgagaagaugaacacccaguucgaggccgucggcaaggaguucagcaaccuggagcgccggcucgagaaccugaacaagaagauggaggacggguuccuggacguguggaccuacaacgccgagcuccuggugcugauggagaacgagcgcacgcucgacuuccacgacuccaacgucaagaaccuguacgacaaggugcggaugcagcugcgcgacaacgucaaggagcucggcaacgggugcuucgaguucuaccacaagugcgacgacgagugcaugaacagcgugaagaacggcaccuacgacuaccccaaguacgaggaggaguccaagcugaaccggaacgagaucaagggcgugaagcugagcuccaugggggucuaccagauccucgccaucuacgccaccguggcgggcagccugucccuggccaucaugauggccgggaucagcuucuggaugugcuccaacggcagccuccagugccgcaucugcaucuga

SEQ ID NO: 67189 - RNA, 1689 nt, Artificial Sequence
  derived and/or modified CDS sequence (opt1) from hemagglutinin__InfluenzaA__ACU79959
auggccaucaucuaccugauccuccuguucaccgccgugcgcggcgaccagaucugcaucggguaccacgcgaacaacagcaccgagaaggucgacacgauccuggagcggaacgugaccgugacccacgccaaggacauccucgagaagacccacaacggcaagcugugcaagcugaacgggaucccgccccucgagcugggcgacugcuccaucgccggguggcugcucggcaaccccgagugcgaccgccugcugagcguccccgagugguccuacaucauggagaaggagaacccccgggacggccucugcuacccggggagcuucaacgacuacgaggagcugaagcaccuccuguccagcgugaagcacuucgagaaggugaagauccugcccaaggaccgcuggacgcagcacaccaccaccggcgggucccgggccugcgccgucagcggcaaccccuccuucuuccgcaacaugguguggcugacgaagaaggggagcgacuaccccguggcgaagggcuccuacaacaacaccagcggcgagcagaugcucaucaucuggggcguccaccacccgaacgacgagaccgagcagcggacccuguaccagaacguggggacguacguguccgucgggaccagcacccugaacaagcgcuccacccccgagaucgccacgcggcccaaggugaacggccagggcgggcgcauggaguucagcuggacccuccuggacaugugggacaccaucaacuucgaguccaccggcaaccugaucgcccccgaguacggguucaagaucagcaagcggggcuccagcgggaucaugaagacggagggcacccucgagaacugcgagaccaagugccagaccccgcugggcgccaucaacacgacccugcccuuccacaacgugcacccccucaccaucggggagugccccaaguacgucaagagcgagaagcuggugcuggcgaccggccuccgcaacgugccgcagaucgagucccgggggcuguucggcgccaucgccggguucaucgagggcggcuggcaggggauggucgacggcugguacggguaccaccacagcaacgaccagggcuccggguacgccgccgacaaggagagcacgcagaaggcguucgacggcaucaccaacaaggugaacuccgugaucgagaagaugaacacccaguucgaggccgucggcaaggaguucagcaaccuggagcgccggcucgagaaccugaacaagaagauggaggacggguuccuggacguguggaccuacaacgccgagcuccuggugcugauggagaacgagcgcacgcucgacuuccacgacuccaacgucaagaaccuguacgacaaggugcggaugcagcugcgcgacaacgucaaggagcucggcaacgggugcuucgaguucuaccacaagugcgacgacgagugcaugaacagcgugaagaacggcaccuacgacuaccccaaguacgaggaggaguccaagcugaaccggaacgagaucaagggcgugaagcugagcuccaugggggucuaccagauccucgccaucuacgccaccguggcgggcagccugucccuggccaucaugauggccgggaucagcuucuggaugugcuccaacggcagccuccagugccgcaucugcaucuga

SEQ ID NO: 67190 - RNA, 1701 nt, Artificial Sequence
  derived and/or modified CDS sequence (opt1) from hemagglutinin__InfluenzaA__ACU79970
augaagaccaucaucgcccugagcuacauccagugccucguguucgcccagaaguuccccggcaacgacaacuccaccgcgacgcugugccuggggcaccacgccgucccgaacggcaccaucgugaagaccaucaccaacgaccagaucgaggugacgaacgccaccgagcucguccagagcuccagcaccggggagaucugcgacagcccccaccagauccuggacggcgagaacugcacccugaucgacgcccuccugggggacccccagugcgacggcuuccagaacaagaacugggaccuguucguggagcgcagcaaggccuacuccaacugcuaccccuacgacgugccggacuacgcgagccuccggucccuggucgccagcuccggcacgcuggaguucaacaacgagagcuucaacuggaccggggugacccagaacggcaccuccagcgccugcauccgccgguccaacaacagcuucuucuccaagcucaacuggcugacgcacagcaaguucaaguaccccgcccugaacgugaccaugcccaacaacgagaacuucgacaagcucuacaucuggggcguccaccaccccgggaccgacaacgaccagaucuuccuguacgcgcaggccuccgggcgcaucaccgugagcacgaagcggagccagcagaccgugaucccgaacaucggcucccgcccccggguccgcaacauccccagccggaucuccaucuacuggaccaucgugaagcccggcgacauccugcucaucaacagcaccgggaaccugaucgccccgcgcggcuacuucaagauccgguccgggaaguccuccaucaugcgcagcgacgcccccaucggcaagugcaacuccgagugcaucacgcccaacggcagcauccccaacgacaagccguuccagaacgugaaccggaucaccuacggggccugcccccgcuacgucaagcagaacacccugaagcucgcgaccggcaugcggaacgugcccgagaagcagacgcgcgggaucuucggcgccaucgccggguucaucgagaacggcugggagggcaugguggacgggugguacggcuuccggcaccagaacuccgaggggaucggccaggccgccgaccucaagagcacccaggcggccaucgaccagaucaacgggaagcugaaccgccugaucggcaagaccaacgagaaguuccaccagaucgagaaggaguucuccgaggucgagggccggauccaggaccuggagaaguacguggaggacaccaagaucgaccuguggagcuacaacgccgagcuccugguggcccuggagaaccagcacacgaucgaccucaccgacuccgagaugaacaagcuguucgagaagaccaagaagcagcugcgcgagaacgccgaggacauggggaacggcugcuucaagaucuaccacaagugcgacaacgcgugcaucgggagcauccggaacggcaccuacgaccacgacgucuaccgcgacgaggcccucaacaaccgcuuccagaucaaggggguggagcugaaguccggcuacaaggacuggauccuguggaucagcuucgccaucuccugcuuccuccugugcaucgcccugcucggcuucaucaugugggccugccagaaggggaacauccggugcaacaucugcaucuga

SEQ ID NO: 67191 - RNA, 1698 nt, Artificial Sequence
  derived and/or modified CDS sequence (opt1) from hemagglutinin__InfluenzaA__ACU79981
augaaggugaagcugcucguccugcugugcaccuucaccgccacguacgccgacaccaucugcaucggcuaccacgcgaacaacagcaccgacaccguggacacggugcucgagcgcaacgucaccgugacccacuccgugaaccugcuggagaacagccacaacgggaagcucugccugcugaagggcaucgcgccccuccagcuggggaacugcuccgucgccggcuggauccuggggaacccggagugcgagcuccugaucagcaaggaguccuggagcuacaucguggagaagcccaaccccgagaacgggaccugcuaccccggccacuucgccgacuacgaggagcugcgggagcagcucuccagcguguccagcuucgagcgcuucgagaucuucccgaaggaguccagcuggcccaaccacacggucaccgggguguccgccagcugcucccacaacggcgagagcuccuucuaccggaaccugcuguggcucaccgggaagaacggccuguaccccaaccugagcaaguccuacgccaacaacaaggagaaggaggugcucguccuguggggcgugcaccacccgcccaacaucggcgaccagaaggcccuguaccacaccgagaacgccuacgugagcgucgugagcucccacuacagccgcaaguucacgcccgagaucgccaagcggcccaaggugcgcgaccaggagggccggaucaacuacuacuggacccuccugaagcccggggacaccaucaucuucgaggcgaacggcaaccugaucgccccgcgcuacgccuucgcccucucccggggguucggcagcggcaucaucaacuccaacgcccccauggacaagugcgacgcgaagugccagacgccccagggggccaucaacagcucccugcccuuccagaacguccacccggugaccaucggcgagugccccaaguacgugcgcagcgccaagcugcggauggucaccgggcuccgcaacauccccuccauccagagccggggccuguucggggccaucgccggcuucaucgagggcggguggaccggcaugguggacgggugguacggcuaccaccaccagaacgagcagggguccggcuacgcggccgaccagaaguccacccagaacgccaucaacggcaucacgaacaaggugaacagcgucaucgagaagaugaacacccaguucaccgccguggggaaggaguucaacaagcuggagcgccggauggagaaccucaacaagaaggucgacgacggcuucaucgacaucuggaccuacaacgccgagcugcuggugcuccuggagaacgagcgcacgcuggacuuccacgacagcaacgugaagaaccucuacgagaaggucaagucccagcugaagaacaacgcgaaggagaucgggaacggcugcuucgaguucuaccacaagugcaacgacgagugcauggagagcgugaagaacgggaccuacgacuaccccaaguacuccgaggagagcaagcugaaccgggagaagaucgacggcgugaagcucgaguccaugggcgucuaccagauccuggccaucuacagcaccguggccagcucccuggugcuccuggucagccugggggccaucuccuucuggaugugcagcaacggcucccuccagugccgcaucugcaucuga

SEQ ID NO: 67192 - RNA, 1698 nt, Artificial Sequence
  derived and/or modified CDS sequence (opt1) from hemagglutinin__InfluenzaA__ACU79992
augaaggugaagcugcucguccugcugugcaccuucaccgccacguacgccgacaccaucugcaucggcuaccacgcgaacaacagcaccgacaccguggacacggugcucgagaagaacgucaccgugacccacuccgugaaccugcuggaggacaaccacaacgggaagcucugccugcugaagggcaaggcgccccuccagcuggggaacugcagcgucgccggcuggauccuggggaacccggagugcggccuccugaucuccaaggagagcugguccuacaucguggagcgccccaaccccgagaacgggaccugcuaccccgggcacuucgccgacuacgaggagcugcgggagcagcucagcuccgugagcuccuucgagcgcuucgagaucuucccgaaggagagcuccuggcccaaccacacggucaccggcgugagcgccuccugcagccacaacggggaguccagcuucuacaagaaccugcuguggcucaccggcaagaacgggcuguaccccaaccuguccaagagcuacgccaacaacaaggagaaggaggugcucguccuguggggcgugcaccacccgcccaacaucggcgaccagaugacccuguaccacaaggagaacgccuacguguccgucgugagcagccacuacucccggaaguucacgcccgagaucgccaagcgccccaaggugcgggaccaggaggggcgcaucaacuacuacuggacccuccuggagcccggcgacaccaucaucuucgaggccaacgggaaccugaucgcgccgcgguacgccuucgcccucagccgcggcuucggcuccgggaucaucaacagcaacgcccccauggacgagugcgacgccaagugccagacgccccagggcgcgaucaacuccagccugcccuuccagaacguccacccggugaccaucggggagugccccaaguacgugcgguccgccaagcugcgcauggucaccggccuccggaacauccccagcauccagucccgcgggcuguucggcgccaucgccggcuucaucgagggcggcuggaccgggaugguggacggcugguacggguaccaccaccagaacgagcagggcagcggcuacgccgcggaccagaaguccacccagaacgccaucaacgggaucacgaacaaggugaacagcgucaucgagaagaugaacacccaguucaccgccgugggcaaggaguucaacaagcuggagcggcgcauggagaaccucaacaagaaggucgacgacggguucaucgacguguggaccuacaacgccgagcugcuggugcuccuggagaacgagcggacgcuggacuuccacgacuccaacgucaagaaccucuacgagaaggugaagaaccagcugaagaacaacgccaaggagaucggcaacgggugcuucgaguucuaccacaagugcaacgacgagugcauggagagcgugaagaacggcaccuacgacuaccccaaguacuccgaggagagcaagcugucccgcgagaagaucgacggcgucaagcucgagagcauggggguguaccagauccuggcgaucuacuccaccguggccagcagccugguccuccuggugucccugggcgccaucagcuucuggaugugcuccaacgggagccuccagugccggaucugcaucuga

SEQ ID NO: 67193 - RNA, 1701 nt, Artificial Sequence; identical to SEQ ID NO: 66458
  derived and/or modified CDS sequence (opt1) from hemagglutinin__InfluenzaA__ACU80003

SEQ ID NO: 67194 - RNA, 1698 nt, Artificial Sequence
  derived and/or modified CDS sequence (opt1) from hemagglutinin__InfluenzaA__ACU80025
augaaggugaagcugcucguccugcugugcaccuucgccgccaccuacgcggacacgaucugcaucggcuaccacgccaacaacagcaccgacaccguggacaccgugcucgagaagaacgucacggugacccacuccgugaaccugcuggagaacagccacaacgggaagcucugccugcugaagggcaucgcgccccuccagcuggggaacugcuccgucgccggcuggauccuggggaacccggagugcgagcuccugaucagcaaggaguccuggagcuacaucguggagaagcccaaccccgagaacgggaccugcuaccccggccacuucgccgacuacgaggagcugcgcgagcagcucuccagcguguccagcuucgagcgguucgagaucuucccgaaggaguccagcuggcccaaccacaccgucacggggguguccgccagcugcucccacaacggcgagagcuccuucuaccgcaaccugcuguggcucaccgggaagaacggccuguaccccaaccugagcaaguccuacgccaacaacaaggagaaggaggugcucguccuguggggcgugcaccacccgcccaacaucggcgaccagaaggcccuguaccacaccgagaacgccuacgugagcgucgugagcucccacuacagccggaaguucacccccgagaucgcgaagcgccccaaggugcgggaccaggagggccgcaucaacuacuacuggacgcuccuggagcccggggacaccaucaucuucgaggccaacggcaaccugaucgccccgcgguacgccuucgcccucucccgcggguucggcagcggcaucaucaacuccaacgcgcccauggacaagugcgacgccaagugccagacgccccagggggccaucaacagcucccugcccuuccagaacguccacccggugaccaucggcgagugccccaaguacgugcggagcgccaagcugcgcauggucaccgggcuccggaacauccccuccauccagagccgcggccuguucggggccaucgcgggcuucaucgagggcggguggaccggcaugguggacgggugguacggcuaccaccaccagaacgagcagggguccggcuacgccgccgaccagaaguccacccagaacgccaucaacggcaucaccaacaaggugaacagcgucaucgagaagaugaacacgcaguucaccgccguggggaaggaguucaacaagcuggagcggcgcauggagaaccucaacaagaaggucgacgacggcuucaucgacaucuggaccuacaacgcggagcugcuggugcuccuggagaacgagcggacccuggacuuccacgacagcaacgugaagaaccucuacgagaaggucaagucccagcugaagaacaacgccaaggagaucgggaacggcugcuucgaguucuaccacaagugcaacgacgagugcauggagagcgugaagaacgggacguacgacuaccccaaguacuccgaggagagcaagcugaaccgcgagaagaucgacggcgugaagcucgaguccaugggcgucuaccagauccuggccaucuacagcaccguggccagcucccuggugcuccuggucagccugggggccaucuccuucuggaugugcagcaacggcucccuccagugccggaucugcaucuga

SEQ ID NO: 67195 - RNA, 1701 nt, Artificial Sequence
  derived and/or modified CDS sequence (opt1) from hemagglutinin__InfluenzaA__ACU80036
augaagaccaucaucgcccugagcuacauccucugccugguguucgcccagaagcugcccggcaacgacaacuccaccgcgacgcucugccuggggcaccacgccgucccgaacggcaccaucgugaagaccaucaccaacgaccagaucgaggugacgaacgccaccgagcugguccagagcuccagcaccggggagaucugcgacagcccccaccagauccucgacggcgagaacugcacccugaucgacgcccugcucggggacccccagugcgacggcuuccagaacaagaagugggaccuguucguggagcgcagcaaggccuacuccaacugcuaccccuacgacgugccggacuacgcgagccugcggucccucgucgccagcuccggcacgcuggaguucaacaacgagagcuucaacuggaccggggugacccagaacggcaccuccagcgccugcauccgccgguccaacaacagcuucuucucccgccugaacuggcucacgcaccugaaguucaaguaccccgcccugaacgugaccaugcccaacaacgagcaguucgacaagcucuacaucuggggcguccaccaccccgggaccgacaacgaccagaucuuccuguacgcgcaggccagcgggcggaucaccguguccacgaagcgcagccagcagaccgugaucccgaacaucggcagccggccccgcguccggaacauccccucccgcaucagcaucuacuggaccaucgugaagcccggcgacauccugcucaucaacuccaccgggaaccugaucgccccgcggggcuacuucaagauccgcagcgggaaguccagcaucaugcgguccgacgcccccaucggcaagugcagcuccgagugcaucacgcccaacggcagcauccccaacgacaagccguuccagaacgugaaccgcaucaccuacggggccugcccccgguacgucaagcagaacacccugaagcucgcgaccggcaugcgcaacgugcccgagaagcagacgcgggggaucuucggcgccaucgccggguucaucgagaacggcugggagggcaugguggacgggugguacggcuuccgccaccagaacuccgaggggcggggccaggccgccgaccugaaguccacccaggcggccaucgaccagaucaacgggaagcugaaccgccucaucggcaagaccaacgagaaguuccaccagaucgagaaggaguucuccgaggucgagggccggauccaggaccuggagaaguacguggaggacaccaagaucgaccuguggagcuacaacgccgagcuccugguggcccuggagaaccagcacacgaucgaccucaccgacuccgagaugaacaagcuguucgagaagaccaagaagcagcugcgcgagaacgccgaggacaucgggaacggcugcuucaagaucuaccacaagugcgacaacgcgugcaucgggagcauccgcaacggcaccuacgaccacgacgucuaccgggacgaggcccucaacaaccgcuuccagaucaaggggguggagcugaaguccggcuacaaggacuggauccuguggaucagcuucgccaucuccugcuuccuccugugcguggcccugcucggcuucaucaugugggccugccagaaggggaacauccggugcaacaucugcaucuga

SEQ ID NO: 67196 - RNA, 1698 nt, Artificial Sequence; identical to SEQ ID NO: 66667
  derived and/or modified CDS sequence (opt1) from hemagglutinin__InfluenzaA__ACU80047

SEQ ID NO: 67197 - RNA, 1701 nt, Artificial Sequence
  derived and/or modified CDS sequence (opt1) from hemagglutinin__InfluenzaA__ACU80058
augaagaccaucaucgcccugagcuacauccucugccugguguucgcccagaagcugcccggcaacgacaacuccaccgcgacgcucugccuggggcaccacgccgucccgaacggcaccaucgugaagaccaucaccaacgaccagaucgaggugacgaacgccaccgagcugguccagagcuccagcaccgggggcaucugcgacagcccccaccagauccucgacggggagaacugcacccugaucgacgcccugcucggcgacccccagugcgacggcuuccagaacaagaagugggaccuguucguggagcgcagcaaggccugcuccaacugcuaccccuacgacgugccggacuacgcgagccugcggucccucgucgccagcuccgggacgcuggaguucaacaacgagagcuucaacuggaccggcgugacccagaacgggaccuccagcgccugcaagcgccgguccaacaacagcuucuucucccgccugaacuggcucacgcaccugaaguucaaguaccccgcccugaacgugaccaugcccaacaacgagaaguucgacaagcucuacaucuggggcguccaccaccccgggaccgacaacgaccagaucuuccuguacgcgcaggccagcggccggaucaccguguccacgaagcgcagccagcagaccgugaucccgaacaucggcagccggccccgcguccggaacauccccucccgcaucagcaucuacuggaccaucgugaagcccggggacauccugcucaucaacuccaccggcaaccugaucgccccgcggggguacuucaagauccgcagcggcaaguccagcaucaugcgguccgacgcccccaucggcaagugcaacagcgagugcaucacgcccaacggguccauccccaacgacaagccguuccagaacgugaaccgcaucaccuacggcgccugcccccgguacgucaagcagaacacccugaagcucgcgaccgggaugcgcaacgugcccgagaagcagacgcggggcaucuucggggccaucgccggcuucaucgagaacggcugggaggggaugguggacggcugguacggguuccgccaccagaacagcgagggcaucgggcaggccgccgaccugaaguccacccaggcggccaucaaccagaucaacggcaagcugaaccggcucaucggcaagaccaacgagaaguuccaccagaucgagaaggaguucagcgaggucgaggggcgcauccaggaccuggagaaguacguggaggacaccaagaucgaccugugguccuacaacgccgagcuccugguggcccuggagaaccagcacacgaucgaccucaccgacagcgagaugaacaagcuguucgagcggaccaagaagcagcugcgcgagaacgccgaggacaugggcaacgggugcuucaagaucuaccacaagugcgacaacgcgugcaucggcuccauccgcaacgggaccuacgaccacgacgucuaccgggacgaggcccucaacaaccgcuuccagaucaagggcguggagcugaaguccggcuacaaggacuggauccuguggaucuccuucgccaucagcugcuuccuccugugcguggcccugcucggguucaucaugugggccugccagaagggcaacauccggugcaacaucugcaucuga

SEQ ID NO: 67198 - RNA, 1698 nt, Artificial Sequence; identical to SEQ ID NO: 66512
  derived and/or modified CDS sequence (opt1) from hemagglutinin__InfluenzaA__ACU80069

SEQ ID NO: 67199 - RNA, 1698 nt, Artificial Sequence
  derived and/or modified CDS sequence (opt1) from hemagglutinin__InfluenzaA__ACU80080
augaaggugaagcugcucguccugcugugcaccuucaccgccacguacgccgacaccaucugcaucggcuaccacgcgaacaacagcaccgacaccguggacacggugcucgagaagaacgucaccgugacccacuccgugaaccugcuggagaacagccacaacgggaagcucugccugcugaagggcaucgcgccccuccagcuggggaacugcuccgucgccggcuggauccuggggaacccggagugcgagcuccugaucagcaaggaguccuggagcuacaucguggagaagcccaaccccgagaacgggaccugcuaccccggccacuucgccgacuacgaggagcugcgcgagcagcucuccagcguguccagcuucgagcgguucgagaucuucccgaaggaguccagcuggcccaaccacacggucaccgggguguccgccagcugcucccacaacggcgagagcuccuucuaccgcaaccugcuguggcucaccgggaagaacggccuguaccccaaccugagcaaguccuacgccaacaacaaggagaaggaggugcucguccuguggggcgugcaccacccgcccaacaucguggaccagaagacccuguaccggacggagaacgccuacgucagcguggugagcucccacuacagccgcaaguucacccccgagaucgccaagcggcccaagguccgcgaccaggagggccggaucaacuacuacuggacccuccuggagcccggcgacaccaucaucuucgaggccaacgggaaccugaucgcgccgcgcuacgccuucgcccucucccggggcuucgggagcggcaucaucaacuccaacgcccccauggacaagugcgacgccaagugccagacgccccagggcgcgaucaacagcucccugcccuuccagaacgugcacccggugaccaucggggagugccccaaguacguccgcagcgccaagcugcggauggugaccggccuccgcaacauccccuccauccagagccgggggcuguucggcgccaucgccggguucaucgagggcggcuggaccgggaugguggacggcugguacggguaccaccaccagaacgagcagggcuccggguacgccgcggaccagaaguccacgcagaacgccaucaacggcaucaccaacaaggucaacagcgugaucgagaagaugaacacccaguucaccgccgucggcaaggaguucaacaagcuggagcgccggauggagaaccucaacaagaagguggacgacggguucaucgacaucuggacguacaacgccgagcugcuggugcuccuggagaacgagcgcacccuggacuuccacgacagcaacgucaagaaccucuacgagaaggugaagucccagcugaagaacaacgccaaggagaucggcaacgggugcuucgaguucuaccacaagugcaacgacgagugcauggagagcgugaagaacggcaccuacgacuaccccaaguacuccgaggagagcaagcugaaccgggagaagaucgacgggaucaagcucgaguccaugggcgucuaccagauccuggcgaucuacagcaccguggccagcucccuggugcuccuggucagccugggcgccaucuccuucuggaugugcagcaacgggucccuccagugccgcaucugcaucuga

SEQ ID NO: 67200 - RNA, 1698 nt, Artificial Sequence; identical to SEQ ID NO: 66798
  derived and/or modified CDS sequence (opt1) from hemagglutinin__InfluenzaA__ACU80091

SEQ ID NO: 67201 - RNA, 1701 nt, Artificial Sequence; identical to SEQ ID NO: 66561
  derived and/or modified CDS sequence (opt1) from hemagglutinin__InfluenzaA__ACU80102

SEQ ID NO: 67202 - RNA, 1701 nt, Artificial Sequence
  derived and/or modified CDS sequence (opt1) from hemagglutinin__InfluenzaA__ACU80113
augaagaccaucaucgcccugagcuacauccucugccugguguucgcccagaaguuccccggcaacgacaacuccaccgcgacgcugugccucgggcaccacgccgucccgaacggcaccaucgugaagaccaucaccaacgaccagaucgaggugacgaacgccaccgagcugguccagagcuccagcaccggggagaucugcgacagcccccaccagauccuggacggcgagaacugcacccucaucgacgcccugcugggggacccccagugcgacggcuuccagaacaagaacugggaccucuucguggagcgcagcaaggccuacuccaacugcuaccccuacgacgugccggacuacgcgagccugcggucccuggucgccagcuccggcacgcucgaguucaacaacgagagcuucaacuggaccggggugacccagaacggcaccuccagcgccugcauccgccgguccaacaacagcuucuucucccgccugaacuggcugacgcacagcaaguucaaguaccccgcccucaacgugaccaugcccaacaacgagaacuucgacaagcuguacaucuggggcguccaccaccccgggaccgacaacgaccagaucuuccuguacgcgcaggccuccgggcggaucaccgugagcacgaagcgcagccagcagaccgugaucccgaacaucggcucccggccccgcguccggaacauccccagccgcaucuccaucuacuggaccaucgugaagcccggcgacauccuccugaucaacagcaccgggaaccugaucgccccgcggggcuacuucaagauccgcuccgggaaguccuccaucaugcggagcgacgcccccaucggcaagugcaacuccgagugcaucacgcccaacggcagcauccccaacgacaagccguuccagaacgugaaccgcaucaccuacggggccugcccccgguacgucaagcagaacacccucaagcuggcgaccggcaugcgcaacgugcccgagaagcagacgcgggggaucuucggcgccaucgccggguucaucgagaacggcugggagggcaugguggacgggugguacggcuuccgccaccagaacuccgaggggaucggccaggccgccgaccucaagagcacccaggcggccaucgaccagaucaacgggaagcugaaccggcugaucggcaagaccaacgagaaguuccaccagaucgagaaggaguucuccgagaucgagggccgcauccaggaccuggagaaguacgucgaggacaccaagaucgaccucuggagcuacaacgccgagcugcugguggcccucgagaaccagcacacgaucgaccugaccgacuccgagaugaacaagcuguucgagaagaccaagaagcagcuccgggagaacgccgaggacauggggaacggcugcuucaagaucuaccacaagugcgacaacgcgugcaucgggagcauccgcaacggcaccuacgaccacgacguguaccgcgacgaggcccugaacaaccgguuccagaucaagggggucgagcugaaguccggcuacaagaacuggauccucuggaucagcuucgccaucuccugcuuccugcugugcaucgcccuccugggcuucaucaugugggccugccagaaggggaacauccgcugcaacaucugcaucuga

SEQ ID NO: 67203 - RNA, 1701 nt, Artificial Sequence
  derived and/or modified CDS sequence (opt1) from hemagglutinin__InfluenzaA__ACU80135
augaagaccaucaucgcccugagcuacauccucugccugguguucgcccagaaguuccccggcaacgacaacuccaccgcgacgcugugccucgggcaccacgccgucccgaacggcaccauggugaagaccaucaccaacgaccagaucgaggugacgaacgccaccgagcugguccagagcuccagcaccggggagaucugcgacagcccccaccagauccuggacggcgagaacugcacccucaucgacgcccugcugggggacccccagugcgacggcuuccagaacaagaacugggaccucuucguggagcgcagcaaggccuacuccaacugcuaccccuacgacgugccggacuacgcgagccugcggucccuggucgccagcuccggcacgcucgaguucaacaacgagagcuucaacuggaccggggugacccagaacggcaccuccagcgccugcauccgccgguccaacaacagcuucuucucccgccugaacuggcugacgcacagcaaguucaaguaccccgcccucaacgugaccaugcccaacaacgagaacuucgacaagcuguacaucuggggcguccaccaccccgggaccgacaacgaccagaucuuccuguacgcgcaggccuccgggcggaucaccgugagcacgaagcgcagccagcagaccgugaucccgaacaucggcucccggccccgcguccggaacauccccagccgcaucuccaucuacuggaccaucgugaagcccggcgacauccuccugaucaacagcaccgggaaccugaucgccccgcggggcuacuucaagauccgcuccgggaaguccuccaucaugcggagcgacgcccccaucggcaagugcaacuccgagugcaucacgcccaacggcagcauccccaacgacaagccguuccagaacgugaaccgcaucaccuacggggccugcccccgguacgucaagcagaacacccucaagcuggcgaccggcaugcgcaacgugcccgagaagcagacgcgggggaucuucggcgccaucgccggguucaucgagaacggcugggagggcaugguggacgggugguacggcuuccgccaccagaacuccgaggggaucggccaggccgccgaccucaagagcacccaggcggccaucgaccagaucaacgggaagcugaaccggcugaucggcaagaccaacgagaaguuccaccagaucgagaaggaguucuccgaggucgagggccgcauccaggaccuggagaaguacguggaggacaccaagaucgaccucuggagcuacaacgccgagcugcugguggcccucgagaaccagcacacgaucgaccugaccgacuccgagaugaacaagcuguucgagaagaccaagaagcagcuccgggagaacgccgaggacauggggaacggcugcuucaagaucuaccacaagugcgacaacgcgugcaucgggagcauccgcaacggcaccuacgaccacgacgucuaccgcgacgaggcccugaacaaccgguuccagaucaaggggguggagcugaaguccggcuacaaggacuggauccucuggaucagcuucgccaucuccugcuuccugcugugcaucgcccuccugggcuucaucaugugggccugccagaaggggaacauccgcugcaacaucugcaucuga

SEQ ID NO: 67204 - RNA, 1701 nt, Artificial Sequence
  derived and/or modified CDS sequence (opt1) from hemagglutinin__InfluenzaA__ACU80146
augaagaccaucaucgcccugagcuacauccucugccugguguucgcccagaagcugcccggcaacgacaacuccaccgcgacgcucugccuggggcaccacgccgucccgaacggcaccaucgugaagaccaucaccaacgaccagaucgaggugacgaacgccaccgagcugguccagagcuccagcaccggggagaucugcgacagcccccaccagauccucgacggcgagaacugcacccugaucgacgcccugcucggggacccccagugcgacggcuuccagaacaagaagugggaccuguucguggagcgcagcaaggccuacuccaacugcuaccccuacgacgugccggacuacgcgagccugcggucccucgucgccagcuccggcacgcuggaguucaacaacgagagcuucaacuggaccggggugacccagaacggcaccuccagcgccugcauccgccgguccaacaacagcuucuucucccgccugaacuggcucacgcacagcaaguucaaguaccccgcccugaacgugaccaugcccaacaacgaggaguucgacaagcuguacaucuggggcguccaccaccccgggaccgacaacgaccagaucuuccucuacgcgcaggccuccgggcggaucaccgugagcacgaagcgcagccagcagaccgugaucccgaacaucggcucccggccccgcguccggaacauccccagccgcaucuccaucuacuggaccaucgugaagcccggcgacauccugcugaucaacagcaccgggaaccucaucgccccgcggggcuacuucaagauccgcuccgggaaguccuccaucaugcggagcgacgcccccaucggcaagugcaacuccgagugcaucacgcccaacggcagcauccccaacgacaagccguuccagaacgugaaccgcaucaccuacggggccugcccccgguacgucaagcagaacacccugaagcuggcgaccggcaugcgcaacgugcccgagaagcagacgcgggggaucuucggcgccaucgccggguucaucgagaacggcugggagggcaugguggacgggugguacggcuuccgccaccagaacuccgaggggaucggccaggccgccgaccucaagagcacccaggcggccaucgaccagaucaacgggaagcugaaccggcugaucggcaagaccaacgagaaguuccaccagaucgagaaggaguucuccgaggucgagggccgcauccaggaccucgagaaguacguggaggacaccaagaucgaccuguggagcuacaacgccgagcugcucguggcccuggagaaccagcacacgaucgaccugaccgacuccgagaugaacaagcuguucgagaagaccaagaagcagcuccgggagaacgccgaggacauggggaacggcugcuucaagaucuaccacaagugcgacaacgcgugcaucgggagcauccgcaacggcaccuacgaccacgacgucuaccgcgacgaggcccugaacaaccgguuccagaucaaggggguggagcucaaguccggcuacaaggacuggauccuguggaucagcuucgccaucuccugcuuccugcucugcguggcccugcugggccucaucaugugggccugccagaaggggaacauccgcugcaacaucugcaucuga

SEQ ID NO: 67205 - RNA, 1701 nt, Artificial Sequence; identical to SEQ ID NO: 66458
  derived and/or modified CDS sequence (opt1) from hemagglutinin__InfluenzaA__ACU80157

SEQ ID NO: 67206 - RNA, 1698 nt, Artificial Sequence; identical to SEQ ID NO: 67194
  derived and/or modified CDS sequence (opt1) from hemagglutinin__InfluenzaA__ACU80168

SEQ ID NO: 67207 - RNA, 1701 nt, Artificial Sequence; identical to SEQ ID NO: 66458
  derived and/or modified CDS sequence (opt1) from hemagglutinin__InfluenzaA__ACU80179

SEQ ID NO: 67208 - RNA, 1701 nt, Artificial Sequence
  derived and/or modified CDS sequence (opt1) from hemagglutinin__InfluenzaA__ACU80190
augaagaccaucaucgcccugagcuacauccucugccugguguucgcccagaagcugcccggcaacgacaacuccaccgcgacgcucugccuggggcaccacgccgucccgaacggcaccaucgugaagaccaucaccaacgaccagaucgaggugacgaacgccaccgagcugguccagagcuccagcaccggggagaucugcgacagcccccaccagauccucgacggcgagaacugcacccugaucgacgcccugcucggggacccccagugcgacggcuuccagaacaagaagugggaccuguucguggagcgcagcaaggccuacuccaacugcuaccccuacgacgugccggacuacgcgagccugcggucccucgucgccagcuccggcacgcuggaguucaacaacgagagcuucaacuggaccggggugacccagaacggcaccuccagcgccugcauccgccgguccaacaacagcuucuucucccgccugaacuggcucacgcacagcaaguucaaguaccccgcccugaacgugaccaugcccaacaacgaggaguucgacaagcuguacaucuggggcguccaccaccccgggaccgacaacgaccagaucuuccucuacgcgcaggccuccgggcggaucaccgugagcacgaagcgcagccagcagaccgugaucccgaacaucggcucccggccccgcguccggaacauccccagccgcaucuccaucuacuggaccaucgugaagcccggcgacauccugcugaucaacagcaccgggaaccucaucgccccgcggggcuacuucaagauccgcuccgggaaguccuccaucaugcggagcgacgcccccaucggcaagugcaacuccgagugcaucacgcccaacggcagcauccccaacgacaagccguuccagaacgugaaccgcaucaccuacggggccugcccccgguacgucaagcagaacacccugaagcuggcgaccggcaugcgcaacgugcccgagaagcagacgcgggggaucuucggcgccaucgccggguucaucgagaacggcugggagggcaugguggacgggugguacggcuuccgccaccagaacuccgaggggaucggccaggccgccgaccucaagagcacccaggcggccaucgaccagaucaacgggaagcugaaccggcugaucggcaagaccaacgagaaguuccaccagaucgagaaggaguucuccgaggucgagggccgcauccaggaccucgagaaguacguggaggacaccaagaucgaccuguggagcuacaacgccgagcugcucguggcccuggagaaccagcacacgaucgaccugaccgacuccgagaugaacaagcuguucgagaagaccaagaagcagcuccgggagaacgccgaggacauggggaacggcugcuucaagaucuaccacaagugcgacaacgcgugcaucgggagcauccgcaacggcaccuacgaccacgacgucuaccgcgacgaggcccugaacaaccgguuccagaucaaggggaucgagcucaaguccggcuacaaggacuggauccuguggaucagcuucgccaucuccugcuuccugcucugcguggcccugcugggcuucaucaugugggccugccagaaggggaacauccgcugcaacaucugcaucuga

SEQ ID NO: 67209 - RNA, 1701 nt, Artificial Sequence
  derived and/or modified CDS sequence (opt1) from hemagglutinin__InfluenzaA__ACU80201
augaagaccaucaucgcccugagcuacauccucugccugguguucgcccagaagcugcccggcaacgacaacuccaccgcgacgcucugccuggggcaccacgccgucccgaacggcaccaucgugaagaccaucaccaacgaccagaucgaggugacgaacgccaccgagcugguccagagcuccagcaccggggagaucugcgacagcccccaccagauccucgacggcgagaacugcacccugaucgacgcccugcucggggacccccagugcgacggcuuccagaacaagaagugggaccuguucguggagcgcagcaaggccuacuccaacugcuaccccuacgacgugccggacuacgcgagccugcggucccucgucgccagcuccggcacgcuggaguucaacaacgagagcuucaacuggaccggggugacccagaacggcaccuccagcgccugcauccgccgguccaacaacagcuucuucucccgccugaacuggcucacgcaccugaaguucaaguaccccgcccugaacgugaccaugcccaacaacgagcaguucgacaagcucuacaucuggggcguccaccaccccgggaccgacaacgaccagaucuuccuguacgcgcaggccagcgggcggaucaccguguccacgaagcgcagccagcagaccgugaucccgaacaucggcagccggccccgcguccggaacauccccucccgcaucagcaucuacuggaccaucgugaagcccggcgacauccugcucaucaacuccaccgggaaccugaucgccccgcggggcuacuucaagauccgcagcgggaaguccagcaucaugcgguccgacgcccccaucggcaagugcaacagcgagugcaucacgcccaacggcuccauccccaacgacaagccguuccagaacgugaaccgcaucaccuacggggccugcccccgguacgucaagcagaacacccugaagcucgcgaccggcaugcgcaacgugcccgagaagcagacgcgggggaucuucggcgccaucgccggguucaucgagaacggcugggagggcaugguggacgggugguacggcuuccgccaccagaacagcgaggggcggggccaggccgccgaccugaaguccacccaggcggccaucgaccagaucaacgggaagcugaaccgccucaucggcaagaccaacgagaaguuccaccagaucgagaaggaguucagcgaggucgagggccggauccaggaccuggagaaguacguggaggacaccaagaucgaccugugguccuacaacgccgagcuccugguggcccuggagaaccagcacacgaucgaccucaccgacagcgagaugaacaagcuguucgagaagaccaagaagcagcugcgcgagaacgccgaggacauggggaacggcugcuucaagaucuaccacaagugcgacaacgcgugcaucggguccauccgcaacggcaccuacgaccacgacgucuaccgggacgaggcccucaacaaccgcuuccagaucaaggggguggagcugaaguccggcuacaaggacuggauccuguggaucuccuucgccaucagcugcuuccuccugugcguggcccugcucggcuucaucaugugggccugccagaaggggaacaucaagugcaacaucugcaucuga

SEQ ID NO: 67210 - RNA, 1701 nt, Artificial Sequence; identical to SEQ ID NO: 66458
  derived and/or modified CDS sequence (opt1) from hemagglutinin__InfluenzaA__ACU80212

SEQ ID NO: 67211 - RNA, 1698 nt, Artificial Sequence
  derived and/or modified CDS sequence (opt1) from hemagglutinin__InfluenzaA__ACU80234
augaaggugaagcugcucguccugcugugcaccuucgccgccaccuacgcggacacgaucugcaucggcuaccacgccaacaacagcaccgacaccguggacaccgugcucgagaagaacgucacggugacccacuccgugaaccugcuggagaacagccacaacgggaagcucugccugcugaagggcaucgcgccccuccagcuggggaacugcuccgucgccggcuggauccuggggaacccggagugcgagcuccugaucagcaaggaguccuggagcuacaucguggagaagcccaaccccgagaacgggaccugcuaccccggccacuucgccgacuacgaggagcugcgcgagcagcucuccagcguguccagcuucgagcgguucgagaucuucccgaaggaguccagcuggcccaaccacaccgucacggggguguccgccagcugcucccacaacggcgagagcuccuucuacaagaaccugcuguggcucaccgggaagaacggccuguaccccaaccugagcaaguccuacgccaacaacaaggagaaggaggugcucguccuguggggcgugcaccacccgcccaacaucggcgaccagaaggcccuguaccacaccgagaacgccuacgugagcgucgugagcucccacuacagccgcaaguucacccccgagaucgcgaagcggcccaaggugcgcgaccaggagggccggaucaacuacuacuggacgcuccuggagcccggggacaccaucaucuucgaggccaacggcaaccugaucgccccgcgcuacgccuucgcccucucccggggguucggcagcggcaucaucaacuccaacgcgcccauggacaagugcgacgccaagugccagacgccccagggggccaucaacagcucccugcccuuccagaacguccacccggugaccaucggcgagugccccaaguacgugcgcagcgccaagcugcggauggucaccgggcuccgcaacauccccuccauccagagccggggccuguucggggccaucgcgggcuucaucgagggcggguggaccggcaugguggacgggugguacggcuaccaccaccagaacgagcagggguccggcuacgccgccgaccagaaguccacccagaacgccaucaacggcaucaccaacaaggugaacagcgucaucgagaagaugaacacgcaguucaccgccguggggaaggaguucaacaagcuggagcgccggauggagaaccucaacaagaaggucgacgacggcuucaucgacaucuggaccuacaacgcggagcugcuggugcuccuggagaacgagcgcacccuggacuuccacgacagcaacgugaagaaccucuacgagaaggucaagucccagcugaagaacaacgccaaggagaucgggaacggcugcuucgaguucuaccacaagugcaacgacgagugcauggagagcgugaagaacgggacguacgacuaccccaaguacuccgaggagagcaagcugaaccgggagaagaucgacggcgugaagcucgaguccaugggcgucuaccagauccuggccaucuacagcaccguggccagcucccuggugcuccuggucagccugggggccaucuccuucuggaugugcagcaacggcucccuccagugccgcaucugcaucuga

SEQ ID NO: 67212 - RNA, 1701 nt, Artificial Sequence
  derived and/or modified CDS sequence (opt1) from hemagglutinin__InfluenzaA__ACU80245
augaagaccaucaucgcccugagcuacauccucugccugguguucgcccagaaguuccccggcaacgacaacuccaccgcgacgcugugccucgggcaccacgccgucccgaacggcaccaucgugaagaccaucaccaacgaccagaucgaggugacgaacgccaccgagcugguccagagcuccagcaccggggagaucugcgacagcccccaccagauccuggacggcgagaacugcacccucaucgacgcccugcugggggacccccagugcgacggcuuccagaacaagaacugggaccucuucguggagcgcagcaaggccuacuccaacugcuaccccuacgacgugccggacuacgcgagccugcggucccuggucgccagcuccggcacgcucgaguucaacaacgagagcuucaacuggaccggggugacccagaacggcaccuccagcgccugcauccgccgguccaacaacagcuucuucucccgccugaacuggcugacgcacagcaaguucaaguaccccgcccucaacgugaccaugcccaacaacgagaacuucgacaagcuguacaucuggggcguccaccaccccgggaccgacaacgaccagaucuuccuguacgcgcaggccuccgggcggaucaccgugagcacgaagcgcagccagcagaccgugaucccgaacaucggcucccggccccgcguccggaacauccccagccgcaucuccaucuacuggaccaucgugaagcccggcgacauccuccugaucaacagcaccgggaaccugaucgccccgcggggcuacuucaagauccgcuccgggaaguccuccaucaugcggagcgacgcccccaucggccgcugcaacuccgagugcaucacgcccaacggcagcauccccaacgacaagccguuccagaacgugaaccggaucaccuacggggccugcccccgcuacgucaagcagaacacccucaagcuggcgaccggcaugcggaacgugcccgagaagcagacgcgcgggaucuucggcgccaucgccggguucaucgagaacggcugggagggcaugguggacgggugguacggcuuccggcaccagaacuccgaggggaucggccaggccgccgaccucaagagcacccaggcggccaucgaccagaucaacgggaagcugaaccgccugaucggcaagaccaacgagaaguuccaccagaucgagaaggaguucuccgaggucgagggccggauccaggaccuggagaaguacguggaggacaccaagaucgaccucuggagcuacaacgccgagcugcugguggcccucgagaaccagcacacgaucgaccugaccgacuccgagaugaacaagcuguucgagaagaccaagaagcagcuccgcgagaacgccgaggacauggggaacggcugcuucaagaucuaccacaagugcgacaacgcgugcaucgggagcauccgcaacggcaccuacgaccacgacgucuaccgggacgaggcccugaacaaccgcuuccagaucaaggggguggagcugaaguccggcuacaaggacuggauccucuggaucagcuucgccaucuccugcuuccugcugugcaucgcccuccugggcuucaucaugugggccugccagaaggggaacauccggugcaacaucugcaucuga

SEQ ID NO: 67213 - RNA, 1701 nt, Artificial Sequence; identical to SEQ ID NO: 66561
  derived and/or modified CDS sequence (opt1) from hemagglutinin__InfluenzaA__ACU80256

SEQ ID NO: 67214 - RNA, 1698 nt, Artificial Sequence; identical to SEQ ID NO: 66512
  derived and/or modified CDS sequence (opt1) from hemagglutinin__InfluenzaA__ACU80267

SEQ ID NO: 67215 - RNA, 1698 nt, Artificial Sequence; identical to SEQ ID NO: 67194
  derived and/or modified CDS sequence (opt1) from hemagglutinin__InfluenzaA__ACU80278

SEQ ID NO: 67216 - RNA, 1701 nt, Artificial Sequence; identical to SEQ ID NO: 66458
  derived and/or modified CDS sequence (opt1) from hemagglutinin__InfluenzaA__ACU80289

SEQ ID NO: 67217 - RNA, 1701 nt, Artificial Sequence; identical to SEQ ID NO: 66561
  derived and/or modified CDS sequence (opt1) from hemagglutinin__InfluenzaA__ACU80300

SEQ ID NO: 67218 - RNA, 1701 nt, Artificial Sequence
  derived and/or modified CDS sequence (opt1) from hemagglutinin__InfluenzaA__ACU80311
augcgcaccaucaucgcccugagcuacauccucugccugguguucgcccagaaguuccccggcaacgacaacuccaccgcgacgcugugccucgggcaccacgccgucccgaacggcaccaucgugaagaccaucaccaacgaccagaucgaggugacgaacgccaccgagcugguccagagcuccagcaccggggagaucugcgacagcccccaccagauccuggacggcgagaacugcacccucaucgacgcccugcugggggacccccagugcgacggcuuccagaacaagaacugggaccucuucguggagcggagcaaggccuacuccaacugcuaccccuacgacgugccggacuacgcgagccugcgcucccuggucgccagcuccggcacgcucgaguucaacaacgagagcuucaacuggaccggggugacccagaacggcaccuccagcgccugcauccggcgcuccaacaacagcuucuucucccggcugaacuggcugacgcacagcaaguucaaguaccccgcccucaacgugaccaugcccaacaacgagaacuucgacaagcuguacaucuggggcguccaccaccccgggaccgacaacgaccagaucuuccuguacgcgcaggccuccgggcgcaucaccgugagcacgaagcggagccagcagaccgugaucccgaacaucggcucccgcccccggguccgcaacauccccagccggaucuccaucuacuggaccaucgugaagcccggcgacauccuccugaucaacagcaccgggaaccugaucgccccgcgcggcuacuucaagauccgguccgggaaguccuccaucaugcgcagcgacgcccccaucggcaagugcaacuccgagugcaucacgcccaacggcagcauccccaacgacaagccguuccagaacgugaaccggaucaccuacggggccugcccccgcuacgucaagcagaacacccucaagcuggcgaccggcaugcggaacgugcccgagaagcagacgcgcgggaucuucggcgccaucgccggguucaucgagaacggcugggagggcaugguggacgggugguacggcuuccggcaccagaacuccgaggggaucggccaggccgccgaccucaagagcacccaggcggccaucgaccagaucaacgggaagcugaaccgccugaucggcaagaccaacgagaaguuccaccagaucgagaaggaguucuccgaggucgagggccggauccaggaccuggagaaguacguggaggacaccaagaucgaccucuggagcuacaacgccgagcugcugguggcccucgagaaccagcacacgaucgaccugaccgacuccgagaugaacaagcuguucgagaagaccaagaagcagcuccgcgagaacgccgaggacauggggaacggcugcuucaagaucuaccacaagugcgacaacgcgugcaucgggagcauccgcaacggcaccuacgaccacgacgucuaccgggacgaggcccugaacaaccgcuuccagaucaaggggguggagcugaaguccggcuacaaggacuggauccucuggaucagcuucgccaucuccugcuuccugcugugcaucgcccuccugggcuucaucaugugggccugccagaaggggaacauccggugcaacaucugcaucuga

SEQ ID NO: 67219 - RNA, 1701 nt, Artificial Sequence; identical to SEQ ID NO: 66561
  derived and/or modified CDS sequence (opt1) from hemagglutinin__InfluenzaA__ACU80322

SEQ ID NO: 67220 - RNA, 1701 nt, Artificial Sequence; identical to SEQ ID NO: 66458
  derived and/or modified CDS sequence (opt1) from hemagglutinin__InfluenzaA__ACU80333

SEQ ID NO: 67221 - RNA, 1701 nt, Artificial Sequence; identical to SEQ ID NO: 66561
  derived and/or modified CDS sequence (opt1) from hemagglutinin__InfluenzaA__ACU80344

SEQ ID NO: 67222 - RNA, 1701 nt, Artificial Sequence; identical to SEQ ID NO: 66561
  derived and/or modified CDS sequence (opt1) from hemagglutinin__InfluenzaA__ACU80355

SEQ ID NO: 67223 - RNA, 1701 nt, Artificial Sequence; identical to SEQ ID NO: 66561
  derived and/or modified CDS sequence (opt1) from hemagglutinin__InfluenzaA__ACU80366

SEQ ID NO: 67224 - RNA, 1701 nt, Artificial Sequence
  derived and/or modified CDS sequence (opt1) from hemagglutinin__InfluenzaA__ACU80377
augaagaccaucaucgcccugagcuacauccucugccugguguucgcccagaaguuccccggcaacgacaacuccaccgcgacgcugugccucgggcaccacgccgucccgaacggcaccaucgugaagaccaucaccaacgaccagaucgaggugacgaacgccaccgagcugguccagagcuccagcaccggggagaucugcgacagcccccaccagauccuggacggcgagaacugcacccucaucgacgcccugcugggggacccccagugcgacggcuuccagaacaagaacugggaccucuucguggagcgcagcaaggccuacuccaacugcuaccccuacgacgugccggacuacgcgagccugcggucccuggucgccagcuccggcacgcucgaguucaacaacgagagcuucaacuggaccggggugacccagaacggcaccuccagcgccugcauccgccgguccaacaacagcuucuucucccgccugaacuggcugacgcacagcaaguucaaguaccccgcccucaacgugaccaugcccaacaacgagaacuucgacaagcuguacaucuggggcguccaccaccccgggaccgacaacgaccagaucuuccuguacgcgcaggccuccgggcggaucaccgugagcacgaagcgcagccagcagaccgugaucccgaacaucggcucccggccccgcguccggaacauccccagccgcaucuccaucuacuggaccaucgugaagcccggcgacauccuccugaucaacagcaccgggaaccugaucgccccgcggggcuacuucaagauccgcuccgggaaguccuccaucaugcggagcgacgcccccaucggcaagugcaacuucgagugcaucacgcccaacggcuccauccccaacgacaagccguuccagaacgugaaccgcaucaccuacggggccugcccccgguacgucaagcagaacacccucaagcuggcgaccggcaugcgcaacgugcccgagaagcagacgcgggggaucuucggcgccaucgccggguucaucgagaacggcugggagggcaugguggacgggugguacggcuuccgccaccagaacagcgaggggaucggccaggccgccgaccugaaguccacccaggcggccaucgaccagaucaacgggaagcucaaccggcugaucggcaagaccaacgagaaguuccaccagaucgagaaggaguucagcgaggucgagggccgcauccaggaccuggagaaguacguggaggacaccaagaucgaccucugguccuacaacgccgagcugcugguggcccucgagaaccagcacacgaucgaccugaccgacagcgagaugaacaagcuguucgagaagacccggaagcagcuccgcgagaacgccgaggacauggggaacggcugcuucaagaucuaccacaagugcgacaacgcgugcaucggguccauccgcaacggcaccuacgaccacgacgucuaccgggacgaggcccugaacaaccgcuuccagaucaaggggguggagcucaagagcggcuacaaggacuggauccuguggaucuccuucgccaugagcugcuuccugcugugcaucgcccuccugggcuucaucaugugggccugccagaaggggaacauccggugcaacaucugcaucuga

SEQ ID NO: 67225 - RNA, 1701 nt, Artificial Sequence; identical to SEQ ID NO: 66561
  derived and/or modified CDS sequence (opt1) from hemagglutinin__InfluenzaA__ACU80388

SEQ ID NO: 67226 - RNA, 1701 nt, Artificial Sequence; identical to SEQ ID NO: 66458
  derived and/or modified CDS sequence (opt1) from hemagglutinin__InfluenzaA__ACU80399

SEQ ID NO: 67227 - RNA, 1698 nt, Artificial Sequence
  derived and/or modified CDS sequence (opt1) from hemagglutinin__InfluenzaA__ACU80410
augaaggugaagcugcucguccugcugugcaccuucaccgccacguacgccgacaccaucugcaucggcuaccacgcgaacaacagcaccgacaccguggacacggugcucgagaagaacgucaccgugacccacuccgugaaccugcuggagaacagccacaacgggaagcucugccugcugaagggcaucgcgccccuccagcuggggaacugcuccgucgccggcuggauccuggggaacccggagugcgagcuccugaucagcaaggaguccuggagcuacaucguggagaagcccaaccccgagaacgggaccugcuaccccggccacuucgccgacuacgaggagcugcgcgagcagcucuccagcguguccagcuucgagcgguucgagaucuucccgaaggaguccagcuggcccaaccacacggucaccgggguguccgccagcugcucccacaacggcgagagcuccuucuaccgcaaccugcuguggcucaccgggaagaacggccuguaccccaaccugagcaaguccuacgccaacaacaaggagaaggaggugcucguccuguggggcgugcaccacccgcccaacaucggcgaccagaaggcccuguaccacaccgagaacgccuacgugagcgucgugagcucccacuacagccggaaguucacgcccgagaucgccaagcgccccaaggugcgggaccaggagggccgcaucaacuacuacuggacccuccuggagcccggggacaccaucaucuucgaggcgaacggcaaccugaucgccccgcgguacgccuucgcccucucccgcggguucggcagcggcaucaucaacuccaacgcccccauggacaagugcgacgcgaagugccagacgccccagggggccaucaacagcucccugcccuuccagaacguccacccggugaccaucggcgagugccccaaguacgugcggagcgccaagcugcgcauggucaccgggcuccggaacauccccuccauccagagccgcggccuguucggggccaucgccggcuucaucgagggcggguggaccggcaugguggacgggugguacggcuaccaccaccagaacgagcagggguccggcuacgcggccgaccagaaguccacccagaacgccaucaacggcaucacgaacaaggugaacagcgucaucgagaagaugaacacccaguucaccgccguggggaaggaguucaacaagcuggagcggcgcauggagaaccucaacaagaaggucgacgacggcuucaucgacaucuggaccuacaacgccgagcugcuggugcuccuggagaacgagcggacgcuggacuuccacgacagcaacgugaagaaccucuacgagaaggucaagaaccagcugaagaacaacgcgaaggagaucgggaacggcugcuucgaguucuaccacaagugcaacgacgagugcauggaguccgugaagaacgggaccuacgacuaccccaaguacagcgaggaguccaagcugaaccgcgagaagaucgacggcgugaagcucgagagcaugggcgucuaccagauccuggccaucuacuccaccguggccagcagccuggugcuccuggucucccugggggccaucagcuucuggaugugcuccaacggcagccuccagugccggaucugcaucuga

SEQ ID NO: 67228 - RNA, 1701 nt, Artificial Sequence
  derived and/or modified CDS sequence (opt1) from hemagglutinin__InfluenzaA__ACU80424
augaagaccaucaucgcccugagcuacauccucugccugguguucgcccagaaguuccccggcaacgacaacuccaccgcgacgcugugccucgggcaccacgccgucccgaacggcaccaucgugaagaccaucaccaacgaccagaucgaggugacgaacgccaccgagcugguccagagcuccagcaccggggagaucugcgacagcccccaccagauccuggacggcgagaacugcacccucaucgacgcccugcugggggacccccagugcgacggcuuccagaacaagaacugggaccucuucguggagcgcagcaaggccuacuccaacugcuaccccuacgacgugccggacuacgcgagccugcggucccuggucgccagcuccggcacgcucgaguucaacaacgagagcuucaacuggaccggggugacccagaacggcaccuccagcgccugcauccgccgguccaacaacagcuucuucucccgccugaacuggcugacgcacagcaaguucaaguaccccgcccucaacgugaccaugcccaacaacgagaacuucgacaagcuguacaucuggggcguccaccaccccgggaccgacaacgaccagaucuuccuguacgcgcaggccuccgggcggaucaccgugagcacgaagcgcagccagcagaccgugaucccgaacaucggcucccggccccgcguccggaacauccccagccgcaucuccaucuacuggaccaucgugaagcccggcgacauccuccugaucaacagcaccgggaaccugaucgccccgcggggcuacuucaagauccgcuccgggaaguccuccaucaugcggagcgacgcccccaucggcaagugcaacuucgagugcaucacgcccaacggcuccauccccaacgacaagccguuccagaacgugaaccgcaucaccuacggggccugcccccgguacgucaagcagaacacccucaagcuggcgaccggcaugcgcaacgugcccgagaagcagacgcgggggaucuucggcgccaucgccggguucaucgagaacggcugggagggcaugguggacgggugguacggcuuccgccaccagaacagcgaggggaucggccaggccgccgaccugaaguccacccaggcggccaucgaccagaucaacgggaagcucaaccggcugaucggcaagaccaacgagaaguuccaccagaucgagaaggaguucagcgaggucgagggccgcauccaggaccuggagaaguacguggaggacaccaagaucgaccucugguccuacaacgccgagcugcugguggcccucgagaaccagcacacgaucgaccugaccgacagcgagaugaacaagcuguucgagaagacccggaagcagcuccgcgagaacgccgaggacauggggaacggcugcuucaagaucuaccacaagugcgacaacgcgugcaucggguccauccgcaacggcaccuacgaccacgacgucuaccgggacgaggcccugaacaaccgcuuccagaucaaggggguggagcucaagagcggcuacaaggacuggauccuguggaucuccuucgccaucagcugcuuccugcugugcaucgcccuccugggcuucaucaugugggccugccagaaggggaacauccggugcaacaucugcaucuga

SEQ ID NO: 67229 - RNA, 1701 nt, Artificial Sequence; identical to SEQ ID NO: 67228
  derived and/or modified CDS sequence (opt1) from hemagglutinin__InfluenzaA__ACU80435

SEQ ID NO: 67230 - RNA, 1698 nt, Artificial Sequence
  derived and/or modified CDS sequence (opt1) from hemagglutinin__InfluenzaA__ACU80446
augaaggugaagcugcucguccugcugugcaccuucaccgccacguacgccgacaccaucugcaucggcuaccacgcgaacaacagcaccgacaccguggacacggugcucgagaagaacgucaccgugacccacuccgugaaccugcuggagaacagccacaacgggaagcucugccugcugaagggcaucgcgccccuccagcuggggaacugcuccgucgccggcuggauccuggggaacccggagugcgagcuccugaucagcaaggaguccuggagcuacaucguggagaagcccaaccccgagaacgggaccugcuaccccggccacuucgccgacuacgaggagcugcgcgagcagcucuccagcguguccagcuucgagcgguucgagaucuucccgaaggaguccagcuggcccaaccacacggucaccgggguguccgccagcugcucccacaacggcgagagcuccuucuaccgcaaccugcuguggcucaccgggaagaacggccuguaccccaaccugagcaaguccuacgccaacaacaaggagaaggaggugcucguccuguggggcgugcaccacccgcccaacaucggcgaccagaagacccuguaccacacggagaacgccuacgugagcgucgugagcucccacuacagccggaaguucacccccgagaucgccaagcgccccaaggugcgggaccaggagggccgcaucaacuacuacuggacccuccuggagcccggggacaccaucaucuucgaggccaacggcaaccugaucgcgccgcgguacgccuucgcccucucccgcggguucggcagcggcaucaucaacuccaacgcccccauggacaagugcgacgccaagugccagacgccccagggggcgaucaacagcucccugcccuuccagaacguccacccggugaccaucggcgagugccccaaguacgugcggagcgccaagcugcgcauggucaccgggcuccggaacauccccuccauccagagccgcggccuguucggggccaucgccggcuucaucgagggcggguggaccggcaugguggacgggugguacggcuaccaccaccagaacgagcagggguccggcuacgccgcggaccagaaguccacgcagaacgccaucaacggcaucaccaacaaggugaacagcgucaucgagaagaugaacacccaguucaccgccguggggaaggaguucaacaagcuggagcggcgcauggagaaccucaacaagaaggucgacgacggcuucaucgacaucuggacguacaacgccgagcugcuggugcuccuggagaacgagcggacccuggacuuccacgacagcaacgugaagaaccucuacgagaaggucaagucccagcugaagaacaacgccaaggagaucgggaacggcugcuucgaguucuaccacaagugcaacgacgagugcauggagagcgugaagaacgggaccuacgacuaccccaaguacuccgaggagagcaagcugaaccgcgagaagaucgacggcgugaagcucgaguccauggaggucuaccagauccuggcgaucuacagcaccguggccagcucccuggugcuccuggucagccugggcgccaucuccuucuggaugugcagcaacgggucccuccagugccggaucugcaucuga

SEQ ID NO: 67231 - RNA, 1701 nt, Artificial Sequence; identical to SEQ ID NO: 66458
  derived and/or modified CDS sequence (opt1) from hemagglutinin__InfluenzaA__ACU80458

SEQ ID NO: 67232 - RNA, 1701 nt, Artificial Sequence; identical to SEQ ID NO: 66458
  derived and/or modified CDS sequence (opt1) from hemagglutinin__InfluenzaA__ACU80470

SEQ ID NO: 67233 - RNA, 1701 nt, Artificial Sequence; identical to SEQ ID NO: 66561
  derived and/or modified CDS sequence (opt1) from hemagglutinin__InfluenzaA__ACU80600

SEQ ID NO: 67234 - RNA, 1701 nt, Artificial Sequence; identical to SEQ ID NO: 67228
  derived and/or modified CDS sequence (opt1) from hemagglutinin__InfluenzaA__ACU80611

SEQ ID NO: 67235 - RNA, 1701 nt, Artificial Sequence; identical to SEQ ID NO: 66561
  derived and/or modified CDS sequence (opt1) from hemagglutinin__InfluenzaA__ACU80622

SEQ ID NO: 67236 - RNA, 1701 nt, Artificial Sequence; identical to SEQ ID NO: 66458
  derived and/or modified CDS sequence (opt1) from hemagglutinin__InfluenzaA__ACU80633

SEQ ID NO: 67237 - RNA, 1701 nt, Artificial Sequence
  derived and/or modified CDS sequence (opt1) from hemagglutinin__InfluenzaA__ACU80644
augaagaccaucaucgcccugagcuacauccucugccugguguucgcccagaagcugcccggcaacgacaacuccaccgcgacgcucugccuggggcaccacgccgucccgaacggcaccaucgugaagaccaucaccaacgaccagaucgaggugacgaacgccaccgagcugguccagagcuccagcaccggggagaucugcgacagcccccaccagauccucgacggcgagaacugcacccugaucgacgcccugcucggggacccccagugcgacggcuuccagaacaagaagugggaccuguucguggagcgcagcaaggccuacuccaacugcuaccccuacgacgugccggacuacgcgagccugcggucccucgucgccagcuccggcacgcuggaguucaacaacgagagcuucaacuggaccggggugacccagaacggcaccuccagcgccugcauccgccgguccaacaacagcuucuucucccgccugaacuggcucacgcacagcaaguucaaguaccccgcccugaacgugaccaugcccaacaacgaggaguucgacaagcuguacaucuggggcguccaccaccccgggaccgacaacgaccagaucuuccucuacgcgcaggccuccgggcggaucaccgugagcacgaagcgcagccagcagaccgugaucccgaacaucggcucccggccccgcguccggaacauccccagccgcaucuccaucuacuggaccaucgugaagcccggcgacauccugcugaucaacagcaccgggaaccucaucgccccgcggggcuacuucaagauccgcuccgggaaguccuccaucaugcggagcgacgcccccaucggcaagugcaacuccgagugcaucacgcccaacggcagcauccccaacgacaagccguuccagaacgugaaccgcaucaccuacggggccugcccccgguacgucaagcagaacacccugaagcuggcgaccggcaugcgcaacgugcccgagaagcagacgcgggggaucuucggcgccaucgccggguucaucgagaacggcugggagggcaugguggacgggugguacggcuuccgccaccagaacuccgaggggaucggccaggccgccgaccucaagagcacccaggcggccaucgaccagaucaacgggaagcugaaccggcugaucggcaagaccaacgagaaguuccaccagaucgagaaggaguucuccgaggucgagggccgcauccaggaccucgagaaguacguggaggacaccaagaucgaccuguggagcuacaacgccgagcugcucguggcccuggagaaccagcacacgaucgaccugaccgacuccgagaugaacaagcuguucgagaagaccaagaagcagcuccgggagaacgccgaggacauggggaacggcugcuucaagaucuaccacaagugcgacaacgcgugcaucgggagcauccgcaacggcaccuacgaccacgacgucuaccgcgacgaggcccugaacaaccgguuccagaucaaggggguggagcucaaguccggcuacaaggacuggauccuguggaucagcuucgccaucuccugcuuccugcucugcguggcccugcugggcuucaucaugugggccugccagaaggggaacauccgcugcaacaucugcaucuga

SEQ ID NO: 67238 - RNA, 1701 nt, Artificial Sequence; identical to SEQ ID NO: 66458
  derived and/or modified CDS sequence (opt1) from hemagglutinin__InfluenzaA__ACU80655

SEQ ID NO: 67239 - RNA, 1701 nt, Artificial Sequence; identical to SEQ ID NO: 66458
  derived and/or modified CDS sequence (opt1) from hemagglutinin__InfluenzaA__ACU80666

SEQ ID NO: 67240 - RNA, 1701 nt, Artificial Sequence; identical to SEQ ID NO: 65952
  derived and/or modified CDS sequence (opt1) from hemagglutinin__InfluenzaA__ACU80677

SEQ ID NO: 67241 - RNA, 1701 nt, Artificial Sequence; identical to SEQ ID NO: 66458
  derived and/or modified CDS sequence (opt1) from hemagglutinin__InfluenzaA__ACU80688

SEQ ID NO: 67242 - RNA, 1701 nt, Artificial Sequence; identical to SEQ ID NO: 66561
  derived and/or modified CDS sequence (opt1) from hemagglutinin__InfluenzaA__ACU80699

SEQ ID NO: 67243 - RNA, 1701 nt, Artificial Sequence; identical to SEQ ID NO: 66561
  derived and/or modified CDS sequence (opt1) from hemagglutinin__InfluenzaA__ACU80710

SEQ ID NO: 67244 - RNA, 1701 nt, Artificial Sequence
  derived and/or modified CDS sequence (opt1) from hemagglutinin__InfluenzaA__ACU80721
augaagaccaucaucgcccugagcuacauccucugccugguguucgcccagaagcugcccggcaacgacaacuccaccgcgacgcucugccuggggcaccacgccgucccgaacggcaccaucgugaagaccaucaccaacgaccagacggaggugaccaacgccaccgagcugguccagagcuccagcaccggggagaucugcgacagcccccaccagauccucgacggcgagaacugcacgcugaucgacgcccugcucggggacccccagugcgacggcuuccagaacaagaagugggaccuguucguggagcgcagcaaggccuacuccaacugcuaccccuacgacgugccggacuacgcgagccugcggucccucgucgccagcuccggcacccuggaguucaacaacgagagcuucaacuggaccggggugacccagaacggcacguccagcgccugcauccgccgguccaacaacagcuucuucucccgccugaacuggcucacccaccugaaguucaaguaccccgcccugaacgugaccaugcccaacaacgagcaguucgacaagcucuacaucuggggcguccaccaccccgggaccgacaacgaccagaucuuccuguacgcgcaggccagcgggcggaucacgguguccaccaagcgcagccagcagaccgugaucccgaacaucggcagccggccccgcguccggaacauccccucccgcaucagcaucuacuggaccaucgugaagcccggcgacauccugcucaucaacuccacggggaaccugaucgccccgcggggcuacuucaagauccgcagcgggaaguccagcaucaugcgguccgacgcccccaucggcaagugcaacagcgagugcaucacccccaacggcuccauccccaacgacaagccguuccagaacgugaaccgcaucaccuacggggccugcccccgguacgucaagcagaacacccugaagcucgcgacgggcaugcgcaacgugcccgagaagcagacccgggggaucuucggcgccaucgccggguucaucgagaacggcugggagggcaugguggacgggugguacggcuuccgccaccagaacagcgaggggcggggccaggccgccgaccugaaguccacccaggcggccaucgaccagaucaacgggaagcugaaccgccucaucggcaagaccaacgagaaguuccaccagaucgagaaggaguucagcgaggucgagggccggauccaggaccuggagaaguacguggaggacacgaagaucgaccugugguccuacaacgccgagcuccugguggcccuggagaaccagcacaccaucgaccucaccgacagcgagaugaacaagcuguucgagaagaccaagaagcagcugcgcgagaacgccgaggacauggggaacggcugcuucaagaucuaccacaagugcgacaacgcgugcaucggguccauccgcaacggcacguacgaccacgacgucuaccgggacgaggcccucaacaaccgcuuccagaucaaggggguggagcugaaguccggcuacaaggacuggauccuguggaucuccuucgccaucagcugcuuccuccugugcguggcccugcucggcuucaucaugugggccugccagaaggggaacauccggugcaacaucugcaucuga

SEQ ID NO: 67245 - RNA, 1701 nt, Artificial Sequence; identical to SEQ ID NO: 66458
  derived and/or modified CDS sequence (opt1) from hemagglutinin__InfluenzaA__ACU80732

SEQ ID NO: 67246 - RNA, 1701 nt, Artificial Sequence; identical to SEQ ID NO: 66458
  derived and/or modified CDS sequence (opt1) from hemagglutinin__InfluenzaA__ACU80743

SEQ ID NO: 67247 - RNA, 1701 nt, Artificial Sequence
  derived and/or modified CDS sequence (opt1) from hemagglutinin__InfluenzaA__ACU80754
augaagaccaucaucgcccugagcuacauccucugccugguguucgcccagaagcugcccggcaacgacaacuccaccgcgacgcucugccuggggcaccacgccgucccgaacggcaccaucgugaagaccaucaccaacgaccagaucgaggugacgaacgccaccgagcugguccagagcuccagcaccggggagaucugcgacagcccccaccagauccucgacggcgagaacugcacccugaucgacgcccugcucggggacccccagugcgacggcuuccagaacaagaagugggaccuguucguggagcgcagcaaggccuacuccaacugcuaccccuacgacgugccggacuacgcgagccugcggucccucgucgccagcuccggcacgcuggaguucaacaacgagagcuucaacuggaccggggugacccagaacggcaccuccagcgccugcauccgccgguccaacaacagcuucuucucccgccugaacuggcucacgcaccugaaguucaaguaccccgcccugaacgugaccaugcccaacaacgagcaguucgacaagcucuacaucuggggcguccaccaccccgggaccgacaacgaccagaucuuccuguacgcgcaggccagcgggcggaucaccguguccacgaagcgcagccagcagaccgugaucccgaacaucggcagccggccccgcguccggaacauccccucccgcaucagcaucuacuggaccaucgugaagcccggcgacauccugcucaucaacuccaccgggaaccugaucgccccgcggggcuacuucaagauccgcagcgggaaguccagcaucaugcgguccgacgcccccaucggcaagugcaacagcgagugcaucacgcccaacggcuccauccccaacgacaagccguuccagaacgugaaccgcaucaccuacggggccugcccccgguacgucaagcagaacacccugaagcucgcgaccggcaugcgcaacgugcccgagaagcagacgcgggggaucuucggcgccaucgccggguucaucgagaacggcugggagggcaugguggacgggugguacggcuuccgccaccagaacagcgaggggcggggccaggccgccgaccugaaguccacccaggcggccaucgaccagaucaacgggaagcugaaccgccucaucggcaagaccaacgagaaguuccaccagaucgagaaggaguucagcgaggucgagggccggauccaggaccuggagaaguacguggaggacaccaagaucgaccugugguccuacaacgccgagcuccugguggcccuggagaaccagcacacgaucgaccucaccgacagcgagaugaacaagcuguucgagaagaccaagaagcagcugcgcgagaacgccgaggacauggggaacggcugcuucaagaucuaccacaagugcgacaacgcgugcaucggguccauccgcaacggcaccuacgaccacgacgucuaccgggacgaggcccucaacaaccgcuuccagaucaaggggguggagcugaaguccggcuacaaggacuggauccuguggaucuccuucgccaucagcugcuuccuccugugcgugguccugcucggcuucaucaugugggccugccagaaggggaacauccggugcaacaucugcaucuga

SEQ ID NO: 67248 - RNA, 1701 nt, Artificial Sequence
  derived and/or modified CDS sequence (opt1) from hemagglutinin__InfluenzaA__ACU80765
augaagaccaucaucgcccugagcuacauccucugccugguguucgcccagaagcugcccggcaacgacaacuccaccgcgacgcucugccuggggcaccacgccgucccgaacggcaccaucgugaagaccaucaccaacgaccagaucgaggugacgaacgccaccgagcugguccagagcuccagcaccggggagaucugcgacagcccccaccagauccucgacggcgagaacugcacccugaucgacgcccugcucggggacccccagugcgacggcuuccagaacaagaagugggaccuguucguggagcgcagcaaggccuacuccaacugcuaccccuacgacgugccggacuacgcgagccugcggucccucgucgccagcuccggcacgcuggaguucaacaacgagagcuucaacuggaccggggugacccagaacggcaccuccagcgccugcauccgccgguccaacaacagcuucuucucccgccugaacuggcucacgcacagcaaguucaaguaccccgcccugaacgugaccaugcccaacaacgaggaguucgacaagcuguacaucuggggcguccaccaccccgggaccgacaacgaccagaucuuccucuacgcgcaggccuccgggcggaucaccgugagcacgaagcgcagccagcagaccgugaucccgaacaucggcucccggccccgcguccggaacauccccagccgcaucuccaucuacuggaccaucgugaagcccggcgacauccugcugaucaacagcaccgggaaccucaucgccccgcggggcuacuucaagauccgcuccgggaaguccuccaucaugcggagcgacgcccccaucggcaagugcaacuccgagugcaucacgcccaacggcagcauccccaacgacaagccguuccagaacgugaaccgcaucaccuacggggccugcccccgguacgucaagcagaacacccugaagcuggcgaccggcaugcgcaacgugcccgagaagcagacgcgggggaucuucggcgccaucgccggguucaucgagaacggcugggagggcaugguggacgggugguacggcuuccgccaccagaacuccgaggggaucggccaggccgccgaccucaagagcacccaggcggccaucgaccagaucaacgggaagcugaaccggcugaucggcaagaccaacgagaaguuccaccagaucgagaaggaguucuccgaggucgagggccgcauccaggaccucgagaaguacguggaggacaccaagaucgaccuguggagcuacaacgccgagcugcucguggcccuggagaaccagcacacgaucgaccugaccgacuccgagaugaacaagcuguucgagaagaccaagaagcagcuccgggagaacgccgaggacauggggaacggcugcuucaagaucuaccacaagugcgacaacgcgugcaucgggagcauccgcaacggcaccuacgaccacgacgucuaccgcgacgaggcccugaacaaccgguuccagaucaaggggguggagcucaaguccggcuacaaggacuggauccuguggaucagcuucgccaucuccugcuuccugcucugcaucgcccugcugggcuucaucaugugggccugccagaaggggaacauccgcugcaacaucugcaucuga

SEQ ID NO: 67249 - RNA, 1701 nt, Artificial Sequence
  derived and/or modified CDS sequence (opt1) from hemagglutinin__InfluenzaA__ACU80787
augaagaccaucaucgcccugagcuacauccucugccugguguucgcccagaagcugcccggcaacgacaacuccaccgcgacgcucugccuggggcaccacgccgucccgaacggcaccaucgugaagaccaucaccaacgaccagaucgaggugacgaacgccaccgagcugguccagagcuccagcaccggggagaucugcgacagcccccaccagauccucgacggcgagaacugcacccugaucgacgcccugcucggggacccccagugcgacggcuuccagaacaagaagugggaccuguucguggagcgcagcaaggccuacuccaacugcuaccccuacgacgugccggacuacgcgagccugcggucccucgucgccagcuccggcacgcuggaguucaacaacgagagcuucaacuggaccggggugacccagaacggcaccuccagcgccugcauccgccgguccaacaacagcuucuucucccgccugaacuggcucacgcaccugaaguucaaguaccccgcccugaacgugaccaugcccaacaacgagcaguucgacaagcucuacaucuggggcguccaccaccccgggaccgacaacgaccagaucuuccuguacgcgcaggccagcgggcggaucaccguguccacgaagcgcagccagcagaccgugaucccgaacaucggcagccggccccgcguccggaacauccccucccgcaucagcaucuacuggaccaucgugaagcccggcgacauccugcucaucaacuccaccgggaaccugaucgccccgcggggcuacuucaagauccgcagcgggaaguccagcaucaugcgguccgacgcccccaucggcaagugcaacagcgagugcaucacgcccaacggcuccauccccaacgacaagccguuccagaacgugaaccgcaucaccuacggggccugcccccgguacgucaagcagaacacccugaagcucgcgaccggcaugcgcaacgugcccgagaagcagacgcgggggaucuucggcgccaucgccggguucaucgagaacggcugggagggcaugauggacgggugguacggcuuccgccaccagaacagcgaggggcggggccaggccgccgaccugaaguccacccaggcggccaucgaccagaucaacgggaagcugaaccgccucaucggcaagaccaacgagaaguuccaccagaucgagaaggaguucagcgagguggagggccggauccaggaccuggagaaguacgucgaggacaccaagaucgaccugugguccuacaacgccgagcuccugguggcccuggagaaccagcacacgaucgaccucaccgacagcgagaugaacaagcuguucgagaagaccaagaagcagcugcgcgagaacgccgaggacauggggaacggcugcuucaagaucuaccacaagugcgacaacgcgugcaucggguccauccgcaacggcaccuacgaccacgacguguaccgggacgaggcccucaacaaccgcuuccagaucaagggggucgagcugaaguccggcuacaaggacuggauccuguggaucuccuucgccaucagcugcuuccuccugugcguggcccugcucggcuucaucaugugggccugccagaaggggaacauccggugcaacaucugcaucuga

SEQ ID NO: 67250 - RNA, 1701 nt, Artificial Sequence; identical to SEQ ID NO: 66458
  derived and/or modified CDS sequence (opt1) from hemagglutinin__InfluenzaA__ACU80798

SEQ ID NO: 67251 - RNA, 1701 nt, Artificial Sequence; identical to SEQ ID NO: 66458
  derived and/or modified CDS sequence (opt1) from hemagglutinin__InfluenzaA__ACU81103

SEQ ID NO: 67252 - RNA, 1701 nt, Artificial Sequence
  derived and/or modified CDS sequence (opt1) from hemagglutinin__InfluenzaA__ACU87270
augaaggccauccuggugguccuccuguacaccuucgccaccgcgaacgccgacacgcugugcaucggcuaccacgccaacaacagcaccgacaccguggacaccgugcucgagaagaacgucacggugacccacuccgugaaccugcuggaggacaagcacaacgggaagcucugcaagcugcgcggcgucgcgccccugcaccucgggaagugcaacaucgccggcuggauccuggggaacccggagugcgagagccuguccaccgccagcuccuggagcuacaucguggagaccuccagcuccgacaacggcacgugcuaccccggcgacuucaucgacuacgaggagcuccgggagcagcugagcuccgugagcuccuucgagcgcuucgagaucuuccccaagaccagcuccuggcccaaccacgacagcaacaagggggucaccgccgccugcccgcacgccggcgcgaaguccuucuacaagaaccugaucuggcucgugaagaaggggaacagcuaccccaagcuguccaagagcuacaucaacgacaagggcaaggaggugcugguccucugggggauccaccaccccagcaccuccgccgaccagcagagccuguaccagaacgccgacgccuacguguucgugggcacgucccgguacagcaagaaguucaagcccgagaucgccauccgcccgaagguccgggaccgcgagggccggaugaacuacuacuggacccugaucgagcccggggacaagaucaccuucgaggcgaccggcaaccucguggugccccgcuacgccuucgccauggagcggaacgccggguccggcaucaucaucagcgacacgcccguccacgacugcaacacgaccugccagaccccgaagggcgccaucaacaccucccugcccuuccagaacauccaccccaucaccaucgggaagugccccaaguacgucaagagcaccaagcugcgccucgcgaccggccugcggaacgugccguccauccagagccgcgggcuguucggcgccaucgccggguucaucgagggcggcuggacggggaugguggacggcugguacggguaccaccaccagaacgagcagggcuccggguacgccgccgaccucaagagcacccagaacgcgaucgacgagaucaccaacaaggugaacuccgugaucgagaagaugaacacccaguucacggccgucggcaaggaguucaaccaccuggagaagcggaucgagaaccugaacaagaagguggacgacggcuuccucgacaucuggaccuacaacgccgagcugcugguccuccuggagaacgagcgcacccuggacuaccacgacagcaacgugaagaaccucuacgagaaggugcggucccagcugaagaacaacgccaaggagaucgggaacggcugcuucgaguucuaccacaagugcgacaacacgugcauggagagcgucaagaacgggaccuacgacuaccccaaguacuccgaggaggccaagcugaaccgcgaggagaucgacggcgugaagcucgagagcacccggaucuaccagauccuggcgaucuacuccaccguggccagcagccugguccucguggugucccugggggccaucagcuucuggaugugcuccaacggcagccugcagugccgcaucugcaucuga

SEQ ID NO: 67253 - RNA, 1701 nt, Artificial Sequence; identical to SEQ ID NO: 66693
  derived and/or modified CDS sequence (opt1) from hemagglutinin__InfluenzaA__ACV04228

SEQ ID NO: 67254 - RNA, 1701 nt, Artificial Sequence; identical to SEQ ID NO: 66693
  derived and/or modified CDS sequence (opt1) from hemagglutinin__InfluenzaA__ACV04238

SEQ ID NO: 67255 - RNA, 1701 nt, Artificial Sequence
  derived and/or modified CDS sequence (opt1) from hemagglutinin__InfluenzaA__ACV04248
auggaggccauccuggugguccuccuguacaccuucgccaccgcgaacgccgacacgcugugcaucggcuaccacgccaacaacagcaccgacaccguggacaccgugcucgagaagaacgucacggugacccacuccgugaaccugcuggaggacaagcacaacgggaagcucugcaagcugcgcggcgucgcgccccugcaccucgggaagugcaacaucgccggcuggauccuggggaacccggagugcgagagccuguccaccgccagcuccuggagcuacaucguggagaccuccagcuccgacaacggcacgugcuaccccggcgacuucaucgacuacgaggagcuccgggagcagcugagcuccgugagcuccuucgagcgcuucgagaucuuccccaagaccagcuccuggcccaaccacgacagcaacaaggggaucaccgccgccugcccgcacgccggcgcgaaguccuucuacaagaaccugaucuggcucgucaagaaggggaacagcuaccccaagcuguccaagagcuacaucaacgacaagggcaaggaggugcuggugcucugggggauccaccaccccagcaccuccgccgaccagcagagccuguaccagaacgccgacgccuacgucuucgugggcuccagccgguacuccaagaaguucaagcccgagaucgccauccgcccgaaggugcgggaccaggagggccgcaugaacuacuacuggacgcuggucgagcccggggacaagaucaccuucgaggcgaccggcaaccucguggugccccgguacgccuucgccauggagcgcaacgccgggagcggcaucaucaucuccgacacccccguccacgacugcaacacgaccugccagaccccgaagggcgccaucaacaccagccugcccuuccacaacauccaccccaucacgaucgggaagugccccaaguacgugaaguccaccaagcugcggcucgcgaccggccugcgcaacgugccgagcauccagucccgggggcuguucggcgccaucgccggguucaucgagggcggcuggaccgggauggucgacggcugguacggguaccaccaccagaacgagcagggcagcggguacgccgccgaccucaaguccacgcagaacgcgaucgacgagaucaccaacaaggugaacagcgugaucgagaagaugaacacccaguucaccgccgucggcaaggaguucaaccaccuggagaagcgcaucgagaaccugaacaagaagguggacgacggcuuccucgacaucuggacguacaacgccgagcugcugguccuccuggagaacgagcggacccuggacuaccacgacuccaacgugaagaaccucuacgagaaggugcgcagccagcugaagaacaacgccaaggagaucgggaacggcugcuucgaguucuaccacaagugcgacaacacgugcauggaguccgucaagaacgggaccuacgacuaccccaaguacagcgaggaggccaagcugaaccgggaggagaucgacggcgugaagcucgaguccacccgcaucuaccagauccuggcgaucuacagcaccguggccagcucccugguccucguggugagccugggggccaucuccuucuggaugugcagcaacggcucccugcagugccggaucugcaucuga

SEQ ID NO: 67256 - RNA, 1701 nt, Artificial Sequence; identical to SEQ ID NO: 66693
  derived and/or modified CDS sequence (opt1) from hemagglutinin__InfluenzaA__ACV04258

SEQ ID NO: 67257 - RNA, 1701 nt, Artificial Sequence; identical to SEQ ID NO: 66693
  derived and/or modified CDS sequence (opt1) from hemagglutinin__InfluenzaA__ACV04268

SEQ ID NO: 67258 - RNA, 1701 nt, Artificial Sequence; identical to SEQ ID NO: 66693
  derived and/or modified CDS sequence (opt1) from hemagglutinin__InfluenzaA__ACV04278

SEQ ID NO: 67259 - RNA, 1701 nt, Artificial Sequence; identical to SEQ ID NO: 66693
  derived and/or modified CDS sequence (opt1) from hemagglutinin__InfluenzaA__ACV04288

SEQ ID NO: 67260 - RNA, 1701 nt, Artificial Sequence
  derived and/or modified CDS sequence (opt1) from hemagglutinin__InfluenzaA__ACV04298
augaaggccauccuggugguccuccuguacaccuucgccaccgcgaacgccgacacgcugugcaucggcuaccacgccaacaacagcaccgacaccguggacaccgugcucgagaagaacgucacggugacccacuccgugaaccugcuggaggacaagcacaacgggaagcucugcaagcugcgcggcgucgcgccccugcaccucgggaagugcaacaucgccggcuggauccuggggaacccggagugcgagagccuguccaccgccagcuccuggagcuacaucguggagaccuccagcuccgacaacggcacgugcuaccccggcgacuucaucgacuacgaggagcuccgggagcagcugagcuccgugagcuccuucgagcgcuucgagaucuuccccaagaccagcuccuggcccaaccacgacagcaacaagggggucaccgccgccugcccgcacgccggcgcgaaguccuucuacaagaaccugaucuggcucgugaagaaggggaacagcuaccccaagcuguccaagagcuacaucaacgacaagggcaaggaggugcugguccucugggggauccaccaccccagcaccuccgccgaccagcagagccuguaccagaacgccgacgccuacguguucgugggcacgucccgguacagcaagaaguucaagcccgagaucgccauccgcccgaagguccgggaccaggagggccgcaugaacuacuacuggacccugguggagcccggggacaagaucaccuucgaggcgaccggcaaccucguggucccccgguacgccuucgccauggagcgcaacgccggguccggcaucaucaucagcgacacgcccgugcacgacugcaacacgaccugccagaccccgaagggcgccaucaacaccucccugcccuuccagaacauccaccccgugaccaucgggaagugccccaaguacgucaagagcaccaagcugcggcucgcgaccggccugcgcaacgugccguccauccagagccgggggcuguucggcgccaucgccggguucaucgagggcggcuggacggggaugguggacggcugguacggguaccaccaccagaacgagcagggcuccggguacgccgccgaccucaagagcacccagaacgcgaucgacgagaucaccaacaaggucaacuccgugaucgagaagaugaacacccaguucacggccgucggcaaggaguucaaccaccuggagaagcgcaucgagaaccugaacaagaagguggacgacggcuuccucgacaucuggaccuacaacgccgagcugcuggugcuccuggagaacgagcggacccuggacuaccacgacagcaacgucaagaaccucuacgagaaggugcgcucccagcugaagaacaacgccaaggagaucgggaacggcugcuucgaguucuaccacaagugcgacaacacgugcauggagagcgugaagaacgggaccuacgacuaccccaaguacuccgaggaggccaagcugaaccgggaggagaucgacggcgucaagcucgagagcacccgcaucuaccagauccuggcgaucuacuccaccguggccagcagccuggugcucgucgugucccugggggccaucagcuucuggaugugcuccaacggcagccugcagugccggaucugcaucuga

SEQ ID NO: 67261 - RNA, 1701 nt, Artificial Sequence; identical to SEQ ID NO: 66693
  derived and/or modified CDS sequence (opt1) from hemagglutinin__InfluenzaA__ACV04308

SEQ ID NO: 67262 - RNA, 1701 nt, Artificial Sequence
  derived and/or modified CDS sequence (opt1) from hemagglutinin__InfluenzaA__ACV04318
augaaggccauccuggugguccuccuguacaccuucgccaccgcgaacgccgacacgcugugcaucggcuaccacgccaacaacagcaccgacaccguggacaccgugcucgagaagaacgucacggugacccacuccgugaaccugcuggaggacaagcacaacgggaagcucugcaagcugcgcggcgucgcgccccugcaccucgggaagugcaacaucgccggcuggauccuggggaacccggagugcgagagccuguccaccgccagcuccuggagcuacaucguggagaccuccagcuccgacaacggcacgugcuaccccggcgacuucaucgacuacgaggagcuccgggagcagcugagcuccgugagcuccuucgagcgcuucgagaucuuccccaagaccagcuccuggcccaaccacgacagcaacaagggggucaccgccgccugcccgcacgccggcgcgaaguccuucuacaagaaccugaucuggcucgugaagaaggggaacagcuaccccaagcuguccaagagcuacaucaacgacaagggcaaggaggugcugguccucugggggauccaccaccccagcaccuccgccgaccagcagagccuguaccagaacgccgacgccuacguguucgugggcacgucccgguacagcaagaaguucaagcccgagaucgccauccgcccgaagguccgggaccaggagggccgcaugaacuacuacuggacccugguggagcccggggacaagaucaccuucgaggcgaccggcaaccucguggucccccgguacgccuucgccauggagcgcaacgccggguccggcaucaucaucagcgacacgcccgugcacaacugcaacacgaccugccagaccccgaagggcgccaucaacaccucccugcccuuccagaacauccaccccaucaccaucgggaagugccccaaguacgucaagagcaccaagcugcggcucgcgaccggccugcgcaacgugccguccauccagagccgggggcuguucggcgccaucgccggguucaucgagggcggcuggacggggaugguggacggcugguacggguaccaccaccagaacgagcagggcuccggguacgccgccgaccucaagagcacccagaacgcgaucgacgagaucaccaacaaggugaacuccgucaucgagaagaugaacacccaguucacggccgugggcaaggaguucaaccaccuggagaagcgcaucgagaaccugaacaagaaggucgacgacggcuuccucgacaucuggaccuacaacgccgagcugcuggugcuccuggagaacgagcggacccuggacuaccacgacagcaacgugaagaaccucuacgagaagguccgcucccagcugaagaacaacgccaaggagaucgggaacggcugcuucgaguucuaccacaagugcgacaacacgugcauggagagcgugaagaacgggaccuacgacuaccccaaguacuccgaggaggccaagcugaaccgggaggagaucgacggcgugaagcucgagagcacccgcaucuaccagauccuggcgaucuacuccaccgucgccagcagccuggugcucguggucucccugggggccaucagcuucuggaugugcuccaacggcagccugcagugccggaucugcaucuga

SEQ ID NO: 67263 - RNA, 1701 nt, Artificial Sequence; identical to SEQ ID NO: 66693
  derived and/or modified CDS sequence (opt1) from hemagglutinin__InfluenzaA__ACV04328

SEQ ID NO: 67264 - RNA, 1701 nt, Artificial Sequence; identical to SEQ ID NO: 66693
  derived and/or modified CDS sequence (opt1) from hemagglutinin__InfluenzaA__ACV04338

SEQ ID NO: 67265 - RNA, 1701 nt, Artificial Sequence; identical to SEQ ID NO: 66935
  derived and/or modified CDS sequence (opt1) from hemagglutinin__InfluenzaA__ACV04358

SEQ ID NO: 67266 - RNA, 1701 nt, Artificial Sequence
  derived and/or modified CDS sequence (opt1) from hemagglutinin__InfluenzaA__ACV04368
augaaggccauccuggugguccuccuguacaccuucgccaccgcgaacgccgacacgcugugcaucggcuaccacgccaacaacagcaccgacaccguggacaccgugcucgagaagaacgucacggugacccacuccgugaaccugcuggaggacaagcacaacgggaagcucugccagcugcgcggcgucgcgccccugcaccucgggaagugcaacaucgccggcuggauccuggggaacccggagugcgagagccuguccaccgccagcuccuggagcuacaucguggagaccuccagcuccgacaacggcacgugcuaccccggcgacuucaucgacuacgaggagcuccgggagcagcugagcuccgugagcuccuucgagcgcuucgagaucuuccccaagaccagcuccuggcccaaccacgacagcaacaagggggucaccgccgccugcccgcacgccggcgcgaaguccuucuacaagaaccugaucuggcucgugaagaaggggaacagcuaccccaagcuguccaagagcuacaucaacgacaagggcaaggaggugcugguccucugggggauccaccaccccagcaccuccgccgaccagcagagccuguaccagaacgccgacgccuacguguucgugggcacgucccgguacagcaagaaguucaagcccgagaucgccauccgcccgaagguccgggaccaggagggccgcaugaacuacuacuggacccugguggagcccggggacaagaucaccuucgaggcgaccggcaaccucguggucccccgguacgccuucgccauggagcgcaacgccggguccggcaucaucaucagcgacacgcccgugcacgacugcaacacgaccugccagaccccgaagggcgccaucaacaccucccugcccuuccagaacauccaccccaucaccaucgggaagugccccaaguacgucaagagcaccaagcugcggcucgcgaccggccugcgcaacgugccguccauccagagccgggggcuguucggcgccaucgccggguucaucgagggcggcuggacggggaugguggacggcugguacggguaccaccaccagaacgagcagggcuccggguacgccgccgaccucaagagcacccagaacgcgaucgacgagaucaccaacaaggugaacuccgucaucgagaagaugaacacccaguucacggccgugggcaaggaguucaaccaccuggagaagcgcaucgagaaccugaacaagaaggucgacgacggcuuccucgacaucuggaccuacaacgccgagcugcuggugcuccuggagaacgagcggacccuggacuaccacgacagcaacgugaagaaccucuacgagaagguccgcucccagcugaagaacaacgccaaggagaucgggaacggcugcuucgaguucuaccacaagugcgacaacacgugcauggagagcgugaagaacgggaccuacgacuaccccaaguacuccgaggaggccaagcugaaccgggaggagaucgacggcgugaagcucgagagcacccgcaucuaccagauccuggcgaucuacuccaccgucgccagcagccuggugcucguggucucccugggggccaucagcuucuggaugugcuccaacggcagccugcagugccggaucugcaucuga

SEQ ID NO: 67267 - RNA, 1701 nt, Artificial Sequence
  derived and/or modified CDS sequence (opt1) from hemagglutinin__InfluenzaA__ACV04378
augaaggccauccuggugguccuccuguacaccuucgccaccgcgaacgccgacacgcugugcaucggcuaccacgccaacaacagcaccgacaccguggacaccgugcucgagaagaacgucacggugacccacuccgugaaccugcuggaggacaagcacaacgggaagcucugcaagcugcgcggcgucgcgccccugcaccucgggaagugcaacaucgccggcuggauccuggggaacccggagugcgagagccuguccaccgccagcuccuggagcuacaucguggagaccuccagcuccgacaacggcacgugcuaccccggcgacuucaucgacuacgaggagcuccgggagcagcugagcuccgugagcuccuucgagcgcuucgagaucuuccccaagaccagcuccuggcccaaccacgacagcaacaagggggucaccgccgccugcccgcacgccggcgcgaaguccuucuacaagaaccugaucuggcucgugaagaaggggaacagcuaccccaagcuguccaagagcuacaucaacgacaagggcaaggaggugcugguccucugggggauccaccaccccagcaccuccgccgaccagcagagccuguaccagaacgccgacgccuacguguucgugggcacgucccgguacagcaagaaguucaagcccgagaucgccauccgcccgaagguccgggaccaggagggccgcaugaacuacuacuggacccugguggagcccggggacaagaucaccuucgaggcgaccggcaaccucguggucccccgguacgccuucgccauggagcgcaacgccggguccggcaucaucaucagcgacacgcccgugcacgacugcaacacgaccugccagaccccgaagggcgccaucaacaccucccugcccuuccagaacauccaccccaucaccaucgggaagugccccaaguacgucaagagcaccaagcugcggcucgcgaccggccugcgcaacaucccguccauccagagccgggggcuguucggcgccaucgccggguucaucgagggcggcuggacggggaugguggacggcugguacggguaccaccaccagaacgagcagggcuccggguacgccgccgaccucaagagcacccagaacgcgaucgacgagaucaccaacaaggugaacuccgugaucgagaagaugaacacccaguucacggccgucggcaaggaguucaaccaccuggagaagcgcaucgagaaccugaacaagaagguggacgacggcuuccucgacaucuggaccuacaacgccgagcugcugguccuccuggagaacgagcggacccuggacuaccacgacagcaacgugaagaaccucuacgagaaggugcgcucccagcugaagaacaacgccaaggagaucgggaacggcugcuucgaguucuaccacaagugcgacaacacgugcauggagagcgucaagaacgggaccuacgacuaccccaaguacuccgaggaggccaagcugaaccgggaggagaucgacggcgugaagcucgagagcacccgcaucuaccagauccuggcgaucuacuccaccguggccagcagccugguccucaucgugucccugggggccaucagcuucuggaugugcuccaacggcagccugcagugccggaucugcaucuga

SEQ ID NO: 67268 - RNA, 1701 nt, Artificial Sequence; identical to SEQ ID NO: 66935
  derived and/or modified CDS sequence (opt1) from hemagglutinin__InfluenzaA__ACV04388

SEQ ID NO: 67269 - RNA, 1701 nt, Artificial Sequence; identical to SEQ ID NO: 66693
  derived and/or modified CDS sequence (opt1) from hemagglutinin__InfluenzaA__ACV04398

SEQ ID NO: 67270 - RNA, 1701 nt, Artificial Sequence; identical to SEQ ID NO: 66937
  derived and/or modified CDS sequence (opt1) from hemagglutinin__InfluenzaA__ACV04408

SEQ ID NO: 67271 - RNA, 1701 nt, Artificial Sequence; identical to SEQ ID NO: 66693
  derived and/or modified CDS sequence (opt1) from hemagglutinin__InfluenzaA__ACV04489

SEQ ID NO: 67272 - RNA, 1701 nt, Artificial Sequence; identical to SEQ ID NO: 66693
  derived and/or modified CDS sequence (opt1) from hemagglutinin__InfluenzaA__ACV04499

SEQ ID NO: 67273 - RNA, 1701 nt, Artificial Sequence; identical to SEQ ID NO: 66873
  derived and/or modified CDS sequence (opt1) from hemagglutinin__InfluenzaA__ACV04509

SEQ ID NO: 67274 - RNA, 1701 nt, Artificial Sequence; identical to SEQ ID NO: 66693
  derived and/or modified CDS sequence (opt1) from hemagglutinin__InfluenzaA__ACV04519

SEQ ID NO: 67275 - RNA, 1701 nt, Artificial Sequence; identical to SEQ ID NO: 66693
  derived and/or modified CDS sequence (opt1) from hemagglutinin__InfluenzaA__ACV04529

SEQ ID NO: 67276 - RNA, 1701 nt, Artificial Sequence; identical to SEQ ID NO: 66693
  derived and/or modified CDS sequence (opt1) from hemagglutinin__InfluenzaA__ACV04549

SEQ ID NO: 67277 - RNA, 1701 nt, Artificial Sequence; identical to SEQ ID NO: 66693
  derived and/or modified CDS sequence (opt1) from hemagglutinin__InfluenzaA__ACV04559

SEQ ID NO: 67278 - RNA, 1701 nt, Artificial Sequence; identical to SEQ ID NO: 66693
  derived and/or modified CDS sequence (opt1) from hemagglutinin__InfluenzaA__ACV04579

SEQ ID NO: 67279 - RNA, 1701 nt, Artificial Sequence
  derived and/or modified CDS sequence (opt1) from hemagglutinin__InfluenzaA__ACV04751
auggaggccauccugguggucaugcucuacaccuucgccaccgcgaacgccgacacgcugugcaucggcuaccacgccaacaacagcaccgacaccguggacaccgugcuggagaagaacgucacggugacccacuccgugaaccuccuggaggacaagcacaacgggaagcugugcaagcuccgcggcgucgcgccccugcggcuggggaagugcaacaucgccggcuggauccucgggaacccggagugcgagagccuguccaccgccagcuccuggagcuacaucguggagaccuccagcuccgacaacggcacgugcuaccccggcgacuucaucgacuacgaggagcugcgcgagcagcucagcuccgugagcuccuucgagcgguucgagaucuuccccaagaccagcuccuggcccaaccacgacagcaacaagggggucaccgccgccugcccgcacgccggcgcgaaguccuucuacaagaaccugaucuggcuggugaagaaggggaacagcuaccccaagcucuccaagagcuacaucaacgacaagggcaaggaggugcugguccugugggggauccaccaccccagcaccuccgccgaccagcagagccucuaccagaacgccgacgccuacguguucgugggcacgucccgcuacagcaagaaguucaagcccgagaucgccauccggccgaagguccgcgaccaggagggccggaugaacuacuacuggacccugguggagcccggggacaagaucaccuucgaggcgaccggcaaccugguggucccccgcuacgccuucgccauggagcggaacgccggguccggcaucaucaucagcgacacgcccgugcacaacugcaacacgaccugccagaccccgaagggcgccaucaacaccucccuccccuuccagaacauccaccccaucaccaucgggaagugccccaaguacgucaagagcaccaagcugcgccuggcgaccggccuccggaacgugccguccauccagagccgcgggcuguucggcgccaucgccggguucaucgagggcggcuggacggggaugguggacggcugguacggguaccaccaccagaacgagcagggcuccggguacgccgccgaccucaagagcacccagaacgcgaucgacgagaucaccaacaaggugaacuccgucaucgagaagaugaacacccaguucacggccgugggcaaggaguucaaccaccuggagaagcggaucgagaaccugaacaagaaggucgacgacggcuuccuggacaucuggaccuacaacgccgagcuccuggugcugcucgagaacgagcgcacccuggacuaccacgacagcaacgugaagaaccuguacgagaagguccggucccagcucaagaacaacaccaaggagaucgggaacggcugcuucgaguucuaccacaagugcgacaacacgugcauggagagcgugaagaacgggaccuacgacuaccccaaguacuccgaggaggccaagcugaaccgcgaggagaucgacggcgugaagcuggagagcacccggaucuaccagauccucgccaucuacuccaccgucgcgagcagccuggugcugguggucucccucggggccaucagcuucuggaugugcuccaacggcagccugcagugccgcaucugcaucuga

SEQ ID NO: 67280 - RNA, 1701 nt, Artificial Sequence
  derived and/or modified CDS sequence (opt1) from hemagglutinin__InfluenzaA__ACV04752
auggaggccauccuggugguccuccuguacaccuucgccaccgcgaacgccgacacgcugugcaucggcuaccacgccaacaacagcaccgacaccguggacaccgugcucgagaagaacgucacggugacccacuccgugaacauccuggaggacaagcacaacgggaagcugugcaagcuccgcggcgucgcgccccugcaccuggggaagugcaacaucgccggcuggauccucgagaacccggagugcgagagccuguccaccgccagcuccuggagcuacaucguggagaccuccagcuccgacaacgggacgugcuaccccggcgacuucaucgacuacgaggagcugcgggagcagcucagcuccgugagcuccuucgagcgcuucgagaucuuccccaagaccagcuccuggcccaaccacgacagcaacaagggcgucaccgccgccugcccgcacgccggggcgaaguccuucuacaagaaccugaucuggcuggugaagaagggcaacagcuaccccaagcucuccaagagcuacaucaacgacaaggggaaggaggugcugguccuguggggcauccaccaccccagcaccuccgccgaccagcagagccucuaccagaacgccgacgccuacguguucgugggguccagccgguacuccaagaaguucaagcccgagaucgccauccgcccgaagguccgggaccaggagggccgcaugaacuacuacuggacgcugguggagcccggcgacaagaucaccuucgaggcgaccgggaaccugguggucccccgguacgccuucgccauggagcgcaacgccggcagcgggaucaucaucuccgacacccccgugcacgacugcaacacgaccugccagaccccgaagggcgccaucaacaccagccuccccuuccacaacauccaccccaucacgaucggcaagugccccaaguacgugaaguccaccaagcugcggcuggcgaccgggcuccgcaacgucccgagcauccagucccggggccuguucggggccaucgccggcuucaucgagggcggguggaccggcaugguggacgggugguacggcuaccaccaccagaacgagcaggggagcggcuacgccgccgaccugaaguccacgcagaacgcgaucgacgagaucaccaacaaggugaacagcgucaucgagaagaugaacacccaguucaccgccguggggaaggaguucaaccaccucgagaagcgcaucgagaaccugaacaagaaggucgacgacggcuuccuggacaucuggacguacaacgccgagcuccuggugcugcucgagaacgagcggacccuggacuaccacgacuccaacgugaagaaccuguacgagaagguccgcagccagcucaagaacaacgccaaggagaucggcaacgggugcuucgaguucuaccacaagugcgacaacacgugcauggaguccgugaagaacggcaccuacgacuaccccaaguacagcgaggaggccaagcugaaccgggaggagaucgacggggugaagcuggaguccacccgcaucuaccagauccucgcgaucuacagcaccgucgccagcucccuggugcugguggucagccucggcgccaucuccuucuggaugugcagcaacgggucccugcagugccggaucugcaucuga

SEQ ID NO: 67281 - RNA, 1701 nt, Artificial Sequence
  derived and/or modified CDS sequence (opt1) from hemagglutinin__InfluenzaA__ACV04753
auggaggccauccuggugguccuccuguacaccuucgccaccgcgaacgccgacacgcugugcaucggcuaccacgccaacaacagcaccgacaccguggacaccgugcucgagaagaacgucacggugacccacuccgugaaccugcuggaggacaagcacaacgggaagcucugcaagcugcgcggcgucgcgccccugcaccucgggaagugcaacaucgccggcuggauccuggggaacccggagugcgagagccuguccaccgccagcuccuggagcuacaucguggagaccuccagcuccgacaacggcacgugcuaccccggcgacuucaucgacuacgaggagcuccgggagcagcugagcuccgugagcuccuucgagcgcuucgagaucuuccccaagaccagcuccuggcccaaccacgacagcaacaagggggucaccgccgccugcccgcacgccggcgcgaaguccuucuacaagaaccugaucuggcucgugaagaaggggaacagcuaccccaagcuguccaagagcuacaucaacgacaagggcaaggaggugcugguccucugggggauccaccaccccagcaccuccgccgaccagcagagccuguaccagaacgccgacgccuacguguucgugggcacgucccgguacagcaagaaguucaagcccgagaucgccauccgcccgaagguccgggaccgcgagggccggaugaacuacuacuggacccugguggagcccggggacaagaucaccuucgaggcgaccggcaaccucguggucccccgcuacgccuucgccauggagcggaacgccggguccggcaucaucaucagcgacacgcccgugcacgacugcaacacgaccugccagaccccgaagggcgccaucaacaccucccugcccuuccagaacauccaccccaucaccaucgggaagugccccaaguacgucaagagcaccaagcugcgccucgcgaccggccugcggaacgugccguccauccagagccgcgggcuguucggcgccaucgccggguucaucgagggcggcuggacggggaugguggacggcugguacggguaccaccaccagaacgagcagggcuccggguacgccgccgaccucaagagcacccagaacgcgaucgacgagaucaccaacaaggugaacuccgucaucgagaagaugaacacccaguucacggccgugggcaaggaguucaaccaccuggagaagcggaucgagaaccugaacaagaaggucgacgacggcuuccucgacaucuggaccuacaacgccgagcugcuggugcuccuggagaacgagcgcacccuggacuaccacgacagcaacgugaagaaccucuacgagaagguccggucccagcugaagaacaacgccaaggagaucgggaacggcugcuucgaguucuaccacaagugcgacaacacgugcauggagagcgugaagaacgggaccuacgacuaccccaaguacuccgaggaggccaagcugaaccgcgaggagaucgacggcgugaagcucgagagcacccggaucuaccagauccuggcgaucuacuccaccgucgccagcagccuggugcucguggucucccugggggccaucagcuucuggaugugcuccaacggcagccugcagugccgcaucugcaucuga

SEQ ID NO: 67282 - RNA, 1701 nt, Artificial Sequence
  derived and/or modified CDS sequence (opt1) from hemagglutinin__InfluenzaA__ACV04754
auggaggccauccuggugguccuccuguacaccuucgccaccgcgaacgccgacacgcugugcaucggcuaccacgccaacaacagcaccgacaccguggacaccgugcucgagaagaacguccccgugacgcacuccgugaaccugcugaaggacaagcacaacgggaagcucugcaagcugcgcggcgucgccccgcugcaccucgggaagugcaacaucgccggcuggauccuggggaaccccgagugcgagagccuguccaccgcgagcuccuggagcuacaucguggagaccuccagcuccgacaacgggaccugcuaccccggcgacuucaucgacuacgaggagcuccgggagcagcugagcuccgugagcuccuucgagcgcuucgagaucuuccccaagacgagcuccuggccgaaccacgagagcaacaagggggucaccgccgccugcccccacgccggcgcgaaguccuucuacaagaaccugaucuggcucgugaagaaggggaacagcuaccccaagcuguccaagagcuacaucaacgacaagggcaaggaggugcugguccucugggggauccaccaccccagcaccuccgccgaccagcagagccuguaccagaacgccgacgccuacguguucgugggcaccucccgguacagcaagaaguucaagccggagaucgccauccgccccaagguccgggaccaggagggccgcaugaacuacuacuggacgcugguggagcccggggacaagaucaccuucgaggcgaccggcaaccucguggucccccgguacgccuucgccauggagcgcaacgccggguccggcaucaucaucagcgacaccccggugcacgacugcaacacgaccugccagacccccaagggcgccaucaacaccucccugcccuuccagaacauccaccccaucacgaucgggaagugcccgaaguacgucaagagcaccaagcugcggcucgcgaccggccugcgcaacgugcccuccauccagagccggggcguguucggcgccaucgccggguucaucgagggcggcuggaccgggaugguggacggcugguacggguaccaccaccagaacgagcagggcuccggguacgccgccgaccucaagagcacgcagaacgcgaucgacgagaucaccaacaaggucaacuccgugaucgagaagaugaacacccaguucaccgccgucggcaaggaguucaaccaccuggagaagcgcaucgagaaccugaacaagaagguggacgacggcuuccuggacaucuggacguacaacgccgagcuccuggugcugcucgagaacgagcggacccuggacuaccacgacagcaacgucaagaaccuguacgagaaggugcgcucccagcucaagaacaacgccaaggagaucgggaacggcugcuucgaguucuaccacaagugcgacaacacgugcauggagagcgugaagaacgggaccuacgacuaccccaaguacuccgaggaggccaagcugaaccgggaggagaucgacggcgucaagcuggagagcacccgcaucuaccagauccucgcgaucuacuccaccguggccagcagccuggugcuggucgugucccucggggccaucagcuucuggaugugcuccaacggcagccugcagugccggaucugcaucuga

SEQ ID NO: 67283 - RNA, 1701 nt, Artificial Sequence; identical to SEQ ID NO: 67178
  derived and/or modified CDS sequence (opt1) from hemagglutinin__InfluenzaA__ACV04755

SEQ ID NO: 67284 - RNA, 1701 nt, Artificial Sequence; identical to SEQ ID NO: 66873
  derived and/or modified CDS sequence (opt1) from hemagglutinin__InfluenzaA__ACV33084

SEQ ID NO: 67285 - RNA, 1701 nt, Artificial Sequence; identical to SEQ ID NO: 66693
  derived and/or modified CDS sequence (opt1) from hemagglutinin__InfluenzaA__ACV33094

SEQ ID NO: 67286 - RNA, 1701 nt, Artificial Sequence; identical to SEQ ID NO: 66693
  derived and/or modified CDS sequence (opt1) from hemagglutinin__InfluenzaA__ACV33104

SEQ ID NO: 67287 - RNA, 1701 nt, Artificial Sequence; identical to SEQ ID NO: 66693
  derived and/or modified CDS sequence (opt1) from hemagglutinin__InfluenzaA__ACV33114

SEQ ID NO: 67288 - RNA, 1701 nt, Artificial Sequence; identical to SEQ ID NO: 66693
  derived and/or modified CDS sequence (opt1) from hemagglutinin__InfluenzaA__ACV33124

SEQ ID NO: 67289 - RNA, 1701 nt, Artificial Sequence; identical to SEQ ID NO: 66693
  derived and/or modified CDS sequence (opt1) from hemagglutinin__InfluenzaA__ACV33134

SEQ ID NO: 67290 - RNA, 1701 nt, Artificial Sequence; identical to SEQ ID NO: 67255
  derived and/or modified CDS sequence (opt1) from hemagglutinin__InfluenzaA__ACV33144

SEQ ID NO: 67291 - RNA, 1701 nt, Artificial Sequence; identical to SEQ ID NO: 66693
  derived and/or modified CDS sequence (opt1) from hemagglutinin__InfluenzaA__ACV33154

SEQ ID NO: 67292 - RNA, 1701 nt, Artificial Sequence; identical to SEQ ID NO: 66693
  derived and/or modified CDS sequence (opt1) from hemagglutinin__InfluenzaA__ACV33164

SEQ ID NO: 67293 - RNA, 1701 nt, Artificial Sequence; identical to SEQ ID NO: 66693
  derived and/or modified CDS sequence (opt1) from hemagglutinin__InfluenzaA__ACV33174

SEQ ID NO: 67294 - RNA, 1701 nt, Artificial Sequence; identical to SEQ ID NO: 66680
  derived and/or modified CDS sequence (opt1) from hemagglutinin__InfluenzaA__ACV41981

SEQ ID NO: 67295 - RNA, 1701 nt, Artificial Sequence; identical to SEQ ID NO: 66719
  derived and/or modified CDS sequence (opt1) from hemagglutinin__InfluenzaA__ACV41991

SEQ ID NO: 67296 - RNA, 1701 nt, Artificial Sequence; identical to SEQ ID NO: 66719
  derived and/or modified CDS sequence (opt1) from hemagglutinin__InfluenzaA__ACV42001

SEQ ID NO: 67297 - RNA, 1701 nt, Artificial Sequence; identical to SEQ ID NO: 66693
  derived and/or modified CDS sequence (opt1) from hemagglutinin__InfluenzaA__ACV42008

SEQ ID NO: 67298 - RNA, 1701 nt, Artificial Sequence; identical to SEQ ID NO: 66693
  derived and/or modified CDS sequence (opt1) from hemagglutinin__InfluenzaA__ACV42018

SEQ ID NO: 67299 - RNA, 1701 nt, Artificial Sequence; identical to SEQ ID NO: 66340
  derived and/or modified CDS sequence (opt1) from hemagglutinin__InfluenzaA__ACV49501

SEQ ID NO: 67300 - RNA, 1701 nt, Artificial Sequence
  derived and/or modified CDS sequence (opt1) from hemagglutinin__InfluenzaA__ACV49512
augaagaccaucaucgcccugagcuacaucuucugccucgcccugggccaggaccugcccgggaacgacaacuccaccgcgacgcucugccugggccaccacgccgugccgaacgggacccuggucaagaccaucaccgacgaccagaucgaggugacgaacgccaccgagcucgugcagagcuccagcaccggcaagaucugcaacaacccccaccgcauccuggacgggaucgacugcacccugaucgacgcccuccugggcgacccccacugcgacgucuuccagaacgagacgugggaccuguucguggagcgguccaaggccuucagcaacugcuaccccuacgacgugccggacuacgcgucccuccgcagccuggucgccuccagcggcacccuggaguucaucaccgagggguucaccuggacgggcgugacccagaacgggggcuccaacgccugcaagcgggggcccggcagcggcuucuucucccgccucaacuggcugaccaagagcggguccaccuaccccgugcugaacgucacgaugcccaacaacgacaacuucgacaagcucuacaucuggggcgugcaccacccgagcaccaaccaggagcagaccucccuguacgugcaggccagcgggcgggucaccguguccacgcgccggagccagcagaccaucauccccaacaucgagagccgccccugggugcggggccuguccagccgcaucuccaucuacuggaccaucgucaagcccggcgacgugcucgugaucaacagcaacgggaaccugaucgcgccgcggggcuacuucaagaugcgcaccgggaaguccagcaucaugcgguccgacgcccccaucgacacgugcaucagcgagugcaucacccccaacggcuccauccccaacgacaagccguuccagaacgucaacaagaucaccuacggggccugccccaaguacgugaagcagaacacccugaagcucgccacgggcaugcgcaacgugcccgagaagcagacccggggccuguucggggccaucgcgggcuucaucgagaacgggugggagggcaugaucgacgggugguacggcuuccgccaccagaacagcgagggcaccgggcaggccgccgaccugaaguccacccaggccgccaucgaccagaucaacggcaagcucaaccgggucaucgagaagacgaacgagaaguuccaccagaucgagaaggaguucagcgagguggaggggcgcauccaggaccuggagaaguacguggaggacaccaagaucgaccugugguccuacaacgcggagcuccuggucgcccuggagaaccagcacaccaucgaccucaccgacagcgagaugaacaagcuguucgagaagacgcggcgccagcugcgggagaacgccgaggacaugggcaacgggugcuucaagaucuaccacaagugcgacaacgccugcaucgaguccauccgcaacggcaccuacgaccacgacguguaccgcgacgaggcccucaacaaccgguuccagaucaaggacgucgagcucaagagcggcuacaaggacuggauccuguggaucuccuucgcgaucagcugcuuccugcugugcguggugcugcucggguucaucaugugggccugccagcgcggcaacauccggugcaacaucugcaucuga

SEQ ID NO: 67301 - RNA, 1701 nt, Artificial Sequence; identical to SEQ ID NO: 66353
  derived and/or modified CDS sequence (opt1) from hemagglutinin__InfluenzaA__ACV49523

SEQ ID NO: 67302 - RNA, 1698 nt, Artificial Sequence
  derived and/or modified CDS sequence (opt1) from hemagglutinin__InfluenzaA__ACV49545
augaaggccaaccugcucgugcugcugugcgcccucgcggccgccgacgccgacaccaucugcaucggcuaccacgccaacaacagcaccgacacggucgacaccgugcuggagaagaacgugaccgucacccacuccgugaaccugcucgaggacagccacaacgggaagcugugccgccugaagggcaucgcgccccuccagcuggggaagugcaacaucgccggcuggcugcucgggaacccggagugcgacccccugcugcccgugcgguccuggagcuacaucgucgagacgcccaacuccgagaacggcaucugcuacccgggcgacuucaucgacuacgaggagcuccgcgagcagcugagcuccgugagcuccuucgagcgguucgagaucuuccccaaggagagcuccuggcccaaccacaacaccaacggggugaccgccgccugcagccacgagggcaaguccagcuucuaccgcaaccugcucuggcugaccgagaaggagggguccuaccccaagcugaagaacagcuacgucaacaagaagggcaaggaggugcucgugcugugggggauccaccacccgcccaacuccaaggagcagcagaaccuguaccagaacgagaacgcguacgucagcguggugacguccaacuacaaccggcgcuucacccccgagaucgccgagcggcccaagguccgcgaccaggccggccggaugaacuacuacuggacccuccugaagccgggcgacaccaucaucuucgaggccaacgggaaccugaucgcccccauguacgcguucgcccucagccgcggcuucgggagcggcaucaucacguccaacgccagcaugcacgagugcaacaccaagugccagacgccccugggcgccaucaacuccagccugcccuaccagaacauccacccggugaccaucggggagugccccaaguacgugcgguccgccaagcuccgcauggucaccggccugcggaacauccccagcauccagucccgcgggcuguucggcgcgaucgccggguucaucgagggcggcuggaccgggaugaucgacggcugguacggguaccaccaccagaacgagcagggcagcggguacgccgccgaccagaaguccacccagaacgccaucaacggcaucaccaacaaggugaacacggugaucgagaagaugaacauccaguucaccgcggucggcaaggaguucaacaagcucgagaagcggauggagaaccugaacaagaagguggacgacggguuccuggacaucuggaccuacaacgccgagcuccuggugcugcucgagaacgagcgcacccuggacuuccacgacagcaacgucaagaaccuguacgagaaggugaagucccagcucaagaacaacgccaaggagaucggcaacgggugcuucgaguucuaccacaagugcgacaacgagugcauggagagcguccggaacggcacguacgacuaccccaaguacuccgaggagagcaagcugaaccgcgagaagguggacggggugaagcuggaguccaugggcaucuaccagauccucgccaucuacagcaccgucgccuccagccuggugcugcucgugucccugggcgcgaucagcuucuggaugugcagcaacgggucccugcagugccggaucugcaucuga

SEQ ID NO: 67303 - RNA, 1701 nt, Artificial Sequence
  derived and/or modified CDS sequence (opt1) from hemagglutinin__InfluenzaA__ACV49556
augaaggcccgccugcucauccugcugugcgcccucgcggccaccgacgccgacaccaucugcaucggcuaccacgccaacaacagcacggacaccguggacaccguccuggagaagaacgugaccgugacgcacuccgucaaccugcucgaggacagccacaacgggaagcugugccggcugaagggcaucgcgccccuccagcuggggaagugcaacaucgccggcuggauccuggggaacccggagugcgacucccuccugcccgccagcuccuggagcuacaucguggagacccccaacuccaagaacggcaucugcuaccccggcgacuucaucgacuacgaggagcugcgcgagcagcucagcuccgugagcuccuucgagcgguucgagaucuucccgaaggagagcuccuggcccaagcacagcaccaccaagggggucacggccgccugcucccacgcgggcaagagcuccuucuaccgcaaccugcuguggcucaccaagaaggaggacagcuaccccaagcuguccaacagcuacgugaacaagaaggggaaggaggugcugguccucuggggcgugcaccaccccagcuccagcaaggagcagcagacccuguaccagaacgagaacgccuacguguccgucgugagcuccaacuacaaccggcgcuucaucccggagaucgccgagcggcccgaggugaaggaccaggccgggcgcaucaacuacuacuggacccugcucgagcccggcgacacgaucaucuucgaggccaacggcaaccuggucgcgcccugguacgccuucgcccugagccggggguucggcuccgggaucaucaccagcaacgccuccaugcacgagugcaacaccaagugccagaccccgcagggcgccaucaacagcucccuccccuuccagaacauccaccccgugacgaucggcgagugccccaaguacgucaagagcgcgaagcugcgcauggugaccgggcugcggaacaucccguccauccagagccgcggccucuucggggccaucgccggcuucaucgagggcggguggaccggcaugaucgacgggugguacggcuaccaccaccagaacgagcagggguccggcuacgccgccgaccagaaguccacccagaacgcgaucaacgggaucacgaacaaggugaacagcgugaucgagaagaugaacacccaguucaccgccgucggcaaggaguucaacaaccuggagaagcggauggagaaccugaacaagaagguggacgacggcuuccucgacaucuggaccuacaacgccgagcugcuggugcuccuggagaacgagcgcacgcuggacuuccacgacagcaacgucaagaaccucuacgagaaggugaagauccagcugaagaacaacgccaaggagaucgggaacggcugcuucgaguucuaccacaagugcgacaacgagugcauggaguccguccggaacgggaccuacgacuaccccaaguacagcaaggagagcaagcugaaccgcgagaagaucgacggcgugaagcucgaguccauggggguguaccagauccuggccaucuacagcaccgucgcguccagccuggugcuccuggugucccugggcgccaucagcuucuggaugugcuccaacggcagccuccagugccggaucugcaucuga

SEQ ID NO: 67304 - RNA, 1701 nt, Artificial Sequence
  derived and/or modified CDS sequence (opt1) from hemagglutinin__InfluenzaA__ACV49567
augaaggccaagcugcucauccugcugugcgcccucaccgcgaccgacgccgacacgaucugcaucggcuaccacgccaacaacagcaccgacaccguggacaccguccuggagaagaacgugacggugacccacuccgucaaccugcucgaggacagccacaacgggaagcugugccgccugaagggcaucgcgccccuccagcuggggaagugcaacaucgccggcuggauccuggggaacccggagugcgagucccuccugagcaagcgguccuggagcuacaucgccgagacccccaacuccgagaacggcgccugcuaccccggcgacuucgccgacuacgaggagcugcgcgagcagcucagcuccgugagcuccuucgagcgguucgagaucuuccccaaggagcgcagcuggccgaagcacaacaucacccgcggggugacggccgcgugcucccacgccggcaagagcuccuucuacaagaaccugcuguggcucaccgagaccgacgggagcuaccccaagcuguccaagagcuacgucaacaacaaggagaaggaggugcuggugcucuggggcguccaccaccccuccaacaucgaggaccagaagacccuguaccggaaggagaacgccuacgugagcguggucagcuccaacuacaaccggcgcuucacgcccgagaucgccgagcggccgaaggugcgcgggcaggccggccggaucaacuacuacuggacccugcucgagcccggcgacaccaucaucuucgaggcgaacgggaaccugaucgcccccugguacgccuucgcccugagccgcgacuucggcuccgggaucaucaccagcaacgccuccauggacgagugcgacacgaagugccagacgccccagggcgcgaucaacagcucccucccguuccagaacauccaccccgugaccaucggcgagugccccaaguacgucaagagcaccaagcugcggauggugaccgggcugcgcaacauccccuccauccagagccggggccucuucggggccaucgccggcuucaucgagggcggguggaccggcaugaucgacgggugguacggcuaccaccaccagaacgagcagggguccggcuacgccgccgaccagaaguccacccagaacgcgaucaacuggaucaccaacaaggugaacagcgucaucgagaagaugaacacgcaguucaccgccguggggaaggaguucaacaagcuggagaagcgcauggagaaccugaacaagaagguggacgacggcuuccucgacaucuggaccuacaacgccgagcugcugguccuccuggagaacgagcggacccuggacuuccacgacagcaacgugaagaaccucuacgagaaggugaagaaccagcugcgcaacaacgccaaggagaucggcaacgggugcuucgaguucuaccacaagugcaacaacgagugcauggaguccgucaagaacggcacguacgacuacccgaaguacagcgaggaguccaagcugaaccgggagaagaucgacggggugaagcucgagagcaugggcgucuaccagauccuggccaucuacuccaccguggcgagcagccuggugcuccuggucucccugggggccaucagcuucuggaugugcuccaacggcagccuccagugccgcaucugcaucuga

SEQ ID NO: 67305 - RNA, 1689 nt, Artificial Sequence
  derived and/or modified CDS sequence (opt1) from hemagglutinin__InfluenzaA__ACV49578
auggccaucaucuaccugauccuccuguucaccgccgugcgcggcgaccagaucugcaucggguaccacgcgaacaacagcaccgagaaggucgacacgauccuggagcggaacgugaccgugacccacgccaaggacauccucgagaagacccacaacggcaagcugugcaagcugaacgggaucccgccccucgagcugggcgacugcuccaucgccggguggcugcucggcaaccccgagugcgaccgccugcugcggguccccgaguggagcuacaucauggagaaggagaaccccaaguacucccucugcuacccgggcagcuucaacgacuacgaggagcugaagcaccuccuguccagcgugaagcacuucgagaaggugaagauccugcccaaggaccgcuggacgcagcacaccaccaccgggggcucccgggccugcgccgucagcgggaaccccuccuucuuccgcaacaugguguggcugacgaagaagggccccaacuacccgguggcgaaggggagcuacaacaacaccuccggcgagcagaugcucaucaucuggggcguccaccaccccaucgacgaggccgagcagaucgcccuguaccagaagguggggaccuacgugagcgccuccaccagcacgcugaacaagcgguccacccccgagaucgcggcccgccccgaggucaacggccucgggagccggauggaguucuccuggacccugcuggacaugugggacaccaucaacuucgagagcacgggcaaccucguggccccggaguacggcuucaagaucuccaagcgcgggagcagcggcaucaugaagaccgaggggacccuggagaacugcgagaccaagugccagacgccccugggcgccaucaacaccacccuccccuuccacaacgugcacccccugaccaucggggagugcccgaaguacgucaaguccgagaagcuggugcucgccacgggccugcggaacgugccccagaucgagagccgcggccuguucggggcgaucgccggcuucaucgagggcggguggcaggggauggucgacggcugguacggcuaccaccacuccaacgaccaggggagcggcuacgccgccgacaaggaguccacccagaaggccuucgacgggaucaccaacaaggugaacagcgugaucgagaagaugaacacccaguucgaggcggucggcaaggaguucuccaaccucgagaagcggcuggagaaccugaacaagaagauggaggacggguuccucgacguguggacguacaacgccgagcugcuggugcucauggagaacgagcgcacccuggacuuccacgacagcaacgucaagaaccuguacgacaaggugcggaugcagcuccgcgacaacgucaaggagcugggcaacggcugcuucgaguucuaccacaagugcgacgacgagugcauggacuccgugaagaacgggaccuacgacuaccccaaguacgaggaggagagcaagcugaaccggaacgagaucaagggcgugaagcucuccagcaugggggucuaccagauccuggccaucuacgccaccguggccggcucccugagccucgcgaucaugauggccggcaucuccuucuggaugugcagcaacgggucccugcagugccgcaucugcaucuga

SEQ ID NO: 67306 - RNA, 1689 nt, Artificial Sequence; identical to SEQ ID NO: 67305
  derived and/or modified CDS sequence (opt1) from hemagglutinin__InfluenzaA__ACV49589

SEQ ID NO: 67307 - RNA, 1689 nt, Artificial Sequence
  derived and/or modified CDS sequence (opt1) from hemagglutinin__InfluenzaA__ACV49600
auggccaucaucuaccugauccuccuguucaccgccgugcgcggcgaccagaucugcaucggguaccacgcgaacaacagcaccgagaaggucgacacgauccuggagcggaacgugaccgugacccacgccaaggacauccucgagaagacccacaacggcaagcugugcaagcugaacgggaucccgccccucgagcugggcgacugcuccaucgccggguggcugcucggcaaccccgagugcgaccgccugcugagcguccccgagugguccuacaucauggagaaggagaacccccgggacggccucugcuacccggggagcuucaacgacuacgaggagcugaagcaccuccuguccagcgugaagcacuucgagaaggugaagauccugcccaaggaccgcuggacgcagcacaccaccaccggcgggucccgggccugcgccgucagcggcaaccccuccuucuuccgcaacaugguguggcugacggagaaggggagcaacuaccccguggcgaagggcuccuacaacaacaccagcggcgagcagaugcucaucaucuggggcguccaccacccgaacgacgagaccgagcagcggacccuguaccagaacguggggacguacguguccgucgggaccagcacccugaacaagcgcuccacccccgagaucgccacgcggcccaaggugaacggccagggcgggcgcauggaguucagcuggacccuccuggacaugugggacaccaucaacuucgaguccaccggcaaccugaucgcccccgaguacggguucaagaucagcaagcggggcuccagcgggaucaugaagacggagggcacccucgagaacugcgagaccaagugccagaccccgcugggcgccaucaacacgacccugcccuuccacaacgugcacccccucaccaucggggagugccccaaguacgucaagagcgagaagcuggugcuggcgaccggccuccgcaacgugccgcagaucgagucccgggggcuguucggcgccaucgccggguucaucgagggcggcuggcaggggauggucgacggcugguacggguaccaccacagcaacgaccagggcuccggguacgccgccgacaaggagagcacgcagaaggcguucgacggcaucaccaacaaggugaacuccgugaucgagaagaugaacacccaguucgaggccgucggcaaggaguucagcaaccuggagcgccggcucgagaaccugaacaagaagauggaggacggguuccuggacguguggaccuacaacgccgagcuccuggugcugauggagaacgagcgcacgcucgacuuccacgacuccaacgucaagaaccuguacgacaaggugcggaugcagcugcgcgacaacgucaaggagcucggcaacgggugcuucgaguucuaccacaagugcgacgacgagugcaugaacagcgugaagaacggcaccuacgacuaccccaaguacgaggaggaguccaagcugaaccggaacgagaucaagggcgugaagcugagcuccaugggggucuaccagauccucgccaucuacgccaccguggcgggcagccugucccuggccaucaugauggccgggaucagcuucuggaugugcuccaacggcagccuccagugccgcaucugcaucuga

SEQ ID NO: 67308 - RNA, 1689 nt, Artificial Sequence
  derived and/or modified CDS sequence (opt1) from hemagglutinin__InfluenzaA__ACV49611
auggccaucaucuaccugauccuccuguucaccgccgugcgcggcgaccagaucugcaucggguaccacgcgaacaacagcaccgagaaggucgacacgauccuggagcggaacgugaccgugacccacgccaaggacauccucgagaagacccacaacggcaagcugugcaagcugaacgggaucccgccccucgagcugggcgacugcuccaucgccggguggcugcucggcaaccccgagugcgaccgccugcugagcguccccgagugguccuacaucauggagaaggagaacccccgggacggccucugcuacccggggagcuucaacgacuacgaggagcugaagcaccuccuguccagcgugaagcacuucgagaaggugaagauccugcccaaggaccgcuggacgcagcacaccaccaccggcgggucccgggccugcgccgucagcggcaaccccuccuucuuccgcaacaugguguggcugacggagaaggggagcaacuaccccguggcgaagggcuccuacaacaacaccagcggcgagcagaugcucaucaucuggggcguccaccacccgaacgacgagaccgagcagcggacccuguaccagaacguggggacguacguguccgucgggaccagcacccugaacaagcgcuccacccccaagaucgccacgcggcccaaggugaacggccagggcgggcgcauggaguucagcuggacccuccuggacaugugggacaccaucaacuucgaguccaccggcaaccugaucgcccccgaguacggguucaagaucagcaagcggggcuccagcgggaucaugaagacggagggcacccucgagaacugcgagaccaagugccagaccccgcugggcgccaucaacacgacccugcccuuccacaacgugcacccccucaccaucggggagugccccaaguacgucaagagcgagaagcuggugcuggcgaccggccuccgcaacgugccgcagaucgagucccgggggcuguucggcgccaucgccggguucaucgagggcggcuggcaggggauggucgacggcugguacggguaccaccacagcaacgaccagggcuccggguacgccgccgacaaggagagcacgcagaaggcguucgacggcaucaccaacaaggugaacuccgugaucgagaagaugaacacccaguucgaggccgucggcaaggaguucagcaaccuggagcgccggcucgagaaccugaacaagaagguggaggacggguuccuggacguguggaccuacaacgccgagcuccugguccugauggagaacgagcgcacgcucgacuuccacgacuccaacgugaagaaccuguacgacaagguccggaugcagcugcgcgacaacgugaaggagcucggcaacgggugcuucgaguucuaccacaagugcgacgacgagugcaugaacagcgugaagaacggcaccuacgacuaccccaaguacgaggaggaguccaagcugaaccggaacgagaucaagggcgucaagcugagcuccauggggguguaccagauccucgccaucuacgccaccguggcgggcagccugucccuggccaucaugauggccgggaucagcuucuggaugugcuccaacggcagccuccagugccgcaucugcaucuga

SEQ ID NO: 67309 - RNA, 1701 nt, Artificial Sequence
  derived and/or modified CDS sequence (opt1) from hemagglutinin__InfluenzaA__ACV49633
augaagaccaucaucgcccugagcuacauccucugccugguguucgcccagaagcugcccggcaacgacaacuccaccgcgacgcucugccuggggcaccacgccgucccgaacggcacccuggugaagaccaucaccaacgaccagaucgaggugacgaacgccaccgagcucguccagagcuccagcaccgggcgcaucugcgacagcccccaccggauccuggacggcaagaacugcacccugaucgacgcccuccugggggacccccacugcgacggcuuccagaacaaggagugggaccuguucguggagcgcagcaaggccuacuccaacugcuaccccuacgacgugccggacuacgcgagccuccggucccuggucgccagcuccggcacgcuggaguucaccaacgagggguucaacuggaccggcguggcccaggacgggaccagcuacgccugcaagcgcggcuccgugaaguccuucuucucccggcucaacuggcugcacaagcuggaguacaaguaccccgcgcucaacgucacgaugcccaacaacgacaaguucgacaagcuguacaucuggggcgugcaccaccccagcaccgacuccgugcagaccagccuguacguccaggccuccgggcgcgugaccgugagcacgaagcggagccagcagaccgucaucccgaacaucggcucccgccccugggugcgggggaucagcucccgcaucagcaucuacuggaccaucgugaagcccggcgacauccuccugaucaacuccaccgggaaccugaucgcgccccggggcuacuucaagauccgcagcggcaaguccagcaucaugcgguccgacgccccgaucgggaacugcaacagcgagugcaucacgcccaacggcuccauccccaacgacaagcccuuccagaacgucaaccgcaucaccuacggggccugcccgcgguacgugaagcagaacacccucaagcuggccaccggcaugcgcaacgugcccgagaagcagacgcgggggaucuucggcgccaucgccggcuucaucgagaacgggugggagggcauggucgacgggugguacggcuuccgccaccagaacagcgaggggaccggccaggccgccgaccugaaguccacccaggcggccaucaaccagaucaacggcaagcucaaccggcugaucgagaagaccaacgagaaguucccccagaucgagaaggaguucagcgagguggaggggcgcauccaggaccuggagaaguacguggaggacacgaagaucgaccucugguccuacaacgccgagcugcuggucgcccucgagaaccagcacaccaucgaccugaccgacagcgagaugaacaagcuguucgagcggacccgcaagcagcuccgcgagaacgccgaggacaugggcaacgggugcuucaagaucuaccacaagugcgacaacgcgugcaucggcuccauccggaacgggacguacgaccacgacguguaccgcgacgaggcccugaacaaccgguuccagaucaagggcgucgagcucaagagcggcuacaaggacuggauccuguggaucuccuucgccaucagcugcuuccugcugugcguggugcuccugggguucaucaugugggccugccagaagggcaacauccgcugcaacaucugcaucuga

SEQ ID NO: 67310 - RNA, 1701 nt, Artificial Sequence; identical to SEQ ID NO: 66380
  derived and/or modified CDS sequence (opt1) from hemagglutinin__InfluenzaA__ACV49644

SEQ ID NO: 67311 - RNA, 1698 nt, Artificial Sequence; identical to SEQ ID NO: 67199
  derived and/or modified CDS sequence (opt1) from hemagglutinin__InfluenzaA__ACV49676

SEQ ID NO: 67312 - RNA, 1701 nt, Artificial Sequence; identical to SEQ ID NO: 66680
  derived and/or modified CDS sequence (opt1) from hemagglutinin__InfluenzaA__ACV53450

SEQ ID NO: 67313 - RNA, 1701 nt, Artificial Sequence; identical to SEQ ID NO: 66680
  derived and/or modified CDS sequence (opt1) from hemagglutinin__InfluenzaA__ACV53460

SEQ ID NO: 67314 - RNA, 1701 nt, Artificial Sequence; identical to SEQ ID NO: 66680
  derived and/or modified CDS sequence (opt1) from hemagglutinin__InfluenzaA__ACV53480

SEQ ID NO: 67315 - RNA, 1701 nt, Artificial Sequence
  derived and/or modified CDS sequence (opt1) from hemagglutinin__InfluenzaA__ACV53490
auggaggccauccuggugguccuccuguacaccuucgccaccgcgaacgccgacacgcugugcaucggcuaccacgccaacaacagcaccgacaccguggacaccgugcucgagaagaacgucacggugacccacuccgugaaccugcuggaggacaagcacaacgggaagcucugcaagcugcgcggcgucgcgccccugcaccucgggaagugcgacaucgccggcuggauccuggggaacccggagugcgagagccuguccaccgccagcuccuggagcuacaucguggagaccuccagcuccgacaacggcacgugcuaccccggcgacuucaucgacuacgaggagcuccgggagcagcugagcuccgugagcuccuucgagcgcuucgagaucuuccccaagaccagcuccuggcccaaccacgacagcaacaagggggucaccgccgccugcccgcacgccggcgcgaaguccuucuacaagaaccugaucuggcucgugaagaaggggaacagcuaccccaagcuguccaagagcuacaucaacgacaagggcaaggaggugcugguccucugggggauccaccaccccagcaccuccgccgaccagcagagccuguaccagaacgccgacgccuacguguucgugggcuccagccgguacuccaagaaguucaagcccgagaucgccauccgcccgaagguccgggaccaggagggccgcaugaacuacuacuggacgcugguggagcccggggacaagaucaccuucgaggcgaccggcaaccucguggucccccgguacgccuucgccauggagcgcaacgccgggagcggcaucaucaucuccgacacccccgugcacgacugcaacacgaccugccagaccccgaagggcgccaucaacaccagccugcccuuccacaacauccaccccaucacgaucgggaagugccccaaguacgugaaguccaccaagcugcggcucgcgaccggccugcgcaacgucccgagcauccagucccgggggcuguucggcgccaucgccggguucaucgagggcggcuggaccgggaugguggacggcugguacggguaccaccaccagaacgagcagggcagcggguacgccgccgaccucaaguccacgcagaacgcgaucgacgagaucaccaacaaggugaacagcgucaucgagaagaugaacacccaguucaccgccgugggcaaggaguucaaccaccuggagacgcgcaucgagaaccugaacaagaaggucgacgacggcuuccucgacaucuggaccuacaacgccgagcugcuggugcuccuggagaacgagcggacccuggacuaccacgacuccaacgugaagaaccucuacgagaagguccgcagccagcugaagaacaacgccaaggagaucgggaacggcugcuucgaguucuaccacaagugcgacaacacgugcauggaguccgugaagaacgggaccuacgacuaccccaaguacagcgaggaggccaagcugaaccgggaggagaucgacggcgugaagcucgaguccacccgcaucuaccagauccuggcgaucuacagcaccgucgccagcucccuggugcucguggucagccugggggccaucuccuucuggaugugcagcaacggcucccugcagugccggaucugcaucuga

SEQ ID NO: 67316 - RNA, 1701 nt, Artificial Sequence
  derived and/or modified CDS sequence (opt1) from hemagglutinin__InfluenzaA__ACV53500
auggaggccauccuggugguccuccuguacaccuucgccaccgcgaacgccgacacgcugugcaucggcuaccacgccaacaacagcaccgacaccguggacaccgugcucgagaagaacgucacggugacccacuccgugaaccugcuggaggacaagcacaacgggaagcucugcaagcugcgcggcgucgcgccccugcaccucgggaagugcaacaucgccggcuggauccuggggaacccggagugcgagagccuguccaccgccagcuccuggagcuacaucguggagaccuccagcuccgacaacggcacgugcuaccccggcgacuucaucgacuacgaggagcuccgggagcagcugagcuccgugagcuccuucgagcgcuucgagaucuuccccaagaccagcuccuggcccaaccacgacagcaacaagggggucaccgccgccugcccgcacgccggcgcgaaguccuucuacaagaaccugaucuggcucgugaagaaggggaacagcuaccccaagcuguccaagagcuacaucaacgacaagggcaaggaggugcugguccucugggggauccaccaccccagcaccuccgccgaccagcagagccuguaccagaacgccgacgccuacguguucgugggcuccagccgguacuccaagaaguucaagcccgagaucgccauccgcccgaagguccgggaccaggagggccgcaugaacuacuacuggacgcugguggagcccggggacaagaucaccuucgaggcgaccggcaaccucguggucccccgguacgccuucgccauggagcgcaacgccgggagcggcaucaucaucuccgacacccccgugcacgacugcaacacgaccugccagaccccgaagggcgccaucaacaccagccugcccuuccacaacauccaccccaucacgaucgggaagugccccaaguacgugaaguccaccaagcugcggcucgcgaccggccugcgcaacgucccgagcauccagucccgggggcuguucggcgccaucgccggguucaucgagggcggcuggaccgggaugguggacggcugguacggguaccaccaccagaacgagcagggcagcggguacgccgccgaccucaaguccacgcagaacgcgaucgacgagaucaccaacaaggugaacagcgucaucgagaagaugaacacccaguucaccgccgugggcaaggaguucaaccaccuggagacgcgcaucgagaaccugaacaagaaggucgacgacggcuuccucgacaucuggaccuacaacgccgagcugcuggugcuccuggagaacgagcggacccuggacuaccacgacuccaacgugaagaaccucuacgagaagguccgcagccagcugaagaacaacgccaaggagaucgggaacggcugcuucgaguucuaccacaagugcgacaacacgugcauggaguccgugaagaacgggaccuacgacuaccccaaguacagcgaggaggccaagcugaaccgggaggagaucgacggcgugaagcucgaguccacccgcaucuaccagauccuggcgaucuacagcaccgucgccagcucccuggugcucguggucagccugggggccaucuccuucuggaugugcagcaacggcucccugcagugccggaucugcaucuga

SEQ ID NO: 67317 - RNA, 1701 nt, Artificial Sequence
  derived and/or modified CDS sequence (opt1) from hemagglutinin__InfluenzaA__ACV53880
augaaggccauccuggugguccuccuguacaccuucgccaccgcgaacgccgacacgcugugcaucggcuaccacgccaacaacagcaccgacaccguggacaccgugcucgagaagaacgucacggugacccacuccgugaaccugcuggaggacaagcacaacgggaagcucugcaagcugcgcggcgucgcgccccugcaccucgggaagugcaacaucgccggcuggauccuggggaacccggagugcgagagccuguccaccgccagcuccuggagcuacaucguggagaccuccagcuccgacaacggcacgugcuaccccggcgacuucaucgacuacgaggagcuccgggagcagcugagcuccgugagcuccuucgagcgcuucgagaucuuccccaagaccagcuccuggcccaaccacgacagcaacaagggggucaccaccgccugcccgcacgccggcgccaaguccuucuacaagaaccugaucuggcucgugaagaaggggaacagcuaccccaagcuguccaagagcuacaucaacgacaagggcaaggaggugcugguccucugggggauccaccaccccagcacguccgcggaccagcagagccuguaccagaacgccgacgccuacguguucgugggcaccucccgguacagcaagaaguucaagcccgagaucgccauccgcccgaagguccgggaccaggagggccgcaugaacuacuacuggacccugguggagcccggggacaagaucaccuucgaggccacgggcaaccucguggucccccgguacgcguucgccauggagcgcaacgccggguccggcaucaucaucagcgacacccccgugcacgacugcaacacgaccugccagaccccgaagggcgccaucaacaccucccugcccuuccagaacauccaccccaucaccaucgggaagugccccaaguacgucaagagcaccaagcugcggcucgccacgggccugcgcaacgugccguccauccagagccgggggcuguucggcgcgaucgccggguucaucgagggcggcuggaccgggaugguggacggcugguacggguaccaccaccagaacgagcagggcuccggguacgccgccgaccucaagagcacccagaacgccaucgacgagaucaccaacaaggugaacuccgucaucgagaagaugaacacgcaguucaccgcggugggcaaggaguucaaccaccuggagaagcgcaucgagaaccugaacaagaaggucgacgacggcuuccucgacaucuggaccuacaacgccgagcugcuggugcuccuggagaacgagcggacccuggacuaccacgacagcaacgugaagaaccucuacgagaagguccgcucccagcugaagaacaacgccaaggagaucgggaacggcugcuucgaguucuaccacaagugcgacaacacgugcauggagagcgugaagaacgggaccuacgacuaccccaaguacuccgaggaggccaagcugaaccgggaggagaucgacggcgugaagcucgagagcacccgcaucuaccagauccuggccaucuacuccaccgucgcgagcagccuggugcucguggucucccugggggccaucagcuucuggaugugcuccaacggcagccugcagugccggaucugcaucuga

SEQ ID NO: 67318 - RNA, 1701 nt, Artificial Sequence; identical to SEQ ID NO: 66693
  derived and/or modified CDS sequence (opt1) from hemagglutinin__InfluenzaA__ACV53881

SEQ ID NO: 67319 - RNA, 1701 nt, Artificial Sequence; identical to SEQ ID NO: 66680
  derived and/or modified CDS sequence (opt1) from hemagglutinin__InfluenzaA__ACV53882

SEQ ID NO: 67320 - RNA, 1701 nt, Artificial Sequence; identical to SEQ ID NO: 66693
  derived and/or modified CDS sequence (opt1) from hemagglutinin__InfluenzaA__ACV53883

SEQ ID NO: 67321 - RNA, 1701 nt, Artificial Sequence; identical to SEQ ID NO: 66693
  derived and/or modified CDS sequence (opt1) from hemagglutinin__InfluenzaA__ACV53885

SEQ ID NO: 67322 - RNA, 1701 nt, Artificial Sequence
  derived and/or modified CDS sequence (opt1) from hemagglutinin__InfluenzaA__ACV53899
augaaggccauccuggugguccuccuguacaccuucgccaccgcgaacgccgacacgcugugcaucggcuaccacgccaacaacagcaccgacaccguggacaccgugcucgagaagaacgucacggugacccacuccgugaaccugcuggaggacaagcacaacgggaagcucugcaagcugcgcggcgucgcgccccugcaccucgggaagugcaacaucgccggcuggauccuggggaacccggagugcgagagccuguccaccgccagcuccuggagcuacaucguggagaccuccagcuccgacaacggcacgugcuaccccggcgacuucaucgacuacgaggagcuccgggagcagcugagcuccgugagcuccuucgagcgcuucgagaucuuccccaagaccagcuccuggcccaaccacgacagcaacaagggggucaccgccgccugcccgcacgccggcgcgaaguccuucuacaagaaccugaucuggcucgugaagaaggggaacagcuaccccaagcuguccaagagcuacaucaacgacaagggcaaggaggugcugguccucugggggauccaccaccccagcaccuccgccgaccagcagagccuguaccagaacgccgacgccuacguguucgugggcacgucccgguacagcaagaaguucaagcccgagaucgccauccgcccgaagguccgggaccaggagggccgcaugaacuacuacuggacccugguggagcccggggacaagaucaccuucgaggcgaccggcaaccucguggucccccgguacgccuucgccauggagcgcaacgccggguccggcaucaucaucagcgacacgcccgugcacgacugcaacacgaccugccagaccccggagggcgccaucaacaccucccugcccuuccagaacauccaccccaucaccaucgggaagugccccaaguacgucaagagcaccaagcugcggcucgcgaccggccugcgcaacgugccguccauccagagccgggggcuguucggcgccaucgccggguucaucgagggcggcuggacggggaugguggacggcugguacggguaccaccaccagaacgagcagggcuccggguacgccgccgaccucaagagcacccagaacgcgaucgacgagaucaccaacaaggugaacuccgucaucgagaagaugaacacccaguucacggccgugggcaaggaguucaaccaccuggagaagcgcaucgagaaccugaacaagaaggucgacgacggcuuccucgacaucuggaccuacaacgccgagcugcuggugcuccuggagaacgagcggacccuggacuaccacgacagcaacgugaagaaccucuacgagaagguccgcucccagcugaagaacaacgccaaggagaucgggaacggcugcuucgaguucuaccacaagugcgacaacacgugcauggagagcgugaagaacgggaccuacgacuaccccaaguacuccgaggaggccaagcugaaccgggaggagaucgacggcgugaagcucgagagcacccgcaucuaccagauccuggcgaucuacuccaccgucgccagcagccuggugcucguggucucccugggggccaucagcuucuggaugugcuccaacggcagccugcagugccggaucugcaucuga

SEQ ID NO: 67323 - RNA, 1701 nt, Artificial Sequence; identical to SEQ ID NO: 66693
  derived and/or modified CDS sequence (opt1) from hemagglutinin__InfluenzaA__ACV53909

SEQ ID NO: 67324 - RNA, 1701 nt, Artificial Sequence; identical to SEQ ID NO: 66693
  derived and/or modified CDS sequence (opt1) from hemagglutinin__InfluenzaA__ACV67220

SEQ ID NO: 67325 - RNA, 1701 nt, Artificial Sequence
  derived and/or modified CDS sequence (opt1) from hemagglutinin__InfluenzaA__ACV67221
augaaggccauccuggugguccuccuguacaccuucgccaccgcgaacgccgacacgcugugcaucggcuaccacgccaacaacagcaccgacaccguggacaccgugcucgagaagaacgucacggugacccacuccgugaaccugcuggaggacaagcacaacgggaagcucugcaagcugcgcggcgucgcgccccugcaccucgggaagugcaacaucgccggcuggauccuggggaacccggagugcggcagccuguccaccgccagcuccuggagcuacaucguggagaccuccagcuccgacaacggcacgugcuaccccggggacuucaucgacuacgaggagcuccgggagcagcugagcuccgugagcuccuucgagcgcuucgagaucuuccccaagaccagcuccuggcccaaccacgacagcaacaagggcgucaccgccgccugcccgcacgccggggcgaaguccuucuacaagaaccugaucuggcucgugaagaagggcaacagcuaccccaagcuguccaagagcuacaucaacgacaaggggaaggaggugcugguccucuggggcauccaccaccccagcaccuccgccgaccagcagagccuguaccaguccgccgacgccuacguguucgugggcacgagccgguacuccaagaaguucaagcccgagaucgccauccgcccgaagguccgggaccaggaggggcgcaugaacuacuacuggacccugguggagcccggcgacaagaucaccuucgaggcgaccgggaaccucguggucccccgguacgccuucgccauggagcgcaacgccggcagcggcaucaucaucuccgacacgcccgugcacgacugcaacacgaccugccagaccccgaagggggccaucaacaccagccugcccuuccagaacauccaccccaucaccaucggcaagugccccaaguacgugaaguccaccaagcugcggcucgcgaccgggcugcgcaacgucccgagcauccagucccggggccuguucggggccaucgccggcuucaucgagggcggguggacgggcaugguggacgggugguacggcuaccaccaccagaacgagcaggggagcggcuacgccgccgaccucaaguccacccagaacgcgaucgacgagaucaccaacaaggugaacagcgucaucgagaagaugaacacccaguucacggccgugggcaaggaguucaaccaccuggagaagcgcaucgagaaccugaacaagaaggucgacgacggguuccucgacaucuggaccuacaacgccgagcugcuggugcuccuggagaacgagcggacccuggacuaccacgacuccaacgugaagaaccucuacgagaagguccgcagccagcugaagaacaacgccaaggagaucggcaacgggugcuucgaguucuaccacaagugcgacaacacgugcauggaguccgugaagaacggcaccuacgacuaccccaaguacagcgaggaggccaagcugaaccgggaggagaucgacggggugaagcucgaguccacccgcaucuaccagauccuggcgaucuacagcaccgucgccagcucccuggugcucguggucagccugggcgccaucuccuucuggaugugcagcaacggcucccugcagugccggaucugcaucuga

SEQ ID NO: 67326 - RNA, 1701 nt, Artificial Sequence; identical to SEQ ID NO: 66680
  derived and/or modified CDS sequence (opt1) from hemagglutinin__InfluenzaA__ACV67222

SEQ ID NO: 67327 - RNA, 1701 nt, Artificial Sequence; identical to SEQ ID NO: 66719
  derived and/or modified CDS sequence (opt1) from hemagglutinin__InfluenzaA__ACV67223

SEQ ID NO: 67328 - RNA, 1701 nt, Artificial Sequence; identical to SEQ ID NO: 66935
  derived and/or modified CDS sequence (opt1) from hemagglutinin__InfluenzaA__ACV67224

SEQ ID NO: 67329 - RNA, 1701 nt, Artificial Sequence; identical to SEQ ID NO: 66873
  derived and/or modified CDS sequence (opt1) from hemagglutinin__InfluenzaA__ACV67225

SEQ ID NO: 67330 - RNA, 1701 nt, Artificial Sequence; identical to SEQ ID NO: 66693
  derived and/or modified CDS sequence (opt1) from hemagglutinin__InfluenzaA__ACV67226

SEQ ID NO: 67331 - RNA, 1701 nt, Artificial Sequence
  derived and/or modified CDS sequence (opt1) from hemagglutinin__InfluenzaA__ACV67227
augaaggccauccuggugguccuccuguacaccuucgccaccgcgaacgccgacacgcugugcaucggcuaccacgccaacaacagcaccgacaccguggacaccgugcucgagaagaacgucacggugacccacuccgugaaccugcuggaggacaagcacaacgggaagcucugcaagcugcgcggcgucgcgccccugcaccucgggaagugcaacaucgccggcuggauccuggggaacccggagugcgagagccuguccaccgccagcuccuggagcuacaucguggagaccuccagcuccgacaacggcacgugcuaccccggcgacuucaucgacuacgaggagcuccgggagcagcugagcuccgugagcuccuucgagcgcuucgagaucuuccccaagaccagcuccuggcccaaccacgacagcaacaagggggucaccgccgccugcccgcacgccggcgcgaaguccuucuacaagaaccugaucuggcucgugaagaaggggaacagcuaccccaagcuguccaagagcuacaucaacgacaagggcaaggaggugcugguccucugggggauccaccaccccagcaccuccgccgaccagcagagccuguaccagaacgccgacgccuacguguucgugggcacgucccgguacagcaagaaguucaagcccgagaucgccauccgcccgaagguccgggaccaggagggccgcaugaacuacuacuggacccugguggagcccggggacaagaucaccuucgaggcgaccggcaaccucguggucccccgguacgccuucgccauggagcgcaacgccggguccggcaucaucaucagcaacacgcccgugcacgacugcaacacgaccugccagaccccgaagggcgccaucaacaccucccugcccuuccagaacauccaccccaucaccaucgggaagugccccaaguacgucaagagcaccaagcugcggcucgcgaccggccugcgcaacgugccguccauccagagccgggggcuguucggcgccaucgccggguucaucgagggcggcuggacggggaugguggacggcugguacggguaccaccaccagaacgagcagggcuccggguacgccgccgaccucaagagcacccagaacgcgaucgacgagaucaccaacaaggugaacuccgucaucgagaagaugaacacccaguucacggccgugggcaaggaguucaaccaccuggagaagcgcaucgagaaccugaacaagaaggucgacgacggcuuccucgacaucuggaccuacaacgccgagcugcuggugcuccuggagaacgagcggacccuggacuaccacgacagcaacgugaagaaccucuacgagaagguccgcucccagcugaagaacaacgccaaggagaucgggaacggcugcuucgaguucuaccacaagugcgacaacacgugcauggagagcgugaagaacgggaccuacgacuaccccaaguacuccgaggaggccaagcugaaccgggaggagaucgacggcgugaagcucgagagcacccgcaucuaccagauccuggcgaucuacuccaccgucgccagcagccuggugcucguggucucccugggggccaucagcuucuggaugugcuccaacggcagccugcagugccggaucugcaucuga

SEQ ID NO: 67332 - RNA, 1701 nt, Artificial Sequence; identical to SEQ ID NO: 66935
  derived and/or modified CDS sequence (opt1) from hemagglutinin__InfluenzaA__ACV67228

SEQ ID NO: 67333 - RNA, 1701 nt, Artificial Sequence
  derived and/or modified CDS sequence (opt1) from hemagglutinin__InfluenzaA__ACV67229
augaaggccauccuggugguccuccuguacaccuucgccaccgcgaacgccgacacgcugugcaucggcuaccacgccaacaacagcaccgacaccguggacaccgugcucgagaagaacgucacggugacccacuccgugaaccugcuggaggacaagcacaacgggaagcucugcaagcugcgcggcgucgcgccccugcaccucgggaagugcaacaucgccggcuggauccuggggaacccggagugcgagagccuguccaccgccagcuccuggagcuacaucguggagaccuccagcuccgacaacggcacgugcuaccccggcgacuucaucgacuacgaggagcuccgggagcagcugagcuccgugagcuccuucgagcgcuucgagaucuuccccaagaccagcuccuggcccaaccacgacagcaacaagggggucaccgccgccugcccgcacgccggcgcgaaguccuucuacaagaaccugaucuggcucgugaagaaggggaacagcuaccccaagcuguccaagagcuacaucaacgacaagggcaaggaggugcugguccucugggggauccaccaccccagcaccuccgccgaccagcagagccuguaccagaacgccgacgccuacguguucgugggcacgucccgguacagcaagaaguucaagcccgagaucgccauccgcccgaagguccgggaccaggagggccgcaugaacuacuacuggacccugguggagcccggggacaagaucaccuucgaggcgaccggcaaccucguggucccccgguacgccuucgccauggagcgcaacgccggguccggcaucaucaucagcgacacgcccgugcacgacugcaacacgaccugccagaccccgaagggcgccaucaacaccucccugcccuuccagaacauccaccccaucaccaucgggaagugccccaaguacgucaagagcaccaagcugcggcucgcgaccggccugcgcaacgugccguccauccagagccgggggcuguucggcgccaucgccggguucaucgagggcggcuggacggggaugguggacggcugguacggguaccaccaccagaacgagcagggcuccggguacgccgccgaccucaagagcacccagaaccccaucgacgagaucaccaacaaggugaacuccgucaucgagaagaugaacacccaguucacggcggugggcaaggaguucaaccaccuggagaagcgcaucgagaaccugaacaagaaggucgacgacggcuuccucgacaucuggaccuacaacgccgagcugcuggugcuccuggagaacgagcggacccuggacuaccacgacagcaacgugaagaaccucuacgagaagguccgcucccagcugaagaacaacgccaaggagaucgggaacggcugcuucgaguucuaccacaagugcgacaacacgugcauggagagcgugaagaacgggaccuacgacuaccccaaguacuccgaggaggccaagcugaaccgggaggagaucgacggcgugaagcucgagagcacccgcaucuaccagauccuggccaucuacuccaccgucgcgagcagccuggugcucguggucucccugggggccaucagcuucuggaugugcuccaacggcagccugcagugccggaucugcaucuga

SEQ ID NO: 67334 - RNA, 1701 nt, Artificial Sequence; identical to SEQ ID NO: 66680
  derived and/or modified CDS sequence (opt1) from hemagglutinin__InfluenzaA__ACV67230

SEQ ID NO: 67335 - RNA, 1701 nt, Artificial Sequence; identical to SEQ ID NO: 66693
  derived and/or modified CDS sequence (opt1) from hemagglutinin__InfluenzaA__ACV67231

SEQ ID NO: 67336 - RNA, 1701 nt, Artificial Sequence; identical to SEQ ID NO: 66693
  derived and/or modified CDS sequence (opt1) from hemagglutinin__InfluenzaA__ACV67232

SEQ ID NO: 67337 - RNA, 1701 nt, Artificial Sequence; identical to SEQ ID NO: 66680
  derived and/or modified CDS sequence (opt1) from hemagglutinin__InfluenzaA__ACV67233

SEQ ID NO: 67338 - RNA, 1701 nt, Artificial Sequence; identical to SEQ ID NO: 66935
  derived and/or modified CDS sequence (opt1) from hemagglutinin__InfluenzaA__ACV67234

SEQ ID NO: 67339 - RNA, 1701 nt, Artificial Sequence
  derived and/or modified CDS sequence (opt1) from hemagglutinin__InfluenzaA__ACV67235
augaaggccauccuggugguccuccuguacaccuucgccaccgcgaacgccgacacgcugugcaucggcuaccacgccaacaacagcaccgacaccguggacaccgugcucgagaagaacgucacggugacccacuccgugaaccugcuggaggacaagcacaacgggaagcucugcaagcugcgcggcgucgcgccccugcaccucgggaagugcaacaucgccggcuggauccuggggaacccggagugcgagagccuguccaccgccagcuccuggagcuacaucguggagaccuccagcuccgacaacggcacgugcuaccccggcgacuucaucgacuacgaggagcuccgggagcagcugagcuccgugagcuccuucgagcgcuucgagaucuuccccaagaccagcuccuggcccaaccacgacagcaacaagggggucaccgccgccugcccgcacgccggcgcgaaguccuucuacaagaaccugaucuggcucgugaagaaggggaacagcuaccccaagcuguccaagagcuacaucaacgacaagggcaaggaggugcugguccucugggggauccaccaccccagcaccuccgccgaccagcagagccuguaccagaacgccgacgccuacguguucgugggcuccagccgguacuccaagaaguucaagcccgagaucgccauccgcccgaagguccgggaccaggagggccgcaugaacuacuacuggacgcugguggagcccggggacaagaucaccuucgaggcgaccggcaaccucguggucccccgguacgccuucgccauggagcgcaacgccgggagcggcaucaucaucuccgacacccccgugcacgacugcaacacgaccugccagaccccgaagggcgccaucaacaccagccugcccuuccagaacauccaccccaucacgaucgggaagugccccaaguacgugaaguccaccaagcugcggcucgcgaccggccugcgcaacgucccgagcauccagucccgggggcuguucggcgccaucgccggguucaucgagggcggcuggaccgggaugguggacggcugguacggguaccaccaccagaacgagcagggcagcggguacgccgccgaccucaaguccacgcagaacgcgaucgacgagaucaccaacaaggugaacagcgucaucgagaagaugaacacccaguucaccgccgugggcaaggaguucaaccaccuggagaagcgcaucgagaaccugaacaagaaggucgacgacggcuuccucgacaucuggacguacaacgccgagcugcuggugcuccuggagaacgagcggacccuggacuaccacgacuccaacgugaagaaccucuacgagaagguccgcagccagcugaagaacaacgccaacgagaucgggaacggcugcuucgaguucuaccacaagugcgacaacacgugcauggaguccgugaagaacgggaccuacgacuaccccaaguacagcgaggaggccaagcugaaccgggaggagaucgacggcgugaagcucgaguccacccgcaucuaccagauccuggcgaucuacagcaccgucgccagcucccuggugcucguggucagccugggggccaucuccuucuggaugugcagcaacggcucccugcagugccggaucugcaucuga

SEQ ID NO: 67340 - RNA, 1701 nt, Artificial Sequence; identical to SEQ ID NO: 66937
  derived and/or modified CDS sequence (opt1) from hemagglutinin__InfluenzaA__ACV67236

SEQ ID NO: 67341 - RNA, 1701 nt, Artificial Sequence; identical to SEQ ID NO: 66680
  derived and/or modified CDS sequence (opt1) from hemagglutinin__InfluenzaA__ACV67238

SEQ ID NO: 67342 - RNA, 1701 nt, Artificial Sequence
  derived and/or modified CDS sequence (opt1) from hemagglutinin__InfluenzaA__ACV67239
augaaggccauccuggugguccuccuguacaccuucaccacggccaacgcggacacccugugcaucggcuaccacgccaacaacagcaccgacaccguggacacggugcucgagaagaacgucaccgugacccacuccgugaaccugcuggaggacaagcacaacgggaagcucugcaagcugcgcggcgucgcgccccugcaccucgggaagugcaacaucgccggcuggauccuggggaacccggagugcgagagccuguccaccgccagcuccuggagcuacaucguggagacguccagcuccgacaacgggaccugcuaccccggcgacuucaucgacuacgaggagcuccgggagcagcugagcuccgugagcuccuucgagcgcuucgagaucuuccccaagaccagcuccuggcccaaccacgacagcaacaagggcgucaccgccgccugcccgcacgccggcgccaaguccuucuacaagaaccugaucuggcucgugaagaaggggaacagcuaccccaagcuguccaagagcuacaucaacgacaagggcaaggaggugcugguccucugggggauccaccaccccagcacguccgcggaccagcagagccuguaccagaacgccgacgccuacguguucgugggcuccagccgguacuccaagaaguucaagcccgagaucgccauccgcccgaagguccgggaccaggagggccgcaugaacuacuacuggacccugguggagcccggggacaagaucaccuucgaggccaccggcaaccucguggucccccgguacgcguucgccauggagcgcaacgccgggagcggcaucaucaucuccgacacgcccgugcacgacugcaacacgaccugccagaccccgaagggcgccaucaacaccagccugcccuuccagaacauccaccccaucaccaucgggaagugccccaaguacgugaaguccaccaagcugcggcucgccaccggccugcgcaacgucccgagcauccagucccgggggcuguucggcgcgaucgccggguucaucgagggcggcuggacggggaugguggacggcugguacggguaccaccaccagaacgagcagggcagcggguacgccgccgaccucaaguccacccagaacgccaucgacgagaucaccaacaaggugaacagcgucaucgagaagaugaacacccaguucacggcggugggcaaggaguucaaccaccuggagaagcgcaucgagaaccugaacaagaaggucgacgacggcuuccucgacaucuggaccuacaacgccgagcugcuggugcuccuggagaacgagcggacccuggacuaccacgacuccaacgugaagaaccucuacgagaagguccgcagccagcugaagaacaacgccaaggagaucgggaacggcugcuucgaguucuaccacaagugcaacaacacgugcauggaguccgugaagaacgggaccuacgacuaccccaaguacagcgaggaggccaagcugaaccgggaggagaucgacggcgugaagcucgaguccacccgcaucuaccagauccuggccaucuacagcaccgucgcgagcucccuggugcucguggucagccugggggccaucuccuucuggaugugcagcaacggcucccugcagugccggaucugcaucuga

SEQ ID NO: 67343 - RNA, 1701 nt, Artificial Sequence; identical to SEQ ID NO: 66937
  derived and/or modified CDS sequence (opt1) from hemagglutinin__InfluenzaA__ACV67240

SEQ ID NO: 67344 - RNA, 1701 nt, Artificial Sequence
  derived and/or modified CDS sequence (opt1) from hemagglutinin__InfluenzaA__ACV67241
augaaggccauccuggugguccuccuguacaccuucgccaccgcgaacgccgacacgcugugcaucggcuaccacgccaacaacagcaccgacaccguggacaccgugcucgagaagaacgucacggugacccacuccgugaaccugcuggaggacaagcacaacgggaagcucugcaagcugcgcggcgucgcgccccugcaccucgggaagugcaacaucgccggcuggauccuggggaacccggagugcgagagccuguccaccgccagcuccuggagcuacaucguggagaccuccagcuccgacaacggcacgugcuaccccggcgacuucaucgacuacgaggagcuccgggagcagcugagcuccgugagcuccuucgagcgcuucgagaucuuccccaagaccagcuccuggcccaaccacgacagcaacaagggggucaccgccgccugcccgcacgccggcgcgaaguccuucuacaagaaccugaucuggcucgugaagaacgggaacagcuaccccaagcuguccaagagcuacaucaacgacaagggcaaggaggugcugguccucugggggauccaccaccccagcaccuccgccgaccagcagagccuguaccagaacgccgacgccuacguguucgugggcacgucccgguacagcaagaaguucaagcccgagaucgccauccgcccgaagguccgggaccaggagggccgcaugaacuacuacuggacccugguggagcccggggacaagaucaccuucgaggcgaccggcaaccucguggucccccgguacgccuucgccauggagcgcaacgccggguccggcaucaucaucagcgacacgcccgugcacgacugcaacacgaccugccagaccccgaagggcgccaucaacaccucccugcccuuccagaacauccaccccaucaccaucgggaagugccccaaguacgucaagagcaccaagcugcggcucgcgaccggccugcgcaacgugccguccauccagagccgggggcuguucggcgccaucgccggguucaucgagggcggcuggacggggaugguggacggcugguacggguaccaccaccagaacgagcagggcuccggguacgccgccgaccucaagagcacccagaacgcgaucgacgagaucaccaacaaggugaacuccgucaucgagaagaugaacacccaguucacggccgugggcaaggaguucaaccaccuggagaagcgcaucgagaaccugaacaagaaggucgacgacggcuuccucgacaucuggaccuacaacgccgagcugcuggugcuccuggagaacgagcggacccuggacuaccacgacagcaacgugaagaaccucuacgagaagguccgcucccagcugaagaacaacgccaaggagaucgggaacggcugcuucgaguucuaccacaagugcgacaacacgugcauggagagcgugaagaacgggaccuacgacuaccccaaguacuccgaggaggccaagcugaaccgggaggagaucgacggcgugaagcucgagagcacccgcaucuaccagauccuggcgaucuacuccaccgucgccagcagccuggugcucguggucucccugggggccaucagcuucuggaugugcuccaacggcagccugcagugccggaucugcaucuga

SEQ ID NO: 67345 - RNA, 1701 nt, Artificial Sequence; identical to SEQ ID NO: 66935
  derived and/or modified CDS sequence (opt1) from hemagglutinin__InfluenzaA__ACV67242

SEQ ID NO: 67346 - RNA, 1701 nt, Artificial Sequence; identical to SEQ ID NO: 66873
  derived and/or modified CDS sequence (opt1) from hemagglutinin__InfluenzaA__ACV67244

SEQ ID NO: 67347 - RNA, 1701 nt, Artificial Sequence; identical to SEQ ID NO: 66786
  derived and/or modified CDS sequence (opt1) from hemagglutinin__InfluenzaA__ACV67246

SEQ ID NO: 67348 - RNA, 1701 nt, Artificial Sequence; identical to SEQ ID NO: 67317
  derived and/or modified CDS sequence (opt1) from hemagglutinin__InfluenzaA__ACV67247

SEQ ID NO: 67349 - RNA, 1701 nt, Artificial Sequence; identical to SEQ ID NO: 66680
  derived and/or modified CDS sequence (opt1) from hemagglutinin__InfluenzaA__ACV70073

SEQ ID NO: 67350 - RNA, 1701 nt, Artificial Sequence; identical to SEQ ID NO: 66680
  derived and/or modified CDS sequence (opt1) from hemagglutinin__InfluenzaA__ACV70093

SEQ ID NO: 67351 - RNA, 1701 nt, Artificial Sequence; identical to SEQ ID NO: 66680
  derived and/or modified CDS sequence (opt1) from hemagglutinin__InfluenzaA__ACV70103

SEQ ID NO: 67352 - RNA, 1701 nt, Artificial Sequence; identical to SEQ ID NO: 66680
  derived and/or modified CDS sequence (opt1) from hemagglutinin__InfluenzaA__ACV70113

SEQ ID NO: 67353 - RNA, 1701 nt, Artificial Sequence; identical to SEQ ID NO: 66680
  derived and/or modified CDS sequence (opt1) from hemagglutinin__InfluenzaA__ACV70123

SEQ ID NO: 67354 - RNA, 1701 nt, Artificial Sequence; identical to SEQ ID NO: 66680
  derived and/or modified CDS sequence (opt1) from hemagglutinin__InfluenzaA__ACV70154

SEQ ID NO: 67355 - RNA, 1701 nt, Artificial Sequence
  derived and/or modified CDS sequence (opt1) from hemagglutinin__InfluenzaA__ACV70164
augaaggccauccuggugguccuccuguacaccuucaccacggccaacgcggacacccugugcaucggcuaccacgccaacaacagcaccgacaccguggacacggugcucgagaagaacgucaccgugacccacuccgugaaccugcuggaggacaagcacaacgggaagcucugcaagcugcgcggcgucgcgccccugcaccucgggaagugcaacaucgccggcuggauccuggggaacccggagugcgagagccuguccaccgccagcuccuggagcuacaucguggagacguccagcuccgacaacgggaccugcuaccccggcgacuucaucgacuacgaggagcuccgggagcagcugagcuccgugagcuccuucgagcgcuucgagaucuuccccaagaccagcuccuggcccaaccacgacagcaacaagggggucaccgccgccugcccgcacgccggcgccaaguccuucuacaagaaccugaucuggcucgugaagaaggggaacagcuaccccaagcuguccaagagcuacaucaacgacaagggcaaggaggugcugguccucugggggauccaccaccccagcacguccgcggaccagcagagccuguaccagaacgccgacgccuacguguucgugggcuccagccgguacuccaagaaguucaagcccgagaucgccauccgcccgaagguccgggaccaggagggccgcaugaacuacuacuggacccugguggagcccggggacaagaucaccuucgaggccaccggcaaccucguggucccccgguacgcguucgccauggagcgcaacgccgggagcggcaucaucaucuccgacacgcccgugcacgacugcaacacgaccugccagacccugaagggcgccaucaacaccagccugccguuccagaacauccaccccaucaccaucgggaagugccccaaguacgugaaguccaccaagcuccggcuggccaccggccugcgcaacguccccagcauccagucccggggccucuucggcgcgaucgccggguucaucgagggcggcuggacggggaugguggacggcugguacggguaccaccaccagaacgagcagggcagcggguacgccgccgaccugaaguccacccagaacgccaucgacgagaucaccaacaaggugaacagcgucaucgagaagaugaacacccaguucacggcggugggcaaggaguucaaccaccuggagaagcgcaucgagaaccucaacaagaaggucgacgacggcuuccuggacaucuggaccuacaacgccgagcugcucgugcugcuggagaacgagcggacccucgacuaccacgacuccaacgugaagaaccuguacgagaagguccgcagccagcugaagaacaacgccaaggagaucgggaacggcugcuucgaguucuaccacaagugcgacaacacgugcauggaguccgugaagaacgggaccuacgacuacccgaaguacagcgaggaggccaagcucaaccgggaggagaucgacggcgugaagcuggaguccacccgcaucuaccagauccuggccaucuacagcaccgucgcgagcucccucgugcugguggucagccugggggccaucuccuucuggaugugcagcaacggcucccuccagugccggaucugcaucuga

SEQ ID NO: 67356 - RNA, 1701 nt, Artificial Sequence; identical to SEQ ID NO: 66680
  derived and/or modified CDS sequence (opt1) from hemagglutinin__InfluenzaA__ACV70174

SEQ ID NO: 67357 - RNA, 1701 nt, Artificial Sequence; identical to SEQ ID NO: 66680
  derived and/or modified CDS sequence (opt1) from hemagglutinin__InfluenzaA__ACV70184

SEQ ID NO: 67358 - RNA, 1701 nt, Artificial Sequence; identical to SEQ ID NO: 66680
  derived and/or modified CDS sequence (opt1) from hemagglutinin__InfluenzaA__ACV70194

SEQ ID NO: 67359 - RNA, 1701 nt, Artificial Sequence; identical to SEQ ID NO: 66680
  derived and/or modified CDS sequence (opt1) from hemagglutinin__InfluenzaA__ACV70204

SEQ ID NO: 67360 - RNA, 1701 nt, Artificial Sequence; identical to SEQ ID NO: 66680
  derived and/or modified CDS sequence (opt1) from hemagglutinin__InfluenzaA__ACV70214

SEQ ID NO: 67361 - RNA, 1701 nt, Artificial Sequence; identical to SEQ ID NO: 66680
  derived and/or modified CDS sequence (opt1) from hemagglutinin__InfluenzaA__ACV70224

SEQ ID NO: 67362 - RNA, 1701 nt, Artificial Sequence; identical to SEQ ID NO: 66680
  derived and/or modified CDS sequence (opt1) from hemagglutinin__InfluenzaA__ACV70234

SEQ ID NO: 67363 - RNA, 1701 nt, Artificial Sequence; identical to SEQ ID NO: 66680
  derived and/or modified CDS sequence (opt1) from hemagglutinin__InfluenzaA__ACV70254

SEQ ID NO: 67364 - RNA, 1701 nt, Artificial Sequence; identical to SEQ ID NO: 66680
  derived and/or modified CDS sequence (opt1) from hemagglutinin__InfluenzaA__ACV70264

SEQ ID NO: 67365 - RNA, 1701 nt, Artificial Sequence; identical to SEQ ID NO: 66680
  derived and/or modified CDS sequence (opt1) from hemagglutinin__InfluenzaA__ACV70274

SEQ ID NO: 67366 - RNA, 1701 nt, Artificial Sequence; identical to SEQ ID NO: 66680
  derived and/or modified CDS sequence (opt1) from hemagglutinin__InfluenzaA__ACV70284

SEQ ID NO: 67367 - RNA, 1701 nt, Artificial Sequence; identical to SEQ ID NO: 66680
  derived and/or modified CDS sequence (opt1) from hemagglutinin__InfluenzaA__ACV70294

SEQ ID NO: 67368 - RNA, 1701 nt, Artificial Sequence; identical to SEQ ID NO: 66680
  derived and/or modified CDS sequence (opt1) from hemagglutinin__InfluenzaA__ACV70304

SEQ ID NO: 67369 - RNA, 1701 nt, Artificial Sequence; identical to SEQ ID NO: 67355
  derived and/or modified CDS sequence (opt1) from hemagglutinin__InfluenzaA__ACV70314

SEQ ID NO: 67370 - RNA, 1701 nt, Artificial Sequence
  derived and/or modified CDS sequence (opt1) from hemagglutinin__InfluenzaA__ACV70324
augaaggccauccuggugguccuccuguacaccuucgccaccgcgaacgccgacacgcugugcaucggcuaccacgccaacaacagcaccgacaccguggacaccgugcucgagaagaacgucacggugacccacuccgugaaccugcuggaggacaagcacaacgggaagcucugcaagcugcgcggcgucgcgccccugcaccucgggaagugcaacaucgccggcuggauccuggggaacccggagugcgagagccuguucaccgcguccagcugguccuacaucguggagaccagcuccagcgacaacggcacgugcuaccccggcgacuucaucgacuacgaggagcuccgggagcagcuguccagcguguccagcuucgagcgcuucgagaucuuccccaagaccuccagcuggcccaaccacgacuccaacaagggggucaccgccgccugcccgcacgccggcgccaagagcuucuacaagaaccugaucuggcucgugaagaaggggaacuccuaccccaagcugagcaaguccuacaucaacgacaagggcaaggaggugcugguccucugggggauccaccaccccagcaccagcgccgaccagcagucccuguaccagaacgccgacgccuacguguucgugggcagcucccgguacagcaagaaguucaagcccgagaucgccauccgcccgaagguccgggaccaggagggccgcaugaacuacuacuggacgcugguggagcccggggacaagaucaccuucgaggcgaccggcaaccucguggucccccgguacgccuucgccauggagcgcaacgccggguccggcaucaucaucagcgacacccccgugcacgacugcaacacgaccugccagaccccgaagggcgccaucaacaccucccugcccuuccagaacauccaccccaucacgaucgggaagugccccaaguacgucaagagcaccaagcugcggcucgcgaccggccugcgcaacgugccguccauccagagccgggggcuguucggcgccaucgccggguucaucgagggcggcuggaccgggaugguggacggcugguacggguaccaccaccagaacgagcagggcuccggguacgccgccgaccucaagagcacgcagaacgcgaucgacgagaucaccaacaaggugaacuccgucaucgagaagaugaacacccaguucaccgccgugggcaaggaguucaaccaccuggagaagcgcaucgagaaccugaacaagaaggucgacgacggcuuccucgacaucuggacguacaacgccgagcugcuggugcuccuggagaacgagcggacccuggacuaccacgacagcaacgugaagaaccucuacgagaagguccgcucccagcugaagaacaacgccaaggagaucgggaacggcugcuucgaguucuaccacaagugcgacaacacgugcauggagagcgugaagaacgggaccuacgacuaccccaaguacuccgaggaggccaagcugaaccgggaggagaucgacggcgugaagcucgagagcacccgcaucuaccagauccuggcgaucuacuccaccgucgccagcagccuggugcucguggucucccugggggccaucagcuucuggaugugcuccaacggcagccugcagugccggaucugcaucuga

SEQ ID NO: 67371 - RNA, 1701 nt, Artificial Sequence; identical to SEQ ID NO: 66680
  derived and/or modified CDS sequence (opt1) from hemagglutinin__InfluenzaA__ACV70334

SEQ ID NO: 67372 - RNA, 1701 nt, Artificial Sequence; identical to SEQ ID NO: 66680
  derived and/or modified CDS sequence (opt1) from hemagglutinin__InfluenzaA__ACV70344

SEQ ID NO: 67373 - RNA, 1701 nt, Artificial Sequence; identical to SEQ ID NO: 66680
  derived and/or modified CDS sequence (opt1) from hemagglutinin__InfluenzaA__ACV70354

SEQ ID NO: 67374 - RNA, 1701 nt, Artificial Sequence; identical to SEQ ID NO: 66680
  derived and/or modified CDS sequence (opt1) from hemagglutinin__InfluenzaA__ACV70364

SEQ ID NO: 67375 - RNA, 1701 nt, Artificial Sequence; identical to SEQ ID NO: 66680
  derived and/or modified CDS sequence (opt1) from hemagglutinin__InfluenzaA__ACV70374

SEQ ID NO: 67376 - RNA, 1701 nt, Artificial Sequence; identical to SEQ ID NO: 66680
  derived and/or modified CDS sequence (opt1) from hemagglutinin__InfluenzaA__ACV70384

SEQ ID NO: 67377 - RNA, 1701 nt, Artificial Sequence; identical to SEQ ID NO: 66680
  derived and/or modified CDS sequence (opt1) from hemagglutinin__InfluenzaA__ACV70394

SEQ ID NO: 67378 - RNA, 1701 nt, Artificial Sequence; identical to SEQ ID NO: 66680
  derived and/or modified CDS sequence (opt1) from hemagglutinin__InfluenzaA__ACV70404

SEQ ID NO: 67379 - RNA, 1701 nt, Artificial Sequence; identical to SEQ ID NO: 67355
  derived and/or modified CDS sequence (opt1) from hemagglutinin__InfluenzaA__ACV70414

SEQ ID NO: 67380 - RNA, 1701 nt, Artificial Sequence; identical to SEQ ID NO: 66680
  derived and/or modified CDS sequence (opt1) from hemagglutinin__InfluenzaA__ACV70424

SEQ ID NO: 67381 - RNA, 1701 nt, Artificial Sequence; identical to SEQ ID NO: 66680
  derived and/or modified CDS sequence (opt1) from hemagglutinin__InfluenzaA__ACV70434

SEQ ID NO: 67382 - RNA, 1701 nt, Artificial Sequence; identical to SEQ ID NO: 66680
  derived and/or modified CDS sequence (opt1) from hemagglutinin__InfluenzaA__ACV70444

SEQ ID NO: 67383 - RNA, 1701 nt, Artificial Sequence; identical to SEQ ID NO: 66680
  derived and/or modified CDS sequence (opt1) from hemagglutinin__InfluenzaA__ACV70454

SEQ ID NO: 67384 - RNA, 1701 nt, Artificial Sequence; identical to SEQ ID NO: 66680
  derived and/or modified CDS sequence (opt1) from hemagglutinin__InfluenzaA__ACV70464

SEQ ID NO: 67385 - RNA, 1701 nt, Artificial Sequence; identical to SEQ ID NO: 66680
  derived and/or modified CDS sequence (opt1) from hemagglutinin__InfluenzaA__ACV70474

SEQ ID NO: 67386 - RNA, 1701 nt, Artificial Sequence; identical to SEQ ID NO: 66680
  derived and/or modified CDS sequence (opt1) from hemagglutinin__InfluenzaA__ACV70484

SEQ ID NO: 67387 - RNA, 1701 nt, Artificial Sequence; identical to SEQ ID NO: 66680
  derived and/or modified CDS sequence (opt1) from hemagglutinin__InfluenzaA__ACV70494

SEQ ID NO: 67388 - RNA, 1701 nt, Artificial Sequence; identical to SEQ ID NO: 66680
  derived and/or modified CDS sequence (opt1) from hemagglutinin__InfluenzaA__ACV70504

SEQ ID NO: 67389 - RNA, 1701 nt, Artificial Sequence; identical to SEQ ID NO: 66680
  derived and/or modified CDS sequence (opt1) from hemagglutinin__InfluenzaA__ACV70514

SEQ ID NO: 67390 - RNA, 1701 nt, Artificial Sequence; identical to SEQ ID NO: 66680
  derived and/or modified CDS sequence (opt1) from hemagglutinin__InfluenzaA__ACV70524

SEQ ID NO: 67391 - RNA, 1701 nt, Artificial Sequence; identical to SEQ ID NO: 66873
  derived and/or modified CDS sequence (opt1) from hemagglutinin__InfluenzaA__ACV70534

SEQ ID NO: 67392 - RNA, 1701 nt, Artificial Sequence; identical to SEQ ID NO: 66680
  derived and/or modified CDS sequence (opt1) from hemagglutinin__InfluenzaA__ACV70544

SEQ ID NO: 67393 - RNA, 1701 nt, Artificial Sequence; identical to SEQ ID NO: 66680
  derived and/or modified CDS sequence (opt1) from hemagglutinin__InfluenzaA__ACV70564

SEQ ID NO: 67394 - RNA, 1701 nt, Artificial Sequence; identical to SEQ ID NO: 66680
  derived and/or modified CDS sequence (opt1) from hemagglutinin__InfluenzaA__ACV70584

SEQ ID NO: 67395 - RNA, 1701 nt, Artificial Sequence; identical to SEQ ID NO: 67355
  derived and/or modified CDS sequence (opt1) from hemagglutinin__InfluenzaA__ACV70594

SEQ ID NO: 67396 - RNA, 1701 nt, Artificial Sequence; identical to SEQ ID NO: 66680
  derived and/or modified CDS sequence (opt1) from hemagglutinin__InfluenzaA__ACV70604

SEQ ID NO: 67397 - RNA, 1701 nt, Artificial Sequence; identical to SEQ ID NO: 66680
  derived and/or modified CDS sequence (opt1) from hemagglutinin__InfluenzaA__ACV70614

SEQ ID NO: 67398 - RNA, 1701 nt, Artificial Sequence; identical to SEQ ID NO: 66680
  derived and/or modified CDS sequence (opt1) from hemagglutinin__InfluenzaA__ACV70624

SEQ ID NO: 67399 - RNA, 1701 nt, Artificial Sequence; identical to SEQ ID NO: 66680
  derived and/or modified CDS sequence (opt1) from hemagglutinin__InfluenzaA__ACV70634

SEQ ID NO: 67400 - RNA, 1701 nt, Artificial Sequence; identical to SEQ ID NO: 66680
  derived and/or modified CDS sequence (opt1) from hemagglutinin__InfluenzaA__ACV70644

SEQ ID NO: 67401 - RNA, 1701 nt, Artificial Sequence; identical to SEQ ID NO: 66680
  derived and/or modified CDS sequence (opt1) from hemagglutinin__InfluenzaA__ACV70654

SEQ ID NO: 67402 - RNA, 1701 nt, Artificial Sequence; identical to SEQ ID NO: 66680
  derived and/or modified CDS sequence (opt1) from hemagglutinin__InfluenzaA__ACV70664

SEQ ID NO: 67403 - RNA, 1701 nt, Artificial Sequence; identical to SEQ ID NO: 66680
  derived and/or modified CDS sequence (opt1) from hemagglutinin__InfluenzaA__ACV70674

SEQ ID NO: 67404 - RNA, 1701 nt, Artificial Sequence; identical to SEQ ID NO: 66680
  derived and/or modified CDS sequence (opt1) from hemagglutinin__InfluenzaA__ACV70684

SEQ ID NO: 67405 - RNA, 1701 nt, Artificial Sequence; identical to SEQ ID NO: 66680
  derived and/or modified CDS sequence (opt1) from hemagglutinin__InfluenzaA__ACV70694

SEQ ID NO: 67406 - RNA, 1701 nt, Artificial Sequence; identical to SEQ ID NO: 66680
  derived and/or modified CDS sequence (opt1) from hemagglutinin__InfluenzaA__ACV70704

SEQ ID NO: 67407 - RNA, 1701 nt, Artificial Sequence; identical to SEQ ID NO: 66680
  derived and/or modified CDS sequence (opt1) from hemagglutinin__InfluenzaA__ACV70714

SEQ ID NO: 67408 - RNA, 1701 nt, Artificial Sequence; identical to SEQ ID NO: 66680
  derived and/or modified CDS sequence (opt1) from hemagglutinin__InfluenzaA__ACV70724

SEQ ID NO: 67409 - RNA, 1701 nt, Artificial Sequence; identical to SEQ ID NO: 67317
  derived and/or modified CDS sequence (opt1) from hemagglutinin__InfluenzaA__ACV70734

SEQ ID NO: 67410 - RNA, 1701 nt, Artificial Sequence; identical to SEQ ID NO: 66680
  derived and/or modified CDS sequence (opt1) from hemagglutinin__InfluenzaA__ACV70744

SEQ ID NO: 67411 - RNA, 1701 nt, Artificial Sequence; identical to SEQ ID NO: 66680
  derived and/or modified CDS sequence (opt1) from hemagglutinin__InfluenzaA__ACV70754

SEQ ID NO: 67412 - RNA, 1701 nt, Artificial Sequence; identical to SEQ ID NO: 66680
  derived and/or modified CDS sequence (opt1) from hemagglutinin__InfluenzaA__ACV70764

SEQ ID NO: 67413 - RNA, 1701 nt, Artificial Sequence; identical to SEQ ID NO: 66680
  derived and/or modified CDS sequence (opt1) from hemagglutinin__InfluenzaA__ACV70784

SEQ ID NO: 67414 - RNA, 1701 nt, Artificial Sequence
  derived and/or modified CDS sequence (opt1) from hemagglutinin__InfluenzaA__ACV70794
augaaggccauccuggugguccuccuguacaccuucgccaccgcgaacgccgacacgcugugcaucggcuaccacgccaacaacagcaccgacaccguggacaccgugcucgagaagaacgucacggugacccacuccgugaaccugcuggaggacaagcacaacgggaagcucugcaagcugcgcggcgucgcgccccugcaccucgggaagugcaacaucgccggcuggauccuggggaacccggagugcgagagccuguccaccgccagcuccuggagcuacaucguggagaccuccagcuccgacaacggcacgugcuaccccggcgacuucaucgacuacgaggagcuccgggagcagcugagcuccgugagcuccuucgagcgcuucgagaucuuccccaagaccagcuccuggcccaaccacgacagcaacaagggggccaccgccgccugcccgcacgcgggcgccaagggguucuacaagaaccugaucuggcucgucaagaagggcaacuccuaccccaagcugagcaaguccuacaucaacgacaaggggaaggaggugcuggugcucuggggcauccaccaccccagcaccagcgccgaccagcagucccuguaccagaacgccgacgccuacgucuucgugggcagcucccgguacagcaagaaguucaagcccgagaucgcgauccgcccgaaggugcgggaccaggaggggcgcaugaacuacuacuggacgcuggucgagcccggcgacaagaucaccuucgaggccaccgggaaccucguggugccccgguacgccuucgccauggagcgcaacgccggcuccggcaucaucaucagcgacacccccguccacgacugcaacacgaccugccagaccccgaagggggcgaucaacaccucccugcccuuccagaacauccaccccaucacgaucggcaagugccccaaguacgucaagagcaccaagcugcggcucgccaccgggcugcgcaacgugccguccauccagagccggggccuguucggggccaucgccggcuucaucgagggcggguggaccggcaugguggacgggugguacggcuaccaccaccagaacgagcagggguccggcuacgccgcggaccucaagagcacgcagaacgccaucgacgagaucaccaacaaggugaacuccgugaucgagaagaugaacacccaguucaccgccgucggcaaggaguucaaccaccuggagaagcgcaucgagaaccugaacaagaagguggacgacggguuccucgacaucuggacguacaacgccgagcugcugguccuccuggagaacgagcggacccuggacuaccacgacagcaacgugaagaaccucuacgagaaggugcgcucccagcugaagaacaacgccaaggagaucggcaacgggugcuucgaguucuaccacaagugcgacaacacgugcauggagagcgucaagaacggcaccuacgacuaccccaaguacuccgaggaggcgaagcugaaccgggaggagaucgacggggugaagcucgagagcacccgcaucuaccagauccuggccaucuacuccaccguggccagcagccugguccucguggugucccugggcgccaucagcuucuggaugugcuccaacggcagccugcagugccggaucugcaucuga

SEQ ID NO: 67415 - RNA, 1701 nt, Artificial Sequence; identical to SEQ ID NO: 66680
  derived and/or modified CDS sequence (opt1) from hemagglutinin__InfluenzaA__ACV70804

SEQ ID NO: 67416 - RNA, 1701 nt, Artificial Sequence; identical to SEQ ID NO: 67355
  derived and/or modified CDS sequence (opt1) from hemagglutinin__InfluenzaA__ACV70824

SEQ ID NO: 67417 - RNA, 1701 nt, Artificial Sequence; identical to SEQ ID NO: 66680
  derived and/or modified CDS sequence (opt1) from hemagglutinin__InfluenzaA__ACV70834

SEQ ID NO: 67418 - RNA, 1701 nt, Artificial Sequence
  derived and/or modified CDS sequence (opt1) from hemagglutinin__InfluenzaA__ACV70844
augaaggccauccuggugguccuccuguacaccuucgccaccgcgaacgccgacacgcugugcaucggcuaccacgccaacaacagcaccgacaccguggacaccgugcucgagaagaacgucacggugacccacuccgugaaccugcuggaggacaagcacaacgggaagcucugcaagcugcgcggcgucgcgccccugcaccucgggaagugcaacaucgccggcuggauccuggggaacccggagugcgagagccuguccaccgccagcuccuggagcuacaucguggagaccuccagcuccgacaacggcacgugcuaccccggcgacuucaucgacuacgaggagcuccgggagcagcugagcuccgugagcuccuucgagcgcuucgagaucuuccccaagaccagcuccuggcccaaccacgacagcaacaagggggucaccgccgccugcccgcacgccggcgcgaagggguucuacaagaaccugaucuggcucgugaagaagggcaacuccuaccccaagcugagcaaguccuacaucaacgacaaggggaaggaggugcugguccucuggggcauccaccaccccagcaccagcgccgaccagcagucccuguaccagaacgccgacgccuacguguucgugggcagcucccgguacagcaagaaguucaagcccgagaucgccauccgcccgaagguccgggaccaggaggggcgcaugaacuacuacuggacgcugguggagcccggcgacaagaucaccuucgaggcgaccgggaaccuccuggugccccgguacgccuucgccauggagcgcaacgccggcuccggcaucaucaucagcgacacccccguccacgacugcaacacgaccugccagaccccgaagggggccaucaacaccucccugcccuuccagaacauccaccccaucacgaucggcaagugccccaaguacgucaagagcaccaagcuccggcuggcgaccgggcugcgcaacgugccguccauccagagccggggccucuucggggccaucgccggcuucaucgagggcggguggaccggcaugguggacgggugguacggcuaccaccaccagaacgagcagggguccggcuacgccgccgaccucaagagcacgcagaacgcgaucgacgagaucaccaacaaggugaacuccgugaucgagaagaugaacacccaguucaccgccgucggcaaggaguucaaccaccuggagaagcgcaucgagaaccugaacaagaagguggacgacggguuccuggacaucuggacguacaacgccgagcugcucguccugcuggagaacgagcggacccucgacuaccacgacagcaacgugaagaaccuguacgagaaggugcgcucccagcugaagaacaacgccaaggagaucggcaacgggugcuucgaguucuaccacaagugcgacaacacgugcauggagagcgucaagaacggcaccuacgacuaccccaaguacuccgaggaggccaagcucaaccgggaggagaucgacggggugaagcuggagagcacccgcaucuaccagauccuggcgaucuacuccaccguggccagcagccucguccugguggugucccugggcgccaucagcuucuggaugugcuccaacggcagccuccagugccggaucugcaucuga

SEQ ID NO: 67419 - RNA, 1701 nt, Artificial Sequence; identical to SEQ ID NO: 66680
  derived and/or modified CDS sequence (opt1) from hemagglutinin__InfluenzaA__ACV70854

SEQ ID NO: 67420 - RNA, 1701 nt, Artificial Sequence
  derived and/or modified CDS sequence (opt1) from hemagglutinin__InfluenzaA__ACV70864
augaaggccauccuggugguccuccuguacaccuucgccaccgcgaacgccgacacgcugugcaucggcuaccacgccaacaacagcaccgacaccguggacaccgugcucgagaagaacgucacggugacccacuccgugaaccugcuggaggacaagcacaacgggaagcucugcaagcugcgcggcgucgcgccccugcaccucgggaagugcaacaucgccggcuggauccuggggaacccggagugcgagagccuguccaccgccagcuccuggagcuacaucguggagaccuccagcuccgacaacggcacgugcuaccccggcgacuucaucgacuacgaggagcuccgggagcagcugagcuccgugagcuccuucgagcgcuucgagaucuuccccaagaccagcuccuggcccaaccacgacagcaacaagggggucaccgccgccugcccgcacgccggcgcgaaguccuucuacaagaaccugaucuggcucgugaagaaggggaccagcuaccccaagcuguccaagagcuacaucaacgacaagggcaaggaggugcugguccucugggggauccaccaccccagcacguccgccgaccagcagagccuguaccagaacgccgacgccuacguguucgugggcuccagccgguacuccaagaaguucaagcccgagaucgccauccgcccgaagguccgggaccaggagggccgcaugaacuacuacuggacccugguggagcccggggacaagaucaccuucgaggcgaccggcaaccucguggucccccgguacgccuucgccauggagcgcaacgccgggagcggcaucaucaucuccgacacgcccgugcacgacugcaacacgaccugccagaccccgaagggcgccaucaacaccagccugcccuuccagaacauccaccccaucaccaucgggaagugccccaaguacgugaaguccaccaagcugcggcucgcgaccggccugcgcaacgucccgagcauccagucccgggggcuguucggcgccaucgccggguucaucgagggcggcuggacggggaugguggacggcugguacggguaccaccaccagaacgagcagggcagcggguacgccgccgaccucaaguccacccagaacgcgaucgacgagaucaccaacaaggugaacagcgucaucgagaagaugaacacccaguucacggccgugggcaaggaguucaaccaccuggagaagcgcaucgagaaccugaacaagaaggucgacgacggcuuccucgacaucuggaccuacaacgccgagcugcuggugcuccuggagaacgagcggacccuggacuaccacgacuccaacgugaagaaccucuacgagaagguccgcagccagcugaagaacaacgccaaggagaucgggaacggcugcuucgaguucuaccacaagugcgacaacacgugcauggaguccgugaagaacgggaccuacgacuaccccaaguacagcgaggaggccaagcugaaccgggaggagaucgacggcgugaagcucgaguccacccgcaucuaccagauccuggcgaucuacagcaccgucgccagcucccuggugcucguggucagccugggggccaucuccuucuggaugugcagcaacggcucccugcagugccggaucugcaucuga

SEQ ID NO: 67421 - RNA, 1701 nt, Artificial Sequence; identical to SEQ ID NO: 66680
  derived and/or modified CDS sequence (opt1) from hemagglutinin__InfluenzaA__ACV70874

SEQ ID NO: 67422 - RNA, 1701 nt, Artificial Sequence; identical to SEQ ID NO: 66873
  derived and/or modified CDS sequence (opt1) from hemagglutinin__InfluenzaA__ACV70884

SEQ ID NO: 67423 - RNA, 1701 nt, Artificial Sequence
  derived and/or modified CDS sequence (opt1) from hemagglutinin__InfluenzaA__ACV70904
augaaggccauccuggugguccuccuguacaccuucgccaccgcgaacgccgacacgcugugcaucggcuaccacgccaacaacagcaccgacaccguggacaccgugcucgagaagaacgucacggugacccacuccgugaaccugcuggaggacaagcacaacgggaagcucugcaagcugcgcggcgucgcgccccugcaccucgggaagugcaacaucgccggcuggauccuggggaacccggagugcgagagccuguccaccgccagcuccuggagcuacaucguggagaccuccagcuccgacaacggcacgugcuaccccggcgacuucaucgacuacgaggagcuccgggagcagcugagcuccgugagcuccuucgagcgcuucgagaucuuccccaagaccagcuccuggcccaaccacgacagcaacaagggggucaccgccgccugcccgcacgccggcgcgaaguccuucuacaagaaccugaucuggcucgugaagaaggggaacagcuaccccaagcuguccaagagcuacaucaacgacaagggcaaggaggugcugguccucugggggauccaccaccccagcaccuccgccgaccagcagagccuguaccagaacgccgacgccuacguguucgugggcuccagccgguacuccaagaaguucaagcccgagaucgccauccgcccgaagguccgggaccaggagggccgcaugaacuacuacuggacgcugguggagcccggggacaagaucaccuucgaggcgaccggcaaccucguggucccccgguacgccuucgccauggagcgcaacgccgggagcggcaucaucaucuccgacacccccgugcacgacugcaacacgaccugccagaccccgaagggcgccaucaacaccagccugcccuuccagaacauccaccccaucacgaucgggaagugccccaaguacgugaaguccaccaagcugcggcucgcgaccggccugcgcaacaucccgagcauccagucccgggggcuguucggcgccaucgccggguucaucgagggcggcuggaccgggauggucgacggcugguacggguaccaccaccagaacgagcagggcagcggguacgccgccgaccucaaguccacgcagaacgcgaucgacgagaucaccaacaaggugaacagcgugaucgagaagaugaacacccaguucaccgccgucggcaaggaguucaaccaccuggagaagcgcaucgagaaccugaacaagaagguggacgacggcuuccucgacaucuggacguacaacgccgagcugcugguccuccuggagaacgagcggacccuggacuaccacgacuccaacgugaagaaccucuacgagaaggugcgcagccagcugaagaacaacgccaaggagaucgggaacggcugcuucgaguucuaccacaagugcgacaacacgugcauggaguccgucaagaacgggaccuacgacuaccccaaguacagcgaggaggccaagcugaaccgggaggagaucgacggcgugaagcucgaguccacccgcaucuaccagauccuggcgaucuacagcaccguggccagcucccugguccucguggugagccugggggccaucuccuucuggaugugcagcaacggcucccugcagugccggaucugcaucuga

SEQ ID NO: 67424 - RNA, 1701 nt, Artificial Sequence; identical to SEQ ID NO: 66680
  derived and/or modified CDS sequence (opt1) from hemagglutinin__InfluenzaA__ACV70914

SEQ ID NO: 67425 - RNA, 1701 nt, Artificial Sequence; identical to SEQ ID NO: 66680
  derived and/or modified CDS sequence (opt1) from hemagglutinin__InfluenzaA__ACV70924

SEQ ID NO: 67426 - RNA, 1701 nt, Artificial Sequence; identical to SEQ ID NO: 66680
  derived and/or modified CDS sequence (opt1) from hemagglutinin__InfluenzaA__ACV70934

SEQ ID NO: 67427 - RNA, 1701 nt, Artificial Sequence; identical to SEQ ID NO: 66680
  derived and/or modified CDS sequence (opt1) from hemagglutinin__InfluenzaA__ACV70944

SEQ ID NO: 67428 - RNA, 1701 nt, Artificial Sequence
  derived and/or modified CDS sequence (opt1) from hemagglutinin__InfluenzaA__ACV70954
augaaggccauccuggugguccuccuguacaccuucgccaccgcgaacgccgacacgcugugcaucggcuaccacgccaacaacagcaccgacaccguggacaccgugcucgagaagaacgucacggugacccacuccgugaaccugcuggaggacaagcacaacgggaagcucugcaagcugcgcggcgucgcgccccugcaccucgggaagugcaacaucgccggcuggauccuggggaacccggagugcgagagccuguccaccgccagcuccuggagcuacaucguggagaccuccagcuccgacaacggcacgugcuaccccggcgacuucaucgacuacgaggagcuccgggagcagcugagcuccgugagcuccuucgagcgcuucgagaucuuccccaagaccagcuccuggcccaaccacgacagcaacaagggggucaccgccgccugcccgcacgccggcgcgaaguccuucuacaagaaccugaucuggcucgugaagaaggggaacagcuaccccaagcuguccaagagcuacaucaacgacaagggcaaggaggugcugguccucugggggauccaccaccccagcaccuccgccgaccagcagagccuguaccagaacgccgacgccuacguguucgugggcuccagccgguacuccaagaaguucaagcccgagaucgccauccgcccgaagguccgggaccaggagggccgcaugaacuacuacuggacgcugguggagcccggggacaagaucaccuucgaggcgaccggcaaccuccuggugccccgguacgccuucgccauggagcgcaacgccgggagcggcaucaucaucuccgacacccccguccacgacugcaacacgaccugccagaccccgaagggcgccaucaacaccagccugcccuuccagaacauccaccccaucacgaucgggaagugccccaaguacgugaaguccaccaagcuccggcuggcgaccggccugcgcaacgugccgagcauccagucccggggccucuucggggccaucgccggguucaucgagggcggcuggaccgggauggucgacggcugguacggguaccaccaccagaacgagcagggcagcggguacgccgccgaccugaaguccacgcagaacgcgaucgacgagaucaccaacaaggugaacagcgugaucgagaagaugaacacccaguucaccgccgucggcaaggaguucaaccaccuggagaagcgcaucgagaaccucaacaagaagguggacgacggcuuccuggacaucuggacguacaacgccgagcugcucguccugcuggagaacgagcggacccucgacuaccacgacuccaacgugaagaaccuguacgagaaggugcgcagccagcugaagaacaacgccaaggagaucgggaacggcugcuucgaguucuaccacaagugcgacaacacgugcauggaguccgucaagaacgggaccuacgacuaccccaaguacagcgaggaggccaagcucaaccgggaggagaucgacggcgugaagcuggaguccacccgcaucuaccagauccuggcgaucuacagcaccguggccagcucccucguccugguggugagccugggggccaucuccuucuggaugugcagcaacggcucccuccagugccggaucugcaucuga

SEQ ID NO: 67429 - RNA, 1701 nt, Artificial Sequence; identical to SEQ ID NO: 66680
  derived and/or modified CDS sequence (opt1) from hemagglutinin__InfluenzaA__ACV70964

SEQ ID NO: 67430 - RNA, 1701 nt, Artificial Sequence; identical to SEQ ID NO: 66680
  derived and/or modified CDS sequence (opt1) from hemagglutinin__InfluenzaA__ACV70974

SEQ ID NO: 67431 - RNA, 1701 nt, Artificial Sequence; identical to SEQ ID NO: 67423
  derived and/or modified CDS sequence (opt1) from hemagglutinin__InfluenzaA__ACV70984

SEQ ID NO: 67432 - RNA, 1701 nt, Artificial Sequence; identical to SEQ ID NO: 67428
  derived and/or modified CDS sequence (opt1) from hemagglutinin__InfluenzaA__ACV70994

SEQ ID NO: 67433 - RNA, 1701 nt, Artificial Sequence; identical to SEQ ID NO: 66680
  derived and/or modified CDS sequence (opt1) from hemagglutinin__InfluenzaA__ACV71004

SEQ ID NO: 67434 - RNA, 1701 nt, Artificial Sequence
  derived and/or modified CDS sequence (opt1) from hemagglutinin__InfluenzaA__ACV82230
augaagaccaucaucgcccugagcuacauccucugccugguguucgcccagaagcugcccggcaacgacaacuccaccgcgacgcucugccuggggcaccacgccgucccgaacggcaccaucgugaagaccaucaccaacgaccagaucgaggugacgaacgccaccgagcugguccagagcuccagcaccggggagaucugcgacagcccccaccagauccucgacggcaagaacugcacccugaucgacgcccugcucggggacccccagugcgacggcuuccagaacaagaagugggaccuguucguggagcgcagccaggccuacuccaacugcuaccccuacgacgugccggacuacgcgagccugcggucccucgucgccagcuccggcacgcuggaguucaacaacgagagcuucaacuggaccggggugacccagaacggcaccuccagcgccugcauccgccgguccaagaacagcuucuucucccgccugaacuggcucacgcaccugaacuucaaguaccaggcccugaacgugaccaugcccaacaacgagcaguucgacaagcucuacaucuggggcguccaccaccccgggaccgacaaggaccagaucuuccuguacgcgcaggccagcgggcggaucaccguguccacgaagcgcagccagcagaccgugauccccaacaucggcagccggccgcgcguccggaacauccccucccgcaucagcaucuacuggaccaucgugaagcccggcgacauccugcucaucaacuccaccgggaaccugaucgcgccccggggcuacuucaagauccagagcgggaaguccagcaucaugcgcuccgacgccccgaucggcaagugcaacagcgagugcaucacgcccaacggcuccauccccaacgacaagcccuuccagaacgugaaccggaucaccuacggggccugcccgcgcuacgucaagcagaacacccugaagcucgccaccggcaugcggaacgugcccgagaagcagacgcgcgggaucuucggcgccaucgccggguucaucgagaacggcugggagggcaugguggacgggugguacggcuuccggcaccagaacagcgaggggcgcggccaggccgccgaccugaaguccacccaggcggccaucgaccagaucaacgggaagcugaaccggcucaucggcaagaccaacgagaaguuccaccagaucgagaaggaguucagcgaggucgagggccgcauccaggaccuggagaaguacguggaggacaccaagaucgaccugugguccuacaacgccgagcuccugguggcccuggagaaccagcacacgaucgaccucaccgacagcgagaugaacaagcuguucgagaagaccaagaagcagcugcgggagaacgccgaggacauggggaacggcugcuucaagaucuaccacaagugcgacaacgcgugcaucggguccauccgcaacggcaccuacgaccacgacgucuaccgcgacgaggcccucaacaaccgguuccagaucaaggggguggagcugaaguccggcuacaaggacuggauccuguggaucuccuucgccaucagcugcuuccuccugugcguggcccugcucggcuucaucaugugggccugccagaaggggaacauccgcugcaacaucugcaucuga

SEQ ID NO: 67435 - RNA, 1701 nt, Artificial Sequence
  derived and/or modified CDS sequence (opt1) from hemagglutinin__InfluenzaA__ACV82232
augaagaccaucaucgcccugagcuacauccucugccugguguucgcccagaagcugcccggcaacgacaacuccaccgcgacgcucugccuggggcaccacgccgucccgaacggcaccaucgugaagaccaucaccaacgaccagaucgaggugacgaacgccaccgagcugguccagagcuccagcaccggggagaucugcgacagcccccaccagauccucgacggcgagaacugcacccugaucgacgcccugcucggggacccccagugcgacggcuuccagaacaagaagugggaccuguucguggagcgcagcaaggccuacuccaacugcuaccccuacgacgugccggacuacgcgagccugcggucccucgucgccagcuccggcacgcuggaguucaacaacgagagcuucaacuggaccggggugacccagaacggcaccuccagcgccugcauccgccgguccaacaacagcuucuucucccgccugaacuggcucacgcaccugaacuucaaguaccccgcccugaacgugaccaugcccaacaacgagcaguucgacaagcucuacaucuggggcguccaccaccccgggaccgacaaggaccagaucuuccuguacgcgcaggccagcgggcggaucaccguguccacgaagcgcagccagcaggccgugaucccgaacaucggcagccggccccgcguccggaacauccccucccgcaucagcaucuacuggaccaucgugaagcccggcgacauccugcucaucaacuccaccgggaaccugaucgccccgcggggcuacuucaagauccgcagcgggaaguccagcaucaugcgguccgacgcccccaucggcaagugcaacagcgagugcaucacccccaacggcuccauccccaacgacaagccguuccagaacgugaaccgcaucacguacggggcgugcccccgguacgucaagcagaacacccugaagcucgccaccggcaugcgcaacgugcccgagaagcagacccgggggaucuucggcgccaucgccggguucaucgagaacggcugggagggcaugguggacgggugguacggcuuccgccaccagaacagcgaggggcggggccaggccgcggaccugaaguccacgcaggccgccaucgaccagaucaacgggaagcugaaccgccucaucggcaagaccaacgagaaguuccaccagaucgagaaggaguucagcgaggucgagggccggauccaggaccuggagaaguacguggaggacaccaagaucgaccugugguccuacaacgccgagcuccugguggcccuggagaaccagcacaccaucgaccucacggacagcgagaugaacaagcuguucgagaagaccaagaagcagcugcgcgagaacgcggaggacauggggaacggcugcuucaagaucuaccacaagugcgacaacgccugcaucggguccauccgcaacggcaccuacgaccacgacgucuaccgggacgaggcccucaacaaccgcuuccagaucaaggggguggagcugaaguccggcuacaaggacuggauccuguggaucuccuucgccaucagcugcuuccuccugugcguggcccugcucggcuucaucaugugggcgugccagaaggggaacauccggugcaacaucugcaucuga

SEQ ID NO: 67436 - RNA, 1698 nt, Artificial Sequence
  derived and/or modified CDS sequence (opt1) from hemagglutinin__InfluenzaA__ACV82233
augaaggugaagcugcucguccugcugugcaccuucaccgccacguacgccgacaccaucugcaucggcuaccacgcgaacaacagcaccgacaccguggacacggugcucgagaagaacgucaccgugacccacuccgugaaccugcuggagaacaaccacaacgggaagcucugccugcugaagggcaucgcgccccuccagcuggggaacugcagcgucgccggcuggauccuggggaacccggagugcgagcuccugaucuccaaggagagcugguccuacaucguggagaagcccaaccccgagaacgggaccugcuaccccggccacuucgccgacuacgaggagcugcgcgagcagcucagcuccgugagcuccuucgagcgguucgagaucuucccgaaggagagcuccuggcccaaccacacggucaccggggugagcgccuccugcagccacaacggcgagaacuccuucuaccgcaaccugcuguggcucaccgggaagaacggccuguaccccaaccugagcaaguccuacgccaacaacaaggagaaggaggugcucguccuguggggcgugcaccacccgcccaacaucgccgaccagaagacccuguaccacacggagaacgccuacgugagcgucguguccagccacuacagccggaaguucacccccgagaucgccaagcgccccaagauccgggaccaggagggccgcaucaacuacuacuggacccuccuggagcccggcgacaccaucaucuucgaggcgaacgggaaccugaucgccccgcgguacgccuucgcccucucccgcggcuucgggagcggcaucaucaacuccaacgcccccauggacaagugcgacgcgaagugccagacgccccagggcgccaucaacagcucccugcccuuccagaacgugcacccggucaccaucggggagugccccaaguacgugcggagcgccaagcugcgcauggugaccggccuccggaacauccccuccauccagagccgcgggcuguucggcgccaucgccggguucaucgagggcggcuggaccgggauggucgacggcugguacggguaccaccaccagaacgagcagggcuccggguacgcggccgaccagaaguccacgcagaacgccaucaacggcaucaccaacaaggugaacagcgugaucgagaagaugaacacccaguucaccgccgucggcaaggaguucaacaagcuggagcggcgcauggagaaccucaacaagaagguggacgacggguucaucgacaucuggacguacaacgccgagcugcugguccuccuggagaacgagcggacccuggacuuccacgacagcaacgugaagaaccucuacgagaaggugaagucccagcugaagaacaacgcgaaggagaucggcaacgggugcuucgaguucuaccacaagugcaacgacgagugcauggagagcgucaagaacggcaccuacgacuaccccaaguacuccgaggagagcaagcugaaccgcgagaagaucgacggggugaagcucgaguccaugggcguguaccagauccuggccaucuacagcaccgucgccuccagccuggugcuccuggugagccugggcgccaucuccuucuggaugugcagcaacgggucccuccagugccggaucugcaucuga

SEQ ID NO: 67437 - RNA, 1701 nt, Artificial Sequence
  derived and/or modified CDS sequence (opt1) from hemagglutinin__InfluenzaA__ACV83662
augaaggccauccuggugguccuccuguacaccuucgccaccgcgaacgccgacacgcugugcaucggcuaccacgccaacaacagcaccgacaccguggacaccgugcucgagaagaacgucacggugacccacuccgugaaccugcuggaggacaagcacaacgggaagcucugcaagcugcgcggcgucgcgccccugcaccucgggaagugcaacaucgccggcuggauccuggggaacccggagugcgagagccuguccaccgccagcuccuggagcuacaucguggagaccuccagcuccgacaacggcacgugcuaccccggcgacuucaucgacuacgaggagcuccgggagcagcugagcuccgugagcuccuucgagcgcuucgagaucuuccccaagaccagcuccuggcccaaccacgacagcaacaagggggucaccgccgccugcccgcacgccggcgcgaaguccuucuacaagaaccugaucuggcucgugaagaaggggaacagcuaccccaagcuguccaagagcuacaucaacgacaagggcaaggaggugcugguccucugggggauccaccaccccagcaccuccgccgaccagcagagccuguaccagaacgccgacgccuacguguucgugggcacgucccgguacagcaagaaguucaagcccgagaucgccauccgcccgaagguccgggaccgcgagggccggaugaacuacuacuggacccugguggagcccggggacaagaucaccuucgaggcgaccggcaaccucguggucccccgcuacgccuucgccauggugcggaacgccggguccggcaucaucaucagcgacacgcccgugcacgacugcaacacgaccugccagaccccgaagggcgccaucaacaccucccugcccuuccagaacauccaccccaucaccaucgggaagugccccaaguacgucaagagcaccaagcugcgccucgcgaccggccugcggaacgugccguccauccagagccgcgggcuguucggcgccaucgccggguucaucgagggcggcuggacggggaugguggacggcugguacggguaccaccaccagaacgagcagggcuccggguacgccgccgaccucaagagcacccagaacgcgaucgacgagaucaccaacaaggucaacuccgugaucgagaagaugaacacccaguucacggccgucggcaaggaguucaaccaccuggagaagcggaucgagaaccugaacaagaagguggacgacggcuuccucgacaucuggaccuacaacgccgagcugcuggugcuccuggagaacgagcgcacccuggacuaccacgacagcaacgucaagaaccucuacgagaaggugcggucccagcugaagaacaacgccaaggagaucgggaacggcugcuucgaguucuaccacaagugcgacaacacgugcauggagagcgugaagaacgggaccuacgacuaccccaaguacuccgaggaggccaagcugaaccgcgaggagaucgacggcgucaagcucgagagcacccggaucuaccagauccuggcgaucuacuccaccguggccagcagccuggugcucgucgugucccugggggccaucagcuucuggaugugcuccaacggcagccugcagugccgcaucugcaucuga

SEQ ID NO: 67438 - RNA, 1701 nt, Artificial Sequence
  derived and/or modified CDS sequence (opt1) from hemagglutinin__InfluenzaA__ACV83663
augaaggccauccuggugguccuccuguacaccuucgccaccgcgaacgccgacacgcugugcaucggcuaccacgccaacaacagcaccgacaccguggacaccgugcucgagaagaacgucacggugacccacuccgugaaccugcuggaggacaagcacaacgggaagcucugcaagcugcgcggcgucgcgccccugcaccucgggaagugcaacaucgccggcuggauccuggggaacccggagugcgagagccuguccaccgccagcuccuggagcuacaucguggagaccuccagcuccgacaacggcacgugcuaccccggcgacuucaucgacuacgaggagcuccgggagcagcugagcuccgugagcuccuucgagcgcuucgagaucuuccccaagaccagcuccuggcccaaccacgacagcaacaagggggucaccgccgccugcccgcacgccggcgcgaaguccuucuacaagaaccugaucuggcucgugaagaaggggaacagcuaccccaagcuguccaagagcuacaucaacgacaagggcaaggaggugcugguccucugggggauccaccaccccagcaccuccgccgaccagcagagccuguaccagaacgccgacgccuacguguucgugggcacgucccgguacagcaagaaguucaagcccgagaucgccauccgcccgaagguccggggccaggaggggcgcaugaacuacuacuggacccugguggagcccggcgacaagaucaccuucgaggcgaccgggaaccucguggucccccgguacgccuucgccauggagcgcaacgccggcuccggcaucaucaucagcgacacgcccgugcacgacugcaacacgaccugccagaccccgaagggggccaucaacaccucccugcccuuccagaacauccaccccaucaccaucggcaagugccccaaguacgucaagagcaccaagcugcggcucgcgaccgggcugcgcaacgugccguccauccagagccggggccuguucggggccaucgccggcuucaucgagggcggguggacgggcaugguggacgggugguacggcuaccaccaccagaacgagcagggguccggcuacgccgccgaccucaagagcacccagaacgcgaucgacgagaucaccaacaaggugaacuccgucaucgagaagaugaacacccaguucacggccgugggcaaggaguucaaccaccuggagaagcgcaucgagaaccugaacaagaaggucgacgacggguuccucgacaucuggaccuacaacgccgagcugcuggugcuccuggagaacgagcggacccuggacuaccacgacagcaacgugaagaaccucuacgagaagguccgcucccagcugaagaacaacgccaaggagaucggcaacgggugcuucgaguucuaccacaagugcgacaacacgugcauggagagcgugaagaacggcaccuacgacuaccccaaguacuccgaggaggccaagcugaaccgggaggagaucgacggggugaagcucgagagcacccgcaucuaccagauccuggcgaucuacuccaccgucgccagcagccuggugcucguggucucccugggcgccaucagcuucuggaugugcuccaacggcagccugcagugccggaucugcaucuga

SEQ ID NO: 67439 - RNA, 1701 nt, Artificial Sequence; identical to SEQ ID NO: 67438
  derived and/or modified CDS sequence (opt1) from hemagglutinin__InfluenzaA__ACV83664

SEQ ID NO: 67440 - RNA, 1701 nt, Artificial Sequence
  derived and/or modified CDS sequence (opt1) from hemagglutinin__InfluenzaA__ACV83665
auggaggccauccuggugguccuccuguacaccuucgccaccgcgaacgccgacacgcugugcaucggcuaccacgccaacaacagcaccgacaccguggacaccgugcucgagaagaacgucacggugacccacuccgugaaccugcuggaggacaagcacaacgggaagcucugcaagcugcgcggcgucgcgccccugcaccucgggaagugcaacaucgccggcuggauccuggggaacccggagugcgagagccuguccaccgccagcuccuggagcuacaucguggagaccuccagcuccgacaacggcacgugcuaccccggcgacuucaucgacuacgaggagcuccgggagcagcugagcuccgugagcuccuucgagcgcuucgagaucuuccccaagaccagcuccuggcccaaccacgacagcaacaagggggucaccgccgccugcccgcacgccggcgcgaaguccuucuacaagaaccugaucuggcucgugaagaaggggaacagcuaccccaagcuguccaagagcuacaucaacgacaagggcaaggaggugcugguccucugggggauccaccaccccagcaccaucgccgaccagcagucccuguaccagaacgccgacgccuacguguucgugggcagcucccgguacagcaagaaguucaagcccgagaucgccauccgcccgaagguccgggaccaggagggccgcaugaacuacuacuggacgcugguggagcccggggacaagaucaccuucgaggcgaccggcaaccucguggucccccgguacgccuucgccauggagcgcaacgccggguccggcaucaucaucagcgacacccccgugcacgacugcaacacgaccugccagaccccgaagggcgccaucaacaccucccugcccuuccacaacauccaccccaucacgaucgggaagugccccaaguacgucaagagcaccaagcugcggcucgcgaccggccugcgcaacgugccguccauccagagccgggggcuguucggcgccaucgccggguucaucgagggcggcuggaccgggaugguggacggcugguacggguaccaccaccagaacgagcagggcuccggguacgccgccgaccucaagagcacgcagaacgcgaucgacgagaucaccaacaaggugaacuccgucaucgagaagaugaacacccaguucaccgccgugggcaaggaguucaaccaccuggagaagcgcaucgagaaccugaacaagaaggucgacgacggcuuccucgacaucuggacguacaacgccgagcugcuggugcuccuggagaacgagcggacccuggacuaccacgacagcaacgugaagaaccucuacgagaagguccgcucccagcugaagaacaacgccaaggagaucgggaacggcugcuucgaguucuaccacaagugcgacaacacgugcauggagagcgugaagaacgggaccuacgacuaccccaaguacuccgaggaggccaagcugaaccgggaggagaucgacggcgugaagcucgagagcacccgcaucuaccagauccuggcgaucuacuccaccgucgccagcagccuggugcucguggucucccugggggccaucagcuucuggaugugcuccaacggcagccugcagugccggaucugcaucuga

SEQ ID NO: 67441 - RNA, 1701 nt, Artificial Sequence
  derived and/or modified CDS sequence (opt1) from hemagglutinin__InfluenzaA__ACV83667
augaaggccauccuggugguccuccuguacaccuucgccaccgcgaacgccgacacgcugugcaucggcuaccacgccaacaacagcaccgacaccguggacaccgugcucgagaagaacgucacggugacccacuccgugaaccugcuggaggacaagcacaacgggaagcucugcaagcugcgcggcgucgcgccccugcaccucgggaagugcaacaucgccggcuggauccuggggaacccggagugcgagagccuguccaccgccagcuccuggagcuacaucguggagaccuccagcuccgacaacggcacgugcuaccccggcgacuucaucgacuacgaggagcuccgggagcagcugagcuccgugagcuccuucgagcgcuucgagaucuuccccaagaccagcuccuggcccaaccacgacagcaacaagggggucaccgccgccugcccgcacgccggcgcgaaguccuucuacaagaaccugaucuggcucgugaagaaggggaacagcuaccccaagcuguccaagagcuacaucaacgacaagggcaaggaggugcugguccucugggggauccaccaccccagcaccuccgccgaccagcagagccuguaccagaacgccgacgccuacguguucgugggcacgucccgguacagcaagaaguucaagcccgagaucgccauccgcccgaagguccggaaccaggagggccgcaugaacuacuacuggacccugguggagcccggggacaagaucaccuucgaggcgaccggcaaccucguggucccccgguacgccuucgccauggagcgcaacgccggguccggcaucaucaucagcgacacgcccgugcacgacugcaacacgaccugccagaccccgaagggcgccaucaacaccucccugcccuuccagaacauccaccccaucaccaucgggaagugccccaaguacgucaagagcaccaagcugcggcucgcgaccggccugcgcaacgugccguccauccagagccgggggcuguucggcgccaucgccggguucaucgagggcggcuggacggggaugguggacggcugguacggguaccaccaccagaacgagcagggcuccggguacgccgccgaccucaagagcacccagaacgcgaucgacgagaucaccaacaaggugaacuccgucaucgagaagaugaacacccaguucacggccgugggcaaggaguucaaccaccuggagaagcgcaucgagaaccugaacaagaaggucgacgacggcuuccucgacaucuggaccuacaacgccgagcugcuggugcuccuggagaacgagcggacccuggacuaccacgacagcaacgugaagaaccucuacgagaagguccgcucccagcugaagaacaacgccaaggagaucgggaacggcugcuucgaguucuaccacaagugcgacaacacgugcauggagagcgugaagaacgggaccuacgacuaccccaaguacuccgaggaggccaagcugaaccgggaggagaucgacggcgugaagcucgagagcacccgcaucuaccagauccuggcgaucuacuccaccgucgccagcagccuggugcucguggucucccugggggccaucagcuucuggaugugcuccaacggcagccugcagugccggaucugcaucuga

SEQ ID NO: 67442 - RNA, 1701 nt, Artificial Sequence; identical to SEQ ID NO: 66693
  derived and/or modified CDS sequence (opt1) from hemagglutinin__InfluenzaA__ACV83668

SEQ ID NO: 67443 - RNA, 1701 nt, Artificial Sequence; identical to SEQ ID NO: 66693
  derived and/or modified CDS sequence (opt1) from hemagglutinin__InfluenzaA__ACV83670

SEQ ID NO: 67444 - RNA, 1701 nt, Artificial Sequence; identical to SEQ ID NO: 66935
  derived and/or modified CDS sequence (opt1) from hemagglutinin__InfluenzaA__ACV83671

SEQ ID NO: 67445 - RNA, 1701 nt, Artificial Sequence; identical to SEQ ID NO: 67255
  derived and/or modified CDS sequence (opt1) from hemagglutinin__InfluenzaA__ACV88399

SEQ ID NO: 67446 - RNA, 1701 nt, Artificial Sequence; identical to SEQ ID NO: 67255
  derived and/or modified CDS sequence (opt1) from hemagglutinin__InfluenzaA__ACV88409

SEQ ID NO: 67447 - RNA, 1701 nt, Artificial Sequence; identical to SEQ ID NO: 66680
  derived and/or modified CDS sequence (opt1) from hemagglutinin__InfluenzaA__ACV88419

SEQ ID NO: 67448 - RNA, 1698 nt, Artificial Sequence; identical to SEQ ID NO: 67302
  derived and/or modified CDS sequence (opt1) from hemagglutinin__InfluenzaA__ACV89502

SEQ ID NO: 67449 - RNA, 1701 nt, Artificial Sequence
  derived and/or modified CDS sequence (opt1) from hemagglutinin__InfluenzaA__ACV89516
augaaggcccgccugcucauccugcugugcgcccucgcggccaccgacgccgacaccaucugcaucggcuaccacgccaacaacagcacggacaccguggacaccguccuggagaagaacgugaccgugacgcacuccgucaaccugcucgaggacagccacaacgggaagcugugccggcugaagggcaucgcgccccuccagcuggggaagugcaacaucgccggcuggauccuggggaacccggagugcgacucccuccugcccgccagcuccuggagcuacaucguggagacccccaacuccaagaacggcaucugcuaccccggcgacuucaucgacuacgaggagcugcgcgagcagcucagcuccgugagcuccuucgagcgguucgagaucuucccgaaggagagcuccuggcccaagcacagcaccaccaagggggucacggccgccugcucccacgcgggcaagagcuccuucuaccgcaaccugcuguggcucaccaagaagggggacagcuaccccaagcuguccaacagcuacgugaacaagaagggcaaggaggugcugguccucuggggcgugcaccaccccagcuccagcaaggagcagcagacccuguaccagaacgagaacgccuacguguccgucgugagcuccaacuacaaccggcgcuucaucccggagaucgccgagcggcccgaggugaaggaccaggccgggcgcaucaacuacuacuggacccugcucgagcccggcgacacgaucaucuucgaggccaacgggaaccuggucgcgcccugguacgccuucgcccugagccggggcuucggguccggcaucaucaccagcaacgccuccaugcacgagugcaacaccaagugccagaccccgcagggcgccaucaacagcucccuccccuuccagaacauccaccccgugacgaucggggagugccccaaguacgucaagagcgcgaagcugcgcauggugaccggccugcggaacaucccguccauccagagccgcggccucuucggggccaucgccggguucaucgagggcggcuggaccgggaugaucgacggcugguacggguaccaccaccagaacgagcagggcuccggguacgccgccgaccagaaguccacccagaacgcgaucaacggcaucacgaacaaggugaacagcgugaucgagaagaugaacacccaguucaccgccgucggcaaggaguucaacaaccuggagaagcggauggagaaccugaacaagaagguggacgacggguuccucgacaucuggaccuacaacgccgagcugcuggugcuccuggagaacgagcgcacgcuggacuuccacgacagcaacgucaagaaccucuacgagaaggugaagauccagcugaagaacaacgccaaggagaucggcaacgggugcuucgaguucuaccacaagugcgacaacgagugcauggaguccguccggaacggcaccuacgacuaccccaaguacagcaaggagagcaagcugaaccgcgagaagaucgacggggugaagcucgaguccaugggcguguaccagauccuggccaucuacagcaccgucgcguccagccuggugcuccuggugucccugggcgccaucagcuucuggaugugcuccaacgggagccuccagugccggaucugcaucuga

SEQ ID NO: 67450 - RNA, 1698 nt, Artificial Sequence
  derived and/or modified CDS sequence (opt1) from hemagglutinin__InfluenzaA__ACV90512
augaacgugaagcugcucguccugcugugcaccuucaccgccacguacgccgacaccaucugcaucggcuaccacgcgaacaacagcaccgacaccguggacacggugcucgagaagaacgucaccgugacccacuccgugaaccugcuggagaacagccacaacgggaagcucugccugcugaagggcaucgcgccccuccagcuggggaacugcuccgucgccggcuggauccuggggaacccggagugcgagcuccugaucagcaaggaguccuggagcuacaucguggagaagcccaaccccgagaacgggaccugcuaccccggccacuucgccgacuacgaggagcugcgcgagcagcucuccagcguguccagcuucgagcgguucgagaucuucccgaaggaguccagcuggcccaaccacacggucaccgggguguccgccagcugcucccacaacggcgagaacagcuucuaccgcaaccugcuguggcucaccgggaagaacggccuguaccccaaccuguccaagagcuacgccaacaacaaggagaaggaggugcucguccuguggggcgugcaccacccgcccaacaucgccgaccagaagacccuguaccacacggagaacgccuacguguccgucgugagcagccacuacucccggaaguucacccccgagaucgccaagcgccccaaggugcgggaccaggagggccgcaucaacuacuacuggacccuccuggagcccggcgacaccaucaucuucgaggcgaacgggaaccugaucgccccgcgguacgccuucgcccucagccgcggcuucggguccggcaucaucaacagcaacgcccccaucgacaagugggacgcgaagugccagacgccccagggcgccaucaacuccagccugcccuuccagaacguccacccggugaccaucggggaguggcccaaguacgugcgguccgccaagcugcgcauggucaccggccuccggaacauccccagcauccagucccgcgggcuguucggcgccaucgccggguucaucgagggcggcuggaccgggaugguggacggcugguacggguaccaccaccagaacgagcagggcagcggguacgcggccgaccagaaguccacgcagaacgccaucaacggcaucaccaacaagaugaacagcgugaucgagaagaugaacacccaguucaccgccgucggcaaggaguucaacaagcuggagcggcgcauggagaaccucaacaagaagguggacgacggguucaucgacaucuggacguacaacgccgagcugcugguccuccuggagaacgagcggacccuggacuuccacgacuccaacgugaagaaccucuacgagaaggucaagagccagcugaagaacaacgcgaaggagaucggcaacgggugcuucgaguucuaccacaagugcaacgacgagugcauggaguccgugaagaacggcaccuacgacuaccccaaguacagcgaggaguccaagcugaaccgcgagaagaucgacggggugacccucgagagcaugggcguguaccagauccuggccaucuacuccacggucgccagcagccuggugcuccuggugucccugggcgccaucagcuucuggaugugcuccaacgggagccuccagugccggaucugcaucuga

SEQ ID NO: 67451 - RNA, 1701 nt, Artificial Sequence; identical to SEQ ID NO: 66693
  derived and/or modified CDS sequence (opt1) from hemagglutinin__InfluenzaA__ACV91672

SEQ ID NO: 67452 - RNA, 1701 nt, Artificial Sequence; identical to SEQ ID NO: 66693
  derived and/or modified CDS sequence (opt1) from hemagglutinin__InfluenzaA__ACV91676

SEQ ID NO: 67453 - RNA, 1701 nt, Artificial Sequence; identical to SEQ ID NO: 66693
  derived and/or modified CDS sequence (opt1) from hemagglutinin__InfluenzaA__ACV91680

SEQ ID NO: 67454 - RNA, 1701 nt, Artificial Sequence
  derived and/or modified CDS sequence (opt1) from hemagglutinin__InfluenzaA__ACX31591
augaagaccaucaucgcccugagcuacauccucugccugguguucgcccagaagcugcccggcaacgacaacuccaccgcgacgcucugccuggggcaccacgccgucccgaacggcaccaucgugaagaccaucaccaacgaccagaucgaggugacgaacgccaccgagcugguccagagcuccagcaccggggagaucugcgacagcccccaccagauccucgacggcaagaacugcacccugaucgacgcccugcucggggacccccagugcgacggcuuccagaacaagaagugggaccuguucguggagcgcagcaaggccuacuccaacugcuaccccuacgacgugccggacuacgcgagccugcggucccucgucgccagcuccggcacgcuggaguucaacaacgagagcuucaacuggaccggggugacccagaacggcaccuccagcgccugcauccgccgguccaagaacagcuucuucucccgccugaacuggcucacgcaccugaacuucaaguaccaggcccugaacgugaccaugcccaacaacgagcaguucgacaagcucuacaucuggggcguccaccaccccgggaccgacaaggaccagaucuuccuguacgcgcaggccagcgggcggaucaccguguccacgaagcgcagccagcagaccgugauccccaacaucggcagccggccgcgcguccggaacauccccucccgcaucagcaucuacuggaccaucgugaagcccggcgacauccugcucaucaacuccaccgggaaccugaucgcgccccggggcuacuucaagauccagagcgggaaguccagcaucaugcgcuccgacgccccgaucggcaagugcaacagcgagugcaucacgcccaacggcuccauccccaacgacaagcccuuccagaacgugaaccggaucaccuacggggccugcccgcgcuacgucaagcagaacacccugaagcucgccaccggcaugcggaacgugcccgagaagcagacgcgcgggaucuucggcgccaucgccggguucaucgagaacggcugggagggcaugguggacgggugguacggcuuccggcaccagaacagcgaggggcgcggccaggccgccgaccugaaguccacccaggcggccaucgaccagaucaacgggaagcugaaccggcucaucggcaagaccaacgagaaguuccaccagaucgagaaggaguucagcgaggucgagggccgcauccaggaccuggagaaguacguggaggacaccaagaucgaccugugguccuacaacgccgagcuccugguggcccuggagaaccagcacacgaucgaccucaccgacagcgagaugaacaagcuguucgagaagaccaagaagcagcugcgggagaacgccgaggacauggggaacggcugcuucaagaucuaccacaagugcgacaacgcgugcaucggguccauccgcaacggcaccuacgaccacgacgucuaccgcgacgaggcccucaacaaccgguuccagaucaaggggguggagcugaaguccggcuacaaggacuggauccuguggaucuccuucgccaucagcugcuuccuccugugcguggcccugcucggcuucaucaugugggccugccagaaggggaacauccgcugcaacaucugcaucuga

SEQ ID NO: 67455 - RNA, 1701 nt, Artificial Sequence
  derived and/or modified CDS sequence (opt1) from hemagglutinin__InfluenzaA__ACX31933
augaaggccauccuggugguccuccuguacaccuucgccaccgcgaacgccgacacgcugugcaucggcuaccacgccaacaacagcaccgacaccguggacaccgugcucgagaagaacgucacggugacccacuccgugaaccugcuggaggacaagcacaacgggaagcucugcaagcugcgcggcgucgcgccccugcaccucgggaagugcaacaucgccggcuggauccuggggaacccggagugcgagagccuguccaccgccagcuccuggagcuacaucguggagaccuccagcuccggcaacggcacgugcuaccccggggacuucaucgacuacgaggagcuccgggagcagcugagcuccgugagcuccuucgagcgcuucgagaucuuccccaagaccagcuccuggcccaaccacgacagcaacaagggcgucaccgccgccugcccgcacgccggggcgaaguccuucuacaagaaccugaucuggcucgugaagaagggcaacagcuaccccaagcuguccaagagcuacaucaacgacaaggggaaggaggugcugguccucuggggcauccaccaccccagcaccuccgccgaccagcagagccuguaccagaacgccgacgccuacguguucgugggcacgucccgguacagcaagaaguucaagcccgagaucgccauccgcccgaagguccgggaccaggaggggcgcaugaacuacuacuggacccugguggagcccggcgacaagaucaccuucgaggcgaccgggaaccucguggucccccgguacgccuucgccauggagcgcaacgccggcuccggcaucaucaucagcgacacgcccgugcacgacugcaacacgaccugccagaccccgaagggggccaucaacaccucccugcccuuccagaacauccaccccaucaccaucggcaagugccccaaguacgucaagagcaccaagcugcggcucgcgaccgggcugcgcaacgugccguccauccagagccggggccuguucggggccaucgccggcuucaucgagggcggguggacgggcaugguggacgggugguacggcuaccaccaccagaacgagcagggguccggcuacgccgccgaccucaagagcacccagaacgcgaucgacgagaucaccaacaaggugaacuccgucaucgagaagaugaacacccaguucacggccgugggcaaggaguucaaccaccuggagaagcgcaucgagaaccugaacaagaaggucgacgacggguuccucgacaucuggaccuacaacgccgagcugcuggugcuccuggagaacgagcggacccuggacuaccacgacagcaacgugaagaaccucuacgagaagguccgcucccagcugaagaacaacgccaaggagaucggcaacgggugcuucgaguucuaccacaagugcgacaacacgugcauggagagcgugaagaacggcaccuacgacuaccccaaguacuccgaggaggccaagcugaaccgggaggagaucaacggggugaagcucgagagcacccgcaucuaccagauccuggcgaucuacuccaccgucgccagcagccuggugcucguggucucccugggcgccaucagcuucuggaugugcuccaacggcagccugcagugccggaucugcaucuga

SEQ ID NO: 67456 - RNA, 1701 nt, Artificial Sequence
  derived and/or modified CDS sequence (opt1) from hemagglutinin__InfluenzaA__ACX31934
augaaggccauccuggugguccuccuguacaccuucgccaccgcgaacgccgacacgcugugcaucggcuaccacgccaacaacagcaccgacaccguggacaccgugcucgagaagaacgucacggugacccacuccgugaaccugcuggaggacaagcacaacgggaagcucugcaagcugcgcggcgucgcgccccugcaccucgggaagugcaacaucgccggcuggauccuggggaacccggagugcgagagccuguccaccgccagcuccuggagcuacaucguggagaccuccagcuccgacaacggcacgugcuaccccggcgacuucaucgacuacgaggagcuccgggagcagcugagcuccgugagcuccuucgagcgcuucgagaucuuccccaagaccagcuccuggcccaaccacgacagcaacaagggggucaccgccgccugcccgcacgccggcgcgaaguccuucuacaagaaccugaucuggcucgugaagaaggggaacagcuaccccaagcuguccaagagcuacaucaacgacaagggcaaggaggugcugguccucugggggauccaccaccccagcaccuccgccgaccagcagagccuguaccagaacgccgacgccuacguguucgugggcacgucccgguacagcaagaaguucaagcccgagaucaccauccgcccgaagguccggggccaggaggggcgcaugaacuacuacuggacccugguggagcccggcgacaagaucaccuucgaggccacggggaaccucguggucccccgguacgcguucgccauggagcgcaacgccggcuccggcaucaucaucagcgacacccccgugcacgacugcaacacgaccugccagaccccgaagggggccaucaacaccucccugcccuuccagaacauccaccccaucaccaucggcaagugccccaaguacgucaagagcaccaagcugcggcucgccacggggcugcgcaacgugccguccauccagagccggggccuguucggggcgaucgccggcuucaucgagggcggguggaccggcaugguggacgggugguacggcuaccaccaccagaacgagcagggguccggcuacgccgccgaccucaagagcacccagaacgccaucgacgagaucaccaacaaggugaacuccgucaucgagaagaugaacacgcaguucaccgcggugggcaaggaguucaaccaccuggagaagcgcaucgagaaccugaacaagaaggucgacgacggguuccucgacaucuggaccuacaacgccgagcugcuggugcuccuggagaacgagcggacccuggacuaccacgacagcaacgugaagaaccucuacgagaagguccgcucccagcugaagaacaacgccaaggagaucggcaacgggugcuucgaguucuaccacaagugcgacaacacgugcauggagagcgugaagaacggcaccuacgacuaccccaaguacuccgaggaggccaagcugaaccgggaggagaucgacggggugaagcucgagagcacccgcaucuaccagauccuggccaucuacuccaccgucgcgagcagccuggugcucguggucucccugggcgccaucagcuucuggaugugcuccaacggcagccugcagugccggaucugcaucuga

SEQ ID NO: 67457 - RNA, 1701 nt, Artificial Sequence; identical to SEQ ID NO: 66693
  derived and/or modified CDS sequence (opt1) from hemagglutinin__InfluenzaA__ACX31935

SEQ ID NO: 67458 - RNA, 1701 nt, Artificial Sequence; identical to SEQ ID NO: 66693
  derived and/or modified CDS sequence (opt1) from hemagglutinin__InfluenzaA__ACX31936

SEQ ID NO: 67459 - RNA, 1701 nt, Artificial Sequence; identical to SEQ ID NO: 66784
  derived and/or modified CDS sequence (opt1) from hemagglutinin__InfluenzaA__ACX31939

SEQ ID NO: 67460 - RNA, 1701 nt, Artificial Sequence; identical to SEQ ID NO: 66784
  derived and/or modified CDS sequence (opt1) from hemagglutinin__InfluenzaA__ACX31940

SEQ ID NO: 67461 - RNA, 1701 nt, Artificial Sequence; identical to SEQ ID NO: 66693
  derived and/or modified CDS sequence (opt1) from hemagglutinin__InfluenzaA__ACX31943

SEQ ID NO: 67462 - RNA, 1701 nt, Artificial Sequence; identical to SEQ ID NO: 66693
  derived and/or modified CDS sequence (opt1) from hemagglutinin__InfluenzaA__ACX31946

SEQ ID NO: 67463 - RNA, 1701 nt, Artificial Sequence; identical to SEQ ID NO: 66693
  derived and/or modified CDS sequence (opt1) from hemagglutinin__InfluenzaA__ACX31947

SEQ ID NO: 67464 - RNA, 1701 nt, Artificial Sequence; identical to SEQ ID NO: 66693
  derived and/or modified CDS sequence (opt1) from hemagglutinin__InfluenzaA__ACX31948

SEQ ID NO: 67465 - RNA, 1701 nt, Artificial Sequence
  derived and/or modified CDS sequence (opt1) from hemagglutinin__InfluenzaA__ACX31949
augaaggccauccuggugguccuccuguacaccuucgccaccgcgaacgccgacacgcugugcaucggcuaccacgccaacaacagcaccgacaccguggacaccgugcucgagaagaacgucacggugacccacuccgugaaccugcuggaggacaagcacaacgggaagcucugcaagcugcgcggcgucgcgccccugcaccucgggaagugcaacaucgccggcuggauccuggggaacccggagugcgagagccuguccaccgccagcuccuggagcuacaucguggagaccuccagcuccgacaacggcacgugcuaccccggcgacuucaucgacuacgaggagcuccgggagcagcugagcuccgugagcuccuucgagcgcuucgagaucuuccccaagaccagcuccuggcccaaccacgacagcaacaagggggucaccgccgccugcccgcacgccggcgcgaaguccuucuacaagaaccugaucuggcucgugaagaaggggaacagcuaccccaagcuguccaagagcuacaucaacgacaagggcaaggaggugcugguccucugggggauccaccaccccagcaccuccgccgaccagcagagccuguaccagaacgccgacgccuacguguucgugggcacgucccgguacagcaagaaguucaagcccgagaucgccauccgcccgaagguccgggaccaggagggccgcaugaacuacuacuggacccugguggagcccggggacaagaucaccuucgaggcgaccggcaaccucguggucccccgguacgccuucgccauggagcgcaacgccggguccggcaucaucaucagcgacacgcccgugcacuacugcaacacgaccugccagaccccgaagggcgccaucaacaccucccugcccuuccagaacauccaccccaucaccaucgggaagugccccaaguacgucaagagcaccaagcugcggcucgcgaccggccugcgcaacgugccguccauccagagccgggggcuguucggcgccaucgccggguucaucgagggcggcuggacggggaugguggacggcugguacggguaccaccaccagaacgagcagggcuccggguacgccgccgaccucaagagcacccagaacgcgaucgacgagaucaccaacaaggugaacuccgucaucgagaagaugaacacccaguucacggccgugggcaaggaguucaaccaccuggagaagcgcaucgagaaccugaacaagaaggucgacgacggcuuccucgacaucuggaccuacaacgccgagcugcuggugcuccuggagaacgagcggacccuggacuaccacgacagcaacgugaagaaccucuacgaggagguccgcucccagcugaagaacaacgccaaggagaucgggaacggcugcuucgaguucuaccacaagugcgacaacacgugcauggagagcgugaagaacgggaccuacgacuaccccaaguacuccgaggaggccaagcugaaccgggaggagaucgacggcgugaagcucgagagcacccgcaucuaccagauccuggcgaucuacuccaccgucgccagcagccuggugcucguggucucccugggggccaucagcuucuggaugugcuccaacggcagccugcagugccggaucugcaucuga

SEQ ID NO: 67466 - RNA, 1701 nt, Artificial Sequence; identical to SEQ ID NO: 66693
  derived and/or modified CDS sequence (opt1) from hemagglutinin__InfluenzaA__ACX31950

SEQ ID NO: 67467 - RNA, 1701 nt, Artificial Sequence; identical to SEQ ID NO: 66693
  derived and/or modified CDS sequence (opt1) from hemagglutinin__InfluenzaA__ACX31951

SEQ ID NO: 67468 - RNA, 1701 nt, Artificial Sequence; identical to SEQ ID NO: 66693
  derived and/or modified CDS sequence (opt1) from hemagglutinin__InfluenzaA__ACX31954

SEQ ID NO: 67469 - RNA, 1701 nt, Artificial Sequence; identical to SEQ ID NO: 66693
  derived and/or modified CDS sequence (opt1) from hemagglutinin__InfluenzaA__ACX31955

SEQ ID NO: 67470 - RNA, 1701 nt, Artificial Sequence; identical to SEQ ID NO: 66680
  derived and/or modified CDS sequence (opt1) from hemagglutinin__InfluenzaA__ACX31956

SEQ ID NO: 67471 - RNA, 1701 nt, Artificial Sequence; identical to SEQ ID NO: 66693
  derived and/or modified CDS sequence (opt1) from hemagglutinin__InfluenzaA__ACX31957

SEQ ID NO: 67472 - RNA, 1701 nt, Artificial Sequence; identical to SEQ ID NO: 66680
  derived and/or modified CDS sequence (opt1) from hemagglutinin__InfluenzaA__ACX31958

SEQ ID NO: 67473 - RNA, 1701 nt, Artificial Sequence; identical to SEQ ID NO: 66935
  derived and/or modified CDS sequence (opt1) from hemagglutinin__InfluenzaA__ACX31960

SEQ ID NO: 67474 - RNA, 1701 nt, Artificial Sequence
  derived and/or modified CDS sequence (opt1) from hemagglutinin__InfluenzaA__ACX31961
augaaggccauccugguggucaugcucuacaccuucgccaccgcgaacgccgacacgcugugcaucggcuaccacgccaacaacagcaccgacaccguggacaccgugcuggagaagaacgucacggugacccacuccgugaaccuccuggaggacaagcacaacgggaagcugugcaagcuccgcggcgucgcgccccugcaccuggggaagugcaacaucgccggcuggauccucgggaacccggagugcgagagccuguccaccgccagcuccuggagcuacaucguggagaccuccagcuccgacaacggcacgugcuaccccggcgacuucaucgacuacgaggagcugcgggagcagcucagcuccgugagcuccuucgagcgcuucgagaucuuccccaagaccagcuccuggcccaaccacgacagcaacaagggggucaccgccgccugcccgcacgccggcgcgaaguccuucuacaagaaccugaucuggcuggugaagaaggggaacagcuaccccaagcucuccaagagcuacaucaacgacaagggcaaggaggugcugguccugugggggauccaccaccccagcaccuccgccgaccagcagagccucuaccagaacgccgacgccuacguguucgugggcuccagccgguacuccaagaaguucaagcccgagaucgccauccgcccgaagguccgggaccaggagggccgcaugaacuacuacuggacgcugguggagcccggggacaagaucaccuucgaggcgaccggcaaccugguggucccccgguacgccuucgccauggagcgcaacgccgggagcggcaucaucaucuccgacacccccgugcacgacugcaacacgaccugccagaccccgaagggcgccaucaacaccagccuccccuuccagaacauccaccccaucacgaucgggaagugccccaaguacgugaaguccaccaagcugcggcuggcgaccggccuccgcaacgucccgagcauccagucccgggggcuguucggcgccaucgccggguucaucgagggcggcuggaccgggaugguggacggcugguacggguaccaccaccagaacgagcagggcagcggguacgccgccgaccugaaguccacgcagaacgcgaucgacgagaucaccaacaaggugaacagcgucaucgagaagaugaacacccaguucaccgccgugggcaaggaguucaaccaccucgagaagcgcaucgagaaccugaacaagaaggucgacgacggcuucauggacaucuggacguacaacgccgagcugcucgugcugcuggagaacgagcggacccucgacuaccacgacuccaacgugaagaaccuguacgagaagguccgcagccagcugaagaacaacgccaaggagaucgggaacggcugcuucgaguucuaccacaagugcgacaacacgugcauggaguccgugaagaacgggaccuacgacuaccccaaguacagcgaggaggccaagcucaaccgggaggagaucgacggcgugaagcuggaguccacccgcaucuaccagauccuggcgaucuacagcaccgucgccagcucccucgugcugguggucagccugggggccaucuccuucuggaugugcagcaacggcucccuccagugccggaucugcaucuga

SEQ ID NO: 67475 - RNA, 1701 nt, Artificial Sequence; identical to SEQ ID NO: 66693
  derived and/or modified CDS sequence (opt1) from hemagglutinin__InfluenzaA__ACX31962

SEQ ID NO: 67476 - RNA, 1701 nt, Artificial Sequence; identical to SEQ ID NO: 66693
  derived and/or modified CDS sequence (opt1) from hemagglutinin__InfluenzaA__ACX31964

SEQ ID NO: 67477 - RNA, 1701 nt, Artificial Sequence; identical to SEQ ID NO: 66680
  derived and/or modified CDS sequence (opt1) from hemagglutinin__InfluenzaA__ACX35237

SEQ ID NO: 67478 - RNA, 1701 nt, Artificial Sequence; identical to SEQ ID NO: 66693
  derived and/or modified CDS sequence (opt1) from hemagglutinin__InfluenzaA__ACX35247

SEQ ID NO: 67479 - RNA, 1701 nt, Artificial Sequence; identical to SEQ ID NO: 66693
  derived and/or modified CDS sequence (opt1) from hemagglutinin__InfluenzaA__ACX35257

SEQ ID NO: 67480 - RNA, 1701 nt, Artificial Sequence; identical to SEQ ID NO: 66693
  derived and/or modified CDS sequence (opt1) from hemagglutinin__InfluenzaA__ACX35267

SEQ ID NO: 67481 - RNA, 1701 nt, Artificial Sequence; identical to SEQ ID NO: 66693
  derived and/or modified CDS sequence (opt1) from hemagglutinin__InfluenzaA__ACX35277

SEQ ID NO: 67482 - RNA, 1701 nt, Artificial Sequence; identical to SEQ ID NO: 66693
  derived and/or modified CDS sequence (opt1) from hemagglutinin__InfluenzaA__ACX35287

SEQ ID NO: 67483 - RNA, 1701 nt, Artificial Sequence; identical to SEQ ID NO: 66693
  derived and/or modified CDS sequence (opt1) from hemagglutinin__InfluenzaA__ACX35297

SEQ ID NO: 67484 - RNA, 1701 nt, Artificial Sequence
  derived and/or modified CDS sequence (opt1) from hemagglutinin__InfluenzaA__ACX35307
augaaggccauccuggugguccuccuguacaccuucgccaccgcgaacgccgacacgcugugcaucggcuaccacgccaacaacagcaccgacaccguggacaccgugcucgagaagaacgucacggugacccacuccgugaaccugcuggaggacaagcacaacgggaagcucugcaagcugcgcggcgucgcgccccugcaccucgggaagugcaacaucgccggcuggauccuggggaacccggagugcgagagccuguccaccgccagcuccuggagcuacaucguggagaccuccagcuccgacaacggcacgugcuaccccggcgacuucaucgacuacgaggagcuccgggagcagcugagcuccgugagcuccuucgagcgcuucgagaucuuccccaagaccagcuccuggcccaaccacgacagcaacaagggggucaccgccgccugcccgcacgccggcgcgaaguccuucuacaagaaccugaucuggcucgugaagaaggggaacagcuaccccaagcuguccaagagcuacaucaacgacaagggcaaggaggugcugguccucugggggauccaccaccccagcaccuccgccgaccagcagagccuguaccagaacgccgacgccuacguguucgugggcacgucccgguacagcaagaaguucaagcccgagaucgccauccgcccgaagguccgggaccaggagggccgcaugaacuacuacuggacccugguggggcccggcgacaagaucaccuucgaggcgaccgggaaccucguggucccccgguacgccuucgccauggagcgcaacgccggcuccggcaucaucaucagcgacacgcccgugcacgacugcaacacgaccugccagaccccgaagggggccaucaacaccucccugcccuuccagaacauccaccccaucaccaucggcaagugccccaaguacgucaagagcaccaagcugcggcucgcgaccgggcugcgcaacgugccguccauccagagccggggccuguucggggccaucgccggcuucaucgagggcggguggacgggcaugguggacgggugguacggcuaccaccaccagaacgagcagggguccggcuacgccgccgaccucaagagcacccagaacgcgaucgacgagaucaccaacaaggugaacuccgucaucgagaagaugaacacccaguucacggccgugggcaaggaguucaaccaccuggagaagcgcaucgagaaccugaacaagaaggucgacgacggguuccucgacaucuggaccuacaacgccgagcugcuggugcuccuggagaacgagcggacccuggacuaccacgacagcaacgugaagaaccucuacgagaagguccgcucccagcugaagaacaacgccaaggagaucggcaacgggugcuucgaguucuaccacaagugcgacaacacgugcauggagagcgugaagaacggcaccuacgacuaccccaaguacuccgaggaggccaagcugaaccgggaggagaucgacggggugaagcucgagagcacccgcaucuaccagauccuggcgaucuacuccaccgucgccagcagccuggugcucguggucucccugggcgccaucagcuucuggaugugcuccaacggcagccugcagugccggaucugcaucuga

SEQ ID NO: 67485 - RNA, 1701 nt, Artificial Sequence; identical to SEQ ID NO: 66935
  derived and/or modified CDS sequence (opt1) from hemagglutinin__InfluenzaA__ACX35317

SEQ ID NO: 67486 - RNA, 1701 nt, Artificial Sequence
  derived and/or modified CDS sequence (opt1) from hemagglutinin__InfluenzaA__ACX35327
augaaggccauccuggugguccuccuguacaccuucgccaccgcgaacgccgacacgcugugcaucggcuaccacgccaacaacagcaccgacaccguggacaccgugcucgagaagaacgucacggugacccacuccgugaaccugcuggaggacaagcacaacgggaagcucugcaagcugcgcggcgucgcgccccugcaccucgggaagugcaacaucgccggcuggauccuggggaacccggagugcgagagccuguccaccgccagcuccuggagcuacaucguggagaccuccagcuccgacaacggcacgugcuaccccggcgacuucaucgacuacgaggagcuccgggagcagcugagcuccgugagcuccuucgagcgcuucgagaucuuccccaagaccagcuccuggcccaaccacgacagcaacaagggggucaccgccgccugcccgcacgccggcgcgaaguccuucuacaagaaccugaucuggcucgugaagaaggggaacagcuaccccaagcuguccaagagcuacaucaacgacaagggcaaggaggugcugguccucugggggauccaccaccccagcaccuccgccgaccagcagagccuguaccagaacgccgacuccuacguguucgugggcacgagccgguacuccaagaaguucaagcccgagaucgccauccgcccgaagguccgggaccaggagggccgcaugaacuacuacuggacccugguggagcccggggacaagaucaccuucgaggccaccggcaaccucguggucccccgguacgcguucgccauggagcgcaacgccgggagcggcaucaucaucuccgacacgcccgugcacgacugcaacacgaccugccagaccccgaagggcgccaucaacaccagccugcccuuccagaacauccaccccaucaccaucgggaagugccccaaguacgugaaguccaccaagcugcggcucgccaccggccugcgcaacgucccgagcauccagucccgggggcuguucggcgcgaucgccggguucaucgagggcggcuggacggggaugguggacggcugguacggguaccaccaccagaacgagcagggcagcggguacgccgccgaccucaaguccacccagaacgccaucgacgagaucaccaacaaggugaacagcgucaucgagaagaugaacacccaguucacggcggugggcaaggaguucaaccaccuggagaagcgcaucgagaaccugaacaagaaggucgacgacggcuuccucgacaucuggaccuacaacgccgagcugcuggugcuccuggagaacgagcggacccuggacuaccacgacuccaacgugaagaaccucuacgagaagguccgcagccagcugaagaacaacgccaaggagaucgggaacggcugcuucgaguucuaccacaagugcgacaacacgugcauggaguccgugaagaacgggaccuacgacuaccccaaguacagcgaggaggccaagcugaaccgggaggagaucgacggcgugaagcucgaguccacccgcaucuaccagauccuggccaucuacagcaccgucgcgagcucccuggugcucguggucagccugggggccaucuccuucuggaugugcagcaacggcucccugcagugccggaucugcaucuga

SEQ ID NO: 67487 - RNA, 1701 nt, Artificial Sequence
  derived and/or modified CDS sequence (opt1) from hemagglutinin__InfluenzaA__ACX36501
augaaggccauccuggugguccuccuguacaccuucgccaccgcgaacgccgacacgcugugcaucggcuaccacgccaacaacagcaccgacaccguggacaccgugcucgagaagaacgucacggugacccacuccgugaaccugcuggaggacaagcacaacgggaagcucugcaagcugcgcggcgucgcgccccugcaccucgggaagugcaacaucgccggcuggauccuggggaacccggagugcgagagccuguccaccgccagcuccuggagcuacaucguggagaccuccagcuccgacaacggcacgugcuaccccggcgacuucaucgacuacgaggagcuccgggagcagcugagcuccgugagcuccuucgagcgcuucgagaucuuccccaagaccagcuccuggcccaaccacgacagcaacaagggggucaccgccgccugcccgcacgccggcgcgaaguccuucuacaagaaccugaucuggcucgugaagaaggggaacagcuaccccaagcuguccaagagcuacaucaacgacaagggcaaggaggugcugguccucugggggauccaccaccccagcaccuccgccgaccagcagagcaucuaccagaacgccgacgccuacguguucgugggcacgucccgguacagcaagaaguucaagcccgagaucgccauccgcccgaagguccgggaccaggagggccgcaugaacuacuacuggacccugguggagcccggggacaagaucaccuucgaggcgaccggcaaccugguggucccccgguacgccuucgccauggagcgcaacgccggguccggcaucaucaucagcgacacgcccgugcacgacugcaacacgaccugccagaccccgaagggcgccaucaacaccucccuccccuuccagaacauccaccccaucaccaucgggaagugccccaaguacgucaagagcaccaagcugcggcuggcgaccggccuccgcaacgugccguccauccagagccgggggcuguucggcgccaucgccggguucaucgagggcggcuggacggggaugguggacggcugguacggguaccaccaccagaacgagcagggcuccggguacgccgccgaccucaagagcacccagaacgcgaucgacgagaucaccaacaaggugaacuccgucaucgagaagaugaacacccaguucacggccgugggcaaggaguucaaccaccuggagaagcgcaucgagaaccugaacaagaaggucgacgacggcuuccuggacaucuggaccuacaacgccgagcuccuggugcugcucgagaacgagcggacccuggacuaccacgacagcaacgugaagaaccuguacgagaagguccgcucccagcucaagaacaacgccaaggagaucgggaacggcugcuucgaguucuaccacaagugcgacaacacgugcauggagagcgugaagaacgggaccuacgacuaccccaaguacuccgaggaggccaagcugaaccgggaggagaucgacggcgugaagcuggagagcacccgcaucuaccagauccucgcgaucuacuccaccgucgccagcagccuggugcugguggucucccucggggccaucagcuucuggaugugcuccaacggcagccugcagugccggaucugcaucuga

SEQ ID NO: 67488 - RNA, 1701 nt, Artificial Sequence
  derived and/or modified CDS sequence (opt1) from hemagglutinin__InfluenzaA__ACX36502
augaaggccauccuggugguccuccuguacaccuucgccaccgcgaacgccgacacgcugugcaucggcuaccacgccaacaacagcaccgacaccguggacaccauccucgagaagaacgugacggucacccacuccgugaaccugcuggaggacaagcacaacgggaagcucugcaagcugcgcggcguggcgccccugcaccucgggaagugcaacaucgccggcuggauccuggggaacccggagugcgagagccuguccaccgccagcuccuggagcuacaucgucgagaccuccagcuccgacaacggcacgugcuaccccggcgacuucaucgacuacgaggagcuccgggagcagcugagcuccgugagcuccuucgagcgcuucgagaucuuccccaagaccagcuccuggcccaaccacgacagcaacaagggggugaccgccgccugcccgcacgccggcgcgaaguccuucuacaagaaccugaucuggcucgucaagaaggggaacagcuaccccaagcuguccaagagcuacaucaacgacaagggcaaggaggugcuggugcucugggggauccaccaccccagcaccuccgccgaccagcagagcaucuaccagaacgccgacgccuacgucuucgugggcacgucccgguacagcaagaaguucaagcccgagaucgccauccgcccgaaggugcgggaccaggagggccgcaugaacuacuacuggacccuggucgagcccggggacaagaucaccuucgaggcgaccggcaaccugguggugccccgguacgccuucgccauggagcgcaacgccggguccggcaucaucaucagcgacacgcccguccacgacugcaacacgaccugccagaccccgaagggcgccaucaacaccucccuccccuuccagaacauccaccccaucaccaucgggaagugccccaaguacgucaagagcaccaagcugcggcuggcgaccggccuccgcaacgugccguccauccagagccgggggcuguucggcgccaucgccggguucaucgagggcggcuggacggggaugguggacggcugguacggguaccaccaccagaacgagcagggcuccggguacgccgccgaccucaagagcacccagaacgcgaucgacgagaucaccaacaaggugaacuccgugaucgagaagaugaacacccaguucacggccgucggcaaggaguucaaccaccuggagaagcgcaucgagaaccugaacaagaagguggacgacggcuuccuggacaucuggaccuacaacgccgagcuccugguccugcucgagaacgagcggacccuggacuaccacgacagcaacgugaagaaccuguacgagaaggugcgcucccagcucaagaacaacgccaaggagaucgggaacggcugcuucgaguucuaccacaagugcgacaacacgugcauggagagcgucaagaacgggaccuacgacuaccccaaguacuccgaggaggccaagcugaaccgggaggagaucgacggcgugaagcuggagagcacccgcaucuaccagauccucgcgaucuacuccaccguggccagcagccugguccugguggugucccucggggccaucagcuucuggaugugcuccaacggcagccugcagugccggaucugcaucuga

SEQ ID NO: 67489 - RNA, 1701 nt, Artificial Sequence
  derived and/or modified CDS sequence (opt1) from hemagglutinin__InfluenzaA__ACX36503
augaaggccauccuggugguccuccuguacaccuucgccaccgcgaacgccgacacgcugugcaucggcuaccacgccaacaacagcaccgacaccguggacaccauccucgagaagaacgugacggucacccacuccgugaaccugcuggaggacaagcacaacgggaagcucugcaagcugcgcggcguggcgccccugcaccucgggaagugcaacaucgccggcuggauccuggggaacccggagugcgagagccuguccaccgccagcuccuggagcuacaucgucgagaccuccagcuccgacaacggcacgugcuaccccggcgacuucaucgacuacgaggagcuccgggagcagcugagcuccgugagcuccuucgagcgcuucgagaucuuccccaagaccagcuccuggcccaaccacgacagcaacaagggggugaccgccgccugcccgcacgccggcgcgaaguccuucuacaagaaccugaucuggcucgucaagaaggggaacagcuaccccaagcuguccaagagcuacaucaacgacaagggcaaggaggugcuggugcucugggggauccaccaccccagcaccuccgccgaccagcagagcaucuaccagaacgccgacgccuacgucuucgugggcacgucccgguacagcaagaaguucaagcccgagaucgccauccgcccgaaggugcgggaccaggagggccgcaugaacuacuacuggacccuggucgagcccggggacaagaucaccuucgaggcgaccggcaaccugguggugccccgguacgccuucgccauggagcgcaacgccggguccggcaucaucaucagcgacacgcccguccacgacugcaacacgaccugccagaccccgaagggcgccaucaacaccucccuccccuuccagaacauccaccccaucaccaucgggaagugccccaaguacgucaagagcaccaagcugcggcuggcgaccggccuccgcaacgugccguccauccagagccgggggcuguucggcgccaucgccggguucaucgagggcggcuggacggggaugguggacggcugguacggguaccaccaccagaacgagcagggcuccggguacgccgccgaccucaagagcacccagaacgcgaucgacgagaucaccaacaaggugaacuccgugaucgagaagaugaacacccaguucacggccgucggcaaggaguucaaccaccuggagaagcgcaucgagaaccugaacaagaagguggacgacggcuuccuggacaucuggaccuacaacgccgagcuccugguccugcucgagaacgagcggacccuggacuaccacgacagcaacgugaagaaccuguacgagaaggugcgcucccagcucaagaacaacaccaaggagaucgggaacggcugcuucgaguucuaccacaagugcgacaacacgugcauggagagcgucaagaacgggaccuacgacuaccccaaguacuccgaggaggccaagcugaaccgggaggagaucgacggcgugaagcuggagagcacccgcaucuaccagauccucgccaucuacuccaccguggcgagcagccugguccugguggugucccucggggccaucagcuucuggaugugcuccaacggcagccugcagugccggaucugcaucuga

SEQ ID NO: 67490 - RNA, 1701 nt, Artificial Sequence
  derived and/or modified CDS sequence (opt1) from hemagglutinin__InfluenzaA__ACX47367
augaaggccauccuggugguccuccuguacaccuucgccaccgcgaacgccgacacgcugugcaucggcuaccacgccaacaacagcaccgacaccguggacaccgugcucgagaagaacgucacggugacccacuccgugaaccugcuggaggacaagcacaacgggaagcucugcaagcugcgcggcgucgcgccccugcaccucgggaagugcaacaucgccggcuggauccuggggaacccggagugcgagagccuguccaccgcgagcuccuggagcuacaucguggagaccuccagcuccgacaacggcacgugcuaccccggcgacuucaucgacuacgaggagcuccgggagcagcugagcuccgugagcuccuucgagcgcuucgagaucuuccccaagaccagcuccuggcccaaccacgacccgaacaagggggucaccgccgccugcccccacgccggcgccaagagcuucuacaagaaccugaucuggcucgugaagaaggggaacuccuaccccaagcugagcaaguccuacaucaacgacaagggcaaggaggugcugguccucugggggauccaccaccccagcaccagcgccgaccagcagucccuguaccagaacgccgacgccuacguguucgugggcacgagccgguacuccaagaaguucaagccggagaucgccauccgccccaagguccgggaccaggagggccgcaugaacuacuacuggacccuggugaagcccggggacaagaucaccuucgaggcgaccggcaaccucguggucccccgguacgccuucgccauggagcgcaacgccgggagcggcaucaucaucuccgacacgccggugcacgacugcaacacgaccugccagacccccaagggcgccaucaacaccagccugcccuuccagaacauccaccccaucaccaucgggaagugcccgaaguacgugaaguccaccaagcugcggcucgcgaccggccugcgcaacguccccagcauccagucccgggggcuguucggcgccaucgccggguucaucgagggcggcuggacggggaugguggacggcugguacggguaccaccaccagaacgagcagggcagcggguacgccgccgaccucaaguccacccagaacgcgaucgacgagaucaccaacaaggugaacagcgucaucgagaagaugaacacccaguucacggccgugggcaaggaguucaaccaccuggagaagcgcaucgagaaccugaacaagaaggucgacgacggcuuccucgacaucuggaccuacaacgccgagcugcuggugcuccuggagaacgagcggacccuggacuaccacgacuccaacgugaagaaccucuacgagaagguccgcagccagcugaagaacaacgccaaggagaucgggaacggcugcuucgaguucuaccacaagugcgacaacacgugcauggaguccgugaagaacgggaccuacgacuaccccaaguacagcgaggaggccaagcugaaccgggaggagaucgacggcgugaagcucgaguccacccgcaucuaccagauccuggcgaucuacagcaccgucgccuccagccuggugcucguggucagccugggggccaucuccuucuggaugugcagcaacggcucccugcagugccggaucugcaucuga

SEQ ID NO: 67491 - RNA, 1701 nt, Artificial Sequence
  derived and/or modified CDS sequence (opt1) from hemagglutinin__InfluenzaA__ACX47368
augaaggccauccuggugguccuccuguacaccuucgccaccgcgaacgccgacacgcugugcaucggcuaccacgccaacaacagcaccgacaccguggacaccgugcucgagaagaacgucacggugacccacuccgugaaccugcuggaggacaagcacaacgggaagcucugcaagcugcgcggcgucgcgccccugcaccucgggaagugcaacaucgccggcuggauccuggggaacccggagugcgagagccuguccaccgcgagcuccuggagcuacaucguggagaccuccagcuccgacaacggcacgugcuaccccggcgacuucaucgacuacgaggagcuccgggagcagcugagcuccgugagcuccuucgagcgcuucgagaucuuccccaagaccagcuccuggcccaaccacgacccgaacaagggggucaccgccgccugcccccacgccggcgccaagagcuucuacaagaaccugaucuggcucgugaagaaggggaacuccuaccccaagcugagcaaguccuacaucaacgacaagggcaaggaggugcugguccucugggggauccaccaccccagcaccagcgccgaccagcagucccuguaccagaacgccgacgccuacguguucgugggcacgagccgguacuccaagaaguucaagccggagaucgccauccgccccaagguccgggaccaggagggccgcaugaacuacuacuggacccugguggagcccggggacaagaucaccuucgaggcgaccggcaaccucguggucccccgguacgccuucgccauggagcgcaacgccgggagcggcaucaucaucuccgacacgccggugcacgacugcaacacgaccugccagacccccaagggcgccaucaacaccagccugcccuuccagaacauccaccccaucaccaucgggaagugcccgaaguacgugaaguccaccaagcugcggcucgcgaccggccugcgcaacguccccagcauccagucccgggggcuguucggcgccaucgccggguucaucgagggcggcuggacggggaugguggacggcugguacggguaccaccaccagaacgagcagggcagcggguacgccgccgaccucaaguccacccagaacgcgaucgacgagaucaccaacaaggugaacagcgucaucgagaagaugaacacccaguucacggccgugggcaaggaguucaaccaccuggagaagcgcaucgagaaccugaacaagaaggucgacgacggcuuccucgacaucuggaccuacaacgccgagcugcuggugcuccuggagaacgagcggacccuggacuaccacgacuccaacgugaagaaccucuacgagaagguccgcagccagcugaagaacaacgccaaggagaucgggaacggcugcuucgaguucuaccacaagugcgacaacacgugcauggaguccgugaagaacgggaccuacgacuaccccaaguacagcgaggaggccaagcugaaccgggaggagaucgacggcgugaagcucgaguccacccgcaucuaccagauccuggcgaucuacagcaccgucgccuccagccuggugcucguggucagccugggggccaucuccuucuggaugugcagcaacggcucccugcagugccggaucugcaucuga

SEQ ID NO: 67492 - RNA, 1701 nt, Artificial Sequence; identical to SEQ ID NO: 67491
  derived and/or modified CDS sequence (opt1) from hemagglutinin__InfluenzaA__ACX47369

SEQ ID NO: 67493 - RNA, 1701 nt, Artificial Sequence
  derived and/or modified CDS sequence (opt1) from hemagglutinin__InfluenzaA__ACX47370
augaaggccauccuggugguccuccuguacaccuucgccaccgcgaacgccgacacgcugugcaucggcuaccacgccaacaacagcaccgacaccguggacaccgugcucgagaagaacgucacggugacccacuccgugaaccugcuggaggacaagcacaacgggaagcucugcaagcugcgcggcgucgcgccccugcaccucgggaagugcaacaucgccggcuggauccuggggaacccggagugcgagagccuguccaccgcgagcuccuggagcuacaucguggagaccuccagcuccgacaacggcacgugcuaccccggcgacuucaucgacuacgaggagcuccgggagcagcugagcuccgugagcuccuucgagcgcuucgagaucuuccccaagaccagcuccuggcccaaccacgacccgaacaagggggucaccgccgccugcccccacgccggcgccaagagcuucuacaagaaccugaucuggcucgugaagaaggggaacuccuaccccaagcugagcaaguccuacaucaacgacaagggcaaggaggugcugguccucugggggauccaccaccccagcaccagcgccgaccggcagucccuguaccagaacgccgacgccuacguguucgugggcacgagccgcuacuccaagaaguucaagccggagaucgccauccggcccaagguccgcgaccaggagggccggaugaacuacuacuggacccugguggagcccggggacaagaucaccuucgaggcgaccggcaaccucguggucccccgcuacgccuucgccauggagcggaacgccgggagcggcaucaucaucuccgacacgccggugcacgacugcaacacgaccugccagacccccaagggcgccaucaacaccagccugcccuuccagaacauccaccccaucaccaucgggaagugcccgaaguacgugaaguccaccaagcugcgccucgcgaccggccugcggaacguccccagcauccagucccgcgggcuguucggcgccaucgccggguucaucgagggcggcuggacggggaugguggacggcugguacggguaccaccaccagaacgagcagggcagcggguacgccgccgaccucaaguccacccagaacgcgaucgacgagaucaccaacaaggugaacagcgucaucgagaagaugaacacccaguucacggccgugggcaaggaguucaaccaccuggagaagcggaucgagaaccugaacaagaaggucgacgacggcuuccucgacaucuggaccuacaacgccgagcugcuggugcuccuggagaacgagcgcacccuggacuaccacgacuccaacgugaagaaccucuacgagaagguccggagccagcugaagaacaacgccaaggagaucgggaacggcugcuucgaguucuaccacaagugcgacaacacgugcauggaguccgugaagaacgggaccuacgacuaccccaaguacagcgaggaggccaagcugaaccgcgaggagaucgacggcgugaagcucgaguccacccggaucuaccagauccuggcgaucuacagcaccgucgccuccagccuggugcucguggucagccugggggccaucuccuucuggaugugcagcaacggcucccugcagugccgcaucugcaucuga

SEQ ID NO: 67494 - RNA, 1701 nt, Artificial Sequence; identical to SEQ ID NO: 67491
  derived and/or modified CDS sequence (opt1) from hemagglutinin__InfluenzaA__ACX47371

SEQ ID NO: 67495 - RNA, 1701 nt, Artificial Sequence; identical to SEQ ID NO: 67491
  derived and/or modified CDS sequence (opt1) from hemagglutinin__InfluenzaA__ACX47372

SEQ ID NO: 67496 - RNA, 1701 nt, Artificial Sequence; identical to SEQ ID NO: 67491
  derived and/or modified CDS sequence (opt1) from hemagglutinin__InfluenzaA__ACX47373

SEQ ID NO: 67497 - RNA, 1701 nt, Artificial Sequence; identical to SEQ ID NO: 67491
  derived and/or modified CDS sequence (opt1) from hemagglutinin__InfluenzaA__ACX47374

SEQ ID NO: 67498 - RNA, 1701 nt, Artificial Sequence
  derived and/or modified CDS sequence (opt1) from hemagglutinin__InfluenzaA__ACX47375
augaaggccauccuggugguccuccuguacaccuucgccaccgcgaacgccgacacgcugugcaucggcuaccacgccaacaacagcaccgacaccguggacaccgugcucgagaagaacgucacggugacccacuccgugaaccugcuggaggacaagcacaacgggaagcucugcaagcugcgcggcgucgcgccccugcaccucgggaagugcaacaucgccggcuggauccuggggaacccggagugcgagagccuguccaccgcgagcuccuggagcuacaucguggagaccuccagcuccgacaacggcacgugcuaccccggcgacuucaucgacuacgaggagcuccgggagcagcugagcuccgugagcuccuucgagcgcuucgagaucuuccccaagaccagcuccuggcccaaccacgacccgaacaagggggucaccgccgccugcccccacgccggcgccaagagcuucuacaagaaccugaucuggcucgugaagaaggggaacuccuaccccaagcugagcaaguccuacaucaacgacaagggcaaggaggugcugguccucugggggauccaccaccccagcaccagcgccgaccagcagucccuguaccagaacgccgacgccuacguguucgugggcacgagccgguacuccaagaaguucaagccggagaucgccauccgccccaagguccgggaccaggagggccgcaugaacuacuacuggacccugguggagcccggggacaagaucaccuucgaggcgaccggcaaccucguggucccccgguacgccuucgccauggagcgcaacgccgggagcggcaucaucaucuccgacacgccggugcacgacugcaacacgaccugccagacccccaacggcgccaucaacaccagccugcccuuccagaacauccaccccaucaccaucgggaagugcccgaaguacgugaaguccaccaagcugcggcucgcgaccggccugcgcaacguccccagcauccagucccgggggcuguucggcgccaucgccggguucaucgagggcggcuggacggggaugguggacggcugguacggguaccaccaccagaacgagcagggcagcggguacgccgccgaccucaaguccacccagaacgcgaucgacgagaucaccaacaaggugaacagcgucaucgagaagaugaacacccaguucacggccgugggcaaggaguucaaccaccuggagaagcgcaucgagaaccugaacaagaaggucgacgacggcuuccucgacaucuggaccuacaacgccgagcugcuggugcuccuggagaacgagcggacccuggacuaccacgacuccaacgugaagaaccucuacgagaagguccgcagccagcugaagaacaacgccaaggagaucgggaacggcugcuucgaguucuaccacaagugcgacaacacgugcauggaguccgugaagaacgggaccuacgacuaccccaaguacagcgaggaggccaagcugaaccgggaggagaucgacggcgugaagcucgaguccacccgcaucuaccagauccuggcgaucuacagcaccgucgccuccagccuggugcucguggucagccugggggccaucuccuucuggaugugcagcaacggcucccugcagugccggaucugcaucuga

SEQ ID NO: 67499 - RNA, 1701 nt, Artificial Sequence; identical to SEQ ID NO: 67491
  derived and/or modified CDS sequence (opt1) from hemagglutinin__InfluenzaA__ACX47376

SEQ ID NO: 67500 - RNA, 1701 nt, Artificial Sequence; identical to SEQ ID NO: 67491
  derived and/or modified CDS sequence (opt1) from hemagglutinin__InfluenzaA__ACX47377

SEQ ID NO: 67501 - RNA, 1701 nt, Artificial Sequence
  derived and/or modified CDS sequence (opt1) from hemagglutinin__InfluenzaA__ACX47380
augaaggccauccuggugguccuccuguacaccuucgccaccgcgaacgccgacacgcugugcaucggcuaccacgccaacaacagcaccgacaccguggacaccgugcucgagaagaacgucacggugacccacuccgugaaccugcuggaggacaagcacaacgggaagcucugcaagcugcgcggcgucgcgccccugcaccucgggaagugcaacaucgccggcuggauccuggggaacccggagugcgagagccuguccaccaccagcuccuggagcuacaucguggagacguccagcuccgacaacgggaccugcuaccccggcgacuucaucgacuacgaggagcuccgggagcagcugagcuccgugagcuccuucgagcgcuucgagaucuuccccaagaccagcuccuggcccaaccacgacagcaacaagggcgucaccgccgccugcccgcacgccggcgccaaguccuucuacaagaaccugaucuggcucgugaagaaggggaacagcuaccccaagcuguccaagagcuacaucaacgacaagggcaaggaggugcugguccucugggggauccaccaccccagcacguccgcggaccagcagagccuguaccagaacgccgacgccuacguguucgugggcaccucccgguacagcaagaaguucaagcccgagaucgccauccgcccgaagguccgggaccaggagggccgcaugaacuacuacuggacccugguggagcccggggacaagaucaccuucgaggccacgggcaaccucguggucccccgguacgcguucgugauggagcgcaacgccggguccggcaucaucaucagcgacacccccgugcacgacugcaacacgaccugccagaccccgaagggcgccaucaacaccucccugcccuuccagaacauccaccccaucaccaucgggaagugccccaaguacgucaagagcaccaagcugcggcucgccacgggccugcgcaacgugccguccauccagagccgggggcuguucggcgccaucgcgggguucaucgagggcggcuggaccgggaugguggacggcugguacggguaccaccaccagaacgagcagggcuccggguacgccgccgaccucaagagcacccagaacgccaucgacgagaucaccaacaaggucaacuccgugaucgagaagaugaacacgcaguucaccgccgucggcaaggaguucaaccaccuggagaagcgcaucgagaaccugaacaagaagguggacgacggcuuccucgacaucuggaccuacaacgcggagcugcuggugcuccuggagaacgagcggacccuggacuaccacgacagcaacgucaagaaccucuacgagaaggugcgcucccagcugaagaacaacgccaaggagaucgggaacggcugcuucgaguucuaccacaagugcgacaacacgugcauggagagcgugaagaacgggaccuacgacuaccccaaguacuccgaggaggccaagcugaaccgggaggagaucgacggcgucaagcucgagagcacccgcaucuaccagauccuggccaucuacuccaccguggccagcagccuggugcucgucgugucccugggggcgaucagcuucuggaugugcuccaacggcagccugcagugccggaucugcaucuga

SEQ ID NO: 67502 - RNA, 1701 nt, Artificial Sequence; identical to SEQ ID NO: 67501
  derived and/or modified CDS sequence (opt1) from hemagglutinin__InfluenzaA__ACX47381

SEQ ID NO: 67503 - RNA, 1701 nt, Artificial Sequence; identical to SEQ ID NO: 67501
  derived and/or modified CDS sequence (opt1) from hemagglutinin__InfluenzaA__ACX47382

SEQ ID NO: 67504 - RNA, 1701 nt, Artificial Sequence
  derived and/or modified CDS sequence (opt1) from hemagglutinin__InfluenzaA__ACX47383
augaaggccauccuggugguccuccuguacaccuucgccaccgcgaacgccgacacgcugugcaucggcuaccacgccaacaacagcaccgacaccguggacaccgugcucgagaagaacgucacggugacccacuccgugaaccugcuggaggacaagcacaacgggaagcucugcaagcugcgcggcgucgcgccccugcaccucgggaagugcaacaucgccggcuggauccuggggaacccggagugcgagagccuguccaccaccagcuccuggagcuacaucguggagacguccagcuccgacaacgggaccugcuaccccggcgacuucaucgacuacgaggagcuccgggagcagcugagcuccgugagcuccuucgagcgcuucgagaucuuccccaagaccagcuccuggcccaaccacgacagcaacaagggcgucaccgccgccugcccgcacgccggcgccaaguccuucuacaagaaccugaucuggcucgugaagaaggggaacagcuaccccaagcuguccaagagcuacaucaacgacaagggcaaggaggugcugguccucugggggauccaccaccccagcacguccgcggaccagcagagccuguaccagaacgccgacgccuacguguucgugggcaccucccgguacagcaagaaguucaagcccgagaucgccauccgcccgaagguccgggaccaggagggccgcaugaacuacuacuggacccugguggagcccggggacaagaucaccuucgaggccacgggcaaccucguggucccccgguacgcguucgccauggagcgcaacgccggguccggcaucaucaucagcgacacccccgugcacgacugcaacacgaccugccagaccccgaagggcgccaucaacaccucccugcccuuccagaacauccaccccaucaccaucgggaagugccccaaguacgucaagagcaccaagcugcggcucgccacgggccugcgcaacgugccguccauccagagccgggggcuguucggcgcgaucgccggguucaucgagggcggcuggaccgggaugguggacggcugguacggguaccaccaccagaacgagcagggcuccggguacgccgccgaccucaagagcacccagaacgccaucgacgagaucaccaacaaggugaacuccgucaucgagaagaugaacacgcaguucaccgcggugggcaaggaguucaaccaccuggagaagcgcaucgagaaccugaacaagaaggucgacgacggcuuccucgacaucuggaccuacaacgccgagcugcuggugcuccuggagaacgagcggacccuggacuaccacgacagcaacgugaagaaccucuacgagaagguccgcucccagcugaagaacaacgccaaggagaucgggaacggcugcuucgaguucuaccacaagugcgacaacacgugcauggagagcgugaagaacgggaccuacgacuaccccaaguacuccgaggaggccaagcugaaccgggagaagaucgacggcgugaagcucgagagcacccgcaucuaccagauccuggccaucuacuccaccgucgcgagcagccuggugcucguggucucccugggggccaucagcuucuggaugugcuccaacggcagccugcagugccggaucugcaucuga

SEQ ID NO: 67505 - RNA, 1701 nt, Artificial Sequence
  derived and/or modified CDS sequence (opt1) from hemagglutinin__InfluenzaA__ACX47384
augaaggccauccuggugguccuccuguacaccuucgccaccgcgaacgccgacacgcugugcaucggcuaccacgccaacaacagcaccgacaccguggacaccgugcucgagaagaacgucacggugacccacuccgugaaccugcuggaggacaagcacaacgggaagcucugcaagcugcgcggcgucgcgccccugcaccucgggaagugcaacaucgccggcuggauccuggggaacccggagugcgagagccuguccaccaccagcuccuggagcuacaucguggagacguccagcuccgacaacgggaccugcuaccccggcgacuucaucgacuacgaggagcuccgggagcagcugagcuccgugagcuccuucgagcgcuucgagaucuuccccaagaccagcuccuggcccaaccacgacagcaacaagggcgucaccgccgccugcccgcacgccggcgccaaguccuucuacaagaaccugaucuggcucgugaagaaggggaacagcuaccccaagcuguccaagagcuacaucaacgacaagggcaaggaggugcugguccucugggggauccaccaccccagcacguccgcggaccagcagagccuguaccagaacgccgacgccuacguguucgugggcaccucccgguacagcaagaaguucaagcccgagaucgccauccgcccgaagguccgggaccaggagggccgcaugaacuacuacuggacccugguggagcccggggacaagaucaccuucgaggccacgggcaaccucguggucccccgguacgcguucgccauggagcgcaacgccggguccggcaucaucaucagcgacacccccgugcacgacugcaacacgaccugccagaccccgaagggcgccaucaacaccucccugcccuuccagaacauccaccccaucaccaucgggaagugccccaaguacgucaagagcaccaagcugcggcucgccacgggccugcgcaacgugccguccauccagagccgggggcuguucggcgcgaucgccggguucaucgagggcggcuggaccgggaugguggacggcugguacggguaccaccaccagaacgagcagggcuccggguacgccgccgaccucaagagcacccagaacgccaucgacgagaucaccaacaaggugaacuccgucaucgagaagaugaacacgcaguucaccgcggugggcaaggaguucaaccaccuggagaagcgcaucgagaaccugaacaagaaggucgacgacggcuuccucgacaucuggaccuacaacgccgagcugcuggugcuccuggagaacgagcggacccuggacuaccacgacagcaacgugaagaaccucuacgagaagguccgcucccagcugaagaacaacgccaaggagaucgggaacggcugcuucgaguucuaccacaagugcgacaacacgugcauggagagcgugaagaacgggaccuacgacuaccccaaguacuccgaggaggccaagcugaaccgggaggagaucgacggcgugaagcucgagagcacccgcaucuaccagauccuggccaucuacuccaccgucgcgagcagccuggugcucguggucucccugggggccaucagcuucuggaugugcuccaacggcagccugcagugccggaucugcaucuga

SEQ ID NO: 67506 - RNA, 1701 nt, Artificial Sequence; identical to SEQ ID NO: 67505
  derived and/or modified CDS sequence (opt1) from hemagglutinin__InfluenzaA__ACX47385

SEQ ID NO: 67507 - RNA, 1701 nt, Artificial Sequence; identical to SEQ ID NO: 67505
  derived and/or modified CDS sequence (opt1) from hemagglutinin__InfluenzaA__ACX47387

SEQ ID NO: 67508 - RNA, 1701 nt, Artificial Sequence; identical to SEQ ID NO: 66693
  derived and/or modified CDS sequence (opt1) from hemagglutinin__InfluenzaA__ACX55834

SEQ ID NO: 67509 - RNA, 1701 nt, Artificial Sequence; identical to SEQ ID NO: 67491
  derived and/or modified CDS sequence (opt1) from hemagglutinin__InfluenzaA__ACX61574

SEQ ID NO: 67510 - RNA, 1701 nt, Artificial Sequence; identical to SEQ ID NO: 66693
  derived and/or modified CDS sequence (opt1) from hemagglutinin__InfluenzaA__ACX61575

SEQ ID NO: 67511 - RNA, 1701 nt, Artificial Sequence
  derived and/or modified CDS sequence (opt1) from hemagglutinin__InfluenzaA__ACX83577
augaaggccauccuggugguccuccuguacaccuucgccaccgcgaacgccgacacgcugugcaucggcuaccacgccaacaacagcaccgacaccguggacaccgugcucgagaagaacgucacggugacccacuccgugaaccugcuggaggacaagcacaacgggaagcucugcaagcugcgcggcgucgcgccccugcaccucgggaagugcaacaucgccggcuggauccuggggaacccggagugcgagagcuucuccaccagcuccagcugguccuacaucguggagaccagcuccagcgacaacggcacgugcuaccccggcgacuucaucgacuacgaggagcugcgggagcagcucuccagcguguccagcuucgagcgcuucgagaucuuccccaagaccuccagcuggcccaaccacgacuccaacaagggggucaccgccgccugcccgcacgccggcgccaagagcuucuacaagaaccugaucuggcuggugaagaaggggaacuccuaccccaagcucagcaagagcuacaucaacgacaagggcaaggaggugcugguccugugggggauccaccaccccuccaccagcgcggaccagcagucccucuaccagaacgccgacgccuacguguucgugggcacgagccgguacuccaagaaguucaagcccgagaucgccauccgcccgaagguccggggccaggaggggcgcaugaacuacuacuggacccugguggagcccggcgacaagaucaccuucgaggccaccgggaaccugguggucccccgguacgcguucgccauggagcgcaacgccggcagcggcaucaucaucuccgacacgcccgugcacgacugcaacacgaccugccagaccccgaagggggccaucaacaccagccuccccuuccagaacauccaccccaucaccaucggcaagugccccaaguacgugaaguccaccaagcugcggcuggccaccgggcuccgcaacgucccgagcauccagucccggggccuguucggggcgaucgccggcuucaucgagggcggguggacgggcaugguggacgggugguacggcuaccaccaccagaacgagcaggggagcggcuacgccgccgaccugaaguccacccagaacgccaucgacgagaucaccaacaaggugaacagcgucaucgagaagaugaacacccaguucacggcggugggcaaggaguucaaccaccucgagaagcgcaucgagaaccugaacaagaaggucgacgacggguuccuggacaucuggaccuacaacgccgagcuccuggugcugcucgagaacgagcggacccuggacuaccacgacuccaacgugaagaaccuguacgagaagguccgcagccagcucaagaacaacgccaaggagaucggcaacgggugcuucgaguucuaccacaagugcgacaacacgugcauggaguccgugaagaacggcaccuacgacuaccccaaguacagcgaggaggccaagcugaaccgggaggagaucgacggggugaagcuggaguccacccgcaucuaccagauccucgccaucuacagcaccgucgcgagcucccuggugcugguggucagccucggcgccaucuccuucuggaugugcagcaacggcucccugcagugccggaucugcaucuga

SEQ ID NO: 67512 - RNA, 1701 nt, Artificial Sequence
  derived and/or modified CDS sequence (opt1) from hemagglutinin__InfluenzaA__ACX94091
augaaggccauccuggugguccuccuguacaccuucgccaccgcgaacgccgacacgcugugcaucggcuaccacgccaacaacagcaccgacaccguggacaccgugcucgagaagaacgucacggugacccacuccgugaaccugcuggaggacaagcacaacgggaagcucugcaagcugcgcggcgucgcgccccugcaccucgggaagugcaacaucgccggcuggauccuggggaacccggagugcgagagccuguccaccgcgagcuccuggagcuacaucguggagaccuccagcuccgacaacggcacgugcuaccccggcgacuucaucgacuacgaggagcuccgggagcagcugagcuccgugagcuccuucgagcgcuucgagaucuuccccaagaccaucagcuggcccaaccacgacuccaacaagggggucaccgccgccugcccgcacgccggcgccaagagcuucuacaagaaccugaucuggcucgugaagaaggggaacuccuaccccaagcugagcaaguccuacaucaacgacaagggcaaggaggugcugguccucugggggauccaccaccccagcaccagcgccgaccagcagucccuguaccagaacgccgacgccuacguguucgugggcacgagccgguacuccaagaaguucaagcccgagaucgccauccgcccgaagguccgggaccaggagggccgcaugaacuacuacuggacccugguggagcccggggacaagaucaccuucgaggcgaccggcaaccucguggucccccgguacgccuucgccauggagcgcaacgccgggagcggcaucaucaucuccgacacgcccgugcacgacugcaacacgaccugccagaccccgaagggcgccaucaacaccagccugcccuuccagaacauccaccccaucaccaucgggaagugcuccaaguacgucaagagcaccaagcugcggcucgcgaccggccugcgcaacgugcccuccauccagagccgggggcuguucggcgccaucgccggguucaucgagggcggcuggacggggaugguggacggcugguacggguaccaccaccagaacgagcagggcuccggguacgccgccgaccucaagagcacccagaacgcgaucgacgagaucaccaacaaggugaacuccgucaucgagaagaugaacacccaguucacggccgugggcaaggaguucaaccaccuggagaagcgcaucgagaaccugaacaagaaggucgacgacggcuuccucgacaucuggaccuacaacgccgagcugcuggugcuccuggagaacgagcggacccuggacuaccacgacagcaacgugaagaaccucuacgagaagguccgcucccagcugaagaacaacgccaaggagaucgggaacggcugcuucgaguucuaccacaagugcgacaacacgugcauggagagcgugaagaacgggaccuacgacuacccgaaguacuccgaggaggccaagcugaaccgggaggagaucgacggcgugaagcucgagagcacccgcaucuaccagauccuggcgaucuacuccaccgucgccagcagccuggugcucguggucucccugggggccaucagcuucuggaugugcuccaacggcagccugcagugccggaucugcaucuga

SEQ ID NO: 67513 - RNA, 1701 nt, Artificial Sequence
  derived and/or modified CDS sequence (opt1) from hemagglutinin__InfluenzaA__ACY26192
augaaggccauccuggugguccuccuguacaccuucgccaccgcgaacgccgacacgcugugcaucggcuaccacgccaacaacagcaccgacaccguggacaccgugcucgagaagaacgucacggugacccacuccgugaaccugcuggaggacaagcacaacgggaagcucugcaagcugcgcggcgucgcgccccugcaccucgggaagugcaacaucgccggcuggauccuggggaacccggagugcgagagccuguccaccgccagcuccuggagcuacaucguggagaccuccagcuccgacaacggcacgugcuaccccggcgacuucaucgacuacgaggagcuccgggagcagcugagcuccgugagcuccuucgagcgcuucgagaucuuccccaagaccagcuccuggcccaaccacgacagcaacaagggggucaccgccgccugcccgcacgccggcgcgaaguccuucuacaagaaccugaucuggcucgugaagaaggggaacagcuaccccaagcuguccaagagcuacaucaacgacaagggcaaggaggugcugguccucugggggauccaccaccccagcaccuccgccgaccagcagagccuguaccagaacgccgacgccuacguguucgugggcacgucccgguacagcaagaaguucaagcccgagaucgccauccgcccgaagguccgggaccaggagggccgcaugaacuacuacuggacccugguggagcccggggacaagaucaccuucgaggcgaccggcaaccucguggucccccgguacgccuucgccauggagcgcaacgccggguccggcaucaucaucagcgacacgcccgugcacaacugcaacacgaccugccagaccccgaagggcgccaucaacaccucccugcccuuccagaacauccaccccaucaccaucgggaagugccccaaguacgucaagagcaccaagcugcggcucgcgaccggccugcgcaacgugccguccauccagagccgggggcuguucggcgccaucgccggguucaucgagggcggcuggacggggaugguggacggcugguacggguaccaccaccagaacgagcagggcuccggguacgccgccgaccucaagagcacccaggacgcgaucgacgagaucaccaacaaggugaacuccgucaucgagaagaugaacacccaguucacggccgugggcaaggaguucaaccaccuggagaagcgcaucgagaaccugaacaagaaggucgacgacggcuuccucgacaucuggaccuacaacgccgagcugcuggugcuccuggagaacgagcggacccuggacuaccacgacagcaacgugaagaaccucuacgagaagguccgcucccagcugaagaacaacgccaaggagaucgggaacggcugcuucgaguucuaccacaagugcgacaacacgugcauggagagcgugaagaacgggaccuacgacuaccccaaguacuccgaggaggccaagcugaaccgggaggagaucgacggcgugaagcucgagagcacccgcaucuaccagauccuggcgaucuacuccaccgucgccagcagccuggugcucguggucucccugggggccaucagcuucuggaugugcuccaacggcagccugcagugccggaucugcaucuga

SEQ ID NO: 67514 - RNA, 1701 nt, Artificial Sequence; identical to SEQ ID NO: 67262
  derived and/or modified CDS sequence (opt1) from hemagglutinin__InfluenzaA__ACY26202

SEQ ID NO: 67515 - RNA, 1701 nt, Artificial Sequence; identical to SEQ ID NO: 66693
  derived and/or modified CDS sequence (opt1) from hemagglutinin__InfluenzaA__ACY46103

SEQ ID NO: 67516 - RNA, 1701 nt, Artificial Sequence; identical to SEQ ID NO: 66693
  derived and/or modified CDS sequence (opt1) from hemagglutinin__InfluenzaA__ACY46113

SEQ ID NO: 67517 - RNA, 1701 nt, Artificial Sequence
  derived and/or modified CDS sequence (opt1) from hemagglutinin__InfluenzaA__ACY46123
augaaggccauccuggugguccuccuguacaccuucgccaccgcgaacgccgacacgcugugcaucggcuaccacgccaacaacagcaccgacaccguggacaccgugcucgagaagaacgucacggugacccacuccgugaaccugcuggaggacaagcacaacgggaagcucugcaagcugcgcggcgucgcgccccugcaccucgggaagugcaacaucgccggcuggauccuggggaacccggagugcgagagccuguccaccgccagcuccuggagcuacaucguggagaccuccagcuccgacaacggcacgugcuaccccggcgacuucaucgacuacgaggagcuccgggagcagcugagcuccgugagcuccuucgagcgcuucgagaucuuccccaagaccagcuccuggcccaaccacgacagcaacaagggggucaccgccgccugcccgcacgccggcgcgaaguccuucuacaagaaccugaucuggcucgugaagaaggggaacagcuaccccaagcuguccaagagcuacaucaacgacaagggcaaggaggugcugguccucugggggauccaccaccccagcaccuccgccgaccagcagagccuguaccagaacgccgacgccuacguguucgugggcacgucccgguacagcaagaaguucaagcccgagaucgccauccgcccgaaggucggcgaccaggaggggcggaugaacuacuacuggacccugguggagcccggcgacaagaucaccuucgaggcgaccgggaaccucguggucccccgcuacgccuucgccauggagcggaacgccggcuccggcaucaucaucagcgacacgcccgugcacgacugcaacacgaccugccagaccccgaagggggccaucaacaccucccugcccuuccagaacauccaccccaucaccaucggcaagugccccaaguacgucaagagcaccaagcugcgccucgcgaccgggcugcggaacgugccguccauccagagccgcggccuguucggggccaucgccggcuucaucgagggcggguggacgggcaugguggacgggugguacggcuaccaccaccagaacgagcagggguccggcuacgccgccgaccucaagagcacccagaacgcgaucgacgagaucaccaacaaggugaacuccgucaucgagaagaugaacacccaguucacggccgugggcaaggaguucaaccaccuggagaagcggaucgagaaccugaacaagaaggucgacgacggguuccucgacaucuggaccuacaacgccgagcugcuggugcuccuggagaacgagcgcacccuggacuaccacgacagcaacgugaagaaccucuacgagaagguccggucccagcugaagaacaacgccaaggagaucggcaacgggugcuucgaguucuaccacaagugcgacaacacgugcauggagagcgugaagaacggcaccuacgacuaccccaaguacuccgaggaggccaagcugaaccgcgaggagaucgacggggugaagcucgagagcacccggaucuaccagauccuggcgaucuacuccaccgucgccagcagccuggugcucguggucucccugggcgccaucagcuucuggaugugcuccaacggcagccugcagugccgcaucugcaucuga

SEQ ID NO: 67518 - RNA, 1701 nt, Artificial Sequence; identical to SEQ ID NO: 66693
  derived and/or modified CDS sequence (opt1) from hemagglutinin__InfluenzaA__ACY46133

SEQ ID NO: 67519 - RNA, 1701 nt, Artificial Sequence; identical to SEQ ID NO: 66693
  derived and/or modified CDS sequence (opt1) from hemagglutinin__InfluenzaA__ACY46163

SEQ ID NO: 67520 - RNA, 1701 nt, Artificial Sequence
  derived and/or modified CDS sequence (opt1) from hemagglutinin__InfluenzaA__ACY46173
augaaggccauccuggugguccuccuguacaccuucgccaccgcgaacgccgacacgcugugcaucggcuaccacgccaacaacagcaccgacaccguggacaccgugcucgagaagaacgucacggugacccacuccgugaaccugcuggaggacaagcacaacgggaagcucugcaagcugcgcggcgucgcgccccugcaccucgggaagugcaacaucgccggcuggauccuggggaacccggagugcgagagccuguccaccgccagcuccuggagcuacaucguggagaccuccagcuccgacaacggcacgugcuaccccggcgacuucaucgacuacgaggagcuccgggagcagcugagcuccgugagcuccuucgagcgcuucgagaucuuccccaagaccagcuccuggcccaaccacgacagcaacaagggggucaccgccgccugcccgcacgccggcgcgaaguccuucuacaagaaccugaucuggcucgugaagaaggggaacagcuaccccaagcuguccaagagcuacaucaacgacaagggcaaggaggugcugguccucugggggauccaccaccccagcaccuccgccgaccagcagagccuguaccagaacgccgacgccuacguguucgugggcuccagcaaguacuccaagaaguucaagcccgagaucgccauccggccgaagguccgcgaccaggagggccggaugaacuacuacuggacgcugguggagcccggggacaagaucaccuucgaggcgaccggcaaccucguggucccccgcuacgccuucgccauggagcggaacgccgggagcggcaucaucaucuccgacacccccgugcacgacugcaacacgaccugccagaccccgaagggcgccaucaacaccagccugcccuuccagaacauccaccccaucacgaucgggaagugccccaaguacgugaaguccaccaagcugcgccucgcgaccggccugcggaacgucccgagcauccagucccgcgggcuguucggcgccaucgccggguucaucgagggcggcuggaccgggaugguggacggcugguacggguaccaccaccagaacgagcagggcagcggguacgccgccgaccucaaguccacgcagaacgcgaucgacgagaucaccaacaaggugaacagcgucaucgagaagaugaacacccaguucaccgccgugggcaaggaguucaaccaccuggagaagcggaucgagaaccugaacaagaaggucgacgacggcuuccucgacaucuggacguacaacgccgagcugcuggugcuccuggagaacgagcgcacccuggacuaccacgacuccaacgugaagaaccucuacgagaagguccggagccagcugaagaacaacgccaaggagaucgggaacggcugcuucgaguucuaccacaagugcgacaacacgugcauggaguccgugaagaacgggaccuacgacuaccccaaguacagcgaggaggccaagcugaaccgcgaggagaucgacggcgugaagcucgaguccacccggaucuaccagauccuggcgaucuacagcaccgucgccagcucccuggugcucguggucagccugggggccaucuccuucuggaugugcagcaacggcucccugcagugccgcaucugcaucuga

SEQ ID NO: 67521 - RNA, 1701 nt, Artificial Sequence; identical to SEQ ID NO: 66693
  derived and/or modified CDS sequence (opt1) from hemagglutinin__InfluenzaA__ACY46213

SEQ ID NO: 67522 - RNA, 1701 nt, Artificial Sequence; identical to SEQ ID NO: 66693
  derived and/or modified CDS sequence (opt1) from hemagglutinin__InfluenzaA__ACY46223

SEQ ID NO: 67523 - RNA, 1701 nt, Artificial Sequence; identical to SEQ ID NO: 66693
  derived and/or modified CDS sequence (opt1) from hemagglutinin__InfluenzaA__ACY46233

SEQ ID NO: 67524 - RNA, 1701 nt, Artificial Sequence; identical to SEQ ID NO: 66693
  derived and/or modified CDS sequence (opt1) from hemagglutinin__InfluenzaA__ACY46243

SEQ ID NO: 67525 - RNA, 1701 nt, Artificial Sequence; identical to SEQ ID NO: 66693
  derived and/or modified CDS sequence (opt1) from hemagglutinin__InfluenzaA__ACY46253

SEQ ID NO: 67526 - RNA, 1701 nt, Artificial Sequence; identical to SEQ ID NO: 66693
  derived and/or modified CDS sequence (opt1) from hemagglutinin__InfluenzaA__ACY46263

SEQ ID NO: 67527 - RNA, 1701 nt, Artificial Sequence; identical to SEQ ID NO: 66693
  derived and/or modified CDS sequence (opt1) from hemagglutinin__InfluenzaA__ACY46273

SEQ ID NO: 67528 - RNA, 1701 nt, Artificial Sequence; identical to SEQ ID NO: 66693
  derived and/or modified CDS sequence (opt1) from hemagglutinin__InfluenzaA__ACY46283

SEQ ID NO: 67529 - RNA, 1701 nt, Artificial Sequence
  derived and/or modified CDS sequence (opt1) from hemagglutinin__InfluenzaA__ACY46293
augaaggccauccuggugguccuccuguacaccuucgccaccgcgaacgccgacacgcugugcaucggcuaccacgccaacaacagcaccgacaccguggacaccgugcucgagaagaacgucacggugacccacuccgugaaccugcuggaggacaagcacaacgggaagcucugcaagcugcgcggcgucgcgccccugcaccucgggaagugcaacaucgccggcuggauccuggggaacccggagugcgagagccuguccaccgccagcuccuggagcuacaucguggagaccuccagcuccgacaacggcacgugcuaccccggcgacuucaucgacuacgaggagcuccgggagcagcugagcuccgugagcuccuucgagcgcuucgagaucuuccccaagaccagcuccuggcccaaccacgacagcaacaagggggucaccgccgccugcccgcacgccggcgcgaaguccuucuacaagaaccugaucuggcucgugaagaaggggaacagcuaccccaagcuguccaagagcuacaucaacgacaagggcaaggaggugcugguccucugggggauccaccaccccagcaccuccgccgaccagcagagccuguaccagaacgccgacgccuacguguucgugggcacgucccgguacagcaagaaguucaagcccgagaucgccauccgcccgaagguccgggaccaggagggccgcaugaacuacuacuggacccugguggagcccggggacaagaucaccuucgaggcgaccggcaaccucguggucccccgguacgccuucgccauggagcgcaacgccggguccggcaucaucaucagcgacacgcccgugcacgacugcaacacgaccugccagaccccgaagggcgccaucaacaccucccugcccuuccagaacauccaccccaucaccaucgggaagugccccaaguacgucaagagcaccaagcugcggcucgcggccggccugcgcaacgugccguccauccagagccgggggcuguucggcgccaucgccggguucaucgagggcggcuggaccgggaugguggacggcugguacggguaccaccaccagaacgagcagggcuccggguacgccgcggaccucaagagcacgcagaacgccaucgacgagaucaccaacaaggugaacuccgucaucgagaagaugaacacccaguucaccgccgugggcaaggaguucaaccaccuggagaagcgcaucgagaaccugaacaagaaggucgacgacggcuuccucgacaucuggacguacaacgccgagcugcuggugcuccuggagaacgagcggacccuggacuaccacgacagcaacgugaagaaccucuacgagaagguccgcucccagcugaagaacaacgccaaggagaucgggaacggcugcuucgaguucuaccacaagugcgacaacacgugcauggagagcgugaagaacgggaccuacgacuaccccaaguacuccgaggaggcgaagcugaaccgggaggagaucgacggcgugaagcucgagagcacccgcaucuaccagauccuggccaucuacuccaccgucgccagcagccuggugcucguggucucccugggggccaucagcuucuggaugugcuccaacggcagccugcagugccggaucugcaucuga

SEQ ID NO: 67530 - RNA, 1701 nt, Artificial Sequence; identical to SEQ ID NO: 66693
  derived and/or modified CDS sequence (opt1) from hemagglutinin__InfluenzaA__ACY46303

SEQ ID NO: 67531 - RNA, 1701 nt, Artificial Sequence; identical to SEQ ID NO: 66693
  derived and/or modified CDS sequence (opt1) from hemagglutinin__InfluenzaA__ACY46313

SEQ ID NO: 67532 - RNA, 1701 nt, Artificial Sequence; identical to SEQ ID NO: 66693
  derived and/or modified CDS sequence (opt1) from hemagglutinin__InfluenzaA__ACY46323

SEQ ID NO: 67533 - RNA, 1701 nt, Artificial Sequence; identical to SEQ ID NO: 66693
  derived and/or modified CDS sequence (opt1) from hemagglutinin__InfluenzaA__ACY46343

SEQ ID NO: 67534 - RNA, 1701 nt, Artificial Sequence; identical to SEQ ID NO: 66693
  derived and/or modified CDS sequence (opt1) from hemagglutinin__InfluenzaA__ACY46353

SEQ ID NO: 67535 - RNA, 1701 nt, Artificial Sequence
  derived and/or modified CDS sequence (opt1) from hemagglutinin__InfluenzaA__ACY46373
augaaggccauccugaucgugcuccuguacaccuucgccaccgcgaacgccgacacgcugugcaucggcuaccacgccaacaacagcaccgacaccgucgacaccgugcucgagaagaacgugacggucacccacuccgugaaccugcuggaggacaagcacaacgggaagcucugcaagcugcgcggcguggcgccccugcaccucgggaagugcaacaucgccggcuggauccuggggaacccggagugcgagagccuguccaccgccagcuccuggagcuacaucgucgagaccuccagcuccgacaacggcacgugcuaccccggcgacuucaucgacuacgaggagcuccgggagcagcugagcuccgugagcuccuucgagcgcuucgagaucuuccccaagaccagcuccuggcccaaccacgacagcaacaagggggugaccgccgccugcccgcacgccggcgcgaaguccuucuacaagaaccugaucuggcucgucaagaaggggaacagcuaccccaagcuguccaagagcuacaucaacgacaagggcaaggaggugcuggugcucugggggauccaccaccccagcaccuccgccgaccagcagagccuguaccagaacgccgacgccuacgucuucgugggcacgucccgguacagcaagaaguucaagcccgagaucgccauccgcccgaaggugcgggaccaggagggccgcaugaacuacuacuggacccuggucgagcccggggacaagaucaccuucgaggcgaccggcaaccucguggugccccgguacgccuucgccauggagcgcaacgccggguccggcaucaucaucagcgacacgcccguccacgacugcaacacgaccugccagaccccgaagggcgccaucaacaccucccugcccuuccagaacauccaccccaucaccaucgggaagugccccaaguacgucaagagcaccaagcugcggcucgcgaccggccugcgcaacgugccguccauccagagccgggggcuguucggcgccaucgccggguucaucgagggcggcuggacggggaugguggacggcugguacggguaccaccaccagaacgagcagggcuccggguacgccgccgaccucaagagcacccagaacgcgaucgacgagaucaccaacaaggugaacuccgugaucgagaagaugaacacccaguucacggccgucggcaaggaguucaaccaccuggagaagcgcaucgagaaccugaacaagaagguggacgacggcuuccucgacaucuggaccuacaacgccgagcugcugguccuccuggagaacgagcggacccuggacuaccacgacagcaacgugaagaaccucuacgagaaggugcgcucccagcugaagaacaacgccaaggagaucgggaacggcugcuucgaguucuaccacaagugcgacaacacgugcauggagagcgucaagaacgggaccuacgacuaccccaaguacuccgaggaggccaagcugaaccgggaggagaucgacggcgugaagcucgagagcacccgcaucuaccagauccuggcgaucuacuccaccguggccagcagccugguccucguggugucccugggggccaucagcuucuggaugugcuccaacggcagccugcagugccggaucugcaucuga

SEQ ID NO: 67536 - RNA, 1701 nt, Artificial Sequence
  derived and/or modified CDS sequence (opt1) from hemagglutinin__InfluenzaA__ACY46383
augaaggccauccuggugguccuccuguacaccuucgccaccgcgaacgccgacacgcugugcaucggcuaccacgccaacaacagcaccgacaccguggacaccgugcucgagaagaacgucacggugacccacuccgugaaccugcuggaggacaagcacaacgggaagcucugcaagcugcgcggcgucgcgccccugcaccucgggaagugcaacaucgccggcuggauccuggggaacccggagugcgagagccuguccaccgccagcuccuggagcuacaucguggagaccuccagcuccgacaacggcacgugcuaccccggcgacuucaucgacuacgaggagcuccgggagcagcugagcuccgugagcuccuucgagcgcuucgagaucuuccccaagaccagcuccuggcccaaccacgacagcaacaagggggucaccgccgccugcccgcacgccggcgcgaaguccuucuacaagaaccugaucuggcucgugaagaaggggaacagcuaccccaagcuguccaagagcuacaucaacgacaagggcaaggaggugcugguccucugggggauccaccaccccagcaccuccgccgaccagcagagccuguaccagaacgccgacgccuacguguucgugggcuccagccgguacuccaagaaguucaagcccgagaucgccauccgcccgaagguccgggaccaggagggccgcaugaacuacuacuggacgcugguggagcccggggacaagaucaccuucgaggcgaccggcaaccucguggucccccgguacgccuucgccauggagcgcaacgccgggagcggcaucaucaucuccgacacccccgugcacgacugcaacacgaccugccagaccccgaagggcgccaucaacaccagccugcccuuccacaacauccaccccaucacgaucgggaagugccccaaguacgugaaguccaccaagcugcggcucgcgaccggccugcgcaacgucccgagcauccagucccgggggcuguucggcgccaucgccggguucaucgagggcggcuggaccgggaugguggacggcugguacggguaccaccaccagaacgagcagggcagcggguacgccgccgaccucaaguccacgcagaacgcgaucgacgagaucaccaacaaggugaacagcgucaucgagaagaugaacacccaguucaccgccgugggcaaggaguucaaccaccuggagaagcgcaucgagaaccugaacaagaaggucgacgacggcuuccucgacaucuggacguacaacgccgagcugcuggugcuccuggagaacgagcggacccuggacuaccacgacuccaacgugaagaaccucuacgagaagguccgcagccagcugaagaacaacgccaaggagaucgggaacggcugcuucgaguucuaccacaagugcgacaacacgugcauggaguccgugaagaacgggaccuacgacuaccccaaguacagcgaggaggccaagcugaaccgggaggagaucgacggcgugaagcucgaguccacccgcaucuaccagauccuggcgaucuacagcaccgucgccagcucccuggugcucguggucagccugggggccaucuccuucuggaugugcagcaacggcucccugcagugccggaucugcaucuga

SEQ ID NO: 67537 - RNA, 1701 nt, Artificial Sequence; identical to SEQ ID NO: 66693
  derived and/or modified CDS sequence (opt1) from hemagglutinin__InfluenzaA__ACY46393

SEQ ID NO: 67538 - RNA, 1701 nt, Artificial Sequence; identical to SEQ ID NO: 66693
  derived and/or modified CDS sequence (opt1) from hemagglutinin__InfluenzaA__ACY46403

SEQ ID NO: 67539 - RNA, 1701 nt, Artificial Sequence; identical to SEQ ID NO: 66693
  derived and/or modified CDS sequence (opt1) from hemagglutinin__InfluenzaA__ACY46413

SEQ ID NO: 67540 - RNA, 1701 nt, Artificial Sequence; identical to SEQ ID NO: 66693
  derived and/or modified CDS sequence (opt1) from hemagglutinin__InfluenzaA__ACY46433

SEQ ID NO: 67541 - RNA, 1701 nt, Artificial Sequence; identical to SEQ ID NO: 66693
  derived and/or modified CDS sequence (opt1) from hemagglutinin__InfluenzaA__ACY46443

SEQ ID NO: 67542 - RNA, 1701 nt, Artificial Sequence; identical to SEQ ID NO: 66693
  derived and/or modified CDS sequence (opt1) from hemagglutinin__InfluenzaA__ACY46453

SEQ ID NO: 67543 - RNA, 1701 nt, Artificial Sequence
  derived and/or modified CDS sequence (opt1) from hemagglutinin__InfluenzaA__ACY46463
augaaggccauccugguggucaugcucuacaccuucgccaccgcgaacgccgacacgcugugcaucggcuaccacgccaacaacagcaccgacaccguggacaccgugcuggagaagaacgucacggugacccacuccgugaaccuccuggaggacaagcacaacgggaagcugugcaagcuccgcggcgucgcgccccugcaccuggggaagugcaacaucgccggcuggauccucgggaacccggagugcgagagccuguccaccgccagcuccuggagcuacaucguggagaccuccagcuccgacaacggcacgugcuaccccggcgacuucaucgacuacgaggagcugcgggagcagcucagcuccgugagcuccuucgagcgcuucgagaucuuccccaagaccagcuccuggcccaaccacgacagcaacaagggggucaccgccgccugcccgcacgccggcgcgaaguccuucuacaagaaccugaucuggcuggugaagaaggggaacagcuaccccaagcucuccaagagcuacaucaacgacaagggcaaggaggugcugguccugugggggauccaccaccccagcaccuccgccgaccagcagagccucuaccagaacgccgacgccuacguguucgugggcacgucccgguacagcaagaaguucaagcccgagaucgccauccgcccgaagguccgggaccaggagggccgcaugaacuacuacuggacccugguggagcccggggacaagaucaccuucgaggcgaccggcaaccugguggucccccgguacgccuucgccauggugcgcaacgccggguccggcaucaucaucagcgacacgcccgugcacgacugcaacacgaccugccagaccccgaagggcgccaucaacaccucccuccccuuccagaacauccaccccaucaccaucgggaagugccccaaguacgucaagagcaccaagcugcggcuggcgaccggccuccgcaacgugccguccauccagagccgggggcuguucggcgccaucgccggguucaucgagggcggcuggacggggaugguggacggcugguacggguaccaccaccagaacgagcagggcuccggguacgccgccgaccucaagagcacccagaacgcgaucgacgagaucaccaacaaggucaacuccgugaucgagaagaugaacacccaguucacggccgucggcaaggaguucaaccaccuggagaagcgcaucgagaaccugaacaagaagguggacgacggcuuccuggacaucuggaccuacaacgccgagcuccuggugcugcucgagaacgagcggacccuggacuaccacgacagcaacgucaagaaccuguacgagaaggugcgcucccagcucaagaacaacgccaaggagaucgggaacggcugcuucgaguucuaccacaagugcgacaacacgugcauggagagcgugaagaacgggaccuacgacuaccccaaguacuccgaggaggccaagcugaaccgggaggagaucgacggcgucaagcuggagagcacccgcaucuaccagauccucgcgaucuacuccaccguggccagcagccuggugcuggucgugucccucggggccaucagcuucuggaugugcuccaacggcagccugcagugccggaucugcaucuga

SEQ ID NO: 67544 - RNA, 1701 nt, Artificial Sequence; identical to SEQ ID NO: 66693
  derived and/or modified CDS sequence (opt1) from hemagglutinin__InfluenzaA__ACY46473

SEQ ID NO: 67545 - RNA, 1701 nt, Artificial Sequence; identical to SEQ ID NO: 66680
  derived and/or modified CDS sequence (opt1) from hemagglutinin__InfluenzaA__ACY46493
